United States Patent Application Publication US 2021/0199660 A1 - sequence listing, part 48

SEQ ID NO: 685999 - DNA, 120 bp, Artificial Sequence
  ENSG00000187609_23 (sequence is synthesized)
tttgacatcaaggacgttgccagctgccatgtgactgcagctggagcagctgcctctggagaggagcggctggggctggcaggagcacagccctcttctcccgagtgaaaagagttaact

SEQ ID NO: 686000 - DNA, 120 bp, Artificial Sequence
  ENSG00000187609_24 (sequence is synthesized)
gctcttagaagaacgaaaataattctccgtggtggctcttctcatgcaggcatggcaaccgtactgctttcttgttcatccattcctttgttctttcatctaataaagtttttggaagca

SEQ ID NO: 686001 - DNA, 120 bp, Artificial Sequence
  ENSG00000187609_25 (sequence is synthesized)
ctatctcagccgctttggtcctgtggaaccttgacctcaggcaggacagatgctgcaggcctcaggtggacggctgcccctcctccccgagtgctcatagccagtctgcaaggtcggggt

SEQ ID NO: 686002 - DNA, 120 bp, Artificial Sequence
  ENSG00000187609_26 (sequence is synthesized)
gaccctgccgctggcgagcgccaccgcatgggcacccacaggcttctacagcctcttctccacctaagcagagtgggatgttttcaaagtgcaacaccccagctagcagggcccctggaa

SEQ ID NO: 686003 - DNA, 120 bp, Artificial Sequence
  ENSG00000187609_27 (sequence is synthesized)
cagcctcggcgccccctggaacactaatggccctccctggaacagacacggcacccccaccgagaacagcctcggtgccccctggaacagcctcagcaccccctggaacactaatggccc

SEQ ID NO: 686004 - DNA, 120 bp, Artificial Sequence
  ENSG00000187609_28 (sequence is synthesized)
tccctggaacagacacggcacccccaccgagaacagcctcggtgccccctggaacagcctcagcaccccctggaacactaatggccctccctggaacagatacggccccccgccagaaca

SEQ ID NO: 686005 - DNA, 120 bp, Artificial Sequence
  ENSG00000187609_29 (sequence is synthesized)
gacatggtgcccgctggaacactaatggtcctccctggaacagcctcggtgccccctggaacactaatggccctccctggaacagacacggcgcccccccacagaacagcctcgatgccc

SEQ ID NO: 686006 - DNA, 120 bp, Artificial Sequence
  ENSG00000187609_30 (sequence is synthesized)
cctggaacagcctcggtgccccctggaacagcctcggtgccccctggaacagcctggtgctcctggaacagacacagcccccccagaacagacacagcaccccctggaacagcctggcgc

SEQ ID NO: 686007 - DNA, 120 bp, Artificial Sequence
  ENSG00000187609_31 (sequence is synthesized)
tcctttctgtgctgctttaggcatctgcccttacatggttcgtgtccagctctgtcaacaaggccagctccacaagaggccccagctcagccctccccagtgggctcccctactcaggct

SEQ ID NO: 686008 - DNA, 120 bp, Artificial Sequence
  ENSG00000187609_32 (sequence is synthesized)
ctgggtcagcttcttcccaggaggtgtcctggcccctgtgctggccccgcctcgctgcctggacacctgtccgtgccaccctggtcactgagcaggacatccgcgtctgtggcccctggg

SEQ ID NO: 686009 - DNA, 120 bp, Artificial Sequence
  ENSG00000187609_33 (sequence is synthesized)
accctgcccccgacagccaggcctgggtttgtccttttaggtagagtgcctggtccaggtcattggaggagagtccacatggccacctctggcgtgttctagagaggccctcccgcgctg

SEQ ID NO: 686010 - DNA, 120 bp, Artificial Sequence
  ENSG00000187609_34 (sequence is synthesized)
ggtcaggaggcatcatcgggacaggagaagggggctgagctcctgttcctctctccctcccccgaggccaagaaacattcccatccgaatgtccactgcgctcacagattcctttcctcc

SEQ ID NO: 686011 - DNA, 90 bp, Artificial Sequence
  ENSG00000187609_35 (sequence is synthesized)
ccatccgaatgtccactgcgctcacagattcctttcctcctaaaacttcagccttggccaggctcacggccaggattgtgggaggccgag

SEQ ID NO: 686012 - DNA, 71 bp, Artificial Sequence
  ENSG00000187609_36 (sequence is synthesized)
ttagctggacatggtggcgggaggcagtagaactgcttgaaccctggaggcggaggttacagttatccgag

SEQ ID NO: 686013 - DNA, 89 bp, Artificial Sequence
  ENSG00000187609_37 (sequence is synthesized)
tggggaggctgaggcaggagaatggcttggaggcagtagaactgcttgaaccctggaggcggaggttacagttatccgaggttgtgtca

SEQ ID NO: 686014 - DNA, 120 bp, Artificial Sequence
  ENSG00000187609_38 (sequence is synthesized)
tcaccctgtctggccactttccccgaggggcatcctttggagggtctggactttgcagccttgcctcccgcgcctttgggcatggcaccctcctggacagcgctgaggtctcctcacaca

SEQ ID NO: 686015 - DNA, 120 bp, Artificial Sequence
  ENSG00000187609_39 (sequence is synthesized)
tctcatgtaaattgtttaggttcaaacttggataacgcccaggtctctataaacagtgtttgttggaggtcgggagtccaccaagccacagtgggggacagcagggccatcgggggccgg

SEQ ID NO: 686016 - DNA, 120 bp, Artificial Sequence
  ENSG00000187609_40 (sequence is synthesized)
cgagggcctccagagccccctaaaccaccatcctcctcatgggctgaccccaaatcagacgcagccgcacgtacacgaaccccgtgtccagctgtcccctgaagccctgagtgtgctccg

SEQ ID NO: 686017 - DNA, 120 bp, Artificial Sequence
  ENSG00000187609_41 (sequence is synthesized)
tgcagcagctggggccaccccttccctggagtgggcaccagctgcctcgaggacacgcagcccatgtgcttctgggaccctcctctgctgcacgcctccaccgtgcagtgggctggggga

SEQ ID NO: 686018 - DNA, 120 bp, Artificial Sequence
  ENSG00000187609_42 (sequence is synthesized)
tcatggattcctggtgccagcccggctttgacatcaaggacgttgccagtttttggaagcacttggtgtgtgacgtctgtcagcaattacagagaaaaggcagcacctgacaaggagccc

SEQ ID NO: 686019 - DNA, 120 bp, Artificial Sequence
  ENSG00000187609_43 (sequence is synthesized)
atatggtgcctgtatggattcagggaagccatgtgcatgtgtgtgcatgtgtgtgcatgtatgtgtgtgcccatgtgcatgtgtgcctgcaggtgtgcatgtgtgtgtctctgtgtgtgc

SEQ ID NO: 686020 - DNA, 120 bp, Artificial Sequence
  ENSG00000187609_44 (sequence is synthesized)
acgtgatatgtgcgtgtgtgcacgtttgtgtgtgcctgtaggtgtgcatgtgtgtgcatgtatgtgtgtgcctgcaggtgtgtgtgtgtgcatgtatatctgtgtgtgcattgtgttcgt

SEQ ID NO: 686021 - DNA, 120 bp, Artificial Sequence
  ENSG00000187609_45 (sequence is synthesized)
ttgtgcaggtgtgtatgtctgcgtgcatatgatgtgtacatgtgtgtgcctgcaggtgtacgtgtgttttcgtgcatgtggtgtgtgtgtgcatgtatgtgtgtgcctgtaggtgtgtgt

SEQ ID NO: 686022 - DNA, 120 bp, Artificial Sequence
  ENSG00000187609_46 (sequence is synthesized)
ttgtatgtgtgtgtgcatgggtgtgtacgtgtgtgcatgtgtgcctgtgcatgtgtgtgcgtgtggtgtgtgtacatgtatgtgtgtgcacgtgtgtgtgcctgcaggtgtgcgtgtgtg

SEQ ID NO: 686023 - DNA, 120 bp, Artificial Sequence
  ENSG00000187609_47 (sequence is synthesized)
tgcatgtgtgtgcgtgtgtacctgtgtgtgcactgtgttcatgtttgtgcaggtctgtgtgtgcatgcatgtgtgtgtacgtgtgtgtgcctgcaggtgtgcatgtgtgtgtgtgtgaga

SEQ ID NO: 686024 - DNA, 120 bp, Artificial Sequence
  ENSG00000187609_48 (sequence is synthesized)
tatgagggatgacatctgggaggggaggggcttcctgctctatatctggtcaaggtgccccgagagtgaagcaagctgaaaggtctgtgaaggctccagggcccatccactggcaggcag

SEQ ID NO: 686025 - DNA, 120 bp, Artificial Sequence
  ENSG00000187609_49 (sequence is synthesized)
atcccggcctccattccccacacagccccagggttgtctcactggagagtcacaggcttggacttggacgtcaggccgtcccgggcccatcctcctccacttgtcctccaagtcacttcc

SEQ ID NO: 686026 - DNA, 120 bp, Artificial Sequence
  ENSG00000187609_50 (sequence is synthesized)
actttctgagtttgtttcctcattcgcacaatggggctgagtccacctgactcaaagcttgctaagacttttcatcagagggagcaggcagcagccgcacagcgtcaggccaggcacaga

SEQ ID NO: 686027 - DNA, 120 bp, Artificial Sequence
  ENSG00000187609_51 (sequence is synthesized)
cggtaccctgaggtgacctccttgagcctggagaagctgagtccgaaggcgctgagcaggcaggtcttgcgtctgcaggagcggtacggcgtagccccagaagagcctgtcacaggagaa

SEQ ID NO: 686028 - DNA, 120 bp, Artificial Sequence
  ENSG00000187609_52 (sequence is synthesized)
cgcagggcggccgaggtcttctgttccaagctcttagtgaattctgtatttttaggacttgctctacaaatagtacagctttattttcaccctcatttgttttctgcagcttcaaggatt

SEQ ID NO: 686029 - DNA, 120 bp, Artificial Sequence
  ENSG00000187609_53 (sequence is synthesized)
gtctgtttatgtcggtctaggatgttctagacaggtgttcacatttgtgaccaccttactcacaggtgcagtgatctcacagaggcagacatagattcatgcattttctggagagaacat

SEQ ID NO: 686030 - DNA, 120 bp, Artificial Sequence
  ENSG00000187609_54 (sequence is synthesized)
ttttgaagaagggaagctttgaagcacagattctgacataacaagtatttgctacttccaagcactgcagtcaaactaatggatataatgggatgggctggttgctcctaactgtgctgg

SEQ ID NO: 686031 - DNA, 120 bp, Artificial Sequence
  ENSG00000187609_55 (sequence is synthesized)
agaaggtgggaaagaaaaagatgagctcagctccacacgaaggacctgcaagcttctatcttggcccagaagaagcccttattccctgtagctgcagaagtaaaattgctgaacaccatg

SEQ ID NO: 686032 - DNA, 120 bp, Artificial Sequence
  ENSG00000187609_56 (sequence is synthesized)
cctagagtttaatcctgtgagcagctgaattacaacagaaattaaattcacaactgatgttattaaactttgtccacttggccagtcctatccatgtaaaattacatttcattgtctttg

SEQ ID NO: 686033 - DNA, 120 bp, Artificial Sequence
  ENSG00000187609_57 (sequence is synthesized)
caaggcgcctgggcgaggccggaaggaggaaggccaggcccccccagcccggtgccagcgcagagccggccggaagggcagcggacgtcctgaagaatgcgggcggcttccacgtattgt

SEQ ID NO: 686034 - DNA, 120 bp, Artificial Sequence
  ENSG00000187609_58 (sequence is synthesized)
agccacagagtttggcctgggatactcactgcgcactgcagggtgcacagacatatcaagtaggagctgcttcttgccccagagctggaagagcctgtcacaggagaactggaccgacca

SEQ ID NO: 686035 - DNA, 120 bp, Artificial Sequence
  ENSG00000187609_59 (sequence is synthesized)
gcctgacactcaaggccatcctggacccatggactccaggaccttgcggggagggagaccctcgcttgtgctgggccctgcatttcccagcgggggctgagggtcccgcaggcctggcct

SEQ ID NO: 686036 - DNA, 120 bp, Artificial Sequence
  ENSG00000187609_60 (sequence is synthesized)
cccctcccttcccgcctgacactcaaggccatcctggacccatggactccaggaccttgcggggagggagaccctcgcttgtgctgggccctgcatttcccagcgggggctgagggtccc

SEQ ID NO: 686037 - DNA, 120 bp, Artificial Sequence
  ENSG00000187609_61 (sequence is synthesized)
ctgagctcaagccatcggcctgcctcgtcttctcaaagtgctgggattccgggcgtggccactgcgcctggctgatgcgttgttcctgcatttgcccaccgactctctgtgtttggctgt

SEQ ID NO: 686038 - DNA, 120 bp, Artificial Sequence
  ENSG00000187612_0 (sequence is synthesized)
atggactgggaaaattgctcctcattaactgatttttttctcttgggaattaccaataacccagagatgaaagtgaccctatttgctgtattcttggctgtttatatcattaatttctca

SEQ ID NO: 686039 - DNA, 120 bp, Artificial Sequence
  ENSG00000187612_1 (sequence is synthesized)
gcaaatcttggaatgatagttttaatcagaatggattaccaacttcacacaccaatgtatttcttcctcagtcatctgtctttctgtgatctctgctattctactgcaactgggcccaag

SEQ ID NO: 686040 - DNA, 120 bp, Artificial Sequence
  ENSG00000187612_2 (sequence is synthesized)
atgctggtagatctacttgccaagaacaagtcaatacccttctatggctgtgctctgcaattcttggtcttctgtatctttgcagattctgagtgtctactgctgtcagtgatggccttt

SEQ ID NO: 686041 - DNA, 120 bp, Artificial Sequence
  ENSG00000187612_3 (sequence is synthesized)
ggaatagcagatgctttgatacatatgacactggccttccgcctatgcttctgtgggtctaatgagattaatcatttcttctgtgatatccctcctctcttattactctctcgctcagat

SEQ ID NO: 686042 - DNA, 120 bp, Artificial Sequence
  ENSG00000187612_4 (sequence is synthesized)
acacaggtcaatgagttagtgttattcaccgtctttggttttattgaactgagtaccatttcaggagttttcatttcttattgttatatcatcctatcagtcttggagatacactctgct

SEQ ID NO: 686043 - DNA, 120 bp, Artificial Sequence
  ENSG00000187612_5 (sequence is synthesized)
gaggggaggttcaaagctctctctacatgcacttcccacttatctgcggttgcaattttccagggaactctgctctttatgtatttccggccaagttcttcctattctctagatcaagat

SEQ ID NO: 686044 - DNA, 120 bp, Artificial Sequence
  ENSG00000187612_6 (sequence is synthesized)
aaaatgacctcattgttttacacccttgtggttcccatgttgaaccccctgatttatagcctgaggaacaaggatgtgaaagaggccctgaaaaaactgaaaaataaaattttattttaa

SEQ ID NO: 686045 - DNA, 120 bp, Artificial Sequence
  ENSG00000187616_0 (sequence is synthesized)
agctgccatcagagccctgcccaaagggagctggccttcccacttcgtgctcctgtgctggggacctgggacaccagcaccctccccaccccagccagtgctttcctcctggcccatggg

SEQ ID NO: 686046 - DNA, 120 bp, Artificial Sequence
  ENSG00000187616_1 (sequence is synthesized)
gacgctggtggccaagctgctcctgcccaccctcagcagcctggccttcctccccactgtcagcatcgcggccaagaggcggttccacatggaggccatggtctacctcttcaccctgtt

SEQ ID NO: 686047 - DNA, 120 bp, Artificial Sequence
  ENSG00000187616_2 (sequence is synthesized)
cttcgtggcgctccaccatgcctgcaatggacccggcttgtctgtgctgtgcttcatgcgtcacgacatcctggagtatttcagtgtctacgggacagccctgagcatgtgggtctcgct

SEQ ID NO: 686048 - DNA, 120 bp, Artificial Sequence
  ENSG00000187616_3 (sequence is synthesized)
gggccccatcggcacagccatcctcatcatcgcggcaaagtggctacagaagatgaaggagaagaagggcctgtacccagacaagagcgtctacacccagcagataggccccggcctctg

SEQ ID NO: 686049 - DNA, 120 bp, Artificial Sequence
  ENSG00000187616_4 (sequence is synthesized)
cttcggggcgctggccctgatgctacgcttcttctttgaggactgggactacacttatgtccacagcttctaccactgtgccctggctatgtcctttgttctgctgctgcccaaggtcaa

SEQ ID NO: 686050 - DNA, 120 bp, Artificial Sequence
  ENSG00000187616_5 (sequence is synthesized)
caagaaggctggatccccggggaccccggccaagctggactgctccaccctgtgctgtgcttgtgtctgatgctgcgcccagcccggctctgagcccctgccctccccagctcacacttg

SEQ ID NO: 686051 - DNA, 120 bp, Artificial Sequence
  ENSG00000187616_6 (sequence is synthesized)
gggagtgcagggcggccctgctccccagcgtggcccaggaccagcccgctggagcccactggggcctgccatctgctgggcagaggagggctgctgccgctccctgggcctcagtctcct

SEQ ID NO: 686052 - DNA, 120 bp, Artificial Sequence
  ENSG00000187624_0 (sequence is synthesized)
gcagcaggggtggtcgccatggagacgcgtggccctggcctggcggtccgcgctgagagtcgccgattagtcggcatcgggcctcgggcgcccccggggcgggttgggttgcagcccagc

SEQ ID NO: 686053 - DNA, 120 bp, Artificial Sequence
  ENSG00000187624_1 (sequence is synthesized)
gggcggctggaccgccgcggtggggcggggacaatggggtacaaggacaacgacggcgaggaggaggagcgggagggcggcgccgcgggcccgcgggggtctagactgccccccatcaca

SEQ ID NO: 686054 - DNA, 120 bp, Artificial Sequence
  ENSG00000187624_2 (sequence is synthesized)
ggcggcgcctccgagctggccaaacggaaggtgaagaagaaaaaaaggaagaagaagaccaaggggtctggcaagggggacgataaacatcagagtcagagcctgaagagccagccgctt

SEQ ID NO: 686055 - DNA, 120 bp, Artificial Sequence
  ENSG00000187624_3 (sequence is synthesized)
tcttcctcctttcatgacatcttaagtccttgcaaagagcgtggcccgaaaccagagcacagacagagcaaagtggaaaagaagcacctcccttctgactcctccaccgtcagcctcccc

SEQ ID NO: 686056 - DNA, 120 bp, Artificial Sequence
  ENSG00000187624_4 (sequence is synthesized)
gactttgccgaaatagagaaccttgcgaatcggatcaacgaaagtctgcgttgggatggaattcttgctgacccggaggcagagaaggaaaggattcgcatctataaactgaatcggaga

SEQ ID NO: 686057 - DNA, 120 bp, Artificial Sequence
  ENSG00000187624_5 (sequence is synthesized)
aaacggtaccggtgcttggccctcaagggcttccaccccgaccccgaggccctcaagggcttccaccccgaccccgacgccctcaagggcttccaccccgaccccgaggccctcaagggc

SEQ ID NO: 686058 - DNA, 120 bp, Artificial Sequence
  ENSG00000187624_6 (sequence is synthesized)
ttccaccccgaccccgaggccctcaagggcatccaccccgaccccgaggctctcaagggcttccaccccgaccccgaggccctcaagggcttccaccccgaccctgaggccctcaagggt

SEQ ID NO: 686059 - DNA, 120 bp, Artificial Sequence
  ENSG00000187624_7 (sequence is synthesized)
ccccgaggccctcaagggcttccaccccgaccccaaggccctcaagggcttccaccccgaccccaaggccctcaagggtttccacactgaccccgaggccctcaagggcttccaccccga

SEQ ID NO: 686060 - DNA, 120 bp, Artificial Sequence
  ENSG00000187624_8 (sequence is synthesized)
ccccaaggccctcaagggcttccaccccgaccccgaggccctcaagggcttccaccccgaccccgaggccctcaagggcttccaccccgaccccgaggccctcaagggcttccacactga

SEQ ID NO: 686061 - DNA, 120 bp, Artificial Sequence
  ENSG00000187624_9 (sequence is synthesized)
ccccaatgccgaggaggcccctgagaacttaccctacctctcggacaaagatggcagctccagccacaggcagcccacgtcgaaagccgagtgccccaatctctgttttgaaggaaacct

SEQ ID NO: 686062 - DNA, 120 bp, Artificial Sequence
  ENSG00000187624_10 (sequence is synthesized)
taccccaaagcttctacactctgacttagctcctactctgctggagtgaaaatctacccacgacgctcacaaacttataattcctcctcaccacaagtttatgtgttaaaaaccatcatc

SEQ ID NO: 686063 - DNA, 120 bp, Artificial Sequence
  ENSG00000187624_11 (sequence is synthesized)
ataaaaggaaatgagacccgtatctgaaggaaacagatgttcggtacacggacgacgccgactctcccatcaccaagctgccctcggttgcccaggagagccacagtgccttgagaacat

SEQ ID NO: 686064 - DNA, 120 bp, Artificial Sequence
  ENSG00000187624_12 (sequence is synthesized)
aagcaatttagtgaacagagttcttttcagaatttcctttttcttaagtaagcatctctgttacttaatttctcaccacagctagatgtctataatctgccccaaaaagaaaagaaagcg

SEQ ID NO: 686065 - DNA, 120 bp, Artificial Sequence
  ENSG00000187624_13 (sequence is synthesized)
tgtagatgatttacctcttaagtctcaatctcatggtgaaactcctcacacggtacctgcttctgttggccggaggacgatgccctgaacctcttggagcctttttctgttttaattaaa

SEQ ID NO: 686066 - DNA, 120 bp, Artificial Sequence
  ENSG00000187624_14 (sequence is synthesized)
tgcatggcctgcctttatatggcctcaaataagtgggttccagaactccatccctgggaagttaccatgggaagtcccaagaggaatactgcttctttcataaacatggtcctctcctaa

SEQ ID NO: 686067 - DNA, 120 bp, Artificial Sequence
  ENSG00000187624_15 (sequence is synthesized)
aaagaaatgatgtctccgcccaacagcatggtggacctgagtcctgctaccagccacatgagtgtgcttggaagcaggtggagcccagttgagccttgaggtgcctccctctgtgagaga

SEQ ID NO: 686068 - DNA, 120 bp, Artificial Sequence
  ENSG00000187624_16 (sequence is synthesized)
ccccaagccggagacatccggccaagaggcacccagattcctgccccacagaaactgatacaataacgttgtttaaagccactacatttggaggtaatcttgttacacagcaataactga

SEQ ID NO: 686069 - DNA, 120 bp, Artificial Sequence
  ENSG00000187624_17 (sequence is synthesized)
ctaatacagtcggcctcttccatcagtcacgattctcagtgagttgtctcgcccttaatctgagggctggaaagcccgaaacccaacattgtcgtaagaaactgcgttacccaagacacc

SEQ ID NO: 686070 - DNA, 120 bp, Artificial Sequence
  ENSG00000187624_18 (sequence is synthesized)
cttgcccagggtcacaccaggagtaagaggagacgctgggatgtcacacccaggctagctggttccagagatcctgcttttaattactgcactgcagtatctaagacctcagcaggatga

SEQ ID NO: 686071 - DNA, 120 bp, Artificial Sequence
  ENSG00000187624_19 (sequence is synthesized)
atagccttggaagatagagatcgtgtctccctccagagcaaagggcagattagcttcaatgatgacagaagatctcggttcccgggctcagagctccgctgctgtaacttcagcatgcct

SEQ ID NO: 686072 - DNA, 120 bp, Artificial Sequence
  ENSG00000187624_20 (sequence is synthesized)
gatgaatagccttggaagatagagatcgtgtctccctccagagcaaagggcagattagcttcaatgatgacagaagatctcggttcccgggctcagagctccgctgctgtaacgtaagcc

SEQ ID NO: 686073 - DNA, 120 bp, Artificial Sequence
  ENSG00000187624_21 (sequence is synthesized)
cttctgtcctcatgtcacctagagcctcttcctgtcaccctgtgggaagtgattctgaggaaaccaggacaattgcaaacactctggctactgctttgctgtgactaataaacatccttt

SEQ ID NO: 686074 - DNA, 120 bp, Artificial Sequence
  ENSG00000187626_0 (sequence is synthesized)
agcctcaacttccctcctatgtctggagagtgatcactttcactcccaaagacatcctttggtgatacttactgtgggattcagagtggggtgcagaggacgaccctgcaaaggcacgga

SEQ ID NO: 686075 - DNA, 120 bp, Artificial Sequence
  ENSG00000187626_1 (sequence is synthesized)
ctataagagagatctgtgcagctgcgcctcagggggtgtcctgggcccctgggcatgacaggagggggaccacttgcagttctactggaaaatttaccacccttccagaatcctctgaag

SEQ ID NO: 686076 - DNA, 120 bp, Artificial Sequence
  ENSG00000187626_2 (sequence is synthesized)
atatacaggtcgcaactagagtgagacccgagtactgccttgggtcagaatggctagagaaccgagaaaaaacgcagccctggacgcccagtctgcagaagaccagacggggctcctgac

SEQ ID NO: 686077 - DNA, 120 bp, Artificial Sequence
  ENSG00000187626_3 (sequence is synthesized)
cgtgaaggtggagaaggaggaagcctccgccttgacggcggaggtgagagcaccctgcagccctgctcggggccccgaacgctcccgccagcgcttccgaggcttccgctacccggaggc

SEQ ID NO: 686078 - DNA, 120 bp, Artificial Sequence
  ENSG00000187626_4 (sequence is synthesized)
tgcgggcccccgcgaggcgttgagccggctccgagaactctgcggacaatggctgcagcctgagatgcacagcaaggagcagatcctggagctgctggtgctggagcagttcctgaccat

SEQ ID NO: 686079 - DNA, 120 bp, Artificial Sequence
  ENSG00000187626_5 (sequence is synthesized)
cctgccggggaatctgcagagctgggtgcgggagcagcatccagagagcggggaggaggtggtggtgctattggagtatttggagaggcagctggatgagccggcgccgcaggttcccgt

SEQ ID NO: 686080 - DNA, 120 bp, Artificial Sequence
  ENSG00000187626_6 (sequence is synthesized)
tggtgaccaggggcaagaactgctctgttgcaagatggcactattgacacaaactcaagggtctcaaagtagccagtgccagccaatgaaggctctgttcaagcatgaatctctgggatc

SEQ ID NO: 686081 - DNA, 120 bp, Artificial Sequence
  ENSG00000187626_7 (sequence is synthesized)
ccagcccttacacgatagagttctccaggttcctgggcttgcccagggagggtgctgcagagaagatgcaatggtagcttccaggctcactccagggtcccagggtttgctgaaaatgga

SEQ ID NO: 686082 - DNA, 120 bp, Artificial Sequence
  ENSG00000187626_8 (sequence is synthesized)
agatgtggccctgaccctcactcctgggtggacacagctggattcatctcaggtgaacctctacagagatgaaaagcaggagaaccatagcagcctggtctcccttggtggtgaaataca

SEQ ID NO: 686083 - DNA, 120 bp, Artificial Sequence
  ENSG00000187626_9 (sequence is synthesized)
gactaagagcagggacttgcctccagtcaagaagcttccagaaaaggagcatgggaagatatgccacctgagggaagacattgcccagattcctacacatgcagaagctggtgaacagga

SEQ ID NO: 686084 - DNA, 120 bp, Artificial Sequence
  ENSG00000187626_10 (sequence is synthesized)
gggcaggttacaaagaaagcagaaaaatgccatagggagtaggcgacattattgccatgaatgtggaaagagttttgctcaaagttcaggcctgactaaacacaggagaatccacactgg

SEQ ID NO: 686085 - DNA, 120 bp, Artificial Sequence
  ENSG00000187626_11 (sequence is synthesized)
tgagaaaccctatgaatgtgaagactgtggaaagaccttcattgggagctctgcccttgtcattcatcagagagtccacactggtgagaagccatatgagtgtgaagaatgtggtaaggt

SEQ ID NO: 686086 - DNA, 120 bp, Artificial Sequence
  ENSG00000187626_12 (sequence is synthesized)
cttcagtcacagctcaaaccttatcaaacaccagagaacccacactggggagaagccctatgagtgtgatgactgtgggaagaccttcagccagagctgcagcctccttgaacatcacaa

SEQ ID NO: 686087 - DNA, 120 bp, Artificial Sequence
  ENSG00000187626_13 (sequence is synthesized)
aattcatactggggagaagccataccagtgcaatatgtgtggcaaagcctttaggcggaattcacatctcctgagacatcagaggattcatggtgataaaaatgttcagaatcctgagca

SEQ ID NO: 686088 - DNA, 120 bp, Artificial Sequence
  ENSG00000187626_14 (sequence is synthesized)
cggggagtcctgggaaagtcagggtaggacggaaagccagtgggaaaatactgaggctcccgtgtcttataaatgtaatgagtgtgagagaagtttcacacggaatagaagtcttattga

SEQ ID NO: 686089 - DNA, 120 bp, Artificial Sequence
  ENSG00000187626_15 (sequence is synthesized)
acatcagaaaatccacactggtgagaaaccctatcagtgtgacacatgtggaaaaggtttcactcgaacttcataccttgttcaacatcagagaagccatgtagggaaaaaaactctttc

SEQ ID NO: 686090 - DNA, 120 bp, Artificial Sequence
  ENSG00000187626_16 (sequence is synthesized)
acagtgacccatggtattcatgccaacattggtgctcatttgtcactgaactgaagccaccctggagcccttaatggttacagaaattgtggaccagggctttatttaccactatacatc

SEQ ID NO: 686091 - DNA, 120 bp, Artificial Sequence
  ENSG00000187626_17 (sequence is synthesized)
atcgggtattagaaaatgtagtctggctgagacgatgagttatcttctacattctagaaagtgattggaagaagtcatttgataagaggccatgggagagtggtctggaagttgtaggac

SEQ ID NO: 686092 - DNA, 120 bp, Artificial Sequence
  ENSG00000187626_18 (sequence is synthesized)
ctaaaatagtttgttctcacccagtgtatttaaatggccttctggacttgttaattgccctcagccagcactttaggacatctggttggatggctctgatgtggggggctgctgctctga

SEQ ID NO: 686093 - DNA, 120 bp, Artificial Sequence
  ENSG00000187626_19 (sequence is synthesized)
ccattcattttgcctctaatgaatctttcacaaattggtcagatccatgaggtcttttactcttctttgtgccttgtatgataggtgctaataaacatttattaaatgtaccagtaaaat

SEQ ID NO: 686094 - DNA, 120 bp, Artificial Sequence
  ENSG00000187626_20 (sequence is synthesized)
ggcctttgtaccaaaaatttgatgttgtctatatttctgagaaatttctaacttatgccatttgaatttatgtattattctctgaggttctagattctgggccaatctagtgtatttgtt

SEQ ID NO: 686095 - DNA, 120 bp, Artificial Sequence
  ENSG00000187626_21 (sequence is synthesized)
gccacgtacatactgttttcagaattggggtgggggaatccatatttctctaccatgatagtagagatgagaagaatgccttaaacagcttctttatcattaagacactgtgagattgct

SEQ ID NO: 686096 - DNA, 120 bp, Artificial Sequence
  ENSG00000187626_22 (sequence is synthesized)
ttagggggagtctttcacattcaggtaaataaaaatcaacttactgagttagatcaaaatgattattatgaattttgaacacattctgtaacacttaccatcttgtttcttaccttttag

SEQ ID NO: 686097 - DNA, 120 bp, Artificial Sequence
  ENSG00000187626_23 (sequence is synthesized)
ttatcttgggccgaccaagtgctaagacgtcatctgtgtccctcttccccagtttatagctgactgtgcatcaaggcttatgccagctaagcttaaactttctccaggtccgaagattca

SEQ ID NO: 686098 - DNA, 120 bp, Artificial Sequence
  ENSG00000187626_24 (sequence is synthesized)
taacaaatatttataattattattcatggtttcaaaactgccctgtcagttggggacaggaagatcaggttagaggcagcctatgaggatagaaactcacatctgagtggtaggagaaaa

SEQ ID NO: 686099 - DNA, 89 bp, Artificial Sequence
  ENSG00000187626_25 (sequence is synthesized)
ctatgaggatagaaactcacatctgagtggtaggagaaaatgtatctgttcaggctgggtgccatggctttggcaggcagatcacatga

SEQ ID NO: 686100 - DNA, 78 bp, Artificial Sequence
  ENSG00000187626_26 (sequence is synthesized)
tgtgtctgttcagaagcacattgggaatcctaggtatctgatgaaaaagattgtacaatatccaaagtgttgatatgt

SEQ ID NO: 686101 - DNA, 120 bp, Artificial Sequence
  ENSG00000187626_27 (sequence is synthesized)
tgatgaaaaagattgtacaatatccaaagtgttgatatgtgatgtcaaggctcaatgctgtgagttattcacaagaaataagaattttttgatatcttctgctttcacccaaatcacctg

SEQ ID NO: 686102 - DNA, 120 bp, Artificial Sequence
  ENSG00000187626_28 (sequence is synthesized)
cgatgcttaaagactgatttcttccgaagtgctcaagtgcctattaccatcttccagcattgccagactgtcatgaatggattctgcttctgatgaaatccctgaccatgttttattcag

SEQ ID NO: 686103 - DNA, 120 bp, Artificial Sequence
  ENSG00000187626_29 (sequence is synthesized)
tcaccagcatcgtgttcttgtctatcctcaaataccctttctggatttctcctctgaaataccacaggctgaccagagacttacaaaaccgtagagctctccctttattaattccctaca

SEQ ID NO: 686104 - DNA, 120 bp, Artificial Sequence
  ENSG00000187626_30 (sequence is synthesized)
atcttttattgccttcattatctccttttcagtctaatttaaaacttctttagaattccaaagttctgtagactttctctgctcaatcttttctagccttttcaaatttctttaaaatca

SEQ ID NO: 686105 - DNA, 120 bp, Artificial Sequence
  ENSG00000187626_31 (sequence is synthesized)
gctttatttatgttatttccacaaagctagccatttccttttctcctttttcacttctcctaaatatttgctaaatagctctgattttacacactcaaactcattacagacaactctgtt

SEQ ID NO: 686106 - DNA, 120 bp, Artificial Sequence
  ENSG00000187626_32 (sequence is synthesized)
aacttttctgtgatatttgtttctgatgttacatgaagagatatatgtgaaagccttttacaaaccagaaagcattatacaaatataacttcctgagattaactaaggaccactgtgcct

SEQ ID NO: 686107 - DNA, 120 bp, Artificial Sequence
  ENSG00000187626_33 (sequence is synthesized)
cctttcactcctgcgcctccaagcctaaaagtcttctctgtagaggagggaaatattgtagaaaagtacttttcagtgtctgctatgctagaaaagggaagaaataaagcctctatttgt

SEQ ID NO: 686108 - DNA, 120 bp, Artificial Sequence
  ENSG00000187626_34 (sequence is synthesized)
gtgtgtgtgtgtgtgtgtgtatacacacttaggcttaggtctttagtacagtcaggttggtaagacttgcacacaaataaggcagtgtaatgataaatgccttatgagtggtaaactgag

SEQ ID NO: 686109 - DNA, 120 bp, Artificial Sequence
  ENSG00000187626_35 (sequence is synthesized)
gcttgtagaaattcagagaaggaaaaggatgcttccagctgtgcaagctgttattatatggacagggtgacatgttagaaagctgaatggactcacaacaactttgtccaattgagtaaa

SEQ ID NO: 686110 - DNA, 120 bp, Artificial Sequence
  ENSG00000187626_36 (sequence is synthesized)
taaagcaaattttaagagatagggacattgtaggggccttcagtgccagagcaaaaagtttaaattttattcagtaagcactggggagccatgatattttataatcaaaatattatctag

SEQ ID NO: 686111 - DNA, 120 bp, Artificial Sequence
  ENSG00000187626_37 (sequence is synthesized)
gaaactttatctggtgtattatataatatcaaataaaatcattttgcttacagtcttttagatactccacttttctataaaacagtggtatgtgtttataaatagctgaattataaaatg

SEQ ID NO: 686112 - DNA, 120 bp, Artificial Sequence
  ENSG00000187626_38 (sequence is synthesized)
agtttatctgtagcctattgaaaggatggccaaaaaagttattttccaatgaaattagatctagtaaagtaaactacttagttgagatataagcagtatataaagcacaataaaatgcca

SEQ ID NO: 686113 - DNA, 120 bp, Artificial Sequence
  ENSG00000187626_39 (sequence is synthesized)
cttttcatattttcttaaattgcttttaggaattttagtggtgactagtctgccattctatttcatttctgtaactgaagcagcgcagaaatcttctattttcttttttctccctttgct

SEQ ID NO: 686114 - DNA, 120 bp, Artificial Sequence
  ENSG00000187626_40 (sequence is synthesized)
tgaatagtaaatggttatagcactttttctacttcgatagaatgaatggttataatgaaaaaagcttttgatgaatggcactcttggatttgttcttaattttggcaaagacgtatataa

SEQ ID NO: 686115 - DNA, 120 bp, Artificial Sequence
  ENSG00000187626_41 (sequence is synthesized)
ttctgcaaaagactttctctgcctcttcctttagtgagagaaaaaaaaaggtaggaatgacaacttaactcctaggattctgaggatctgcttatacaaataagaagtgctaagtaaaaa

SEQ ID NO: 686116 - DNA, 120 bp, Artificial Sequence
  ENSG00000187626_42 (sequence is synthesized)
ctctgaaaatgttgctaactggtagagaaatggagattaacactttgttaatggaaacctccaaataaaggaattataattgtttaataataaagactatattttaaaagtgtcctgtaa

SEQ ID NO: 686117 - DNA, 120 bp, Artificial Sequence
  ENSG00000187627_0 (sequence is synthesized)
atgaacgtgatgggttttaacacagaccgcttagcatggactagaaataagttgagaggattctattttgcaaagctgtattatgaagctaaagaatatgatcttgctaaaaaatacgta

SEQ ID NO: 686118 - DNA, 120 bp, Artificial Sequence
  ENSG00000187627_1 (sequence is synthesized)
tgtacttaccttagtgtgcaagagagggatcccagagctcacagatttctgggtcttctttatgaattggaagaaaacacagagaaagccgttgaatgttacaggcgttcactggaatta

SEQ ID NO: 686119 - DNA, 120 bp, Artificial Sequence
  ENSG00000187627_2 (sequence is synthesized)
aacccaccacaaaaagatcttgtgttgaagattgcagaattgctttgtaaaaatgatgttactgatggaagagcaaaatactgggttgaaagggcagcgaaacttttcccaggaagtcct

SEQ ID NO: 686120 - DNA, 120 bp, Artificial Sequence
  ENSG00000187627_3 (sequence is synthesized)
tagattgtgaaggtgaagatggatggaataaactttttgactggattcagtcagaactttatgtaagacctgatgacgtccatatgaacatccggctagtggagttgtatcgctcaaata

SEQ ID NO: 686121 - DNA, 120 bp, Artificial Sequence
  ENSG00000187627_4 (sequence is synthesized)
cggctagtggagttgtatcgctcaaataaaagattgaaggatgctgtggcccgctgccatgaggcagagaggaacatagctttgcgttcaagtttagagtggaattcgtgtgttgtacag

SEQ ID NO: 686122 - DNA, 120 bp, Artificial Sequence
  ENSG00000187627_5 (sequence is synthesized)
acccttaaggaatatctggagtctttacagtgtttggagtctgataaaagtgactggcgagcaaccaatacagacttactgctggcctatgctaatcttatgcttcttacgctttccact

SEQ ID NO: 686123 - DNA, 120 bp, Artificial Sequence
  ENSG00000187627_6 (sequence is synthesized)
agagatgtgcaggaaagtagagaattactggaaagttttgatagtgctcttcagtctgcaaaatcttctttgggtggaaatgatgaactgtcagctactttcttagaaatgaaaggacat

SEQ ID NO: 686124 - DNA, 120 bp, Artificial Sequence
  ENSG00000187627_7 (sequence is synthesized)
ttctacatgcatgctggttctctgctcttgaagatgggtcagcatggtaataatgttcaatggcaagctctttctgagctggctgcattgtgctatgtcatagcatttcaggttccaaga

SEQ ID NO: 686125 - DNA, 120 bp, Artificial Sequence
  ENSG00000187627_8 (sequence is synthesized)
ccaaagattaaattaataaaaggtgaagctggacaaaatctgctggaaatgatggcctgtgaccgactgagccaatcagggcatatgttgctaaacttaagtcgtggcaagcaagatttt

SEQ ID NO: 686126 - DNA, 120 bp, Artificial Sequence
  ENSG00000187627_9 (sequence is synthesized)
ttaaaagaggttgttgaaacttttgccaacaaaagcgggcagtctgtgttatataatgctctgttttctagtcagtcatctaaggatacatcttttcttggtagcgatgatattggaaac

SEQ ID NO: 686127 - DNA, 120 bp, Artificial Sequence
  ENSG00000187627_10 (sequence is synthesized)
gaagatttggctagatacgatgttggtgctattcaagcacataatggtagtcttcagcaccttacttggcttggcttacagtggaattcattgcctgctttacctggaatccgaaaatgg

SEQ ID NO: 686128 - DNA, 120 bp, Artificial Sequence
  ENSG00000187627_11 (sequence is synthesized)
gctttacctggaatccgaaaatggctaaaacagcttttccatcatttgccccaggaaacctcaaggcttgaaacaaatgcacctgaatcaatatgtattttagatcttgaagtatttctc

SEQ ID NO: 686129 - DNA, 120 bp, Artificial Sequence
  ENSG00000187627_12 (sequence is synthesized)
cttggagtagtatataccagccacttacaattaaaggagaaatgtaattctcaccacagctcctatcagccgttatgcctgccccttcctgtgtgtaaacggctttgtacagagagacaa

SEQ ID NO: 686130 - DNA, 120 bp, Artificial Sequence
  ENSG00000187627_13 (sequence is synthesized)
aaatcttggtgggatgcggtttgtactctgattcacagaaaagcagtacctggaaactcagcagaattgagacttgtagttcagcatgaaataaacactctaagagcccaggaaaaacat

SEQ ID NO: 686131 - DNA, 120 bp, Artificial Sequence
  ENSG00000187627_14 (sequence is synthesized)
ggccttcaacctgctctgcttgtacattgggcaaaatgccttcagaaaatgggcaggggtcttaattcttcttatgatcaacaagaatacatagggagaagtgttcattattggaagaaa

SEQ ID NO: 686132 - DNA, 120 bp, Artificial Sequence
  ENSG00000187627_15 (sequence is synthesized)
gttttgccattgttgaagataataaagaagaacagtattcctgaacctattgatcctctgtttaaacattttcatagtgtagacattcaggcatcagaaattgttgagtatgaagaagat

SEQ ID NO: 686133 - DNA, 120 bp, Artificial Sequence
  ENSG00000187627_16 (sequence is synthesized)
gcacacataacttttgctatattggatgcagtacatggaaatatagaagatgctgtgactgcttttgaatctataaaaagtgttgtttcttattggaatcttgcactgatttttcacagg

SEQ ID NO: 686134 - DNA, 120 bp, Artificial Sequence
  ENSG00000187627_17 (sequence is synthesized)
aaagcagaagacattgaaaatgatgccgtttttcctgaagaacaagaagaatgcaaaaattatctgagaaagaccagggactacctaataaagattatagatgacagtgattcaaatctt

SEQ ID NO: 686135 - DNA, 120 bp, Artificial Sequence
  ENSG00000187627_18 (sequence is synthesized)
tcagtggtcaagaaattgcctgtgcccctggagtctgtaaaagagatgcttaagtcagtcatgcaggaactcgaagactatagtgaaggaggtcctctctataaaaatggttctttgcga

SEQ ID NO: 686136 - DNA, 120 bp, Artificial Sequence
  ENSG00000187627_19 (sequence is synthesized)
aatgcagattcagaaataaaacattctacaccatctcctaccaaatattcactatcaccaagtaaaagttacaagtattctcccaaaacaccacctcgatgggcagaagatcagaattct

SEQ ID NO: 686137 - DNA, 120 bp, Artificial Sequence
  ENSG00000187627_20 (sequence is synthesized)
ttacggaaaatgatttgccaagaagtaaaggccattacgaaactaaatagcagtaagtcagcatcccgtcatcgttggcccacagagaattatggaccagactcggtgcctgatggatat

SEQ ID NO: 686138 - DNA, 120 bp, Artificial Sequence
  ENSG00000187627_21 (sequence is synthesized)
tcccagtatcttctcagaccagcagctaatgttactcccacaaagggttcttctaatacagaatttaagtcaaccaaagaaggattttccatcgctgtgtctgctgatggatttaaattt

SEQ ID NO: 686139 - DNA, 120 bp, Artificial Sequence
  ENSG00000187627_22 (sequence is synthesized)
ggcatttcggaaccaggaaatcaagaaaagaaaagtgaaaagcctcttgaaaatgatactggcttccaggctcaggatattagtggccagaagaatggccgtggtgtgatttttggccaa

SEQ ID NO: 686140 - DNA, 120 bp, Artificial Sequence
  ENSG00000187627_23 (sequence is synthesized)
acaagtagcacttttacatttgcagatgttgcaaaatcaacttcaggagaaggatttcagtttggcaaaaaagaccccaatttcaagggattttcaggtgctggagaaaaattattctca

SEQ ID NO: 686141 - DNA, 120 bp, Artificial Sequence
  ENSG00000187627_24 (sequence is synthesized)
tcacaatgcggtaaaatggccaataaagcaaacacttccggtgactttgagaaagatgatgatgcctgtaagactgaggacagcgatgacatccattttgaaccagtagttcaaatgcct

SEQ ID NO: 686142 - DNA, 120 bp, Artificial Sequence
  ENSG00000187627_25 (sequence is synthesized)
gaaaaagtagaacttgtaacaggagaagaaggtgaaaaagttctgtattcacagggggtaaaactatttagatttgatgctgagataagtcagtggaaagaaaggggcttggggaactta

SEQ ID NO: 686143 - DNA, 120 bp, Artificial Sequence
  ENSG00000187627_26 (sequence is synthesized)
aaaattctcaaaaatgaggtcaatggcaaaccaagaatgctgatgcgaagagaccaagtactaaaagtgtgtgctaatcattggataacaactacaatgaacctgaagcccctctctgga

SEQ ID NO: 686144 - DNA, 120 bp, Artificial Sequence
  ENSG00000187627_27 (sequence is synthesized)
tcagatagagcatggatgtggttagccagtgatttctctgatggtgatgccaaactagagcggttggcagcacaatttaaaacaccagagctggctgaagaattcaagcagaaatttgag

SEQ ID NO: 686145 - DNA, 120 bp, Artificial Sequence
  ENSG00000187627_28 (sequence is synthesized)
gaatgccagcggcttctgttagacataccacttcaaactccccataaacttgtagatactggcagagctgccaagctaatacagagagctgaagaaatgaagagtggactgaaagatttc

SEQ ID NO: 686146 - DNA, 120 bp, Artificial Sequence
  ENSG00000187627_29 (sequence is synthesized)
aaaacgtttttgacaaatgatcaaacaaaagtcactgaggaagaaaataagggttcaggtacaggtgcagccggtgcctcagacacaacaataaaacccaatcctgaaaacactgggccc

SEQ ID NO: 686147 - DNA, 120 bp, Artificial Sequence
  ENSG00000187627_30 (sequence is synthesized)
acattagaatgggataactatgatttaagggaagatgctttggatgataatgttagtagtagctcagtacatgattctccgttggcaagtagccctgtgagaaaaaatattttccgcttt

SEQ ID NO: 686148 - DNA, 120 bp, Artificial Sequence
  ENSG00000187627_31 (sequence is synthesized)
gatgagtcaacaacaggatttaacttcagttttaaatctgctttgagtctatctaagtctcctgccaagttgaatcagagtgggacttcagttggcactgatgaagaatctgatgttact

SEQ ID NO: 686149 - DNA, 120 bp, Artificial Sequence
  ENSG00000187627_32 (sequence is synthesized)
caagaagaagagagagatggacagtactttgaacctgttgttcctttacctgatctagttgaagtatccagtggtgaggaaaatgaacaagttgtttttagtcacagggcagaactctac

SEQ ID NO: 686150 - DNA, 120 bp, Artificial Sequence
  ENSG00000187627_33 (sequence is synthesized)
agatatgataaagatgttggtcaatggaaagaaaggggcattggtgatataaagattttacagaattatgataataagcaagttcgtatagtgatgagaagggaccaagtattaaaactt

SEQ ID NO: 686151 - DNA, 120 bp, Artificial Sequence
  ENSG00000187627_34 (sequence is synthesized)
tgtgccaatcacagaataactccagacatgagtttgcaaaatatgaaagggacagaaagagtatgggtgtggactgcatgtgattttgcagatggagaaagaaaagtagagcatttagct

SEQ ID NO: 686152 - DNA, 120 bp, Artificial Sequence
  ENSG00000187627_35 (sequence is synthesized)
gttcgttttaaactacaggatgttgcagactcatttaagaaaatttttgatgaagcaaaaacagcccaggaaaaagattctttgataacacctcatgtttctcggtcaagcactcccaga

SEQ ID NO: 686153 - DNA, 120 bp, Artificial Sequence
  ENSG00000187627_36 (sequence is synthesized)
gagtcaccatgtggcaaaattgctgtagctgtattagaagaaaccacaagagagaggacagatgttattcagggtgatgatgtagcagatgcagcttcagaagttgaagtgtctagcaca

SEQ ID NO: 686154 - DNA, 120 bp, Artificial Sequence
  ENSG00000187627_37 (sequence is synthesized)
tctgaaacaacaacaaaagcagtggtttctcctccaaagtttgtatttggttcagagtctgttaaaagaatttttagtagtgaaaaatcaaacccatttgcatttggcaacagttctgcc

SEQ ID NO: 686155 - DNA, 120 bp, Artificial Sequence
  ENSG00000187627_38 (sequence is synthesized)
actgggtctttgtttggatttagttttaatgcacctttgaaaagtaacgatagtgaaactagttcagtagcccagagtggatctgaaagcaaagtggaacctaaaaaatgtgaactgtca

SEQ ID NO: 686156 - DNA, 120 bp, Artificial Sequence
  ENSG00000187627_39 (sequence is synthesized)
aagaactctgatatcgaacagtcttcagatagcaaagtcaaaaatctctctgcttcctttccaatggaagaatcttcaatcaactacacatttaaaacaccagaaaaggagcctccatta

SEQ ID NO: 686157 - DNA, 120 bp, Artificial Sequence
  ENSG00000187627_40 (sequence is synthesized)
tggcatgctgaatttaccaaagaagaattggttcagaagctcagttccaccacaaaaagtgcagatcagttaaacggcctgcttcgggaaacagaggcaaccagtgcagtccttatggag

SEQ ID NO: 686158 - DNA, 120 bp, Artificial Sequence; identical to SEQ ID NO: 668526
  ENSG00000187627_41 (sequence is synthesized)

SEQ ID NO: 686159 - DNA, 120 bp, Artificial Sequence
  ENSG00000187627_42 (sequence is synthesized)
gagagagagagccttcttcctgttataaatacgatgttgcagctcagccctgaagaaaagggaaaacttgctgcggttgctcaaggtcttcaagaaacctccatacccaagaaaaaatag

SEQ ID NO: 686160 - DNA, 120 bp, Artificial Sequence
  ENSG00000187627_43 (sequence is synthesized)
ctggtttcacgcgtctcgggagccaggttggcggtgcgatgaggcgcagcaaggcctacggggagcggtacctcgcctcggtgcagggctccgccccgtcgcctggaaagaagttgagag

SEQ ID NO: 686161 - DNA, 120 bp, Artificial Sequence
  ENSG00000187627_44 (sequence is synthesized)
ttatcctaaatacagttggccctctgtatccatgggttccacatccacaaattcaaccaactgtggatggaaaagacttgaaaaagatgagagaaaataacaatatgacaataaaacata

SEQ ID NO: 686162 - DNA, 120 bp, Artificial Sequence
  ENSG00000187627_45 (sequence is synthesized)
atacaaataaaaacaatacagtataacaacgattacatagcatttacattatattagggattgcacaagagaaggtatgtaggttatatgcaaatactgcaccattttacataagggact

SEQ ID NO: 686163 - DNA, 120 bp, Artificial Sequence
  ENSG00000187627_46 (sequence is synthesized)
tgagaagcatggattttggtagccacaggggtcctggaaccaatccctcacagacacagacggacactttacagtagatgaacacaaagatgaaaggaaaagtctgacctaggtttgcgg

SEQ ID NO: 686164 - DNA, 120 bp, Artificial Sequence
  ENSG00000187627_47 (sequence is synthesized)
ggagaagtggaactccatttttgacaggtgatgccattttttgttttggacatcgtccctctgtagttctttccattcccagtcttgcactctgaaagatacactgaaggaaagtccaca

SEQ ID NO: 686165 - DNA, 120 bp, Artificial Sequence
  ENSG00000187627_48 (sequence is synthesized)
cagtggtcaaagtctttcacaagacaccacgtgaaggtctgcacagcacagtcacattgagaaaaagatctcatgcaccagaccccctgtttctgctttctaaaagatcatcttttgcac

SEQ ID NO: 686166 - DNA, 120 bp, Artificial Sequence
  ENSG00000187627_49 (sequence is synthesized)
ctgcaaaaaggctgcagtaaactgggccattccatactttgattcatgtattcaaatgctacttatgagctctctgtgtattgagccccaccaggatgctggggacacacggggcacagt

SEQ ID NO: 686167 - DNA, 120 bp, Artificial Sequence
  ENSG00000187627_50 (sequence is synthesized)
gcagccagaggcttggccatcatagagctcacattctagtggaatcagacaggggggttacaggaaatattcaagtaaacaatataaaatgagatcacttgatgatacatggatacatgt

SEQ ID NO: 686168 - DNA, 120 bp, Artificial Sequence; identical to SEQ ID NO: 668536
  ENSG00000187627_51 (sequence is synthesized)

SEQ ID NO: 686169 - DNA, 120 bp, Artificial Sequence; identical to SEQ ID NO: 668537
  ENSG00000187627_52 (sequence is synthesized)

SEQ ID NO: 686170 - DNA, 120 bp, Artificial Sequence; identical to SEQ ID NO: 668538
  ENSG00000187627_53 (sequence is synthesized)

SEQ ID NO: 686171 - DNA, 120 bp, Artificial Sequence; identical to SEQ ID NO: 668539
  ENSG00000187627_54 (sequence is synthesized)

SEQ ID NO: 686172 - DNA, 120 bp, Artificial Sequence
  ENSG00000187627_55 (sequence is synthesized)
ggaattggcgactgctgcggggctgagcgctggtttcacgcgtctcgggagccaggttggcggtgcgatgaggcgcagcaaggcctacggggagcggtacctcgcctcggtgcagggctc

SEQ ID NO: 686173 - DNA, 120 bp, Artificial Sequence
  ENSG00000187627_56 (sequence is synthesized)
cgccccgtcgcctggaaagtacaaacgtgtttgcaaacaattaagtttatcctgccaaaagaaatagcagttcagatgcttgtcaagtggtacaatgtccacagtgctccaggaggaccc

SEQ ID NO: 686174 - DNA, 120 bp, Artificial Sequence
  ENSG00000187627_57 (sequence is synthesized)
gaaattttgactttgaaggatcactttcccctgtcattgcacccaaaaaagcaaggccttctgagactggatctgatgataagttgagaggattctattttgcaaagctgtattatgaag

SEQ ID NO: 686175 - DNA, 120 bp, Artificial Sequence
  ENSG00000187630_0 (sequence is synthesized)
agacttgctggtctgatccatgcagatggccaggctgctaggcctctgtgcctgggcacggaagtcggtgcggatggccagctccaggatgacccgccgggacccgctcacaaataaggt

SEQ ID NO: 686176 - DNA, 120 bp, Artificial Sequence
  ENSG00000187630_1 (sequence is synthesized)
ggccctggtaacggcctccaccgacgggatcggcttcgccatcgcccggcgtttggcccaggacagggcccacgtggtcgtcagcagccggaagcagcagaatgtggaccaggcggtggc

SEQ ID NO: 686177 - DNA, 120 bp, Artificial Sequence
  ENSG00000187630_2 (sequence is synthesized)
cacgctgcagggggaggggctgagcgtgacgggcactgtgtgccatgtggggaaggcggaggaccgggagcggctggtggccatggctgtgaagcttcatggaggtatcgatatcctagt

SEQ ID NO: 686178 - DNA, 120 bp, Artificial Sequence
  ENSG00000187630_3 (sequence is synthesized)
ctccaatgctgctgtcaaccctttctttggaagcctaatggatgtcaccgaggaggtgtgggacaagactctggacattaatgtgaaggccccagccctgatgacaaaggcagtggtgcc

SEQ ID NO: 686179 - DNA, 120 bp, Artificial Sequence
  ENSG00000187630_4 (sequence is synthesized)
agaaatggagaaacgaggaggcggctcagtggtgatcgtgtcttccatagcagccttcagtccatctcctggcttcagtccttacaatgtcagtaaaacagccttgctgggcctcaacaa

SEQ ID NO: 686180 - DNA, 120 bp, Artificial Sequence
  ENSG00000187630_5 (sequence is synthesized)
ttatcaagactagcttcagcaggatgctctggatggacaaggaaaaagaggaaagcatgaaagaaaccctgcggataagaaggttaggcgagccagaggattgtgctggcatcgtgtctt

SEQ ID NO: 686181 - DNA, 120 bp, Artificial Sequence
  ENSG00000187630_6 (sequence is synthesized)
tcctgtgctctgaagatgccagctacatcactggggaaacagtggtggtgggtggaggaaccccgtcccgcctctgaggaccgggagacagcccacaggccagagttgggctctagctcc

SEQ ID NO: 686182 - DNA, 120 bp, Artificial Sequence
  ENSG00000187630_7 (sequence is synthesized)
tggtgctgttcctgcattcacccactggcctttcccacctctgctcaccttactgttcacctcatcaaatcagttctgccctgtgaaaagatccagccttccctgccgtcaaggtggcgt

SEQ ID NO: 686183 - DNA, 120 bp, Artificial Sequence
  ENSG00000187630_8 (sequence is synthesized)
cttactcgggattcctgctgttgttgtggccttgggtaaaggcctcccctgagaacacaggacaggcctgctgacaaggctgagtctaccttggcaaagaccaagatattttttcctggg

SEQ ID NO: 686184 - DNA, 120 bp, Artificial Sequence
  ENSG00000187630_9 (sequence is synthesized)
ccactggggaatctgaggggtgatgggagagaaggaacctggagtggaaggagcagagttgcaaattaacaacttgcaaatgaggtgcaaataaaatgcagatgattgcgcggctttgaa

SEQ ID NO: 686185 - DNA, 120 bp, Artificial Sequence
  ENSG00000187630_10 (sequence is synthesized)
ccaccgtggagctcatctgagagttgtaaggtacgggactgcctcggtctttgggacgccccgtctggtagcatcccagatccagcacgttccttccggccctgcaccccggcccggtgc

SEQ ID NO: 686186 - DNA, 120 bp, Artificial Sequence
  ENSG00000187630_11 (sequence is synthesized)
ctcacaccccgctaccccaagcatccagactctaaggcagcccctgcatctcagtcctgacatcgctgtccctggagcatcctccgctggagctggagcttgacaggatcggcttcgcca

SEQ ID NO: 686187 - DNA, 120 bp, Artificial Sequence
  ENSG00000187630_12 (sequence is synthesized)
gaacattagggtgaactgcctgcacctggacttatcaagactagcttcagcaggatggttaggcgagccagaggattgtgctggcatcgtgtctttcctgtgctctgaagatgccagcta

SEQ ID NO: 686188 - DNA, 120 bp, Artificial Sequence
  ENSG00000187630_13 (sequence is synthesized)
aaactgtcatgagggcaagggcactaagagacatgaagatgggaaggtctggtccctagcagcccacagcccgctgtctcagtcccacagataacacaggcaggctctcttctgcctcac

SEQ ID NO: 686189 - DNA, 120 bp, Artificial Sequence
  ENSG00000187630_14 (sequence is synthesized)
agaccacgaattcataaacactatcactacagtgacctgagcaagaagtcagcttccctttccaaaggtaaacacagagacatcggggtttcagcagtgcagaggtctcggagaagccct

SEQ ID NO: 686190 - DNA, 120 bp, Artificial Sequence
  ENSG00000187630_15 (sequence is synthesized)
gagtcctctctccacctgggggattgcctccacctctgagcatccatggagaccagggaccataaccaaaaccatgctttgttagtccccttgaataatgacacatgtttacaaaactca

SEQ ID NO: 686191 - DNA, 120 bp, Artificial Sequence
  ENSG00000187630_16 (sequence is synthesized)
atgctcagtcgggcagctctccgggccggcgtgggagcccgcgctccaaggcccggtggggggaggggcgctcacgcaaccgccactgtctggagcgggctcgcctctgcggcagccctc

SEQ ID NO: 686192 - DNA, 120 bp, Artificial Sequence
  ENSG00000187630_17 (sequence is synthesized)
ccagaaatggagaaacgagggtacagagagtgagagagagcctgggtgagaggggaccccacacaggctgagggcagtggtccacactgggaagacggtcagctctcttctttttccaga

SEQ ID NO: 686193 - DNA, 120 bp, Artificial Sequence
  ENSG00000187634_0 (sequence is synthesized)
gcagagcccagcagatccctgcggcgttcgcgagggtgggacgggaagcgggctgggaagtcgggccgagggaaaagtctgaagacgcttatgtccaaggggatcctgcaggtgcatcct

SEQ ID NO: 686194 - DNA, 120 bp, Artificial Sequence
  ENSG00000187634_1 (sequence is synthesized)
ccgatctgcgactgcccgggctgccgaatatcctccccggtgaaccgggggcggctggcagacaagaggacagtcgccctgcctgccgcccggaacctgaagaaggagcgaactcccagc

SEQ ID NO: 686195 - DNA, 120 bp, Artificial Sequence
  ENSG00000187634_2 (sequence is synthesized)
ttctctgccagcgatggtgacagcgacgggagtggccccacctgtgggcggcggccaggcttgaagcaggaggatggtccgcacatccgtatcatgaagagaagagtccacacccactgg

SEQ ID NO: 686196 - DNA, 120 bp, Artificial Sequence
  ENSG00000187634_3 (sequence is synthesized)
gacgtgaacatctctttccgagaggcgtcctgcagccaggacggcaaccttcccaccctcatatccagcgtccaccgcagccgccacctcgttatgcccgagcatcagagccgctgtgaa

SEQ ID NO: 686197 - DNA, 120 bp, Artificial Sequence
  ENSG00000187634_4 (sequence is synthesized)
ttccagagaggcagcctggagattggcctgcgacccgccggtgacctgttgggcaagaggctgggccgctccccccgtatcagcagcgactgcttttcagagaagagggcacgaagcgaa

SEQ ID NO: 686198 - DNA, 120 bp, Artificial Sequence
  ENSG00000187634_5 (sequence is synthesized)
tcgcctcaagaggcgctgctgctgccgcgggagctggggcccagcatggccccggaggaccattaccgccggcttgtgtcagcactgagcgaggccagcacctttgaggaccctcagcgc

SEQ ID NO: 686199 - DNA, 120 bp, Artificial Sequence
  ENSG00000187634_6 (sequence is synthesized)
ctctaccacctgggcctccccagccacggtgaggacccaccctggcatgatccccctcatcacctccccagccacgatctcctgagggtccggcaggaggtggcggctgcagctctgagg

SEQ ID NO: 686200 - DNA, 120 bp, Artificial Sequence
  ENSG00000187634_7 (sequence is synthesized)
ggccccagtggcctggaagcccacctgccctcctccacggcaggtcagcgtcggaagcagggcctggctcagcaccgggagggcgccgccccagctgccgccccgtccttctcggagagg

SEQ ID NO: 686201 - DNA, 120 bp, Artificial Sequence
  ENSG00000187634_8 (sequence is synthesized)
gagctgcctcagccgccccccttgctgtcgccgcagaatgcccctcacgtcgccctgggcccccatctcaggccccccttcctgggggtgccctcggctctgtgccagaccccaggctac

SEQ ID NO: 686202 - DNA, 120 bp, Artificial Sequence
  ENSG00000187634_9 (sequence is synthesized)
ggcttcctgccccccgcgcaggcggagatgttcgcctggcagcaggagctcctgcggaagcagaacctggcccggctggagctgcccgccgacctcctgcggcagaaggagctggagagc

SEQ ID NO: 686203 - DNA, 80 bp, Artificial Sequence
  ENSG00000187634_10 (sequence is synthesized)
gccccaacgacggcgccgaggagctgcagcggcgcggggccctgctggtgctgaaccacggcgcggcgccactgctggcc

SEQ ID NO: 686204 - DNA, 120 bp, Artificial Sequence
  ENSG00000187634_11 (sequence is synthesized)
cgtcccgggactctgcccggcgagccccccggaaggggggtcccggccctgcctcagcgcggcccagcgagtccaaggagatgacgggggctaggctctgggcacaagatggctcggaag

SEQ ID NO: 686205 - DNA, 120 bp, Artificial Sequence
  ENSG00000187634_12 (sequence is synthesized)
acgagccccccaaagactcggacggagaggaccccgagacggcagctgttgggtgcagggggcccactccgggccaagctccagctggaggggccggcgccgaggggaaggggcttttcc

SEQ ID NO: 686206 - DNA, 120 bp, Artificial Sequence
  ENSG00000187634_13 (sequence is synthesized)
cagggtccacactgcccctgggcttcccttatgccgtcagcccctacttccacacaggcgcggtagggggactctccatggatggggaggaggccccagcccctgaggacgtcaccaagt

SEQ ID NO: 686207 - DNA, 120 bp, Artificial Sequence
  ENSG00000187634_14 (sequence is synthesized)
ggaccgtggatgacgtctgcagcttcgtggggggcctgtctggctgtggagagtacactcgggtcttcagggagcaggggatcgacggggagaccctgccactgctgacggaggagcacc

SEQ ID NO: 686208 - DNA, 120 bp, Artificial Sequence
  ENSG00000187634_15 (sequence is synthesized)
tgctgaccaacatggggctgaagctggggcccgccctcaagatccgggcccaggtggccaggcgcctgggccgagttttctacgtggccagcttccccgtggctctgccactgcagccac

SEQ ID NO: 686209 - DNA, 120 bp, Artificial Sequence
  ENSG00000187634_16 (sequence is synthesized)
caaccctgcgggccccggagcgagaactcggcacaggagagcagcccttgtcccccacgacggccacgtccccctatggagggggccacgcccttgccggtcaaacttcacccaagcagg

SEQ ID NO: 686210 - DNA, 120 bp, Artificial Sequence
  ENSG00000187634_17 (sequence is synthesized)
agaatgggaccttggctctacttccaggggcccccgacccttcccagcctctgtgttgaggttgccgggggtaggggtggggccacacaaatctccaggagccaccactcaacacaatgg

SEQ ID NO: 686211 - DNA, 120 bp, Artificial Sequence
  ENSG00000187634_18 (sequence is synthesized)
ccctgcctcccaccgctttatttctttcggtttcggatgcaaaacaaaaaattttaaaagaaaatgtgacttcaaaggaaaggaacaaattttcaaagacttgggggagtgaaggcagag

SEQ ID NO: 686212 - DNA, 120 bp, Artificial Sequence
  ENSG00000187634_19 (sequence is synthesized)
cctggtgcagatggacgaggtctgcagacggagggcagaggtggtggaaggggccaggggcctgcaggcctccccctggaactgggactggtctcggtctgctgacgtcagggtcagctc

SEQ ID NO: 686213 - DNA, 120 bp, Artificial Sequence
  ENSG00000187634_20 (sequence is synthesized)
ccccgcggagctgacttcagcagcccacagctgtggggcttcagcagccacaccagcccagcccagcccagctctcgatacgtttggtctttcatgctgaaaaataaataataaagcctg

SEQ ID NO: 686214 - DNA, 120 bp, Artificial Sequence
  ENSG00000187634_21 (sequence is synthesized)
tgggatcgatgcgggcggccgcgccggctgggctctgcgggctggcacccggcccggggcgggacccacctccgctttcggatctcctgagggtccggcaggaggtggcggctgcagctc

SEQ ID NO: 686215 - DNA, 80 bp, Artificial Sequence
  ENSG00000187634_22 (sequence is synthesized)
gcgggtgcacgactgacgcggcccgggcggcggggcgggggcttgggacccccgagaggggcggggactccgcgactcct

SEQ ID NO: 686216 - DNA, 80 bp, Artificial Sequence
  ENSG00000187634_23 (sequence is synthesized)
ggactccgcgactcctcgctgccgggctcggcctggcgggtgggtcggcgagccgggcgtgggactgccccgggcgcggg

SEQ ID NO: 686217 - DNA, 120 bp, Artificial Sequence
  ENSG00000187634_24 (sequence is synthesized)
tggaactgcggcgctcggcgagtcgatccgggatcgatagcagctccatgtctccggcctctgaggccccgccggccggctgggcagtccggggaggcctggcgggcggcgcgtaggcgg

SEQ ID NO: 686218 - DNA, 80 bp, Artificial Sequence
  ENSG00000187634_25 (sequence is synthesized)
gcgcggccaggcgcctccccggcccccgcgacccaactccagcccgggccggaataagttgctgccgccggcggagagcg

SEQ ID NO: 686219 - DNA, 120 bp, Artificial Sequence
  ENSG00000187634_26 (sequence is synthesized)
gggctgcggagccaccggggcgccatgccggcggtcaagaaggagttcccgggccgcgaggacctggccctggctctggccacgttccacccgaccctggccgcgctgccgctgccgccg

SEQ ID NO: 686220 - DNA, 80 bp, Artificial Sequence
  ENSG00000187634_27 (sequence is synthesized)
gccgcctcgctgcccgcctcggccgccggttacgaggctctgctggccccgccgctccgccccccgcgcgcctacctcag

SEQ ID NO: 686221 - DNA, 120 bp, Artificial Sequence
  ENSG00000187634_28 (sequence is synthesized)
gccgccccgcacctccacctgcccagggacccgctggccctcgagcgcttctcggccaccgcggccgcggccccggatttccagccgctgctggacaacggcgagccgtgcatcgaggtg

SEQ ID NO: 686222 - DNA, 120 bp, Artificial Sequence
  ENSG00000187634_29 (sequence is synthesized)
gagtgcggcgccaaccgcgcgctgctctacgtgcgcaaactctgccagggcagcaagggcccgtccatccgccaccgcggcgagtggctcacgcccaacgagttccagttcgtcagcggc

SEQ ID NO: 686223 - DNA, 120 bp, Artificial Sequence
  ENSG00000187634_30 (sequence is synthesized)
tggggcccgccctcaagatccgggcccaggtgagacgctggggagtgaggtcagggtctccagaccacagctgggcagaaagctctgggtgggtgtgcgacagcccccaccaggccatct

SEQ ID NO: 686224 - DNA, 120 bp, Artificial Sequence
  ENSG00000187634_31 (sequence is synthesized)
gccgcagaatgcccctcacgtcgccctgggcccccatctcaggccccccttcctgggggtgccctcggctctgtgccagaccccaggtgaggaggcgggtgcgcatcccctgggagcccg

SEQ ID NO: 686225 - DNA, 120 bp, Artificial Sequence
  ENSG00000187634_32 (sequence is synthesized)
cgtggaggctcgcggacccggccctgcccctgtcggagccgagacggaccgggtaggggattgcaaagggccggctcggaccgcctcggaccccccgaccccgcgttgtccccctcccca

SEQ ID NO: 686226 - DNA, 120 bp, Artificial Sequence
  ENSG00000187642_0 (sequence is synthesized)
atggaaaatttccagtacagcgtccagctgagtgaccaggactgggccgagttctcagccaccgccgatgagtgtggcctcctgcaggccggcctggcctctggggacgagctcttgtcc

SEQ ID NO: 686227 - DNA, 120 bp, Artificial Sequence
  ENSG00000187642_1 (sequence is synthesized)
agtgacattgaccaaggggacagcagtggcagcagtccccccagggccccacctctcccaactgggcagctagctgcaggagggcggagccggcggggctgcgaggaggaggacgtggcc

SEQ ID NO: 686228 - DNA, 120 bp, Artificial Sequence
  ENSG00000187642_2 (sequence is synthesized)
acacagcagccggtcagcaggtctcagggtgagcctgtcttggccctggggaccggtcagcagacacccagcacgtccgcacgggcagaagctccaccgtccctcggccccggcgccagc

SEQ ID NO: 686229 - DNA, 120 bp, Artificial Sequence
  ENSG00000187642_3 (sequence is synthesized)
cctcccagccagttctcatcctgccctggtccggcgtcttctggagaccagatgcagaggcttctgcagggccctgccccacggccccctggtgagccccctgggagtcccaagtcccct

SEQ ID NO: 686230 - DNA, 120 bp, Artificial Sequence
  ENSG00000187642_4 (sequence is synthesized)
ggccacagcactggctcccagaggccccccgatagccctggagccccaccacggagccccagccgaaagaagaggcgagctgtgggtgccaaggggggtgggcacacaggagcctctgct

SEQ ID NO: 686231 - DNA, 120 bp, Artificial Sequence
  ENSG00000187642_5 (sequence is synthesized)
tctgcccagacgggctccccgctgctccctgcggccagtcctgagacggcaaagctgatggccaaagccgggcaggaggagttggggccaggtcctgcaggagctcctgagcctggcccc

SEQ ID NO: 686232 - DNA, 120 bp, Artificial Sequence
  ENSG00000187642_6 (sequence is synthesized)
aggtcccctgtgcaggaagacagaccagggccaggtttgggcctgtctacacctgtccctgtgacagagcaaggcacagaccaaatcagaaccccgcgccgagccaagctgcacacagtg

SEQ ID NO: 686233 - DNA, 120 bp, Artificial Sequence
  ENSG00000187642_7 (sequence is synthesized)
tccacgactgtctgggaagccctcccagatgtctcaagggctaagtcagacatggctgtgtctacacctgcctccgagccgcaacctgacagggacatggctgtgtctacacctgcctcc

SEQ ID NO: 686234 - DNA, 120 bp, Artificial Sequence
  ENSG00000187642_8 (sequence is synthesized)
gagccgcaatctgacagggacatggctgtgtctacacctgcctctgagccgcaacctgacacggacatggctgtgtctacacctgcctctgagccgcaacctgacagggacatggctgtg

SEQ ID NO: 686235 - DNA, 120 bp, Artificial Sequence
  ENSG00000187642_9 (sequence is synthesized)
tctatacctgcctccaagccgcaatctgacacggctgtgtctacaccagcttctgagcctcagtccagtgtggctctgtctacacccatctccaagccacaattggacacggacgtggct

SEQ ID NO: 686236 - DNA, 120 bp, Artificial Sequence
  ENSG00000187642_10 (sequence is synthesized)
gtgtccacacctgcctccaaacatggcctggatgtggccttgcctacagcaggcccagtggctaagctagaggtggcttcatctccacctgtctcggaggctgtgccgaggatgaccgag

SEQ ID NO: 686237 - DNA, 120 bp, Artificial Sequence
  ENSG00000187642_11 (sequence is synthesized)
tccagcgggcttgtgtctacacctgttcccagagccgacgccgctggcctcgcctggcctcccacccgcagagctgggcctgatgtggtggagatggaggcggttgtgtctgagccctca

SEQ ID NO: 686238 - DNA, 120 bp, Artificial Sequence
  ENSG00000187642_12 (sequence is synthesized)
gcaggggcccccggatgctgctctggggcacccgcactgggtctcacccaagtccccaggaagaagaaagtgcgcttctccgtggctgggcccagccccaataagccaggctcaggacag

SEQ ID NO: 686239 - DNA, 120 bp, Artificial Sequence
  ENSG00000187642_13 (sequence is synthesized)
ggatcctcaagcacctgcctcgcccccctccctctgccgtgacgagggtcgggcccgggagcagctttgccgtgaccctcccggaggcctacgagttcttcttctgtgacaccatcgagg

SEQ ID NO: 686240 - DNA, 120 bp, Artificial Sequence
  ENSG00000187642_14 (sequence is synthesized)
agaacgaagaggctgaggcggcagcggccggtcaggatccggcaggcgtccagtggccggacatgtgcgagttcttcttcccagacgttggagcccagaggtcgaggcggcgggggtccc

SEQ ID NO: 686241 - DNA, 120 bp, Artificial Sequence
  ENSG00000187642_15 (sequence is synthesized)
cggagccgctcccgagagctgatcctgtgccggcccccatacctggagaccccgtgcccatctccatccctgaggtctatgaacacttcttcttcggggaggacaggcttgagggcgtgc

SEQ ID NO: 686242 - DNA, 120 bp, Artificial Sequence
  ENSG00000187642_16 (sequence is synthesized)
tggggccggctgtcccgctcccactgcaggccctggagcctccccggtcggcctccgagggggcggggcctgggacccccctcaagccagccgtggtagagcggctccacctggctctta

SEQ ID NO: 686243 - DNA, 120 bp, Artificial Sequence
  ENSG00000187642_17 (sequence is synthesized)
gacgggcaggggagctccgggggcctgtcccatcatttgccttcagccagaatgacatgtgcctggtgtttgtagcttttgccacctgggctgtgaggacgtcagatccgcataccccag

SEQ ID NO: 686244 - DNA, 120 bp, Artificial Sequence
  ENSG00000187642_18 (sequence is synthesized)
acgcctggaaaacagccttgctggccaacgtcggcaccatctctgccatccgctacttccgccggcaggtggggcaagggcgccgcagccacagccccagccccagctcctaggagccag

SEQ ID NO: 686245 - DNA, 120 bp, Artificial Sequence
  ENSG00000187642_19 (sequence is synthesized)
gcccgggccagggagatgcaggatgaggagacgaccacaggcgcccagggcaggacgaggtgccgccctcgcccgggccctctgacccctctcttctaccgcgtccaggaggggggcgtg

SEQ ID NO: 686246 - DNA, 120 bp, Artificial Sequence
  ENSG00000187642_20 (sequence is synthesized)
tcctggtgctgctccctccgactcacctgaggatccagccagtgaccacggccactccccacgcctgggagggaggtgctaaagtctgggtgggtggagggcaggcaggtggctgggtag

SEQ ID NO: 686247 - DNA, 120 bp, Artificial Sequence
  ENSG00000187642_21 (sequence is synthesized)
gagggtggccagattcacagatgagaacacagggcattcggttaatttcagacaggcaatagtggggaggtcattttactaagaagttgttgtttatctgaaatcaaatgcaaccgcacc

SEQ ID NO: 686248 - DNA, 120 bp, Artificial Sequence
  ENSG00000187642_22 (sequence is synthesized)
ctgcgtttcttctggggtgcagggggagctgagtggcaggacaggacttggacctcggaggggtctgagcagcaagacactccggctggagctctgggcagaggcaggggagaggacaca

SEQ ID NO: 686249 - DNA, 120 bp, Artificial Sequence
  ENSG00000187642_23 (sequence is synthesized)
gggtggcctcaaagaggggatgggcagcctcctcacaggtgggctgggctggcaagggctccaaggcccatcactcttgatcctcaaaggactgtggccaaggcctctgcgggctctggc

SEQ ID NO: 686250 - DNA, 120 bp, Artificial Sequence
  ENSG00000187642_24 (sequence is synthesized)
ctgagacagcgaaggctctgcctgcccctccccagtgcagcagcccctgcagggtgggggtctgtggcagagccgcgagcccctccccgggagccctgggtgcaggtgcagagggagaat

SEQ ID NO: 686251 - DNA, 120 bp, Artificial Sequence
  ENSG00000187642_25 (sequence is synthesized)
tcggtggcctcagatggagggctgggctcctggggttgtcccgggggctcctgtggggcagctggggacccacagccaagaggagtcagagatgaggtgggaaggtcggtgaggggcccg

SEQ ID NO: 686252 - DNA, 120 bp, Artificial Sequence
  ENSG00000187642_26 (sequence is synthesized)
aggtggcagaggaagggggctgcctggctgggtgctgggtgggggtcctcaagactgtgggagaccctggctgctgagcagagaacacatggatgcagcaccaataaaattctatctttt

SEQ ID NO: 686253 - DNA, 120 bp, Artificial Sequence
  ENSG00000187650_0 (sequence is synthesized)
ctgtacagcagcctgggccatgtcggcgccgccggccctgcagatccgggaggcaaacgcacacctggcagccgtgcaccggcgcgcagcggagctggaggcgcggctggacgcggcgga

SEQ ID NO: 686254 - DNA, 120 bp, Artificial Sequence
  ENSG00000187650_1 (sequence is synthesized)
gcgcacggtgcacgcccaagccgagcgcctggccctccacgaccagcagctgcgcgccgccctagacgaactgggtcgcgccaaggaccgtgagattgccacactccaggagcagctgat

SEQ ID NO: 686255 - DNA, 120 bp, Artificial Sequence
  ENSG00000187650_2 (sequence is synthesized)
gacctcagaagccactgtccacagcctgcaggccaccgtgcaccagagggacgagctcattaggcagttgcagccccgggctgagctgctgcaggacatctgccgccgccggccacccct

SEQ ID NO: 686256 - DNA, 120 bp, Artificial Sequence
  ENSG00000187650_3 (sequence is synthesized)
ggctgggctgctggatgccctggctgaggctgagcgcctggggcccctgccggccagtgaccccggccacccaccccccggtgggcctggtccaccccttgacaacagcactggggaaga

SEQ ID NO: 686257 - DNA, 120 bp, Artificial Sequence
  ENSG00000187650_4 (sequence is synthesized)
ggcggacagggaccacctccagcctgcagtgtttgggaccacagtgtgagcccggaatgcagattacagaatggagacagaaagccactgctgtcagtgtccttgggagtcaccagcacc

SEQ ID NO: 686258 - DNA, 120 bp, Artificial Sequence
  ENSG00000187650_5 (sequence is synthesized)
ctgcagggggaccctacggcagagccaaagtcctgtctaagcatcagaacaggctgaacagtcaaaaagttttcaaataggcccacaggccaggtgcagacgtttaacccagacagaagt

SEQ ID NO: 686259 - DNA, 120 bp, Artificial Sequence
  ENSG00000187650_6 (sequence is synthesized)
gttcttgtttgtttttaagctttgaatcagtcacccttgctaaaaacctggcaatgcaaacacaaagatctggatttctggcaagacttggccaagcttgcctggagttcagggcaccct

SEQ ID NO: 686260 - DNA, 120 bp, Artificial Sequence
  ENSG00000187650_7 (sequence is synthesized)
ctttagccagggtgtgagtttctgttttttgtttttttttttttaagacagagtcccactctgtcgccctggctggggtgcagtggtgcgattttggctaactgcaacctccgcctccca

SEQ ID NO: 686261 - DNA, 80 bp, Artificial Sequence
  ENSG00000187650_8 (sequence is synthesized)
tctcctgtctcatccttatattttatatttttggtagagaccggggaggggagggggtttcaccatgttgaccaggctgg

SEQ ID NO: 686262 - DNA, 120 bp, Artificial Sequence
  ENSG00000187650_9 (sequence is synthesized)
gccaccgcgcccggccctagcctagcttttgtagcatgcaactgtctcctttttatacgccctaaagaatatatttttgaactccttgtttctgcgctgtccttcttagcccaggacatt

SEQ ID NO: 686263 - DNA, 120 bp, Artificial Sequence
  ENSG00000187650_10 (sequence is synthesized)
cagggtgctttgcttgttgtcaaaccagggaaaggagaaaactcctgtgcctttctgggccagcctgtcaccctggcctggtcggcagccattcccctacctcctcactcaggaactgtc

SEQ ID NO: 686264 - DNA, 120 bp, Artificial Sequence
  ENSG00000187650_11 (sequence is synthesized)
acaccaggaaccggcgaggggcacagcctgtttcagaccagaaaggtcggaggccacccacggccttcaggatggcgcccgcctgcctgcctggcaacagtgacccctcagtgcagtaac

SEQ ID NO: 686265 - DNA, 120 bp, Artificial Sequence
  ENSG00000187650_12 (sequence is synthesized)
aatgggcccattttctcctctggatgaacaaggaggggggttgtttgtacaaaggaaaggcaggctggggcctgtctgtgctcaagaataaaccggatgatttcctggcctgggggcaag

SEQ ID NO: 686266 - DNA, 120 bp, Artificial Sequence
  ENSG00000187650_13 (sequence is synthesized)
agggaggccctctgtgttatttgtgcctcctggtagggtcctgctgggccaggtagaatctagggagtgtaggccaagcactctctacagcgattgcatctaatcttcgagtttccctgt

SEQ ID NO: 686267 - DNA, 85 bp, Artificial Sequence
  ENSG00000187650_14 (sequence is synthesized)
ctctctacagcgattgcatctaatcttcgagtttccctgtagacacaggctttgtcctcattttacagctgtggaaagtgaggcc

SEQ ID NO: 686268 - DNA, 76 bp, Artificial Sequence
  ENSG00000187650_15 (sequence is synthesized)
agtgagactcagtctcaaagaggcccagaggtgtgaagggaacacactccgggtctggagggccagggccacttcc

SEQ ID NO: 686269 - DNA, 120 bp, Artificial Sequence
  ENSG00000187650_16 (sequence is synthesized)
agggaacacactccgggtctggagggccagggccacttccaattctgggggaagttattgctgaaattctgttttctttctttctttcttttttttttaaagagacaaagtctcactgtt

SEQ ID NO: 686270 - DNA, 120 bp, Artificial Sequence
  ENSG00000187658_0 (sequence is synthesized)
actccgcgtcagcgcgcgcccacctaggtgggctggcaaccagccaccagtttccaactctttctccaacagggaagccgcaatgacacagccgactaggccctcggtcacctgtgacca

SEQ ID NO: 686271 - DNA, 120 bp, Artificial Sequence
  ENSG00000187658_1 (sequence is synthesized)
gggatcctccacgatcggcgggaccgccgcccaggcgaccaccagttccagcgccacctcgggttcgaactaccagcgcgatagactcggccgccgcccagaaatcggcgtagggggtca

SEQ ID NO: 686272 - DNA, 120 bp, Artificial Sequence
  ENSG00000187658_2 (sequence is synthesized)
gccgcagatctgctttccgcggccgaggtccgcgcagcagccggtgctgttcagcttaatgaattccagtgaagcagcgatgaaaaaaactttacccaagagccatttatctcgggtgat

SEQ ID NO: 686273 - DNA, 120 bp, Artificial Sequence
  ENSG00000187658_3 (sequence is synthesized)
attcatgataaccgcatcacacaacgaatctatgagatggaggtgagcgctttagagaagaccaagaaaaagatcagccactactatgaacacctgaaaaaaaagttcatgacagagcag

SEQ ID NO: 686274 - DNA, 120 bp, Artificial Sequence
  ENSG00000187658_4 (sequence is synthesized)
ctcagaaagctcgggcgatggagagaggaatccgtgaacagcaaccggtacttaaccttcgggataccaccaccagtttaaactccagtctcccaagaaaggccaaccaccctagttctg

SEQ ID NO: 686275 - DNA, 120 bp, Artificial Sequence
  ENSG00000187658_5 (sequence is synthesized)
gcaaagggatctgccccagggtcacgatgacaccagtgtgacccgaggagaactagtaactacaacctacacaactgtagaacaataaacagaaaccagcagacagcggagcataataaa

SEQ ID NO: 686276 - DNA, 80 bp, Artificial Sequence
  ENSG00000187664_0 (sequence is synthesized)
agtcttaaccgggtgtgcggggagcgcagtccgggtgcgtaggggccgctcggcgggggccgcgcgggcaagatggtgtg

SEQ ID NO: 686277 - DNA, 120 bp, Artificial Sequence
  ENSG00000187664_1 (sequence is synthesized)
gcctggggcgtcctgctgctcacagcccctgcgggggcgcagcgtggccggaagaaggtcgtgcacgtgctggagggtgagtcgggctcggtagtggtacagacagcgcctgggcaggtg

SEQ ID NO: 686278 - DNA, 120 bp, Artificial Sequence
  ENSG00000187664_2 (sequence is synthesized)
gtaagccaccgtggtggcaccatcgtcttgccctgccgctaccactatgaggcagccgcccacggtcacgacggcgtccggctcaagtggacaaaggtggtggacccgctggccttcacc

SEQ ID NO: 686279 - DNA, 120 bp, Artificial Sequence
  ENSG00000187664_3 (sequence is synthesized)
gacgtcttcgtggcactaggcccccagcaccgggcattcggcagctaccgtgggcgggctgagctgcagggcgacgggcctggggatgcctccctggtcctccgcaacgtcacgctgcaa

SEQ ID NO: 686280 - DNA, 120 bp, Artificial Sequence
  ENSG00000187664_4 (sequence is synthesized)
gactacgggcgctatgagtgcgaagtcaccaatgagctggaagatgacgctggcatggtcaagctggacctggaaggcgtggtctttccctaccacccccgtggaggccgatacaagctg

SEQ ID NO: 686281 - DNA, 120 bp, Artificial Sequence
  ENSG00000187664_5 (sequence is synthesized)
accttcgcggaggcgcagcgcgcgtgcgccgagcaggacggcatcctggcatctgcagaacagctgcacgcggcctggcgcgacggcctggactggtgcaacgcgggctggttgcgcgac

SEQ ID NO: 686282 - DNA, 120 bp, Artificial Sequence
  ENSG00000187664_6 (sequence is synthesized)
ggctcagtgcaataccccgtgaaccggccccgggagccctgcggcggcctgggggggaccgggagtgcagggggcggcggtgatgccaacgggggcctgcgcaactacgggtatcgccat

SEQ ID NO: 686283 - DNA, 120 bp, Artificial Sequence
  ENSG00000187664_7 (sequence is synthesized)
aacgccgaggaacgctacgacgccttctgcttcacgtccaacctgccggggcgcgtgttcttcctgaagccgctgcgacctgtacccttctccggagctgcgcgcgcgtgtgctgcgcgt

SEQ ID NO: 686284 - DNA, 120 bp, Artificial Sequence
  ENSG00000187664_8 (sequence is synthesized)
ggcgcggccgtggccaaggtggggcagctgttcgccgcgtggaagctgcagctgctagaccgctgcaccgcgggttggctggccgatggcagtgcgcgctaccccatcgtgaacccgcga

SEQ ID NO: 686285 - DNA, 120 bp, Artificial Sequence
  ENSG00000187664_9 (sequence is synthesized)
gcgcgctgcggaggccgcaggcctggtgtgcgcagcctcggcttcccggacgccacccgacggctcttcggcgtctactgctaccgcgctccaggagcaccggacccggcacctggcggc

SEQ ID NO: 686286 - DNA, 120 bp, Artificial Sequence
  ENSG00000187664_10 (sequence is synthesized)
tggggctggggctgggcgggcggcggcggctgggcagggggcgcgcgcgatcctgctgcctggacccctctgcacgtctaggctgggagtaggcggacagccagggcgcttgaccactgg

SEQ ID NO: 686287 - DNA, 120 bp, Artificial Sequence
  ENSG00000187664_11 (sequence is synthesized)
tctagagccctgtggtcccctggagcctggccacgcccttgaagccctggacactggccacattccctgtggtcccttacaaactaactgtgcccctggggtccctgaagactggctagt

SEQ ID NO: 686288 - DNA, 120 bp, Artificial Sequence
  ENSG00000187664_12 (sequence is synthesized)
cctggcagaacagtactttggagttccctggagcctggccagccctcacctcttctggatagaggattcccccaactccccaactttctccatgagggtcacgccccctgaggacctcag

SEQ ID NO: 686289 - DNA, 120 bp, Artificial Sequence
  ENSG00000187664_13 (sequence is synthesized)
gaggccagcagaacccgcaggctcctgaagactggccacgcctcctgagaccacttggaaacagaccaactgcccccgtggtcgcctggtggctggacccccgggattgactagagaccg

SEQ ID NO: 686290 - DNA, 120 bp, Artificial Sequence
  ENSG00000187664_14 (sequence is synthesized)
gccgtacaccttctgcatctcactggagactgaacactagtcccttgcggtcacgtgggacactgggcgcctcctcctccccctcctcctcacctggagagactacaggaacttcagggt

SEQ ID NO: 686291 - DNA, 120 bp, Artificial Sequence
  ENSG00000187664_15 (sequence is synthesized)
cactccccgtggtcacatggaggttgtgggccgaggcgcttattttcccttatggtgacctgagtcctggagactcccattctccccctctccctgagagtcccctgcagtttctgggta

SEQ ID NO: 686292 - DNA, 120 bp, Artificial Sequence
  ENSG00000187664_16 (sequence is synthesized)
acagggcacacccctctagtttcatgggcgagcacccccatctgccacctcagactgacacacagccagctggctcacttactgggggccacgtcccacccctcagatatttctttgaag

SEQ ID NO: 686293 - DNA, 120 bp, Artificial Sequence
  ENSG00000187664_17 (sequence is synthesized)
ggagagcaaacccaccctgtcctctgacgtccctttcccaactgtcaccaaacagaccatcttcccaggcctggggaccggtaagatccatgtcactagttatgcagagcagttgccttg

SEQ ID NO: 686294 - DNA, 120 bp, Artificial Sequence
  ENSG00000187664_18 (sequence is synthesized)
ccagtcctgctgctacctgtcacctagagtcacacaccccttccctcatcaggcacacccatgaagacagtgcctccctcctccagctgtaaccatggataccacacatttctcatctca

SEQ ID NO: 686295 - DNA, 120 bp, Artificial Sequence
  ENSG00000187664_19 (sequence is synthesized)
ttggcccccaccccagagacctccacctcaacttctggctgtccctaccctgactcaccgccatggagatcaccctccccgaagctgtcgccagggtgacccaacatccagttctccggc

SEQ ID NO: 686296 - DNA, 120 bp, Artificial Sequence
  ENSG00000187664_20 (sequence is synthesized)
tctcaccatggaaacaaactgtccctgtccccaggcccactccagttccagaccaccctccatgctccacccccaggcggtttggaccccaccactgttgccatggtgaccaaactctgg

SEQ ID NO: 686297 - DNA, 120 bp, Artificial Sequence
  ENSG00000187664_21 (sequence is synthesized)
agtccgaggtaacagaacacctgtccccctaggcttttccttgtggacaacggggccctgttcaccaagctgttgccatagagactgtcaacgttgtcctcatgacaaccagacttccag

SEQ ID NO: 686298 - DNA, 120 bp, Artificial Sequence
  ENSG00000187664_22 (sequence is synthesized)
ttctcaggaacttctcattgtgggccagaagtcctgggtgcctcctactagggctaccctactgcaccccatcaggggcctgatggctgccccttccccagacagggctggacttctgga

SEQ ID NO: 686299 - DNA, 120 bp, Artificial Sequence
  ENSG00000187664_23 (sequence is synthesized)
gctgctaagccaccctccgtttgcacgttaactctatgccggatagcagctgtgcacgagacaatcttgcaacacccgggcatgtttgtcgtcgtcctacaaatgaggaaaccgagccta

SEQ ID NO: 686300 - DNA, 120 bp, Artificial Sequence
  ENSG00000187664_24 (sequence is synthesized)
tggcgtgccctggtctgttgagatatgcaagcactgagctcctcttttgtcctctgagaccccatctccattctcacccagttcctctctccttccctgacccccacccacatttccctc

SEQ ID NO: 686301 - DNA, 120 bp, Artificial Sequence
  ENSG00000187664_25 (sequence is synthesized)
cttagagatccaggagggatggaatgttctttaaaattcaacacccaccaggctctaagcggcgatctgtgctaagaggtcaggacccagccgaagtcctcggcgttgacaggcagctgg

SEQ ID NO: 686302 - DNA, 120 bp, Artificial Sequence
  ENSG00000187664_26 (sequence is synthesized)
ggggacatgatccatggacaaggccatcccggccgtgggagaccccagtcccgaagtcttgcctgcaggagtactggggtccccctggggccctctttactgtcacgtcatctctaggaa

SEQ ID NO: 686303 - DNA, 120 bp, Artificial Sequence
  ENSG00000187664_27 (sequence is synthesized)
acctatctctgagttttgggaccaggtcggtttgggtttgaattctgcctcttcttgctcactgtgtgaccaagtgacaaactccttctgaacctgtgttctcccactgtaccagggctg

SEQ ID NO: 686304 - DNA, 120 bp, Artificial Sequence
  ENSG00000187664_28 (sequence is synthesized)
ttctgtggtccccgtgagtgccaagcatacagtaggggctcaataaatccttgtttcttttgatgaatgagaaaatgaggcagccagtgggtaattcctgtataaatgcactttggtaga

SEQ ID NO: 686305 - DNA, 120 bp, Artificial Sequence
  ENSG00000187664_29 (sequence is synthesized)
tataaatgcactttggtagataagatgttacaagcttggggggcttggggttttttttgttttgtttttttgagatggagtcctgccctgtcgcccaggctggagtgcagtcgtgcaatc

SEQ ID NO: 686306 - DNA, 76 bp, Artificial Sequence
  ENSG00000187664_30 (sequence is synthesized)
cgcctggccgggcttgatttttattctctttggaagtggggtccttcattcctcccccacctccccaatctcttgc

SEQ ID NO: 686307 - DNA, 120 bp, Artificial Sequence
  ENSG00000187664_31 (sequence is synthesized)
tggggtccttcattcctcccccacctccccaatctcttgctcctctttcttcccccatcctgtgcccactgtctccctttagccacccaccatgggtctgctccttgtcaactctgtcct

SEQ ID NO: 686308 - DNA, 120 bp, Artificial Sequence
  ENSG00000187664_32 (sequence is synthesized)
gactgggtcattgacaagatccagggcatgaaattcgggaaactggaaggggggttcctgtaccaggaagggagagacattacaaactttccctgacatgaatatgtgggctgagggcag

SEQ ID NO: 686309 - DNA, 120 bp, Artificial Sequence
  ENSG00000187664_33 (sequence is synthesized)
gggctgaggaagcactggaagtttctaggatacaacaaagcatgaagagaaaaaatagtgtaaggtcctgaccgtgcacagtggatcatgcctataatcccagcactttaagagaccaag

SEQ ID NO: 686310 - DNA, 79 bp, Artificial Sequence
  ENSG00000187664_34 (sequence is synthesized)
gtggatcatgcctataatcccagcactttaagagaccaaggtgggaggattgcttgagccagaaggtttgggcgacgga

SEQ ID NO: 686311 - DNA, 120 bp, Artificial Sequence
  ENSG00000187664_35 (sequence is synthesized)
ggtggggacatgggcgtgagagaggtcctcgctgtggggaaggcaggcccgggagggagccaggcctccgaaaagccaaggctgggaggctggactgagcgccccgtgcccgccccccag

SEQ ID NO: 686312 - DNA, 120 bp, Artificial Sequence
  ENSG00000187672_0 (sequence is synthesized)
gcgcctggccctggccctccgagcagtgtcctcctccttcccttctttcctccctccctgttccccgccccgcttctcctcctcttcctccgcctcccgctcctgctcgctcggtctccg

SEQ ID NO: 686313 - DNA, 120 bp, Artificial Sequence
  ENSG00000187672_1 (sequence is synthesized)
gctccggcgccggctcctgctcctcctggccgcccggggccaaggcgacgagaggttgtaaaaatccatgtgggacggccccggggcgagcatcggaaagatctctgagtggagttattt

SEQ ID NO: 686314 - DNA, 120 bp, Artificial Sequence
  ENSG00000187672_2 (sequence is synthesized)
tctggtacggactgtgaaaagaatgcggtgaaaattctggacaatcgtggaaatattagctcaaaccccaacttaatatagcatttcttctcttcagtaacacctcataatacaagaaaa

SEQ ID NO: 686315 - DNA, 120 bp, Artificial Sequence
  ENSG00000187672_3 (sequence is synthesized)
atgtatggaagtgcaagaacaatcaccaatctggaaggtagcccttccagatcccctcgtttgccaaggtctcctcgtttgggccaccgaagaacaagtagtgggggaggtggaggaaca

SEQ ID NO: 686316 - DNA, 120 bp, Artificial Sequence
  ENSG00000187672_4 (sequence is synthesized)
ggcaagactctgtctatggagaatatccagtccctcaatgcagcctatgctacgtctggacccatgtatctgagtgatcatgaaggggtggcttcaacaacctacccaaagggcactatg

SEQ ID NO: 686317 - DNA, 120 bp, Artificial Sequence
  ENSG00000187672_5 (sequence is synthesized)
actctgggaagggctacaaatcgagctgtatatggaggccgtgtcacagccatggggagtagtcccaatattgcttctgctggactttcccacacagatgtcctttcatacacagatcaa

SEQ ID NO: 686318 - DNA, 120 bp, Artificial Sequence
  ENSG00000187672_6 (sequence is synthesized)
catggtgggctgactggctcatcccatcatcaccaccaccaggtcccctccatgttgaggcaggtaagagacagcacaatgttagatcttcaggcccagctgaaagaactgcagagagag

SEQ ID NO: 686319 - DNA, 120 bp, Artificial Sequence
  ENSG00000187672_7 (sequence is synthesized)
aatgacctcctccggaaagagctagacatcaaggacagcaaattgggatcttccatgaacagtattaagactttctggagtcctgagcttaagaaggagagagtcttgaggaaagaagag

SEQ ID NO: 686320 - DNA, 120 bp, Artificial Sequence
  ENSG00000187672_8 (sequence is synthesized)
gcagcgcggatgtctgtcctcaaggagcagatgagggtttcccatgaagaaaatcagcacctacagttgacaatccaggcccttcaagatgagctgcgaacccagagagacctcaaccac

SEQ ID NO: 686321 - DNA, 120 bp, Artificial Sequence
  ENSG00000187672_9 (sequence is synthesized)
ctcctccagcaagagagtggcaaccgaggagcggagcacttcaccatcgagctgaccgaggagaactttaggcggctccaagccgagcatgacaggcaggctaaggagctgttccttttg

SEQ ID NO: 686322 - DNA, 120 bp, Artificial Sequence
  ENSG00000187672_10 (sequence is synthesized)
aggaagacattagaggaaatggagctgagaattgaaacgcagaaacaaaccctcaatgcccgagatgagtcaattaaaaaacttcttgagatgttgcaaagtaaaggcttgccatccaaa

SEQ ID NO: 686323 - DNA, 120 bp, Artificial Sequence
  ENSG00000187672_11 (sequence is synthesized)
agcctggaggatgacaatgagcgaacgcggcggatggcagaggctgagtctcaggtcagccacttggaagtgattttagatcagaaagagaaggaaaacatacatcttagagaggaattg

SEQ ID NO: 686324 - DNA, 120 bp, Artificial Sequence
  ENSG00000187672_12 (sequence is synthesized)
caccgaagaagccaacttcagccggagccagccaagacgaaggctctccagactgtcatcgaaatgaaggacacaaaaatcgcttcattggaacgaaacataagggatcttgaggatgag

SEQ ID NO: 686325 - DNA, 120 bp, Artificial Sequence
  ENSG00000187672_13 (sequence is synthesized)
atccagatgttaaaagccaatggtgtgctgaacactgaggaccgcgaagaagagatcaaacaaattgaggtttacaaaagtcactccaagtttatgaagaccaagattgatcagctgaag

SEQ ID NO: 686326 - DNA, 120 bp, Artificial Sequence
  ENSG00000187672_14 (sequence is synthesized)
caggaactttcaaagaaagagtcggaacttcttgccttacaaacaaagcttgaaaccctcagcaatcaaaattcagattgcaagcaacacattgaagtgctcaaagagtcacttactgcc

SEQ ID NO: 686327 - DNA, 120 bp, Artificial Sequence
  ENSG00000187672_15 (sequence is synthesized)
aaagaacagagggctgccatccttcagactgaggtagatgcgctgagattacgactggaagaaaaagaatctttcctcaataaaaaaacaaaacagctacaggacctcacagaagagaag

SEQ ID NO: 686328 - DNA, 120 bp, Artificial Sequence
  ENSG00000187672_16 (sequence is synthesized)
gggacactggccggtgaaattcgtgacatgaaagatatgttagaagtgaaggaaagaaaaatcaatgttcttcagaaaaagattgaaaacttgcaagaacaacttagggataaagacaag

SEQ ID NO: 686329 - DNA, 120 bp, Artificial Sequence
  ENSG00000187672_17 (sequence is synthesized)
caactgaccaacctgaaagacagagtgaagtccttgcagacggattccagtaatacagatactgcactggcgacgctagaggaagctctgtcagagaaggagagaataattgagcgcttg

SEQ ID NO: 686330 - DNA, 120 bp, Artificial Sequence
  ENSG00000187672_18 (sequence is synthesized)
aaagaacagcgagaaagagatgatcgggaaagactagaagagatagaatccttccgaaaagagaacaaagacctgaaagagaaggtcaatgctttacaggctgaactgactgagaaagag

SEQ ID NO: 686331 - DNA, 120 bp, Artificial Sequence
  ENSG00000187672_19 (sequence is synthesized)
tctagtttaattgacctcaaagaacatgcatcttcattagcctctgcggggctgaaaagggattccaaattaaaatctctagaaatagccattgaacaaaagaaagaggaatgtagcaaa

SEQ ID NO: 686332 - DNA, 120 bp, Artificial Sequence
  ENSG00000187672_20 (sequence is synthesized)
ttggaagcacagttaaaaaaggcacataatattgaagatgactccaggatgaaccctgagtttgcagaccaaataaaacagctcgataaagaggcgtcttactaccgcgacgagtgtggc

SEQ ID NO: 686333 - DNA, 120 bp, Artificial Sequence
  ENSG00000187672_21 (sequence is synthesized)
aaggcccaagcggaagtggaccggttgctggagatcctcaaggaggtggagaatgagaagaatgacaaggacaagaagatcgcagaactggagagcttgactctcaggcatatgaaagat

SEQ ID NO: 686334 - DNA, 120 bp, Artificial Sequence
  ENSG00000187672_22 (sequence is synthesized)
cagaataagaaggtggccaacctcaagcacaatcaacagttggaaaagaagaaaaatgctcagttactagaagaagtgcgcaggcgagaagacagcatggctgacaactcacagcatttg

SEQ ID NO: 686335 - DNA, 120 bp, Artificial Sequence
  ENSG00000187672_23 (sequence is synthesized)
cagatagaggaactgatgaatgcactggagaagaccagacaggaactggatgccaccaaagcacgcctcgcctccacacaacagtccctggccgaaaaagaagcgcacttggccaacctc

SEQ ID NO: 686336 - DNA, 120 bp, Artificial Sequence
  ENSG00000187672_24 (sequence is synthesized)
cggattgagaggaggaaacagctggaggagatcctggagatgaaacaggaagcactacttgcagccatcagtgaaaaagatgcaaacattgccttgctggaattgtctgcctccaaaaag

SEQ ID NO: 686337 - DNA, 120 bp, Artificial Sequence
  ENSG00000187672_25 (sequence is synthesized)
tcaccattaccaccaccaccaccatcaccaccaccatcgatctcctgggaggtcgcaacattccaatcacaggccctctccggaccaggatgacgaggagggcatatgggcatagccggg

SEQ ID NO: 686338 - DNA, 120 bp, Artificial Sequence
  ENSG00000187672_26 (sequence is synthesized)
cctgtaaaccaaagttccagttttgttttgagggctattagaagggctgaataaagggaacatgcagctctgcagcaatattctgataatgtattgcagtgcggctcacatcactgtcca

SEQ ID NO: 686339 - DNA, 120 bp, Artificial Sequence
  ENSG00000187672_27 (sequence is synthesized)
ccaccacctggagcggctcatcagaactgaaggggagttttcacttaccttattgagcgtgattctgttctacttgatatttccttcaccacctcatgtcatttctcatggatttggtta

SEQ ID NO: 686340 - DNA, 120 bp, Artificial Sequence
  ENSG00000187672_28 (sequence is synthesized)
tgatggaaaggaagaatgcagaggaggagaaaagtgacagatcctccatttttgttgggatgcgggcattttgaatgtgatcatctttgctgaatgtcattatttgataacattttgttt

SEQ ID NO: 686341 - DNA, 120 bp, Artificial Sequence
  ENSG00000187672_29 (sequence is synthesized)
atgttacttaaacatcattggataaatttgaactccatgggattttatctgtggattcagcttctgttggacaactagcctcatctccagtatcctgctggttcactctaattggtcatt

SEQ ID NO: 686342 - DNA, 120 bp, Artificial Sequence
  ENSG00000187672_30 (sequence is synthesized)
cctaatgcattagattatcaaaaagtataaattcgctgtgagtgagtggtgttggcagtgtttgtataccatgatgcatggagtgtttgacgaagaaacaaaaaacaccaaaaattgcga

SEQ ID NO: 686343 - DNA, 120 bp, Artificial Sequence
  ENSG00000187672_31 (sequence is synthesized)
gcctttaccctcctctatttctttaatctgttgtttgaagaaccgcattttgagggtgtaaccagtagtcacctctgggccaggttggaaaagaaatcaattttttaaaccactaatgct

SEQ ID NO: 686344 - DNA, 120 bp, Artificial Sequence
  ENSG00000187672_32 (sequence is synthesized)
tgccaagaaatcgccttatgagaacatggtgtgtgtctctgacaatgcgtggcacatctaaattgatcattcataattttatctacccagtcatgtactggagagtggcaaaagtctgag

SEQ ID NO: 686345 - DNA, 120 bp, Artificial Sequence
  ENSG00000187672_33 (sequence is synthesized)
gcacctgcatatctctagtccctgtgttctgcacatccccacggtggggacgccaccaagcctcagactcttaccatcccggtgcatgcaggtctccatgaagaagctgggactcattca

SEQ ID NO: 686346 - DNA, 120 bp, Artificial Sequence
  ENSG00000187672_34 (sequence is synthesized)
catttcaagatccaaatgctgtgcaaacagtgtaagcttagattttctgtaaatgaagggtcatttctctttttttttttttttaaagaaaatgtgtctgcaacatggattccaaagcat

SEQ ID NO: 686347 - DNA, 120 bp, Artificial Sequence
  ENSG00000187672_35 (sequence is synthesized)
tttcagcatcaaacatgaaaacattgatgaatgaggaacaatcacaaaagctgtgtctctgtatatagctctacacaacatgtatgtggatacagtcattatttaaagcacatgccaggg

SEQ ID NO: 686348 - DNA, 120 bp, Artificial Sequence
  ENSG00000187672_36 (sequence is synthesized)
aaaaagaccaaattttgaggtcttttacatacagtgatatggtactaaggagaattaaactcctactgcttcctctgaatattaagaaacaatttaaattgttataacttcataaaactc

SEQ ID NO: 686349 - DNA, 120 bp, Artificial Sequence
  ENSG00000187672_37 (sequence is synthesized)
atgactgagtctggcaaacatgtgcaactcttgtattgctccattttcttgtcaatggaagaaacccttccacgtgtatgcaagtgggagatgaaaacctgcatttttaaaggacaaaca

SEQ ID NO: 686350 - DNA, 120 bp, Artificial Sequence
  ENSG00000187672_38 (sequence is synthesized)
gtgaatttaagcatgagtggccttaataaatatagttgtctttctttgctgctgtggaaaggattctaaacagatgtccctgaagtcttgcattgaatttagtcattattattacttttt

SEQ ID NO: 686351 - DNA, 120 bp, Artificial Sequence
  ENSG00000187672_39 (sequence is synthesized)
aaaatgttggtgcaattaactctggacctctcttgtgagccatagagatatttaaaagacaaacaccttatttgtcggggaagatgaaaccgtccctgagttgcaccattctttcttggt

SEQ ID NO: 686352 - DNA, 120 bp, Artificial Sequence
  ENSG00000187672_40 (sequence is synthesized)
gcattcgcggttaagatactcaagcaggtttcttgcttctggctttgttcttgtcatcagtaagtataacaaactatgtaatgcttatgtgttgcataaacaatccaaatgcattcatgt

SEQ ID NO: 686353 - DNA, 120 bp, Artificial Sequence
  ENSG00000187672_41 (sequence is synthesized)
tttaaaagtttgtcctttaactatcagagggatctaggtcttggttagagaagtaagcagagttctttgcaagcttatttagcacattttgacacaatgttgcactgaaaacccaggcca

SEQ ID NO: 686354 - DNA, 120 bp, Artificial Sequence
  ENSG00000187672_42 (sequence is synthesized)
caaatgtgtcccagtgaacagtttggatgtcctcaaagaagtggttctcactgcctcctacaaccaggtcttgacctgaactctgcaactgaatacttgaagtaggaagtaggaaatcca

SEQ ID NO: 686355 - DNA, 120 bp, Artificial Sequence
  ENSG00000187672_43 (sequence is synthesized)
gtagggaaaatagggtccttgaaacagaaaaaaaaaaccaacccatgtatagctagctatttctatgtatgtgccaattttgtcacagctcttgtttggagggatcattttctgcccaac

SEQ ID NO: 686356 - DNA, 120 bp, Artificial Sequence
  ENSG00000187672_44 (sequence is synthesized)
tttcattggttaaaatattactgatcttacctttatgaggtcgtataatttagtcccttaaaaattaaattctctctaacataacaacctttcccatttcgtgtaatattctctgatgtt

SEQ ID NO: 686357 - DNA, 120 bp, Artificial Sequence
  ENSG00000187672_45 (sequence is synthesized)
tgggggttaccaaaaatatccctttttcacatattaagaatagtctctgggtttacaacaaacactgtgatgttgggaagctatttcctttgcgcaaactttaacaggttttcttctaat

SEQ ID NO: 686358 - DNA, 120 bp, Artificial Sequence
  ENSG00000187672_46 (sequence is synthesized)
cataacatagttgaaaaaagaagtttgggctaacatttaggagaagttggtcttactttgtgcaaaagcaggcttgtgctttataccccatttgatttcgatgtacagtctcaattttgt

SEQ ID NO: 686359 - DNA, 120 bp, Artificial Sequence
  ENSG00000187672_47 (sequence is synthesized)
atttaatgatttttgtgtatccagtatgcacgttaacagcgtgtcaactttcatttgaaagtgggtttcaatttactttttaaacagtgtttatgacgagacctcagatgtgttgacgta

SEQ ID NO: 686360 - DNA, 120 bp, Artificial Sequence
  ENSG00000187672_48 (sequence is synthesized)
agctctatctgcaatgtttttgtgtagagtggcgattgaatgctgcccagggtcagtgtatctaattccccgagaccctcgtttgatagtgcttcttgtaatatttcttcaagtgagtgg

SEQ ID NO: 686361 - DNA, 120 bp, Artificial Sequence
  ENSG00000187672_49 (sequence is synthesized)
catgtgggttgtgatattgaccatgtgattatggacatcgatatgaaaaataaataaataaaactaaggaaccctggaaactaccagtgggcatgtattagccagtcattgtaacctcgt

SEQ ID NO: 686362 - DNA, 120 bp, Artificial Sequence
  ENSG00000187672_50 (sequence is synthesized)
gtctagtagaacaatgtacaaggtatgtacagttcataaatttgttgtcatgtgtatgagaagtactttgtgctgatcgccttatttatattcatcaaataaaccttgtttctttctgaa

SEQ ID NO: 686363 - DNA, 120 bp, Artificial Sequence
  ENSG00000187672_51 (sequence is synthesized)
tgtaaaccaaagttccagttttgttttgagggatgatccagctctgtcggaggcacgtaggcacagccaaatctcatgctgtacattgatcacctgtccaacctttgcctagagtgggag

SEQ ID NO: 686364 - DNA, 120 bp, Artificial Sequence
  ENSG00000187672_52 (sequence is synthesized)
cccccagttccttcgagatccaacattacctgtctgtaaagaagaagaggaggagggagacagcggggaggatccggtggcagtttaacaccagagcagctattagaagggctgaataaa

SEQ ID NO: 686365 - DNA, 120 bp, Artificial Sequence
  ENSG00000187672_53 (sequence is synthesized)
gagaagctgagcacccatgctggaactcaccatatagatgcctcactgcttttcatttctaagtttctcctccatgtctttttcctcttgccagtgtttagataaaattatttctatttg

SEQ ID NO: 686366 - DNA, 120 bp, Artificial Sequence
  ENSG00000187672_54 (sequence is synthesized)
atacatttttcttcactcttgtccttaatgggtcaagtctcatgtggcttcatagccctgacagacagtagtattgctattttggagtcaaggtctcgttctgtcggccaagctggagtg

SEQ ID NO: 686367 - DNA, 120 bp, Artificial Sequence
  ENSG00000187672_55 (sequence is synthesized)
cagtggcaccatcagggctcactgcagccttgacctccgaggctcaaggaatcctcccacctcagcctcagccttccggatagttggtactacagatgatccagctctgtcggaggcacg

SEQ ID NO: 686368 - DNA, 120 bp, Artificial Sequence
  ENSG00000187672_56 (sequence is synthesized)
tgtacctccttctgaatagaagaagaaaatgttaatttctgtaagaataaagactttaagagcaacatttagtgggccacatttgactggtgaattgatttttattttgaagcaccagca

SEQ ID NO: 686369 - DNA, 120 bp, Artificial Sequence
  ENSG00000187672_57 (sequence is synthesized)
ccattatttcccactagaatgagtgaagttgttctctaagtagcagattgaacaatatgaaatggaattggatcaaatgggtttgttatgttagagatacacaataaatttttaacttgg

SEQ ID NO: 686370 - DNA, 120 bp, Artificial Sequence
  ENSG00000187672_58 (sequence is synthesized)
tttcagagaaggtgaattctgggttatagtcctagagctgtgtccataactgcatctcagtgttcctggtgtcttcaagattgccagcccttcccaacctgtgccagacataagaggaag

SEQ ID NO: 686371 - DNA, 120 bp, Artificial Sequence
  ENSG00000187672_59 (sequence is synthesized)
attttctttcctctgtttccttgctgtgtttgtattgggagcacagagtaatgtaatttagtaaattatgatttgatggctgggcatcagccccagtgttgaacagtatttggactatga

SEQ ID NO: 686372 - DNA, 120 bp, Artificial Sequence
  ENSG00000187672_60 (sequence is synthesized)
ttacttgctggctttgtcacagttgacattaattattgatggaagtttcagaaatagcgcatgtgccaggagcttttcaccggaacgcaggctccaggcaggagggatgctaaagagtgt

SEQ ID NO: 686373 - DNA, 120 bp, Artificial Sequence
  ENSG00000187672_61 (sequence is synthesized)
agttcatcgggaggcggggattgtagtgcaggaaacgagaactgggcaggggaggtcactaaatactaatgaagactgccagcagaggaacctacagaggatttttgttcaaagaggaca

SEQ ID NO: 686374 - DNA, 120 bp, Artificial Sequence
  ENSG00000187672_62 (sequence is synthesized)
agagactctgcataatgagcttggatttgggggctcacatgtactttacattttgctagagtgtaggagttgctatttttgtatttaattcacagccagactgttccatgattcccacca

SEQ ID NO: 686375 - DNA, 80 bp, Artificial Sequence
  ENSG00000187676_0 (sequence is synthesized)
ggcgcagctccgctccccgcgcgtctcccttccccgcgcccaggtagggcgctcagcctccgccgccaggatgcggccgc

SEQ ID NO: 686376 - DNA, 120 bp, Artificial Sequence
  ENSG00000187676_1 (sequence is synthesized)
ccgcctgctggtggctgctcgcgccgccggcgctgctcgcgctcctcacctgctccctggcttttggtttggcttctgaagatacaaagaaagaggtcaagcagtctcaggatttggaga

SEQ ID NO: 686377 - DNA, 120 bp, Artificial Sequence
  ENSG00000187676_2 (sequence is synthesized)
aaagtggtatatcaaggaaaaatgacatagacttaaaaggaattgtattcgtcatccagagtcaaagtaattcttttcatgcaaagagagcagagcagttaaaaaaaagcatcttaaagc

SEQ ID NO: 686378 - DNA, 120 bp, Artificial Sequence
  ENSG00000187676_3 (sequence is synthesized)
aggctgcagatcttacacaggagctccccagtgtcctcctccttcatcagctggctaaacaagaaggtgcatggaccatacttccgttgttaccgcatttttctgtaacatatagcagaa

SEQ ID NO: 686379 - DNA, 120 bp, Artificial Sequence
  ENSG00000187676_4 (sequence is synthesized)
attcatcttggattttcttctgtgaagaagagacaagaatacagattccaaaactcttggaaaccctcagaagatatgacccctctaaggaatggtttttgggaaaagcattacatgatg

SEQ ID NO: 686380 - DNA, 120 bp, Artificial Sequence
  ENSG00000187676_5 (sequence is synthesized)
aagaagctacaataattcaccattatgccttttccgagaatcctacagtttttaagtatccagactttgctgcaggctgggccttaagtattccacttgtaaacaagcttaccaagagac

SEQ ID NO: 686381 - DNA, 120 bp, Artificial Sequence
  ENSG00000187676_6 (sequence is synthesized)
taaagagtgaatccttgaaatccgactttacaatagatttaaaacatgagattgccctctacatctgggacaaaggcggaggacctcccctgaccccagtgcctgagttttgtaccaatg

SEQ ID NO: 686382 - DNA, 120 bp, Artificial Sequence
  ENSG00000187676_7 (sequence is synthesized)
acgtggacttctactgtgctaccacattccattcttttctaccgctttgtagaaagccagtgaagaagaaggatatttttgttgcagtaaaaacatgcaagaaatttcatggtgacagaa

SEQ ID NO: 686383 - DNA, 120 bp, Artificial Sequence
  ENSG00000187676_8 (sequence is synthesized)
tacctattgttaagcagacttgggagagccaggcaagtctcattgaatactatagtgactatactgaaaattccattcctactgtggatttgggaattcctaatacagatagaggtcatt

SEQ ID NO: 686384 - DNA, 120 bp, Artificial Sequence
  ENSG00000187676_9 (sequence is synthesized)
gtggaaagacatttgccattttggaaagatttctgaatcgtagccaggacaaaacagcatggttagtcattgtggatgatgatacattaataagtatctccaggctccagcacttgctta

SEQ ID NO: 686385 - DNA, 120 bp, Artificial Sequence
  ENSG00000187676_10 (sequence is synthesized)
gctgttatgactccggcgagcctgtgtttctgggagagcgctacggctacggcctgggcactggtggctacagctacatcacgggaggaggaggaatggtcttcagcagagaagccgtca

SEQ ID NO: 686386 - DNA, 120 bp, Artificial Sequence
  ENSG00000187676_11 (sequence is synthesized)
ggagacttctcgccagtaaatgtcgatgctacagcaatgatgctcccgatgatatggtcctgggaatgtgctttagtggcttgggaatccctgtgacacacagccctctcttccatcagg

SEQ ID NO: 686387 - DNA, 120 bp, Artificial Sequence
  ENSG00000187676_12 (sequence is synthesized)
ctcggccggtggattaccctaaggactacctttctcatcaagttcccatatcgttccacaaacactggaacatcgatccagtgaaggtgtatttcacatggttggcacccagtgacgaag

SEQ ID NO: 686388 - DNA, 120 bp, Artificial Sequence
  ENSG00000187676_13 (sequence is synthesized)
acaaagccaggcaggagacacagaaaggttttcgagaggagttataaatcagggtgacctgtgcgcctagcctgcgcagggaatgaactggagactgtggcctcatcccactgtgctgtg

SEQ ID NO: 686389 - DNA, 120 bp, Artificial Sequence
  ENSG00000187676_14 (sequence is synthesized)
ctcacaacacttgtgtctgccacatggcattgggtgcttcctgactttagggggagattttatgtatggtattttttgacagaggaagaaaaggggtcacaggagaaacatttttttttc

SEQ ID NO: 686390 - DNA, 120 bp, Artificial Sequence
  ENSG00000187676_15 (sequence is synthesized)
tgggaaaaatcacttgcttttgacttatgcagttgttttaacacttagtgatgactgtgtattctccaagctgtgatacagcagtttttttttattgtcacagggaaataaatggtacca

SEQ ID NO: 686391 - DNA, 120 bp, Artificial Sequence
  ENSG00000187676_16 (sequence is synthesized)
gaagtccctttcctgttctgtctcttcattgtaatggaagtttcagttgggcatgagcctggagagatgtgactgtctacagttctatttgtatatataaaaagaagactgaaagtcttt

SEQ ID NO: 686392 - DNA, 120 bp, Artificial Sequence
  ENSG00000187676_17 (sequence is synthesized)
gaatggtatgaacttttaaaccatattattgatgatgaaaattatttcctgggaactcagtaggaataataccgtattaaggaataatactgtacataaaacatcatgaaaccctagata

SEQ ID NO: 686393 - DNA, 120 bp, Artificial Sequence
  ENSG00000187676_18 (sequence is synthesized)
tgaaatcccctgaagtctgtaatcatggtggttatgttttgtctattcttttgctgtttgtgcctcataaaaagagaatgaggtcttctgctagagcttcgtattgctttggaagttcat

SEQ ID NO: 686394 - DNA, 120 bp, Artificial Sequence
  ENSG00000187676_19 (sequence is synthesized)
ctgtgttttatttctccctgaagccctatctttatggcttacttgtaacatgaaagtagtagatgctgccagaaaatagtgtcctcaatattttaaaacaatgttgacatgttttgttca

SEQ ID NO: 686395 - DNA, 120 bp, Artificial Sequence
  ENSG00000187676_20 (sequence is synthesized)
agtcagcaagctctatgtgagtctcaggaagtgaattaaatttggaccttatgttttactcttgttttttttttttttttaaatgttacttaatgactctctcctgactcaggagagaaa

SEQ ID NO: 686396 - DNA, 120 bp, Artificial Sequence
  ENSG00000187676_21 (sequence is synthesized)
ccccttgtggaaggacagcatggtgatcaggcaatttctctgggttcccaaagaatgacatttgaacacagtattttgaaacagctctagttttcaaattatatctttaatatatagtaa

SEQ ID NO: 686397 - DNA, 120 bp, Artificial Sequence
  ENSG00000187676_22 (sequence is synthesized)
ttctttttaataaaaactgttactcattaactttgcttataatgctttttatagcccagcacagaatttaaagccataccaccaaaagtacctgtgtgtgttaatatgtttttcttgtag

SEQ ID NO: 686398 - DNA, 120 bp, Artificial Sequence
  ENSG00000187676_23 (sequence is synthesized)
catagattgactatttgcaatagtattagtatttaccatttttccaaattagcaactaccagacctcacgtgttgcagtgataacacaatgcattggattcagttttgtgaaaatggatt

SEQ ID NO: 686399 - DNA, 120 bp, Artificial Sequence
  ENSG00000187676_24 (sequence is synthesized)
ctgtggccatccaagggatgtatcagggatgatcagctgatgagaggctccagaaggatttctagatcgcttcaagcctatactgatggccttagctttgttcagtcattgtaactggga

SEQ ID NO: 686400 - DNA, 120 bp, Artificial Sequence
  ENSG00000187676_25 (sequence is synthesized)
ttgttgtcattgctaccgtggtagtcaccttcatgtcatctataatagtactcctggagagccctggctgcctacaccagtggaaaagagtctccagttctgctctggcctactaactgt

SEQ ID NO: 686401 - DNA, 120 bp, Artificial Sequence
  ENSG00000187676_26 (sequence is synthesized)
taccactgagagaacaacatgttcatttgacatgattgaagctggcatccgtatatgaagatccttgtcaagctttcttctgtggtctgattagtgccttctactgataccggggcacct

SEQ ID NO: 686402 - DNA, 120 bp, Artificial Sequence
  ENSG00000187676_27 (sequence is synthesized)
cctctggtacttttaagtgttttgttaattatatttactttttggaatggtgtaagcctaaccacaagtaaaagatctttgcctaagtttttgatttctcaaatattgtgttcattagtc

SEQ ID NO: 686403 - DNA, 120 bp, Artificial Sequence
  ENSG00000187676_28 (sequence is synthesized)
tagactgggaatggggaggggaaatggggaaaatgaatgaatgaaatcagaaaaaagtcagcggctcagtaaatacagtttaaagagagaataattacttcagagctacccttttaagag

SEQ ID NO: 686404 - DNA, 120 bp, Artificial Sequence
  ENSG00000187676_29 (sequence is synthesized)
aaaaccatcagaaattgataatgtttatataaagtttataaagccattgtgttttgttatataacaaatcagagatgttattttagaatcgattcccatctaaagaactcaattttgagt

SEQ ID NO: 686405 - DNA, 120 bp, Artificial Sequence
  ENSG00000187676_30 (sequence is synthesized)
ctgacatttccaggaccagatattgtcttactcacatttcctttgctttgaaatagggctttccttccaaatggctatttttaggctagggatgttaacatcagggatttgtgtgtggaa

SEQ ID NO: 686406 - DNA, 120 bp, Artificial Sequence
  ENSG00000187676_31 (sequence is synthesized)
taactggaatgtcatttttgcttttaagccatttctgatgatatagccaaagcaggttgtctgactatgtaggatttttacatcttgaaactaaatcagaaatccagacatgaaaataac

SEQ ID NO: 686407 - DNA, 120 bp, Artificial Sequence
  ENSG00000187676_32 (sequence is synthesized)
ctttctagaatgcctaggagcagaaaacaataatagcatgctaaatcacaaatgatgctatgtatgggtatgtaaatatcagtgctgtctgcatttctgggtttattgaagacctcttgt

SEQ ID NO: 686408 - DNA, 120 bp, Artificial Sequence
  ENSG00000187676_33 (sequence is synthesized)
tgtatatatcctcaaaaattaatgtaattgacatcttcaagaatgtttctattgtcttccattcataatcagagatgtaatttgtatggactaaataaaaactttattatgtaatgaaaa

SEQ ID NO: 686409 - DNA, 120 bp, Artificial Sequence
  ENSG00000187676_34 (sequence is synthesized)
ggacccttgctggggactgaggaaagttcttgacctttcctcacagcttcttccagcattatgcaatggaggatattttacccaacagtgtgaacttttagtggctgcaagctgcaggga

SEQ ID NO: 686410 - DNA, 120 bp, Artificial Sequence
  ENSG00000187676_35 (sequence is synthesized)
gccctttctgggtacctattgttaagcagacttgggagagccaggcaagtctcattgaatactatagtgactatactgaaaattccattcctactgtggatttgggaattcctaatacag

SEQ ID NO: 686411 - DNA, 120 bp, Artificial Sequence
  ENSG00000187678_0 (sequence is synthesized)
attttcccaggcagtggttgcaacatcgccgcggaggtagcgagctgagctgacagcgcggagctggcgctgtggagcgcagggagccttgccggttcctccgaccggcgtctgcgagta

SEQ ID NO: 686412 - DNA, 120 bp, Artificial Sequence
  ENSG00000187678_1 (sequence is synthesized)
cagcggcggctaacctgccccggcttcaggatttacacagacgtggggcgatgcttgtgaccctgcagctcctcaaaggcccctagaagcctgtttctccgtacagtccaggacctccag

SEQ ID NO: 686413 - DNA, 120 bp, Artificial Sequence
  ENSG00000187678_2 (sequence is synthesized)
ccccatggagcccccgatcccacagagcgcccccttgactcccaactcagtcatggtccagccccttcttgacagccggatgtcccacagccggctccagcacccactcaccatcctacc

SEQ ID NO: 686414 - DNA, 120 bp, Artificial Sequence
  ENSG00000187678_3 (sequence is synthesized)
cattgaccaggtgaagaccagccatgtggagaatgactacatagacaaccctagcctggccctgaccaccggcccaaagcggacccggggcggggccccagagctggccccgacgcccgc

SEQ ID NO: 686415 - DNA, 120 bp, Artificial Sequence
  ENSG00000187678_4 (sequence is synthesized)
ccgctgtgaccaggatgtcacccaccattggatctccttcagcgggcgccccagctctgtgagcagcagcagcagcacatcctctgaccaacggctcttagaccacatggcaccaccacc

SEQ ID NO: 686416 - DNA, 120 bp, Artificial Sequence
  ENSG00000187678_5 (sequence is synthesized)
cgtggctgaccaggcctcaccaagggctgtgcgcatccagcccaaggtggtccactgccagccgctggacctcaagggcccggcggtcccacccgagctggacaagcacttcttgctgtg

SEQ ID NO: 686417 - DNA, 120 bp, Artificial Sequence
  ENSG00000187678_6 (sequence is synthesized)
cgaggcctgtgggaagtgtaaatgcaaggagtgtgcatccccccggacgttgccttcctgctgggtctgcaaccaggagtgcctgtgctcagcccagactctggtcaactatggcacgtg

SEQ ID NO: 686418 - DNA, 120 bp, Artificial Sequence
  ENSG00000187678_7 (sequence is synthesized)
catgtgtttggtgcagggcatcttctaccactgcacgaatgaggacgatgagggctcctgcgctgaccacccctgctcctgctcccgctccaactgctgcgcccgctggtccttcatggg

SEQ ID NO: 686419 - DNA, 120 bp, Artificial Sequence
  ENSG00000187678_8 (sequence is synthesized)
tgctctctccgtggtgctgccctgcctgctctgctacctgcctgccaccggctgcgtgaagctggcccagcgtggctacgaccgtctgcgccgccctggttgccgctgcaagcacacgaa

SEQ ID NO: 686420 - DNA, 120 bp, Artificial Sequence
  ENSG00000187678_9 (sequence is synthesized)
acctggttctcttctgacatctaagaagactgcagcaaggtcagaggttttagcctcctgaggctgaccttgctagtctgcccactccctacccccagcttcggaaaatacagagaccac

SEQ ID NO: 686421 - DNA, 120 bp, Artificial Sequence
  ENSG00000187678_10 (sequence is synthesized)
caccacgtaccctgtattccccaaggtgatgaagaagcactttggggctttttttcagggtcctgaaactttgtgtcaaacagacaatgcaggggcagggtgtggtttggggggaaattt

SEQ ID NO: 686422 - DNA, 120 bp, Artificial Sequence
  ENSG00000187678_11 (sequence is synthesized)
ttctttttcagaagacagaacacagatgtggacacatatccggaaactgcagctgcttgaatgccttcccagcccctccttctccctccctccctccgcccccccccccttcctcttttc

SEQ ID NO: 686423 - DNA, 120 bp, Artificial Sequence
  ENSG00000187678_12 (sequence is synthesized)
cattgtctttggctctcacaggagctagctgcctgggaggaattgttaactgagtaccagggtacctttaaagaagacccttggagtcttctataccttcttctccttccccatctcact

SEQ ID NO: 686424 - DNA, 120 bp, Artificial Sequence
  ENSG00000187678_13 (sequence is synthesized)
ccaccccactttgtccctgatgtcttggggaaggtgtagaacaccctagcagttcctattgtatatacttgggagccactgagaacagaggacggccagtgagtccaagcctcgttcctc

SEQ ID NO: 686425 - DNA, 120 bp, Artificial Sequence
  ENSG00000187678_14 (sequence is synthesized)
cttctgcctccccggagccacaggatggatttaggagccactgctcagtgcacttctcccttccaactgcatcaactaactctcgggggtgttctgctcaccacaccgtccttcggttct

SEQ ID NO: 686426 - DNA, 120 bp, Artificial Sequence
  ENSG00000187678_15 (sequence is synthesized)
tactgagtcacagactcgcctgcccactacgtgtcctgggttctctctactcagatcccttccagaaactttatatgggtagaggaagccagggcggcaaatgcgagaccaaatatcatt

SEQ ID NO: 686427 - DNA, 120 bp, Artificial Sequence
  ENSG00000187678_16 (sequence is synthesized)
ttgccaatgagtctgaggctgtggtctctggatccagtcattatgtttttatagaataattaaaccggatgctaacggtgttttaaaaaataataataaaacaacttgtttccttttggc

SEQ ID NO: 686428 - DNA, 120 bp, Artificial Sequence
  ENSG00000187678_17 (sequence is synthesized)
cacccccaggaagggctgatttcaaaatctgggggcgagcaacctcaaggaacacaatttccctccctatcaacaagaggattttaacagcaaagaagagaggcagcacctcccattggc

SEQ ID NO: 686429 - DNA, 120 bp, Artificial Sequence
  ENSG00000187678_18 (sequence is synthesized)
agaatgaccgctgagccaggctgggtttgggtttcttctcttctgattctgctgctcactgtcatagccttttgtgtatagtgatgtgtctgtatctttaatgtaaatagagagatgatg

SEQ ID NO: 686430 - DNA, 120 bp, Artificial Sequence
  ENSG00000187678_19 (sequence is synthesized)
acctcccagctcggtgcccacggtgccagctttgccgtgtatctcccagcccgccgtagcggcctatgctcgacgtagattttttctttctcttcggagccgtgacggactgaattccct

SEQ ID NO: 686431 - DNA, 120 bp, Artificial Sequence
  ENSG00000187678_20 (sequence is synthesized)
ccccttctgcctctccctcgatggtcagcgaggggctggctcaggactgggcattcctactccctctccttggcgaggcggttcctcgccgtctgacctttgctccgctgccgcatttta

SEQ ID NO: 686432 - DNA, 120 bp, Artificial Sequence
  ENSG00000187678_21 (sequence is synthesized)
cgagctgtgccaggccccggagcccccaggccgcgctagggctgcggtgggggttgaaggtgcgtttacataacaccaggcgtgtgggagctggaggaagaggttgcgaatgtaggagag

SEQ ID NO: 686433 - DNA, 120 bp, Artificial Sequence
  ENSG00000187678_22 (sequence is synthesized)
ataaggctcctgctttccctccttccttcttggtggtaccaggcttgacatcacagagaagaggatagagacgggcccctagaagcctgtttctccgtacagtccaggacctccagcccc

SEQ ID NO: 686434 - DNA, 120 bp, Artificial Sequence
  ENSG00000187678_23 (sequence is synthesized)
ctgcgtgccaggtaatatgctaggtaatagatagtattttctcatttaatccttgcaagagcccattttacagatgacaaaaccaaaatctaaggcatagagatgaaagaactcattcat

SEQ ID NO: 686435 - DNA, 120 bp, Artificial Sequence
  ENSG00000187678_24 (sequence is synthesized)
agcaatattgctagaccaaagtgagagtcaaatttgagtgttgttccagagcctgtgtttacatccactgagctatgtgtcttaaataaggagcatgtttcacagtgactaagagaatga

SEQ ID NO: 686436 - DNA, 120 bp, Artificial Sequence
  ENSG00000187678_25 (sequence is synthesized)
actcaggctgcccaggtttgagtcctgctactgatagttttggatagttttgtgtgactttggacaaattaatttcaacatgtcttttctctaaatagaaaagggggataatagtagtta

SEQ ID NO: 686437 - DNA, 120 bp, Artificial Sequence
  ENSG00000187678_26 (sequence is synthesized)
cgttttaggcttatcatgaagtcaatgacttaatgcatatggtgcttaggagagtacctccatcttaagtgctcagtagtattatttccaccactgacttcttgtcattattaatcatct

SEQ ID NO: 686438 - DNA, 120 bp, Artificial Sequence
  ENSG00000187678_27 (sequence is synthesized)
taagcttggggagtcactggaaagtccacagagggattttagttcctatgtcaattgggcggctcccaaggacctgatggggggtgaggtattggcaggccacatactgatgcctggaat

SEQ ID NO: 686439 - DNA, 120 bp, Artificial Sequence
  ENSG00000187678_28 (sequence is synthesized)
attttagtgttaggaagccccagcaggggagtcggaagagcttggaagagctggggagagggtaggggaaaggtttttccaggggccactgggtttgagccctgcttctgtgcacagcca

SEQ ID NO: 686440 - DNA, 120 bp, Artificial Sequence
  ENSG00000187678_29 (sequence is synthesized)
caccaccctctcccgacagccctcaaagacgtagcaactctttctctcaaggtgctaaaggactcagaaggtgcagcacgtccagtgggtaggtacttgttgcatgcaaaagctgtagtg

SEQ ID NO: 686441 - DNA, 120 bp, Artificial Sequence
  ENSG00000187678_30 (sequence is synthesized)
tatctggtccttcctccccagcttttgtgtggggttcttgctttgtgtggtattttgttttcccctctaatgagagggcatggcctgagtcagaagagctaccccaggtgaaactggaag

SEQ ID NO: 686442 - DNA, 120 bp, Artificial Sequence
  ENSG00000187678_31 (sequence is synthesized)
tgcatgaggcagagcgtccgtagcatttccagtttgttctgtataggaacagaggtgcctccgggaaggaggcagcgaggtaggtagctatgataggcacctaatgcttctcaaggactt

SEQ ID NO: 686443 - DNA, 120 bp, Artificial Sequence
  ENSG00000187678_32 (sequence is synthesized)
attttttccttcttgaagactagtagtaacatcttatgatttagagtaagttgattgtaaccataggtatttattgattggaggaagggagggtcatattattttcggctttatttatgt

SEQ ID NO: 686444 - DNA, 120 bp, Artificial Sequence
  ENSG00000187678_33 (sequence is synthesized)
aacatttgctagcttgtaaaaggcgaatgtgaaatattgcatctgcattttccaaggctgattcgtgtagctacccttgccacagttgtgacggatgtatggatgttcttgaacatttca

SEQ ID NO: 686445 - DNA, 120 bp, Artificial Sequence
  ENSG00000187678_34 (sequence is synthesized)
gaaggagtggtagaaaaaaacacacattcagccaaccacttatatgaattgaatgtatcagaagtgtactgaagggactggagatggttttcctcagatgagggggccccaaaattgata

SEQ ID NO: 686446 - DNA, 120 bp, Artificial Sequence
  ENSG00000187678_35 (sequence is synthesized)
gtgcacatctgcacgctttctgcgaggcctcagaacttcccagggcccctccctcaaattgtctccatgggaaacttgacccagtggcaagttgcactttggtgatcttggtggtctaca

SEQ ID NO: 686447 - DNA, 87 bp, Artificial Sequence
  ENSG00000187678_36 (sequence is synthesized)
ccacactgactgtctaccgacaaagaccctatttcctggcaaacggcctcctgaaccctgactttttgtgtacatacttgtaaacac

SEQ ID NO: 686448 - DNA, 120 bp, Artificial Sequence
  ENSG00000187678_37 (sequence is synthesized)
ctcctgaaccctgactttttgtgtacatacttgtaaacacggatttttctgggttttggtttgctttttccttttttccccctgcccctgttctagcttgttcttcttggtttgctttca

SEQ ID NO: 686449 - DNA, 120 bp, Artificial Sequence
  ENSG00000187678_38 (sequence is synthesized)
acctgcttgatggatgtctgcagagtgctctctaagagtccacctcagtgcctcgtgtgctcagtggtcatgggaaaggagcgaaggaaccatccttggttctcccagcttggttgtgta

SEQ ID NO: 686450 - DNA, 83 bp, Artificial Sequence
  ENSG00000187678_39 (sequence is synthesized)
gcgaaggaaccatccttggttctcccagcttggttgtgtagcaatccctcagcattgtttttctcagcttcttggcaaaaatt

SEQ ID NO: 686451 - DNA, 120 bp, Artificial Sequence
  ENSG00000187678_40 (sequence is synthesized)
ggggccagtcgagagccactgagggacccagcactcagagacacaacacacatgtgtagctgcttctggctgagtgtgtttcctgtcaccaatggcctgtttggctggacgatgcctcgg

SEQ ID NO: 686452 - DNA, 120 bp, Artificial Sequence
  ENSG00000187678_41 (sequence is synthesized)
cttgaccttttttgaaaagtgctggttagttcccgcccctggtaaacctggggtaggtgggggttctgtcttaactcgaggggcacctgggatccaggacgcttctagggggctctggct

SEQ ID NO: 686453 - DNA, 120 bp, Artificial Sequence
  ENSG00000187678_42 (sequence is synthesized)
gcccgtgttaatgaaggacagcgcttccgcgagcaccctgggaactgggtcttgggtagcaaagccctcccagagaaaagattgggcacaactaaggctttcctgagcaggaagggggtg

SEQ ID NO: 686454 - DNA, 120 bp, Artificial Sequence
  ENSG00000187678_43 (sequence is synthesized)
aagaccaatcccttcctttggtcctttggtacgcaccccctcagagctgagatggaagacatggctagttcttttcagccttgtggagcctgtcagtcgccatcatacctcgagtgaggc

SEQ ID NO: 686455 - DNA, 120 bp, Artificial Sequence
  ENSG00000187678_44 (sequence is synthesized)
ccagctagataatgacttgtccaagatggcacacgtggaaagttgatctgcaccagaacccggatgactgtcaccttgaagcatcctgttctccttctgtgctgtcccaggaagtgtctg

SEQ ID NO: 686456 - DNA, 120 bp, Artificial Sequence
  ENSG00000187678_45 (sequence is synthesized)
gcgggcgtgggcagcacagctctacactgtacgattcactagggcatcctgcgagcctcactagccttctggttcatgcctttgacaagcatttttgtgccccctctgcttactgtgaca

SEQ ID NO: 686457 - DNA, 120 bp, Artificial Sequence
  ENSG00000187678_46 (sequence is synthesized)
gtcgatgatgaatcttgcgttgccattttctgctgtgggtaactgcgtgcagtgtcttgccttgctttctcttcttactgtcccacagcttggtttcatgttacaaacagaaaagctcga

SEQ ID NO: 686458 - DNA, 120 bp, Artificial Sequence
  ENSG00000187678_47 (sequence is synthesized)
ggctcccaccccgccacatcccaacttcatttccccctcactgtagcccatttccaccccaccacaaagttgccacaggttttctttgtatagaatatttattttgaagctctattttaa

SEQ ID NO: 686459 - DNA, 120 bp, Artificial Sequence
  ENSG00000187678_48 (sequence is synthesized)
atttattttgaagctctattttaatagtatttattttagaaagtctactattgtaagagttcttctgtttgtgaagaaaaaaacaagttaaaaactgaatgtactgatttagaaaatata

SEQ ID NO: 686460 - DNA, 120 bp, Artificial Sequence
  ENSG00000187678_49 (sequence is synthesized)
gacgtggggcgatgcttgtgaccctgcagctcctcaaaccagcctgtattgagcggtttgcagcctgatgctcagccccctccccacagggcccctagaagcctgtttctccgtacagtc

SEQ ID NO: 686461 - DNA, 120 bp, Artificial Sequence
  ENSG00000187678_50 (sequence is synthesized)
agaacagcggcaagacagaccttacaagggactcagggccaagccctggcccagactctgctcttatccacgcatcaaagccaccccccgccccggacttcccggaggctacaggctcct

SEQ ID NO: 686462 - DNA, 120 bp, Artificial Sequence
  ENSG00000187678_51 (sequence is synthesized)
ccgttccagggaggagcagggcctgctgcgagggctccccgccttcctggagtcaggcctaatggcgggggcttttcttttcaccggcttgagctgatcctcacccccgccccccaacgc

SEQ ID NO: 686463 - DNA, 120 bp, Artificial Sequence
  ENSG00000187682_0 (sequence is synthesized)
cgtgaggagggaaggagagatggggggacgtgggacagggagaaaacaacataaatcatatatatatagcatgcaaattggaaggtgatcagcacacaataggcattcaataaatgttga

SEQ ID NO: 686464 - DNA, 120 bp, Artificial Sequence
  ENSG00000187682_1 (sequence is synthesized)
aataatgacaccccactgtctccttgccctcaaatggtctcccctaacgtatcccctgttgtcttgcttcttctcttcccacttgcagagcctgctgcccacgtctcttccctgagctgc

SEQ ID NO: 686465 - DNA, 120 bp, Artificial Sequence
  ENSG00000187682_2 (sequence is synthesized)
ctgctggggtcatggagctgccaacaaagcctggcaccttcgacctgggcctggccacatggagcccttccttccagggggaaacccaccgggctcaggcacgccgcagggatgttggca

SEQ ID NO: 686466 - DNA, 120 bp, Artificial Sequence
  ENSG00000187682_3 (sequence is synthesized)
ggcagctgcctgagtacaaggctgtggtggtgggcgccagtggcgtgggcaagagtgcgctgaccatccagctgaaccaccagtgcttcgtggaggaccacgaccccaccatccaggatt

SEQ ID NO: 686467 - DNA, 120 bp, Artificial Sequence
  ENSG00000187682_4 (sequence is synthesized)
cctactggaaggagttgaccctggacagtggggactgcattctgaatgtgctggacacagcagggcaggccatccatagggccctgcgtgaccagtgcctggctgtctgtgatggtgtgc

SEQ ID NO: 686468 - DNA, 120 bp, Artificial Sequence
  ENSG00000187682_5 (sequence is synthesized)
gccctcaccccgcccagccccttgtcctcgtgggcaacaagtgtgaccttgtgaccactgctggagatgctcatgccgctgctgcagccctcgcacacagctggggggcccacttcgtgg

SEQ ID NO: 686469 - DNA, 120 bp, Artificial Sequence
  ENSG00000187682_6 (sequence is synthesized)
agacctcggccaaaacacggcaaggcgtggaggaggccttttccctgctggtccatgagatccagagggtccaggaggccatggcgaaggagcccatggcaaggtcctgtagggagaaga

SEQ ID NO: 686470 - DNA, 120 bp, Artificial Sequence
  ENSG00000187682_7 (sequence is synthesized)
cccggcaccagaaggccacctgccactgtggctgctctgtggcctgaaggtcttggccaagaaatgtagacctttccccaggccagggtgattgttcatttgacatgagacccctgaggc

SEQ ID NO: 686471 - DNA, 120 bp, Artificial Sequence
  ENSG00000187682_8 (sequence is synthesized)
aactagctttgagggacacatcaggtatactagggaaagatggacatctctcttgttttcacttggtgaggggctttttggtaacatgggagtgcctaatgttgcttttgttatgtcaag

SEQ ID NO: 686472 - DNA, 120 bp, Artificial Sequence
  ENSG00000187682_9 (sequence is synthesized)
ttgaaagattttgtgcaaaattaaataaatggtgttttgggtttcaaagctgcctccatgccgagtgttgtgtgggtgggagtgagactgggtagaatgttacttgagttgtgagaattc

SEQ ID NO: 686473 - DNA, 120 bp, Artificial Sequence
  ENSG00000187688_0 (sequence is synthesized)
agtctctggtggctagcctgtcctgacaggggagagttaagctcccgttctccaccgtgccggctggccaggtgggctgagggtgaccgagagaccagaacctgcttgctggagcttagt

SEQ ID NO: 686474 - DNA, 120 bp, Artificial Sequence
  ENSG00000187688_1 (sequence is synthesized)
gctcagagctggggagggaggttccgccgctcctctgctgtcagcgccggcagcccctcccggcttcacttcctcccgcagcccctgctactgagaagctccgggatcccagcagccgcc

SEQ ID NO: 686475 - DNA, 120 bp, Artificial Sequence
  ENSG00000187688_2 (sequence is synthesized)
acgccctggcctcagcctgcggggctccagtcaggccaacaccgacgcgcagctgggaggaagacaggacccttgacatctccatctgcacagaggtcctggctggaccgagcagcctcc

SEQ ID NO: 686476 - DNA, 120 bp, Artificial Sequence
  ENSG00000187688_3 (sequence is synthesized)
tcctcctaggatgacctcaccctccagctctccagttttcaggttggagacattagatggaggccaagaagatggctctgaggcggacagaggaaagctggattttgggagcgggctgcc

SEQ ID NO: 686477 - DNA, 120 bp, Artificial Sequence
  ENSG00000187688_4 (sequence is synthesized)
tcccatggagtcacagttccagggcgaggaccggaaattcgcccctcagataagagtcaacctcaactaccgaaagggaacaggtgccagtcagccggatccaaaccgatttgaccgaga

SEQ ID NO: 686478 - DNA, 120 bp, Artificial Sequence
  ENSG00000187688_5 (sequence is synthesized)
tcggctcttcaatgcggtctcccggggtgtccccgaggatctggctggacttccagagtacctgagcaagaccagcaagtacctcaccgactcggaatacacagagggctccacaggtaa

SEQ ID NO: 686479 - DNA, 120 bp, Artificial Sequence
  ENSG00000187688_6 (sequence is synthesized)
gacgtgcctgatgaaggctgtgctgaaccttaaggacggagtcaatgcctgcattctgccactgctgcagatcgacagggactctggcaatcctcagcccctggtaaatgcccagtgcac

SEQ ID NO: 686480 - DNA, 120 bp, Artificial Sequence
  ENSG00000187688_7 (sequence is synthesized)
agatgactattaccgaggccacagcgctctgcacatcgccattgagaagaggagtctgcagtgtgtgaagctcctggtggagaatggggccaatgtgcatgcccgggcctgcggccgctt

SEQ ID NO: 686481 - DNA, 120 bp, Artificial Sequence
  ENSG00000187688_8 (sequence is synthesized)
cttccagaagggccaagggacttgcttttatttcggtgagctacccctctctttggccgcttgcaccaagcagtgggatgtggtaagctacctcctggagaacccacaccagcccgccag

SEQ ID NO: 686482 - DNA, 120 bp, Artificial Sequence
  ENSG00000187688_9 (sequence is synthesized)
cctgcaggccactgactcccagggcaacacagtcctgcatgccctagtgatgatctcggacaactcagctgagaacattgcactggtgaccagcatgtatgatgggctcctccaagctgg

SEQ ID NO: 686483 - DNA, 120 bp, Artificial Sequence
  ENSG00000187688_10 (sequence is synthesized)
ggcccgcctctgccctaccgtgcagcttgaggacatccgcaacctgcaggatctcacgcctctgaagctggccgccaaggagggcaagatcgagattttcaggcacatcctgcagcggga

SEQ ID NO: 686484 - DNA, 120 bp, Artificial Sequence
  ENSG00000187688_11 (sequence is synthesized)
ctttcccgaaagttcaccgagtggtgctatgggcctgtccgggtgtcgctgtatgacctggcttctgtggacagctgtgaggagaactcagtgctggagatcattgcctttcattgcaag

SEQ ID NO: 686485 - DNA, 120 bp, Artificial Sequence
  ENSG00000187688_12 (sequence is synthesized)
agcccgcaccgacaccgaatggtcgttttggagcccctgaacaaactgctgcaggcgaaatgggatctgctcatccccaagttcttcttaaacttcctgtgtaatctgatctacatgttc

SEQ ID NO: 686486 - DNA, 120 bp, Artificial Sequence
  ENSG00000187688_13 (sequence is synthesized)
atcttcaccgctgttgcctaccatcagcctaccctgaagaagcaggccgcccctcacctgaaagcggaggttggaaactccatgctgctgacgggccacatccttatcctgctagggggg

SEQ ID NO: 686487 - DNA, 120 bp, Artificial Sequence
  ENSG00000187688_14 (sequence is synthesized)
atctacctcctcgtgggccagctgtggtacttctggcggcgccacgtgttcatctggatctcgttcatagacagctactttgaaatcctcttcctgttccaggccctgctcacagtggtg

SEQ ID NO: 686488 - DNA, 120 bp, Artificial Sequence
  ENSG00000187688_15 (sequence is synthesized)
tcccaggtgctgtgtttcctggccatcgagtggtacctgcccctgcttgtgtctgcgctggtgctgggctggctgaacctgctttactatacacgtggcttccagcacacaggcatctac

SEQ ID NO: 686489 - DNA, 120 bp, Artificial Sequence
  ENSG00000187688_16 (sequence is synthesized)
agtgtcatgatccagaaggtcatcctgcgggacctgctgcgcttccttctgatctacttagtcttccttttcggcttcgctgtagccctggtgagcctgagccaggaggcttggcgcccc

SEQ ID NO: 686490 - DNA, 120 bp, Artificial Sequence
  ENSG00000187688_17 (sequence is synthesized)
gaagctcctacaggccccaatgccacagagtcagtgcagcccatggagggacaggaggacgagggcaacggggcccagtacaggggtatcctggaagcctccttggagctcttcaaattc

SEQ ID NO: 686491 - DNA, 120 bp, Artificial Sequence
  ENSG00000187688_18 (sequence is synthesized)
accatcggcatgggcgagctggccttccaggagcagctgcacttccgcggcatggtgctgctgctgctgctggcctacgtgctgctcacctacatcctgctgctcaacatgctcatcgcc

SEQ ID NO: 686492 - DNA, 120 bp, Artificial Sequence
  ENSG00000187688_19 (sequence is synthesized)
ctcatgagcgagaccgtcaacagtgtcgccactgacagctggagcatctggaagctgcagaaagccatctctgtcctggagatggagaatggctattggtggtgcaggaagaagcagcgg

SEQ ID NO: 686493 - DNA, 120 bp, Artificial Sequence
  ENSG00000187688_20 (sequence is synthesized)
gcaggtgtgatgctgaccgttggcactaagccagatggcagccccgatgagcgctggtgcttcagggtggaggaggtgaactgggcttcatgggagcagacgctgcctacgctgtgtgag

SEQ ID NO: 686494 - DNA, 120 bp, Artificial Sequence
  ENSG00000187688_21 (sequence is synthesized)
gacccgtcaggggcaggtgtccctcgaactctcgagaaccctgtcctggcttcccctcccaaggaggatgaggatggtgcctctgaggaaaactatgtgcccgtccagctcctccagtcc

SEQ ID NO: 686495 - DNA, 120 bp, Artificial Sequence
  ENSG00000187688_22 (sequence is synthesized)
aactgatggcccagatgcagcaggaggccagaggacagagcagaggatctttccaaccacatctgctggctctggggtcccagtgaattctggtggcaaatatatattttcactaactaa

SEQ ID NO: 686496 - DNA, 120 bp, Artificial Sequence
  ENSG00000187688_23 (sequence is synthesized)
tgagcaaatgaagttctgttcctggtggtgtggcaatctggagcctggaacgatgtaagagcaagtagctgtccagtactcataaggtacagacttcccatcagctgtctgaggcacttt

SEQ ID NO: 686497 - DNA, 120 bp, Artificial Sequence
  ENSG00000187688_24 (sequence is synthesized)
gtcctcagtctacaaatggggaaactgagatgcagagaggctgagggcccaaccccacacaggtaaccggatgttggagccagattcgaatccgcgtgtttagttgacttcgcgttatac

SEQ ID NO: 686498 - DNA, 120 bp, Artificial Sequence
  ENSG00000187688_25 (sequence is synthesized)
tgtgaagtgctgcgcggcacttccctgctccgcttgccttgtgtgcctttgcccccaggcagggtcccaggacgttctgtctgatgcatcctttgtccccagaaagccatctctgtcctg

SEQ ID NO: 686499 - DNA, 120 bp, Artificial Sequence
  ENSG00000187688_26 (sequence is synthesized)
ctcacaggacagggctccaagtgggtggcccagaaccctgcagagaaaaagcctgtcctcctcagggcctctgtgtccaccagagcatctctgcatagtctcccaatttggggggccacg

SEQ ID NO: 686500 - DNA, 120 bp, Artificial Sequence
  ENSG00000187688_27 (sequence is synthesized)
cccctctccggggtgggaggggaggcggtcaaagcaggcaaacctcagagctgctctgttgccctcagggtggaggaggtgaactgggcttcatgggagcagacgctgcctacgctgtgt

SEQ ID NO: 686501 - DNA, 120 bp, Artificial Sequence
  ENSG00000187689_0 (sequence is synthesized)
attgaagggtaaaatttttcaccagagtaaacttgagaaaccaactggaccttgagtattgtacattttgcctcgtggacccaaaggtagcaatctgaaacatgaggagtacgattctac

SEQ ID NO: 686502 - DNA, 120 bp, Artificial Sequence
  ENSG00000187689_1 (sequence is synthesized)
tgttttgtcttctaggatcaactcggtcattaccacagctcaaacctgctttgggactccctcccacaaaactggctccggatcagggaacactaccaaaccaacagcagtcaaatcagg

SEQ ID NO: 686503 - DNA, 120 bp, Artificial Sequence
  ENSG00000187689_2 (sequence is synthesized)
tctttccttctttaagtctgataccattaacacagatgctcacactggggccagatctgcatctgttaaatcctgctgcaggaatgacacctggtacccagacccacccattgaccctgg

SEQ ID NO: 686504 - DNA, 120 bp, Artificial Sequence
  ENSG00000187689_3 (sequence is synthesized)
gagggttgaatgtacaacagcaactgcacccacatgtgttaccaatttttgtcacacaacttggagcccagggcactatcctaagctcagaggaattgccacaaatcttcacgagcctca

SEQ ID NO: 686505 - DNA, 120 bp, Artificial Sequence
  ENSG00000187689_4 (sequence is synthesized)
ggctaatccagatgtccaggatggaagccttccagcaggaggagcaggtgtaaatcctgccacccagggaaccccagcaggccgcctcccaactcccagtggcacagatgacgactttgc

SEQ ID NO: 686506 - DNA, 120 bp, Artificial Sequence
  ENSG00000187689_5 (sequence is synthesized)
agtgaccacccctgcaggcatccaaaggagcacacatgccatcgaggaagccaccacagaatcagcaaatggaattcagtaagctgtttcaaattttttcaactaagctgcctcgaattt

SEQ ID NO: 686507 - DNA, 120 bp, Artificial Sequence
  ENSG00000187689_6 (sequence is synthesized)
ggtgatacatgtgaatctttatcattgattatattatggaatagattgagacacattggatagtcttagaagaaattaattcttaatttacctgaaaatattcttgaaatttcagaaaat

SEQ ID NO: 686508 - DNA, 120 bp, Artificial Sequence
  ENSG00000187689_7 (sequence is synthesized)
atgttctatgtagagaatcccaacttttaaaaacaataattcaatggataaatctgtctttgaaatataacattatgctgcctggatgatatgcatattaaaacatatttggaaaactga

SEQ ID NO: 686509 - DNA, 120 bp, Artificial Sequence
  ENSG00000187690_0 (sequence is synthesized)
accagttcgcgctctcctccggcagaagtagcagctgcgctcttgctctctgggggagaacctggcgttatggccactcagtcagacatggagaaggagcagaagcaccagcaggacgag

SEQ ID NO: 686510 - DNA, 120 bp, Artificial Sequence
  ENSG00000187690_1 (sequence is synthesized)
gggcagggagggctgaacaacgaaaccgcccttgcctccggggatgcctgcgggaccgggaatcaagatcctgctgcttccgtcaccacagtctccagccaagcatctccctcgggcggc

SEQ ID NO: 686511 - DNA, 120 bp, Artificial Sequence
  ENSG00000187690_2 (sequence is synthesized)
gccgccctaagcagcagcacagccggttcttccgctgcagccgccacctccgccgccattttcatcaccgatgaggcctcggggctgccaatcatagctgctgtgctgacggagaggcat

SEQ ID NO: 686512 - DNA, 120 bp, Artificial Sequence
  ENSG00000187690_3 (sequence is synthesized)
tctgaccgccaggactgccgcagtcctcacgaagtttttgggtgtgtggtgcccgaggggggcagccaggccgctgtggggccccagaaggccactggccacgccgacgagcacctggcc

SEQ ID NO: 686513 - DNA, 120 bp, Artificial Sequence
  ENSG00000187690_4 (sequence is synthesized)
cagaccaagagccccgggaacagccgtcgtaggaagcagccctgccgcaaccaggctgccccggctcagaagcctccagggcggcgtctgtttcctgagcctttgccgccatcttctcca

SEQ ID NO: 686514 - DNA, 120 bp, Artificial Sequence
  ENSG00000187690_5 (sequence is synthesized)
gggttccggcccagcagctatccctgttccggggcttctacgtcgagtcaggcaacccagccaggccctgcactcctaagccacgcatctgaggcaaggcctgctacccgaagccgcatc

SEQ ID NO: 686515 - DNA, 120 bp, Artificial Sequence
  ENSG00000187690_6 (sequence is synthesized)
accctggtagcttctgctctccgcagacgtgcatctggtccaggccctgtcatccgaggctgcaccgcccagccaggccctgcttttccacaccgcgccactcatctagaccctgctcgt

SEQ ID NO: 686516 - DNA, 120 bp, Artificial Sequence
  ENSG00000187690_7 (sequence is synthesized)
cgccgaggccgcgattctgcgccagtctctgccccccgaggccgcgattctgcgccaggctctgcccgccgaggccgcgattctgcgccaggccctgcccttcgcgtccgcacagcaagg

SEQ ID NO: 686517 - DNA, 120 bp, Artificial Sequence
  ENSG00000187690_8 (sequence is synthesized)
tcagacgccggtcatcgcagcaccagcacgacgccaggcactggcctccggagccgttccacccagcaaagatcagcccttctcagccgccgctctctgtctgggtcagctgatgagaat

SEQ ID NO: 686518 - DNA, 120 bp, Artificial Sequence
  ENSG00000187690_9 (sequence is synthesized)
ccttcctgtgggactggctcagaaaggcttgcctttcagagcagatcaggctctcctgatcctgaggtcccaagccgtgcttccccgcctgtttggcatgcagtccgtatgcgtgcctcc

SEQ ID NO: 686519 - DNA, 120 bp, Artificial Sequence
  ENSG00000187690_10 (sequence is synthesized)
tcaccctcaccccctgggaggttcttccttcccatccctcagcagtgggatgagagctcctcctcctcctatgcttccaactcctcctccccgagtaggtctcctggcctaagcccctca

SEQ ID NO: 686520 - DNA, 120 bp, Artificial Sequence
  ENSG00000187690_11 (sequence is synthesized)
tccccttcccctgagtttttgggcctgagatctatctccactcctagccctgaaagccttaggtatgctttgatgcctgagttttatgctctgagccctgtccctccagaagagcaggca

SEQ ID NO: 686521 - DNA, 120 bp, Artificial Sequence
  ENSG00000187690_12 (sequence is synthesized)
gaaatagagagcacagctcaccccgcaacaccgcctgagccgtgaccctctataagcatcctctaagacccacagaaggaatcaacatttacccactttgtgaatgggctgcctgccctg

SEQ ID NO: 686522 - DNA, 120 bp, Artificial Sequence
  ENSG00000187690_13 (sequence is synthesized)
tagttagctgcgaggtctcccaaagttccagccgttaaccaacatcctgagtagtttagaagcctctcctccccatgactccaccacctagcacttaacctgctgttggcctttgattct

SEQ ID NO: 686523 - DNA, 120 bp, Artificial Sequence
  ENSG00000187690_14 (sequence is synthesized)
gggccaccttcttcctcaagagtttgcctttgcccttgagctgagatttctgttttccaagttgcttttctgttatgaaatgttttaattagtaaaataaattgttttgtttaaacaaaa

SEQ ID NO: 686524 - DNA, 120 bp, Artificial Sequence
  ENSG00000187699_0 (sequence is synthesized)
acatgctgccacttggctgagccgggcgccggcgagaaggcggcgccgctgccctggcagctggactgcactttgcccccgcccggcctcagctgccgcccgcccagacgccagcaagcc

SEQ ID NO: 686525 - DNA, 120 bp, Artificial Sequence
  ENSG00000187699_1 (sequence is synthesized)
cccctcccacgacagggctgctccgggagcttcggagacccgccccgggcctgagcgcaggctgcctccgggaccccacggctgtccggacgtgccatgggcgcgcagctgccgggcaac

SEQ ID NO: 686526 - DNA, 120 bp, Artificial Sequence
  ENSG00000187699_2 (sequence is synthesized)
gtgttgtgtaaacactacacgtgaagagtggtgaaagggaacattgattactgaagtgccctggagagggaaagcactggtcaacatcacatggacaaatttcattgttttctaaagatg

SEQ ID NO: 686527 - DNA, 120 bp, Artificial Sequence
  ENSG00000187699_3 (sequence is synthesized)
gcctggaagtagtctttgccactgcttcctccacaaacagctcttcataacatgggctgcatgaaatcaaagcaaactttcccatttcctaccatatatgaaggtgagaagcagcatgag

SEQ ID NO: 686528 - DNA, 120 bp, Artificial Sequence
  ENSG00000187699_4 (sequence is synthesized)
agtgaagaaccctttatgccagaagagagatgtctacctaggatggcttctccagttaatgtcaaagaggaagtgaaggaacctccagggaccaatactgtgatcttggaatatgcacac

SEQ ID NO: 686529 - DNA, 120 bp, Artificial Sequence
  ENSG00000187699_5 (sequence is synthesized)
cgcctgtctcaggatatcttgtgtgatgccttgcagcaatgggcatgcaataacatcaagtaccatgacattccatacattgagagtgaggggccttgaggctgtaggatgacaacactt

SEQ ID NO: 686530 - DNA, 120 bp, Artificial Sequence
  ENSG00000187699_6 (sequence is synthesized)
tgactgtggaggtgctagtttgaataaatgtgacaaaagcaaaaactggtgtgaaaaagtacaaataactatctggatttaaaaatgtgtctacgataatgtcactattataagaacaac

SEQ ID NO: 686531 - DNA, 120 bp, Artificial Sequence
  ENSG00000187699_7 (sequence is synthesized)
taggatgaaatgcattttaagtacttctatgttaacagcaatttctgtttagtcttagattttagtcatctgaagggctgaacagaggtcctgtgacacccaataatcagctgaatgtca

SEQ ID NO: 686532 - DNA, 120 bp, Artificial Sequence
  ENSG00000187699_8 (sequence is synthesized)
cagcacttcttcctaagtaatggcatcaccaaagaaaatgctaaggaataaaaactgccccaaattccaatggttgaagtttatcctttaaaataacaatttttgtttgtttatacccaa

SEQ ID NO: 686533 - DNA, 120 bp, Artificial Sequence
  ENSG00000187699_9 (sequence is synthesized)
aaaaagtccagatatgaaaagggcttttctaaaatttcttggcgagggaatggcactcaaatcatagtgattaacagtaagtcttgtttgtttgtcaaggatctctacttcttgacacaa

SEQ ID NO: 686534 - DNA, 120 bp, Artificial Sequence
  ENSG00000187699_10 (sequence is synthesized)
atgaaccctgtctttaataagataagatatttatttttgtagatgagaagtgtaactaccaccttggacctcagggccctaactaattacagctgttactggacgactcagactttgtgc

SEQ ID NO: 686535 - DNA, 120 bp, Artificial Sequence
  ENSG00000187699_11 (sequence is synthesized)
ctaaagccatcttagagataacagtttatagaagccatgacattagtgtttattgcattgaattaagcccagtgatataactatacaagaaaacaagtaggggtaccttttacaaagagc

SEQ ID NO: 686536 - DNA, 120 bp, Artificial Sequence
  ENSG00000187699_12 (sequence is synthesized)
aatccaataaatcttaaaaataacagaaacttagtctgcaaggtagaaagtttcagttttaattctgtattaagctttactatctcagaggtacagagggctggaatatgggcatttatt

SEQ ID NO: 686537 - DNA, 120 bp, Artificial Sequence
  ENSG00000187699_13 (sequence is synthesized)
tccagttttttcttgactagtaaggcggtcaccattaaaatagaccagataatgcatgaagatttacagttgtattgcaaaacggaaaagataaaactgtcctttgaggagagtactcgt

SEQ ID NO: 686538 - DNA, 120 bp, Artificial Sequence
  ENSG00000187699_14 (sequence is synthesized)
tttctgggtttttgttattttttagtggtaacacaagcctatagggcatttatagccacctattatactgtttccataagcctggctaccttttagggaagctattttttctctttcatt

SEQ ID NO: 686539 - DNA, 120 bp, Artificial Sequence
  ENSG00000187699_15 (sequence is synthesized)
tttactgtcacagcacatacacacacacctttttgttttaaaggattaagtactgtttgaagatcagtggtaacagaaaatttgggagggagaagaagaaattaagacatgacttgttag

SEQ ID NO: 686540 - DNA, 120 bp, Artificial Sequence
  ENSG00000187699_16 (sequence is synthesized)
ttatttaagcctgtgtatgttagatccacaatacaccattggtattgaaatataaaggttaaaaaaaaggcttatgacctctttaatgagataaatatgtatttgtcttgtaagcaggca

SEQ ID NO: 686541 - DNA, 120 bp, Artificial Sequence
  ENSG00000187699_17 (sequence is synthesized)
gaaaatctacctctaattttaacactaatactttgaaacccacaatcaaatagagtgaattctccaagttacataagcaaggaaaacattatttgaaatatgccatgttttcgttgcctt

SEQ ID NO: 686542 - DNA, 120 bp, Artificial Sequence
  ENSG00000187699_18 (sequence is synthesized)
tggacacctcatcattcaactctaattttaccgagtcccgggatttgtactgtcccattgtacttgcaatctacaatttatataatagaaaaacaaccaaacccattcatacaaggatct

SEQ ID NO: 686543 - DNA, 120 bp, Artificial Sequence
  ENSG00000187699_19 (sequence is synthesized)
gaagttataaggttaagggcagaaagtttcccataagtataaaacatttccaggtcatgaagagtagtttaggttgagtgacaaaagcctaggtgtggttgtttttcattcattttgcat

SEQ ID NO: 686544 - DNA, 120 bp, Artificial Sequence
  ENSG00000187699_20 (sequence is synthesized)
ctcacaccaagacatttttgctgcaaggtcatctgctgcttaaaatgtacaattaggtatataaaataagtacaatggtgaaaacacaaagccaggtaaagcagcatgccccactaaact

SEQ ID NO: 686545 - DNA, 120 bp, Artificial Sequence
  ENSG00000187699_21 (sequence is synthesized)
tttcagtatacatagggacagacaagtgagttttggttgtatctaaatattttaatttcaggttccttctgtgccctgggccactatttcccaggggtgtgacagagatgcctgccagat

SEQ ID NO: 686546 - DNA, 120 bp, Artificial Sequence
  ENSG00000187699_22 (sequence is synthesized)
ccatatcaactagaagtctgatttctgttgctgcccttcctcagcaactatggcagtatacttttatcaccaagcaccactcccttgtccctgaatcacattttaatagagtacaatatc

SEQ ID NO: 686547 - DNA, 120 bp, Artificial Sequence
  ENSG00000187699_23 (sequence is synthesized)
ttctgtacaatatttctgaaacacttatgtctgaaatatatgctgtattgtatgttaacccatgacatatatgaactacaaggcttgcataatcagtgagctagtggataaatcaagaca

SEQ ID NO: 686548 - DNA, 120 bp, Artificial Sequence
  ENSG00000187699_24 (sequence is synthesized)
ggagcaaatgggagaaagatgaataaacaaatgaaaaaagatgaataaatgaataagagagatgaataaacaaatttacattacatgtgatagttatcatggtatggccttcatgacaag

SEQ ID NO: 686549 - DNA, 120 bp, Artificial Sequence
  ENSG00000187699_25 (sequence is synthesized)
atggatgagaatatcactgataggatattagccttctttcatatctttatattgaaatatgggctttacttcaatttgaaggtctttcatgaacaataaaagagagtagaaggactgtct

SEQ ID NO: 686550 - DNA, 120 bp, Artificial Sequence
  ENSG00000187699_26 (sequence is synthesized)
gagaaggcaggagacatataaaacagatgactgaaagactgactagctcctggaaagggaaacatttggaacatccagagtaagggcaaatgggcttctaccagcacaacaaagagcctc

SEQ ID NO: 686551 - DNA, 120 bp, Artificial Sequence
  ENSG00000187699_27 (sequence is synthesized)
caggtggcaacatggaagcaggttatcagagaaaataaatgtgcaaattccttatttacaatgactcacttaaccccacaaacatgtttcactgctgccttccccagttgtcgcttatgt

SEQ ID NO: 686552 - DNA, 120 bp, Artificial Sequence
  ENSG00000187699_28 (sequence is synthesized)
actgttgttacctttcagttacatgcctttgatcctaaaattctctacttttgttgccttatcagttctttgcaatctgcctgtggttatcagcacttaaagcacaattttgaaggggaa

SEQ ID NO: 686553 - DNA, 120 bp, Artificial Sequence
  ENSG00000187699_29 (sequence is synthesized)
aaaaatgataatcaccttagtcccaaagaaataatttgtcaaactgccttattagtattaaaaacagacacactgaatgaagtagcatgatacgcatatatcctactcagtatcattggc

SEQ ID NO: 686554 - DNA, 120 bp, Artificial Sequence
  ENSG00000187699_30 (sequence is synthesized)
cttttatcaaatggggaaactatacttttgtattacatagttttagaaatcgaaagttagagactctttataagtaatgtcaaggaacagtaatttaaaaacaaagttctaacaaatata

SEQ ID NO: 686555 - DNA, 120 bp, Artificial Sequence
  ENSG00000187699_31 (sequence is synthesized)
ttgtttgcttaatcacaatgccctcaacttgtatttgaataactaaataggacatgtcttccttggagctgtgggcattagttcagaagcactacctgcatcttaattttcaaaacttaa

SEQ ID NO: 686556 - DNA, 120 bp, Artificial Sequence
  ENSG00000187699_32 (sequence is synthesized)
gttttattagcaaatcctcttctctgtaagacttagctatgaagtggtatattttttccaaatatttttctgaaaacatttgttgttgtaactgcacaataaaagtccagttgcaattaa

SEQ ID NO: 686557 - DNA, 120 bp, Artificial Sequence
  ENSG00000187699_33 (sequence is synthesized)
gggagccagctgttgtcatcattcaggagctatcagcctatttctacatactttatatctgttttggattatttggattccagttgtaagcctccatttagaaagggagcatgagaagca

SEQ ID NO: 686558 - DNA, 120 bp, Artificial Sequence
  ENSG00000187699_34 (sequence is synthesized)
tttcattgacctctgcgatgcctcgctggcttctgctttcattgacctttgcgggtctgttcccgctgcggcgccggcagctgcttggtagttgcggggggcgtgagggcggtggcccag

SEQ ID NO: 686559 - DNA, 120 bp, Artificial Sequence
  ENSG00000187699_35 (sequence is synthesized)
accaaccggctggcagcccagctccgctccgcccgcccctgcctcggaccctgcgcctgaggaagtatcgaggcaaccctctgccacccgaagttcgtgggtcgctcccagagggcgcgc

SEQ ID NO: 686560 - DNA, 80 bp, Artificial Sequence
  ENSG00000187699_36 (sequence is synthesized)
cctggagccgagcgcccttgggcggccatctggaggccaggtgcgggccgcgaacccgcgaggagcgcgcggcgggcgcg

SEQ ID NO: 686561 - DNA, 120 bp, Artificial Sequence
  ENSG00000187699_37 (sequence is synthesized)
gaaacccatgagttacaggaggctttaattaaacgagaccgttctcagccagctgccgtggatagagcctcacatctccgtcccctaatcgagaagagttagcccctaccccttcaattt

SEQ ID NO: 686562 - DNA, 120 bp, Artificial Sequence
  ENSG00000187699_38 (sequence is synthesized)
tagagatttccttctccctgtggagtttcactccctgctcctctggtcaccctcctgatggatctctgtggtgccaggcaggaatggcctgctaggggatgcagcgagatcccaggtcct

SEQ ID NO: 686563 - DNA, 120 bp, Artificial Sequence
  ENSG00000187699_39 (sequence is synthesized)
actcctccatagttaacttgctacgtacatgaagccagaatagactagttcatatatccaagagcagggctcctgaagggcatggactctagcttattacagacataccctggcatctag

SEQ ID NO: 686564 - DNA, 120 bp, Artificial Sequence
  ENSG00000187699_40 (sequence is synthesized)
cacaatacctggcacataatagacagcagtctgcagcctggaagaggaccctcaccagaacctgaccatcttagcactgtgttttggacttccaggctccataactcctccatttagaaa

SEQ ID NO: 686565 - DNA, 120 bp, Artificial Sequence
  ENSG00000187699_41 (sequence is synthesized)
aaatgctgaagctgggagcggcgacagggaagcgctggctcccagaatggaggtaacggctgctgcggcctgggaggcttacccggaattaagggcgaggcgaggagatccgaaggaaaa

SEQ ID NO: 686566 - DNA, 120 bp, Artificial Sequence
  ENSG00000187699_42 (sequence is synthesized)
tgcctctttaggctgggttgccagagcccttggcctgggagaaggacttttaagcctattggacctgccagctgttggtgaccaggtgaaatagatatcctgagcacacctgtttgattc

SEQ ID NO: 686567 - DNA, 120 bp, Artificial Sequence
  ENSG00000187699_43 (sequence is synthesized)
caagcctccatttagaaagggagcatgagaagcactgaaaagtaaggcactgtgatctacacggaaaccatatattgggctcacagctactgaatgagaccgactggtggagacagttta

SEQ ID NO: 686568 - DNA, 120 bp, Artificial Sequence
  ENSG00000187699_44 (sequence is synthesized)
aatcagaaagctagaaggttaaaaaagtgtggtctagtgtgggccaccaaacccacaagtatcataagtaactaccacttttttagctggcaatgaatttgtcactgtctcaagcacttc

SEQ ID NO: 686569 - DNA, 120 bp, Artificial Sequence
  ENSG00000187699_45 (sequence is synthesized)
gtcactgtctcaagcacttcatatacattatgtcattttatcttcacaaaactctgtgagtgttctctccccattttatatttgagttaacgattttgggctgggcgcagtggctcacac

SEQ ID NO: 686570 - DNA, 120 bp, Artificial Sequence
  ENSG00000187699_46 (sequence is synthesized)
cagaatagactagttcatatatccaagagcagggctcctgaagggcatggactctagcttattacagacataccctggcatctagcacaatacctggcacataatagcctccatttagaa

SEQ ID NO: 686571 - DNA, 120 bp, Artificial Sequence
  ENSG00000187701_0 (sequence is synthesized)
atggagcagagcaattattccgtgtatgccgactttatccttctgggtttgttcagcaacgcccgtttcccctggcttctctttgccctcattctcctggtctttttgacctccatagcc

SEQ ID NO: 686572 - DNA, 120 bp, Artificial Sequence
  ENSG00000187701_1 (sequence is synthesized)
agcaacgtggtcaagatcattctcatccacatagactcccgcctccacacccccatgtacttcctgctcagccagctctccctcagggacatcctgtatatttccaccattgtgcccaaa

SEQ ID NO: 686573 - DNA, 120 bp, Artificial Sequence
  ENSG00000187701_2 (sequence is synthesized)
atgctggtcgaccaggtgatgagccagagagccatttcctttgctggatgcactgcccaacacttcctctacttgaccttagcaggggctgagttcttcctcctaggactcatgtcctat

SEQ ID NO: 686574 - DNA, 120 bp, Artificial Sequence
  ENSG00000187701_3 (sequence is synthesized)
ctcacccccgtcaccatgcagttccccttctgtgcctctcgggagatcaaccacttcttctgcgaggtgcctgcccttctgaagctctcctgcacggacacatcagcctacgagacagcc

SEQ ID NO: 686575 - DNA, 120 bp, Artificial Sequence
  ENSG00000187701_4 (sequence is synthesized)
atgtatgtctgctgtattatgatgctcctcatccctttctctgtcatctcgggctcttacacaagaattctcattactgtttataggatgagcgaggcagaggggaggggaaaggctgtg

SEQ ID NO: 686576 - DNA, 120 bp, Artificial Sequence
  ENSG00000187701_5 (sequence is synthesized)
gccacctgctcctcacacatggtggttgtcagcctcttctatggggctgccatgtacacatacgtgctgcctcattcttaccacacccctgagcaggacaaagctgtatctgccttctac

SEQ ID NO: 686577 - DNA, 120 bp, Artificial Sequence
  ENSG00000187701_6 (sequence is synthesized)
accatccttactcccatgctcaatccactcatttacagccttaggaacaaggatgtcacaggggccctacagaaggttgtggggaggtgtgtgtcctcaggaaaggtaaccactttctaa

SEQ ID NO: 686578 - DNA, 120 bp, Artificial Sequence
  ENSG00000187701_7 (sequence is synthesized)
tgaacaattgcatgtactaccttagttctgtaaggtttctctctaaatattcagatcatcgtgtttggggaagatactgtgtaagtttgctgctgcaagaaggaaagcaaacaccacttg

SEQ ID NO: 686579 - DNA, 80 bp, Artificial Sequence
  ENSG00000187713_0 (sequence is synthesized)
gtgggggcatggcgtccgatcgaggcgggcgttcacgggcggccagggttgagtcccgggtcggggccgggggattgccg

SEQ ID NO: 686580 - DNA, 120 bp, Artificial Sequence
  ENSG00000187713_1 (sequence is synthesized)
cgggcgagggccacggggagaggagacgcagccccgcgggtggcacgctcggccgggccccggcccgcgctcaacgggcgcgatgctcttctcgctccgggagctggtgcagtggctagg

SEQ ID NO: 686581 - DNA, 120 bp, Artificial Sequence
  ENSG00000187713_2 (sequence is synthesized)
ttctcgctccgggagctggtgcagtggctaggcttcgccaccttcgagatcttcgtgcacctgctggccctgttggtgttctctgtgctgctggcactgcgtgtggatggcctggtcccg

SEQ ID NO: 686582 - DNA, 120 bp, Artificial Sequence
  ENSG00000187713_3 (sequence is synthesized)
ggcctctcctggtggaacgtgttcgtgcctttcttcgccgctgacgggctcagcacctacttcaccaccatcgtgtccgtgcgcctcttccaggatggagagaagcggctggcggtgctc

SEQ ID NO: 686583 - DNA, 120 bp, Artificial Sequence
  ENSG00000187713_4 (sequence is synthesized)
cgccttttctgggtacttacggtcctgagtctcaagttcgtcttcgagatgctgttgtgccagaagctggcggagcagactcgggagctctggttcggcctcattacgtccccgctcttc

SEQ ID NO: 686584 - DNA, 120 bp, Artificial Sequence
  ENSG00000187713_5 (sequence is synthesized)
attctcctgcagctgctcatgatccgcgcctgtcgggtcaactagcctcaccgaggtgccggagagggagcgctggacaactagaatgttgacctcgagccgaggccctacttgcagcgc

SEQ ID NO: 686585 - DNA, 120 bp, Artificial Sequence
  ENSG00000187713_6 (sequence is synthesized)
gagaggctctctagtctgaaggcaccgccggcttgcgccgagctgagtgccgggtttccctattccaatcctgtttgaaatggtttcttcagcagggcttaaaagagcagccttcatcct

SEQ ID NO: 686586 - DNA, 120 bp, Artificial Sequence
  ENSG00000187713_7 (sequence is synthesized)
gaaaatgtatttccttttgtttaatgctttgagtagataatcctgaattgaggtcatgaggaggccccccaggccagacagtcctgaacccctctgacacttggaaactgaatataagta

SEQ ID NO: 686587 - DNA, 120 bp, Artificial Sequence
  ENSG00000187713_8 (sequence is synthesized)
aaatgtccaggtggactctgagtatttcctgtggatcctgggaaagtactgttgcacaaaggctgcaaagctggactcaggaatgtcctccaaccagcagcgctgacctaagagctccct

SEQ ID NO: 686588 - DNA, 120 bp, Artificial Sequence
  ENSG00000187713_9 (sequence is synthesized)
gtgccgtctatccagaccagacttcggtagatgcctttgttagatctatcacatgtaaacgagcttgtatctccttccctgtgccacgagagagattggctttttattccagtctaggca

SEQ ID NO: 686589 - DNA, 120 bp, Artificial Sequence
  ENSG00000187713_10 (sequence is synthesized)
gagacagaagaatgttgaataagagcacgattagagtcctgtctggttatctgttgcccaagaaaagaactctgctgtccaggcactgcttggcttactatcccagcaaagactgcagtt

SEQ ID NO: 686590 - DNA, 120 bp, Artificial Sequence
  ENSG00000187713_11 (sequence is synthesized)
ttgtggacttttgaccaccttgggctggcactcttagcacacctgagacagatttaagcctccctaagagactgaagagaggaacaggtgtcagatactcataggcactgagatctacaa

SEQ ID NO: 686591 - DNA, 120 bp, Artificial Sequence
  ENSG00000187713_12 (sequence is synthesized)
atgggaagcttgtgagtggcccatctttgttggcctacgaactttggtttgatgccagtcaggtgccacatgagaacctttgctgagatgcaaataaagtaagagaatgttttcctgaaa

SEQ ID NO: 686592 - DNA, 80 bp, Artificial Sequence
  ENSG00000187714_0 (sequence is synthesized)
aagagccgacgcgaggggaggggagcgcagcggcggggctaacgggcgggcaagcgggcgggcggcaacagcatgtccct

SEQ ID NO: 686593 - DNA, 120 bp, Artificial Sequence
  ENSG00000187714_1 (sequence is synthesized)
gcgcgccccgggcgaagtgcgcccagtctccggccccggcccctcggcgcgcccgacttcccggccgcccctgagcccagcagccgcgggtcccgggatcggctaagagtagctgcaacg

SEQ ID NO: 686594 - DNA, 120 bp, Artificial Sequence
  ENSG00000187714_2 (sequence is synthesized)
aacgcctcgccggacggagtcctttcctttcccgggacgctgggccatgagctccgcggccacctgaggcacaggggagtctgctcggccaggacagcctccccgaagtcccgtgccctc

SEQ ID NO: 686595 - DNA, 120 bp, Artificial Sequence
  ENSG00000187714_3 (sequence is synthesized)
gcctctgcactgcgggacgccagcgctcggccctggcggaggcgtcctcggaagagcatcggggtgggggcatggaatccgcggaacctgcgggccaggcccgggcggcggccaccaagc

SEQ ID NO: 686596 - DNA, 120 bp, Artificial Sequence
  ENSG00000187714_4 (sequence is synthesized)
tgtcggaggctgtgggcgcggcgctgcaggagccccggcggcagaggcgcctggtgcttgttatcgtgtgcgtggcgctgttactggacaacatgctgtacatggtcatcgtgcccatag

SEQ ID NO: 686597 - DNA, 120 bp, Artificial Sequence
  ENSG00000187714_5 (sequence is synthesized)
tgcccgactacatcgcccacatgcgcgggggcggcgagggccccacccggactcccgaggtgtgggagcccaccctgccgctgcccactccggccaatgccagcgcctacacggccaaca

SEQ ID NO: 686598 - DNA, 120 bp, Artificial Sequence
  ENSG00000187714_6 (sequence is synthesized)
cctcggcgtccccgacagctgcgtggccagcgggctcagcccttcggccccgctaccctacggagagcgaagacgtgaagatcggggtgctgtttgcttccaaggctatcctgcagctgc

SEQ ID NO: 686599 - DNA, 120 bp, Artificial Sequence
  ENSG00000187714_7 (sequence is synthesized)
tagtgaaccccttgagcgggcccttcatcgaccgcatgagctacgacgtgccgctgctgatcggcctgggcgtcatgttcgcctctacagtcctgttcgccttcgccgaggactacgcca

SEQ ID NO: 686600 - DNA, 120 bp, Artificial Sequence
  ENSG00000187714_8 (sequence is synthesized)
cgctgttcgcggcgcgcagcctgcagggcctgggctcagccttcgccgacacgtctggcatagccatgatcgccgataagtacccggaggagccggagcgcagtcgtgcactgggcgtgg

SEQ ID NO: 686601 - DNA, 120 bp, Artificial Sequence
  ENSG00000187714_9 (sequence is synthesized)
cgctggccttcattagcttcggaagcctagtggccccgcccttcgggggcatcctctatgagttcgccggcaagcgcgtgcccttcttggtgctagctgccgtgtcgctctttgacgcgc

SEQ ID NO: 686602 - DNA, 120 bp, Artificial Sequence
  ENSG00000187714_10 (sequence is synthesized)
gcagtggccaaacccttctcggcggctgcacgggctcgggccaacctgccagtgggcactcccatccaccgcctcatgctagacccctacattgccgtggtggccggcgcgctcaccacc

SEQ ID NO: 686603 - DNA, 120 bp, Artificial Sequence
  ENSG00000187714_11 (sequence is synthesized)
tgtaacattcccctcgccttcctcgaacccaccattgccacgtggatgaagcatacgatggcggcttccgagtgggagatgggcatggcctggctgccggccttcgtgcctcatgtgctg

SEQ ID NO: 686604 - DNA, 120 bp, Artificial Sequence
  ENSG00000187714_12 (sequence is synthesized)
ggcgtctacctcaccgtgcgcctggcggcgcgctacccacacctgcagtggctgtacggcgcgcttgggctggctgtgatcggcgccagctcgtgcatcgtgcccgcctgccgctccttc

SEQ ID NO: 686605 - DNA, 120 bp, Artificial Sequence
  ENSG00000187714_13 (sequence is synthesized)
gcgccgctagtggtctcactatgcggcctctgttttggcatagccctagtcgacacagcactgctgcccacgctcgccttcctggtggacgtgcgccatgtctcagtctatggcagcgtc

SEQ ID NO: 686606 - DNA, 120 bp, Artificial Sequence
  ENSG00000187714_14 (sequence is synthesized)
tacgccatcgccgacatctcctattcggtggcctacgcgctcgggcccatagtggcaggccacattgtgcactcgctgggctttgagcagctcagccttggcatgggactggccaacctg

SEQ ID NO: 686607 - DNA, 120 bp, Artificial Sequence
  ENSG00000187714_15 (sequence is synthesized)
ctctatgctcccgtcttgctgctgctccgcaacgtgggcctcctgacgcgctcccgttccgagcgcgatgtgctgcttgatgagccaccgcaaggtctgtacgatgcggtgcgcctgcgt

SEQ ID NO: 686608 - DNA, 120 bp, Artificial Sequence
  ENSG00000187714_16 (sequence is synthesized)
gagcgtcctgtgtctggccaggacggcgagcctcgcagcccgcctggcccttttgatgcgtgcgaggacgactacaactactactacacccgcagctagcatccccactcctcctccagc

SEQ ID NO: 686609 - DNA, 120 bp, Artificial Sequence
  ENSG00000187714_17 (sequence is synthesized)
ccacccaaccgccttgggtcaagggggctgctctgcaagcccactggccagctctggctcagggcccacctcctccagcgagtaccccagccactcctcaaccttgacttctgcccaaat

SEQ ID NO: 686610 - DNA, 120 bp, Artificial Sequence
  ENSG00000187714_18 (sequence is synthesized)
cccctccctgtgacccgttccatatccctttctctcttgtccaatggggcttggagcaccgaggccagcgaagccatcgcgctccttgcggaggtgaagaggaccctgagtccccacctg

SEQ ID NO: 686611 - DNA, 120 bp, Artificial Sequence
  ENSG00000187714_19 (sequence is synthesized)
cggctcccctgtgtagagcctgcatctgtctgtccttccttccattgctcccagtgccaaacttgggccgctgcaccgcggcgcctccgcccaaatcaataaactgtgtctgtcccagga

SEQ ID NO: 686612 - DNA, 120 bp, Artificial Sequence
  ENSG00000187715_0 (sequence is synthesized)
agtagggtacgggacgcgcgcggggagaccctgtgcagcgacaccggggctgtagtcgccgtctggaaccagcgcgggaataggtgcgcaggcgcacagtggctggagggcagcggcggc

SEQ ID NO: 686613 - DNA, 120 bp, Artificial Sequence
  ENSG00000187715_1 (sequence is synthesized)
gtggtctcgggccacttccaagcagagggcagcacctgtcccctcggaggcgctgccagcgccctccctcctcctccgcagggcgcgggacctctatttatatcgcccagccagcacagg

SEQ ID NO: 686614 - DNA, 120 bp, Artificial Sequence
  ENSG00000187715_2 (sequence is synthesized)
cccatattgggcagtggcctcagtcaggcccgctggccgccctgccacacggtagcgtccaagccaggtcgtggcccagcgagtggggacgcgccccgaaccaggcagcaccttcaaatg

SEQ ID NO: 686615 - DNA, 120 bp, Artificial Sequence
  ENSG00000187715_3 (sequence is synthesized)
tttcctgacatctttgtagcttcatgagtaatcagacatgcaaatagcccctcaggaatcaagctacacttaaagaagacttagttggaaactttggagagtagatcatggagtgcaaga

SEQ ID NO: 686616 - DNA, 120 bp, Artificial Sequence
  ENSG00000187715_4 (sequence is synthesized)
ttgagggaaaagaaaaataccaacatagcttgaatttactgaataaaattcagaacatgaaagaattagcagaaatgattgatgtggtactcacagcagaaggagagaaatttccttgcc

SEQ ID NO: 686617 - DNA, 120 bp, Artificial Sequence
  ENSG00000187715_5 (sequence is synthesized)
acagactggtcctggctgcatttagcccttatttcaaagctatgttcacctgtggactacttgaatgtaatcaaagggaagtcatactttatgacatcacagcagaaagtgtgtcggtgt

SEQ ID NO: 686618 - DNA, 120 bp, Artificial Sequence
  ENSG00000187715_6 (sequence is synthesized)
tattaaattacatgtacaatgcagctttggagatcaataatgccaatgtacagactgtagctatggctgcctattttatgcagatggaagaagtcttcagtgtgtgtcaaaaatatatga

SEQ ID NO: 686619 - DNA, 120 bp, Artificial Sequence
  ENSG00000187715_7 (sequence is synthesized)
tggaccacatggatgcctccaactgtttaggtatctattattttgcaaagcagattggagctgaagatttatctgatcgatcaaagaaatatttatatcagcactttgccgaggtgagct

SEQ ID NO: 686620 - DNA, 120 bp, Artificial Sequence
  ENSG00000187715_8 (sequence is synthesized)
tacatgaagaaatactagaaatcgaagtgcaccaatttttgacacttattaaatcagatgatcttaacatatccagagaagagagcattctggacttagttctgagatgggtaaatcata

SEQ ID NO: 686621 - DNA, 120 bp, Artificial Sequence
  ENSG00000187715_9 (sequence is synthesized)
acaaagaattgcgtacagtgcatcttgttgagcttttgaagcaagtcagattggaacttgtaaatccttcttttttaagacaagccctaagaaggaacacaatgcttctgtgtgatgcag

SEQ ID NO: 686622 - DNA, 120 bp, Artificial Sequence
  ENSG00000187715_10 (sequence is synthesized)
attgtgttgacataattcaaaatgcattcaaagccatcaagacaccccaacagcactctctaaatctgcgctatggtatggagactaccagtcttctgctttgcattggcaacaattctt

SEQ ID NO: 686623 - DNA, 120 bp, Artificial Sequence
  ENSG00000187715_11 (sequence is synthesized)
caggaatcagatcaagacataggagctatggggatgccagtttttgttatgatcctgtatcacggaaaacctatttcatctcatctcccaagtacggagagggtttaggaactgtgtgta

SEQ ID NO: 686624 - DNA, 120 bp, Artificial Sequence
  ENSG00000187715_12 (sequence is synthesized)
ctggtgttgtcatggaaaataatactataattgtggctggagaagcaagtgcctctaaactctctagacaaaagaacaagaatgttgaaatttataggtatcatgatagaggaaaccagt

SEQ ID NO: 686625 - DNA, 120 bp, Artificial Sequence
  ENSG00000187715_13 (sequence is synthesized)
tttgggaaaagttatgcacagctgaatttcgagaactctatgctctgggcagtattcataatgacctttatgttataggaggacagatgaaaattaaaaaccagtatcttattacaaact

SEQ ID NO: 686626 - DNA, 120 bp, Artificial Sequence
  ENSG00000187715_14 (sequence is synthesized)
gtgttgataagtactctgtagaacgggacaattggaaaagggtgtctccccttccactgcaattggcatgtcatgctgtagtgacagtgaataataaactttatgtaattggaggctgga

SEQ ID NO: 686627 - DNA, 120 bp, Artificial Sequence
  ENSG00000187715_15 (sequence is synthesized)
cccctcagatggatcttcctgatgaagaacctgatcgattaagcaacaaactgttgcagtatgaccccagccaagatcaatggagtgtgcgggcacccatgaagtactctaagtaccgat

SEQ ID NO: 686628 - DNA, 120 bp, Artificial Sequence
  ENSG00000187715_16 (sequence is synthesized)
tcagtacagctgtagtcaacagtgagatttatgttttgggtggcattggctgtgtaggtcaagacaagggccaggttcgaaaatgccttgacgtggtggagatctacaacccagatgggg

SEQ ID NO: 686629 - DNA, 120 bp, Artificial Sequence
  ENSG00000187715_17 (sequence is synthesized)
acttttggcgagagggccctcccatgccaagtcccctcctctcactccgcaccaattccaccaatgcaggggcagtggatgggaaactctatgtctgcgggggattccatggagcagatc

SEQ ID NO: 686630 - DNA, 120 bp, Artificial Sequence
  ENSG00000187715_18 (sequence is synthesized)
gccatgaggttatctccaaagaaatattggaactggacccatgggaaaaccagtggaatgttgtagccatcaacgtcctcatgcatgacagctatgatgtctgcctagtagccaggatga

SEQ ID NO: 686631 - DNA, 120 bp, Artificial Sequence
  ENSG00000187715_19 (sequence is synthesized)
atccccgagacctcatccccccgccttcagatttggtggaagaaggcaatgagcactaaggtgaccttgctggaggacctcctgctgttctgcaaacaaggccttcagaacggagagggc

SEQ ID NO: 686632 - DNA, 120 bp, Artificial Sequence
  ENSG00000187715_20 (sequence is synthesized)
ccacagcatctctgtcatgccagtcatgtgcactgcatgcgtagtggcctgtgtgtgaagaagcagtgtgtgctgggcactgggtggggagcatggggagtctcccttcagggacttccc

SEQ ID NO: 686633 - DNA, 120 bp, Artificial Sequence
  ENSG00000187715_21 (sequence is synthesized)
agcctgatagggtaaataagacactacaaagaagaggtgatgacggccacaggaggggcacagggccacaggagagcagcagagggagggtctcactctgctggggacccatgaacagca

SEQ ID NO: 686634 - DNA, 120 bp, Artificial Sequence
  ENSG00000187715_22 (sequence is synthesized)
ctgccaaggagcagaccttttattgggtccccaaaaggatgaggaggaagtggtcccatgggtgcagtcaatgatgagttcatggaaacagccaagcaagggcccagagacagaaagctc

SEQ ID NO: 686635 - DNA, 120 bp, Artificial Sequence
  ENSG00000187715_23 (sequence is synthesized)
gaccaacgcctgaaagaatgaggagttggacctggtctgtaagccagggaattgtctcaaaatcgtgcattaagggagacttctctctgtgctctgttccagcttcagtcttataaacac

SEQ ID NO: 686636 - DNA, 120 bp, Artificial Sequence
  ENSG00000187715_24 (sequence is synthesized)
tgaccattctccttcagaatccccttctactgaagcaacgccacccagcagcagggctagctgtactaccagcccctaacaaccaaggcactcaagccagaccacagtggccaagaatcc

SEQ ID NO: 686637 - DNA, 120 bp, Artificial Sequence
  ENSG00000187715_25 (sequence is synthesized)
tgccctgggctgactctgtccgggacagggatgtggggttctgcagcctggtccactccggggctggcagggagtgtcctggagtgggctgacccaggctgcctttgcccacctctcaga

SEQ ID NO: 686638 - DNA, 120 bp, Artificial Sequence
  ENSG00000187715_26 (sequence is synthesized)
cacatacaaccatctgcagggtagtcctggctgaacaggactcgcccaagccacccaagccagggacagagaaggctctggctgaggacaggggaagaagcatctcctccagctgctgcc

SEQ ID NO: 686639 - DNA, 120 bp, Artificial Sequence
  ENSG00000187715_27 (sequence is synthesized)
aaccccatggcccggcctttgcaataaagatggagccacccacttcagcccacaattgagcataatcagaagacagtcactcccaaaatatatgttagaaataacatttaaatgacacat

SEQ ID NO: 686640 - DNA, 120 bp, Artificial Sequence
  ENSG00000187715_28 (sequence is synthesized)
gggaagtccgtctatcttacttcccgtctctaattctggaagcacagtggattcaatgagggcatcttcatagctcttcttcagcaacttctccaaagagtttcacattgcacaaggctc

SEQ ID NO: 686641 - DNA, 120 bp, Artificial Sequence
  ENSG00000187715_29 (sequence is synthesized)
ttttggaagcaggagtggtcagtaaattcagagggagacaaaccctaagtagagacagctttctttggtgctgagctgtgtgattgtgatgaccgctagcctgtgcccctaggttccagc

SEQ ID NO: 686642 - DNA, 120 bp, Artificial Sequence
  ENSG00000187715_30 (sequence is synthesized)
tgcccaccaggcaggacaggcaggtcttgccaaaactggagcctgttggaaacctatttctgccaccaaggagagggaccaggagacccagcgtaggttggccccaagtaggctcaactc

SEQ ID NO: 686643 - DNA, 120 bp, Artificial Sequence
  ENSG00000187715_31 (sequence is synthesized)
gggagggtgggggtcccgcctttctcttcgcacttgtgccccaagtgcactcacagtacctggcatgtgggtgacctcttgggtggccggcatggggcagtgtttctcaatcagagggcc

SEQ ID NO: 686644 - DNA, 120 bp, Artificial Sequence
  ENSG00000187715_32 (sequence is synthesized)
tgggccccgagcacgtccaggaatctgagttaaagtgagcttactctttccccagtggatgatcatgatctgtgcattctttttcttgctacaaagatgttcctcctagctgctgtgttg

SEQ ID NO: 686645 - DNA, 120 bp, Artificial Sequence
  ENSG00000187715_33 (sequence is synthesized)
gctgtcggcggccagggttgaggacggcctccacagggcctccacttccctccattcctcttcacatagtcactccacctgctccacctgcttgaaaagtccagaaagctgccgcgtctc

SEQ ID NO: 686646 - DNA, 120 bp, Artificial Sequence
  ENSG00000187715_34 (sequence is synthesized)
cctggctcaaggaggccttgttggcatgtcatggcacatctcctagatgttttgggttcaagatctgggttccagcccccgctctgctacttagctaaccatgtgaacttgggcaagatg

SEQ ID NO: 686647 - DNA, 120 bp, Artificial Sequence
  ENSG00000187715_35 (sequence is synthesized)
acctttctaaagcctcatttccctcatatgcagagtgggaaggaaaatattaatacatactttatagggttggtatgaggattaagtgctgagcaaagtgcctgtgaaatcctgaaataa

SEQ ID NO: 686648 - DNA, 120 bp, Artificial Sequence
  ENSG00000187715_36 (sequence is synthesized)
taagcatgttttagctgccattattatcatcactgtcattatcattgcagtcagcacttcccaaagcaaggtgcccaaaacagactcagtgctttagggaagtggggcagatgtgcatat

SEQ ID NO: 686649 - DNA, 78 bp, Artificial Sequence
  ENSG00000187715_37 (sequence is synthesized)
cagactcagtgctttagggaagtggggcagatgtgcatatggcttgtgacggctcgccaggctggagtgcagtgcagt

SEQ ID NO: 686650 - DNA, 81 bp, Artificial Sequence
  ENSG00000187715_38 (sequence is synthesized)
tgagatggttcttaatttcccataccctgttgcttggctcctccagttggcggctgagagttaagcaagggtttactcgga

SEQ ID NO: 686651 - DNA, 120 bp, Artificial Sequence
  ENSG00000187715_39 (sequence is synthesized)
tccagttggcggctgagagttaagcaagggtttactcggatctgaggcccccgatgccctcaatggacacattcaggaccctgtggcagctcagcagaggcacctgagggtcacgctagg

SEQ ID NO: 686652 - DNA, 120 bp, Artificial Sequence
  ENSG00000187715_40 (sequence is synthesized)
tgagaccatcgcccgcctgtgggaggcaagataagtgggtaaacatcattcctgtctaatgcgaggtctgggcagtgtcccagtggaactttccagagagtgccaagggaggaccgagaa

SEQ ID NO: 686653 - DNA, 120 bp, Artificial Sequence
  ENSG00000187715_41 (sequence is synthesized)
ggggcatgacctctgctggagccaggagggcagtgaccaggagctggcttagcactgaagggaagcaggcatcaagggcaggatttctcaaacttcttctgaggaatccccgaggtcgaa

SEQ ID NO: 686654 - DNA, 120 bp, Artificial Sequence
  ENSG00000187715_42 (sequence is synthesized)
accggtgcttcacagatttcagatgtctgatcttgatttttctttgattccatacaacagattgcttgcctgggttagtgcttattttaagttcttggtgcttcttgtctgacttctgta

SEQ ID NO: 686655 - DNA, 120 bp, Artificial Sequence
  ENSG00000187715_43 (sequence is synthesized)
tttgcaattaaaaacaacatgaccctccccacctgcagccagatatcgttagaaattcaacttcgaaatatattcctatcactcctgttttcactttaatagaaggctgttgcagtactg

SEQ ID NO: 686656 - DNA, 120 bp, Artificial Sequence
  ENSG00000187715_44 (sequence is synthesized)
catgatgggctcttataaaacttctactatctgctaattcttatctttgtgacaggattgtttgacactgagcaaggaaacacaataaggaagtaatttggatgctaggctggcagaagc

SEQ ID NO: 686657 - DNA, 120 bp, Artificial Sequence
  ENSG00000187715_45 (sequence is synthesized)
ctgcagctgtcaaccacagcctgccccagtgtgttcaacacggtggcattgttctccctgacttcataatgagcaaatgtttcacatttgaacttaaggaataaatttttactaataaaa

SEQ ID NO: 686658 - DNA, 120 bp, Artificial Sequence
  ENSG00000187715_46 (sequence is synthesized)
atattgggcagtggcctcagtcaggcccgctggccgccctgccacacggtagcgtccaagccaggtcgtggcccagcgagtggggacgcgccccgaaccaggcagcaccttcgtggcatt

SEQ ID NO: 686659 - DNA, 120 bp, Artificial Sequence
  ENSG00000187715_47 (sequence is synthesized)
atattgggcagtggcctcagtcaggcccgctggccgccctgccacacggtagcgtccaagccaggtcgtggcccagcgagtggggacgcgccccgaaccaggcagcaccttcgtatcatg

SEQ ID NO: 686660 - DNA, 120 bp, Artificial Sequence
  ENSG00000187720_0 (sequence is synthesized)
agaacagaggctgagctcgaagcgccgggcagtacagtgagggagagccgagggaaccagcgcggtgcctagcggaactccagggctggaatcccgagacacaagtgcatctgctagctg

SEQ ID NO: 686661 - DNA, 120 bp, Artificial Sequence
  ENSG00000187720_1 (sequence is synthesized)
ttagcacttggcagacggagttctcctctagggtagttctaactttgggtaataatgtttgtcagctacctgatattaacattgctccacgttcaaacagcagtgttagcaagacctggg

SEQ ID NO: 686662 - DNA, 120 bp, Artificial Sequence
  ENSG00000187720_2 (sequence is synthesized)
ggagagagcattggctgtgatgactacttaggctccgacaaagtcgtggacaaatgtggggtgtgtggaggagacaacacgggctgtcaggttgtgtcgggcgtgtttaagcatgccctc

SEQ ID NO: 686663 - DNA, 120 bp, Artificial Sequence
  ENSG00000187720_3 (sequence is synthesized)
accagcctgggctaccaccgcgtcgtggagattcccgagggagccacgaaaatcaacatcacggagatgtacaagagcaacaactatttggccctgagaagtcgttctggacgctccatc

SEQ ID NO: 686664 - DNA, 120 bp, Artificial Sequence
  ENSG00000187720_4 (sequence is synthesized)
atcaatgggaactgggcaattgatcgaccaggaaaatacgagggcggagggaccatgttcacctacaagcgtccaaatgagatttcgagcactgccggagagtcctttttggcggaaggt

SEQ ID NO: 686665 - DNA, 120 bp, Artificial Sequence
  ENSG00000187720_5 (sequence is synthesized)
cccaccaacgagatcttggatgtctacatgatacaccagcagccaaacccaggcgtgcactacgagtacgtgatcatggggaccaacgccatcagcccccaggtgccaccccacaggaga

SEQ ID NO: 686666 - DNA, 120 bp, Artificial Sequence
  ENSG00000187720_6 (sequence is synthesized)
ccaggggaacccttcaatggccagatggtgacagaaggcaggagccaggaggagggagaacagaaagggaggaacgaggagaaggaagacttgcgtggggaggcccctgagatgttcacc

SEQ ID NO: 686667 - DNA, 120 bp, Artificial Sequence
  ENSG00000187720_7 (sequence is synthesized)
tcagaatcggcacagaccttcccagtcaggcatccagacagattttctccccatcgaccggacaacttggtgccaccagcaccgcagcccccacggcgcagccgggatcacaactggaag

SEQ ID NO: 686668 - DNA, 120 bp, Artificial Sequence
  ENSG00000187720_8 (sequence is synthesized)
cagcttgggacaacagaatgttccacgacctgtgggaaaggatcgcagtaccctattttccgctgtgtgcacagaagcactcatgaagaggctcctgagagttactgtgactccagcatg

SEQ ID NO: 686669 - DNA, 120 bp, Artificial Sequence
  ENSG00000187720_9 (sequence is synthesized)
aagccgacccccgaggaggagccctgcaacatcttcccttgcccagccttctgggacatcggggagtggtctgagtgcagcaagacctgtggcctgggcatgcagcaccgccaggttctg

SEQ ID NO: 686670 - DNA, 120 bp, Artificial Sequence
  ENSG00000187720_10 (sequence is synthesized)
tgccgccaggtgtacgccaaccgcagcctgacggtgcagccctaccgctgccagcacctggagaaacctgagaccaccagcacctgccaactcaagatctgcagcgagtggcagatccgg

SEQ ID NO: 686671 - DNA, 120 bp, Artificial Sequence
  ENSG00000187720_11 (sequence is synthesized)
accgactggacctcgtgctcggtgccctgcggcgtgggacagaggacccgtgatgtgaagtgtgtgagcaacattggggatgtggttgacgatgaggaatgcaacatgaagctccggccg

SEQ ID NO: 686672 - DNA, 120 bp, Artificial Sequence
  ENSG00000187720_12 (sequence is synthesized)
aatgacattgagaactgcgacatgggaccctgtgccaagagctggttcctcaccgagtggagcgaaaggtgctcagcggagtgtggggccggagtgcggacacgctcggtggtgtgcatg

SEQ ID NO: 686673 - DNA, 120 bp, Artificial Sequence
  ENSG00000187720_13 (sequence is synthesized)
accaaccatgtcagcagcctgcccctggagggctgtgggaacaaccggccggcagaggccaccccatgtgacaacggaccctgcacgggcaaggtggagtggtttgccgggagctggagt

SEQ ID NO: 686674 - DNA, 120 bp, Artificial Sequence
  ENSG00000187720_14 (sequence is synthesized)
tgatttgtgttagaaagaatgcagacacctttgaagtgttggacccctctgaatgttctttcctggagaaaccccccagccagcaatcctgccacctcaagccttgcggagccaaatggt

SEQ ID NO: 686675 - DNA, 120 bp, Artificial Sequence
  ENSG00000187720_15 (sequence is synthesized)
ttagcaccgaatggagcatgtgttccaagagctgccagggtggctttcgggtccgggaagtgcggtgtctgtctgatgacatgactctaagtaacctctgtgaccctcagttgaaaccag

SEQ ID NO: 686676 - DNA, 120 bp, Artificial Sequence
  ENSG00000187720_16 (sequence is synthesized)
aagagagagaatcttgtaaccctcaggactgtgtccctgaagttgatgaaaactgcaaggacaagtactacaactgcaacgtggtggtccaggcaagactctgtgtctacaactactaca

SEQ ID NO: 686677 - DNA, 120 bp, Artificial Sequence
  ENSG00000187720_17 (sequence is synthesized)
agaccgcctgctgtgcctcctgcacccgtgtggccaacaggcagacgggcttcctggggagcagataacactcctgcacccccatcagtagggcagcatcactgccttcccgggggcttc

SEQ ID NO: 686678 - DNA, 120 bp, Artificial Sequence
  ENSG00000187720_18 (sequence is synthesized)
agcagtgcgcctggctggctgctgctccaccacgggccccctggcccaggcgctgccaaccaacttagtcaccacccctgcctccggtgaatgcaccccgtggtacccaggggcttttta

SEQ ID NO: 686679 - DNA, 120 bp, Artificial Sequence
  ENSG00000187720_19 (sequence is synthesized)
cacaagatgtttgaaagccacagtcagtcctttaagcatcaccatgtactgatgatcccctccttggacctggcatctgctaatggtgccctttgaaagtcaagcagtgggaagtacatg

SEQ ID NO: 686680 - DNA, 120 bp, Artificial Sequence
  ENSG00000187720_20 (sequence is synthesized)
gagctctcagccctgctcccatctggcaccttcaagtcagcagatgggccactgactgagcactgccccgtccctggtgctactggtctttctaaacttagcaccctggagagtccaagg

SEQ ID NO: 686681 - DNA, 120 bp, Artificial Sequence
  ENSG00000187720_21 (sequence is synthesized)
aggcagcgcccccaacccagcgccccactaagccttgctgacacgcgtgcatccctctgtgacctcagcccagatgtgcctgttttcattctcaaagacattagactgttttcctgccct

SEQ ID NO: 686682 - DNA, 120 bp, Artificial Sequence
  ENSG00000187720_22 (sequence is synthesized)
atgacacagatagctcacatgaatattgtgctttatttagcaggtgtactcacagatactagctccttagcagctcacaacatcccagaatgggaggcagggggtgactcattatcccca

SEQ ID NO: 686683 - DNA, 120 bp, Artificial Sequence
  ENSG00000187720_23 (sequence is synthesized)
ttttactgacagggaaactgaggctcaacttaagtaattgacctgccaggtatattcacccatccagtggaagagctgagtccccgccccagtcatctaccagtatccagcctggggcct

SEQ ID NO: 686684 - DNA, 120 bp, Artificial Sequence
  ENSG00000187720_24 (sequence is synthesized)
gtacttagatgtgaaaggtgctgcttcatttctgaccaagagactgagaagtttcccagaatgcaaacaaagcccaggcccctgaaatctttccggtcaagcctttatcccagcactcag

SEQ ID NO: 686685 - DNA, 120 bp, Artificial Sequence
  ENSG00000187720_25 (sequence is synthesized)
ttgttttggatgtctgttcctacttgcccttacccccaaagttacagatcctagttacaggactctgccagctttgttaaactgtccgtgagacaagaaagccattggggaaaccaggtg

SEQ ID NO: 686686 - DNA, 120 bp, Artificial Sequence
  ENSG00000187720_26 (sequence is synthesized)
attgcctgaaattcttactccgttccaagtgctgttcctcccaggaaatcaaaggccagggtccttatggccgtggagccttcccgaccacagagccaacttgtgaagcacacagctctg

SEQ ID NO: 686687 - DNA, 120 bp, Artificial Sequence
  ENSG00000187720_27 (sequence is synthesized)
cagcctgggctctgccctgcctcagccgcctcccccacgctcttcaccacgttcctggagagtccggccaacctgtcccagccgaaacactgctgtattagaaaaagtctctttctggtc

SEQ ID NO: 686688 - DNA, 120 bp, Artificial Sequence
  ENSG00000187720_28 (sequence is synthesized)
cgaaaatcaacatcacggagatgtacaagagcaacaaaaaaaaaagccatttaaagccagccactagagggagtcagttcagttccgtaaaggtatgctcagtgcccgctgcctgcaagc

SEQ ID NO: 686689 - DNA, 120 bp, Artificial Sequence
  ENSG00000187720_29 (sequence is synthesized)
tgttggggaccccagggagggcaaggcagcctgtccccgcccccagggaactagaacatgacaagaattctccgcactgtgcctacctgtccctttaccttacctctctggcccagagtt

SEQ ID NO: 686690 - DNA, 120 bp, Artificial Sequence
  ENSG00000187720_30 (sequence is synthesized)
cttggagggttttttctttattttcttatgtactcatctacttattctcaaagtatttagcattcaacactctttttgctttaaaaagaatggccttacaaagggacagaaaagagaaga

SEQ ID NO: 686691 - DNA, 120 bp, Artificial Sequence
  ENSG00000187720_31 (sequence is synthesized)
cacgagcttggtgtattttcatcaagttatgtggcagagaaatccagatattaccaggacctgtctaaacaaatgttgtgggttttcttttcattcggatagccactttatagttggaat

SEQ ID NO: 686692 - DNA, 120 bp, Artificial Sequence
  ENSG00000187720_32 (sequence is synthesized)
atcaattctaatgaggaggaagacataaatataagtggtaaaaagaaacatgacttcccttaaaacaggctggataatctatatcagccttgtgggtggagactagtatttgatccttgc

SEQ ID NO: 686693 - DNA, 120 bp, Artificial Sequence
  ENSG00000187720_33 (sequence is synthesized)
catataaaacattttaatatggtttacatgggaaaatatcgatggcttcctcacaaaatgtatgggtgacgtgaagttgaagagccaatggcttgggtgacacgtgctggatccaaaaag

SEQ ID NO: 686694 - DNA, 120 bp, Artificial Sequence
  ENSG00000187720_34 (sequence is synthesized)
atcagggagactagaataaaacttggatgttaaaaattcaccaggaatccacataaagtactatatttgggctaaaatgaaaaactaaatacaaggtgggagagaggcaagaatttcagt

SEQ ID NO: 686695 - DNA, 120 bp, Artificial Sequence
  ENSG00000187720_35 (sequence is synthesized)
tgactaagctcagtgtgagtcaaagtgggatggaaccatgcaaaaacaaaacccacagacatgcaggctacgtgaggagaaaacagtggtgaggatcacatcacattgtgtttgcatttg

SEQ ID NO: 686696 - DNA, 120 bp, Artificial Sequence
  ENSG00000187720_36 (sequence is synthesized)
ccggaaccatactttaagaagaaaaccgatcatctataataacatcagtttatcaatgccccgtcctgatgaagtgtgcagactctcagaaacagcaggaaggacttcatgagaaccctc

SEQ ID NO: 686697 - DNA, 120 bp, Artificial Sequence
  ENSG00000187720_37 (sequence is synthesized)
aggctggagaaggcactagggcacaaggagagctctcctaggaccaggaccaagaagctacaggcaggcacagtttagctcctgcagagacccagcttttcacaagttggagccttccag

SEQ ID NO: 686698 - DNA, 120 bp, Artificial Sequence
  ENSG00000187720_38 (sequence is synthesized)
gtggtaggtggtgacccacccatcactggaggtggaagcagaggccgtttgccagggatgctggagaggggattcaagcatctggctgggcaacgtgatgctcagggccgtctccactca

SEQ ID NO: 686699 - DNA, 120 bp, Artificial Sequence
  ENSG00000187720_39 (sequence is synthesized)
gggcttaggggagtctgtgagtagaagagctttaggtgatttgtttggtgggggaaggcaagtacacagctatgcactttccgtttctgacttttgccaccctgtcagccatggggagcc

SEQ ID NO: 686700 - DNA, 120 bp, Artificial Sequence
  ENSG00000187720_40 (sequence is synthesized)
cactgtgggactgaaaccctgagctgaatgcggcctcatgtctcagagaaacactggcaagttggtcagagccgccgtctgcatcgaggcgtagctgagcggcaggatggggggctgcct

SEQ ID NO: 686701 - DNA, 120 bp, Artificial Sequence
  ENSG00000187720_41 (sequence is synthesized)
gcccagggtctctcaccgtggtgtaagcagagccatggcttgcctaggaccctatagataccatcactctttctcagctcgactggagtttctgcacctttgcaggggcaaagtaactcc

SEQ ID NO: 686702 - DNA, 120 bp, Artificial Sequence
  ENSG00000187720_42 (sequence is synthesized)
ctgcaccctgaaccaccccccattcctgttcatttcagcagataatgatggagggggggggtgtccatcgtgctgagggtgtgaccgcaagagggtgaaaacttccagccaactttctca

SEQ ID NO: 686703 - DNA, 120 bp, Artificial Sequence
  ENSG00000187720_43 (sequence is synthesized)
gtcctttctcttgcgagagggaagccacctgctatacaaactaataccccctgccttgaccccttccccacgactcagttgacagaaggatatactttgttataacttattattttgttc

SEQ ID NO: 686704 - DNA, 120 bp, Artificial Sequence
  ENSG00000187720_44 (sequence is synthesized)
tctgtaaatacaagatgtttataggaaatatgtattctgaactctatctgcagaatgagtcactacaccaaaatagttctattatttagaatgtgttaattttaaagggacctgataggt

SEQ ID NO: 686705 - DNA, 120 bp, Artificial Sequence
  ENSG00000187720_45 (sequence is synthesized)
atttatttacatatgcgatccacatttgtgtgaaagcatgtgatcatactaacccagcctcctggaatgtcgctgtacgatgattgatgtctttttctcagtccatagttacaattgttt

SEQ ID NO: 686706 - DNA, 120 bp, Artificial Sequence
  ENSG00000187720_46 (sequence is synthesized)
agtatgctaatcagtccagttccctgaggtttaagatcaaatataaattactctgcttttcgactcattcaggtagcattgtacctgaacctgattgctactttttcatcttaaatatta

SEQ ID NO: 686707 - DNA, 120 bp, Artificial Sequence
  ENSG00000187720_47 (sequence is synthesized)
tatttcctcatctaatctgccttcccctcatccacagacatttggagaaggaaatgggagggtgtctgttatccctttctctttgctttgtccccgttgttagactggcagcgtcagttg

SEQ ID NO: 686708 - DNA, 120 bp, Artificial Sequence
  ENSG00000187720_48 (sequence is synthesized)
ctcggtgggcttggttagagccgtgggtgaggcaggtggctggcggggacagggagaggctgagagggaagtggtggcatttactgctctgacacttccactgtccctgctggggatgct

SEQ ID NO: 686709 - DNA, 120 bp, Artificial Sequence
  ENSG00000187720_49 (sequence is synthesized)
ggggccaaggcctgtggggcctgtgaactgcacagccaggagcaaggaacccactaaatactccgtcacctccatgtcccctctacagtgttaaattattacataagcaggtgaaaggta

SEQ ID NO: 686710 - DNA, 120 bp, Artificial Sequence
  ENSG00000187720_50 (sequence is synthesized)
gaaggcgaattatgtgagtaaatatggtctgttttctcttcagcaaaaatgactatttttgtgtgtgactaatttatttttattattgtaaagatacaataaaccggttgaaatatctgc

SEQ ID NO: 686711 - DNA, 120 bp, Artificial Sequence
  ENSG00000187720_51 (sequence is synthesized)
gagcatgagtctacaaagagccatgctcaccaggccaagttgaaggagacaaacttcaaaaacaccccaaatgtccgtcagcaggtgaacggacaaaccatggtgcatccacacagcgga

SEQ ID NO: 686712 - DNA, 120 bp, Artificial Sequence
  ENSG00000187720_52 (sequence is synthesized)
acaaaaaactcagccacaaaaatatggatgaacttccggtgcgttttgctaagtaaaaaaaaaagccaggttcaaaaaactacgtgttgtatgagtccatctatataatattctgtaaaa

SEQ ID NO: 686713 - DNA, 120 bp, Artificial Sequence
  ENSG00000187720_53 (sequence is synthesized)
ggagcagctacaaacgccaaatcagtgcctgctggaggatggggtgaccacatctgtgcaatctgaccgtagaggggcagcatgggaattttttgtctgcaatgaaaatatttcgtgtct

SEQ ID NO: 686714 - DNA, 120 bp, Artificial Sequence
  ENSG00000187720_54 (sequence is synthesized)
tgtttgcggtaggagatacacaactgtatgaatttgtcaaaactgatagatgtgtataccacaaaaagggacatttttagatgcaaatttagaaaatatgaagtaaatggttactataat

SEQ ID NO: 686715 - DNA, 120 bp, Artificial Sequence
  ENSG00000187720_55 (sequence is synthesized)
agcaaagactgatggaagctagacttctttgaatgtaccttgttttacaaatttgagtttggaactaagtaaatattttagataatcataaaagaaaattaagttttaaaaaagcaatcc

SEQ ID NO: 686716 - DNA, 120 bp, Artificial Sequence
  ENSG00000187720_56 (sequence is synthesized)
cccagaactgaaaatacaatgaaacaaattaatgtaaatatgtttctagttggtggcatcagcactattgcaagtgacttgaatacatagtaatttgacattctatccctaaaaaaaatt

SEQ ID NO: 686717 - DNA, 120 bp, Artificial Sequence
  ENSG00000187720_57 (sequence is synthesized)
actgcagaagaatgttcacactgtttgcaattatcctatttttggtgatagtgttgtgctggatatgatgattgggcatataatgtgtgagaaggtaaatgagtaattagatgatagtat

SEQ ID NO: 686718 - DNA, 120 bp, Artificial Sequence
  ENSG00000187720_58 (sequence is synthesized)
aattctgttagccccaatatccttgagaagtaggatgttcaaacttaggagaaagtagatacagatacaagatagatattgtatggcttaagtccgcaataaaaagcctgttgtcctgaa

SEQ ID NO: 686719 - DNA, 120 bp, Artificial Sequence
  ENSG00000187720_59 (sequence is synthesized)
caacagaatgttccacgacctgtgggaaaggtgagcctgtgtgggggacgggtggatccctgcagaaccctaagcaaggagtgtgtgggtggcccaaggcagcggtccccggcttttttg

SEQ ID NO: 686720 - DNA, 120 bp, Artificial Sequence
  ENSG00000187720_60 (sequence is synthesized)
gcaccagggactggtttcgtggaagacgatttctccatggatggtggcggggttgggggatggtttctgggtgaaactgccctatcgcagatcatcaggcattagttagagtctcataag

SEQ ID NO: 686721 - DNA, 120 bp, Artificial Sequence
  ENSG00000187720_61 (sequence is synthesized)
cggccgccggtcgctccgggacgcggaccgccaggacttgaacgcaactcccaattgcagaaaattggcaacgtctctgaagagcccttgcttttgcctggacccccagcatcatggttt

SEQ ID NO: 686722 - DNA, 120 bp, Artificial Sequence
  ENSG00000187720_62 (sequence is synthesized)
ccagttcgtctgcccacagccctccactcaacacaggaaggtcccgcagcggatggcggcggagggcgcccccgaggacgacggcggcggcggcgccccgggagtgtggggcgcctgggg

SEQ ID NO: 686723 - DNA, 80 bp, Artificial Sequence
  ENSG00000187720_63 (sequence is synthesized)
tggtcggcctgctcgcgtagctgcagcggcggcgtgatggagcagacgcggccctgcctgccccgctcctaccgcctgcg

SEQ ID NO: 686724 - DNA, 120 bp, Artificial Sequence
  ENSG00000187720_64 (sequence is synthesized)
aacgagatcttggatgtctacgtgagtttggatgtttctggactgttctttggattttgaatcttgtcacttctaaggaacatactctgaacaaataagcaacaaatcattgcccatact

SEQ ID NO: 686725 - DNA, 120 bp, Artificial Sequence
  ENSG00000187720_65 (sequence is synthesized)
caataaaaaccctttgagcagagcctgttggaggcactccttgaatgcttggcgttcatctttgcctttacttctgaatgggcccagctcacagcaacctccaactccaccagatgctta

SEQ ID NO: 686726 - DNA, 120 bp, Artificial Sequence
  ENSG00000187720_66 (sequence is synthesized)
ttaccttcggagtttattgacccagtaaaaccaattttacttgttgaaccaaatcagaggcaaaacatgccctttatttcatgagcattggatctcctccaggcactttccttatactgc

SEQ ID NO: 686727 - DNA, 120 bp, Artificial Sequence
  ENSG00000187720_67 (sequence is synthesized)
taatttggcatgttttctttttatggcaaaagaaagcaagagcctaaaggaaggcaggaccgctcccagctcccagccctgttcagactctgagagcaaatgaagaaaggagagctccag

SEQ ID NO: 686728 - DNA, 120 bp, Artificial Sequence
  ENSG00000187720_68 (sequence is synthesized)
agccctccagatgaaacaataaagctgagagtcacagtagagagatttactagaagctccctgcttcatagaagacaaaaccttaatttcttttacgtgaaactaagatattaaattgct

SEQ ID NO: 686729 - DNA, 120 bp, Artificial Sequence
  ENSG00000187720_69 (sequence is synthesized)
caagagttttaaatggtccttacgttcaaaggaaaccactagaattcaatcttcttaaaagaccaggaaataaagggtgataagacataaaagcttgaaataacattttgataaaaagat

SEQ ID NO: 686730 - DNA, 120 bp, Artificial Sequence
  ENSG00000187720_70 (sequence is synthesized)
tgagatcacccatgaatatacacattatttctgtccccaaagctgagctgattaacatatttgctgtgtcagagttttagaaatattattaattgcattgtcattacttctccacctaca

SEQ ID NO: 686731 - DNA, 120 bp, Artificial Sequence
  ENSG00000187720_71 (sequence is synthesized)
cacagttctatgtcctttcctcttgggcctagtagactcgaaattacaaaggaagccttgttgtagtttattttggattttttttttagactgtccagttggttggttgaatctgaatat

SEQ ID NO: 686732 - DNA, 120 bp, Artificial Sequence
  ENSG00000187720_72 (sequence is synthesized)
attttaaatggcatcagaggtaaaaactcaggttgttaaaggcctactgtgggtggtctaggaatggaagccaacagcaatttcataaacgggacaaggttttgcactggcagaatgctc

SEQ ID NO: 686733 - DNA, 120 bp, Artificial Sequence
  ENSG00000187720_73 (sequence is synthesized)
aggcagaagaggcaccagagagggagggaggatttccagccacagaccgagaggaagattgtgtgaaaagggagtgaggggatgagggatacacagcaggaacctgaggtcacacaaccg

SEQ ID NO: 686734 - DNA, 120 bp, Artificial Sequence
  ENSG00000187720_74 (sequence is synthesized)
tgtcccttggggattcagtgcccaccacgtttctgcaacgccgatggtttgatattggttcctgggtaggagaatcccaggggttctcaggtctgccttcctttgggtaatttataaaat

SEQ ID NO: 686735 - DNA, 120 bp, Artificial Sequence
  ENSG00000187720_75 (sequence is synthesized)
gaagacccatttcatcagtagggagtggcaagagatcatggcataaacaggaagaatagacacaggacccaccatgcaggagtgactcagagatgcttctagctggaaaggacctttgaa

SEQ ID NO: 686736 - DNA, 120 bp, Artificial Sequence
  ENSG00000187720_76 (sequence is synthesized)
agtgacatgattctaacctcttccttccccaaggaagaaatcaaaaactgcagggtgaaggggcttgctctaggttacacagctggtcaataggagagctgctttataaagcagcagaga

SEQ ID NO: 686737 - DNA, 120 bp, Artificial Sequence
  ENSG00000187720_77 (sequence is synthesized)
cagaaacatcaaacccgaccgtgtctccttgcacggctcatatttacactgtggattctcattctgctgctgggtttagcccaccaccctgctccccatcaggaaatccatgggcagcaa

SEQ ID NO: 686738 - DNA, 120 bp, Artificial Sequence
  ENSG00000187720_78 (sequence is synthesized)
agactgtgtgctctaaatccaatagggagggacgtattctgttgggccatgctcatttaatatgttttcagcccagacaatgttcagctgctgacttccacagtcctacgtagattcctg

SEQ ID NO: 686739 - DNA, 120 bp, Artificial Sequence
  ENSG00000187720_79 (sequence is synthesized)
cttgccatcctatttttgtcatcattcctaagagaatatgacccagcaagagttgggtcgcttctacttgttttcctggccccatgtctttgtgtttctggggctttccctgaataagag

SEQ ID NO: 686740 - DNA, 120 bp, Artificial Sequence
  ENSG00000187720_80 (sequence is synthesized)
ggagggacctgggggccagcctcaccagccaggtcaagaactttgagggaacctaaagcatcccggggtggctctgtccaggaggtctgctgcttgttcgcatgactttgtcacgccacc

SEQ ID NO: 686741 - DNA, 120 bp, Artificial Sequence
  ENSG00000187720_81 (sequence is synthesized)
tagtgttaaaacagttctcctgcagtgtacacgtatttatctgtgttggatgtttcaagagcactgagcaaaatctaaggacagaaaggttctgctaccgttgctccatcttctcctttg

SEQ ID NO: 686742 - DNA, 120 bp, Artificial Sequence
  ENSG00000187720_82 (sequence is synthesized)
gagtttagaaaatcttgactcttagcttagtcttcttctgatttgctcggcctaagttcttcattcttcaaaagtaaatgacaaaaagccatccaggaataactttgtttaatctgccac

SEQ ID NO: 686743 - DNA, 120 bp, Artificial Sequence
  ENSG00000187720_83 (sequence is synthesized)
aggttcactgatattactggatgcgtactagagtgaaccaacccagtcatttctcagtagttctgcaaatgccattgaaacccagaaggggtgtgcatacgtgccaagtgcggtaacact

SEQ ID NO: 686744 - DNA, 120 bp, Artificial Sequence
  ENSG00000187720_84 (sequence is synthesized)
ggaccaacgccatcagcccccaggtgccaccccacaggagaccaggtagaatcccttgtcttgtggccggggactctggtcatttccttgtaaagccttctctctctcaattcttgtgca

SEQ ID NO: 686745 - DNA, 120 bp, Artificial Sequence
  ENSG00000187720_85 (sequence is synthesized)
tccaccctctgtctctcggtcaacacagagaaaattgagggacgcatatttcaaagccaaggggccttgacattggagcaggcttcaccatttgtctgagccttcactgatgagactgtt

SEQ ID NO: 686746 - DNA, 120 bp, Artificial Sequence
  ENSG00000187720_86 (sequence is synthesized)
tcattcactcgattccaaaatggcatgagcatcctgggtctgccctgccagttcaacatttgaaatgctttatactagtttccaggccagacaagggggctcatgcctgtaatcctagca

SEQ ID NO: 686747 - DNA, 120 bp, Artificial Sequence
  ENSG00000187720_87 (sequence is synthesized)
ctctgggaggccgacgcaggtggatcgcttgggcccagaggttcaagaccagcctgtgcaacataatgaaacccctgtctctacaaaaaaaattacagaaattagccaggcatggtggtg

SEQ ID NO: 686748 - DNA, 90 bp, Artificial Sequence
  ENSG00000187720_88 (sequence is synthesized)
gctgaggtgggagaatcatctgagcccaaggaggttggggctgcagtgagccgtgatcagaccactgaatctcaaaattaagaaaaaaca

SEQ ID NO: 686749 - DNA, 120 bp, Artificial Sequence
  ENSG00000187720_89 (sequence is synthesized)
gaccctatctcaaaattaagaaaaaacaacacaaatttactttcttagagctctggaggttagaagtctgaagtgggtttcattgggacaaaatgaaggtgtcatcagggcccctctctc

SEQ ID NO: 686750 - DNA, 120 bp, Artificial Sequence
  ENSG00000187720_90 (sequence is synthesized)
tccagaggctctaggagagaacccacttcctcgccttttccaacttctaggagccacctgccttccttggttcctggccccttcctccaccttcaaagccagcagggtggcactttcaaa

SEQ ID NO: 686751 - DNA, 120 bp, Artificial Sequence
  ENSG00000187720_91 (sequence is synthesized)
tctctctctgaccctggcctcatcacatctcctctctgactctcatcttcctctctctttcctttataaggacccttcagattacactgggcccacccaagtaatccaggataatctctc

SEQ ID NO: 686752 - DNA, 120 bp, Artificial Sequence
  ENSG00000187720_92 (sequence is synthesized)
cttctcaaaatctgtaatttagtctcacctgcaaagtccatttttgctatgtaaggtagcatgttcacagattccagggattaggatgtggacatctttagggggccattatctgtctac

SEQ ID NO: 686753 - DNA, 120 bp, Artificial Sequence
  ENSG00000187720_93 (sequence is synthesized)
tatatgccttttctcttggttccccttttgtttctgttaataatactttgacctataagacaagaataatgagttcacacctaacaatccatgttgagtcttcctggtgggctctgctta

SEQ ID NO: 686754 - DNA, 120 bp, Artificial Sequence
  ENSG00000187720_94 (sequence is synthesized)
tggacagagcaggcagctttctctcggctggcactgggcatgggactgctctctgagtctgcagacatttctctaccggaggatgatggagcccaccacccaaatgcaggcagtcttttc

SEQ ID NO: 686755 - DNA, 120 bp, Artificial Sequence
  ENSG00000187720_95 (sequence is synthesized)
cttccttaaaataggaaggtctgcagaagtattcatggtaattatagctcacacacattgagtccttgctgtgtgcaagggcttagaaactgctgtgctgagctctttgcgtagattagt

SEQ ID NO: 686756 - DNA, 120 bp, Artificial Sequence
  ENSG00000187720_96 (sequence is synthesized)
tctttgaattctcatgacagagggaggtacttggagggaagtactattattagccttattttaagagtaaggaaatggaagcttaggaagagtaagttaataattgtcctgatctcacac

SEQ ID NO: 686757 - DNA, 120 bp, Artificial Sequence
  ENSG00000187720_97 (sequence is synthesized)
ctgggcagtgacctgaggagggcctgtgtgaccatactttgtgcttgttatatcactgagaggttacttggtccaatccctaccctaggaggaaataaaggcacaagtgccaaacccgcc

SEQ ID NO: 686758 - DNA, 120 bp, Artificial Sequence
  ENSG00000187720_98 (sequence is synthesized)
ccatccattcttctctgaactttggacgggataaccaggttatctgattgctacagactggggaggacaacagctgggtgcatccccagaacatggggtgggtgtgttgtccaaactcca

SEQ ID NO: 686759 - DNA, 120 bp, Artificial Sequence
  ENSG00000187720_99 (sequence is synthesized)
agtcagcaaactcagcacaacagagaatttttatgtcatgtccagaagcaatccacagtttgagaaaccaagtttgggtaagatttctggggtccattgctggtttacagggataatcag

SEQ ID NO: 686760 - DNA, 120 bp, Artificial Sequence
  ENSG00000187720_100 (sequence is synthesized)
acagactatttgaaatctatcaggatgatgatgatttctgtcaggcctgatggggctcagctcatgaatagcatgggggttctgggatcagctccctgggacagggcaggcctggagggg

SEQ ID NO: 686761 - DNA, 120 bp, Artificial Sequence
  ENSG00000187720_101 (sequence is synthesized)
tcacctgtaaaaagttggtaagcaggggcattgtcaccaggcttcctcttccatgtcaatggagtctggaggcagagttggaatccagctctgcacctttttgctgtgcaccctcaggcg

SEQ ID NO: 686762 - DNA, 120 bp, Artificial Sequence
  ENSG00000187720_102 (sequence is synthesized)
ggtcagcaacctctctgaacacacacccagtctacaaaatagaagaaaaaccctataaggtggtttttggcaggggagaggacatgggaagagattgaataaattagttgtccatcctag

SEQ ID NO: 686763 - DNA, 120 bp, Artificial Sequence
  ENSG00000187720_103 (sequence is synthesized)
catagagcccagaacaaggcactgaaaagacttcttaaatttttttgtccaacaacatcttggacagttctcatttatgtcaacatgcctggtcctgattttgttggtcatatttgcatg

SEQ ID NO: 686764 - DNA, 120 bp, Artificial Sequence
  ENSG00000187720_104 (sequence is synthesized)
tcatattttaaaccatgaagcataataaccaactaagtaagaaagccctggcaaaaaagctgagaggtctggtgcagtggatcacgcctgtgatcccagcacgtttggaagccgaggtgg

SEQ ID NO: 686765 - DNA, 120 bp, Artificial Sequence
  ENSG00000187720_105 (sequence is synthesized)
caggagttcgagaccagcctggacaaaatggcaaaaccccatctctgctaaaagtacaaaaagcagctggatgtggtggcactcacctgtaatcccaggtactcaagagactaagacacg

SEQ ID NO: 686766 - DNA, 120 bp, Artificial Sequence
  ENSG00000187720_106 (sequence is synthesized)
ggatgtggtggcactcacctgtaatcccaggtactcaagagactaagacacgagaatcacttgaacccaggagacacagggtgcagtgagcctcctgcactccagcctgggtgacagagt

SEQ ID NO: 686767 - DNA, 120 bp, Artificial Sequence
  ENSG00000187720_107 (sequence is synthesized)
ggagccgcgacgagacgccagcgctggccggtacggacgccagccgccagggccccacggtgctgcgaggcagccggcacccacagccccagggcctcgaagtcactggggacagaagga

SEQ ID NO: 686768 - DNA, 120 bp, Artificial Sequence
  ENSG00000187720_108 (sequence is synthesized)
gcaggacccgtggtaccattggccctggcaagtatggctatggtaaggccccatatatcttaccactgcagacagacactgcacacacgccacagaggctccggagacagaagctctcat

SEQ ID NO: 686769 - DNA, 120 bp, Artificial Sequence
  ENSG00000187720_109 (sequence is synthesized)
cccgccattccaggtcccagggagcatcttctgctaggcatggctacagttcaccagcccaccaggtcccccaacatgggcctttgtaccaaagtgacagtggccctcgctctggactgc

SEQ ID NO: 686770 - DNA, 120 bp, Artificial Sequence
  ENSG00000187720_110 (sequence is synthesized)
aggctgcggaggcccccatctaccagctacctttgacccatgatcaaggctaccctgcagcttcaagtctctttcacagcccagaaacaagcaacaaccacggtgtggggacccatgggg

SEQ ID NO: 686771 - DNA, 120 bp, Artificial Sequence
  ENSG00000187720_111 (sequence is synthesized)
caactcagagcttctctcagcctgcccgatctacagcaatctcatgcatcggggcctatcggcagtacaagctgtgcaacaccaacgtatgtccagaaagcagtagaagtatccgggagg

SEQ ID NO: 686772 - DNA, 120 bp, Artificial Sequence
  ENSG00000187720_112 (sequence is synthesized)
tacagtgtgcatcctacaacaacaagccattcatgggccggttttatgagtgggaaccatttgcagaagtaaaaggcaatcgcaaatgtgagttgaactgccaggcaatgggctaccgct

SEQ ID NO: 686773 - DNA, 120 bp, Artificial Sequence
  ENSG00000187720_113 (sequence is synthesized)
ggcctggaaggatgcagtgcatattgaaaggtggaccctctgaaaacagttaagaggaatatatgtatgttttacccattaagaaaaaatggcaagctaaacaaatgttaaacttacaga

SEQ ID NO: 686774 - DNA, 120 bp, Artificial Sequence
  ENSG00000187720_114 (sequence is synthesized)
aaatttgtcttatggtcctgagcatatttcccttttagagcaagcctggattcttagcaaagtgtttcccccatttgctcttttagctgacaaatctgccactgtgatgatggtttgcag

SEQ ID NO: 686775 - DNA, 120 bp, Artificial Sequence
  ENSG00000187720_115 (sequence is synthesized)
cttttggaagcagtatggcaacctggcctgacatgctctttaggcttccactaacctggggctttcagaaattctatttggcctttctgtgggtagctttccagcttctcttctagggag

SEQ ID NO: 686776 - DNA, 120 bp, Artificial Sequence
  ENSG00000187720_116 (sequence is synthesized)
ccccaggcatcatttcccaaaagcatccccatctcctgattctcttggaactcctacagataagcatcctggcagaggcccaggctcccaaaccgacaaagtgaaaagagaccagagagg

SEQ ID NO: 686777 - DNA, 120 bp, Artificial Sequence
  ENSG00000187720_117 (sequence is synthesized)
ccaagcatattgactggtgctgttcagggcctgctcttttccactcaccacttgttttgctgcttgtcacgaggagagttgttcctgtatgtggctgctctcagatctttccaagcaagc

SEQ ID NO: 686778 - DNA, 120 bp, Artificial Sequence
  ENSG00000187720_118 (sequence is synthesized)
cagtcatttgaagaggttttcttttcatgctggagggcaggctaagatcaatgagtggaagagagaaaggctgttttagctcaagttaaaggaacaccttctagccatcaaagccgccca

SEQ ID NO: 686779 - DNA, 120 bp, Artificial Sequence
  ENSG00000187720_119 (sequence is synthesized)
acagaggcaagggccaccacacatgagagagcgctctgtccttaaagggaattctctgttgagtgggaggtgaacaccctggttcttccaactcaggaattctcgtggctgggctgggtc

SEQ ID NO: 686780 - DNA, 120 bp, Artificial Sequence
  ENSG00000187720_120 (sequence is synthesized)
agtgatggctttgtctctttatgtctaaagtgccctatggctgctgaaggttacctaaccattctttaaaaggagaatgaccctccatgggaatggccagcctgccaactgtgcaattga

SEQ ID NO: 686781 - DNA, 120 bp, Artificial Sequence
  ENSG00000187720_121 (sequence is synthesized)
agaagacccgatggatcaaccccatgtctcccttggggagaaagtgcataaaccaggggtctctttttttttttcaacaaaccattgagctgttcttggagttcatctctggagaggtta

SEQ ID NO: 686782 - DNA, 120 bp, Artificial Sequence
  ENSG00000187720_122 (sequence is synthesized)
tacattattagaagtttgattattattatagtttgatcaatttatttgtcttagagatccaatttttactaattccctagttttttatttcagcatctgaatgtctttctccctagcaca

SEQ ID NO: 686783 - DNA, 120 bp, Artificial Sequence
  ENSG00000187720_123 (sequence is synthesized)
gtgcatacaatcagggccttgggtatttccagtgataactttccttggagaggatctaagaaaagcccagatttcggtagccatctccctccaaatatgtctctttctgctttcttagtg

SEQ ID NO: 686784 - DNA, 120 bp, Artificial Sequence
  ENSG00000187720_124 (sequence is synthesized)
cccattatttccccctctcctttcttctgtcactgccatctccttcttggtcttcccattgttctttaactggccgtaatgtggaattgatatttacattttgatacggtttttttcttg

SEQ ID NO: 686785 - DNA, 120 bp, Artificial Sequence
  ENSG00000187720_125 (sequence is synthesized)
gcctgtgtacgggattgcctcatttcctgctctgaattttaaaattagatattaaagctgtcatatggtttcctcacaaaagtcaacaaagtccaaacaaaaatagtttgccgttttact

SEQ ID NO: 686786 - DNA, 120 bp, Artificial Sequence
  ENSG00000187720_126 (sequence is synthesized)
ttcatccattgaaaaaggaaattgtgcctcttgcagcctaggcaaaggacatttagtactatcgattctttccaccctcacgatgacttgcggttctctctgtagaaaagggatggccta

SEQ ID NO: 686787 - DNA, 120 bp, Artificial Sequence
  ENSG00000187726_0 (sequence is synthesized)
atctctacaaaacatacaaaaattagccaggcatggtagtgcacgcctgtgtctcagctacttggaaggctgaggtggaagaatcccttgagcctgggaggttgagactgcagtgaggtg

SEQ ID NO: 686788 - DNA, 120 bp, Artificial Sequence
  ENSG00000187726_1 (sequence is synthesized)
ggtgtgatcctgccactgcccaccagcctgggtgacagagtgaagaccctgtctcaaaaacatgataatgataataataataataaaataggagaatgtggatgtgaggtatatgggaac

SEQ ID NO: 686789 - DNA, 120 bp, Artificial Sequence
  ENSG00000187726_2 (sequence is synthesized)
tctctgtactgtcttctcaacttttctaaactctaaaactgttctaaaataaatgtatttttaaaaaattagccaaatgcatttcttctaaaacctttttattaaaactaattactgctc

SEQ ID NO: 686790 - DNA, 120 bp, Artificial Sequence
  ENSG00000187726_3 (sequence is synthesized)
tctttaaaaacaaaaacaaaataaaacagagccctgtgagtcttcaatttccgagttgagtgacctttcacagggtcgcagaatcagccccagctctcccccagtcctttcactgactcc

SEQ ID NO: 686791 - DNA, 120 bp, Artificial Sequence
  ENSG00000187726_4 (sequence is synthesized)
tctctgtggcagagctgaaatttgtttagggaagtgggactacaactcccagagtgcacctgtgcggttgtcaggagcaaccaaggaagccaactaacagccttgctagagtctgaggac

SEQ ID NO: 686792 - DNA, 120 bp, Artificial Sequence
  ENSG00000187726_5 (sequence is synthesized)
tatccagggcctgactgccagctagccagccatgggccaggattattactctgtgctcgggatcactcgcaattcagaggatgcccagatcaagcaggcgtaccgcagactcgcccttaa

SEQ ID NO: 686793 - DNA, 120 bp, Artificial Sequence
  ENSG00000187726_6 (sequence is synthesized)
gagtgaccccatgaagagaggcatctacgacaagtttggagaagagggcctgaagggtgggattcctttggagtttggatcccagaccccatggacaactggttacgtcttccatggcaa

SEQ ID NO: 686794 - DNA, 120 bp, Artificial Sequence
  ENSG00000187726_7 (sequence is synthesized)
acctgaaaaggtgttccacgagttctttggtggaaacaaccccttcagtgagttttttgatgcagaaggaagtgaggtagatttgaactttggggggctccagggccgaggggtcaagaa

SEQ ID NO: 686795 - DNA, 120 bp, Artificial Sequence
  ENSG00000187726_8 (sequence is synthesized)
gcaggacccccaagtcgaacgggatctctacctgtccctggaggacttattctttggctgcaccaaaaaaattaagatctccagaagggtgctgaacgaggatgggtactcctccaccat

SEQ ID NO: 686796 - DNA, 120 bp, Artificial Sequence
  ENSG00000187726_9 (sequence is synthesized)
caaggacaagatcctgaccattgatgtgaagcccggttggaggcagggcacacgcatcacctttgagaaggaaggggaccagggccccaacatcatcccagcagacatcattttcatcgt

SEQ ID NO: 686797 - DNA, 120 bp, Artificial Sequence
  ENSG00000187726_10 (sequence is synthesized)
aaaggagaagctacaccctcgcttccgcagggagaatgacaacctcttcttcgtgaaccccatccctcttggcaaggctctcacctgctgcactgtggaggtgaggaccctagatgaccg

SEQ ID NO: 686798 - DNA, 120 bp, Artificial Sequence
  ENSG00000187726_11 (sequence is synthesized)
tctgctcaacatccccatcaatgacatcatccaccccaaatacttcaagaaggtgccaggggaggggatgccattgccggaggaccccactaagaaaggggatctcttcatcttcttcga

SEQ ID NO: 686799 - DNA, 120 bp, Artificial Sequence
  ENSG00000187726_12 (sequence is synthesized)
catccagttccccacccgcctcacaccccagaagaagcagatgctgcgccaggcattgctgacatgactgtggtgggctggagcaggggtgagaggaggctagccgggcctcaccccacc

SEQ ID NO: 686800 - DNA, 120 bp, Artificial Sequence
  ENSG00000187726_13 (sequence is synthesized)
cctacccgccacagcctcagggtgtgcaggggagcctgctgcacagatatgatacaagggtgggatggcgcagggcttaaactgacataataaagatctatttcctgtcctccagctaca

SEQ ID NO: 686801 - DNA, 120 bp, Artificial Sequence
  ENSG00000187726_14 (sequence is synthesized)
agtgcaggagtgccctctgcagccttcccaactgggacaggctctttcccttcctttctttcagttcagccccatccccgtgggaactggaaaggctctgaatgggaggagtctcttctg

SEQ ID NO: 686802 - DNA, 120 bp, Artificial Sequence
  ENSG00000187726_15 (sequence is synthesized)
aattcttccttctgggctttaccagaccatattcccaggatttcatcagggtgcatgcctcgtgcataagaaagaacagtgggcatggagggtgggctgggagatagtccccaaggtgac

SEQ ID NO: 686803 - DNA, 120 bp, Artificial Sequence
  ENSG00000187726_16 (sequence is synthesized)
gggttgaggaagaccctcagtgcctcatgtctagtccttggcttggccctgtcccatggcccagccctgtgccaggcataagagcaagccccctccacctttgcccagcagaggagatgc

SEQ ID NO: 686804 - DNA, 120 bp, Artificial Sequence
  ENSG00000187726_17 (sequence is synthesized)
cgatgcggccatgctttccacagatggaacccatctggacatgcgactggggagtggaaggatccccagtggggaatgcactgggggaggcttagatatgttgactttcatttctctctt

SEQ ID NO: 686805 - DNA, 120 bp, Artificial Sequence
  ENSG00000187726_18 (sequence is synthesized)
tgggattaagagacttgctggaggctcagggccgggcctctgggatttggagagaggaatggagtacattttcaccatgtatctgttagtggccagggctggagctgtgtgtttgatcaa

SEQ ID NO: 686806 - DNA, 120 bp, Artificial Sequence
  ENSG00000187726_19 (sequence is synthesized)
ctaatggtgactgcttggcatctcagcccccagccccagtctcatggcatcctctgccatactggaatcataagttcttggttgtcatggcaacaggatgggagtgggagtggctcaggg

SEQ ID NO: 686807 - DNA, 120 bp, Artificial Sequence
  ENSG00000187726_20 (sequence is synthesized)
caggctctccccattgctggaggctcttcccattgctagaggattgagcccaagtacaaatcccatagagcatctttcacgtgtgcaaaggtcacctgagtgttcatgaaaatctgagca

SEQ ID NO: 686808 - DNA, 120 bp, Artificial Sequence
  ENSG00000187726_21 (sequence is synthesized)
acaagatcctgaccattgatgtgaagcccggttggaggcagggcacacgcatcacctttgagaaggaaggggaccagcgcccagaagagacctcagcagagttttggtgacttaatgaag

SEQ ID NO: 686809 - DNA, 120 bp, Artificial Sequence
  ENSG00000187726_22 (sequence is synthesized)
tttgggacaggggtgtcatgcctggagttactagcaagacagagacatacgggcagttgcctgacgcccagcttagtgttccacctgcctgccgtctgaggaagcctctccgcccctcca

SEQ ID NO: 686810 - DNA, 120 bp, Artificial Sequence
  ENSG00000187726_23 (sequence is synthesized)
gctgagtgtgtctattttgggcatgctcagtacagaagtaattctggggggattcatttggatgaagacatggagacaagtagaggcaggaacttggccaaggtcacacggccaactagt

SEQ ID NO: 686811 - DNA, 120 bp, Artificial Sequence
  ENSG00000187726_24 (sequence is synthesized)
ttggtggaaacaaccccttcagtggtaagaggtcttcctcccccaccttgccttatagagaaaggacactgctataagtgatgttttcgttgagtagttttgtttttatttttactttat

SEQ ID NO: 686812 - DNA, 89 bp, Artificial Sequence
  ENSG00000187726_25 (sequence is synthesized)
tttcgttgagtagttttgtttttatttttactttattattttattttatttacttattttttttggagatggagagtgggatcatggct

SEQ ID NO: 686813 - DNA, 120 bp, Artificial Sequence
  ENSG00000187730_0 (sequence is synthesized)
ggagccaagtttgcgcggaccccgtcccgagcccgccgcggccatggacgcgcccgcccggctgctggccccgctcctgctcctctgcgcgcagcagctccgcggcaccagagcgatgaa

SEQ ID NO: 686814 - DNA, 120 bp, Artificial Sequence
  ENSG00000187730_1 (sequence is synthesized)
ctgcgcgcagcagctccgcggcaccagagcgatgaatgacatcggcgactacgtgggctccaacctggagatctcctggctccccaacctggacgggctgatagccggctacgcccgcaa

SEQ ID NO: 686815 - DNA, 120 bp, Artificial Sequence
  ENSG00000187730_2 (sequence is synthesized)
cttccggcctggcatcggaggcccccccgtgaatgtggcccttgccctggaggtggccagcatcgaccacatctcagaggccaacatggagtacaccatgacggtgttcctgcaccagag

SEQ ID NO: 686816 - DNA, 120 bp, Artificial Sequence
  ENSG00000187730_3 (sequence is synthesized)
ctggcgggacagcaggctctcctacaaccacaccaacgagaccctgggtctggacagccgcttcgtggacaagctgtggctgcccgacaccttcatcgtgaacgccaagtcggcctggtt

SEQ ID NO: 686817 - DNA, 120 bp, Artificial Sequence
  ENSG00000187730_4 (sequence is synthesized)
ccacgacgtgacggtggagaacaagctcatccggctgcagcccgacggcgtgatcctgtacagcatccgaatcacctccactgtggcctgcgacatggacctggccaaataccccatgga

SEQ ID NO: 686818 - DNA, 120 bp, Artificial Sequence
  ENSG00000187730_5 (sequence is synthesized)
cgagcaggagtgcatgctggacctggagagctacggttactcatcggaggacatcgtctactactggtcggagagccaggagcacatccacgggctggacaagctgcagctggcgcagtt

SEQ ID NO: 686819 - DNA, 120 bp, Artificial Sequence
  ENSG00000187730_6 (sequence is synthesized)
caccatcaccagctaccgcttcaccacggagctgatgaacttcaagtccgctggccagttcccacggctcagcctgcacttccacctgcggaggaaccgcggcgtgtacatcatccaatc

SEQ ID NO: 686820 - DNA, 120 bp, Artificial Sequence
  ENSG00000187730_7 (sequence is synthesized)
gctcatggtcagtgcccgctcctccctgccacgggcatcagccatcaaggcactggacgtctacttctggatctgctatgtcttcgtgtttgccgccctggtggagtacgcctttgctca

SEQ ID NO: 686821 - DNA, 120 bp, Artificial Sequence
  ENSG00000187730_8 (sequence is synthesized)
tttcaacgccgactacaggaagaagcagaaggccaaggtcaaggtctccaggccgagggcagagatggacgtgaggaacgccattgtcctcttctccctctctgctgccggcgtcacgca

SEQ ID NO: 686822 - DNA, 120 bp, Artificial Sequence
  ENSG00000187730_9 (sequence is synthesized)
ggagctggccatctcccgccggcagcgccgcgtcccggggaacctgatgggctcctacaggtcggtgggggtggagacaggggagacgaagaaggagggggcagcccgctcaggaggcca

SEQ ID NO: 686823 - DNA, 120 bp, Artificial Sequence
  ENSG00000187730_10 (sequence is synthesized)
ggggggcatccgtgcccggctcaggcccatcgacgcagacaccattgacatttacgcccgcgctgtgttccctgcggcgtttgcggccgtcaatgtcatctactgggcggcatacgccat

SEQ ID NO: 686824 - DNA, 120 bp, Artificial Sequence
  ENSG00000187730_11 (sequence is synthesized)
gtgagcacaggactcaggccaccctcgcttgtcctggcgcccggcggcagctgcccagaaacttcctgggagaaagagccctcgggctgccttcccctctgcgtgtttcgaagtgggatg

SEQ ID NO: 686825 - DNA, 120 bp, Artificial Sequence
  ENSG00000187730_12 (sequence is synthesized)
acagtcggccacggaaaacaagaggaagcctcggcctccctgagctctgaccccagcctcacccgaaaggccagcctggggctctccggcaggcagcccgagacctgcacagatgaagga

SEQ ID NO: 686826 - DNA, 120 bp, Artificial Sequence
  ENSG00000187730_13 (sequence is synthesized)
gcagaggttctgaccgagaggctgagccaggccggggtctgggcccttcagggagccgcggatttttatgttcagaaagtgatcctggtttctaggtctttgctctgcaggatcgggatc

SEQ ID NO: 686827 - DNA, 120 bp, Artificial Sequence
  ENSG00000187730_14 (sequence is synthesized)
agagcgtgggaggaggtgggggtggacgtccatccggtgaacagtgaaggcgtttgtgaggtctttctggtcccagcatgaaataaagccttggcctgggggccgcttcattctccctca

SEQ ID NO: 686828 - DNA, 120 bp, Artificial Sequence
  ENSG00000187730_15 (sequence is synthesized)
agggcctggggccgagccagggacagcactgctgggggccccaaccaggacccttcagctgccccagcccactgtgggtcccagctgtgctccctgagcgtggggggctggagctgctgg

SEQ ID NO: 686829 - DNA, 120 bp, Artificial Sequence
  ENSG00000187730_16 (sequence is synthesized)
tccaggcggggcccccgcatgggaacacctgtggtccagggccctgggagctgcaccccagtgctcagccctgtctcccccaccggccttcgtgcagatggacgtgaggaacgccattgt

SEQ ID NO: 686830 - DNA, 120 bp, Artificial Sequence
  ENSG00000187730_17 (sequence is synthesized)
gctggacctggagagctgcttcctgtgtggacggagcgctcctgccagggctcccggggcagggccgggctctgccgcccacctgtgtgcttttcctccagacggttactcatcggagga

SEQ ID NO: 686831 - DNA, 120 bp, Artificial Sequence
  ENSG00000187730_18 (sequence is synthesized)
ggaggagatgcctccctcaagcctgggcgtccccatggccctgctgtctaccccgagctgctccgaggttgagctaaaccacagaagcacatggccatttggggatctggagcccaccct

SEQ ID NO: 686832 - DNA, 120 bp, Artificial Sequence
  ENSG00000187730_19 (sequence is synthesized)
gggccttcctgggaggagacagagagtaggaggctgtgggcccgggttttggggccctgtcctcttcctgtccctgccccttgcctcctcctcacattcctcttctccaaaccgtctaat

SEQ ID NO: 686833 - DNA, 120 bp, Artificial Sequence
  ENSG00000187730_20 (sequence is synthesized)
gggggaagcttcgccctcagaagccgacagggagacctctttggtgagggaccccaggggtggagacccgaggccggcctccgcgggctggttgaggagggaggctgttagcctgggagc

SEQ ID NO: 686834 - DNA, 120 bp, Artificial Sequence
  ENSG00000187730_21 (sequence is synthesized)
ttggcccacgctggggggctctgtccaacccagggccacctccctcaaagccaggagggctaagtgggcactgaggccggaggaggaagccaggtcagggccagtggaagaggctgagga

SEQ ID NO: 686835 - DNA, 120 bp, Artificial Sequence
  ENSG00000187730_22 (sequence is synthesized)
cctcccggggttccctgtgtccagccagaggcttggggactggccaggcccccacctgcaagggctcccacagtggccccccatgccctggcccaggtgcccagaacagtgctgcatccc

SEQ ID NO: 686836 - DNA, 76 bp, Artificial Sequence
  ENSG00000187730_23 (sequence is synthesized)
tcctgcctctacaaaaataataaaaaacattagctgggcttggtggtgtgcacctgtggtctcagctactcgggag

SEQ ID NO: 686837 - DNA, 77 bp, Artificial Sequence
  ENSG00000187730_24 (sequence is synthesized)
tggtggtgtgacccacctcaagccccggggggttgaggctgtagtgagtcaagattgcaccactgcactccagcttg

SEQ ID NO: 686838 - DNA, 120 bp, Artificial Sequence
  ENSG00000187730_25 (sequence is synthesized)
cttgggtgacagagtgagaccctgtctcataaacaaacaaaaacatcgggatattttacataggaatttaaatatttgacctctcctagaaaatcaagtgcgtggcaactctgggcctat

SEQ ID NO: 686839 - DNA, 120 bp, Artificial Sequence
  ENSG00000187730_26 (sequence is synthesized)
tcccgtgtgttcctcagccatcgctcgggccagggcctgggtgtgaaggctgtcccctgccccgtaggcccccagcctagttcaatagtcaagcgttttgaagagaatgaatgaaatcca

SEQ ID NO: 686840 - DNA, 120 bp, Artificial Sequence
  ENSG00000187730_27 (sequence is synthesized)
gttcttgacggtcctaaaggaatacttgacgtctatgaagttgagcagtttccaggtttacctggattctgggcaaacacagtctgagaagtagctggggctccaggcaggtgctcaggg

SEQ ID NO: 686841 - DNA, 120 bp, Artificial Sequence
  ENSG00000187730_28 (sequence is synthesized)
ggcatctctgcaggggaactgccaggctttcgggagggctggcctcacccccaaggcctcactgccatgcttgtcttggcagaatcacctccactgtggcctgcgacatggacctggcca

SEQ ID NO: 686842 - DNA, 120 bp, Artificial Sequence
  ENSG00000187730_29 (sequence is synthesized)
acaaggctggcccggctcaggatgcaggaaagcaccaaaccagcttctgcatgcaagaagcctgggcaggaggagaaggggccagaaagcctggagcagtctggcttgtgggtctgtgcc

SEQ ID NO: 686843 - DNA, 120 bp, Artificial Sequence
  ENSG00000187730_30 (sequence is synthesized)
acccgcttgaggctgtatctgaactggggtcaaatctgtctctaggcttgctgtgggggaggccactgactcaggtcccggcccctcaactctcctggagggctcgggccaggctcgggc

SEQ ID NO: 686844 - DNA, 120 bp, Artificial Sequence
  ENSG00000187730_31 (sequence is synthesized)
ctggcgacctggaggacatgtctgaagccacccccttggatagaaatgattctgagaatacaggggggttaatctcaaggccccacccctgggaccaatccccatcctgtgtgcaggagg

SEQ ID NO: 686845 - DNA, 120 bp, Artificial Sequence
  ENSG00000187730_32 (sequence is synthesized)
tcgggaggccaggagcctgaaatcaaggtgtgggtggggctcgttcccctggaggctctgagggaacctccgtccctggcctgtctccagctccggcggtggctggaaaccctggcctcc

SEQ ID NO: 686846 - DNA, 120 bp, Artificial Sequence
  ENSG00000187730_33 (sequence is synthesized)
cctggcctgtggacgcctcaccccaatctctgcctcctctgtccccaggcttcttccctcttctcttctaaggacaccagtccttgggtttagggcccacccaatccagtatggcctcat

SEQ ID NO: 686847 - DNA, 120 bp, Artificial Sequence
  ENSG00000187730_34 (sequence is synthesized)
cttaactaattacctctgcaaagaccttattcccaaataagctcacattctgaggctctgggtggatgtgcattttgggggacgctgttcaacccagtgcaggtgagcagatgggggccg

SEQ ID NO: 686848 - DNA, 71 bp, Artificial Sequence
  ENSG00000187730_35 (sequence is synthesized)
ctggggactggaggcagccgggtgcagtggctcacgcttgtaaccccaacactttttggaggctgaggtga

SEQ ID NO: 686849 - DNA, 120 bp, Artificial Sequence
  ENSG00000187730_36 (sequence is synthesized)
caccatcaccagctaccgcttcaccacggagctgatgaacttcaactggccagttcccacggctcagcctgcacttccacctgcggaggaaccgcggcgtgtacatcatccaatcctaca

SEQ ID NO: 686850 - DNA, 120 bp, Artificial Sequence
  ENSG00000187730_37 (sequence is synthesized)
gtcctgtggccagacctagggccggaggccccctgacatttcaggccatgtggttggtggggagggcaggggtctaagtctctcttctgagccctggtgggccccgtagctgccaagccc

SEQ ID NO: 686851 - DNA, 120 bp, Artificial Sequence
  ENSG00000187730_38 (sequence is synthesized)
tgcagcccctgagtcccatggttgggctgggctgggcagggatgggggcactgacggtggctgtcctggcagctggccagttcccacggctcagcctgcacttccacctgcggaggaacc

SEQ ID NO: 686852 - DNA, 120 bp, Artificial Sequence
  ENSG00000187730_39 (sequence is synthesized)
ccgcggcaccaggaggacaggtatgacaatcaccacaaactggacggcttgaaacaacagacgcctattctctcgcagctcgggaggccaggagcctgaaatcaagagcgatgaatgaca

SEQ ID NO: 686853 - DNA, 120 bp, Artificial Sequence
  ENSG00000187730_40 (sequence is synthesized)
agacatggcacggattgatattgttgagccagtgcagcagcccctgtgtgtcacctgacaacggtgaccccatctgtgtcccatccacctgcccggaggagcccgacgtggtcccagagc

SEQ ID NO: 686854 - DNA, 120 bp, Artificial Sequence
  ENSG00000187730_41 (sequence is synthesized)
cctgggtctccttctggatcagccaggcggcggtgcccgccagggtgtctctaggtacggggcctcgccgctgctccgagggagctggaagggcggccctggggaacaggactccccatc

SEQ ID NO: 686855 - DNA, 120 bp, Artificial Sequence
  ENSG00000187733_0 (sequence is synthesized)
aaaatgtgcttcttacaggaatataaatagtttctggaaaggacactgacaacttcaaagcaaaatgaagctcttttggttgcttttcaccattgggttctgctgggctcagtattcctc

SEQ ID NO: 686856 - DNA, 120 bp, Artificial Sequence
  ENSG00000187733_1 (sequence is synthesized)
aaatacacaacaaggacgaacatctattgttcatctgtttgaatggcgatgggttgatattgctcttgaatgtgagcgatatttagctcccaagggatttggaggggttcaggtctctcc

SEQ ID NO: 686857 - DNA, 120 bp, Artificial Sequence
  ENSG00000187733_2 (sequence is synthesized)
accaaatgaaaatgttgccattcacaaccctttcagaccttggtgggaaagataccaaccagttagctataaattatgcacaagatctggaaatgaagatgaatttagaaacatggtgac

SEQ ID NO: 686858 - DNA, 120 bp, Artificial Sequence
  ENSG00000187733_3 (sequence is synthesized)
tagatgcaacaatgttggggttcgtatttatgtggatgctgtaattaatcatatgtgtggtaatgctgtgagtgcaggaacaagcagtacctgtggaagttacttcaaccctggaagtag

SEQ ID NO: 686859 - DNA, 120 bp, Artificial Sequence
  ENSG00000187733_4 (sequence is synthesized)
ggactttccagcagtcccatattctggatgggattttaatgatggtaaatgtaaaactggaagtggagatatcgagaactataatgatgctactcaggtcagagattgtcgtctgtctgg

SEQ ID NO: 686860 - DNA, 120 bp, Artificial Sequence
  ENSG00000187733_5 (sequence is synthesized)
tcttctcgatcttgcactggggaaggattatgtgcgttctaagattgccgaatatatgaaccatctcattgacattggtgttgcagggttcagaattgatgcttccaagcacatgtggcc

SEQ ID NO: 686861 - DNA, 120 bp, Artificial Sequence
  ENSG00000187733_6 (sequence is synthesized)
tttcatttaccaggaggtaattgatctgggtggtgagccaattaaaagcagtgactactttggtaatggccgggtgacagaattcaagtatggtgcaaaactcggcacagttattcgcaa

SEQ ID NO: 686862 - DNA, 120 bp, Artificial Sequence
  ENSG00000187733_7 (sequence is synthesized)
gtggaatggagagaagatgtcttacttaaagaactggggagaaggttggggtttcatgccttctgacagagcgcttgtctttgtggataaccatgacaatcaacgaggacatggcgctgg

SEQ ID NO: 686863 - DNA, 120 bp, Artificial Sequence
  ENSG00000187733_8 (sequence is synthesized)
aggagcctctatacttaccttctgggatgctaggctgtacaaaatggcagttggatttatgcttgctcatccttatggatttacacgagtaatgtcaagctaccgttggccaagatattt

SEQ ID NO: 686864 - DNA, 120 bp, Artificial Sequence
  ENSG00000187733_9 (sequence is synthesized)
tgaaaatggaaaagatgttaatgattgggttgggccaccaaatgataatggagtaactaaagaagttactattaatccagacactacttgtggcaatgactgggtctgtgaacatcgatg

SEQ ID NO: 686865 - DNA, 120 bp, Artificial Sequence
  ENSG00000187733_10 (sequence is synthesized)
gcgccaaataaggaacatggttaatttccgcaatgtagtggatggccagccttttacaaactggtatgataatgggagcaaccaagtggcttttgggagaggaaacagaggattcattgt

SEQ ID NO: 686866 - DNA, 120 bp, Artificial Sequence
  ENSG00000187733_11 (sequence is synthesized)
tttcaacaatgatgactggacattttctttaactttgcaaactggtcttcctgctggcacatactgtgatgtcatttctggagataaaattaatggcaactgcacaggcattaaaatcta

SEQ ID NO: 686867 - DNA, 120 bp, Artificial Sequence
  ENSG00000187733_12 (sequence is synthesized)
cgtttctgatgatggcaaagctcatttttctattagtaactctgctgaagatccatttattgcaattcatgctgaatctaaattgtaaaatttaaaattaaatgcaaatccgcaaagcaa

SEQ ID NO: 686868 - DNA, 120 bp, Artificial Sequence
  ENSG00000187735_0 (sequence is synthesized)
agccggaagccacgcctgcccactagcccgacgcccgcctggcgggaacatgggctcgcccctcaccagcgatctgcagtcagttggtagcgcctgcacgtcgcgcgcggtgttcgattg

SEQ ID NO: 686869 - DNA, 120 bp, Artificial Sequence
  ENSG00000187735_1 (sequence is synthesized)
ttcgattgtcgctgcctggggaggaggagccggagccgccgccgccgccgccgccgccgcgggcttcgttcgtaaggaagggggcctaggcccgggcctgcggtggtgggggttgctgcg

SEQ ID NO: 686870 - DNA, 120 bp, Artificial Sequence
  ENSG00000187735_2 (sequence is synthesized)
gtcgctcctgctgtgtcttccgctccagcttcgcccacttccccttgccagcggggtgggcgcggagaagacctgccggagccatggaggacgaagtggtccgctttgccaagaagatgg

SEQ ID NO: 686871 - DNA, 120 bp, Artificial Sequence
  ENSG00000187735_3 (sequence is synthesized)
acaagatggtgcagaagaagaacgcggctggagcattggatttgctaaaggagcttaagaatattcctatgaccctggaattactgcagtccacaagaatcggaatgtcagttaatgcta

SEQ ID NO: 686872 - DNA, 120 bp, Artificial Sequence
  ENSG00000187735_4 (sequence is synthesized)
ttcgcaagcagagtacagatgaggaagttacatctttggcaaagtctctcatcaaatcctggaaaaaattattagatgggccatcaactgagaaagaccttgacgaaaagaagaaagaac

SEQ ID NO: 686873 - DNA, 120 bp, Artificial Sequence
  ENSG00000187735_5 (sequence is synthesized)
ctgcaattacatcgcagaacagccctgaggcaagagaagaaagtacttccagcggcaatgtaagcaacagaaaggatgagacaaatgctcgagatacttatgtttcatcctttcctcggg

SEQ ID NO: 686874 - DNA, 120 bp, Artificial Sequence
  ENSG00000187735_6 (sequence is synthesized)
caccaagcacttctgattctgtgcggttgaagtgtagggagatgcttgctgcagctcttcgaacaggggatgactacattgcaattggagctgatgaggaagaattaggatctcaaattg

SEQ ID NO: 686875 - DNA, 120 bp, Artificial Sequence
  ENSG00000187735_7 (sequence is synthesized)
aagaagctatatatcaagaaataaggaatacagacatgaaatacaaaaatagagtacgaagtaggatatcaaatcttaaagatgcaaaaaatccaaatttaaggaaaaatgtcctctgtg

SEQ ID NO: 686876 - DNA, 120 bp, Artificial Sequence
  ENSG00000187735_8 (sequence is synthesized)
ggaatattcctcctgacttatttgctagaatgacagcagaggaaatggctagtgatgagctgaaagagatgcggaaaaacttgaccaaagaagccatcagagagcatcagatggccaaga

SEQ ID NO: 686877 - DNA, 120 bp, Artificial Sequence
  ENSG00000187735_9 (sequence is synthesized)
ctggtgggacccagactgacttgttcacatgtggcaaatgtaaaaagaagaattgcacttacacacaggtacaaacccgtagtgctgatgaaccaatgacaacatttgttgtctgtaatg

SEQ ID NO: 686878 - DNA, 120 bp, Artificial Sequence
  ENSG00000187735_10 (sequence is synthesized)
aatgtggaaatcgatggaagttctgttgagttggaagaattggcaaaatatctggaccattaagaaaacggattttgtaactagctttaaactaggccaagcaactagttttcctgcaaa

SEQ ID NO: 686879 - DNA, 120 bp, Artificial Sequence
  ENSG00000187735_11 (sequence is synthesized)
cttgggttagactttgtttttgacctaacatcccttccttaaatgccttctgtagtttcagatcagtagggagaccatataataattttatggtacctgtttcaaaacatattttttctg

SEQ ID NO: 686880 - DNA, 120 bp, Artificial Sequence
  ENSG00000187735_12 (sequence is synthesized)
tttttataagtaagttgatattaattaaactcttggcaatatttcttctttcttaaaggaaaatataccttaactttttttcttttacactgtgaaacatacacagtagaaattctgtta

SEQ ID NO: 686881 - DNA, 120 bp, Artificial Sequence
  ENSG00000187735_13 (sequence is synthesized)
ctctctgttattaatacataaatgaaaatacatttttttccatattggcatgtagctacaaatattaaaggaggagaaaaggtaatataattttaggtttaccaaatatggtgtgtattc

SEQ ID NO: 686882 - DNA, 120 bp, Artificial Sequence
  ENSG00000187735_14 (sequence is synthesized)
aaataatacttgaccagcttatctaaaatgtacataattttgaggtagcttatgaatttgattttaattattatgttcacaagcttggaatattagatattattttgcatctgtaactaa

SEQ ID NO: 686883 - DNA, 120 bp, Artificial Sequence
  ENSG00000187735_15 (sequence is synthesized)
ccgtgatcatcatttcttgtaatttcttgtacatgtatattacttgttcttaatagatttttggaaacaagactttattgagatcagtttggttttcctgttaatttacctgtttgactt

SEQ ID NO: 686884 - DNA, 120 bp, Artificial Sequence
  ENSG00000187735_16 (sequence is synthesized)
tataatgtgttttagttttgcagaagaacactgttgtagtttagaaggcttttcataaatcccctcataggcaaagatgaaaacttcccactatttttttcccctcttaggaagacatac

SEQ ID NO: 686885 - DNA, 120 bp, Artificial Sequence
  ENSG00000187735_17 (sequence is synthesized)
tggaaagaaaatgtttagcatcttagtgtagtatagctattgtaaacagttcatgactagattttgattcggaaatctatactgaccaaggattaatcttaaggattgtataattcatta

SEQ ID NO: 686886 - DNA, 120 bp, Artificial Sequence
  ENSG00000187735_18 (sequence is synthesized)
aagctgtggtctttccatgtggagactgatagaaaataattttgtcccaagtcttatttgctgactttttctgtcatgagtgagattgttgaacaaactgaatatatgggctatagcaag

SEQ ID NO: 686887 - DNA, 120 bp, Artificial Sequence
  ENSG00000187735_19 (sequence is synthesized)
tagctttacagtacagatcttacaattaagttttgcttttgttaaagtgtgtaccattttttctgtttggagtaagacaaaaattgttttgacataggttccctagggtacacttgctct

SEQ ID NO: 686888 - DNA, 120 bp, Artificial Sequence
  ENSG00000187735_20 (sequence is synthesized)
agcatactttaaaggccactgttgcaaagtctacattttatgctgaatctgcattctgtcaggcacccgtagaaagacctcagtacatgctttgcactctcctttgctccctttttccaa

SEQ ID NO: 686889 - DNA, 120 bp, Artificial Sequence
  ENSG00000187735_21 (sequence is synthesized)
tttcttattgcatatcattttgttgtaatacagaaagcagcatttttaaatgtccgtgttaagaattggcccactggtaccaactcacctctattttgtcagttcatagttgaagatttt

SEQ ID NO: 686890 - DNA, 120 bp, Artificial Sequence
  ENSG00000187735_22 (sequence is synthesized)
agttcatagttgaagattttgttttatttcaaaaacaaagtacatttttgaaataatgtttcagaataaaataatctcacttttaagtgatccattttaaaatttgtaattcaataaagt

SEQ ID NO: 686891 - DNA, 120 bp, Artificial Sequence
  ENSG00000187735_23 (sequence is synthesized)
gcagtggctaccttgagatcatcttggcaaaaactcatgagtgatcacaaaggagacttttcttctggagcacaccaaatctgcttgtttcctgtgatgttaacagtgtctcttgatctc

SEQ ID NO: 686892 - DNA, 120 bp, Artificial Sequence
  ENSG00000187735_24 (sequence is synthesized)
gtccccggggagggtgtccgggcccggggcgtcgggtcccgcggcaacctgcgttaggacccgctcgctcttgtatttccagtccctgctcgctggtgccgtgtaataaacctaatcgat

SEQ ID NO: 686893 - DNA, 120 bp, Artificial Sequence
  ENSG00000187735_25 (sequence is synthesized)
ttagggattagggcacgctctccgttgactttaaactttcgtgctagtaaaaccttggcaatttagcttaggaattgaagcgtagaaagtcctcagaacttgaaagaatggagtcttccg

SEQ ID NO: 686894 - DNA, 120 bp, Artificial Sequence
  ENSG00000187735_26 (sequence is synthesized)
agcatcaaatagaggcttgtgatcggtattagacatcgggctggtaaaatgtaaaacttctgtgtcttatttttgaagagggctgaacgtccgcctggttatctcaactgtgctacatgt

SEQ ID NO: 686895 - DNA, 120 bp, Artificial Sequence
  ENSG00000187735_27 (sequence is synthesized)
tctcttggattcatattatatactcacttaaaatagaaagatttcttctggtcttttcataggtctgcctagatatctaaatatatacagatatgctcacactatacagtactcttgtac

SEQ ID NO: 686896 - DNA, 120 bp, Artificial Sequence
  ENSG00000187735_28 (sequence is synthesized)
tgcatcaattcccctgtctaatgttcccctatttacactcctttttttgttttctaatcaaatggaagtagtaaatgtatgtagccatgtattctaatttatttttttttcagatttctt

SEQ ID NO: 686897 - DNA, 120 bp, Artificial Sequence
  ENSG00000187735_29 (sequence is synthesized)
gaacatttgagaggtagaagacattgaataaataagaagttatttatattgtactcaacaagtttaattgaatgggattgctggggtaggcactgatggaattgataatggaggtagtga

SEQ ID NO: 686898 - DNA, 120 bp, Artificial Sequence
  ENSG00000187735_30 (sequence is synthesized)
aatggttacatttttttcttagtgaatctagatatactgaaagcagtgcctcgtaataaaggcgaggggagttaatttgatctttagggtttttttgccttttaggccagtcaaatttgg

SEQ ID NO: 686899 - DNA, 120 bp, Artificial Sequence
  ENSG00000187735_31 (sequence is synthesized)
ctttcttaacttttgacacaactggataaactctttcagtaagaagaattttctcttaaaggaaaggttgtggataccttttgaaatggtttttgaaattttttgacttacagaaaactt

SEQ ID NO: 686900 - DNA, 120 bp, Artificial Sequence
  ENSG00000187735_32 (sequence is synthesized)
gagatgaggcgaagtgaatgatgtaggcattgtgactaagtgttaggctgctgttgaccttctgatgatccatcagaaggaggctcatctgcttcaggtggtcctgcctcatcgagccct

SEQ ID NO: 686901 - DNA, 120 bp, Artificial Sequence
  ENSG00000187736_0 (sequence is synthesized)
cctgtatcccaagaccctgcctcctcttgcggtggggggaaagcggcctcttactctaggcctttcggtttgcgcgagcgggcaggaaagcgtgcgtgcggctaagagagtgggcgctct

SEQ ID NO: 686902 - DNA, 120 bp, Artificial Sequence
  ENSG00000187736_1 (sequence is synthesized)
cgcggccgctgacgatggaagaactggagcaaggcctgttgatgcagccatgggcgtggctacagcttgcagagaactccctcttggccaaggtttttatcaccaagcagggctatgcct

SEQ ID NO: 686903 - DNA, 120 bp, Artificial Sequence
  ENSG00000187736_2 (sequence is synthesized)
tgttggtttcagatcttcaacaggtgtggcatgaacaggtggacactagtgtggtcagccagcgagccaaggagctgaacaagcggctcactgctcctcctgcagctttcctctgtcatt

SEQ ID NO: 686904 - DNA, 120 bp, Artificial Sequence
  ENSG00000187736_3 (sequence is synthesized)
tggataatctccttcgcccattgttgaaggacgctgctcaccctagcgaagctaccttctcctgtgattgtgtggcagatgcactgattctacgggtgcgaagtgagctctctggcctcc

SEQ ID NO: 686905 - DNA, 120 bp, Artificial Sequence
  ENSG00000187736_4 (sequence is synthesized)
ccttctattggaatttccactgcatgctagctagtccttccctggtctcccaacatttgattcgtcctctgatgggcatgagtctggcattacagtgccaagtgagggagctagcaacgt

SEQ ID NO: 686906 - DNA, 120 bp, Artificial Sequence
  ENSG00000187736_5 (sequence is synthesized)
tacttcatatgaaagacctagagatccaagactaccaggagagtggggctacgctgattcgagatcgattgaagacagaaccatttgaagaaaattccttcttggaacaatttatgatag

SEQ ID NO: 686907 - DNA, 120 bp, Artificial Sequence
  ENSG00000187736_6 (sequence is synthesized)
agaaactgccagaggcatgcagcattggtgatggaaagccctttgtcatgaatctgcaggatctgtatatggcagtcaccacacaagaggtccaagtgggacagaagcatcaaggcgctg

SEQ ID NO: 686908 - DNA, 120 bp, Artificial Sequence
  ENSG00000187736_7 (sequence is synthesized)
gagatcctcatacctcaaacagtgcttccctgcaaggaatcgatagccaatgtgtaaaccagccagaacaactggtctcctcagccccaaccctctcagcacctgagaaagagtccacgg

SEQ ID NO: 686909 - DNA, 120 bp, Artificial Sequence
  ENSG00000187736_8 (sequence is synthesized)
caaggggtctcttcagttaatctgttgtggcctcagctgctgaggatggacttggagaacagcttccaagcttcaccttgaaagaagcttacatggcagcaatatttctaaaatagtgat

SEQ ID NO: 686910 - DNA, 120 bp, Artificial Sequence
  ENSG00000187736_9 (sequence is synthesized)
acagtcagaggcctcctgtaagggcgagagaactgaagttgatgttgacaggcccacagggaattggccttccctgttcaagtggaagccagtctctgagaatcccgtgctctcctctct

SEQ ID NO: 686911 - DNA, 120 bp, Artificial Sequence
  ENSG00000187736_10 (sequence is synthesized)
tttggtggaggttctgtaggttcaggtttctaccatggactttaggtatatagggcaagtcagcaagaaagcaccacacactcaggaagccttgtctacctttccctagcgtctctagcc

SEQ ID NO: 686912 - DNA, 120 bp, Artificial Sequence
  ENSG00000187736_11 (sequence is synthesized)
agccagccccagatactcctcagagacccacttctctcttttgcatggaataaaaagcactcacagtccctgcttttgggattacttatgctgtggaactcataacccaattcacttcct

SEQ ID NO: 686913 - DNA, 120 bp, Artificial Sequence
  ENSG00000187736_12 (sequence is synthesized)
tcactgggtcccaccccattgttgtctctggatgaagtctagccatcagtctggtccttcagattcttcgtaaacttttctgcagttgccagagctaagtctccatttggaaactttgat

SEQ ID NO: 686914 - DNA, 120 bp, Artificial Sequence
  ENSG00000187736_13 (sequence is synthesized)
ctcaagaactctcttgatggtgggcacaagacagataggtgattgctgctttcctttgccaaacttggatgcatttttctctttgtttccaaagtataggcaacaggttaaactaccacg

SEQ ID NO: 686915 - DNA, 120 bp, Artificial Sequence
  ENSG00000187736_14 (sequence is synthesized)
ctttgtttccaaagtataggcaacaggttaaactaccacgtggggtagtttatcaatcctcccgcctcatccttctgcataactgggactaaaggcacacaccaccacacctagctaatt

SEQ ID NO: 686916 - DNA, 68 bp, Artificial Sequence
  ENSG00000187736_15 (sequence is synthesized)
atccaatttctggtttatttactttcgatggttaaatgcctccttattcaaatatcctgtatatatac

SEQ ID NO: 686917 - DNA, 120 bp, Artificial Sequence
  ENSG00000187736_16 (sequence is synthesized)
tggttaaatgcctccttattcaaatatcctgtatatatactggcgtttctgtcctgatgtcaagtctcgagagaagatgatcaaacaataataaaataattataataagaacaacaataa

SEQ ID NO: 686918 - DNA, 120 bp, Artificial Sequence
  ENSG00000187736_17 (sequence is synthesized)
ctctctttggggagattttctgggtaatagaaaattttaaaatgttaaagagtgttgtagactccgaaaatgtttttatctaggatgtgtcttaagttgggaagatgcccaggaaatgca

SEQ ID NO: 686919 - DNA, 120 bp, Artificial Sequence
  ENSG00000187736_18 (sequence is synthesized)
ctagccatacaggacccagacactctttgtccagctctgttttcccagtgtctcctggggagtgattcagggccaaggtgacagtgggtttggagcccagatgaaaggatcgcagggacc

SEQ ID NO: 686920 - DNA, 120 bp, Artificial Sequence
  ENSG00000187736_19 (sequence is synthesized)
gtgcgtgcggctaagagagtgggcgctctcgcggccgctgacggaaaaacaatcacattctctgtcaagcagccgtagttctgattgtctactaggttaagcctactactttagctgctg

SEQ ID NO: 686921 - DNA, 120 bp, Artificial Sequence
  ENSG00000187736_20 (sequence is synthesized)
agatagaaaagttgttttgcaggggttccaggctgggcatgttgtcattggtggcagtgcactggagtgggaatgtggaggatgagttaagtggaagttaattcagtctttacctctgtg

SEQ ID NO: 686922 - DNA, 120 bp, Artificial Sequence
  ENSG00000187736_21 (sequence is synthesized)
gctcctggacacaggttcttagctcttttttgtgtcatcgatccctgagagtttgatgatagctgtagacctcttccccctccccatgcatatatgcgtgtacacataacattttcatat

SEQ ID NO: 686923 - DNA, 120 bp, Artificial Sequence
  ENSG00000187736_22 (sequence is synthesized)
aattctagaggattcacatgcattgactctagattaagaacctgttttagggatttttaaaaaaatcctgagagcttcctaaactttgtttttagataatgatcaaatacttcgaatttc

SEQ ID NO: 686924 - DNA, 120 bp, Artificial Sequence
  ENSG00000187741_0 (sequence is synthesized)
gagccgccgccggggctgtaggcgccaaggccatgtccgactcgtgggtcccgaactccgcctcgggccaggacccagggggccgccggagggcctgggccgagctgctggcgggaaggg

SEQ ID NO: 686925 - DNA, 120 bp, Artificial Sequence
  ENSG00000187741_1 (sequence is synthesized)
tcaagagggaaaaatataatcctgaaagggcacagaaattaaaggaatcagctgtgcgcctcctgcgaagccatcaggacctgaatgcccttttgcttgaggtagaaggtccactgtgta

SEQ ID NO: 686926 - DNA, 120 bp, Artificial Sequence
  ENSG00000187741_2 (sequence is synthesized)
aaaaattgtctctcagcaaagtgattgactgtgacagttctgaggcctatgctaatcattctagttcatttataggctctgctttgcaggatcaagcctcaaggctgggggttcccgtgg

SEQ ID NO: 686927 - DNA, 120 bp, Artificial Sequence
  ENSG00000187741_3 (sequence is synthesized)
gtattctctcagccgggatggttgcctctagcgtgggacagatctgcacggctccagcggagaccagtcaccctgtgctgctgactgtggagcagagaaagaagctgtcttccctgttag

SEQ ID NO: 686928 - DNA, 120 bp, Artificial Sequence
  ENSG00000187741_4 (sequence is synthesized)
agtttgctcagtatttattggcacacagtatgttctcccgtctttccttctgtcaagaattatggaaaatacagagttctttgttgcttgaagcggtgtggcatcttcacgtacaaggca

SEQ ID NO: 686929 - DNA, 120 bp, Artificial Sequence
  ENSG00000187741_5 (sequence is synthesized)
ttgtgagcctgcaagagctgctggaaagccatcccgacatgcatgctgtgggatcgtggctcttcaggaatctgtgctgcctttgtgaacagatggaagcatcctgccagcatgctgacg

SEQ ID NO: 686930 - DNA, 120 bp, Artificial Sequence
  ENSG00000187741_6 (sequence is synthesized)
tcgccagggccatgctttctgattttgttcaaatgtttgttttgaggggatttcagaaaaactcagatctgagaagaactgtggagcctgaaaaaatgccgcaggtcacggttgatgtac

SEQ ID NO: 686931 - DNA, 120 bp, Artificial Sequence
  ENSG00000187741_7 (sequence is synthesized)
tgcagagaatgctgatttttgcacttgacgctttggctgctggagtacaggaggagtcctccactcacaagatcgtgaggtgctggttcggagtgttcagtggacacacgcttggcagtg

SEQ ID NO: 686932 - DNA, 120 bp, Artificial Sequence
  ENSG00000187741_8 (sequence is synthesized)
taatttccacagatcctctgaagaggttcttcagtcataccctgactcagatactcactcacagccctgtgctgaaagcatctgatgctgttcagatgcagagagagtggagctttgcgc

SEQ ID NO: 686933 - DNA, 120 bp, Artificial Sequence
  ENSG00000187741_9 (sequence is synthesized)
ggacacaccctctgctcacctcactgtaccgcaggctctttgtgatgctgagtgcagaggagttggttggccatttgcaagaagttctggaaacgcaggaggttcactggcagagagtgc

SEQ ID NO: 686934 - DNA, 120 bp, Artificial Sequence
  ENSG00000187741_10 (sequence is synthesized)
tctcctttgtgtctgccctggttgtctgctttccagaagcgcagcagctgcttgaagactgggtggcgcgtttgatggcccaggcattcgagagctgccagctggacagcatggtcactg

SEQ ID NO: 686935 - DNA, 120 bp, Artificial Sequence
  ENSG00000187741_11 (sequence is synthesized)
cgttcctggttgtgcgccaggcagcactggagggcccctctgcgttcctgtcatatgcagactggttcaaggcctcctttgggagcacacgaggctaccatggctgcagcaagaaggccc

SEQ ID NO: 686936 - DNA, 120 bp, Artificial Sequence
  ENSG00000187741_12 (sequence is synthesized)
tggtcttcctgtttacgttcttgtcagaactcgtgccttttgagtctccccggtacctgcaggtgcacattctccacccacccctggttcccggcaagtaccgctccctcctcacagact

SEQ ID NO: 686937 - DNA, 120 bp, Artificial Sequence
  ENSG00000187741_13 (sequence is synthesized)
acatctcattggccaagacacggctggccgacctcaaggtttctatagaaaacatgggactctacgaggatttgtcatcagctggggacattactgagccccacagccaagctcttcagg

SEQ ID NO: 686938 - DNA, 120 bp, Artificial Sequence
  ENSG00000187741_14 (sequence is synthesized)
atgttgaaaaggccatcatggtgtttgagcatacggggaacatcccagtcaccgtcatggaggccagcatattcaggaggccttactacgtgtcccacttcctccccgccctgctcacac

SEQ ID NO: 686939 - DNA, 120 bp, Artificial Sequence
  ENSG00000187741_15 (sequence is synthesized)
ctcgagtgctccccaaagtccctgactcccgtgtggcgtttatagagtctctgaagagagcagataaaatccccccatctctgtactccacctactgccaggcctgctctgctgctgaag

SEQ ID NO: 686940 - DNA, 120 bp, Artificial Sequence
  ENSG00000187741_16 (sequence is synthesized)
agaagccagaagatgcagccctgggagtgagggcagaacccaactctgctgaggagcccctgggacagctcacagctgcactgggagagctgagagcctccatgacagaccccagccagc

SEQ ID NO: 686941 - DNA, 120 bp, Artificial Sequence
  ENSG00000187741_17 (sequence is synthesized)
gtgatgttatatcggcacaggtggcagtgatttctgaaagactgagggctgtcctgggccacaatgaggatgacagcagcgttgagatatcaaagattcagctcagcatcaacacgccga

SEQ ID NO: 686942 - DNA, 120 bp, Artificial Sequence
  ENSG00000187741_18 (sequence is synthesized)
gactggagccacgggaacacatggctgtggacctcctgctgacgtctttctgtcagaacctgatggctgcctccagtgtcgctcccccggagaggcagggtccctgggctgccctcttcg

SEQ ID NO: 686943 - DNA, 120 bp, Artificial Sequence
  ENSG00000187741_19 (sequence is synthesized)
tgaggaccatgtgtggacgtgtgctccctgcagtgctcacccggctctgccagctgctccgtcaccagggcccgagcctgagtgccccacatgtgctggggttggctgccctggccgtgc

SEQ ID NO: 686944 - DNA, 120 bp, Artificial Sequence
  ENSG00000187741_20 (sequence is synthesized)
acctgggtgagtccaggtctgcgctcccagaggtggatgtgggtcctcctgcacctggtgctggccttcctgtccctgcgctctttgacagcctcctgacctgtaggacgagggattcct

SEQ ID NO: 686945 - DNA, 120 bp, Artificial Sequence
  ENSG00000187741_21 (sequence is synthesized)
tgttcttctgcctgaaattttgtacagcagcaatttcttactctctctgcaagttttcttcccagtcacgagatactttgtgcagctgcttatctccaggccttattaaaaagtttcagt

SEQ ID NO: 686946 - DNA, 120 bp, Artificial Sequence
  ENSG00000187741_22 (sequence is synthesized)
cgtagccagcctttcctggagacccttgcaccttccttctgcagactggcagagagctgccctctctctctggacacacagaaccttccgagaggtgttgaaagaggaagatgttcactt

SEQ ID NO: 686947 - DNA, 120 bp, Artificial Sequence
  ENSG00000187741_23 (sequence is synthesized)
aacttaccaagactggttacacctggagctggaaattcaacctgaagctgatgctctttcagatactgaacggcaggacttccaccagtgggcgatccatgagcactttctccctgagtc

SEQ ID NO: 686948 - DNA, 120 bp, Artificial Sequence
  ENSG00000187741_24 (sequence is synthesized)
ctcggcttcagggggctgtgacggagacctgcaggctgcgtgtaccattcttgtcaacgcactgatggatttccaccaaagctcaaggagttatgaccactcagaaaattctgatttggt

SEQ ID NO: 686949 - DNA, 120 bp, Artificial Sequence
  ENSG00000187741_25 (sequence is synthesized)
ctttggtggccgcacaggaaatgaggatattatttccagattgcaggagatggtagctgacctggagctgcagcaagacctcatagtgcctctcggccacaccccttcccaggagcactt

SEQ ID NO: 686950 - DNA, 120 bp, Artificial Sequence
  ENSG00000187741_26 (sequence is synthesized)
cctctttgagattttccgcagacggctccaggctctgacaagcgggtggagcgtggctgccagccttcagagacagagggagctgctaatgtacaaacggatcctcctccgcctgccttc

SEQ ID NO: 686951 - DNA, 120 bp, Artificial Sequence
  ENSG00000187741_27 (sequence is synthesized)
gtctgtcctctgcggcagcagcttccaggcagaacagcccatcactgccagatgcgagcagttcttccacttggtcaactctgagatgagaaacttctgctcccacggaggtgccctgac

SEQ ID NO: 686952 - DNA, 120 bp, Artificial Sequence
  ENSG00000187741_28 (sequence is synthesized)
acaggacatcactgcccacttcttcaggggcctcctgaacgcctgtctgcggagcagagacccctccctgatggtcgacttcatactggccaagtgccagacgaaatgccccttaatttt

SEQ ID NO: 686953 - DNA, 120 bp, Artificial Sequence
  ENSG00000187741_29 (sequence is synthesized)
gacctctgctctggtgtggtggccgagcctggagcctgtgctgctctgccggtggaggagacactgccagagcccgctgccccgggaactgcagaagctacaagaaggccggcagtttgc

SEQ ID NO: 686954 - DNA, 120 bp, Artificial Sequence
  ENSG00000187741_30 (sequence is synthesized)
cagcgatttcctctcccctgaggctgcctccccagcacccaacccggactggctctcagctgctgcactgcactttgcgattcaacaagtcagggaagaaaacatcaggaagcagctaaa

SEQ ID NO: 686955 - DNA, 120 bp, Artificial Sequence
  ENSG00000187741_31 (sequence is synthesized)
gaagctggactgcgagagagaggagctattggttttccttttcttcttctccttgatgggcctgctgtcgtcacatctgacctcaaatagcaccacagacctgccaaaggctttccacgt

SEQ ID NO: 686956 - DNA, 120 bp, Artificial Sequence
  ENSG00000187741_32 (sequence is synthesized)
ttgtgcagcaatcctcgagtgtttagagaagaggaagatatcctggctggcactctttcagttgacagagagtgacctcaggctggggcggctcctcctccgtgtggccccggatcagca

SEQ ID NO: 686957 - DNA, 120 bp, Artificial Sequence
  ENSG00000187741_33 (sequence is synthesized)
caccaggctgctgcctttcgctttttacagtcttctctcctacttccatgaagacgcggccatcagggaagaggccttcctgcatgttgctgtggacatgtacttgaagctggtccagct

SEQ ID NO: 686958 - DNA, 120 bp, Artificial Sequence
  ENSG00000187741_34 (sequence is synthesized)
cttcgtggctggggatacaagcacagtttcacctccagctggcaggagcctggagctcaagggtcagggcaaccccgtggaactgataacaaaagctcgtctttttctgctgcagttaat

SEQ ID NO: 686959 - DNA, 120 bp, Artificial Sequence
  ENSG00000187741_35 (sequence is synthesized)
acctcggtgcccgaaaaagagcttctcacacgtggcagagctgctggctgatcgtggggactgcgacccagaggtgagcgccgccctccagagcagacagcaggctgcccctgacgctga

SEQ ID NO: 686960 - DNA, 120 bp, Artificial Sequence
  ENSG00000187741_36 (sequence is synthesized)
cctgtcccaggagcctcatctcttctgacgggacctgccactgcacaccagcccagctcccgtgtaaataatttattacaagcataacatggagctcttgttgcactaaaaagtggatta

SEQ ID NO: 686961 - DNA, 120 bp, Artificial Sequence
  ENSG00000187741_37 (sequence is synthesized)
caaatctcctcgactgctttagtggggaaaggaatcaattatttatgaactgtccggccccgagtcactcagcgtttgcgggaaaataaaccactggtcccagagcagaggaaggctact

SEQ ID NO: 686962 - DNA, 120 bp, Artificial Sequence
  ENSG00000187741_38 (sequence is synthesized)
tgagccggacaccaagcccgcctccagcaccaagggcgggcagcaccctccgaccctcccatgcgggtgcacacgaagggtgaggctgacacagccactgcggagtccaggctgctagag

SEQ ID NO: 686963 - DNA, 120 bp, Artificial Sequence
  ENSG00000187741_39 (sequence is synthesized)
gtgctcatcctcactgccgtcctcaggtgggttcgggcttcaccgcctggccctctgtggtcacagaggggctcggtggcccaggtggtggttccgcctccaggggcagggccttgtcct

SEQ ID NO: 686964 - DNA, 120 bp, Artificial Sequence
  ENSG00000187741_40 (sequence is synthesized)
gggtctgtgtcagcgggtgcaccatggacatgtgtacattgaggttgtgggccttctcaaaccgccggccacactggtcacaggcaaagtccagctcagtctcagccttgtgtttggtca

SEQ ID NO: 686965 - DNA, 120 bp, Artificial Sequence
  ENSG00000187741_41 (sequence is synthesized)
tgtggtacttgagggatgcccgctgcctgcactggaacccacagacctcacacctgggggacagaggcagataagaaggtgcgagggccacagccctgggagggggtcctgactcacact

SEQ ID NO: 686966 - DNA, 120 bp, Artificial Sequence
  ENSG00000187741_42 (sequence is synthesized)
tactgcaaaggcttggctcccgaatgtcgcatttggtggacgagaaggtgcttccgctgcttgaaggtttgtccacattcgtcacagatatagttccgcacctctgagaggggagagtcc

SEQ ID NO: 686967 - DNA, 120 bp, Artificial Sequence
  ENSG00000187741_43 (sequence is synthesized)
agtgagtccaggcccctgatgctccaacctcccggggggacgacgatgacaatgtgaaaccatcacagctgggaagacatttctgcacatggttcaccatgcagtgggcccaagcaaggg

SEQ ID NO: 686968 - DNA, 120 bp, Artificial Sequence
  ENSG00000187741_44 (sequence is synthesized)
gcctatgagggcctcgtttattaagatctttaaactgctttatacactgtcacgtggcttcatcagctgtgtgcatttcaggatggtttttaaagaaacctcagaaagctatttccttaa

SEQ ID NO: 686969 - DNA, 120 bp, Artificial Sequence
  ENSG00000187741_45 (sequence is synthesized)
cttcagcagcccgctcctgagcacacttcctctgccagttacgataacgtgcgtgaggaggaggcgaccatgggaaagcccggggaacgctctggtcagccttttcctgtgaggatgagg

SEQ ID NO: 686970 - DNA, 120 bp, Artificial Sequence
  ENSG00000187741_46 (sequence is synthesized)
tcggaaggttcggagtgttcagtggacacacgcttggcagtgtaatttccacagatcctctgaagaggttcttcagtcataccctgactcagatactcactcacagccctgtgctgaaag

SEQ ID NO: 686971 - DNA, 120 bp, Artificial Sequence
  ENSG00000187741_47 (sequence is synthesized)
cccagatgcacttcgggacctgctcaaggtcatctcctaaacaccctggcttgcttgagagaagcggtgtgggcagcctctcgtgtgagcagggagaaaagaaccgagttctcgtggtgg

SEQ ID NO: 686972 - DNA, 85 bp, Artificial Sequence
  ENSG00000187741_48 (sequence is synthesized)
tgggcgcctgtaatcccaactactggggaggcctttccagtgagccgagatcactccaacggccaatagagcaagactctgtcca

SEQ ID NO: 686973 - DNA, 120 bp, Artificial Sequence
  ENSG00000187741_49 (sequence is synthesized)
gttcttctgcctgaagtgagctcttcttccacagtcgcgtcttctctcctctctctcgaaaagtgacacatgctcgtttgataaaattagaagagacagacatgcagacataccacccaa

SEQ ID NO: 686974 - DNA, 120 bp, Artificial Sequence
  ENSG00000187741_50 (sequence is synthesized)
agataaccactttttagcattttgattttgtacagcagcaatttcttactctctctgcaagttttcttcccagtcacgagatactttgtgcagctgcttatctccaggccttattaaaaa

SEQ ID NO: 686975 - DNA, 120 bp, Artificial Sequence
  ENSG00000187741_51 (sequence is synthesized)
acccaccctcctgcaagaggtcgacccccccatcctctcccagctgctgacaggtacctgggtatcctcagctcaggctgttcgccccacactatccccacagccaggcctcccagggta

SEQ ID NO: 686976 - DNA, 120 bp, Artificial Sequence
  ENSG00000187741_52 (sequence is synthesized)
cacgtcccgacccccaggggtgtccccagcactgataataggcagagatgtccagagttgcctgagccacttcttggtgttgcagacctcaggctggggcggctcctcctccgtgtggcc

SEQ ID NO: 686977 - DNA, 86 bp, Artificial Sequence
  ENSG00000187741_53 (sequence is synthesized)
tggtcccccgggcccagctgtcttgtcttttatctctttgtcttgtatctttctttctacactctctcgtcgccgcacacttaaca

SEQ ID NO: 686978 - DNA, 120 bp, Artificial Sequence
  ENSG00000187741_54 (sequence is synthesized)
gcttttacgcgagcccggtggtgctggtcaagagtgtgtgtaggggggtgtcagcagagtcccagctgactgtgggtgagcctctcagtgaagcccttccctacctgcccggaacctgca

SEQ ID NO: 686979 - DNA, 120 bp, Artificial Sequence
  ENSG00000187741_55 (sequence is synthesized)
gtgcctcctgtcgatggaacattctttgtcagacgcttccataagcactgactgctgctctgagaggccagagtgtccactgctgcttcattcaggtctctagtggtttgcacttgacat

SEQ ID NO: 686980 - DNA, 120 bp, Artificial Sequence
  ENSG00000187741_56 (sequence is synthesized)
gctgtaattgctgtgtagtcttttaaaacttggtgtttgggtgtgcacagtctccttctggaatacttgatcacccagcataactcacgtcatgttcctgctggctgcccttgccttgct

SEQ ID NO: 686981 - DNA, 75 bp, Artificial Sequence
  ENSG00000187741_57 (sequence is synthesized)
ctctgcctcctgggttggcagataaaatccccccatctctgtactccacctactgccaggcctgctctgctgctg

SEQ ID NO: 686982 - DNA, 120 bp, Artificial Sequence
  ENSG00000187741_58 (sequence is synthesized)
cctctctctctggacacacagaaccttccgagaggtgttgaaagaggaagatgttcacgtaggtgaccgttccttctcctgcatcatgccacgtcctgagtctagggtttgtgtgtgctc

SEQ ID NO: 686983 - DNA, 120 bp, Artificial Sequence
  ENSG00000187741_59 (sequence is synthesized)
ctcgggcaagaacagcagcacctggtcatggtgatgtgcacctgcagtcccagccatctgagaggctgagggggagaattctggagttcaggaggcagagtctgcagcgagctacgattg

SEQ ID NO: 686984 - DNA, 120 bp, Artificial Sequence
  ENSG00000187741_60 (sequence is synthesized)
tctccccttgctcctccttccctgggtgtgattcaggctctagagctggccctgcctctcagccccccacatttctagaacacactgtagctgtgcctctacagactcccgctgcctggc

SEQ ID NO: 686985 - DNA, 120 bp, Artificial Sequence
  ENSG00000187741_61 (sequence is synthesized)
ctccacagatcctgctcagattcaccagtaggcaaagcttggccctattagctttttctctccatggctctgtggagatgtgcggagacccttacaggtcgggaggcggaagctgaggag

SEQ ID NO: 686986 - DNA, 120 bp, Artificial Sequence
  ENSG00000187741_62 (sequence is synthesized)
tgggggctgggtggaaggtggacatcggggtttggtggaaatggggctctggggtttgcttccctctagtgtgggcaggggaccttgaagtgaagtcttgagaaaccagtagaatttgcc

SEQ ID NO: 686987 - DNA, 120 bp, Artificial Sequence
  ENSG00000187741_63 (sequence is synthesized)
actgtttccaggccttgtcaaccttttcattctttattttgctcctcatttcccatccctcacagtaactgtttaactgctcaattaaatgtgttgtaccgttcggtacttttactgaaa

SEQ ID NO: 686988 - DNA, 120 bp, Artificial Sequence
  ENSG00000187741_64 (sequence is synthesized)
gagccgccgccggggctgtaggcgccaaggccatgtccgactcgtgggtcccgaactccgcctcgggccaggacccagggggccgccggagggcctgggccgagctgctgggtaggtggg

SEQ ID NO: 686989 - DNA, 120 bp, Artificial Sequence
  ENSG00000187741_65 (sequence is synthesized)
ctgctgggtaggtgggcgcggcaggccgcgggagtgggcggcgtccggcccgggacggtttcgccggttccccgatcccttcccgccagagcctccgccggtcggatccccggacgccgc

SEQ ID NO: 686990 - DNA, 80 bp, Artificial Sequence
  ENSG00000187741_66 (sequence is synthesized)
cctcggacccggcccctcctgcgcctgggcggacgcccccagccgccgcccgcggggcgctcccttctttcccgaacgcc

SEQ ID NO: 686991 - DNA, 120 bp, Artificial Sequence
  ENSG00000187741_67 (sequence is synthesized)
tggggctcccctcagcgcagaggccgcccctcgccagccgtccccgggctcccctgcctcgggccctcctgggccgtcttccccggcgtccgcggtggggccgtctccgttagtttcccg

SEQ ID NO: 686992 - DNA, 120 bp, Artificial Sequence
  ENSG00000187741_68 (sequence is synthesized)
ggcgtccgcggtggggccgtctccgttagtttcccgagacctgcgccctggggaggagccccggcccctcttcgggagggtgtcgctggtgggtttctccgcggcgtccacctgcgcgtc

SEQ ID NO: 686993 - DNA, 120 bp, Artificial Sequence
  ENSG00000187741_69 (sequence is synthesized)
cacaaatgcggagggccgctcttttcagaggcatcttgcaaatggttaagaacgagccctccttgaggttccttgctaagtaagtttataagctccattttagttgggacagattaagca

SEQ ID NO: 686994 - DNA, 120 bp, Artificial Sequence
  ENSG00000187741_70 (sequence is synthesized)
tacaggtacctccacccacagggctggtcagggctgggcagtgtttcccagacccccatctcagcacctctgggtcccgccagatgggaagggttgtctgtgcctctgctccacagatga

SEQ ID NO: 686995 - DNA, 120 bp, Artificial Sequence
  ENSG00000187741_71 (sequence is synthesized)
tgccgagtggccttggcagatcttcctctgcgtgtgccgaggagcctgggttctccctgtcggggcctcagcggatcttcctctgcatgttccgaggagcctgggttctccctgtcgggg

SEQ ID NO: 686996 - DNA, 120 bp, Artificial Sequence
  ENSG00000187741_72 (sequence is synthesized)
cctcagctccttcccctggtttctgtctcacttagttgacggagcctcctgctgtcttttataagaaaattagcgaaatcaagcctggacaccatagtgaaacctcatctccaccaaaaa

SEQ ID NO: 686997 - DNA, 120 bp, Artificial Sequence
  ENSG00000187741_73 (sequence is synthesized)
agtgtcgctcccccggagaggtgaaggcgcgggcagctccctgagtggtggggctcctctgggtgccacctcttgctgggccaagtctgcagaccagggactcatgagctcgtctccgca

SEQ ID NO: 686998 - DNA, 120 bp, Artificial Sequence
  ENSG00000187741_74 (sequence is synthesized)
ggagcatgcggcgatgctgagtttcatcaaataggacgcagcagaagttgggaagcactgcagaagatgggttgtcttccagaaagaccactgttttggggaacagcttggctctttctt

SEQ ID NO: 686999 - DNA, 120 bp, Artificial Sequence
  ENSG00000187741_75 (sequence is synthesized)
ccttgggccatgtgggggacatgagaattgacagctgcctgggccatgtgcctgcctggctggcaatacaactcgactatttctgccagagcccctcccctgtggtctgaggcctagtgg

SEQ ID NO: 687000 - DNA, 120 bp, Artificial Sequence
  ENSG00000187741_76 (sequence is synthesized)
caaatctgactctccagtgttccaggcaatgttctgttgatctggatggaggcaacagagtacctgggttttcttgggaattctccaagcttctcattaattacagagagtggatgaaaa

SEQ ID NO: 687001 - DNA, 120 bp, Artificial Sequence
  ENSG00000187742_0 (sequence is synthesized)
ggaaacgctttgtctgtccggcaagccgacggcccgctgctggcctccgtgacgcggcctcctccgcgcctcgcggcatggcgtcggaggggccgcgggagcccgaaagcgagggcatca

SEQ ID NO: 687002 - DNA, 120 bp, Artificial Sequence
  ENSG00000187742_1 (sequence is synthesized)
agttatcagcagatgtcaaaccatttgtccccagatttgccgggctcaatgtggcatggttagagtcctcagaagcatgtgtcttccccagctctgcagccacatactatccgtttgttc

SEQ ID NO: 687003 - DNA, 120 bp, Artificial Sequence
  ENSG00000187742_2 (sequence is synthesized)
aggaaccaccagtgacagagcagaaaatatatactgaagacatggcctttggagcttcaacttttccacctcagtatttatcttctgagataactcttcatccatatgcctattctcctt

SEQ ID NO: 687004 - DNA, 120 bp, Artificial Sequence
  ENSG00000187742_3 (sequence is synthesized)
atacccttgactccacacagaatgtttactcagtgcctggctcccagtatctttataaccaacccagttgttaccgaggttttcaaacagtgaagcatcgaaatgagaacacatgccctc

SEQ ID NO: 687005 - DNA, 120 bp, Artificial Sequence
  ENSG00000187742_4 (sequence is synthesized)
tcccacaagaaatgaaagctctgtttaagaagaaaacctatgatgagaaaaaaacgtatgatcagcaaaagtttgacagtgaaagggctgatggaactatatcatctgagataaaatcag

SEQ ID NO: 687006 - DNA, 120 bp, Artificial Sequence
  ENSG00000187742_5 (sequence is synthesized)
ctagaggttcacatcatttgtccatttacgctgagaatagtttgaaatcagatggttaccataagcgaacagacaggaaatccagaatcattgcaaaaaatgtatctacctccaaacctg

SEQ ID NO: 687007 - DNA, 120 bp, Artificial Sequence
  ENSG00000187742_6 (sequence is synthesized)
agtttgaatttaccacactggactttcctgaactgcaaggtgcagagaacaatatgtcagagatacagaagcaacccaagtggggacctgtccactctgtctctaccgacatttctcttc

SEQ ID NO: 687008 - DNA, 120 bp, Artificial Sequence
  ENSG00000187742_7 (sequence is synthesized)
taagagaagtagtaaaaccagctgcagtgttatcaaagggtgaaatagtggtgaaaaataacccaaatgaatctgtaactgctaatgccgctaccaattctccttcatgtacaagagagt

SEQ ID NO: 687009 - DNA, 120 bp, Artificial Sequence
  ENSG00000187742_8 (sequence is synthesized)
tatcttggacaccaatgggttatgttgttcgacagacattatctacagaactgtcagcagcccctaaaaatgttacttctatgataaacttaaagaccattgcttcatcagcagatccta

SEQ ID NO: 687010 - DNA, 120 bp, Artificial Sequence
  ENSG00000187742_9 (sequence is synthesized)
aaaatgttagtataccatcttctgaagctttatcttcggatccttcctacaacaaagaaaaacacattattcatcctacccaaaagtctaaagcatcacaaggtagtgaccttgaacaaa

SEQ ID NO: 687011 - DNA, 120 bp, Artificial Sequence
  ENSG00000187742_10 (sequence is synthesized)
atgaagcctcaagaaagaataagaaaaagaaagaaaaatctacatcaaaatatgaagtcctgacagttcaagagcctccaaggattgaagatgccgaggaatttcccaacctggcagttg

SEQ ID NO: 687012 - DNA, 120 bp, Artificial Sequence
  ENSG00000187742_11 (sequence is synthesized)
catctgaaagaagagacagaatagagacaccgaaatttcaatctaagcagcagccacaggataattttaaaaataatgtaaagaagagccagcttccagtgcagttggacttggggggca

SEQ ID NO: 687013 - DNA, 120 bp, Artificial Sequence
  ENSG00000187742_12 (sequence is synthesized)
tgctgacagccctggagaagaagcagcactctcagcatgcaaagcagtcctccaaaccagtggtagtctcagttggagcagtgccagtcctttccaaagaatgtgcatcaggggagagag

SEQ ID NO: 687014 - DNA, 120 bp, Artificial Sequence
  ENSG00000187742_13 (sequence is synthesized)
gccgccgcatgagtcaaatgaagaccccgcacaatcccttggactccagcgccccactgatgaagaaagggaagcagagggagatccccaaggccaagaagccaacctcactgaagaaga

SEQ ID NO: 687015 - DNA, 120 bp, Artificial Sequence
  ENSG00000187742_14 (sequence is synthesized)
tattttgaaagaacggcaagagagaaagcagcgtctccaagaaaatgctgtgagtccagcttttaccagtgatgacacacaagatggagagagtggtggtgatgaccagtttcccgagca

SEQ ID NO: 687016 - DNA, 120 bp, Artificial Sequence
  ENSG00000187742_15 (sequence is synthesized)
ggcagagctgtcagggccagaggggatggacgaactgatctccactccttcggttgaggacaagtctgaagagccaccaggcacagagctccagagggacacagaggcctcccaccttgc

SEQ ID NO: 687017 - DNA, 120 bp, Artificial Sequence
  ENSG00000187742_16 (sequence is synthesized)
tcccaatcacaccaccttccctaagatccacagccgcagattcagggattactgcagccagatgcttagtaaagaagtggatgcttgtgttaccgacctactcaaagaactggtccgttt

SEQ ID NO: 687018 - DNA, 120 bp, Artificial Sequence
  ENSG00000187742_17 (sequence is synthesized)
ccaagaccgtatgtaccagaaagatccagtcaaggccaagactaaacgtcgacttgtgttggggttgagggaggttctcaaacacctgaagctcaaaaaactgaaatgtgtcattatttc

SEQ ID NO: 687019 - DNA, 120 bp, Artificial Sequence
  ENSG00000187742_18 (sequence is synthesized)
tcccaactgtgagaagatacagtcaaaaggtgggctggatgacactttgcacacaattattgattatgcctgtgagcagaacattccctttgtgtttgctctcaaccgcaaagctctggg

SEQ ID NO: 687020 - DNA, 120 bp, Artificial Sequence
  ENSG00000187742_19 (sequence is synthesized)
gcgcagtttgaataaggcagttcctgtcagtgtggtggggatcttcagctatgatggggcccaggatcagttccacaagatggttgagctgacagtggcggcccgacaggcgtacaagac

SEQ ID NO: 687021 - DNA, 120 bp, Artificial Sequence
  ENSG00000187742_20 (sequence is synthesized)
catgctggagaatgtgcagcaggagctggtgggagagcccaggcctcaggcacctcccagcctacccacacagggccccagctgccctgcagaagatggccccccagccctgaaagaaaa

SEQ ID NO: 687022 - DNA, 120 bp, Artificial Sequence
  ENSG00000187742_21 (sequence is synthesized)
agaagagccacactacattgaaatctggaaaaaacatctggaagcatacagtggatgtaccctggagctagaagaatccttggaggcttcaacctctcaaatgatgaatttgaatttatg

SEQ ID NO: 687023 - DNA, 120 bp, Artificial Sequence
  ENSG00000187742_22 (sequence is synthesized)
agagttcttgcctgtgtgtctgtattttgggtaaggaggggaggtctgaaaaagactttggggctttttcttctgtttttcatgacaatgtaatttgtgtaactgttgaatctggaaatt

SEQ ID NO: 687024 - DNA, 120 bp, Artificial Sequence
  ENSG00000187742_23 (sequence is synthesized)
gatcagcattaaagggcacatgaagcagtgtctgcaggcgttcagtgctgcggagcctgttaaaggtcactcagatgtgcaggtgttaatcttctctaaaagcctggtgatacagctctg

SEQ ID NO: 687025 - DNA, 120 bp, Artificial Sequence
  ENSG00000187742_24 (sequence is synthesized)
gctttctgagcacactacggatctggaaaatactggaaaatgtgatacttagaatactttggctgctaaggaaacttcctctccattgcagaatagctgagccaagtgagtgagtttgca

SEQ ID NO: 687026 - DNA, 120 bp, Artificial Sequence
  ENSG00000187742_25 (sequence is synthesized)
gaaagcaggtggtgagctcctgcctgctggaggttgccatggagggccattcctgcccggcaacagcaccgtcctgcagggagccacttggcagaagggtgcagggctgctggtgtcaga

SEQ ID NO: 687027 - DNA, 120 bp, Artificial Sequence
  ENSG00000187742_26 (sequence is synthesized)
gcaagagggctacagggaaagggccctttctcaggggatgtagcttttttaaaagatttgggaacacttggaggatttgctaaaatgagcctcagaaggaaaattggttttctaacctgt

SEQ ID NO: 687028 - DNA, 120 bp, Artificial Sequence
  ENSG00000187742_27 (sequence is synthesized)
gactttttgaaatgaattattcctttcagtctttatttttcaaagaaacaatgtgtattgaagtacctagatttgtttgataatcaacaaatctttcctttttcaatgaacatattctga

SEQ ID NO: 687029 - DNA, 120 bp, Artificial Sequence
  ENSG00000187742_28 (sequence is synthesized)
atgtggtttctgtcttagaccaggaggacagagtttgctttcatattttccctgtaagtaagagggcttatttattttaaataaagagtaattattaaattttgtttcagactctggtga

SEQ ID NO: 687030 - DNA, 120 bp, Artificial Sequence
  ENSG00000187742_29 (sequence is synthesized)
acccagcgcagtgactgcggcccagcccggcgctccccgcagtcggggcggggggactctggcgagcttcccgcgctcttgggaacggatagattgttttaaaggatcctgcgtttttct

SEQ ID NO: 687031 - DNA, 120 bp, Artificial Sequence
  ENSG00000187742_30 (sequence is synthesized)
ttgcagccttgaactcctgggctcaagttactgagcttgcctccgcttcctgagtagattgactacaggcacataccaccacactgggcaaattttttttcttcttttttttttttgtag

SEQ ID NO: 687032 - DNA, 120 bp, Artificial Sequence
  ENSG00000187742_31 (sequence is synthesized)
ttttgtagagacgggatcttactatgttgcgtaggctggtattgcgttctttaacagcatgctgaagttgcctgtaaatcttttcatgtttcttgaaaaattcattcctaccaactatag

SEQ ID NO: 687033 - DNA, 120 bp, Artificial Sequence
  ENSG00000187742_32 (sequence is synthesized)
tcttgtgctgctgttgtaaatggagtcatctctttgatatatgccaactggctgctgtgtgcttgtgccacaccccctcatgtatttctcatgctgttaggagtacttctcaggtgctgt

SEQ ID NO: 687034 - DNA, 120 bp, Artificial Sequence
  ENSG00000187742_33 (sequence is synthesized)
tgggttttccaggtgcatcacctgcacatggtactcatttcacctccatcctctctctggtgcaccagccttggctggtccctggcccagaagcagggtcagggagtagagggtggtgag

SEQ ID NO: 687035 - DNA, 120 bp, Artificial Sequence
  ENSG00000187742_34 (sequence is synthesized)
ttgggatttgggggaggacacaggagctaataggtggtaagtttcagtaatactaatagttaacttttcctgttaagacaataccagctgtgtgttttctttccatttttccccatattt

SEQ ID NO: 687036 - DNA, 120 bp, Artificial Sequence
  ENSG00000187742_35 (sequence is synthesized)
ttggagagttgattctgcaacttgctttctccttgtattttcaggggcgtctgccttggatataaaatcatagatgggtgtgttgctaagaaaaagctctttgcaaccagtattaacacc

SEQ ID NO: 687037 - DNA, 120 bp, Artificial Sequence
  ENSG00000187742_36 (sequence is synthesized)
atgttataggacaagacaaagaaattagaagtagtctgatagataacatttgccatgtttggaaaatactgattatttactgatgtaatgaacaaatttgcctatgcaaacaaaataagt

SEQ ID NO: 687038 - DNA, 120 bp, Artificial Sequence
  ENSG00000187742_37 (sequence is synthesized)
ttcttccaagtaatgtccattgtcatgttacatcctttgtgaaaaatcctgtgcaacctgtgtatgaggatgtgtgccttttgtttgggtattattgtatacttccacttctttcatagt

SEQ ID NO: 687039 - DNA, 120 bp, Artificial Sequence
  ENSG00000187742_38 (sequence is synthesized)
tactacaatccatgaggtggcaggcagatgtaatgttattttgcacatgggaaactgaagctaggaatgtttgttcatgctaattcaaataggtagcaccagaaccagaattaacgtgct

SEQ ID NO: 687040 - DNA, 120 bp, Artificial Sequence
  ENSG00000187742_39 (sequence is synthesized)
attcttcaaaattgctgctgctattgacaagaggtagttgagcattttcaccatctgccaatatactgtgaaaattttagtaccaattgatgcttttgagttaaagcagatcagctatga

SEQ ID NO: 687041 - DNA, 120 bp, Artificial Sequence
  ENSG00000187742_40 (sequence is synthesized)
gaagaactagtggtatacaacattgtacagctgagcacgtggctcggtgggtggaggagaaactgcatcccctttgggtcgttgcctgactgaagggaccatgtgcatgatatgtttggg

SEQ ID NO: 687042 - DNA, 120 bp, Artificial Sequence
  ENSG00000187742_41 (sequence is synthesized)
agatagtagaggaataaagtgataattttggggggaagctgtcagtagattggaagcctgcatagtacagctgaaaagttttaggtttgctgggtaggcaatagggaacttttggtagtg

SEQ ID NO: 687043 - DNA, 120 bp, Artificial Sequence
  ENSG00000187742_42 (sequence is synthesized)
tcttaaatggggtcattgtaatcactcctaaattttggaaagatttttaaagaagagggtcttgaaggctttgaccaggttctaggcactggaaatagtaaagaaactacatgagagaac

SEQ ID NO: 687044 - DNA, 120 bp, Artificial Sequence
  ENSG00000187742_43 (sequence is synthesized)
tgttgaaataaaaaagagccccatgattgtccgtacaggttttggtgggaaagatgttacaaaaatattcggttgaatacatggaaataattgtaggatcatacatgagaacagaagttg

SEQ ID NO: 687045 - DNA, 120 bp, Artificial Sequence
  ENSG00000187742_44 (sequence is synthesized)
taaatggggctgttttggggaatggatgttaaatttgggatttatacgtgctgaattgggaaaaagtgaaatagtaagtggaaatgacctgaaagttggagatggaggcctggactaggg

SEQ ID NO: 687046 - DNA, 120 bp, Artificial Sequence
  ENSG00000187742_45 (sequence is synthesized)
aaggtgctggattgtttatatttatgtcaagtcctaagcagaaagataagaggttctgacccagaatgtgtcagatgggtgagataaggagggtgtagaggagactgcactagggaaaga

SEQ ID NO: 687047 - DNA, 120 bp, Artificial Sequence
  ENSG00000187742_46 (sequence is synthesized)
gacagagatagagccttggagggcaggtgagagccaggcgagcaaagtccaggccagggagcttttcaagtcatgtgatggtcaagccagacccaacgggtgcctggagggagaggcaag

SEQ ID NO: 687048 - DNA, 120 bp, Artificial Sequence
  ENSG00000187742_47 (sequence is synthesized)
aaggaggtcctgggagacctggaagccgttggtgggaaaggggcaaagggaagtggagccaggagaccagcaggtattgcacaattactcagacagtttgattttagtatggatggggta

SEQ ID NO: 687049 - DNA, 120 bp, Artificial Sequence
  ENSG00000187742_48 (sequence is synthesized)
gcttaggacagtgaatgagaaacaggtgtgttactgtgggtttagggtcatctgggccactcctggcatctggaatttcccagacatgccatttgaagccacgccagatgctgtgagtta

SEQ ID NO: 687050 - DNA, 120 bp, Artificial Sequence
  ENSG00000187742_49 (sequence is synthesized)
ctgctttgatgttttgtattttgtgttgttttctgcatgtaattgtgtttgcactggatggaaatggaaaataccaactttccagaggaggaaggaccagtgaggggacagaaacccaaa

SEQ ID NO: 687051 - DNA, 120 bp, Artificial Sequence
  ENSG00000187742_50 (sequence is synthesized)
tgacttacccagaatagaaaactggattgtgattgagctaggaccccaaccaaggtctcctgactcctggatgaaaatttcctggatgacagcagccgtcaaaaccaatggaacctgtcc

SEQ ID NO: 687052 - DNA, 120 bp, Artificial Sequence
  ENSG00000187742_51 (sequence is synthesized)
ctgctttcctttttagctacatttcatttgtctgttcatttatctatttattggacttgggacagtctttttcacatttttttttctgtcaactcatcttttatgaagaacagattatcc

SEQ ID NO: 687053 - DNA, 120 bp, Artificial Sequence
  ENSG00000187742_52 (sequence is synthesized)
accttcagtgacacttgccccccactagcttttctcaactacaaacaaaatacagcacagaattcacaggaacatgtaggcagtgggatgaagctttgagcctcttttctacaaagagct

SEQ ID NO: 687054 - DNA, 120 bp, Artificial Sequence
  ENSG00000187742_53 (sequence is synthesized)
agtcctcagtgctgtatgtttggagcagtgctaggccagttgttttgttggacagacaaaggtcagtaaaaaggggtttatttgatttttaattaggaatatttcatgttaaagttactt

SEQ ID NO: 687055 - DNA, 120 bp, Artificial Sequence
  ENSG00000187742_54 (sequence is synthesized)
acctgtaagtaaaagatcttagaaaatctaagttaacatatcatgaaatagtaaacagtgagatgagagaatatatgattaagtactggatagaagtgaaagcagtaaacgttattatat

SEQ ID NO: 687056 - DNA, 120 bp, Artificial Sequence
  ENSG00000187742_55 (sequence is synthesized)
tataggtagagcctgtagtctccctttcttattcagtgtagtctgttacttgcagcgcattagaaatatgatttctagtaagcggtgcttatgctcatatctcctgacagcgtagcagtt

SEQ ID NO: 687057 - DNA, 120 bp, Artificial Sequence
  ENSG00000187742_56 (sequence is synthesized)
tgaaggtcttaaagggtgtgtcatgactaggtttggattttttgcctttcagtgtactagtacattttggaatagctccggaaattaacagaaacatttgctggaaggaggaggttacta

SEQ ID NO: 687058 - DNA, 120 bp, Artificial Sequence
  ENSG00000187742_57 (sequence is synthesized)
tttgtattttaaatcagttgcttagcattttgtcattgtatcagctttcatgggaaaaaggttgaaacctgtagccttgtatcaaattggctaaaaaagaaaaattagtgttaaattata

SEQ ID NO: 687059 - DNA, 120 bp, Artificial Sequence
  ENSG00000187742_58 (sequence is synthesized)
gtttagtctagcagcttgggataaattgaggcaatagcaaccttcaaagctggtgtccatctgttagtaaagtgtgtagttaacatccacggtgccgtgcggtgtctgctttgcgctctg

SEQ ID NO: 687060 - DNA, 120 bp, Artificial Sequence
  ENSG00000187742_59 (sequence is synthesized)
accctgttagtcagcaaagcgcaggatgtcatggtgggcttggagcagggaagggctggagaaaaccatttgcaggagccttggtggaggcattgcaggctgttgggtctccccgcagca

SEQ ID NO: 687061 - DNA, 120 bp, Artificial Sequence
  ENSG00000187742_60 (sequence is synthesized)
gagagaatggtctttaggggcattttggccagggttgctgggagaggctttcccaaatacttggtagcaattgggtgaaaagctgctggagcatcttctggctctgttgatgtttcttac

SEQ ID NO: 687062 - DNA, 120 bp, Artificial Sequence
  ENSG00000187742_61 (sequence is synthesized)
ggacttccagctcattagtgaaaaaatagagtcaacatctttctttgcagggtgagaaagaaacacccagagattttatttggcttttaattagggattattccagtgctagagtgaatg

SEQ ID NO: 687063 - DNA, 120 bp, Artificial Sequence
  ENSG00000187742_62 (sequence is synthesized)
gtctcagaaatattaaatgttcagtttgaattagtttattacagaaaagcttcttggtttgcagtatgaaatctgcaactaaagtttacactttttacttaggcagaaaatatatactga

SEQ ID NO: 687064 - DNA, 120 bp, Artificial Sequence
  ENSG00000187742_63 (sequence is synthesized)
ggtgaggtgagggtttctctctttttctttttcctttgtacactttaaattgtctcatttcaaacattacacattaaatcttgctgtgggctttgatgtccatggagctggggaggatgt

SEQ ID NO: 687065 - DNA, 120 bp, Artificial Sequence
  ENSG00000187742_64 (sequence is synthesized)
attgggggaagcctttcattgtgcacttatatgaccttctttgtttgaacagtttataatgaggctgtaacatctagtgcagctattgttttatttgtgcgttttgttttgttttgtttt

SEQ ID NO: 687066 - DNA, 67 bp, Artificial Sequence
  ENSG00000187742_65 (sequence is synthesized)
agctattgttttatttgtgcgttttgttttgttttgttttgtttttgaaacggagtctcgctctgtc

SEQ ID NO: 687067 - DNA, 120 bp, Artificial Sequence
  ENSG00000187742_66 (sequence is synthesized)
agtgctaggattacaggcgtgagccacccacgccactgtgcccggctgtagctattgttttaaaagaatcacctagtatacctttttttttgtggggagggagtctcactgtgttgccca

SEQ ID NO: 687068 - DNA, 82 bp, Artificial Sequence
  ENSG00000187742_67 (sequence is synthesized)
tttttttgtggggagggagtctcactgtcttggctcactacaatccccgccttccgggttcaagcagttctcctgcctcagc

SEQ ID NO: 687069 - DNA, 120 bp, Artificial Sequence
  ENSG00000187742_68 (sequence is synthesized)
gattacaggcttgagccaccgtgcccaatctagtatactcctttttatatggtagctgaaaggtattgtggtgcctcagaaggaaaaggttgtaacagagtcaagccgctttgacagccc

SEQ ID NO: 687070 - DNA, 120 bp, Artificial Sequence
  ENSG00000187742_69 (sequence is synthesized)
gacagcccattttcaacacgctacttctaacatgctgatagcactttttccaatatagaaaaaaaagacttttataaaaattgaaatacattaagtcctcacataatgttgtcaataggt

SEQ ID NO: 687071 - DNA, 120 bp, Artificial Sequence
  ENSG00000187742_70 (sequence is synthesized)
tcttggaaactgcaactttaaatgaaaggctgtatagtaggtcctccagtaacattttcttcaccatcatttcattatgatgttgatgaaaaaaggaattggttttgttttatgttgttt

SEQ ID NO: 687072 - DNA, 120 bp, Artificial Sequence
  ENSG00000187742_71 (sequence is synthesized)
tgtttaaagtcacagtttccaagaacctgtccatggtactgaggacttaactgtagtaatatttaaaactgcatagtgtaacttttgaattttccaggcttttattacatctttgtcttg

SEQ ID NO: 687073 - DNA, 120 bp, Artificial Sequence
  ENSG00000187742_72 (sequence is synthesized)
ttaatgatgcagcaaattcaggaaaacttattacagcaggttaattcactttgttcaacatttgatctcagagttttagtccaccaagttgaggcatttctctcaaatggattgatttga

SEQ ID NO: 687074 - DNA, 120 bp, Artificial Sequence
  ENSG00000187742_73 (sequence is synthesized)
gacttccaggaagaaatagtgtctggttagtagttcctaaaatggcttctgatgaatttccgctgaaggagcagtggagtacatgccagtacgaaggcaagtagaaagaagaaagataaa

SEQ ID NO: 687075 - DNA, 120 bp, Artificial Sequence
  ENSG00000187742_74 (sequence is synthesized)
gtggtgaaaaataacccaaatgaatctgtaactgctaatgccgctaccaattctccttcatgtacaagagagtttcatgggcacctaaaggagtagtgttgctgtacttatgcctctgtt

SEQ ID NO: 687076 - DNA, 90 bp, Artificial Sequence
  ENSG00000187742_75 (sequence is synthesized)
ataagttttcacctcctttggataattaccaaggagtgcagtggctaaatcatatggtaagagtatggttagttttgtaaggaattgcta

SEQ ID NO: 687077 - DNA, 120 bp, Artificial Sequence
  ENSG00000187742_76 (sequence is synthesized)
catatggtaagagtatggttagttttgtaaggaattgctaaactattaaatatctcccaaagtggctgtaacgtttttcattcttaccagcaatggataaggatttctgttgtcaaagtg

SEQ ID NO: 687078 - DNA, 120 bp, Artificial Sequence
  ENSG00000187747_0 (sequence is synthesized)
atggcacaggtgagggcgctgcataaaatcatggcccttttttctgctaacagcataggtgctatgaacaactctgacactcgcatagcaggctgcttcctcactggcatccctgggctg

SEQ ID NO: 687079 - DNA, 120 bp, Artificial Sequence
  ENSG00000187747_1 (sequence is synthesized)
gagcaactacatatctggctgtccatccccttctgcatcatgtacatcactgccctggaaggcaatggcatcctaatttgtgtcatcctctcccaggcaatcctgcatgagcccatgtac

SEQ ID NO: 687080 - DNA, 120 bp, Artificial Sequence
  ENSG00000187747_2 (sequence is synthesized)
atattcttatctatgctggccagtgctgatgtcttgctctctaccaccaccatgcctaaggccctggccaatttgtggctaggttatagcctcatttcctttgatggctgcctcactcag

SEQ ID NO: 687081 - DNA, 120 bp, Artificial Sequence
  ENSG00000187747_3 (sequence is synthesized)
atgttcttcattcacttcctcttcattcactctgctgtcctgctggccatggcctttgaccgctatgtggccatctgctcccccctgcgatatgtcacaatcctcacaagcaaggtcatt

SEQ ID NO: 687082 - DNA, 120 bp, Artificial Sequence
  ENSG00000187747_4 (sequence is synthesized)
ccatccatctttctccttgagcacctgcactattgccagatcaatatcattgcacacacattttgtgagcacatgggcattgcccatctgtcctgttctgatatctccatcaatgtctgg

SEQ ID NO: 687083 - DNA, 120 bp, Artificial Sequence
  ENSG00000187747_5 (sequence is synthesized)
tatgggttggcagctgctcttctctccacaggcctagacatcatgcttattactgtttcctacatccacatcctccaagcagtcttccgcctcctttctcaagatgcccgctccaaggcc

SEQ ID NO: 687084 - DNA, 120 bp, Artificial Sequence
  ENSG00000187747_6 (sequence is synthesized)
ctgagtacctgtggatcccatatctgtgtcatcctactcttctatgtccctgcgcttttttctgtctttgcctacaggtttggtgggagaagcgtcccatgctatgtccatattctcctg

SEQ ID NO: 687085 - DNA, 120 bp, Artificial Sequence
  ENSG00000187747_7 (sequence is synthesized)
gccagcctctacgttgtcattcctcctatgctcaatcccgttatttatggagtgaggactaagccaatactggaaggggctaagcagatgttttcaaatcttgccaaaggatctaaataa

SEQ ID NO: 687086 - DNA, 120 bp, Artificial Sequence
  ENSG00000187753_0 (sequence is synthesized)
ggggctgggccttggggctgctggatgaatgagacccagcctctgccctgggagtgcagagactcaagacagatatgaccacgtgaagagacaactgtaaaacaagtggaattagagaat

SEQ ID NO: 687087 - DNA, 120 bp, Artificial Sequence
  ENSG00000187753_1 (sequence is synthesized)
aaaatcccagcacgatgttcctcactggagacaccagtccagctgaggacaatagagaagccacccttcctcaatgttcacttccagaattatatgcatgtattgagaattttaataagg

SEQ ID NO: 687088 - DNA, 120 bp, Artificial Sequence
  ENSG00000187753_2 (sequence is synthesized)
agagcaagaaatcaaatcttctaaaaatgcatggtatttcacttaacgaagcacaggaagtacttgctagaaacctgaatgtcatgtcattcaccaggggcgctgatgtgagaggagatc

SEQ ID NO: 687089 - DNA, 120 bp, Artificial Sequence
  ENSG00000187753_3 (sequence is synthesized)
tccaacctgttatcaggaaaacaattcatgaatctaagggatctggaatggagatattttaaggggcttgcgaagtggaggcgcactactgcaatttcattcggagacataaaatacaac

SEQ ID NO: 687090 - DNA, 120 bp, Artificial Sequence
  ENSG00000187753_4 (sequence is synthesized)
actgagaagagatttgtagagagccaggacatgcctgacgttattttcccccctatagttcgcaagtctttggtcatttatcctcaaattgattatcaaaatgaaggaagttattctctt

SEQ ID NO: 687091 - DNA, 120 bp, Artificial Sequence
  ENSG00000187753_5 (sequence is synthesized)
aaatggaatatgtagtgtattaaaatattttggacgtagatttttgcttttgagagcattgatttaatacacaaaaagtaaagaagccaagtacccaatagaacatctgaagtgagtgtg

SEQ ID NO: 687092 - DNA, 120 bp, Artificial Sequence
  ENSG00000187753_6 (sequence is synthesized)
tacaacacacatgaaggtatattgtaaaattaagccgttaatacagagcaaaaggtccgatttaatctgctaacgtgagaagtggtttggacggtgcaacccatttggaccagggctaaa

SEQ ID NO: 687093 - DNA, 120 bp, Artificial Sequence
  ENSG00000187753_7 (sequence is synthesized)
tcaagcaagcatagctttttaaggaattttaagcacacaaggaagttcatcatcataaagtatttggtacattcaacaaacaaattaacatctgagcatatagagatcaatatgagaact

SEQ ID NO: 687094 - DNA, 120 bp, Artificial Sequence
  ENSG00000187753_8 (sequence is synthesized)
taaatataatctattaactgtccagtgacaaagaaggaaacagcatccatgaaataagaacagaaagatttgtaaaagaacaaattggaaatcttggaaatgaaagatatagtcattgaa

SEQ ID NO: 687095 - DNA, 120 bp, Artificial Sequence
  ENSG00000187753_9 (sequence is synthesized)
aattataataataacccttgataattatcccagtggtagcctggatatatctgaagagagagggctaacaagttggaagacagcattgaaaagcttagagatcatagcactgtaagacag

SEQ ID NO: 687096 - DNA, 120 bp, Artificial Sequence
  ENSG00000187753_10 (sequence is synthesized)
aaaaataagagtattggacggtagaatgagaagttcagaaatgtatacgatggaattagcagaaaaaaaataggagaatggaaattaagtgatatgtgaaaataaaatgacagaaaaatc

SEQ ID NO: 687097 - DNA, 120 bp, Artificial Sequence
  ENSG00000187753_11 (sequence is synthesized)
tcaagaaacacatgagaccttgaactgaaaaatctcagactgattagcaagatattgaaaataaatctatacccagaaatactgtagcaaaactatggaccactaagcagtaaaggaaaa

SEQ ID NO: 687098 - DNA, 120 bp, Artificial Sequence
  ENSG00000187753_12 (sequence is synthesized)
tataatctacgaaagagagatggattacatacaaagaaatgacaaattgacaatagaatgctcattaacaatagaggtcagaggacaatagtgtcatatacttacaatgctgaaggaaaa

SEQ ID NO: 687099 - DNA, 120 bp, Artificial Sequence
  ENSG00000187753_13 (sequence is synthesized)
tagctgtctgtaattctataagcagccaaactctctctgaggagtagggggtaaaataaaaatgttaaaaaatacatgggcctaaaaatgtttactatccataatcccttgcttaaaaaa

SEQ ID NO: 687100 - DNA, 120 bp, Artificial Sequence
  ENSG00000187753_14 (sequence is synthesized)
aactactaataaagtatgtattttagtaagaacccagagggaatgcaagaaataatggcaagcaaattgttaacaatatatgtgtgtatgattgtgtagatattaaaatacatttccgga

SEQ ID NO: 687101 - DNA, 120 bp, Artificial Sequence
  ENSG00000187753_15 (sequence is synthesized)
tgggattatgggcgtgagccaccgcacccgtcctacaaaaattttagtaataaaggttgtccttaatagttgaatgtgcacagctataaaacccacacaagaaagcaatctggcctccgc

SEQ ID NO: 687102 - DNA, 120 bp, Artificial Sequence
  ENSG00000187753_16 (sequence is synthesized)
ccgcatctaatatctgctcaagattgatgagctctctccccctccacgttagccccagatgggttgtttgagctgcccacaccgctcattccctgaagccatcgtgacaggacactgtca

SEQ ID NO: 687103 - DNA, 120 bp, Artificial Sequence
  ENSG00000187753_17 (sequence is synthesized)
cctttgtcatccattgtgttggtatataaatccactcaactgatctgttcctggccaagaccacagacttttcccctctctgaggagctaagtctgattgtcatattttcagttctggtt

SEQ ID NO: 687104 - DNA, 120 bp, Artificial Sequence
  ENSG00000187753_18 (sequence is synthesized)
gttatatcagcagtagtaaattgcattccctgtcaatcaatcgtgttgtcaattcaccctctgacaactaaagcagaaggcctaaaattactgagtgcctactctgtgccagctgccatg

SEQ ID NO: 687105 - DNA, 120 bp, Artificial Sequence
  ENSG00000187753_19 (sequence is synthesized)
ctctccaggtcccagcagaggctgtcacagtgtgggatctcccctcccaagcacacttttccttatgaaattctcaccgatcactcgaatgccttggcccaagttaccgtacagaaggtt

SEQ ID NO: 687106 - DNA, 120 bp, Artificial Sequence
  ENSG00000187754_0 (sequence is synthesized)
ccaggctccagggacagaaccttctcaaagtgggggtggagactctgattttcccgcctaaagcatcccctgggattggctactttaagttcagagtatgcatgctctgactttctctct

SEQ ID NO: 687107 - DNA, 120 bp, Artificial Sequence
  ENSG00000187754_1 (sequence is synthesized)
cgattcttccatactcagagtcagactgctcctggtgccatgaacggagacgacgcctttgcaaggagacctagggctggtgctcaaataccagagaagatccaaaagtccttcgatgat

SEQ ID NO: 687108 - DNA, 120 bp, Artificial Sequence
  ENSG00000187754_2 (sequence is synthesized)
attgccaaatacttctctaagaaagagtgggaaaagatgaaatccttggagaaaatcagctatgtgtatatgaagagaaagtatgaggccatgactaaactaggcttcaaggccaccctc

SEQ ID NO: 687109 - DNA, 120 bp, Artificial Sequence
  ENSG00000187754_3 (sequence is synthesized)
ccacctttcatgcataatacaggggccacagacctccaggggaatgattttgataatgaccgtaaccaagggaatcaggttgaacgtcctcagatgactttttgcaggctccagagaatc

SEQ ID NO: 687110 - DNA, 120 bp, Artificial Sequence
  ENSG00000187754_4 (sequence is synthesized)
ttcccgaagatcatgcccaagaagccagcagaggaaggaaatgattcgaagggagtgccagaagcatctggctcacagaacgatgggaaacacctgtgccctccaggaaaaccaagtacc

SEQ ID NO: 687111 - DNA, 120 bp, Artificial Sequence
  ENSG00000187754_5 (sequence is synthesized)
atccggacccaaaagggggaaacatgcctggacccacagactgcgtgagagaaagcagctggtgatttatgaagagatcagcgaccctgaagaagacgacgagtaactcccctcggggat

SEQ ID NO: 687112 - DNA, 120 bp, Artificial Sequence
  ENSG00000187754_6 (sequence is synthesized)
gaagaagacgacgagtaactcccctcggggatacgacatatgcccatgatgagaagcagaacgtggtgacctttcacgaacatgggcatggctgcggacccctcgtcatcaggtgcatag

SEQ ID NO: 687113 - DNA, 120 bp, Artificial Sequence
  ENSG00000187754_7 (sequence is synthesized)
gttgagcgtcgtttttcttagtgtgacaagagttcgatgttagtgtttccattgtattttcttacagtgtgccattctgttagatattagcgttttcattgatgagcaagacatgcttaa

SEQ ID NO: 687114 - DNA, 120 bp, Artificial Sequence
  ENSG00000187754_8 (sequence is synthesized)
ttttcattgatgagcaagacatgcttaatgtgtatttcggtttgtgtatccatgcacctacctcagaaagcaagtatagtcaggtattctctccatagaacagcactaccctcctctctc

SEQ ID NO: 687115 - DNA, 89 bp, Artificial Sequence
  ENSG00000187754_9 (sequence is synthesized)
ccctcctctctccccagatgtgactactgagggcagatctgagtgtttaatttccgattttcccctctgcatttacacaccagacacac

SEQ ID NO: 687116 - DNA, 120 bp, Artificial Sequence
  ENSG00000187754_10 (sequence is synthesized)
tccccattgccatgagtcctggtcaagccccccttcaatttgtttcctgttcagcatgtactcccctcctctgattccccgtatcagtcactgacagttaatacacctttgcaaacgttc

SEQ ID NO: 687117 - DNA, 120 bp, Artificial Sequence
  ENSG00000187758_0 (sequence is synthesized)
atgcacttgagcagggaagaaatccacaaggactcaccagtctcctggtctgcagagaagacagaatcaacatgagcacagcaggaaaagtaatcaaatgcaaagcagctgtgctatggg

SEQ ID NO: 687118 - DNA, 120 bp, Artificial Sequence
  ENSG00000187758_1 (sequence is synthesized)
agttaaagaaacccttttccattgaggaggtggaggttgcacctcctaaggcccatgaagttcgtattaagatggtggctgtaggaatctgtggcacagatgaccacgtggttagtggta

SEQ ID NO: 687119 - DNA, 120 bp, Artificial Sequence
  ENSG00000187758_2 (sequence is synthesized)
ccatggtgaccccacttcctgtgattttaggccatgaggcagccggcatcgtggagagtgttggagaaggggtgactacagtcaaaccaggtgataaagtcatcccactcgctattcctc

SEQ ID NO: 687120 - DNA, 120 bp, Artificial Sequence
  ENSG00000187758_3 (sequence is synthesized)
agtgtggaaaatgcagaatttgtaaaaacccggagagcaactactgcttgaaaaacgatgtaagcaatcctcaggggaccctgcaggatggcaccagcaggttcacctgcaggaggaagc

SEQ ID NO: 687121 - DNA, 120 bp, Artificial Sequence
  ENSG00000187758_4 (sequence is synthesized)
ccatccaccacttccttggcatcagcaccttctcacagtacacagtggtggatgaaaatgcagtagccaaaattgatgcagcctcgcctctagagaaagtctgtctcattggctgtggat

SEQ ID NO: 687122 - DNA, 120 bp, Artificial Sequence
  ENSG00000187758_5 (sequence is synthesized)
tttcaactggttatgggtctgcagtcaatgttgccaaggtcaccccaggctctacctgtgctgtgtttggcctgggaggggtcggcctatctgctattatgggctgtaaagcagctgggg

SEQ ID NO: 687123 - DNA, 120 bp, Artificial Sequence
  ENSG00000187758_6 (sequence is synthesized)
gcggtggacatcaacaaggacaaatttgcaaaggccaaagagttgggtgccactgaatgcatcaaccctcaagactacaagaaacccatccaggaggtgctaaaggaaatgactgatgga

SEQ ID NO: 687124 - DNA, 120 bp, Artificial Sequence
  ENSG00000187758_7 (sequence is synthesized)
ggtgtggatttttcatttgaagtcatcggtcggcttgacaccatgatggcttccctgttatgttgtcatgaggcatgtggcacaagtgtcatcgtaggggtacctcctgattcccaaaac

SEQ ID NO: 687125 - DNA, 120 bp, Artificial Sequence
  ENSG00000187758_8 (sequence is synthesized)
ctctcaatgaaccctatgctgctactgactggacgtacctggaagggagctattcttggtggctttaaaagtaaagaatgtgtcccaaaacttgtggctgattttatggctaagaagttt

SEQ ID NO: 687126 - DNA, 120 bp, Artificial Sequence
  ENSG00000187758_9 (sequence is synthesized)
tcattggatgcattaataacccatgttttaccttttgaaaaaataaatgaaggatttgacctgcttcactctgggaaaagtatccgtaccattctgatgttttgagacaatacagatgtt

SEQ ID NO: 687127 - DNA, 120 bp, Artificial Sequence
  ENSG00000187758_10 (sequence is synthesized)
ttcccttgtggcagtcttcagcctcctctaccctacatgatctggagcaacagctgggaaatatcattaattctgctcatcacagattttatcaataaattacatttgggggctttccaa

SEQ ID NO: 687128 - DNA, 120 bp, Artificial Sequence
  ENSG00000187758_11 (sequence is synthesized)
agaaatggaaattgatgtaaaattatttttcaagcaaatgtttaaaatccaaatgagaactaaataaagtgttgaacatcagctggggaattgaagccaataaaccttccttcttaacca

SEQ ID NO: 687129 - DNA, 120 bp, Artificial Sequence
  ENSG00000187758_12 (sequence is synthesized)
aaacagaggcaaagagggacgaaagggcttgaccaaggtcaccgcgcagccaggacttcagggatttcctctttccctctcttcctgcctgactcaagcatgtatgtctttaggcacgca

SEQ ID NO: 687130 - DNA, 120 bp, Artificial Sequence
  ENSG00000187758_13 (sequence is synthesized)
catttaggctgcagaatatatgttttctgtataaaggatatttttaatgatgaatggaaatttcccatcatctgtttgttacctggcttgtttaatttattgttatgaggaatcttttat

SEQ ID NO: 687131 - DNA, 120 bp, Artificial Sequence
  ENSG00000187758_14 (sequence is synthesized)
tctatcaactatgcaaacgtgtctcaagtcatatttcctctagaggaaaagcaaagggcttgtttttcttaactgagtgataatagattactttgttaatttttagttaaaaactgtaag

SEQ ID NO: 687132 - DNA, 120 bp, Artificial Sequence
  ENSG00000187758_15 (sequence is synthesized)
ttaaagtaaacataaataatacaagttctgttctcaaattggaatgttttatttttctgccacattcttaacaaaaatgatttaataattttgcatatgttcttaataaattccaatttt

SEQ ID NO: 687133 - DNA, 120 bp, Artificial Sequence
  ENSG00000187758_16 (sequence is synthesized)
tttaaacatattagtatttggccaaaagaagtaagcaattttaggccaactattgttttattaacaaaaacatgccctaaggaaagtgaagctcaaatgcattactatattttatcacag

SEQ ID NO: 687134 - DNA, 120 bp, Artificial Sequence
  ENSG00000187764_0 (sequence is synthesized)
actctgctaacaccagatagtggaaagaaaccatgtgctgaaatgtttgacgacactgatggtttgactctgctaactggaatggcttattgtgcaagaaagtacacctggtcgggtcct

SEQ ID NO: 687135 - DNA, 120 bp, Artificial Sequence
  ENSG00000187764_1 (sequence is synthesized)
ggggctcatctctagcaccagcaaagatttctgaagacgtctttctagaaatgactggaaagtttcaagaggcataagatacagcatttcttctgaggccctgaagaagtatcaagtggg

SEQ ID NO: 687136 - DNA, 120 bp, Artificial Sequence
  ENSG00000187764_2 (sequence is synthesized)
ctttgacattgcggtggtgagagcgacccctcctcacctggagaactgggaaatgtggattctcagggaccgcgctgttcacgagctccaggctgtgctgctggccctggtcctggggcg

SEQ ID NO: 687137 - DNA, 120 bp, Artificial Sequence
  ENSG00000187764_3 (sequence is synthesized)
ctgagccgcatctgcaatagcacacctgcccggccacctgctgccgtgagcctttgctgctgaagcccctggggtcgcctctacctgatgaggatgtgcacccccattagggggctgctc

SEQ ID NO: 687138 - DNA, 120 bp, Artificial Sequence
  ENSG00000187764_4 (sequence is synthesized)
atggcccttgcagtgatgtttgggacagcgatggcatttgcacccataccccggatcacctgggagcacagagaggtgcacctggtgcagtttcatgagccagacatctacaactactca

SEQ ID NO: 687139 - DNA, 120 bp, Artificial Sequence
  ENSG00000187764_5 (sequence is synthesized)
gccttgctgctgagcgaggacaaggacaccttgtacataggtgcccgggaggcggtcttcgctgtgaacgcactcaacatctccgagaagcagcatgaggtgtattggaaggtctcagaa

SEQ ID NO: 687140 - DNA, 120 bp, Artificial Sequence
  ENSG00000187764_6 (sequence is synthesized)
gacaaaaaagcaaaatgtgcagaaaaggggaaatcaaaacagacagagtgcctcaactacatccgggtgctgcagccactcagcgccacttccctttacgtgtgtgggaccaacgcattc

SEQ ID NO: 687141 - DNA, 120 bp, Artificial Sequence
  ENSG00000187764_7 (sequence is synthesized)
cagccggcctgtgaccacctgaacttaacatcctttaagtttctggggaaaaatgaagatggcaaaggaagatgtccctttgacccagcacacagctacacatccgtcatggttgatgga

SEQ ID NO: 687142 - DNA, 120 bp, Artificial Sequence
  ENSG00000187764_8 (sequence is synthesized)
gaactttattcggggacgtcgtataattttttgggaagtgaacccatcatctcccgaaattcttcccacagtcctctgaggacagaatatgcaatcccttggctgaacgagcctagtttc

SEQ ID NO: 687143 - DNA, 120 bp, Artificial Sequence
  ENSG00000187764_9 (sequence is synthesized)
gtgtttgctgacgtgatccgaaaaagcccagacagccccgacggcgaggatgacagggtctacttcttcttcacggaggtgtctgtggagtatgagtttgtgttcagggtgctgatccca

SEQ ID NO: 687144 - DNA, 120 bp, Artificial Sequence
  ENSG00000187764_10 (sequence is synthesized)
cggatagcaagagtgtgcaagggggaccagggcggcctgaggaccttgcagaagaaatggacctccttcctgaaagcccgactcatctgctcccggccagacagcggcttggtcttcaat

SEQ ID NO: 687145 - DNA, 120 bp, Artificial Sequence
  ENSG00000187764_11 (sequence is synthesized)
gtgctgcgggatgtcttcgtgctcaggtccccgggcctgaaggtgcctgtgttctatgcactcttcaccccacagctgaacaacgtggggctgtcggcagtgtgcgcctacaacctgtcc

SEQ ID NO: 687146 - DNA, 120 bp, Artificial Sequence
  ENSG00000187764_12 (sequence is synthesized)
acagccgaggaggtcttctcccacgggaagtacatgcagagcaccacagtggagcagtcccacaccaagtgggtgcgctataatggcccggtacccaagccgcggcctggagcgtgcatc

SEQ ID NO: 687147 - DNA, 120 bp, Artificial Sequence
  ENSG00000187764_13 (sequence is synthesized)
gacagcgaggcacgggccgccaactacaccagctccttgaatttgccagacaagacgctgcagttcgttaaagaccaccctttgatggatgactcggtaaccccaatagacaacaggccc

SEQ ID NO: 687148 - DNA, 120 bp, Artificial Sequence
  ENSG00000187764_14 (sequence is synthesized)
aggttaatcaagaaagatgtgaactacacccagatcgtggtggaccggacccaggccctggatgggactgtctatgatgtcatgtttgtcagcacagaccggggagctctgcacaaagcc

SEQ ID NO: 687149 - DNA, 120 bp, Artificial Sequence
  ENSG00000187764_15 (sequence is synthesized)
atcagcctcgagcacgctgttcacatcatcgaggagacccagctcttccaggactttgagccagtccagaccctgctgctgtcttcaaagaagggcaacaggtttgtctatgctggctct

SEQ ID NO: 687150 - DNA, 120 bp, Artificial Sequence
  ENSG00000187764_16 (sequence is synthesized)
aactcgggcgtggtccaggccccgctggccttctgtgggaagcacggcacctgcgaggactgtgtgctggcgcgggacccctactgcgcctggagcccgcccacagcgacctgcgtggct

SEQ ID NO: 687151 - DNA, 120 bp, Artificial Sequence
  ENSG00000187764_17 (sequence is synthesized)
ctgcaccagaccgagagccccagcaggggtttgattcaggagatgagcggcgatgcttctgtgtgcccggataaaagtaaaggaagttaccggcagcattttttcaagcacggtggcaca

SEQ ID NO: 687152 - DNA, 120 bp, Artificial Sequence
  ENSG00000187764_18 (sequence is synthesized)
gtgttgaaggccgagagccccaagtacggtcttatgggcagaaaaaacttgctcatcttcaacttgtcagaaggagacagtggggtgtaccagtgcctgtcagaggagagggttaagaac

SEQ ID NO: 687153 - DNA, 120 bp, Artificial Sequence
  ENSG00000187764_19 (sequence is synthesized)
aaaacggtcttccaagtggtcgccaagcacgtcctggaagtgaaggtggttccaaagcccgtagtggcccccaccttgtcagttgttcagacagaaggtagtaggattgccaccaaagtg

SEQ ID NO: 687154 - DNA, 120 bp, Artificial Sequence
  ENSG00000187764_20 (sequence is synthesized)
ttggtggcatccacccaagggtcttctcccccaaccccagccgtgcaggccacctcctccggggccatcacccttcctcccaagcctgcgcccaccggcacatcctgcgaaccaaagatc

SEQ ID NO: 687155 - DNA, 120 bp, Artificial Sequence
  ENSG00000187764_21 (sequence is synthesized)
gtcatcaacacggtcccccagctccactcggagaaaaccatgtatcttaagtccagcgacaaccgcctcctcatgtccctcttcctcttcttctttgttctcttcctctgcctctttttc

SEQ ID NO: 687156 - DNA, 120 bp, Artificial Sequence
  ENSG00000187764_22 (sequence is synthesized)
tacaactgctataagggatacctgcccagacagtgcttgaaattccgctcggccctactaattgggaagaagaagcccaagtcagatttctgtgaccgtgagcagagcctgaaggagacg

SEQ ID NO: 687157 - DNA, 120 bp, Artificial Sequence
  ENSG00000187764_23 (sequence is synthesized)
ttagtagagccagggagcttctcccagcagaatggggagcaccccaagccagccctggacaccggctatgagaccgagcaagacaccatcaccagcaaagtccccacggatagggaggac

SEQ ID NO: 687158 - DNA, 120 bp, Artificial Sequence
  ENSG00000187764_24 (sequence is synthesized)
tcacagaggatcgacgacctttctgccagggacaagccctttgacgtcaagtgtgagctgaagttcgctgactcagacgcagatggagactgaggccggctgtgcatccccgctggtgcc

SEQ ID NO: 687159 - DNA, 120 bp, Artificial Sequence
  ENSG00000187764_25 (sequence is synthesized)
tcggctgcgacgtgtccaggcgtggagagttttgtgtttctcctgttcagtatccgagtctcgtgcagtgctgcgtaggttagcccgcatcgtgcagacaacctcagtcctcttgtctat

SEQ ID NO: 687160 - DNA, 120 bp, Artificial Sequence
  ENSG00000187764_26 (sequence is synthesized)
tttctcttgggttgagcctgtgacttggtttctctttgtccttttggaaaaatgacaagcattgcatcccagtcttgtgttccgaagtcagtcggagtacttgaagaaggcccacgggcg

SEQ ID NO: 687161 - DNA, 120 bp, Artificial Sequence
  ENSG00000187764_27 (sequence is synthesized)
gcacggagttcctgagccctttctgtagtgggggaaaggtggctggacctctgttggctgagaagagcatcccttcagcttcccctccccgtagcagccactaaaagattatttaattcc

SEQ ID NO: 687162 - DNA, 120 bp, Artificial Sequence
  ENSG00000187764_28 (sequence is synthesized)
agattggaaatgacattttagtttatcagattggtaacttatcgcctgttgtccagattggcacgaaccttttcttccacttaattatttttttaggattttgctttgattgtgtttatg

SEQ ID NO: 687163 - DNA, 120 bp, Artificial Sequence
  ENSG00000187764_29 (sequence is synthesized)
tcatgggtcatttttttttagttacagaagcagttgtgttaatatttagaagaagatgtatatcttccagattttgttatatatttggcataaaatacggcttacgttgcttaagattct

SEQ ID NO: 687164 - DNA, 120 bp, Artificial Sequence
  ENSG00000187764_30 (sequence is synthesized)
gcttaagattctcagggataaacttccttttgctaaatgcattctttctgcttttagaaatgtagacataaacactccccggagcccactcaccttttttctttttcttttttttttttt

SEQ ID NO: 687165 - DNA, 120 bp, Artificial Sequence
  ENSG00000187764_31 (sequence is synthesized)
tgagggaagcattgtttttggagagattttctttctgtacttcgttttacttttctttttttttaacttttactctctcgaagaagaggaccttcccacatccacgaggtgggttttgag

SEQ ID NO: 687166 - DNA, 120 bp, Artificial Sequence
  ENSG00000187764_32 (sequence is synthesized)
caagggaaggtagcctggatgagctgagtggagccaggctggcccagagctgagatgggagtgcggtacaatctggagcccacagctgtcggtcagaacctcctgtgagacagatggaac

SEQ ID NO: 687167 - DNA, 120 bp, Artificial Sequence
  ENSG00000187764_33 (sequence is synthesized)
cttcacaagggcgcctttggttctctgaacatctcctttctcttcttgcttcaattgcttacccactgcctgcccagactttctatccagcctcactgagctgcccactactggaaggga

SEQ ID NO: 687168 - DNA, 120 bp, Artificial Sequence
  ENSG00000187764_34 (sequence is synthesized)
actgggcctcggtggccggggccgcgagctgtgaccacagcaccctcaagcatacggcgctgttcctgccactgtcctgaagatgtgaatgggtggtacgatttcaacactggttaattt

SEQ ID NO: 687169 - DNA, 120 bp, Artificial Sequence
  ENSG00000187764_35 (sequence is synthesized)
cacactccatctccccgctttgtaaatacccatcgggaagagactttttttccatggtgaagagcaataaactctggatgtttgtgcgcgtgtgtggacagtcttatcttccagcatgat

SEQ ID NO: 687170 - DNA, 120 bp, Artificial Sequence
  ENSG00000187764_36 (sequence is synthesized)
aggatttgaccattttggtgtaaacatttgtgttttataagatttaccttgtttttatttttctactttgaattgtatacatttggaaagtacccaaataaatgagaagcttctatcctt

SEQ ID NO: 687171 - DNA, 120 bp, Artificial Sequence
  ENSG00000187764_37 (sequence is synthesized)
cgcccgaactcgcccggccgggagccgccgcgggcaggacgcgcgctgcagactctgctaacaccagatagtggaaagaaaccatgtgctgaaatgtttgacgacactgatggtttgcat

SEQ ID NO: 687172 - DNA, 120 bp, Artificial Sequence
  ENSG00000187764_38 (sequence is synthesized)
attacgtggctcctgtgttaatagaatcatggagggatcagcgtcggctcctgagcgtctgcagtcctgcacgtggctctggttttgcgattctgattctcttgatctaattgttggtgc

SEQ ID NO: 687173 - DNA, 120 bp, Artificial Sequence
  ENSG00000187764_39 (sequence is synthesized)
tgctactgcaccccacgatccctgtcttgagactgatctcccacactgcaaaggagtgacagccatgctatggaaccttgccacaccacggtggacaccgttctgtttggctgaaaacca

SEQ ID NO: 687174 - DNA, 120 bp, Artificial Sequence
  ENSG00000187764_40 (sequence is synthesized)
gccatccaaaaataaaggaagatgaacagctctttagtgcttgtaattatgccatatgtgtttctgctttttccttctttgcctcatgaagatgaattttaaaggatacatatctggagc

SEQ ID NO: 687175 - DNA, 120 bp, Artificial Sequence
  ENSG00000187764_41 (sequence is synthesized)
gacattccttagcggaggctgtgcagcctcccgcccctgcatggcccaggcgggacagctgggctcgctcttttctgtccgtttcctgctgtgttttgccctctctggcctgtgacgtgc

SEQ ID NO: 687176 - DNA, 120 bp, Artificial Sequence
  ENSG00000187764_42 (sequence is synthesized)
tcctggcgacttcttcctcagtgccctctcttttctgtcctctctgtctcacagcctcgtctcctaagcccctccctcctcctggctcctcttccctgtcctgtctgggccatgtggggg

SEQ ID NO: 687177 - DNA, 120 bp, Artificial Sequence
  ENSG00000187764_43 (sequence is synthesized)
acaggaggctttcctctccctggaccccctggccagcctcgggtgcggggcccgacagcagctcgagggtctccttgctgccgcccttcctgagtgaccaggcacagcacgtgcacgccc

SEQ ID NO: 687178 - DNA, 120 bp, Artificial Sequence
  ENSG00000187764_44 (sequence is synthesized)
tggggaacttctacctcttctgccaggccacaggtgagttgggccctctctgtcccctgtgccctgtccatctgtctcctcccacaggtggggggcgggcgggggcatcctccacatccc

SEQ ID NO: 687179 - DNA, 120 bp, Artificial Sequence
  ENSG00000187764_45 (sequence is synthesized)
tccacatgttcctttaccttccttatctgtcctggctgcgtccctcgggttgagccgtttcacgctttcattgtgggtccatcccgagggaaactgtagacagtgtgaagccacttctag

SEQ ID NO: 687180 - DNA, 120 bp, Artificial Sequence
  ENSG00000187764_46 (sequence is synthesized)
tgtacaggggtcaaccagtgttttctgtaaagggctagatatttaggccttgtgggctgcaggctgtgtcacagccactaagctctgctgttgtattgtaaaaccagccatagtcaatac

SEQ ID NO: 687181 - DNA, 120 bp, Artificial Sequence
  ENSG00000187764_47 (sequence is synthesized)
acaacgagtggtcagggctgtgtgccagtaaaactttatttataaaaatgcacggtgggccagatttgccccaaaggccccagtttcccaacctgtggtatataggattgcttctccctt

SEQ ID NO: 687182 - DNA, 120 bp, Artificial Sequence
  ENSG00000187764_48 (sequence is synthesized)
agaatgggcgagctctggagacctgtgtccctgtgcagacccatgcactgcccgatggcagggcccatgcactcagctggctgcaggacgccatcagggaaagcgctgagtatcgctgct

SEQ ID NO: 687183 - DNA, 120 bp, Artificial Sequence
  ENSG00000187764_49 (sequence is synthesized)
ctgtcctctcctcagcagggaacaagacttcgaaggtgcaggttgctgtgatgagacctgaagtgacccaccaggagaggtggaccagagagctctctgcctggagggctgtggctgggg

SEQ ID NO: 687184 - DNA, 120 bp, Artificial Sequence
  ENSG00000187764_50 (sequence is synthesized)
agcacgaccggatgatgcagagctggaggaaggcgtgggaaagctgtagcaaggacaccctgtagccaccaggaaggagtccctgacaccgacctcaaccccaacaagaccctgctgcca

SEQ ID NO: 687185 - DNA, 120 bp, Artificial Sequence
  ENSG00000187764_51 (sequence is synthesized)
ctgaccacagccacccccggagaaggcctggtcccccacaactgtgaactgtcttgcccaagcctgctctgaacacagccattgggccaccacctgatgggcagaggcgggacagtggag

SEQ ID NO: 687186 - DNA, 120 bp, Artificial Sequence
  ENSG00000187764_52 (sequence is synthesized)
aagcctggaacccaagtgggcctgtgacaggaactaagacttaaaaaattaggtgcttacctgggacagtaagttctgtctggcacaagcaggtaaccaggatggctaacaggctttgat

SEQ ID NO: 687187 - DNA, 120 bp, Artificial Sequence
  ENSG00000187764_53 (sequence is synthesized)
agctgctcgtgaactaaaacagcagggtgtgtgcaggttcctcctctacggtcaggcagcaggctctgaaggctgatcctacaccgtcccagtgactccccttgacagagtgcccccacc

SEQ ID NO: 687188 - DNA, 120 bp, Artificial Sequence
  ENSG00000187764_54 (sequence is synthesized)
ccctaatagccaacagggttagcatggccagcacagatcgctgcttttattgatgcaaatcaagcctgctgcttctcctccctgcagacttagccaaggaactccaagatgcatgactgg

SEQ ID NO: 687189 - DNA, 120 bp, Artificial Sequence
  ENSG00000187764_55 (sequence is synthesized)
gacaagaaaaggtgagactccacatggaaatgccttgccctaaaccttgaatgactgtgagatgcgatctgggagtgcatctgtcaagtctttgtgttttcttcactaacctcagaatac

SEQ ID NO: 687190 - DNA, 120 bp, Artificial Sequence
  ENSG00000187764_56 (sequence is synthesized)
tgggctctattttatcaagcgctgcagtttatgcctctgtcccgtcaatgctcagcttctgcaacaggacaccaaacttgatgcagaaagccaaataggtcaattatgcaaatctcctgg

SEQ ID NO: 687191 - DNA, 120 bp, Artificial Sequence
  ENSG00000187764_57 (sequence is synthesized)
tgccatattaaatttcttgacgatggaatgagtctcatgagtgttttgttctacctgctttcaagtctctaattattaaagctgtatctctgaagactgtgtcactgtgtgtgtgaactt

SEQ ID NO: 687192 - DNA, 120 bp, Artificial Sequence
  ENSG00000187764_58 (sequence is synthesized)
gtcctaaagctactcagcctttaatcttacacacacgtctcttcttgtctgttgaatgacagttttcatgtctatcataaaaccaaagcctctgttaaaagtcaagccgcacccctctgg

SEQ ID NO: 687193 - DNA, 120 bp, Artificial Sequence
  ENSG00000187764_59 (sequence is synthesized)
tgatcctagcaaatactgagtgtcttcccagcagtgtgacaatgacctgttttgcatcccctctttctggagctggacaaattctctaccagcctttgtgtgggatcagcatacatcgcc

SEQ ID NO: 687194 - DNA, 120 bp, Artificial Sequence
  ENSG00000187764_60 (sequence is synthesized)
tgctaattccttcaggatccatcacaacaggtgtcctgaagatgctggagacaccctggttgtctccacacgttccccctccgcaccccaagtcgagaggcccagctgcctgtgaggtgt

SEQ ID NO: 687195 - DNA, 120 bp, Artificial Sequence
  ENSG00000187764_61 (sequence is synthesized)
gtgcttgcccatccagccaaggatgccagtcttgctcacggaaccatcacatactcataacctgaagttttcctgtaaaatatccatcagctcactgtggttcttgctttgggtgtggct

SEQ ID NO: 687196 - DNA, 120 bp, Artificial Sequence
  ENSG00000187764_62 (sequence is synthesized)
tcaaccactacaaactgatgagtgaaatgctatgggctttaggcttatattcttggtgctgttttctgtctcttctcctgaagtctggatttcaagcactttcacacttaacaaaataat

SEQ ID NO: 687197 - DNA, 120 bp, Artificial Sequence
  ENSG00000187764_63 (sequence is synthesized)
tacatacttgaagttttcgtaatgtggagtgttctactgggaaatggagttatgaggatgaatttctgagtctttctttgctctgctggaaaaaataaaaatagagttgtacattgttca

SEQ ID NO: 687198 - DNA, 120 bp, Artificial Sequence
  ENSG00000187764_64 (sequence is synthesized)
agagcccttgaaacccctgcagtcaggacagacgtcccaggcgagcagaggccctgcgtgaggatggggcggcggggccagatggtgtcctgagtatccatcctccctggtggctgagga

SEQ ID NO: 687199 - DNA, 120 bp, Artificial Sequence
  ENSG00000187764_65 (sequence is synthesized)
ggtagctggaggagcgggaagcactgactcctgaagaccctggcttcgctttcctgtgtccgttgggctgtccacttctaagactctctttgtcccccgctgccttccgtattcctcagc

SEQ ID NO: 687200 - DNA, 120 bp, Artificial Sequence
  ENSG00000187764_66 (sequence is synthesized)
agcccagagaaaaacaacagaggtttgcggcagaagtggccaatgtcgggcccagagtccatgctcaaggctggaagcccatcctggatgtgctgcactcggcagtcctagtgtaattct

SEQ ID NO: 687201 - DNA, 120 bp, Artificial Sequence
  ENSG00000187764_67 (sequence is synthesized)
gcagggcctggcccctgccagggtctgagctctccagcctgtggcatctactcccctccaagcccaccccagtgtctcaattggagagacaggccctcatggtccccactctggcccagc

SEQ ID NO: 687202 - DNA, 120 bp, Artificial Sequence
  ENSG00000187764_68 (sequence is synthesized)
cccctctgcacacagctggccgagctctgggcctctccatgctgtggccctggtgatggcagagccttgggatgtctctgtccatgtggtcacaggacatgtgtgtggcagcagggccat

SEQ ID NO: 687203 - DNA, 120 bp, Artificial Sequence
  ENSG00000187764_69 (sequence is synthesized)
ggtggggtgggatgctgttccaaggcccagaaccattctgtaagaaaccagcacagcgctgcaagaaagggggtcctaggggacacaggccacacaggtgtgctttgaaaaatggcaatt

SEQ ID NO: 687204 - DNA, 120 bp, Artificial Sequence
  ENSG00000187764_70 (sequence is synthesized)
aaggtcaaagagcaggaagtccacaggacgggccaaggccaaggctcccgctggccatggggaagccacctccagggcagtcccagggactgaattggaagttgtcccaagtcacttcag

SEQ ID NO: 687205 - DNA, 120 bp, Artificial Sequence
  ENSG00000187764_71 (sequence is synthesized)
gtccaactgggacagcagaggtaacccccctgcaccctcatggggcagcttctttgggtcctaaatgtggactcagaggtggaaacggtctgtgtccccaggtcctgcagacattcgctt

SEQ ID NO: 687206 - DNA, 120 bp, Artificial Sequence
  ENSG00000187764_72 (sequence is synthesized)
ttccattgcctccctcgaggtgacctgggaggtttgtgggagcgtaagaagatttctgagaagtcaccacaccaggtggctttcagatctgggaccaccaggctactggaggtacttgtt

SEQ ID NO: 687207 - DNA, 120 bp, Artificial Sequence
  ENSG00000187764_73 (sequence is synthesized)
tttgttttacctgctcagtgttctgaactccttccttttcactactaagcattctccatgaagccacacttcattttgtcattgtgaggttgatggacatctagggcaaatctaacttct

SEQ ID NO: 687208 - DNA, 120 bp, Artificial Sequence
  ENSG00000187764_74 (sequence is synthesized)
aaagaccaattcttacgaggtgtcatggtcaagcagaggccatggccggcactggtctaggtggcccatggcccatttgggggccttggtgggcctcgaggaagggcaggtgctggtcag

SEQ ID NO: 687209 - DNA, 120 bp, Artificial Sequence
  ENSG00000187764_75 (sequence is synthesized)
ggagccgggtcgctaggcagcaggtgggtgtcaccccagtccacgctgctggggtgcctggcctgatgcaggctgtgcctgagggagacagaagcagcagagtaggctggccggcctccc

SEQ ID NO: 687210 - DNA, 120 bp, Artificial Sequence
  ENSG00000187764_76 (sequence is synthesized)
cagccccaccacaagcaggagcttcagagacagaaggagcacctgcaccccctcacctgccctccagggcctggcctggccctcccagctcaactccagggtctgtacgctctggggctg

SEQ ID NO: 687211 - DNA, 120 bp, Artificial Sequence
  ENSG00000187764_77 (sequence is synthesized)
gagcttagtgggactgtggcccccctcagccctttctgcatttgagtggaagccagtgtgcgaagcagatcaaaatggatgtgcttgtttttccttcagtaagaacagggagttgagcct

SEQ ID NO: 687212 - DNA, 120 bp, Artificial Sequence
  ENSG00000187764_78 (sequence is synthesized)
gtcccaacatggccagcagcccctggagggccaacagacttcacgagcaaggaaggccgggaggtgacctgctgaccagaacttacttgtgcccctcccccccgcccaaaacccccaaca

SEQ ID NO: 687213 - DNA, 120 bp, Artificial Sequence
  ENSG00000187764_79 (sequence is synthesized)
ttctggttttcacagccccaccccagccacctggaacaaatagtgtctaggagtagccctcagggttggccgcgcagacttcttgccctgggatgaggctggcctccccaggcgaggcag

SEQ ID NO: 687214 - DNA, 120 bp, Artificial Sequence
  ENSG00000187764_80 (sequence is synthesized)
cctgggccacaggggaacgtctctgcctcgcccaccctcctgatctctccatcagacaagctgaggccagccaggctccaccctggcaggttgcaacagatggtctgagtgtgtgtgaag

SEQ ID NO: 687215 - DNA, 120 bp, Artificial Sequence
  ENSG00000187764_81 (sequence is synthesized)
tggcagtgaaaaaaacagctggaaagcatgcttgcacggtggcattctgggtttgggttttattggctttccattgagaaaggtggccagtgggcatcaagggtgccataaaggcccaca

SEQ ID NO: 687216 - DNA, 120 bp, Artificial Sequence
  ENSG00000187764_82 (sequence is synthesized)
gagaggctccccgcccacaggtgctcacattctggctcgggggacgaggttgggcttcgaggtggtgtgcttcagcctctggctgcagccccttctcacctatagtgaggccgggaagat

SEQ ID NO: 687217 - DNA, 120 bp, Artificial Sequence
  ENSG00000187764_83 (sequence is synthesized)
gaccgggagtgccaggctcatgcatcctctgctgcagggaggagatctggaggtggggactgaacagcctccccactggctaagagaaacacgtgcagagaagcgctttgctggagggca

SEQ ID NO: 687218 - DNA, 120 bp, Artificial Sequence
  ENSG00000187764_84 (sequence is synthesized)
ggcacctgtgggtgcccagacaggggagagagggatttggacctaaggcccagtgagccctgacatagcacgtggattctgcaggaaggtcacagacctgccttgtttgcctctggttct

SEQ ID NO: 687219 - DNA, 120 bp, Artificial Sequence
  ENSG00000187764_85 (sequence is synthesized)
gagtacctctcctccttactgcaatgtcccctgaaggtacactctggctgcttcccacacactggtgcagaagcagaggccatgctcctggatgcctgcttgcctgatgctagttcttct

SEQ ID NO: 687220 - DNA, 120 bp, Artificial Sequence
  ENSG00000187764_86 (sequence is synthesized)
atataattttttaaccaaagtgcagtctttaccctgtcagggccctgccttcacctctgccaggactatcttccatgtcaagtttagacccgtgtcattttcaaagctaataatggttcc

SEQ ID NO: 687221 - DNA, 120 bp, Artificial Sequence
  ENSG00000187764_87 (sequence is synthesized)
cccatactttaggcagcatttagatatttggatttgggatggccttttatgttttaactacagtgttagaaatcagagcccttggaaccactgggatcagagggcagcagcagaaggcgc

SEQ ID NO: 687222 - DNA, 120 bp, Artificial Sequence
  ENSG00000187764_88 (sequence is synthesized)
ccttggtcctctttgaggggcccagggctctggagagggcccccgttcctagcagccacagtggcctgttggcacgcatgtgtgtgttccagctgctctgtgacatttccctttgtttca

SEQ ID NO: 687223 - DNA, 120 bp, Artificial Sequence
  ENSG00000187764_89 (sequence is synthesized)
gactcttgaaaggccacggccgtcgtgggaattagttgaccttgtgtgttgggccacccttgctggacaggacaaggtggtgctatcaactccctgtgctctgaggtccttcgcatgtta

SEQ ID NO: 687224 - DNA, 120 bp, Artificial Sequence
  ENSG00000187764_90 (sequence is synthesized)
gatgaggcagcttcaccagaaactatccatgtctcttctgttatctgggataattccacgtgcctttacaacacagctgtctggttacctggggtctggaaatgccctcggtgcctcagt

SEQ ID NO: 687225 - DNA, 120 bp, Artificial Sequence
  ENSG00000187764_91 (sequence is synthesized)
ggtgccttcccacaggccccccatggagccaggcgatgcctacagatgcctcagtggtactttctcaggtccctttgcagagaagaggttcaggattcctgcccacattgataaggcggc

SEQ ID NO: 687226 - DNA, 120 bp, Artificial Sequence
  ENSG00000187764_92 (sequence is synthesized)
ttggccagtaagtggcaggcatgaacaggtgcattccagaagcgctggggctggtccagtgccctgagtggtctagagcataccagagtgaaacgttaggctgcgtcggcctggtgactg

SEQ ID NO: 687227 - DNA, 120 bp, Artificial Sequence
  ENSG00000187764_93 (sequence is synthesized)
tcagggagatgaggactcagagaagggagctgtcagaattgctacctatgtggcaggggtctcactctctcctccctcctcttggggcccctggctactctgtgacttcaacagaggaca

SEQ ID NO: 687228 - DNA, 120 bp, Artificial Sequence
  ENSG00000187764_94 (sequence is synthesized)
gaaaggatgaccaacaaggcctcagggcatacccccagctgcactgtccttgtccccagaagggtccccagagtctgggagggaggaggggccatggccaggattagaaaagaccgtgcc

SEQ ID NO: 687229 - DNA, 120 bp, Artificial Sequence
  ENSG00000187764_95 (sequence is synthesized)
ccaaggagagagcacagagatgggccagggaagcagtgggatcctcgggaaaagaggctgggagcaggtgtccgggtgaggcccgggcagcgggtacaggcagggacaagccaggagtcc

SEQ ID NO: 687230 - DNA, 120 bp, Artificial Sequence
  ENSG00000187764_96 (sequence is synthesized)
catcatggaagacatgatggccagcggccagcactgtgtgcagagaatggcccctctggggatgtgcccgctgccccattagttgcaggaaggccacctggatgtgagtttgggagatgg

SEQ ID NO: 687231 - DNA, 120 bp, Artificial Sequence
  ENSG00000187764_97 (sequence is synthesized)
gctggccccgaggcagccagccctgaggtcagagtgggccacatgcatggggatgccgggaggacacagaggagtgctgcaggagatggcagtgggggcactttccaggatgggcccgag

SEQ ID NO: 687232 - DNA, 120 bp, Artificial Sequence
  ENSG00000187764_98 (sequence is synthesized)
caactcagtcactgggtggatgtctcaccacccctccaggccttcctcagggcgaggccactgcccagagggcacctggtttgtcgcagagtagaatcagctccatattttgtaatcaca

SEQ ID NO: 687233 - DNA, 120 bp, Artificial Sequence
  ENSG00000187764_99 (sequence is synthesized)
tccacgaagctctgaagccatggtggtcctggcaccagctggctccgttagaggcttggggtgggagtgagcaggtgggaggtgccccagtgacaggctgagtgctggagcccaggctgc

SEQ ID NO: 687234 - DNA, 120 bp, Artificial Sequence
  ENSG00000187764_100 (sequence is synthesized)
aaacctggcccttgcttataccaaggtgatcagtcttctcacgacagtcctagctgtaggagaaagatcattacctacggcatctgccacagcagttaatttgccttcaacttaagctag

SEQ ID NO: 687235 - DNA, 120 bp, Artificial Sequence
  ENSG00000187764_101 (sequence is synthesized)
ttgcagtgacaggaagggccagggggaaatatctgtcctcaggacctctaccctagatccttgtaagccacaacaacttcccttctttgagggcgcgaccagtgtcacctggctcgccac

SEQ ID NO: 687236 - DNA, 120 bp, Artificial Sequence
  ENSG00000187764_102 (sequence is synthesized)
tgggaagagccaaggcacatccaggttggtggctgctgagccccacagcatcagaccagcctcttgtccccaccccacagaggccaagggggtgatctgggagtagcaccccagcctggc

SEQ ID NO: 687237 - DNA, 120 bp, Artificial Sequence
  ENSG00000187764_103 (sequence is synthesized)
cgctctcttgaggtaacagggttggatggttagggagcttggagcactggcccaagcaagaaaacagtggtgttttcaggaggccctgctgggagatggaagacagctccccactggggg

SEQ ID NO: 687238 - DNA, 120 bp, Artificial Sequence
  ENSG00000187764_104 (sequence is synthesized)
cctaggattccaggagctccccagcagtcctccgtgggacatacgtgggtttgcacctgctgccctgtcccgctgagggtgcggtgctgatggggtggccctgcacactgatggtaactc

SEQ ID NO: 687239 - DNA, 120 bp, Artificial Sequence
  ENSG00000187764_105 (sequence is synthesized)
gtgggtgaataacacgtgccggttgttttgcaggggtttgattcaggagatgagcggcgatgcttctgtgtgcccggataaaagtaaaggaagttaccggcagcattttttcaagcacgg

SEQ ID NO: 687240 - DNA, 120 bp, Artificial Sequence
  ENSG00000187764_106 (sequence is synthesized)
gttggtgaggattcttggggtcaaccatggaacagtttattttccttggaaaaaaactggaataacccataacacttgggtttccagttgtctgttttgccaaagccttttccttttttt

SEQ ID NO: 687241 - DNA, 120 bp, Artificial Sequence
  ENSG00000187764_107 (sequence is synthesized)
gtttctaatgcgaaatcatcattgttttctaagtatctgtggagggaatgacttgagagtgaagagtgtgaagtttgccgctgtggtcactgtccttggtttctgtgtctgggttagtgt

SEQ ID NO: 687242 - DNA, 120 bp, Artificial Sequence
  ENSG00000187764_108 (sequence is synthesized)
agaaggtttaaactcacaataatttgttttcagtgcctttctaggagtgttgctgagtttaagtggatgcacagtttaagggcttaaatagccttgtttcccattattttcacagcaaag

SEQ ID NO: 687243 - DNA, 120 bp, Artificial Sequence
  ENSG00000187766_0 (sequence is synthesized)
accacccagtccagcacccaccatggctgacgcctgctgcaccaggacgtatgtgattgctgcatccaccatgtctgtctgctccagtgacgtgggccatgtcagccgagtctcctcccc

SEQ ID NO: 687244 - DNA, 120 bp, Artificial Sequence
  ENSG00000187766_1 (sequence is synthesized)
cagcacctgcactggctcctcctggcaggtggacaattgccaggaaagctgctgcgagccccgctcctgtgcctccagctgctgtacccctagctgctgtgccccagccccctgcctggc

SEQ ID NO: 687245 - DNA, 120 bp, Artificial Sequence
  ENSG00000187766_2 (sequence is synthesized)
gccccagccccctgcctggccctggtctgtgccccagtgagctgtgagcccagcccctgccaatcaggctgcaccgactcctgcacaccttcatgctgccagcagtctagctgccagccg

SEQ ID NO: 687246 - DNA, 120 bp, Artificial Sequence
  ENSG00000187766_3 (sequence is synthesized)
gtccaactgctgcaagcccgtgtgctgcgtgtccatctgctctggagcttcctccccatgctgccagcagtctagctgccagtcagcttgctgcaccttctccccatgccaacaggcctg

SEQ ID NO: 687247 - DNA, 120 bp, Artificial Sequence
  ENSG00000187766_4 (sequence is synthesized)
tccccatgccaacaggcctgctgtgtgcccatctgctgcaagcccatctgctgtgtgcctgtctgctctggggcttcctctctgtgctgccagaagtctagctgccagccggcttgctgc

SEQ ID NO: 687248 - DNA, 120 bp, Artificial Sequence
  ENSG00000187766_5 (sequence is synthesized)
ctcctcctccgtgtccctcctctgccgccctgtgtgccggcctgcctgctgtgtgcctgtcccctcctgttgtgtccctgcctcctcctgccagcccagctgctgccacccggcctcctg

SEQ ID NO: 687249 - DNA, 120 bp, Artificial Sequence
  ENSG00000187766_6 (sequence is synthesized)
cctgtccttcctctgccgccccgcgtgctcccgcctggcctgctgaggcctctgctcaggccaggagtccagctgctgatgggcacgtcccccagggccagccggctccggtcctgtcct

SEQ ID NO: 687250 - DNA, 120 bp, Artificial Sequence
  ENSG00000187772_0 (sequence is synthesized)
caaaagaaggaaagcacattagaccatgcgagctaaatttgtgatcgcacaaaatcaagatgttagattgatgcagaagatcactccgttccaaagggaaagttttcatctcacgagttt

SEQ ID NO: 687251 - DNA, 120 bp, Artificial Sequence
  ENSG00000187772_1 (sequence is synthesized)
ggagctgagggcccgtggggcaacatggccgaaggcggggctagcaaaggtggtggagaagagcccgggaagctgccggagccggcagaggaggaatcccaggttttgcgcggaactggc

SEQ ID NO: 687252 - DNA, 120 bp, Artificial Sequence
  ENSG00000187772_2 (sequence is synthesized)
cactgtaagtggttcaatgtgcgcatgggatttggattcatctccatgataaaccgagagggaagccccttggatattccagtcgatgtatttgtacaccaaagcaaactattcatggaa

SEQ ID NO: 687253 - DNA, 120 bp, Artificial Sequence
  ENSG00000187772_3 (sequence is synthesized)
ggatttagaagcctaaaagaaggagaaccagtggaattcacatttaaaaaatcttccaaaggccttgagtcaatacgggtaacaggacctggtgggagcccctgtttaggaagtgaaaga

SEQ ID NO: 687254 - DNA, 120 bp, Artificial Sequence
  ENSG00000187772_4 (sequence is synthesized)
agacccaaagggaagacactacagaaaagaaaaccaaagggagatagatgctacaactgtggtggccttgatcatcatgctaaggaatgtagtctacctcctcagccaaagaagtgccat

SEQ ID NO: 687255 - DNA, 120 bp, Artificial Sequence
  ENSG00000187772_5 (sequence is synthesized)
tactgtcagagcatcatgcacatggtggcaaactgcccacataaaaatgttgcacagccacccgcgagttctcagggaagacaggaagcagaatcccagccatgcacttcaactctccct

SEQ ID NO: 687256 - DNA, 120 bp, Artificial Sequence
  ENSG00000187772_6 (sequence is synthesized)
cgagaagtgggaggcgggcatggctgtacatcaccaccgtttcctcaggaggctagggcagagatctcagaacggtcaggcaggtcacctcaagaagcttcctccacgaagtcatctata

SEQ ID NO: 687257 - DNA, 120 bp, Artificial Sequence
  ENSG00000187772_7 (sequence is synthesized)
gcaccagaagagcaaagcaaaaaggggccttcagttcaaaaaaggaaaaagacataacaggtcttcttcatatgttctttcctttacccggttgcaaagtctacctcatgcaagtatagg

SEQ ID NO: 687258 - DNA, 120 bp, Artificial Sequence
  ENSG00000187772_8 (sequence is synthesized)
ggaacagtatttcacaagcagtagctgacctgggattttaactactattggggaactgtgaattttttaaacagacaaatcactctaagcaaattacatttgagcagggtgtcatgtttt

SEQ ID NO: 687259 - DNA, 120 bp, Artificial Sequence
  ENSG00000187772_9 (sequence is synthesized)
atgttaattcagagaataagatactatgtctgtcaatatgtgcatgtgtgagagggagagagcctgagtctgtgtgtgtacatgaggatttttatataggaatgtagacacatatataaa

SEQ ID NO: 687260 - DNA, 120 bp, Artificial Sequence
  ENSG00000187772_10 (sequence is synthesized)
gaggctttgtctttatatatttgtgtatagatcaaagcacacaccctctctcatataattggatatttccaagaattgaaaacccatgtgaagcattatagatagttttaaatttaaccc

SEQ ID NO: 687261 - DNA, 120 bp, Artificial Sequence
  ENSG00000187772_11 (sequence is synthesized)
actggagttttcttgaaataccacttcttttatattatataaaactaaaaacacgactgttaccttttgtgtgaaccaaaggatacttcagatctcagagctgccaattatggggtacta

SEQ ID NO: 687262 - DNA, 120 bp, Artificial Sequence
  ENSG00000187772_12 (sequence is synthesized)
aaggtttttaagacatccagttctcccgaatttgggattgcctctttttcttgaaatctctggagtagtaatttttttcccccttttttgaaggcagtaccttaacttcatatgcctctg

SEQ ID NO: 687263 - DNA, 120 bp, Artificial Sequence
  ENSG00000187772_13 (sequence is synthesized)
actgccataagcttttttgattctgggataacataactccagaaaagacaatgaatgtgtaatttgggccgatatttcactgttttaaattctgtgtttaattgtaaaattagatgccta

SEQ ID NO: 687264 - DNA, 120 bp, Artificial Sequence
  ENSG00000187772_14 (sequence is synthesized)
ttaagagaaatgaaggggaggatcatcttagtggcttgttttcagtagtattttaatatcagcttcttgtaaccttttccatgttgtgagggttgtaagggattgtgtggcaacagcagc

SEQ ID NO: 687265 - DNA, 120 bp, Artificial Sequence
  ENSG00000187772_15 (sequence is synthesized)
ttcccttggctaactcaatcttctacccattgcttagagcagggagccctccttatttactactgaagaccttagagaactccaattgtttggcatatatttttggtggtggtttttatt

SEQ ID NO: 687266 - DNA, 120 bp, Artificial Sequence
  ENSG00000187772_16 (sequence is synthesized)
cctcctggagagttatctaatttgtttctaaaacaaacaagcagcaaagaaatgaattaaatactggggttgagaattaaaattaagtggatgttcacagttgcccaatatatatgacct

SEQ ID NO: 687267 - DNA, 120 bp, Artificial Sequence
  ENSG00000187772_17 (sequence is synthesized)
gcaaatgatacgaaaaagtgcagcatttagtggcagttaacaagagtgacaagcctggggcagaggtaccaaacctctcccaccagagagctagaagtattttatacagtaactttgatc

SEQ ID NO: 687268 - DNA, 120 bp, Artificial Sequence
  ENSG00000187772_18 (sequence is synthesized)
ttatggaagtgaccttcaatgcttattctgaagtaacctatatggtggatacaggatgaacattcagtgccagggagaatcttctcaggttggttctcgttagagtgataaactggctag

SEQ ID NO: 687269 - DNA, 120 bp, Artificial Sequence
  ENSG00000187772_19 (sequence is synthesized)
gggccatagtattggtcctgttaggtttcggtcatggaaaaaaaaattattttggggtcatcctggctctagatgttatgggcaaatttctgaaacatctgcaagaaggtaccagttaat

SEQ ID NO: 687270 - DNA, 120 bp, Artificial Sequence
  ENSG00000187772_20 (sequence is synthesized)
tatagtgcttaatattgggaataagattaagcattataattataatgtatgggcctgttggtgtaagctcagataattaaataaaaatagcatgactcaaatgagacatattctgctgaa

SEQ ID NO: 687271 - DNA, 120 bp, Artificial Sequence
  ENSG00000187772_21 (sequence is synthesized)
cagtttctacttcctctcccgcctgtcctgtcatgggagacgtgtatagttgctgctgtttcagcaaaccaccataagacgaaaatgcctcaggttgggttgccagtcctttacaactca

SEQ ID NO: 687272 - DNA, 120 bp, Artificial Sequence
  ENSG00000187772_22 (sequence is synthesized)
tgaaatatcggtgtgctgtgatgcaaagcttacctttgacgatattgaatgtgatatagctgtagagaagtacttccttgccttatgtgaggatttcaaacttatttaaattatgtagac

SEQ ID NO: 687273 - DNA, 120 bp, Artificial Sequence
  ENSG00000187772_23 (sequence is synthesized)
aaatcaaagtggcattgcttaatttttagcaggcataataagcaagttaacagtaaaatgcaaaacatgataagcgttgctcaatttttagcaggtataataagcaggttaacagtaaaa

SEQ ID NO: 687274 - DNA, 120 bp, Artificial Sequence
  ENSG00000187772_24 (sequence is synthesized)
atgcaaaacatgatagataagtcactttgaaaattcaaaccaaagttccttcaccttatggaaataggaaattatggacttcaaaattggacacttcctgtttacaaaaagaaattcaga

SEQ ID NO: 687275 - DNA, 120 bp, Artificial Sequence
  ENSG00000187772_25 (sequence is synthesized)
gctaaaatcatggtaaaaaaaaatagaaacacttgagaactatggtctttatgggtgcaatttgaaatccttttcatcatcttaccagactaaactaagagcacataccaaacctatctt

SEQ ID NO: 687276 - DNA, 120 bp, Artificial Sequence
  ENSG00000187772_26 (sequence is synthesized)
atggttgaaagttggggtttattttttatatgagaatattatcactattacataacatactcaggacaaagaactttgctcagggaacataccatgtaatatttttgttgtttctttaca

SEQ ID NO: 687277 - DNA, 120 bp, Artificial Sequence
  ENSG00000187772_27 (sequence is synthesized)
gactagtctacagtcctgcttactcaaaacaaaccaaataacttatacctttatataagtattatgtactgatgatagtaactacctctgagtttgacacagatcaaaatttttgaatat

SEQ ID NO: 687278 - DNA, 120 bp, Artificial Sequence
  ENSG00000187772_28 (sequence is synthesized)
cagatatcagttatcctatttttatttcatgtgaaaactcctctaaagcagattccctcaactctgtgcatatgtgaatatcactgatgtgaacacattgttcatttacataggtaaaat

SEQ ID NO: 687279 - DNA, 120 bp, Artificial Sequence
  ENSG00000187772_29 (sequence is synthesized)
attactctgtttacagcaaaaggctacctcatagttgatacatagcacacctgtatgtatgctgttccagccttacaggtggctgataattctctggtacagaacctttttatctgtatt

SEQ ID NO: 687280 - DNA, 120 bp, Artificial Sequence
  ENSG00000187772_30 (sequence is synthesized)
ataaatagcaattcacaactgcatgtttctgacaaacacttgtgaataatgaagcatctcgttttagttagcaaagtctccaaacatttccttaaaataatcatgtatttagtttaaaga

SEQ ID NO: 687281 - DNA, 120 bp, Artificial Sequence
  ENSG00000187772_31 (sequence is synthesized)
attatgggcactgttcaacttaagcaaaacagaacacggaagcagtcttagaagcaccactttgcccagaggtggaggttggaaggggtagcagggagaggggttggtgtatgcaggtat

SEQ ID NO: 687282 - DNA, 120 bp, Artificial Sequence
  ENSG00000187772_32 (sequence is synthesized)
tcatgctaggcaaagagtttaaaagacgccaatgtccttcatttactgtctgtgctgccctgaagccaagcgtattgcagcattatagccccaggcacataactaactagcactggcttg

SEQ ID NO: 687283 - DNA, 120 bp, Artificial Sequence
  ENSG00000187772_33 (sequence is synthesized)
ccaaggaatgaacatgcaatgccattactagctattgagggaaaagggtctgtgtgaagcatcactttgcagggattactaatggtggggcagcaggtctgtgaattaagttatctcttg

SEQ ID NO: 687284 - DNA, 120 bp, Artificial Sequence
  ENSG00000187772_34 (sequence is synthesized)
acctcaccctcatgtcaacacaaatgtaattcctaaacaagatgcattgccagtctcttagccctgtaagctgatcttttgctacatggcagactataatgaaaacatttttatacttgg

SEQ ID NO: 687285 - DNA, 120 bp, Artificial Sequence
  ENSG00000187772_35 (sequence is synthesized)
gtttctagtcttcactagaaggccttggatgtatttttgcagttgaaagatttagaaagatttttacctgcttataacttggaagtttagagtgcaatgtaagaaaaaagatcaagaaat

SEQ ID NO: 687286 - DNA, 120 bp, Artificial Sequence
  ENSG00000187772_36 (sequence is synthesized)
gtcatgttattagcatcagtccacctccaatattgccgatactttttttattctggctcagttttattttgcaccagtgcggccccaagttactgctggttgtatttagtttgtgaatag

SEQ ID NO: 687287 - DNA, 120 bp, Artificial Sequence
  ENSG00000187772_37 (sequence is synthesized)
gagcccataagtgttaatagactttgtaacattcactataagatgaattatacaggacatgggaaatctcattaagtcttaaagttaatttaaattaatttatctgttttctctaagaaa

SEQ ID NO: 687288 - DNA, 120 bp, Artificial Sequence
  ENSG00000187772_38 (sequence is synthesized)
tgtttatcataaaatatatatgtgtatttcccctttggttataaaatttgggaaagtatgtacaagtgcagctgcactgactttaattttctagatgtcttaatgagatttatttgtttt

SEQ ID NO: 687289 - DNA, 120 bp, Artificial Sequence
  ENSG00000187772_39 (sequence is synthesized)
agagaagaacatcttgttaaaagcatcaaactctgtcttacatagctgtcaacagcctctttaagatgtggtggttgtatgatctgtgtcttaattgttcagttagagtgagaagttgac

SEQ ID NO: 687290 - DNA, 120 bp, Artificial Sequence
  ENSG00000187772_40 (sequence is synthesized)
ctatgattcatttttaaattttatatttggaacaaagctgcaagttatggtaaagtactgtactgtgagaagtattatgatatttaatgcatctgtggcttaacacttgtgagagttacc

SEQ ID NO: 687291 - DNA, 120 bp, Artificial Sequence
  ENSG00000187772_41 (sequence is synthesized)
agcttgaaaatgatggtgttgactacctcttgaatcacatctatcaaccactggcacctaccaccaagctggcttcaattagtatgtgttgctttttggtattaacaactaaccgtacta

SEQ ID NO: 687292 - DNA, 120 bp, Artificial Sequence
  ENSG00000187772_42 (sequence is synthesized)
gagaccaaagtgaaccctgatttttatatgtctttaataatggtgttttatctagtgtttttaaattatcctgtgtagtatttagattacctcattgtccattttgactcatgttgttta

SEQ ID NO: 687293 - DNA, 120 bp, Artificial Sequence
  ENSG00000187772_43 (sequence is synthesized)
caagtgaaaataaaaacacttgaactgtatgtttttaaaagacaaaaaaggggtagatgtttggaatgcgtttcactcgcatgcagtcatctggagggactgaagcactgtttgcctttc

SEQ ID NO: 687294 - DNA, 120 bp, Artificial Sequence
  ENSG00000187772_44 (sequence is synthesized)
tgtacactctgggttttatattctcatttcatgcctaatgtcttattctgtcaattatggatatgttgaggtttaaaaaaattacttgattaaaaataaaacatataacgttggcattta

SEQ ID NO: 687295 - DNA, 120 bp, Artificial Sequence
  ENSG00000187772_45 (sequence is synthesized)
gtctctcgacctccgcgctccctcaggaagtgacagactccaggccccttcctccgccccgtccttcgggactgaacgccacacacgtcctcacaccctctccccctctcacacccaggc

SEQ ID NO: 687296 - DNA, 69 bp, Artificial Sequence
  ENSG00000187772_46 (sequence is synthesized)
atcgcactgttccctgctggagagatcctcccacctcagcctccccaatagctgggaccactggcgcgc

SEQ ID NO: 687297 - DNA, 120 bp, Artificial Sequence
  ENSG00000187772_47 (sequence is synthesized)
tcctcccacctcagcctccccaatagctgggaccactggcgcgcagaccacgcccagcgaattttttgtagagagccaggtcgccattttccacaggctggtgttgaactcctgggctca

SEQ ID NO: 687298 - DNA, 120 bp, Artificial Sequence
  ENSG00000187772_48 (sequence is synthesized)
attcgccacgtcaacctctgaagaaggtgctgggattacaagcatgagccaccgccgccaggttcttcagaagaggatgaggtcattcaaccaggtttcatcagccccaggcggggctag

SEQ ID NO: 687299 - DNA, 80 bp, Artificial Sequence
  ENSG00000187773_0 (sequence is synthesized)
ccgggtggtgcaggaggcgcgggcgctgcgggcggggcacgctcctcgccttcgccgcgtggaccgcgggctgggtgctg

SEQ ID NO: 687300 - DNA, 120 bp, Artificial Sequence
  ENSG00000187773_1 (sequence is synthesized)
gcggccgcgctgctgctccgcgcgcacccgggtgtcctctccgagcgctgcaccgacgagaagagccggcgcatcctggccgcgctgtgccaggactaccagggcggcacgctggccggg

SEQ ID NO: 687301 - DNA, 120 bp, Artificial Sequence
  ENSG00000187773_2 (sequence is synthesized)
gacctctgcgaggacctgtgtgtggcgggagagctgctgttccaacgctgcctgcactacaacagaggcaagaaggtgctgcaggccgactggcgcggccggcccgtggtcctcaagtcc

SEQ ID NO: 687302 - DNA, 120 bp, Artificial Sequence
  ENSG00000187773_3 (sequence is synthesized)
aaggaggaggccttctccagcttcccgcccctcagcctgttggaagaggaggcaggggagggtggccaggacatgcccgaggccgaactcctcctgatggtggctggggaggtcaagagc

SEQ ID NO: 687303 - DNA, 120 bp, Artificial Sequence
  ENSG00000187773_4 (sequence is synthesized)
gctctgggcctggagttgtccaacagcagcctggggccgtggtggccgggcaggcggggcccacgctggcggggacagctggccagcctgtgggccctgctgcagcaggaggagtacgtc

SEQ ID NO: 687304 - DNA, 120 bp, Artificial Sequence
  ENSG00000187773_5 (sequence is synthesized)
tacttcagcctgctgcaggacctgagcccacacgtgctgcccgtgctgggttcctgcggccacttctacgcggtggagttcctggccgcgggcagcccccaccacagggcactcttcccc

SEQ ID NO: 687305 - DNA, 120 bp, Artificial Sequence
  ENSG00000187773_6 (sequence is synthesized)
ctggaccgggccccaggtgcccctgggggtggccaggccaaggccatcagtgacatcgcactcagcttcttggacatggtgaaccattttgacagtgacttttcccaccgcctccacctc

SEQ ID NO: 687306 - DNA, 120 bp, Artificial Sequence
  ENSG00000187773_7 (sequence is synthesized)
tgcgacatcaagccggaaaactttgccatccggagcgacttcacagtggtggctattgatgtggacatggccttttttgaacctaaaatgagggaaatccttgagcaaaactgcacagga

SEQ ID NO: 687307 - DNA, 120 bp, Artificial Sequence
  ENSG00000187773_8 (sequence is synthesized)
gatgaagactgcaatttctttgactgtttttcaagatgtgatttacgagtcaacaaatgcggagcgcagcgcgtaaacaacaacctgcaggtcatctgtgacaaaatatttcgccattgg

SEQ ID NO: 687308 - DNA, 120 bp, Artificial Sequence
  ENSG00000187773_9 (sequence is synthesized)
ttttccgcgcctctcaagagctctgcggtctctttccagcttcagctgcagttacaggaggcggtgcaggaatgtgcagaccctggggtccccagtgggaacacccggagagcagcctcc

SEQ ID NO: 687309 - DNA, 120 bp, Artificial Sequence
  ENSG00000187773_10 (sequence is synthesized)
agcgtgttctggaagcttcgccaactcctccaagccacactgagggagctgcaggaggcagagaagtagccactctctggccttaaacatgctcacacaggaaaagtgaccttggctgga

SEQ ID NO: 687310 - DNA, 120 bp, Artificial Sequence
  ENSG00000187773_11 (sequence is synthesized)
tttcttctgccattgttttaaagatgagccatttcccctgtgctctctggggtgccgttctggtctccacattgtggagtggcaagtgctgctgccagagacagtgctccctcgctctcg

SEQ ID NO: 687311 - DNA, 120 bp, Artificial Sequence
  ENSG00000187773_12 (sequence is synthesized)
tcccaccctggcctctgacctgtcgccttgtgtaaaatgagatgagggaggaggtacagacctcccttcaggagggctctcggtcagaagacaccaacctgtgtgcacttattctctgca

SEQ ID NO: 687312 - DNA, 120 bp, Artificial Sequence
  ENSG00000187773_13 (sequence is synthesized)
gagagcacttgtacctggttatcccagcacgagttccagctgttctttcctgtaaatcgttaccacgttaaaaagtgtgcgtgtgtgcatacaaatgatgtgtatgcctgtgtctgggtg

SEQ ID NO: 687313 - DNA, 120 bp, Artificial Sequence
  ENSG00000187773_14 (sequence is synthesized)
caaatgagcatgtgagcatgtgtgagtgtgcccatgagtgtctgcatgtgtgtgagtgtgcacaggtgagtgtgcacaggtgagtgtggtgtgctcatgaggagtatgagtatgcctgag

SEQ ID NO: 687314 - DNA, 120 bp, Artificial Sequence
  ENSG00000187773_15 (sequence is synthesized)
gggcatgtgtatgtgattgtgtgagtgtgggcaggtgagtgtgttggggatgtgggttagggtggggagtggtgctttctctagtgtgtcctccggaacatcttgcctacctagcaaaga

SEQ ID NO: 687315 - DNA, 120 bp, Artificial Sequence
  ENSG00000187773_16 (sequence is synthesized)
agtgtgaccattctttcggaattaaatacaataaaaagaaaataagctgcatctttagggaagggaatttgcattggagagcgtgtgtaacggcagcttatagtatttttcattttgtgg

SEQ ID NO: 687316 - DNA, 120 bp, Artificial Sequence
  ENSG00000187773_17 (sequence is synthesized)
aatccaccaaggttatggatgggttttagggcgcctcgtattgcaatacaccttcccctgggcagggacttgtaggttggcttgatgcagcattgtcttcaccttcagagaaaatttaaa

SEQ ID NO: 687317 - DNA, 120 bp, Artificial Sequence
  ENSG00000187773_18 (sequence is synthesized)
gtagagcaaatgctgaggtctgcattgactccaggcaggaccagagaccagcacctttcttttgatggattgaagaccaagtgataggcatcaaatcctatggtggcatgatacgctcat

SEQ ID NO: 687318 - DNA, 120 bp, Artificial Sequence
  ENSG00000187773_19 (sequence is synthesized)
cagtggtgatcccaaggaggcttttccagcaaaatacaggcagggggacaggccaggtgaagccagtgagctttcacttaaagggacctggtttctacccataactgtgacccacgagtg

SEQ ID NO: 687319 - DNA, 120 bp, Artificial Sequence
  ENSG00000187773_20 (sequence is synthesized)
ctcaacaaaccaacgggtcaccccttttcagaaatcccatgaaaagggaaatcgagaaagatgagagaatcaggaagtcatgttggcagtttacacattaaagaagacaaattaatcgga

SEQ ID NO: 687320 - DNA, 120 bp, Artificial Sequence
  ENSG00000187773_21 (sequence is synthesized)
cgttgtgaaagtcacaaactgacacattccaaatggtctcttatcttggcctgcagcccctttctaaaccagagaaacgggaatgccttcttccagactttggggtcacatttactgact

SEQ ID NO: 687321 - DNA, 120 bp, Artificial Sequence
  ENSG00000187773_22 (sequence is synthesized)
ctgcccttcagggcacgctgagaaatggtgtgtgagggactagcatgatcagaggcccccagctctaaattctgccttccccaaagacctgttggaaggcccactgccagctgttattct

SEQ ID NO: 687322 - DNA, 120 bp, Artificial Sequence
  ENSG00000187773_23 (sequence is synthesized)
tacccatcaccactggggatcttccaaatgacacagagttccatagagggcctcctcatcatggacatgaagactcgctttgcaattgtattctagcaagaaggaaaaaacccatgtcag

SEQ ID NO: 687323 - DNA, 120 bp, Artificial Sequence
  ENSG00000187773_24 (sequence is synthesized)
tcaccctgtggcacgagcaaattaaaaccaaagttcaacggccaggcctaggactagtggattccaaaggaaagggcgggcttcgggctattgggtggaggctccgattttccccagagc

SEQ ID NO: 687324 - DNA, 120 bp, Artificial Sequence
  ENSG00000187773_25 (sequence is synthesized)
tgcgctgggtgcaatgcctttctgtggtggtcggggcatactttgggccatgctcaccttctaggcaggttctctacaagcaaaaaggtttacaggaagacgggtgtgagatggaggggg

SEQ ID NO: 687325 - DNA, 120 bp, Artificial Sequence
  ENSG00000187773_26 (sequence is synthesized)
ggaaggagggaagccaccagggctttgccctctgtgccctttaaacagtggggtttcgctctgggaggtcagagtgggtcttttgtgggtagacgctgggatgccagccattcattagtg

SEQ ID NO: 687326 - DNA, 120 bp, Artificial Sequence
  ENSG00000187773_27 (sequence is synthesized)
gcctgagctcactgaccaggcagcaaagccagcctggaaaagagaaatagttagttttcatttcaaccaaaatggaaacaaattgtttttgtttacgatggagactgtgcaatatataat

SEQ ID NO: 687327 - DNA, 120 bp, Artificial Sequence
  ENSG00000187773_28 (sequence is synthesized)
gatggagactgtgcaatatataattatccaacacaattgtggttttattgctgaaagggagctgttttatctcttccctttatgtttggctacacagttacacacacacacacacacaca

SEQ ID NO: 687328 - DNA, 120 bp, Artificial Sequence
  ENSG00000187773_29 (sequence is synthesized)
ggaattcccattagagcagtggctctcaaattgtggtgaagctcagttttgtttttaattttgaaaccttgcaaatcaatgcttttatataacataataaattaacactgtgtatatcaa

SEQ ID NO: 687329 - DNA, 120 bp, Artificial Sequence
  ENSG00000187773_30 (sequence is synthesized)
ggacgcccgagagtttgtgcagcctgggagacggcggggggtttgattcaggggtgcccgtgggaaggggagggctgggtcgtcccagaacctactgactgtcctcgacccccgactctc

SEQ ID NO: 687330 - DNA, 120 bp, Artificial Sequence
  ENSG00000187775_0 (sequence is synthesized)
gtggcagttggagcccctcgagggaagggagccattttctttcctggtttgggaaagagttgctcatcagtttgcgggagaagctgtttgccttcagctgatacacagtgtaaggaaagg

SEQ ID NO: 687331 - DNA, 120 bp, Artificial Sequence
  ENSG00000187775_1 (sequence is synthesized)
ccaagatgacaatggccccggacgtcagactagagtatctggaggaagttgcctccatcgtcctgaagttcaagccggacaagtggagcaagctgataggcgccgaggagaacgtggccc

SEQ ID NO: 687332 - DNA, 120 bp, Artificial Sequence
  ENSG00000187775_2 (sequence is synthesized)
tgttcacagagttctttgaaaagcccgacgtccaggtgctggtgctgacgctcaatgcagccggcatgatcataccctgcctgggcttcccccagtccctcaagtccaaaggggtttact

SEQ ID NO: 687333 - DNA, 120 bp, Artificial Sequence
  ENSG00000187775_3 (sequence is synthesized)
tcatcaagacaaagtccgagaacatcaacaaggacaactacagggcccggctcctttacggcgacatcagccccacacccgtggaccagctgatcgcggtggtggaggaggtcctctctt

SEQ ID NO: 687334 - DNA, 120 bp, Artificial Sequence
  ENSG00000187775_4 (sequence is synthesized)
ctctgttaaaccaaagtgagaacatggctggatggccccaggtggtctcggaagacatcgtgaagcaggtccacaggctgaagaatgaaatgtttgtgatgagtggcaagatcaaaggca

SEQ ID NO: 687335 - DNA, 120 bp, Artificial Sequence
  ENSG00000187775_5 (sequence is synthesized)
aaaccttgctgcctattccggagcacctgggcagcctggatggcacgctggagtccatggagaggatcccctcttcactggacaacttgctcctgcacgccattgaaaccaccatcatcg

SEQ ID NO: 687336 - DNA, 120 bp, Artificial Sequence
  ENSG00000187775_6 (sequence is synthesized)
actggtcccaccagatccgggatgtgctgagcaaagactcagcccaggcgctgctggatgggctgcaccccctgccccaagtggagttcgagttctgggacactcggctgctgaacctca

SEQ ID NO: 687337 - DNA, 120 bp, Artificial Sequence
  ENSG00000187775_7 (sequence is synthesized)
agtgcatccatgaacagctaaacagacccaaagtgaacaagattgttgagatcctagagaaagccaaaagctgctactggccagccctgcaaaacgtttacaccaacgtcactgaagggc

SEQ ID NO: 687338 - DNA, 120 bp, Artificial Sequence
  ENSG00000187775_8 (sequence is synthesized)
tgaaggaagccaacgacatcgtgctctatttgaagcccctacggatcctgctggaggagatggaacaagccgacttcacgatgctccccaccttcattgccaaggtgctggacaccatct

SEQ ID NO: 687339 - DNA, 120 bp, Artificial Sequence
  ENSG00000187775_9 (sequence is synthesized)
gcttcatctgggccacctctgagtactataacacacctgccaggatcatcgtcatcctgcaggagttctgcaaccaaatcatcgagatgacacgaaccttcctgagcccggaagaggtgc

SEQ ID NO: 687340 - DNA, 120 bp, Artificial Sequence
  ENSG00000187775_10 (sequence is synthesized)
tgaagggcctgcaaggtgaaatcgaggaagtcctgagtggcatctccctggctgtaaatgtgctgaaggagctctaccagacgtacgacttctgctgcgtgaacatgaagcttttcttta

SEQ ID NO: 687341 - DNA, 120 bp, Artificial Sequence
  ENSG00000187775_11 (sequence is synthesized)
aggacaaagagcccgtgccttgggaattcccttcttctcttgccttttccaggataaattccttcttccagcgcatccagaccattgaggaactctataaaacagcaattgagtttctga

SEQ ID NO: 687342 - DNA, 120 bp, Artificial Sequence
  ENSG00000187775_12 (sequence is synthesized)
agctggagaaaatcgagcttgggggcgtgcgtgggaacctcctcgggagcctggtgacccgtatctatgatgaggtctttgagctggtgaaggtttttgccgactgcaaatatgatccct

SEQ ID NO: 687343 - DNA, 120 bp, Artificial Sequence
  ENSG00000187775_13 (sequence is synthesized)
tggaccctggagactcgaattttgaccgtgattatgctgattttgagatcaaaatccaagacctggataggaggctggccacgatcttttgccaaggatttgatgactgcagctgtatca

SEQ ID NO: 687344 - DNA, 120 bp, Artificial Sequence
  ENSG00000187775_14 (sequence is synthesized)
agtcctccgcaaagctcctgtacatgtgtgggggcctcatggagcggcccctgattcttgccgaggtggcgcccaggtattcagtcatgctggagctgtttgacgctgagctagacaatg

SEQ ID NO: 687345 - DNA, 120 bp, Artificial Sequence
  ENSG00000187775_15 (sequence is synthesized)
ctaagatcttgtacgatgcccagatggcggcctccgaggaggggaacatccccctgatccacaaaaacatgcctcccgtggccgggcagctcaaatggagcctggagctgcaggagaggc

SEQ ID NO: 687346 - DNA, 120 bp, Artificial Sequence
  ENSG00000187775_16 (sequence is synthesized)
tagaggtgtccatgaaacacctgaagcacgtcgaacacccggtcatgtctggagcagaggccaagctgacctatcagaagtatgacgagatgatggagctgctgaggtgccaccgcgaga

SEQ ID NO: 687347 - DNA, 120 bp, Artificial Sequence
  ENSG00000187775_17 (sequence is synthesized)
agatctaccagcagtgggtggcgggcgtggaccaggactgccactttaacctggggcagccgctgattctgcgggacgccgctagcaacctcatccacgtcaacttcagcaaagcgttgg

SEQ ID NO: 687348 - DNA, 120 bp, Artificial Sequence
  ENSG00000187775_18 (sequence is synthesized)
tggcagttctgagagaagtcaagtatttgaatttccagcaacagaaagagattccagacagtgcggagagtctgttctcagagaacgaaactttccggaagtttgtgggcaacctggagc

SEQ ID NO: 687349 - DNA, 120 bp, Artificial Sequence
  ENSG00000187775_19 (sequence is synthesized)
tcatcgttggctggtataatgagataaagactatagtgaaggcagtagaatttctactaataaagtcagaactggaagcaattgatgtcaagttattgagcgctgaaacgacattattct

SEQ ID NO: 687350 - DNA, 120 bp, Artificial Sequence
  ENSG00000187775_20 (sequence is synthesized)
ggaatggcgaaggtgtgtttcagtacattcaagaggtgcgagaaattctgcacaacttgcagaacaggatgcaaaaggcaaaacaaaatatagaaggaatttcccaggctatgaaggact

SEQ ID NO: 687351 - DNA, 120 bp, Artificial Sequence
  ENSG00000187775_21 (sequence is synthesized)
ggtcggccaacccgctgtttgaaagaaaggacaataagaaagaggccctgttagacttggatggaagaattgccaacctcaacaagcgctacgcagcagtcagggatgctggagtgaaga

SEQ ID NO: 687352 - DNA, 120 bp, Artificial Sequence
  ENSG00000187775_22 (sequence is synthesized)
tccaagccatggttgcagaaaacgcagaactattcagggcagacacactgagcctgccctggaaggattatgtcatctacattgacgacatggtcttagatgaatttgaccagttcattc

SEQ ID NO: 687353 - DNA, 120 bp, Artificial Sequence
  ENSG00000187775_23 (sequence is synthesized)
gcaaatctctgagtttcctaatggacaacatggttatagatgagagtatcgctcccctgtttgagatccgcatggagctggacgaggatgggctgaccttcaacccgaccctggaggtgg

SEQ ID NO: 687354 - DNA, 120 bp, Artificial Sequence
  ENSG00000187775_24 (sequence is synthesized)
gctcagatcgcggcttcctggcactgatcgagggcctggtcaacgacatctacaacgtagccaggctcatccctcggctggccaaggacaggatgaactacaagatggacctggaagata

SEQ ID NO: 687355 - DNA, 120 bp, Artificial Sequence
  ENSG00000187775_25 (sequence is synthesized)
acacagacctcatagagatgagggaggaggtgtccagcctggtcatcaatgccatgaaggaggccgaggagtaccaggattcctttgagaggtactcctacctctggacggacaacctgc

SEQ ID NO: 687356 - DNA, 120 bp, Artificial Sequence
  ENSG00000187775_26 (sequence is synthesized)
aggagtttatgaagaatttcctgatatatgggtgtgcagtcactgcggaggacttggacacctggacagatgacaccatccccaagacaccgcccaccctggctcagttccaggagcaga

SEQ ID NO: 687357 - DNA, 120 bp, Artificial Sequence
  ENSG00000187775_27 (sequence is synthesized)
tcgactcctacgagaagctgtatgaggaggtgtccaagtgcgagaacaccaaggtgttccacggctggctgcagtgcgactgccgccccttcaagcaggccctgctcagcacaatccggc

SEQ ID NO: 687358 - DNA, 120 bp, Artificial Sequence
  ENSG00000187775_28 (sequence is synthesized)
gctggggcttcatgttcaagcggcacctgagcaaccacgtcaccaacagcctggctgacctggaagccttcatgaaagtcgccagaatgggcttgaccaagcccctcaaggagggggact

SEQ ID NO: 687359 - DNA, 120 bp, Artificial Sequence
  ENSG00000187775_29 (sequence is synthesized)
atgatgggcttgtggaggtgatggggcacctgatgaaagtcaaggagaggcaagcagccaccgacaacatgtttgagcccctgaagcaaaccatcgagctgctcaagacctacggggagg

SEQ ID NO: 687360 - DNA, 120 bp, Artificial Sequence
  ENSG00000187775_30 (sequence is synthesized)
agatgccagaggagatccacttgaagctgcaggagctgccggagcactgggcaaataccaagaaactggccattcaggtgaagctgaccgtggcaccactccaggccaacgaggtcagca

SEQ ID NO: 687361 - DNA, 120 bp, Artificial Sequence
  ENSG00000187775_31 (sequence is synthesized)
tcctgcggcggaaatgccagcaattcgagctcaagcaacatgagttcagggagaggttcaggcgcgaggccccgttctccttcagcgaccccaacccctacaagtccctgaataagcaac

SEQ ID NO: 687362 - DNA, 120 bp, Artificial Sequence
  ENSG00000187775_32 (sequence is synthesized)
aaaagagcatctccgccatggaaggcatcatggaggcgctgtccaagtccgggggcctgttcgaggtccccgtcccagactacaagcagctcaaggcctgccaccgggaggtccgcctac

SEQ ID NO: 687363 - DNA, 120 bp, Artificial Sequence
  ENSG00000187775_33 (sequence is synthesized)
tgaaggagctctgggacatggttgttgtggtaaataccagcatcgaggactggaagaccaccaagtggaaagatatcaacgttgagcagatggacatagattgtaagaagtttgccaagg

SEQ ID NO: 687364 - DNA, 120 bp, Artificial Sequence
  ENSG00000187775_34 (sequence is synthesized)
acatgaggtctttggacaaggagatgaaaacctgggatgccttcgtggggctcgacaacaccgtgaaaaacgtgatcacgtccctgcgtgccgtgagcgagctgcagaaccctgccattc

SEQ ID NO: 687365 - DNA, 120 bp, Artificial Sequence
  ENSG00000187775_35 (sequence is synthesized)
gggaacgccactggcagcagctcatgcaggccacccaggtgaaatttaaaatgtcagaagagacgaccctggcagatttactgcagctgaacctccacagttacgaggatgaggtccgca

SEQ ID NO: 687366 - DNA, 120 bp, Artificial Sequence
  ENSG00000187775_36 (sequence is synthesized)
acatcgtggacaaggccgtgaaggagtcgggcatggaaaaggtgctgaaagccctggacagtacctggagcatgatggaattccagcacgagccgcacccgcggacaggcaccatgatgc

SEQ ID NO: 687367 - DNA, 120 bp, Artificial Sequence
  ENSG00000187775_37 (sequence is synthesized)
tcaagtccagcgaggtgctggtggagacgctggaggacaaccaggtgcagctgcagaacctgatgatgtccaagtacctggcccacttcctgaaggaggtgacaagctggcagcagaagc

SEQ ID NO: 687368 - DNA, 120 bp, Artificial Sequence
  ENSG00000187775_38 (sequence is synthesized)
tgtccacggcggactccgtcatctccatctggtttgaggtccagcgaacctggagccacctggagagcatcttcatcggctccgaagacatccgcacccagctcccgggggactcccagc

SEQ ID NO: 687369 - DNA, 120 bp, Artificial Sequence
  ENSG00000187775_39 (sequence is synthesized)
gctttgacgacatcaaccaggaattcaaggccttgatggaagatgcagtgaaaacacccaacgtggtggaagccaccagcaaacccggcctctacaataaactggaggccctgaagaaga

SEQ ID NO: 687370 - DNA, 120 bp, Artificial Sequence
  ENSG00000187775_40 (sequence is synthesized)
gcttggccatctgtgaaaaggctttggcagagtatttagagacgaaaagactggctttcccccggttctattttgtctcctcggctgacctcctggacattctctccaatggcaatgacc

SEQ ID NO: 687371 - DNA, 120 bp, Artificial Sequence
  ENSG00000187775_41 (sequence is synthesized)
ccgtggaggtgagccgccacctgtccaaactcttcgatagcctgtgtaaactgaagttccggctcgatgccagtgacaaacctctcaaggtgggcctgggaatgtacagcaaggaggacg

SEQ ID NO: 687372 - DNA, 120 bp, Artificial Sequence
  ENSG00000187775_42 (sequence is synthesized)
agtacatggtttttgatcaggaatgcgacctctcggggcaggtggaagtgtggctgaatcgagtgctggaccgaatgtgctctaccctccggcacgaaatcccagaggccgtggtgacct

SEQ ID NO: 687373 - DNA, 120 bp, Artificial Sequence
  ENSG00000187775_43 (sequence is synthesized)
acgaagagaagccgagggagcagtggatcctggactacccagcccaggtggccctgacttgcacccagatctggtggacgaccgaggtgggcctggcatttgccaggctggaggaaggct

SEQ ID NO: 687374 - DNA, 120 bp, Artificial Sequence
  ENSG00000187775_44 (sequence is synthesized)
atgaaaacgctatcagagattataacaaaaagcagattagccagctgaacgtactcatcacgctgctcatggggaacctcaacgctggcgacaggatgaagatcatgaccatctgcacca

SEQ ID NO: 687375 - DNA, 120 bp, Artificial Sequence
  ENSG00000187775_45 (sequence is synthesized)
tcgatgtgcacgcacgggacgtggtggccaaaatgatcgtggccaaggtggagagttctcaggccttcacctggcaggcccagctccggcatcgctgggacgaagagaagcgacactgct

SEQ ID NO: 687376 - DNA, 120 bp, Artificial Sequence
  ENSG00000187775_46 (sequence is synthesized)
ttgccaacatctgcgatgcccaaatccagtattcctatgagtatctgggcaacacgccgcggctggtcatcaccccactcactgacaggtgctatatcaccctgacccagtccctccatc

SEQ ID NO: 687377 - DNA, 120 bp, Artificial Sequence
  ENSG00000187775_47 (sequence is synthesized)
tcatcatgggtggagcccctgccggccccgctgggaccggcaagactgagacgaccaaggacctgggcagagccctgggcaccatggtctacgtcttcaactgctccgagcagatggact

SEQ ID NO: 687378 - DNA, 120 bp, Artificial Sequence
  ENSG00000187775_48 (sequence is synthesized)
acaagtcctgtggaaatatctacaagggcctggcccagacgggagcctggggctgctttgacgagtttaatcgcatctcagtggaagtcttgtctgtgattgccgtgcaggtaaaatgtg

SEQ ID NO: 687379 - DNA, 120 bp, Artificial Sequence
  ENSG00000187775_49 (sequence is synthesized)
tccaggatgcaattcgggccaagaaaaaagcattcaatttcctgggagagatcataggcctcattcccaccgtcggtatcttcatcaccatgaaccctgggtacgccggacgcgcggagc

SEQ ID NO: 687380 - DNA, 120 bp, Artificial Sequence
  ENSG00000187775_50 (sequence is synthesized)
tgcctgagaacctaaaagccttattcaggccctgtgccatggtcgtccccgacttcgaactgatatgtgagatcatgctcatggccgagggctttctggaagcccgccttctggccagga

SEQ ID NO: 687381 - DNA, 120 bp, Artificial Sequence
  ENSG00000187775_51 (sequence is synthesized)
agttcatcaccctgtacaccttgtgcaaggagctgctctcgaagcaggatcattacgactggggcctgagagccatcaagtctgtgctggtggtggccggctccctgaagaggggcgacc

SEQ ID NO: 687382 - DNA, 120 bp, Artificial Sequence
  ENSG00000187775_52 (sequence is synthesized)
ccagccgggcagaggaccaggtgctcatgcgggcgctgagagacttcaacatccccaagattgtgacagacgacctgcccgtattcatgggactgatcggggacctcttcccggctctgg

SEQ ID NO: 687383 - DNA, 120 bp, Artificial Sequence
  ENSG00000187775_53 (sequence is synthesized)
acgtgcctcggaaacgggacctgaattttgaaaagatcatcaagcagagcatcgtggagctcaagctgcaggcggaggacagcttcgtgctgaaggtggtgcagctggaggagctgctgc

SEQ ID NO: 687384 - DNA, 120 bp, Artificial Sequence
  ENSG00000187775_54 (sequence is synthesized)
aggtccgccactccgtgttcatcgtcgggaatgcgggcagcggcaaatctcaggtcctcaaatccctcaacaagacctatcagaacctgaagaggaagccggtcgccgtggacctggacc

SEQ ID NO: 687385 - DNA, 120 bp, Artificial Sequence
  ENSG00000187775_55 (sequence is synthesized)
ccaaggccgtcacctgcgacgagctctttggcatcatcaacccagtgaccagggaatggaaagatggcctgttctccaccatcatgcgagacctggccaacatcacccatgacggcccca

SEQ ID NO: 687386 - DNA, 120 bp, Artificial Sequence
  ENSG00000187775_56 (sequence is synthesized)
agtggatcatccttgacggagacatagaccccatgtggatcgagtctctcaacacagtcatggatgacaacaaggtcctcaccctggccagcaacgagcggatccccctgaaccgcacca

SEQ ID NO: 687387 - DNA, 120 bp, Artificial Sequence
  ENSG00000187775_57 (sequence is synthesized)
agccaccgtttccagagccggcatcctctacatcaacccagccgacctgggatggaacccggtggtgagcagctggatcgagaggcgcaaggtgcagtcggagaaggccaacctgatgat

SEQ ID NO: 687388 - DNA, 120 bp, Artificial Sequence
  ENSG00000187775_58 (sequence is synthesized)
cctctttgacaagtacctgcccacgtgcctggacaagttgcgctttgggttcaagaagatcacgccagtgccggagatcacggtgatccaaacgattctgtacctgctggagtgcctgct

SEQ ID NO: 687389 - DNA, 120 bp, Artificial Sequence
  ENSG00000187775_59 (sequence is synthesized)
cacggagaagaccgtgccccccgactcccccagggagctgtacgagctgtacttcgtgttcacctgcttctgggccttcggtggcgccatgttccaggaccagcttgtggattatcgagt

SEQ ID NO: 687390 - DNA, 120 bp, Artificial Sequence
  ENSG00000187775_60 (sequence is synthesized)
ggagttcagtaaatggtggatcaacgaattcaagactatcaagttcccctcgcagggaacgatttttgactactacattgatcctgacacaaaaaagttcctgccctggacagataaagt

SEQ ID NO: 687391 - DNA, 120 bp, Artificial Sequence
  ENSG00000187775_61 (sequence is synthesized)
gccctcctttgagctggatcccgatgtcccactgcaggcctctttggtccacaccacggaaaccatccgcatccgctacttcatggacctgctcatggagaagtcctggccggtgatgct

SEQ ID NO: 687392 - DNA, 120 bp, Artificial Sequence
  ENSG00000187775_62 (sequence is synthesized)
ggtggggaacgcggggacgggcaagtcggtgctgatgggggacaagctggaaagcctgaacacggacaactacctggtgcaggctgtgcccttcaacttctacacgacctcagccatgct

SEQ ID NO: 687393 - DNA, 120 bp, Artificial Sequence
  ENSG00000187775_63 (sequence is synthesized)
gcagggggtgctggagaagccgctggagaagaaatcggggaggaactacgggccgccaggcactaagaagctcgtctacttcatcgacgacatgaacatgcccgaggtggacaagtatgg

SEQ ID NO: 687394 - DNA, 120 bp, Artificial Sequence
  ENSG00000187775_64 (sequence is synthesized)
gacggtggccccgcacaccctcatccggcagcacatggaccaccggcactggtatgacagacataagctgacgttaaaagatatccataattgtcagtacgtggcctgcatgaaccccac

SEQ ID NO: 687395 - DNA, 120 bp, Artificial Sequence
  ENSG00000187775_65 (sequence is synthesized)
ttccggatccttcaccatcgactccaggcttcagcgccatttctgcgtgtttgctgtgagcttccccggccaggaggccctcaccaccatctacaacacaatcctgacgcagcacctggc

SEQ ID NO: 687396 - DNA, 120 bp, Artificial Sequence
  ENSG00000187775_66 (sequence is synthesized)
cttccgctcggtctccatggctatccagaggataagcagccagctggtggccgcggccctggctttgcatcagaaaatcacggcaacatttcttcccacggccattaagtttcattatgt

SEQ ID NO: 687397 - DNA, 120 bp, Artificial Sequence
  ENSG00000187775_67 (sequence is synthesized)
cttcaacctcagggacctctccaatattttccagggactcttattttccacagcagaagttctgaaaaccccactggacctcgtccgcctttggctacatgagactgaacgagtgtatgg

SEQ ID NO: 687398 - DNA, 120 bp, Artificial Sequence
  ENSG00000187775_68 (sequence is synthesized)
tgacaaaatggttgacgaaaaagaccaggaaacattgcatagagtcaccatggcctccaccaagaagttctttgatgatcttggtgatgaactcttatttgccaagccaaatatcttctg

SEQ ID NO: 687399 - DNA, 120 bp, Artificial Sequence
  ENSG00000187775_69 (sequence is synthesized)
ccactttgctcaagggattggcgatcccaaatatgttcctgtaaccgacatggctcctctgaacaagctcctcgtggacgtcctggacagctacaatgaagttaatgcagtcatgaattt

SEQ ID NO: 687400 - DNA, 120 bp, Artificial Sequence
  ENSG00000187775_70 (sequence is synthesized)
ggtgctgtttgaggacgccgtggctcacatctgcaggattaatcgcatcctggagtctccccgggggaatgccctgctggtgggggtgggcggcagtggcaaacagagcctctcccgcct

SEQ ID NO: 687401 - DNA, 120 bp, Artificial Sequence
  ENSG00000187775_71 (sequence is synthesized)
ggcagcgtacatcagcgggcttgacgtgtttcagatcaccctcaagaagggctacgggatccccgacctcaagattgacctcgctgctcagtacataaaggctgccgtgaagaacgttcc

SEQ ID NO: 687402 - DNA, 120 bp, Artificial Sequence
  ENSG00000187775_72 (sequence is synthesized)
ctcggtgttcctgatgacagactcccaggtggccgaggagcagtttctggtgctgatcaatgacctgctggcctcaggagagatccctgggctgtttatggaggacgaggtggagaacat

SEQ ID NO: 687403 - DNA, 120 bp, Artificial Sequence
  ENSG00000187775_73 (sequence is synthesized)
catctcctccatgcgaccccaagtcaagtcccttggcatgaatgacactcgggaaacatgttggaagttcttcatcgaaaaagtgcgcagacagctcaaggtgatcctgtgtttctcccc

SEQ ID NO: 687404 - DNA, 120 bp, Artificial Sequence
  ENSG00000187775_74 (sequence is synthesized)
tgtgggctccgtgctgcgggtacgagccagaaagttcccagctgtggtcaactgcacggccatcgactggttccacgagtggccggaagatgcgctggtgtccgtcagcgcccgcttcct

SEQ ID NO: 687405 - DNA, 120 bp, Artificial Sequence
  ENSG00000187775_75 (sequence is synthesized)
ggaggagactgaggggattccgtgggaagtcaaggcctccatcagcttcttcatgtcctacgtgcacaccaccgtcaacgagatgtccagggtatacctggctactgagaggcgctacaa

SEQ ID NO: 687406 - DNA, 120 bp, Artificial Sequence
  ENSG00000187775_76 (sequence is synthesized)
ctacaccacacccaaaacctttctggagcagatcaaactgtaccagaacctgctggccaagaagagaacggaacttgttgccaaaatcgagaggctggagaacggcctgatgaagctgca

SEQ ID NO: 687407 - DNA, 120 bp, Artificial Sequence
  ENSG00000187775_77 (sequence is synthesized)
gagcacggcttcccaggtggatgatttgaaagccaagttggcgattcaggaggctgagctcaagcagaagaatgagagcgcagaccaactgatccaggtggtcggcatcgaggccgagaa

SEQ ID NO: 687408 - DNA, 120 bp, Artificial Sequence
  ENSG00000187775_78 (sequence is synthesized)
ggtcagcaaagagaaggccattgctgaccaggaagaagtcaaggtcgaggtcatcaataagaacgtcactgagaagcaaaaggcctgtgaaacagacctggccaaagcagaaccggccct

SEQ ID NO: 687409 - DNA, 120 bp, Artificial Sequence
  ENSG00000187775_79 (sequence is synthesized)
gctggcagcccaggaggctctggacactctgaataagaacaacctgacagagctgaagtcctttgggtccccgccggatgctgtggtcaacgtcaccgccgccgtcatgattctgaccgc

SEQ ID NO: 687410 - DNA, 120 bp, Artificial Sequence
  ENSG00000187775_80 (sequence is synthesized)
acctgggggcaagatccccaaggacaagagctggaaggcggccaagatcatgatgggcaaggtggacaccttcctagactccctgaagaagttcgacaaggagcacatccctgaggcctg

SEQ ID NO: 687411 - DNA, 120 bp, Artificial Sequence
  ENSG00000187775_81 (sequence is synthesized)
cctgaaggccttcaagccctaccaaggcaacccgacgttcgaccccgagttcatccgctccaagtccacggccgccgccggcctgtgctcctggtgcatcaacatcgtccgcttctacga

SEQ ID NO: 687412 - DNA, 120 bp, Artificial Sequence
  ENSG00000187775_82 (sequence is synthesized)
ggtctactgcgacgtggcgcccaagaggcaggcactggaggaggctaatgcagagctggcagaggcacaagagaagctgtcccggatcaaaaacaagattgccgaacttaacgccaacct

SEQ ID NO: 687413 - DNA, 120 bp, Artificial Sequence
  ENSG00000187775_83 (sequence is synthesized)
gagcaacctaacctcagcgtttgaaaaagcaacagctgagaaaatcaagtgtcagcaagaggccgatgccacgaacagggtgatcttactggcgaacaggctggtcgggggattagcatc

SEQ ID NO: 687414 - DNA, 120 bp, Artificial Sequence
  ENSG00000187775_84 (sequence is synthesized)
ggaaaacatccgctgggctgagtctgtggagaacttcaggagccagggggtcacgctgtgtggggacgtcctgctcatctctgccttcgtgtcctacgtgggctacttcaccaagaaata

SEQ ID NO: 687415 - DNA, 120 bp, Artificial Sequence
  ENSG00000187775_85 (sequence is synthesized)
ccggaatgagctgatggagaaattctggatcccttacatacataacttaaaggtccccatcccgatcacgaatggcctggatcccttgagcctgctgacagatgacgcggacgtggccac

SEQ ID NO: 687416 - DNA, 120 bp, Artificial Sequence
  ENSG00000187775_86 (sequence is synthesized)
ctggaacaaccagggcctccccagcgaccgcatgtccaccgagaatgccaccatcctgggcaacaccgagcggtggccgctgatcgtggacgcccagctccaaggaatcaagtggatcaa

SEQ ID NO: 687417 - DNA, 120 bp, Artificial Sequence
  ENSG00000187775_87 (sequence is synthesized)
aaacaaatacaggagtgaactgaaagccatccgcctgggacagaagagctacctggatgtcatcgagcaggccatctcggaaggggacaccttgctcattgagaacatcggcgaaaccgt

SEQ ID NO: 687418 - DNA, 120 bp, Artificial Sequence
  ENSG00000187775_88 (sequence is synthesized)
ggaccccgtgctggaccctctactgggcaggaacacgattaaaaagggaaagtacattaagatcggtgacaaggaggtggagtaccaccccaagttccgcctgatcctacacaccaagta

SEQ ID NO: 687419 - DNA, 120 bp, Artificial Sequence
  ENSG00000187775_89 (sequence is synthesized)
cttcaacccacactacaagccagagatgcaggctcagtgcaccctcatcaacttcctggtcaccagggatggactcgaggaccaactcttggccgctgtggtggccaaagagcgcccaga

SEQ ID NO: 687420 - DNA, 120 bp, Artificial Sequence
  ENSG00000187775_90 (sequence is synthesized)
tctggaacagctgaaggcaaacctcaccaagtctcaaaacgaatttaagattgttctgaaagagctggaagattcgctcctggcccgtctgtcggctgcgtcggggaactttctgggaga

SEQ ID NO: 687421 - DNA, 120 bp, Artificial Sequence
  ENSG00000187775_91 (sequence is synthesized)
cacggccttggtggagaatctggagaccaccaagcacacagccagcgagatcgaggagaaggtggtggaggcaaaaatcacagaagttaaaatcaacgaagcgagagagaactaccgccc

SEQ ID NO: 687422 - DNA, 120 bp, Artificial Sequence
  ENSG00000187775_92 (sequence is synthesized)
ggctgcggagagggcatctctgctctacttcatactgaacgatctcaacaaaatcaaccccgtctaccagttctccctcaaggccttcaacgtggtgtttgagaaagccatccagaggac

SEQ ID NO: 687423 - DNA, 120 bp, Artificial Sequence
  ENSG00000187775_93 (sequence is synthesized)
cacccctgccaacgaggtgaagcagcgggtgatcaacctgacggacgagatcacctactccgtctacatgtacacggcccggggactcttcgagagggacaaactcattttcctggcaca

SEQ ID NO: 687424 - DNA, 120 bp, Artificial Sequence
  ENSG00000187775_94 (sequence is synthesized)
agttacgtttcaggtcctgtccatgaagaaggagctgaacccagtggagctggatttcctcctgcggttcccttttaaggccggagtggtctcaccagtggacttcctccagcatcaagg

SEQ ID NO: 687425 - DNA, 120 bp, Artificial Sequence
  ENSG00000187775_95 (sequence is synthesized)
ctggggcgggatcaaggccctctcggagatggatgagttcaaaaatctggacagtgacatcgaaggatctgccaagcgctggaaaaagctggtggagtcggaagcccccgagaaggagat

SEQ ID NO: 687426 - DNA, 120 bp, Artificial Sequence
  ENSG00000187775_96 (sequence is synthesized)
cttccccaaggagtggaagaacaagacggccctgcagaagctgtgcatggtgcgctgcctgcggccagatcgcatgacctacgctatcaagaacttcgtggaggaaaagatgggcagcaa

SEQ ID NO: 687427 - DNA, 120 bp, Artificial Sequence
  ENSG00000187775_97 (sequence is synthesized)
gttcgtggaaggccggagtgttgagttttctaagtcctacgaggagagcagcccctccacgtcaatcttcttcatcctctccccgggggttgaccccttgaaagacgtggaagccctggg

SEQ ID NO: 687428 - DNA, 120 bp, Artificial Sequence
  ENSG00000187775_98 (sequence is synthesized)
aaaaaaactagggtttaccatagacaatggaaaactccataatgtgtccctggggcagggacaagaggtggtggctgagaacgccctggacgtggctgcagagaaaggacactgggtcat

SEQ ID NO: 687429 - DNA, 120 bp, Artificial Sequence
  ENSG00000187775_99 (sequence is synthesized)
tctgcagaatatccacctggtggcccggtggctgggaacactggacaagaagctggagcactacagcacgggcagccatgaggactaccgggtgttcatcagcgcggagcctgcccccag

SEQ ID NO: 687430 - DNA, 120 bp, Artificial Sequence
  ENSG00000187775_100 (sequence is synthesized)
ccccgagacccacatcatcccccagggcattctggagaacgccatcaagatcaccaacgagccccccacgggcatgcacgccaacttgcacaaggccctggacctgttcacccaggacac

SEQ ID NO: 687431 - DNA, 120 bp, Artificial Sequence
  ENSG00000187775_101 (sequence is synthesized)
cctggagatgtgcaccaaggagatggagttcaagtgcatgctcttcgccctgtgctacttccacgctgtggtggcagagaggcgcaagttcggcgcccagggctggaaccggtcgtaccc

SEQ ID NO: 687432 - DNA, 120 bp, Artificial Sequence
  ENSG00000187775_102 (sequence is synthesized)
cttcaacaacggggacctcaccatctccatcaacgtgctctacaactacctggaggccaaccccaaggtgccctgggacgatctccgctacctttttggtgaaatcatgtatggcggcca

SEQ ID NO: 687433 - DNA, 120 bp, Artificial Sequence
  ENSG00000187775_103 (sequence is synthesized)
catcacagatgactgggaccgtcggctgtgcaggacctacctggctgaatacatccggacggagatgctggagggagacgtcctgctggcccccggctttcagatcccccccaacctgga

SEQ ID NO: 687434 - DNA, 120 bp, Artificial Sequence
  ENSG00000187775_104 (sequence is synthesized)
ctacaagggttaccacgaatacatcgatgagaacctgccccctgagagtccctatctgtatggcctgcaccccaacgcagagattggctttctgacggtcacctcagagaagctgttccg

SEQ ID NO: 687435 - DNA, 120 bp, Artificial Sequence
  ENSG00000187775_105 (sequence is synthesized)
cactgtcctggaaatgcagccaaaagagacggactcgggggcaggcacgggagtgtcccgcgaggagaaggtgaaggccgtgctggacgacatcctggagaagattccggagactttcaa

SEQ ID NO: 687436 - DNA, 120 bp, Artificial Sequence
  ENSG00000187775_106 (sequence is synthesized)
catggctgagatcatggcaaaggcagcggaaaagaccccctacgtggtagtcgcctttcaagaatgtgaaagaatgaacatcctgaccaacgaaatgcgccgttcgctcaaggagctgaa

SEQ ID NO: 687437 - DNA, 120 bp, Artificial Sequence
  ENSG00000187775_107 (sequence is synthesized)
cctggggctgaagggagaactgaccatcacgaccgacgtggaagatctgtccacggctctcttctatgacaccgtgcctgatacgtgggtggcccgggcctacccctccatgatgggcct

SEQ ID NO: 687438 - DNA, 120 bp, Artificial Sequence
  ENSG00000187775_108 (sequence is synthesized)
ggcggcctggtacgcagacctgctgctccgcatcagggaactcgaggcctggacgacagactttgccctgcccaccaccgtgtggctggccggcttcttcaacccccagtcgttcctcac

SEQ ID NO: 687439 - DNA, 120 bp, Artificial Sequence
  ENSG00000187775_109 (sequence is synthesized)
ggccatcatgcagtccatggccaggaagaacgagtggcccctggacaagatgtgtctgtctgtcgaggtgaccaagaaaaaccgagaggacatgaccgctcctccgcgagagggctccta

SEQ ID NO: 687440 - DNA, 120 bp, Artificial Sequence
  ENSG00000187775_110 (sequence is synthesized)
cgtgtacggactcttcatggaaggggctcgctgggacacccagactggagtcatcgctgaagcgcggctgaaagagctgaccccggccatgcctgtcatcttcatcaaggccattcctgt

SEQ ID NO: 687441 - DNA, 120 bp, Artificial Sequence
  ENSG00000187775_111 (sequence is synthesized)
ggaccgcatggagaccaagaacatctatgagtgtcccgtgtacaaaacacgcatccgcggccccacctatgtctggacctttaacttgaagaccaaagagaaggcagcgaagtggatcct

SEQ ID NO: 687442 - DNA, 120 bp, Artificial Sequence
  ENSG00000187775_112 (sequence is synthesized)
ggcagccgtggcgctgctcctacaggtttagctcgctcctgcctcacagcccacactccctggggctggaccacaactcagcccttcacctgtgcacctgtgacttattctttacaggaa

SEQ ID NO: 687443 - DNA, 120 bp, Artificial Sequence
  ENSG00000187775_113 (sequence is synthesized)
ctggtggtggtttttcgttctcttaaataatcaggtgctttgtaaccaagcacatcggaaccagagggtggaggttggtgtggaagaggtggggcagattaaagccagtggagccactca

SEQ ID NO: 687444 - DNA, 120 bp, Artificial Sequence
  ENSG00000187775_114 (sequence is synthesized)
tcctcaagtctcagagctgaaaatggcagagcagagctcgcctccctccctccagcagcccgggatcgtgccccggcaatggctctccatgaaggatcatgacgtctgcccactgcagag

SEQ ID NO: 687445 - DNA, 120 bp, Artificial Sequence
  ENSG00000187775_115 (sequence is synthesized)
ggcgagtacctggagcggcttcttctcggaggctgagccccgcaaaaccgtcgtttccacaggccaaataacagccacgcaccacagccccaggcacctctccccacgagtaacagacac

SEQ ID NO: 687446 - DNA, 120 bp, Artificial Sequence
  ENSG00000187775_116 (sequence is synthesized)
cttcagaaatatgtactttgatttctcgcctgaaaattggcagatgctactgagagtctttaaaaaaaaaatgtccttggttagaaatatggaaacaaaagatcatcttgaaaagaagga

SEQ ID NO: 687447 - DNA, 120 bp, Artificial Sequence
  ENSG00000187775_117 (sequence is synthesized)
gaatttacctgtaattccacaacccaagcatgacactgcagggcccttatgcaacctgttactctgtgtgtgtataattgatttatatgtaaaaatatacagactctggatggcgttaaa

SEQ ID NO: 687448 - DNA, 120 bp, Artificial Sequence
  ENSG00000187775_118 (sequence is synthesized)
aacgatctcaacaaaatcaaccccgtctaccagttctccctcaaggtgcgccctgcagctggggctgggtgcctccctcaaggtggggctgcatctgggctccacagccaggcctgttgc

SEQ ID NO: 687449 - DNA, 120 bp, Artificial Sequence
  ENSG00000187775_119 (sequence is synthesized)
ccacacagccatcgggcagtgccagggccaccctcagagggcagacctggtccagcctgcagatggagctggaagagggggagccaggggcccccatcagtcctacacccattctcccca

SEQ ID NO: 687450 - DNA, 120 bp, Artificial Sequence
  ENSG00000187775_120 (sequence is synthesized)
ggagagggtatgagctgctccctcctccctgctcttcccctggtgcctccaggcactcacaacccaatcaaaacaaactggatggcctggcatggtggctcatgcctgtcatctcagcac

SEQ ID NO: 687451 - DNA, 120 bp, Artificial Sequence
  ENSG00000187775_121 (sequence is synthesized)
ctcaaagaaacaaaacaaactggaggccaccacaggtggcagggagtggtggcggggagtggtgaagggctccatctctgcacgcctccatggctctcggtggcggatccccaggccttc

SEQ ID NO: 687452 - DNA, 120 bp, Artificial Sequence
  ENSG00000187775_122 (sequence is synthesized)
ggcgtctccagaggcgcagcacaaagccacactgtgttgacaactcatgacacgcactggggctggtgctctcccaggccccagctcagggctccccacacccatctgtgtgtctcctag

SEQ ID NO: 687453 - DNA, 120 bp, Artificial Sequence
  ENSG00000187775_123 (sequence is synthesized)
gagaagggagaacggagggggaggggaaaccagggccagcgagggctgtgcctgccgagacagcgtgcgtgacctcggggactcggctggggtccaggatccgaaaccttcagattgacc

SEQ ID NO: 687454 - DNA, 120 bp, Artificial Sequence
  ENSG00000187775_124 (sequence is synthesized)
ctcagggaggtgtggactgatgatggtggtgatggtggtaatgataatgatgataataatggtggtgatgtatcgtctttttttttctttttctaggatcttggtgatgaactcttattt

SEQ ID NO: 687455 - DNA, 120 bp, Artificial Sequence
  ENSG00000187775_125 (sequence is synthesized)
agcagtgcaagaggatgcaggcagaggcaggggccagatggtgccgggagccgcttggtgtccttagcctccatgctccagagggctctcagcctttgtgggagcctcttccacgctcag

SEQ ID NO: 687456 - DNA, 120 bp, Artificial Sequence
  ENSG00000187775_126 (sequence is synthesized)
ggcacgggagtgtcccgcgaggagaaggcaggatctttgaaactgctcccaagcgagaggaagggggaggatctagaactgaggagggggtcacagggactggcggcagtacaggggaac

SEQ ID NO: 687457 - DNA, 120 bp, Artificial Sequence
  ENSG00000187778_0 (sequence is synthesized)
aaccggaagtagacgtacctcacggaagccggctttggccctgcggctgctaccgtcgccgcggagaaattgttggatctggcagtctaggaatgaatctcctctcagcctttaagctca

SEQ ID NO: 687458 - DNA, 120 bp, Artificial Sequence
  ENSG00000187778_1 (sequence is synthesized)
cctggtcagaatccttggatgagcctgtgggaccgttcctcctagcccggtggtttggaaccagtggctttgggactgtaagaggatggacaaagattctcaggggctgctagattcatc

SEQ ID NO: 687459 - DNA, 120 bp, Artificial Sequence
  ENSG00000187778_2 (sequence is synthesized)
cctgatggcatcaggcactgccagccgctcagaggatgaggagtcactggcagggcagaagcgagcctcctcccaggccttgggcaccatccctaaacggagaagctcctccaggttcat

SEQ ID NO: 687460 - DNA, 120 bp, Artificial Sequence
  ENSG00000187778_3 (sequence is synthesized)
caagaggaagaagttcgatgatgagctggtggagagcagcctggcaaaatcttctacccgggcaaagggggccagtggggtggaaccagggcgctgttcggggagtgaaccctcctccag

SEQ ID NO: 687461 - DNA, 120 bp, Artificial Sequence
  ENSG00000187778_4 (sequence is synthesized)
tgagaagaagaaggtatccaaagcccccagcactcctgtgccacccagcccagccccagcccctggactcaccaagcgtgtgaagaagagtaaacagccacttcaggtgaccaaggatct

SEQ ID NO: 687462 - DNA, 120 bp, Artificial Sequence
  ENSG00000187778_5 (sequence is synthesized)
gggccgctggaagcctgcagatgacctcctgctcataaatgctgtgttgcagaccaacgacctgacctccgtccacctgggcgtgaaattcagctgccgcttcacccttcgggaggtcca

SEQ ID NO: 687463 - DNA, 120 bp, Artificial Sequence
  ENSG00000187778_6 (sequence is synthesized)
ggagcgttggtacgccctgctctacgatcctgtcatctccaagttggcctgtcaggccatgaggcagctgcacccagaggctattgcagccatccagagcaaggccctgtttagcaaggc

SEQ ID NO: 687464 - DNA, 120 bp, Artificial Sequence
  ENSG00000187778_7 (sequence is synthesized)
tgaggagcagctgctgagcaaagtgggatcgaccagccagcccaccttggagaccttccaggacctgctgcacagacaccctgatgccttctacctggcccgtaccgcgaaggccctgca

SEQ ID NO: 687465 - DNA, 120 bp, Artificial Sequence
  ENSG00000187778_8 (sequence is synthesized)
gaagcagtattacctgctggaggaccagacagtgcagccgctgcccaaaggggaccaagtgctgaacttctctgatgcagaggacctgattgatgacagtaagctcaaggacatgcgaga

SEQ ID NO: 687466 - DNA, 120 bp, Artificial Sequence
  ENSG00000187778_9 (sequence is synthesized)
tgaggtcctggaacatgagctgatggtggctgaccggcgccagaagcgagagattcggcagctggaacaggaactgcataagtggcaggtgctagtggacagcatcacaggcatgagctc

SEQ ID NO: 687467 - DNA, 120 bp, Artificial Sequence
  ENSG00000187778_10 (sequence is synthesized)
tccggacttcgacaaccagacactggcagtgctgcggggccgcatggtgcggtacctgatgcgctcgcgtgagatcaccctgggcagagcaaccaaggataaccagattgatgtggacct

SEQ ID NO: 687468 - DNA, 120 bp, Artificial Sequence
  ENSG00000187778_11 (sequence is synthesized)
gtctctggagggtccggcctggaagatatcccggaaacaaggtgtcatcaagctgaagaacaacggtgatttcttcattgccaatgagggtcgacggcccatctacatcgatggacggcc

SEQ ID NO: 687469 - DNA, 120 bp, Artificial Sequence
  ENSG00000187778_12 (sequence is synthesized)
ggtgctctgtggctccaaatggcgcctcagcaacaactctgtggtggagatcgccagcctgcgattcgtcttccttatcaaccaggacctcattgccctcatcagggctgaggctgccaa

SEQ ID NO: 687470 - DNA, 120 bp, Artificial Sequence
  ENSG00000187778_13 (sequence is synthesized)
gatcacaccacagtgaggagtggtggcaggactcgtgggccctctccggcctgtttcccctgccactccagcccccttgagctgggaactcaggctcctggaaaaacctgggcagtggga

SEQ ID NO: 687471 - DNA, 120 bp, Artificial Sequence
  ENSG00000187778_14 (sequence is synthesized)
ggctcagctgcgggccattgatttgagcctttgagggaggatagggctggcctttgtgaagccagcagaggctgagaacctcaggcttccctagatccagagcccctccccatcttcctc

SEQ ID NO: 687472 - DNA, 120 bp, Artificial Sequence
  ENSG00000187778_15 (sequence is synthesized)
tctctaaaaacaaccctaccccccattgccaccttcactcctgtgtctccagctgattagcctcagactcttcttttattgtttttcttttgtaaataaaaagcaccaggttccaaagta

SEQ ID NO: 687473 - DNA, 120 bp, Artificial Sequence
  ENSG00000187778_16 (sequence is synthesized)
tgcggctgctaccgtcgccgcggagaaattgttggatctggcagtctaggaatgaggtgacttcatcaatgctcctaccccgagttcttgagacagacctggaccgatcccctaccttgg

SEQ ID NO: 687474 - DNA, 120 bp, Artificial Sequence
  ENSG00000187778_17 (sequence is synthesized)
aaatggcgcctcagcaacaactctgtggtggagacaggaagctggggccagagaagccaaattcacactgctagaaagctgacagagcaaggatataaacccagttcctggctgcgtcga

SEQ ID NO: 687475 - DNA, 120 bp, Artificial Sequence
  ENSG00000187778_18 (sequence is synthesized)
aattaaagtgctggtcttcaccaccaaactcccctgcccgcacgacaccaaggggtagtggggtgagacggcctccaggcagtctgccagtttctctaacattgaaggctcagaggtcaa

SEQ ID NO: 687476 - DNA, 120 bp, Artificial Sequence
  ENSG00000187778_19 (sequence is synthesized)
ccaagcatctgctgattccactctgtgcctggcacgtgtgtctttcggtcctggctaggccttgccacctccccctgggccagcaccacccatgtacctgtcggcagagccacagttgac

SEQ ID NO: 687477 - DNA, 120 bp, Artificial Sequence
  ENSG00000187778_20 (sequence is synthesized)
tgacttgctgttgagctgctgctctttagcacggctgcattttgatggcagagggagcagttatgcccagagcccagcgtgtcggcatcaccagtctgacctgagcaccatgtgctgcac

SEQ ID NO: 687478 - DNA, 120 bp, Artificial Sequence
  ENSG00000187778_21 (sequence is synthesized)
actgcccagcgtggaaggtctgggccaggtctgagcccagatgggatctggatggccaaggaactctaccttaaaacctcaagtgtcaaggaggcaggggaggggccaagagggctggca

SEQ ID NO: 687479 - DNA, 120 bp, Artificial Sequence
  ENSG00000187778_22 (sequence is synthesized)
ccgtggggtgagaatgggcttgcgagtttacccccacctccccagccaccagcctgtgggtctcaaaccaaggctacttggtgctctgctttgagttgcagagaatctcctctcagcctt

SEQ ID NO: 687480 - DNA, 120 bp, Artificial Sequence
  ENSG00000187778_23 (sequence is synthesized)
cttgcgagtttacccccacctccccagccaccagcctgtgggtctcaaaccaaggctacttggtgctctgctttgagttgcagaggtgacttcatcaatgctcctaccccgagttcttga

SEQ ID NO: 687481 - DNA, 120 bp, Artificial Sequence
  ENSG00000187778_24 (sequence is synthesized)
ctctggagggtccggcctggaagatatcccggaaacaaggtatcccccaccccctgccccagcaggaagcagtgtgaggtcgtccctcccagcctctcgctgtcctttctagccctgggc

SEQ ID NO: 687482 - DNA, 120 bp, Artificial Sequence
  ENSG00000187778_25 (sequence is synthesized)
ttggtgtccatggggaccctcgtggaccacctgaggcagggattccttggtgtctgcaggaagcagagctggtccatggaagctcctggctctctctggcctttccccatcccatcaatc

SEQ ID NO: 687483 - DNA, 120 bp, Artificial Sequence
  ENSG00000187783_0 (sequence is synthesized)
gagccctattcacacctcggccaggctgcggtggccaggactggtttgggaaggcagggccccggtgtgcagccacagccagcagcctcctacctacacaagggtgttcgggagcatctc

SEQ ID NO: 687484 - DNA, 120 bp, Artificial Sequence
  ENSG00000187783_1 (sequence is synthesized)
agggccgaagactttgctgcctgccctgccaggactttgtcctcacccctggcaccatgcagctccaggtgttctggactgggctggaatacacctgccggctcctgggcatcaccactg

SEQ ID NO: 687485 - DNA, 120 bp, Artificial Sequence
  ENSG00000187783_2 (sequence is synthesized)
ctgcagtgttgatcggcgtgggcactgagaccttcctccagggccagttcaaaagcctggctttctatctgctgtttacaggagccgctgtctccatatgtgaaggggcctactttgtgg

SEQ ID NO: 687486 - DNA, 120 bp, Artificial Sequence
  ENSG00000187783_3 (sequence is synthesized)
ctcagctgctggccatctgcttccagtgtcaaccagggtccctggcagacagagtaagggagaaagcccactggctgggctgcttccagaagttcctggcctacctgctgctgtcggtgg

SEQ ID NO: 687487 - DNA, 120 bp, Artificial Sequence
  ENSG00000187783_4 (sequence is synthesized)
cctgcttcctccacccggtcctggtctggcacgtgaccatcccaggctccatgctcatcatcaccggcctggcctacttccttctgagcaagcggaagaagaggaaagctgcccccgagg

SEQ ID NO: 687488 - DNA, 120 bp, Artificial Sequence
  ENSG00000187783_5 (sequence is synthesized)
tgctggcctccccagagcagtacacagacccctctagcagcgctgtgagcaccaccggctctggggacacagagcaaacctacactttccatggggccctcaaggaggggcccagctccc

SEQ ID NO: 687489 - DNA, 120 bp, Artificial Sequence
  ENSG00000187783_6 (sequence is synthesized)
ttttcatccacatgaagagtatcctgaaggggactaagaagcccagtgccctccagccccccaacaccctgatggagctgagcctggagccagccgactccctggccaagaagaagcagg

SEQ ID NO: 687490 - DNA, 120 bp, Artificial Sequence
  ENSG00000187783_7 (sequence is synthesized)
tgcactttgaagacaacttggtccgcatagtcccctccctcgccgaaggtctggatgatggggacagtgagccagaggagaccacctctgacacgacacccatcattccccctccccagg

SEQ ID NO: 687491 - DNA, 120 bp, Artificial Sequence
  ENSG00000187783_8 (sequence is synthesized)
ccccactcttcctgtcatctcttacagccaccggcctgttctgagcgcttgctccagcctggaggacgctcagtgaggggtctacctagctcaatggccctccctggagtttcagggtct

SEQ ID NO: 687492 - DNA, 120 bp, Artificial Sequence
  ENSG00000187783_9 (sequence is synthesized)
tctctggtcagcttttcaaggggtaaccagacacccccacactggctgggcccctgaggccatcaggaggtgtgactggccagcatttctggagaggcctcgagggaggcacaaacaagg

SEQ ID NO: 687493 - DNA, 120 bp, Artificial Sequence
  ENSG00000187783_10 (sequence is synthesized)
ctcacgccacctcaagccagcacaagctccttcctcctggccacaggtggggaaacccttatgcttccccaacaagaccatcactgccactgcgcacgaggctgcaggtgccattgactc

SEQ ID NO: 687494 - DNA, 120 bp, Artificial Sequence
  ENSG00000187783_11 (sequence is synthesized)
agcccagaagggacagaggatgtctgcccagcaaaagcctctgggcttttcttactcccaacccagggcacaacactcagtgaggaacctatggtccacccatctctgcaggcccaggga

SEQ ID NO: 687495 - DNA, 120 bp, Artificial Sequence
  ENSG00000187783_12 (sequence is synthesized)
agtgtcagtaacttaagcatctctaaggcagagaaggtggctgtgggtcttgaccaaccaagactgctcagggtcgggaggggaggctgcaggcctctggtgggagcagccgggccgtgg

SEQ ID NO: 687496 - DNA, 120 bp, Artificial Sequence
  ENSG00000187783_13 (sequence is synthesized)
gccacattctctgcatgctctagggctggggctgagctgctcaggaaaacaatgccgctctgtgctcactgtgggaaagccaggccagatgagcaaagctcattccagaaacatggctgg

SEQ ID NO: 687497 - DNA, 120 bp, Artificial Sequence
  ENSG00000187783_14 (sequence is synthesized)
ggacttccagcctccttaccacatggcctttccaagattccaggttgatgatgcaaactgaacgcagtgaatgccagggcccagaaggcaatgtctgctgtgggcaggaccacagaggct

SEQ ID NO: 687498 - DNA, 120 bp, Artificial Sequence
  ENSG00000187783_15 (sequence is synthesized)
gcccaggggtggcacagcacagagaagtgtcagtgccgtgtttaggcacttggtagcagaataggtgataaatataaatgtcttcaaaatgaaaggaagtgaggggggaagaagaggagg

SEQ ID NO: 687499 - DNA, 120 bp, Artificial Sequence
  ENSG00000187783_16 (sequence is synthesized)
gaaaatgggaggataggaggaagtgggcaggcaggcaagttctctgccatggggccacggaagtgacagttaacccagaaggaacaaagacatctgaatcagatattcctttgtaaatct

SEQ ID NO: 687500 - DNA, 120 bp, Artificial Sequence
  ENSG00000187783_17 (sequence is synthesized)
gtaaaggatttgcaatataggctttacttctaaaaattgttgtcgggtccatgaggctgttgccaggaagagcacacacaccattcttcatggcaactgcagtgagggagcagtcaggag

SEQ ID NO: 687501 - DNA, 120 bp, Artificial Sequence
  ENSG00000187783_18 (sequence is synthesized)
gaagagtcctgtggcttctcagtccctgtggaggctaacgcaaagctctgtagaacaagccttagagtgcatgctctatggtctaatgagaaacttgtgtttgtgcttgcacacgtttca

SEQ ID NO: 687502 - DNA, 120 bp, Artificial Sequence
  ENSG00000187783_19 (sequence is synthesized)
atgttccctacaggatattttacaaaggtatgaaaataatggccaaccagaagctagtatcagtttggggcctaaatgcagcaggtgttcctgataagcagataagcagagctcttcctg

SEQ ID NO: 687503 - DNA, 120 bp, Artificial Sequence
  ENSG00000187783_20 (sequence is synthesized)
cagtagcccaggtctcaccaaatgacaaatggctaatcaagacactcctgcaagcccttgatggtgagagctgcagagctgtttcttcagctgccatcaaggcaggacctcaggacctga

SEQ ID NO: 687504 - DNA, 120 bp, Artificial Sequence
  ENSG00000187783_21 (sequence is synthesized)
ctgtctacagtcagggaatagtgaacaatatgggatatgggtataggtaggtggtagacaaggatcgtgccccatggctgatgggccgggtgtctcaggcaggccccctgtgcacagaaa

SEQ ID NO: 687505 - DNA, 120 bp, Artificial Sequence
  ENSG00000187783_22 (sequence is synthesized)
gagcctaagtgcagagaagccaggcatctttcccctgtcaactgtggaaggggaatgtgatggccacagacaccctcatggcacagacatggccagcctctgacgttcctctgcatcaga

SEQ ID NO: 687506 - DNA, 120 bp, Artificial Sequence
  ENSG00000187783_23 (sequence is synthesized)
gtagttctgtcctcgaagccccagtcagcagagctggatgaccagatcgcaagaagcaaaccagaaagtgtgatggcagagatgtcagatcccgtttaataaacacttcagtaaacccaa

SEQ ID NO: 687507 - DNA, 120 bp, Artificial Sequence
  ENSG00000187783_24 (sequence is synthesized)
acagcccgtggtgaatgttgtctgggggaatccaggtgagtccattggctgtagatgtgatgtcaggaggccacgtgtgagaagacagccctcaggaaagcaaaggaagacagaggcgcc

SEQ ID NO: 687508 - DNA, 120 bp, Artificial Sequence
  ENSG00000187790_0 (sequence is synthesized)
ccagagttttgtgcgaaggaaaccgatggggatcggaaccgtagcggttgagctgctgctgctacggatatctgacagaagccttcggtggttgtcggcctaatgagcggacggcaaaga

SEQ ID NO: 687509 - DNA, 120 bp, Artificial Sequence
  ENSG00000187790_1 (sequence is synthesized)
acgctttttcagacgtggggctcaagtatctcccgatcatctgggactccgggttgcagctccggaactgagcgacctcagagccctggcagctccaaggcgcctttgccagcagcagcg

SEQ ID NO: 687510 - DNA, 120 bp, Artificial Sequence
  ENSG00000187790_2 (sequence is synthesized)
gaggctcagctggagtcggacgatgatgtgttgcttgtcgcggcgtacgaggctgagcggcagttgtgtctagagaatggcgggttctgcacctccgcgggcgccctgtggatttaccct

SEQ ID NO: 687511 - DNA, 120 bp, Artificial Sequence
  ENSG00000187790_3 (sequence is synthesized)
accaattgcccagtgcgggactaccagctgcacatttcccgggctgctctgttttgcaatacgctggtgtgtctgcctaccggactgggaaagacctttattgccgccgtggtcatgtac

SEQ ID NO: 687512 - DNA, 120 bp, Artificial Sequence
  ENSG00000187790_4 (sequence is synthesized)
aatttctaccgctggttcccttcaggaaaggtggtcttcatggccccaacgaaacccttggtgacacagcagatcgaggcttgctaccaggtgatgggtatcccgcaatcccacatggcc

SEQ ID NO: 687513 - DNA, 120 bp, Artificial Sequence
  ENSG00000187790_5 (sequence is synthesized)
gaaatgacagggtctacacaagcttccaccaggaaggaaatatggtgcagtaagagagtgctttttcttacacctcaggtcatggtaaatgacctttctagaggagcttgtcccgctgct

SEQ ID NO: 687514 - DNA, 120 bp, Artificial Sequence
  ENSG00000187790_6 (sequence is synthesized)
gaaataaagtgtttagttattgatgaagctcataaagctctcggaaactatgcttattgccaggttgtaagagaactagtcaaatatacaaatcactttagaatcttggctctaagtgcc

SEQ ID NO: 687515 - DNA, 120 bp, Artificial Sequence
  ENSG00000187790_7 (sequence is synthesized)
acaccaggtagtgatataaaggctgtgcaacaagttattactaacctgctaattgggcagatagagcttcgttctgaagattctccagatattttgacatattctcatgaaagaaaagtt

SEQ ID NO: 687516 - DNA, 120 bp, Artificial Sequence
  ENSG00000187790_8 (sequence is synthesized)
gaaaagcttattgttccgcttggtgaagaacttgcagccatccaaaagacctatatccagattttggaatcatttgctcgttctttgattcagaggaatgttttgatgagaagggatatc

SEQ ID NO: 687517 - DNA, 120 bp, Artificial Sequence
  ENSG00000187790_9 (sequence is synthesized)
ccaaatctaacaaaatatcagataattctggcaagagatcagtttaggaaaaacccatctccgaatattgtgggaatacaacaaggcataatcgagggagagtttgctatttgtattagt

SEQ ID NO: 687518 - DNA, 120 bp, Artificial Sequence
  ENSG00000187790_10 (sequence is synthesized)
ttatatcatggttatgaattattgcagcaaatgggaatgagatcattatatttcttcctttgtggaattatggatggaactaaagggatgacacggtcaaaaaatgaacttggccgaaat

SEQ ID NO: 687519 - DNA, 120 bp, Artificial Sequence
  ENSG00000187790_11 (sequence is synthesized)
gaagacttcatgaaactctataatcatctagagtgtatgtttgcacgtacacgtagtacttcagcaaatggtatttctgctatccaacaaggagataaaaataaaaaatttgtttatagt

SEQ ID NO: 687520 - DNA, 120 bp, Artificial Sequence
  ENSG00000187790_12 (sequence is synthesized)
catccaaagttaaagaaattagaagaagttgtaattgaacacttcaagtcatggaatgctgaaaacactactgaaaagaaacgtgatgagacccgagttatgatcttctcttcatttcga

SEQ ID NO: 687521 - DNA, 120 bp, Artificial Sequence
  ENSG00000187790_13 (sequence is synthesized)
gatagtgttcaagaaattgcagaaatgctttcacagcatcagccaattattagagtaatgacttttgtcggccatgcctcagggaaaagcacgaagggttttacccagaaggagcaactg

SEQ ID NO: 687522 - DNA, 120 bp, Artificial Sequence
  ENSG00000187790_14 (sequence is synthesized)
gaggtagtgaaacagtttcgtgacggtggttacaacacgctggtttctacctgtgtgggtgaagaaggtttggatataggagaagttgatcttataatatgttttgattcccagaagagc

SEQ ID NO: 687523 - DNA, 120 bp, Artificial Sequence
  ENSG00000187790_15 (sequence is synthesized)
ccaattcgtcttgtacaacgaatgggtagaactggccgtaaacgtcaaggcaggatagttattatcctttctgaaggacgagaggaacgtatttataatcagagtcagtccaacaaaaga

SEQ ID NO: 687524 - DNA, 120 bp, Artificial Sequence
  ENSG00000187790_16 (sequence is synthesized)
agtatatataaagctatttcaagtaacaggcaggtccttcatttttaccaaagaagtccacgaatggttcctgatggaatcaacccaaaattacacaaaatgttcatcacacatggtgtc

SEQ ID NO: 687525 - DNA, 120 bp, Artificial Sequence
  ENSG00000187790_17 (sequence is synthesized)
tatgaaccagagaagccttctcggaacttgcagcgaaagtcatctatcttttcctatagggatggaatgaggcaaagtagcctaaagaaagattggttcttatcagaagaagaatttaaa

SEQ ID NO: 687526 - DNA, 120 bp, Artificial Sequence
  ENSG00000187790_18 (sequence is synthesized)
ttatggaacagactttatagattaagggacagtgatgaaattaaagagataacattgcctcaagttcagttttcttctttacaaaatgaggaaaacaaaccagctcaagaatcaaccact

SEQ ID NO: 687527 - DNA, 120 bp, Artificial Sequence
  ENSG00000187790_19 (sequence is synthesized)
ggaattcatcaactctctctctctgaatggagactgtggcaagatcatcctttgcctacacatcaagttgatcactcagatcgatgccgccattttataggccttatgcaaatgatagag

SEQ ID NO: 687528 - DNA, 120 bp, Artificial Sequence
  ENSG00000187790_20 (sequence is synthesized)
ggaatgagacacgaagagggagaatgcagctatgaattggaagttgaatcttatttacaaatggaagatgttacctcaacatttattgctcccaggaatgaatctaataatcttgccagt

SEQ ID NO: 687529 - DNA, 120 bp, Artificial Sequence
  ENSG00000187790_21 (sequence is synthesized)
gacacctttatcactcacaagaaatcgtcatttataaagaacataaatcaaggcagttcatcctcagtgatagaatctgatgaagaatgtgctgaaattgttaaacaaactcatatcaaa

SEQ ID NO: 687530 - DNA, 120 bp, Artificial Sequence
  ENSG00000187790_22 (sequence is synthesized)
cctactaaaattgtttctttaaagaaaaaagtgtctaaagaaataaaaaaagatcagcttaaaaaagaaaataatcacggtattatagattctgtagataatgacagaaattccactgtt

SEQ ID NO: 687531 - DNA, 120 bp, Artificial Sequence
  ENSG00000187790_23 (sequence is synthesized)
gaaaatatttttcaagaagacctaccaaatgataaaaggacatcagatacagatgaaattgctgccacatgtactattaatgaaaatgttattaaagaaccgtgtgtgttattaacagag

SEQ ID NO: 687532 - DNA, 120 bp, Artificial Sequence
  ENSG00000187790_24 (sequence is synthesized)
tgtcagtttacaaataaatccactagttcacttgctggaaatgttttagattctggttataacagtttcaatgatgaaaaatctgtttcatctaacttatttcttccattcgaagaagag

SEQ ID NO: 687533 - DNA, 120 bp, Artificial Sequence
  ENSG00000187790_25 (sequence is synthesized)
ctttatattgttagaacagatgaccaattttataattgtcactcattgacaaaagaggtactagctaatgtagagagatttttatcttattctcctccgcctctcagtggactctcagac

SEQ ID NO: 687534 - DNA, 120 bp, Artificial Sequence
  ENSG00000187790_26 (sequence is synthesized)
ttggaatatgaaattgctaagggtactgcacttgagaatttgcttttcttaccctgtgcagagcatttacgaagtgataaatgcacctgtttgctgtcacattcagctgtgaattctcaa

SEQ ID NO: 687535 - DNA, 120 bp, Artificial Sequence
  ENSG00000187790_27 (sequence is synthesized)
cagaatttagaattgaattcacttaaatgtataaattatccatctgaaaaaagttgcctttatgatatacctaatgataatatttctgatgagccaagtctctgtgactgtgatgtacat

SEQ ID NO: 687536 - DNA, 120 bp, Artificial Sequence
  ENSG00000187790_28 (sequence is synthesized)
aaacataatcaaaatgaaaatttagtacctaacaatcgtgttcaaatacacagaagccctgcacagaatttagttggagagaacaatcatgatgttgataacagtgacctcccagtattg

SEQ ID NO: 687537 - DNA, 120 bp, Artificial Sequence
  ENSG00000187790_29 (sequence is synthesized)
ttcgacgatgtgagtctttcacccttgaacagtaaaagcgaatctttacctgtgtcagacaaaactgctattagtgaaacgcctctggtctctcagttcttaatttctgatgaacttttg

SEQ ID NO: 687538 - DNA, 120 bp, Artificial Sequence
  ENSG00000187790_30 (sequence is synthesized)
ttggacaataattctgaactccaagatcaaatcacccgtgatgctaatagttttaaatctcgtgatcagagaggtgtacaggaagaaaaagtgaagaatcatgaggatatttttgattgc

SEQ ID NO: 687539 - DNA, 120 bp, Artificial Sequence
  ENSG00000187790_31 (sequence is synthesized)
tctagggatttattttctgttacctttgatttaggattctgtagtccagattctgatgatgaaatattggaacatacatcagatagcaatagacctctagatgatctatatggaaggtat

SEQ ID NO: 687540 - DNA, 120 bp, Artificial Sequence
  ENSG00000187790_32 (sequence is synthesized)
ttggaaattaaggagataagtgatgcaaattatgtttcgaatcaagcactaataccaagagatcatagtaaaaattttactagtggaactgttattatcccatcaaatgaagatatgcag

SEQ ID NO: 687541 - DNA, 120 bp, Artificial Sequence
  ENSG00000187790_33 (sequence is synthesized)
aatccaaattatgtacatttgccactgagtgcagcaaaaaatgaagaattgttatctcctggttattctcagttttctttaccagtgcaaaaaaaagttatgagtacaccactctctaaa

SEQ ID NO: 687542 - DNA, 120 bp, Artificial Sequence
  ENSG00000187790_34 (sequence is synthesized)
tcaaacacattgaactcattttctaagataagaaaggaaatacttaagacaccagattctagtaaggaaaaagtaaacctacaaagattcaaagaagcattgaattcaacttttgattat

SEQ ID NO: 687543 - DNA, 120 bp, Artificial Sequence
  ENSG00000187790_35 (sequence is synthesized)
tcagaattttctctagaaaagtctaaaagcagtggtccaatgtatctgcataaatcctgtcattctgttgaagatggacaattattaacaagtaacgaaagtgaagatgacgagattttc

SEQ ID NO: 687544 - DNA, 120 bp, Artificial Sequence
  ENSG00000187790_36 (sequence is synthesized)
cgaagaaaagttaaaagagcaaaaggaaatgttttaaactctcctgaggatcagaaaaatagtgaagttgattctccacttcatgctgtcaaaaagcgcagatttcctataaacagatca

SEQ ID NO: 687545 - DNA, 120 bp, Artificial Sequence
  ENSG00000187790_37 (sequence is synthesized)
gaattatcatctagtgatgagagtgagaattttcccaaaccatgttcacaattagaagacttcaaggtttgtaacgggaatgccagaagaggcatcaaagtcccaaagagacagagtcac

SEQ ID NO: 687546 - DNA, 120 bp, Artificial Sequence
  ENSG00000187790_38 (sequence is synthesized)
ttaaagcatgtagctaggaagtttttagatgatgaagcagaactttctgaagaagatgcagaatatgtttcatcagatgaaaatgatgagtcagaaaatgaacaagattcctcattactt

SEQ ID NO: 687547 - DNA, 120 bp, Artificial Sequence
  ENSG00000187790_39 (sequence is synthesized)
gactttttaaatgatgaaactcaactttcacaggctataaatgattctgaaatgagagctatttacatgaaatctttgcgtagtccaatgatgaacaataagtacaaaatgattcataag

SEQ ID NO: 687548 - DNA, 120 bp, Artificial Sequence
  ENSG00000187790_40 (sequence is synthesized)
acacataaaaacataaacattttctcgcagattcctgaacaagatgaaacctatttagaggatagtttttgtgttgatgaagaggagtcttgcaaaggccaatcaagtgaagaagaagtt

SEQ ID NO: 687549 - DNA, 120 bp, Artificial Sequence
  ENSG00000187790_41 (sequence is synthesized)
tgtgttgattttaacttaataactgatgattgctttgcaaatagtaaaaagtataaaactcgacgtgcagtaatgctaaaagaaatgatggaacaaaattgtgcacattcaaaaaagaaa

SEQ ID NO: 687550 - DNA, 120 bp, Artificial Sequence
  ENSG00000187790_42 (sequence is synthesized)
ttatccagaattattttaccagatgattcaagtgaggaggagaacaatgtaaatgataaaagagaatctaatattgcggttaacccaagcactgttaagaagaacaaacaacaggaccat

SEQ ID NO: 687551 - DNA, 120 bp, Artificial Sequence
  ENSG00000187790_43 (sequence is synthesized)
tgtttaaattcagtgccttctggatcttctgcgcagtccaaggtgcgttctactccaagagttaatccattagcaaagcagagcaaacagacatcgctgaatttaaaggatacaatttcc

SEQ ID NO: 687552 - DNA, 120 bp, Artificial Sequence
  ENSG00000187790_44 (sequence is synthesized)
gaagtctcagacttcaaacctcagaatcataatgaagtccagtctaccacaccacccttcactactgttgattcacagaaagactgtagaaaatttccagttccacagaaggatggtagt

SEQ ID NO: 687553 - DNA, 120 bp, Artificial Sequence
  ENSG00000187790_45 (sequence is synthesized)
gctttggaggattctagcacttcaggggcatcctgttccaagtcaagaccacatttagctgggacacatacttctcttagacttccgcaggaaggaaaaggaacctgtattcttgtaggt

SEQ ID NO: 687554 - DNA, 120 bp, Artificial Sequence
  ENSG00000187790_46 (sequence is synthesized)
ggtcatgaaatcacttctggattagaagtaatttcttccctaagagcaattcatgggttgcaagtagaagtttgtcctcttaatggctgtgattacatcgtgagtaatcgcatggtggtg

SEQ ID NO: 687555 - DNA, 120 bp, Artificial Sequence
  ENSG00000187790_47 (sequence is synthesized)
gaaaggaggtctcaatctgagatgttaaatagtgtcaataagaacaagttcattgagcagatccagcacctgcagagtatgtttgaaagaatatgtgtgattgtggaaaaggacagagaa

SEQ ID NO: 687556 - DNA, 120 bp, Artificial Sequence
  ENSG00000187790_48 (sequence is synthesized)
aaaacaggagacacatcaaggatgtttaggagaacaaagagctatgacagcctgctgactaccttaattggcgctggaatccgaattcttttcagttcctgccaagaagaaaccgcagat

SEQ ID NO: 687557 - DNA, 120 bp, Artificial Sequence
  ENSG00000187790_49 (sequence is synthesized)
ttgctaaaggaactgtctttagtggaacaaagaaagaatgttggtattcatgttccaacagtggtgaatagtaataaaagtgaggcactccagttttatttaagtattcccaatataagt

SEQ ID NO: 687558 - DNA, 120 bp, Artificial Sequence
  ENSG00000187790_50 (sequence is synthesized)
tatataactgcattaaatatgtgtcaccagttttcatctgtgaaaaggatggctaacagctcacttcaagaaatctccatgtatgcacaagtaactcatcagaaggctgaggagatctat

SEQ ID NO: 687559 - DNA, 120 bp, Artificial Sequence
  ENSG00000187790_51 (sequence is synthesized)
agatatattcactatgtatttgacatacaaatgttaccaaatgatcttaaccaagatagactgaaatctgatatataatcaagctgctcaagatggggttttcaaagacctctcacaata

SEQ ID NO: 687560 - DNA, 120 bp, Artificial Sequence
  ENSG00000187790_52 (sequence is synthesized)
atggggttttcaaagacctctcacaatattaaatgcacttcaataatcattgctgttttatgtttatttgtaaataagagaatattttatttaaatattttatattgtatacatttttat

SEQ ID NO: 687561 - DNA, 120 bp, Artificial Sequence
  ENSG00000187790_53 (sequence is synthesized)
aaaaatctgatgttcagtgatcattttgactagattataaaactaatttttcttattaaataaaacaaggtttattaaaagtgttactaaggatagtttaagaaagtaaaagctaagcta

SEQ ID NO: 687562 - DNA, 120 bp, Artificial Sequence
  ENSG00000187790_54 (sequence is synthesized)
gagatatactttggaatgtttcccaaaattaaagttgtactgttgtgataaatagtaaagttgacatgtctatgactacagccaacttgtcgattttccctatgtgtagatagtatactt

SEQ ID NO: 687563 - DNA, 120 bp, Artificial Sequence
  ENSG00000187790_55 (sequence is synthesized)
ttaagtgtactgattctaaatacatgtacttggtaaggtgtgggtgatgggtgggttgtgagataaatgacccagtaactaggaaagtagaaaacttaactgaatgtttatctgaccaaa

SEQ ID NO: 687564 - DNA, 90 bp, Artificial Sequence
  ENSG00000187790_56 (sequence is synthesized)
actcatctcatcttgacttgtaatctgaattataatcccaatatattggggagggacctcctggaacgtgattagctcatgggggcggtt

SEQ ID NO: 687565 - DNA, 120 bp, Artificial Sequence
  ENSG00000187790_57 (sequence is synthesized)
gagggacctcctggaacgtgattagctcatgggggcggttcccccatgctgttctagtgatagttctcagaggatctgatggttttataagcttttcctctgttcactctgcagttctct

SEQ ID NO: 687566 - DNA, 120 bp, Artificial Sequence
  ENSG00000187790_58 (sequence is synthesized)
tgcctactgccatgtggaaaaggaaacgtttgcttcccctccaccatgattgtaagttcccgaggcctccccagccatgcaggactgtgagtcaattaaacatcttttccttataaatta

SEQ ID NO: 687567 - DNA, 120 bp, Artificial Sequence
  ENSG00000187790_59 (sequence is synthesized)
gttgattccagctcaaggcgctcatagttacccctattttctttctcagatatttgagaaacattagttgtagggtttctcattagcagaatgtggcaccagtttgctcaatggtgtaga

SEQ ID NO: 687568 - DNA, 120 bp, Artificial Sequence
  ENSG00000187790_60 (sequence is synthesized)
tgttaaagagaattttggcgaatagttactagtgatggaagttattgacaatattattataaaaagcctttacgtctattatctcagaacagatggtgataaagaatatctgtactttct

SEQ ID NO: 687569 - DNA, 120 bp, Artificial Sequence
  ENSG00000187790_61 (sequence is synthesized)
ctaaccagataattagtgtcagatgtagatcatgagagcctagtcatggttgggacagtgatctaaaatagggtatgaaaggagttttgaaattaataaagattggtagtggatatgcgg

SEQ ID NO: 687570 - DNA, 120 bp, Artificial Sequence
  ENSG00000187790_62 (sequence is synthesized)
tgtctcttcttggcggctaggtaaaataatgacataatgtatgccacatacctaacacagtgccttccagttgagtactccaggaatataaaataagatgaagtagtgggatgtggttgc

SEQ ID NO: 687571 - DNA, 120 bp, Artificial Sequence
  ENSG00000187790_63 (sequence is synthesized)
aaacatcattcatatctttgcactgaatgaagttgactttctgtttccctcttctcctaagggggattttgcctcttctactcaaggtccaggtcattaatattttatgcttaatagttt

SEQ ID NO: 687572 - DNA, 120 bp, Artificial Sequence
  ENSG00000187790_64 (sequence is synthesized)
gaaagcctttgtaggccataggggataaaggtggtggggactcattaaaaaatgtttggctgggataacacttaagatttgaaagagattagagagaagaaggctaaagacagagtatct

SEQ ID NO: 687573 - DNA, 120 bp, Artificial Sequence
  ENSG00000187790_65 (sequence is synthesized)
acacatgcatttttcccctgttcttacttagcaggtcgtatcttgatataatatttcttgtttgaaaaactgaatatatgttctaattaatatattataggcattctctttggaaaggct

SEQ ID NO: 687574 - DNA, 120 bp, Artificial Sequence
  ENSG00000187790_66 (sequence is synthesized)
gtacgagattattcatgtggcaaatggagagacactggtagtatagagtgacagaaactcagtgttggggaaaattaaacataccctaccaacccagagaatgttctccataaagtttag

SEQ ID NO: 687575 - DNA, 120 bp, Artificial Sequence
  ENSG00000187791_0 (sequence is synthesized)
atgttgagccctacctttgttttgtgggatgttggatatcccttatacacctatggatccatctgcattattgcattaattatttggcaagtgaaaaagagctgccaaaaattaagcttg

SEQ ID NO: 687576 - DNA, 120 bp, Artificial Sequence
  ENSG00000187791_1 (sequence is synthesized)
gtacctaacaggagctgttgccggtgtcaccgaagagtccaacaaaagtctggagatagaacatcaagagctaggagaacttcacaggaagaagccgagaagttgtggaagctgctgttt

SEQ ID NO: 687577 - DNA, 120 bp, Artificial Sequence
  ENSG00000187791_2 (sequence is synthesized)
ctcatgaaaagccagggctggcttcctcaggaaggaagtgtgcggcgaatcctgtgtgcagacccctgctgccaaatctgcaatgttatggctctggagattaagcaattgctggcaggt

SEQ ID NO: 687578 - DNA, 120 bp, Artificial Sequence
  ENSG00000187791_3 (sequence is synthesized)
gagaacaaccagatctccctgacttcactggggccatcacagggctcctcttgcctagaggctttgtccacatctagtgtgtcttttaagcatagtcaggatctgggctccccgaaatcc

SEQ ID NO: 687579 - DNA, 120 bp, Artificial Sequence
  ENSG00000187791_4 (sequence is synthesized)
tctttaacccagtcagctgcccggtcagctggtgcagacagcgtccaagattcctgggctgatcactttcagcgaggacagagatctcaagtcccagctgtgtcccaggtcatgggatct

SEQ ID NO: 687580 - DNA, 120 bp, Artificial Sequence
  ENSG00000187791_5 (sequence is synthesized)
ctgtcttcaaactttgagaagcctggaattcctctgagccagcaggagaggacgaaaaacaactccaaatttgtcctggagaaccaagaagctccagaagttggcttggataacaagatg

SEQ ID NO: 687581 - DNA, 120 bp, Artificial Sequence
  ENSG00000187791_6 (sequence is synthesized)
aagctgtttctgcactggattaaccctgaaatgaaagatcgaaggcatgaggaatccattctcctttctaaggctgagacagtgacccaagacaggacaaaaaacattgagaagagtcca

SEQ ID NO: 687582 - DNA, 120 bp, Artificial Sequence
  ENSG00000187791_7 (sequence is synthesized)
actgtcaccaaagatcatgtgtggggagctacaacacagaagacaacagaggaccctgaggctcagcctccttctactgaggaggaaggcctgatcttctgtgatgcccccagtgcctaa

SEQ ID NO: 687583 - DNA, 120 bp, Artificial Sequence
  ENSG00000187791_8 (sequence is synthesized)
ctacaaatgctccaaactctgtcctcaaatgacttgtgccactcaaccaggaaatctatcccaggtctaactcacctcagcagaaggcactgttttatgcaagaatacccatcacaagaa

SEQ ID NO: 687584 - DNA, 120 bp, Artificial Sequence
  ENSG00000187791_9 (sequence is synthesized)
aaaggagttcataggttcctgaacctctgcaatcccctgaaaaaggctttcattgccatttccattaacatgcaggtgaagcagggcattctccaaatatactttgtacctttaagcaaa

SEQ ID NO: 687585 - DNA, 80 bp, Artificial Sequence
  ENSG00000187792_0 (sequence is synthesized)
gcgtcagcagctgctgtggagccaggcagcgtcggccgcgtcggccgcgggttggagcagctcaggtgcggccccgcccc

SEQ ID NO: 687586 - DNA, 120 bp, Artificial Sequence
  ENSG00000187792_1 (sequence is synthesized)
gccccggcccaggtgagtggccccgcgtccgccggtgtgacctgagtccgcctgaccacctgtccctccggtggccctgggtgtgcgtgtccccaatcgcggggaagcctgtaggggcgc

SEQ ID NO: 687587 - DNA, 120 bp, Artificial Sequence
  ENSG00000187792_2 (sequence is synthesized)
cacgtcgccgcctgggcagcgtgtgcgggtccgtggcaactcttgggcccccagccaggaaaccttgactgcactaagagtttgcagggtgcccaggccctagggactctctggaggatg

SEQ ID NO: 687588 - DNA, 120 bp, Artificial Sequence
  ENSG00000187792_3 (sequence is synthesized)
ggatgacagatgcaggaggacccggagaaggccccgacagagattgtgagaacagtaagtgtggcccaaagaagaacatttttaaagaaatacaaccattggggatgatagcagattcac

SEQ ID NO: 687589 - DNA, 120 bp, Artificial Sequence
  ENSG00000187792_4 (sequence is synthesized)
aatggaggttcccccagcaacaaagtttggtgagacctttgcatttgagaacaggttagagtcacaacaagggcttttcccaggggaggacctgggggacccttttcttcaggaaagagg

SEQ ID NO: 687590 - DNA, 120 bp, Artificial Sequence
  ENSG00000187792_5 (sequence is synthesized)
tttggagcaaatggctgtgatctacaaggagatccctcttggtgagcaggacgaagaaaatgatgattacgaggggaatttcagtttgtgctcaagccctgttcagcatcaaagtatccc

SEQ ID NO: 687591 - DNA, 120 bp, Artificial Sequence
  ENSG00000187792_6 (sequence is synthesized)
cccaggaaccagaccccaggatgatgagctcttcggacaaaccttcctccagaaatccgacctcagcatgtgtcagataatccacagtgaagagcccagtccatgcgattgtgcagaaac

SEQ ID NO: 687592 - DNA, 120 bp, Artificial Sequence
  ENSG00000187792_7 (sequence is synthesized)
agacagaggggactcaggacctaacgcacctcacagaaccccacaaccagccaagccctatgcgtgtcgagagtgtgggaaggccttcagccagagctcgcacctgctccgacacctggt

SEQ ID NO: 687593 - DNA, 120 bp, Artificial Sequence
  ENSG00000187792_8 (sequence is synthesized)
gatccacactggggagaagccctatgagtgctgtgagtgcgggaaggccttcagccagagctcccacctgctcaggcaccagatcatccacaccggggagaagccctacgagtgccggga

SEQ ID NO: 687594 - DNA, 120 bp, Artificial Sequence
  ENSG00000187792_9 (sequence is synthesized)
gtgtgggaaggccttccgccagagctcagccctcacgcaacaccaaaagatccacaccggaaagaggccctacgagtgcagggaatgcgggaaagatttcagccggagctccagcctcag

SEQ ID NO: 687595 - DNA, 120 bp, Artificial Sequence
  ENSG00000187792_10 (sequence is synthesized)
aaaacacgagagaattcatacaggagagagaccttatcagtgtaaggaatgtgggaaatccttcaaccagagctcaggcctgagccagcatcggaagatccacaccctaaagaaacctca

SEQ ID NO: 687596 - DNA, 120 bp, Artificial Sequence
  ENSG00000187792_11 (sequence is synthesized)
cgagtgcgatctctgtgggaaagccttttgtcacaggtcacacctcatccgacaccagcggatccacactgggaagaaaccatacaaatgcgatgagtgcgggaaggccttcagccagag

SEQ ID NO: 687597 - DNA, 120 bp, Artificial Sequence
  ENSG00000187792_12 (sequence is synthesized)
ctccaacctcattgagcaccgcaagacccacactggcgagaagccctacaaatgccagaagtgtgggaaagccttcagccagagctcctccctcattgagcaccagcgcatccacaccgg

SEQ ID NO: 687598 - DNA, 120 bp, Artificial Sequence
  ENSG00000187792_13 (sequence is synthesized)
tgagaagccctacgagtgctgtcagtgtggcaaggccttttgccacagctctgcgctgatccagcaccagagaatccacaccggcaagaagccctacacctgcgagtgtggcaaagcctt

SEQ ID NO: 687599 - DNA, 120 bp, Artificial Sequence
  ENSG00000187792_14 (sequence is synthesized)
ccggcaccggtcagccctcattgagcactataaaacccacaccagagagaagccctacgtgtgcaatctgtgcggcaagtccttccgggggagctcgcacctgattcgccatcagaagat

SEQ ID NO: 687600 - DNA, 120 bp, Artificial Sequence
  ENSG00000187792_15 (sequence is synthesized)
tcattctggggagaagctatagaaagaggagcccacacaaagcttgaaagcctgtgccagatggagcctttattccacgtcgcgtggtctccaagaccccacctacctccctgatgctga

SEQ ID NO: 687601 - DNA, 120 bp, Artificial Sequence
  ENSG00000187792_16 (sequence is synthesized)
atggaaaccttcccacctaagcgctcttgaacatcccactagcaggaaggccctgtgtggccctgggccaagcacgccagctctcagcaggttttctgcatggaagggaaggtggggtga

SEQ ID NO: 687602 - DNA, 120 bp, Artificial Sequence
  ENSG00000187792_17 (sequence is synthesized)
tagggagggcagccagaaaagacagctggccttcagtttctccttcttgcatttgactcccaagcctacaggatttcattttgccctgtcttcacatttcccagaatctagaagaataaa

SEQ ID NO: 687603 - DNA, 120 bp, Artificial Sequence
  ENSG00000187792_18 (sequence is synthesized)
tgccaagagggagaaagttgaattaaacccaggaaaatatcagaagaactctttaaaacaggctgcagtctggcacttttagaagacagaaaccacactcacagtccaaagcagtagaag

SEQ ID NO: 687604 - DNA, 120 bp, Artificial Sequence
  ENSG00000187792_19 (sequence is synthesized)
aaaaatgaattcaaaagtagatgtgtcagcagcaaagtagaattttctcactgcgttgggcattggtggggacaaccaaaacaggtctgcagagcaaaggcaggtctggagggtgggtct

SEQ ID NO: 687605 - DNA, 120 bp, Artificial Sequence
  ENSG00000187792_20 (sequence is synthesized)
tgagattggggatgagggtggtgagcccctgggcgtggcctcttaaccctctccttagccctagggcagtttccctcagacagctctgttacaggaggatagagatttgatcctgttggc

SEQ ID NO: 687606 - DNA, 120 bp, Artificial Sequence
  ENSG00000187792_21 (sequence is synthesized)
cagaggatgtttgacacccagccgtgactcagcctggacaccggacatgactgccctccaggaataacccctccctgagacatagtgtccccaagaccacagtgtgccttggacatcagc

SEQ ID NO: 687607 - DNA, 120 bp, Artificial Sequence
  ENSG00000187792_22 (sequence is synthesized)
agggcctgggtctggtctgttctggcaatgatgcagccctcctgccccagtgtcaggggacctgggaagctgggtggcttgttggaggaggctgtgttctaatcagaaggtctgggttca

SEQ ID NO: 687608 - DNA, 120 bp, Artificial Sequence
  ENSG00000187792_23 (sequence is synthesized)
agtcctagttccaccccctcctacctgggtgagcttgaacaagtcctgtaacttccccaggctccattcccccatccaagagttggggtaatgggaactggccacgtgcctctaagggtt

SEQ ID NO: 687609 - DNA, 120 bp, Artificial Sequence
  ENSG00000187792_24 (sequence is synthesized)
ggtgccaggctgtcattcagaacacagccactgtgaaagtgctttggcaactgtgagcagtcatggtgactgaggacagagacccagagtgacccctgccccacccctgtgcatttccac

SEQ ID NO: 687610 - DNA, 120 bp, Artificial Sequence
  ENSG00000187792_25 (sequence is synthesized)
ggactggagagatgttcccgtctggtttctgagcagtgggacctctcattgaacagggctttctctccctccaccccttgcagcctgggctgtgtatgcctgcggatgcagtgtcccaca

SEQ ID NO: 687611 - DNA, 120 bp, Artificial Sequence
  ENSG00000187792_26 (sequence is synthesized)
caaggacacttcctctaggatgccatcctgagcctcctgtagcagcagtgtcattctgcacttccacattctgtctgtcttccccgcctgccaactaggagttcacgtggggcttgttta

SEQ ID NO: 687612 - DNA, 120 bp, Artificial Sequence
  ENSG00000187792_27 (sequence is synthesized)
aacagtaccattgcttgtgtcccacctggaccagttcagtcagccccagtggtggcatgttttaaagctccccaggtgattataacttcctagtgtgcagccaggctgtgggccctgtgc

SEQ ID NO: 687613 - DNA, 120 bp, Artificial Sequence
  ENSG00000187792_28 (sequence is synthesized)
aagtgccgggattacaggcatgagcctccacacctggcccatgctgggtttttgtgcatccctcgacagcttccaatgtcagcctgctggctttggctgagcagagcttgaaggccattc

SEQ ID NO: 687614 - DNA, 120 bp, Artificial Sequence
  ENSG00000187792_29 (sequence is synthesized)
tgctggctttggctgagcagagcttgaaggccattctgtctcagtgccctcactccctgctccccgcacccggagcctcagggatgggctcaggctgatggtcagctgggcgcttggaaa

SEQ ID NO: 687615 - DNA, 120 bp, Artificial Sequence
  ENSG00000187792_30 (sequence is synthesized)
gtgtttggctggggccttggggatctctttagtcctggcttcccttgggctcctcagagctagtggggaaggaggcagtctaggctgttttgaagtttcctaaacatttatggctgggct

SEQ ID NO: 687616 - DNA, 120 bp, Artificial Sequence
  ENSG00000187792_31 (sequence is synthesized)
aacatgaactcatcatggtaacactgggtatttcagctgatcagaagctcagcatggccattatgcctagttttgatgaataaacatgggaaagccataactgttactaagtgggtcttg

SEQ ID NO: 687617 - DNA, 120 bp, Artificial Sequence
  ENSG00000187792_32 (sequence is synthesized)
ataggccagagatttccaaatgacagatatgatgggctggagaggtcatggtgggagttccagccatgcctctgtccagcccctgtctttgctacgtatgtgaaacatttaacatttaac

SEQ ID NO: 687618 - DNA, 120 bp, Artificial Sequence
  ENSG00000187792_33 (sequence is synthesized)
cagcactccattgtccaccagaaccctctgtgtaaccagttggactgactggatggtgccctgggcattgcctgcaagtggcctgtcatttcaggcctgtctctatcaagagtgaagaga

SEQ ID NO: 687619 - DNA, 120 bp, Artificial Sequence
  ENSG00000187792_34 (sequence is synthesized)
gaatgctaggatgcagtggggacagcaggcggcatcaagcaggggtccctgaaagatctacctcctctttacacctgcccctcttccccaccgttatcatctggcaaatgtctgttacct

SEQ ID NO: 687620 - DNA, 120 bp, Artificial Sequence
  ENSG00000187792_35 (sequence is synthesized)
atctttggtttctccctccccatccttcctgcacaccccagccaaattgatttttaaagcatcattttgcacaagtcaccactctccttaaaaccaactttcaggagctttcctgcacgt

SEQ ID NO: 687621 - DNA, 120 bp, Artificial Sequence
  ENSG00000187792_36 (sequence is synthesized)
aaaccctcgtttcagccaacctggtttacccactctgagcaagccgcatggagatcaggccgcccctgcccactccagcatcactcccagctcataattctgtgctgttcttgcattttg

SEQ ID NO: 687622 - DNA, 120 bp, Artificial Sequence
  ENSG00000187792_37 (sequence is synthesized)
aaatgtgcactttctcctcctctccctccctctctctttctaatttttgtgtaacgtggagatgaagatcccccctctctcccaagggttaacagataaacatggtaagaccaggttctt

SEQ ID NO: 687623 - DNA, 87 bp, Artificial Sequence
  ENSG00000187792_38 (sequence is synthesized)
cccaagggttaacagataaacatggtaagaccaggttcttttttggaagtatgaccagagcctcattccctctgttcaaattctttc

SEQ ID NO: 687624 - DNA, 120 bp, Artificial Sequence
  ENSG00000187792_39 (sequence is synthesized)
ccagcttattagatttttttttttaaactctctcattctatttagattctcaaacagtgtaaagttataaaagatcatccctggcaatattttaatcaattatcttttaatttagttgtt

SEQ ID NO: 687625 - DNA, 82 bp, Artificial Sequence
  ENSG00000187792_40 (sequence is synthesized)
ttttctagtgcagtggggcgatctcggcttactgcaagctctacctcccaggttcagaccattctcctgcctcagcctccca

SEQ ID NO: 687626 - DNA, 68 bp, Artificial Sequence
  ENSG00000187792_41 (sequence is synthesized)
atttttttatttcttcttctccttagagtgacagctttgtctgcactccgtaagttttgacgtggtgt

SEQ ID NO: 687627 - DNA, 120 bp, Artificial Sequence
  ENSG00000187792_42 (sequence is synthesized)
tgacagctttgtctgcactccgtaagttttgacgtggtgttttttgttatagtattaagaatttccttttgcccaaatgttattatttaaaaatatttctaagtgggccgggcatggtga

SEQ ID NO: 687628 - DNA, 120 bp, Artificial Sequence
  ENSG00000187792_43 (sequence is synthesized)
gcagtgagccaagattgtgccactacccttcagcctgggtgacagggcaagactccatctcggggaaaacaacaacaacaaaaacaaaaaatagccgggagcggtggctcaagcctgtaa

SEQ ID NO: 687629 - DNA, 65 bp, Artificial Sequence
  ENSG00000187792_44 (sequence is synthesized)
aggctagactctgtctcaaaaaaaatatatataaaaaaaatttctaagtgatgaatgcttagggt

SEQ ID NO: 687630 - DNA, 120 bp, Artificial Sequence
  ENSG00000187792_45 (sequence is synthesized)
tataaaaaaaatttctaagtgatgaatgcttagggtattgctgcttatttcttactgtactgtggtgtcaacatttctaagtgtccataggacttctttgggcctgaatatattatcagt

SEQ ID NO: 687631 - DNA, 120 bp, Artificial Sequence
  ENSG00000187792_46 (sequence is synthesized)
ttttataaaagcatttgtgtaatctcaaaatgtgtttttattctaccagttctatttgttaactcaattttttcattattttattcaaatccatattttctctgactttcatttacttta

SEQ ID NO: 687632 - DNA, 120 bp, Artificial Sequence
  ENSG00000187792_47 (sequence is synthesized)
gagttcttaatctgggggtccatggcctgcctaggagtctttagcatgtaggggtttaggagttgcagacccctagggatcgaacaaagctgggtatgtgcttgaaggaattttgctggg

SEQ ID NO: 687633 - DNA, 120 bp, Artificial Sequence
  ENSG00000187792_48 (sequence is synthesized)
acaaggatctgtagtatttactatatttttaaatgcctctgtgacaccaaagcagttcagaacactcatttacctgatctaatcatagtttgatgtttgtgtgttatatctctatgtatt

SEQ ID NO: 687634 - DNA, 120 bp, Artificial Sequence
  ENSG00000187792_49 (sequence is synthesized)
cctgtttcacttttaatttctgtatgtgtattgtcgctatgttgtgcagtttttctcaagtcatttttgagaaataggcagggtatgaattatcaataaataagtatcatgtttggggca

SEQ ID NO: 687635 - DNA, 120 bp, Artificial Sequence
  ENSG00000187796_0 (sequence is synthesized)
gactgtggagttaagcagaacccatcaggaagtgcacaggcgtccggcgtgctcctccctccctgcagccccgggcagcatctcccagaggctccgcggcccaggctcctggtgtgtctg

SEQ ID NO: 687636 - DNA, 120 bp, Artificial Sequence
  ENSG00000187796_1 (sequence is synthesized)
cagtgcaggtggctcctggaagaccctcagcctgcctgctgaggccatgtcggactacgagaacgatgacgagtgctggagcgtcctggagggcttccgggtgacgctcacctcggtcat

SEQ ID NO: 687637 - DNA, 120 bp, Artificial Sequence
  ENSG00000187796_2 (sequence is synthesized)
cgacccctcacgcatcacaccttacctgcggcagtgcaaggtcctgaaccccgatgatgaggagcaggtgctcagcgaccccaacctggtcatccgcaaacggaaagtgggtgtgctcct

SEQ ID NO: 687638 - DNA, 120 bp, Artificial Sequence
  ENSG00000187796_3 (sequence is synthesized)
ggacatcctgcagcggaccggccacaagggctacgtggccttcctcgagagcctggagctctactacccgcagctgtacaagaaggtcacaggcaaggagccggcccgcgtcttctccat

SEQ ID NO: 687639 - DNA, 120 bp, Artificial Sequence
  ENSG00000187796_4 (sequence is synthesized)
gatcatcgacgcgtccggggagtcaggcctgactcagctgctgatgactgaggtcatgaagctgcagaagaaggtgcaggacctgaccgcgctgctgagctccaaagatgacttcatcaa

SEQ ID NO: 687640 - DNA, 120 bp, Artificial Sequence
  ENSG00000187796_5 (sequence is synthesized)
ggagctgcgggtgaaggacagcctgctgcgcaagcaccaggagcgtgtgcagaggctcaaggaggagtgcgaggccggcagccgcgagctcaagcgctgcaaggaggagaactacgacct

SEQ ID NO: 687641 - DNA, 120 bp, Artificial Sequence
  ENSG00000187796_6 (sequence is synthesized)
ggccatgcgcctggcgcaccagagtgaggagaagggcgccgcgctcatgcggaaccgtgacctgcagctggagattgaccagctcaagcacagcctcatgaaggccgaggacgactgcaa

SEQ ID NO: 687642 - DNA, 120 bp, Artificial Sequence
  ENSG00000187796_7 (sequence is synthesized)
ggtggagcgcaagcacacgctgaagctcaggcacgccatggagcagcggcccagccaggagctgctgtgggagctgcagcaggagaaggccctgctccaggcccgggtgcaggagctgga

SEQ ID NO: 687643 - DNA, 120 bp, Artificial Sequence
  ENSG00000187796_8 (sequence is synthesized)
accaccaggagcaggccaacaccatcttctccctgcgcaaggacctccgccagggcgaggcccgacgcctccggtgcatggaggagaaggagatgttcgagctgcagtgcctggcactac

SEQ ID NO: 687644 - DNA, 120 bp, Artificial Sequence
  ENSG00000187796_9 (sequence is synthesized)
gtaaggactccaagatgtacaaggaccgcatcgaggccatcctgctgcagatggaggaggtcgccattgagcgggaccaggccatagccacgcgggaggagctgcacgcacagcacgccc

SEQ ID NO: 687645 - DNA, 120 bp, Artificial Sequence
  ENSG00000187796_10 (sequence is synthesized)
ggggcctgcaggagaaggacgcgctgcgcaagcaggtgcgggagctgggcgagaaggcggatgagctgcagctgcaggtgttccagtgtgaggcgcagctactggccgtggagggcaggc

SEQ ID NO: 687646 - DNA, 120 bp, Artificial Sequence
  ENSG00000187796_11 (sequence is synthesized)
tcaggcggcagcagctggagacgctcgtcctgagctccgacctggaagatggctcacccaggaggtcccaggagctctcactcccccaggacctggaggacacccagctctcagacaaag

SEQ ID NO: 687647 - DNA, 120 bp, Artificial Sequence
  ENSG00000187796_12 (sequence is synthesized)
gctgccttgccggcggggggagcccgaaacagccctttgcagctctgcaccaggagcaggttttgcggaacccccatgacgcaggcctgagcagcggggagccgcccgagaaggagcggc

SEQ ID NO: 687648 - DNA, 120 bp, Artificial Sequence
  ENSG00000187796_13 (sequence is synthesized)
ggcgcctcaaagagagttttgagaactaccgcaggaagcgcgccctcaggaagatgcagaaaggatggcggcagggggaggaggaccgggagaacaccacgggcagcgacaacaccgaca

SEQ ID NO: 687649 - DNA, 120 bp, Artificial Sequence
  ENSG00000187796_14 (sequence is synthesized)
ctgagggctcctagccgcagcagcgcaggccccgaccagggcacacccaccggcccggcctcctgccacccgggggtgccgacgccctggggcgcagacttccccgagccgtcgctgact

SEQ ID NO: 687650 - DNA, 120 bp, Artificial Sequence
  ENSG00000187796_15 (sequence is synthesized)
tggcctggaacgaggaatctggtgccctgaaaggcccagccggactgccgggcattggggccgtttgttaagcggcactcattttgcggaggccatgcgggtgctcaccacccccatgca

SEQ ID NO: 687651 - DNA, 120 bp, Artificial Sequence
  ENSG00000187796_16 (sequence is synthesized)
cacgccatctgtgtaacttcaggatctgttctgtttcaccatgtaacacacaatacatgcatgcattgtattagtgttagaaaacacagctgcgtaaataaacagcacgggtgacccgca

SEQ ID NO: 687652 - DNA, 120 bp, Artificial Sequence
  ENSG00000187796_17 (sequence is synthesized)
ctggggcctgcggcagggaggggagccggcgcgtgggatgcagggccaggggagcacggagcctcagccccggccttcccgacccaacccttctctgtgacgggccccaacctaaccaaa

SEQ ID NO: 687653 - DNA, 120 bp, Artificial Sequence
  ENSG00000187796_18 (sequence is synthesized)
cccctcctggcagtggggtgagggcacacgagcagttcagggtcccagcaggaagtggggctgcagggccggggtgggtcctgggcctggccatcaggcagcctagcaggttgttctggg

SEQ ID NO: 687654 - DNA, 120 bp, Artificial Sequence
  ENSG00000187796_19 (sequence is synthesized)
catggagggggcctggtgtggctgagggcatgcccagggctccctggaggatcccgctctgtgccctgcccaccctgtgcctggggagccctctgccctcacagcccacccaccccattt

SEQ ID NO: 687655 - DNA, 120 bp, Artificial Sequence
  ENSG00000187796_20 (sequence is synthesized)
cgtaggcagggcaggtgcagcccaggcagggcagtgggggccttcccagccaggccattgccttttgcccccttcaggaggggaagctggacaggagcagcccctacatccaggtactgg

SEQ ID NO: 687656 - DNA, 120 bp, Artificial Sequence
  ENSG00000187796_21 (sequence is synthesized)
gacatggcccctggggtccaagccaggctggacgggctgagctccgcccactccgtgcctggaaggtggggtgtggagaccccagtgcagcgcctccactcacccactcctggaggcaca

SEQ ID NO: 687657 - DNA, 120 bp, Artificial Sequence
  ENSG00000187796_22 (sequence is synthesized)
gtggacggtgccctctccttgcccgcctgccccccatggcaaaggccaacctctgggctcatggtgcctgaggcacagcagtgtctgaggcctgccggagggccctgtcctgccgcggtc

SEQ ID NO: 687658 - DNA, 120 bp, Artificial Sequence
  ENSG00000187796_23 (sequence is synthesized)
tggaagtgcagggctggtaggggcctggggactcctatggcctcccccgacatcccaactggcctgaccacatgcttctgagcccctgcccggagtataccccaagggccagaatggggg

SEQ ID NO: 687659 - DNA, 120 bp, Artificial Sequence
  ENSG00000187796_24 (sequence is synthesized)
tctcagacaaaggtgaggtggggacagcagtacacccagaggcctcccagcttccccaagtgaggcccatcttcagcacaggcagcccgtgccgcaatgcctgtgtcaacccccacaacc

SEQ ID NO: 687660 - DNA, 120 bp, Artificial Sequence
  ENSG00000187796_25 (sequence is synthesized)
cccactccacagacagggaaactggggctggggataagtaaaatggtcaaggtcacctagagaacaaactacagagcccagctggaacccagggccccagctagtgggacaagtgtcccc

SEQ ID NO: 687661 - DNA, 120 bp, Artificial Sequence
  ENSG00000187796_26 (sequence is synthesized)
tggggtggagagtgtgggggtctgggcagcccccatgggctgcagaggtgagcaggcccaccgtcctgagagtgtggggcccctctgggcagcccccacggggtgcagaggtgagcaggc

SEQ ID NO: 687662 - DNA, 120 bp, Artificial Sequence
  ENSG00000187796_27 (sequence is synthesized)
ccagtcctggctgctccaagcttcctcctggacagagggaggtggtaacgagcgaacgaccaggtgcatgaagctagaagatggggcgagatggggccccacgtggcttgagggaaaggg

SEQ ID NO: 687663 - DNA, 120 bp, Artificial Sequence
  ENSG00000187796_28 (sequence is synthesized)
ggccaagggcctgctgtgtcccggtgcagtgggggtaaggcagtggcaggggcttctagcgggcagggcaggccccctctgcctgtctgggggaaggactgggtggctagctgggagcag

SEQ ID NO: 687664 - DNA, 120 bp, Artificial Sequence
  ENSG00000187796_29 (sequence is synthesized)
ctcccgagtgtccaggagtgggcagtggtgatgaggtaggtgtttgcactgaaggtgctgtcaggtaggggttggggagggcccagcagaggggtcctgggaggctgcaccggagttgga

SEQ ID NO: 687665 - DNA, 120 bp, Artificial Sequence
  ENSG00000187796_30 (sequence is synthesized)
caagcttcctgagtaccaggccgtggcctccaagcagaggcggaaggggaaggaggagccgcagacggggaagtgaagaccagcgcctttggctgcagctcagaacacttgaacatgggg

SEQ ID NO: 687666 - DNA, 120 bp, Artificial Sequence
  ENSG00000187796_31 (sequence is synthesized)
atgccaagcccccatgtaggcacagaggcgagcaggacccaggagtccggctcaggcactgcccccatccccctgggtggctgtggcaggagcaggggcaggtgtgaaggttggagggtg

SEQ ID NO: 687667 - DNA, 120 bp, Artificial Sequence
  ENSG00000187796_32 (sequence is synthesized)
agcaggggaggggctggctctaaggggctgccaatggccaggacagccctggcctggccctcaccgcagtggggctgagactggacgtgcgtggtttctgcccaagggtcctgatccctg

SEQ ID NO: 687668 - DNA, 120 bp, Artificial Sequence
  ENSG00000187796_33 (sequence is synthesized)
gtctgcccaggtcctggcggtttctgagggggtccagccgcctgaaggttctctcccaattgctgcagtacccctgcccccacttcaggaggacccagacagccactgtagctgtcccca

SEQ ID NO: 687669 - DNA, 120 bp, Artificial Sequence
  ENSG00000187796_34 (sequence is synthesized)
actctctccccagggccgccatgcccacagatgctttggagtgatgggggacggtgctgctcaggcccagggtttaagttcccccgaggtctgggaggcgttcctccctggcaggcagcc

SEQ ID NO: 687670 - DNA, 120 bp, Artificial Sequence
  ENSG00000187796_35 (sequence is synthesized)
agctcgggggagggatggtcactggcgggagcgttgggcctgggctggcatctggcggcctcctggagcaatgaacaggcaagcgaggccataaggcctcagtctcatctacagaaagca

SEQ ID NO: 687671 - DNA, 120 bp, Artificial Sequence
  ENSG00000187796_36 (sequence is synthesized)
gagtctacactggacccatgtggggatcccaccaggccttggaagacagccccactgcaatgccggggaggggtggggcagccgtgctatacgtggcccagcagatgggcaggtcccaca

SEQ ID NO: 687672 - DNA, 120 bp, Artificial Sequence
  ENSG00000187796_37 (sequence is synthesized)
cctcccagccgtgggcctcagggtgaccgatcacagggagagtggctccctgccctgggcaccccctgcggtggccccgacgacagctgaggagtgaccacaaggtctctgcccacagtg

SEQ ID NO: 687673 - DNA, 120 bp, Artificial Sequence
  ENSG00000187796_38 (sequence is synthesized)
ctcggggtgcggtgtctgggctgcgaagtggatccccctttcttgggcactgcagcagcttggggggctttttggacgtggatgtgcctggtcctggttttccgagggcctttacagtgg

SEQ ID NO: 687674 - DNA, 120 bp, Artificial Sequence
  ENSG00000187796_39 (sequence is synthesized)
atgaggaggtgaacacaggagtcctgagagcaagcaccacctcgggctttgttgtagaaacaatggcccggaccccaggctggagccgtggcttggcctcctgggtgtgtcttggcatct

SEQ ID NO: 687675 - DNA, 120 bp, Artificial Sequence
  ENSG00000187796_40 (sequence is synthesized)
gaaatgcaggctacccacaccggctcacctccaggggtacaggcaggtcccacagggagagcttggcgctgagctgaggctgtctgggctcctcgcctcccaaccagtctgcagttacag

SEQ ID NO: 687676 - DNA, 120 bp, Artificial Sequence
  ENSG00000187796_41 (sequence is synthesized)
gggccagtggggggcgggtgagaaggacgggttccctcaggggagccggccggagcccgagccttcccccttctccaggacgcaggcctgagcagcggggagccgcccgagaaggagcgg

SEQ ID NO: 687677 - DNA, 120 bp, Artificial Sequence
  ENSG00000187796_42 (sequence is synthesized)
gaccagagcacacaaatggaggggctgtgaccagcctccgcgcccagcggcttgacgtcctccggagcctctgcttggagttgggcggccgggccgagggcccagggcaagcttggggcc

SEQ ID NO: 687678 - DNA, 120 bp, Artificial Sequence
  ENSG00000187796_43 (sequence is synthesized)
gctgcggcccgcggtgtcctcggggtgcgagctgcacgtggacgcagggccccctcaggccgccagggggcggcatagcgcagcgcgcccccgacccggaagacggaagcccaagaacgc

SEQ ID NO: 687679 - DNA, 120 bp, Artificial Sequence
  ENSG00000187796_44 (sequence is synthesized)
cggaagacggaagcccaagaacgccgcttccgcccggcgcccacttccaagatggcggcggggcggggccggggcagggcggacggagccggcgagcgggatgctgcggactgcgctgcg

SEQ ID NO: 687680 - DNA, 80 bp, Artificial Sequence
  ENSG00000187796_45 (sequence is synthesized)
ctgagtcgcgtgcagccccgggcgccctgcctgaggcggctgtggggccgcggggcccgtccagaggtcgcggggaggcg

SEQ ID NO: 687681 - DNA, 120 bp, Artificial Sequence
  ENSG00000187796_46 (sequence is synthesized)
ggggcccgcggcggctctggggcgcgtggaggcggcgcactaccagctcgtctacacctgcaaggtaggcgcgcggcgggacggaaccggggacagacccgtatctgacgctacacggcc

SEQ ID NO: 687682 - DNA, 120 bp, Artificial Sequence
  ENSG00000187796_47 (sequence is synthesized)
tgcggggagaagcggcccgccggggatccgggaggcggcgtggtcaagtcacaggaaggagtggagccaccccttggggcttctgggagggagcggaggcggaccatgaggaggggtgga

SEQ ID NO: 687683 - DNA, 120 bp, Artificial Sequence
  ENSG00000187796_48 (sequence is synthesized)
gccgtccctggggcggggccttcccgggagagggcgaggttgggggtgggtggagctatccctcgggggcggggccttctctggagagggtgaggtggctggagctacccctagaggggc

SEQ ID NO: 687684 - DNA, 120 bp, Artificial Sequence
  ENSG00000187796_49 (sequence is synthesized)
gggtcttcccgggaggggcgtggcggccctcacagcctcaccagctaccctgtcccagccaggtctgcgggactaggtcctccaagcgcatctccaagctggcctatcaccaaggcgtgg

SEQ ID NO: 687685 - DNA, 120 bp, Artificial Sequence
  ENSG00000187796_50 (sequence is synthesized)
tcattgtgacctgccccggctgccagaaccaccatatcatcgctgacaacctgggctggttctcggacctgaatgggaagagaaatatcgaagagatcctgacggccagaggcgagcagg

SEQ ID NO: 687686 - DNA, 120 bp, Artificial Sequence
  ENSG00000187796_51 (sequence is synthesized)
tgcaccgtgtggcgggcgagggggccctggaactggttctggaggctgcaggggcccccacatccactgcagctccggaagcgggtgaggatgagggtccccccagccctggcaagacgg

SEQ ID NO: 687687 - DNA, 120 bp, Artificial Sequence
  ENSG00000187796_52 (sequence is synthesized)
agccgagctgactcctgcgctccccggcactgtgggacttcggccttccagaaggaggttttggccctgggcctctctggacgtggcctgttttctatcaataaacagacattacttcca

SEQ ID NO: 687688 - DNA, 120 bp, Artificial Sequence
  ENSG00000187796_53 (sequence is synthesized)
ccgggaaaccaggccaccctcgcctggcctggcggggtctgcaggccggggcggtcgggggtggccccacgggtctgcggtcaccgcctggaggggacagccaggctcactggaccttct

SEQ ID NO: 687689 - DNA, 120 bp, Artificial Sequence
  ENSG00000187796_54 (sequence is synthesized)
gaccttctgcagattgaccagctcaagcacagcctcatgaaggccgaggacgactgcaaggtggagcgcaagcacacgctgaagctcaggcacgccatggagcagcggcccagccaggag

SEQ ID NO: 687690 - DNA, 120 bp, Artificial Sequence
  ENSG00000187796_55 (sequence is synthesized)
aggcgtccggcgtgctcctccctccctgcagccccgggcagcatctcccagaggctccgcggcccaggctcctggtgtgtctgcagtgcaggtggctcctggaagaccctcagtgcaagg

SEQ ID NO: 687691 - DNA, 120 bp, Artificial Sequence
  ENSG00000187800_0 (sequence is synthesized)
ggctcgaagtggggaccctcgccccgtcctcggctgtccagtcctcctcctcgcagaccccggcggttcctaccccaggccgcaggggagacggggccccaaggcaggcctctgcaatgt

SEQ ID NO: 687692 - DNA, 120 bp, Artificial Sequence
  ENSG00000187800_1 (sequence is synthesized)
caccgcctctgtgtcccctccttctcctggctgtgggcctgcggctggctggaactctcaaccccagtgatcccaatacctgcagcttctgggaaagcttcactaccaccaccaaggagt

SEQ ID NO: 687693 - DNA, 120 bp, Artificial Sequence
  ENSG00000187800_2 (sequence is synthesized)
cccactcccgccccttcagcctgctcccctcagagccctgcgagcggccctgggagggcccccatacttgcccccagcccacggttgtataccggaccgtgtaccgtcaggtggtgaaga

SEQ ID NO: 687694 - DNA, 120 bp, Artificial Sequence
  ENSG00000187800_3 (sequence is synthesized)
cggaccaccgccagcgcctgcagtgctgccatggcttctatgagagcagggggttctgtgtcccgctctgtgcccaggagtgtgtccatggccgttgtgtggcacccaatcagtgccaat

SEQ ID NO: 687695 - DNA, 120 bp, Artificial Sequence
  ENSG00000187800_4 (sequence is synthesized)
gtgtgccaggctggcggggcgacgactgttccagtgagtgtgccccaggaatgtgggggccacagtgtgacaagccctgcagctgcggcaacaacagctcgtgtgatcccaagagtgggg

SEQ ID NO: 687696 - DNA, 120 bp, Artificial Sequence
  ENSG00000187800_5 (sequence is synthesized)
tatgttcttgcccttctggtctgcagcccccgaactgccttcagccctgtacccctggctactatggccctgcctgccagttccgctgccagtgccatggggcaccctgcgatccccaga

SEQ ID NO: 687697 - DNA, 120 bp, Artificial Sequence
  ENSG00000187800_6 (sequence is synthesized)
ctggagcctgcttctgccccgcagagagaactgggcccagctgtgacgtgtcctgttcccagggcacttctggcttcttctgccccagcacccattcttgccaaaatggaggtgtcttcc

SEQ ID NO: 687698 - DNA, 120 bp, Artificial Sequence
  ENSG00000187800_7 (sequence is synthesized)
aaaccccacagggctcctgcagctgcccccctggctggatgggcaccatctgctccctgccctgcccagagggctttcacggacccaactgctcccaggaatgtcgctgccacaacggcg

SEQ ID NO: 687699 - DNA, 120 bp, Artificial Sequence
  ENSG00000187800_8 (sequence is synthesized)
gcctctgtgaccgattcactgggcagtgccgctgcgctccgggttacactggggatcggtgccgggaggagtgcccggtgggccgctttgggcaggactgtgctgagacgtgcgactgcg

SEQ ID NO: 687700 - DNA, 120 bp, Artificial Sequence
  ENSG00000187800_9 (sequence is synthesized)
ccccggacgcccgttgcttcccggccaacggcgcatgtctgtgcgaacacggcttcactggggaccgctgcacggatcgcctctgccccgacggcttctacggtctcagctgccaggccc

SEQ ID NO: 687701 - DNA, 120 bp, Artificial Sequence
  ENSG00000187800_10 (sequence is synthesized)
cctgcacctgcgaccgggagcacagcctcagctgccacccgatgaacggggagtgctcctgcctgccgggctgggcgggcctccactgcaacgagagctgcccgcaggacacgcatgggc

SEQ ID NO: 687702 - DNA, 120 bp, Artificial Sequence
  ENSG00000187800_11 (sequence is synthesized)
cagggtgccaggagcactgtctctgcctgcacggtggcgtctgccaggctaccagcggcctctgtcagtgcgcgccgggttacacgggccctcactgtgctagtctttgtcctcctgaca

SEQ ID NO: 687703 - DNA, 120 bp, Artificial Sequence
  ENSG00000187800_12 (sequence is synthesized)
cctacggtgtcaactgttctgcacgctgctcatgtgaaaatgccatcgcctgctcacccatcgacggcgagtgcgtctgcaaggaaggttggcagcgtggtaactgctctgtgccctgcc

SEQ ID NO: 687704 - DNA, 120 bp, Artificial Sequence
  ENSG00000187800_13 (sequence is synthesized)
cacccggaacctggggcttcagttgcaatgccagctgccagtgtgcccatgaggcagtctgcagcccccaaactggagcctgtacctgcacccctgggtggcatggggcccactgccagc

SEQ ID NO: 687705 - DNA, 120 bp, Artificial Sequence
  ENSG00000187800_14 (sequence is synthesized)
tgccctgtccgaaggggcagtttggagaaggttgtgccagtcgctgtgactgtgaccactctgatggctgtgaccctgttcatggacgctgtcagtgccaggctggctggatgggtgccc

SEQ ID NO: 687706 - DNA, 120 bp, Artificial Sequence
  ENSG00000187800_15 (sequence is synthesized)
gctgccacctgtcctgccctgagggcttatggggagtcaactgtagcaacacctgcacctgcaagaatgggggcacctgtctccctgagaatggcaactgcgtgtgtgcacccggattcc

SEQ ID NO: 687707 - DNA, 120 bp, Artificial Sequence
  ENSG00000187800_16 (sequence is synthesized)
ggggcccctcctgccagagatcctgtcagcctggccgctatggcaaacgctgtgtgccctgcaagtgcgctaaccactccttctgccacccctcgaacgggacctgctactgcctggctg

SEQ ID NO: 687708 - DNA, 120 bp, Artificial Sequence
  ENSG00000187800_17 (sequence is synthesized)
gctggacaggccccgactgctcccagccatgccctccaggacactggggagaaaactgtgcccagacctgccaatgtcaccatggtgggacctgccatccccaggatgggagctgtatct

SEQ ID NO: 687709 - DNA, 120 bp, Artificial Sequence
  ENSG00000187800_18 (sequence is synthesized)
gccccctaggctggactggacaccactgcttagaaggctgccctctggggacatttggtgctaactgctcccagccatgccagtgtggtcctggagaaaagtgccacccagagactgggg

SEQ ID NO: 687710 - DNA, 120 bp, Artificial Sequence
  ENSG00000187800_19 (sequence is synthesized)
cctgtgtatgtcccccagggcacagtggtgcaccttgcaggattggaatccaggagccctttactgtgatgccgaccactccagtagcgtataactcgctgggtgcagtgattggcattg

SEQ ID NO: 687711 - DNA, 120 bp, Artificial Sequence
  ENSG00000187800_20 (sequence is synthesized)
gcaaggagcaccaccacctggctgtggcttacagcagcgggcgcctggacggctccgagtatgtcatgccagatgtccctccgagctacagtcactactactccaaccccagctaccaca

SEQ ID NO: 687712 - DNA, 120 bp, Artificial Sequence
  ENSG00000187800_21 (sequence is synthesized)
ccctgtcgcagtgctccccaaaccccccaccccctaacaaggttccaggcccgctctttgccagcctgcagaaccctgagcggccaggtggggcccaagggcatgataaccacaccaccc

SEQ ID NO: 687713 - DNA, 120 bp, Artificial Sequence
  ENSG00000187800_22 (sequence is synthesized)
tgcctgctgactggaagcaccgccgggagccccctccagggcctctggacagggggagcagccgcctggaccgaagctacagctatagctacagcaatggcccaggcccattctacaata

SEQ ID NO: 687714 - DNA, 120 bp, Artificial Sequence
  ENSG00000187800_23 (sequence is synthesized)
aagggctcatctctgaagaggagctcggggccagtgtggcttccctgagcagtgagaacccatatgccaccatccgggacctgcccagcttgccagggggcccccgggagagcagctaca

SEQ ID NO: 687715 - DNA, 120 bp, Artificial Sequence
  ENSG00000187800_24 (sequence is synthesized)
tggagatgaaaggccctccctcaggatctccccccaggcagcctcctcagttctgggacagccagaggcggcggcaaccccagccacagagagacagtggcacctacgagcagcccagcc

SEQ ID NO: 687716 - DNA, 120 bp, Artificial Sequence
  ENSG00000187800_25 (sequence is synthesized)
ccctgatccatgaccgagactctgtgggctcccagccccctctgcctccgggcctaccccccggccactatgactcacccaagaacagccacatccctggacattatgacttgcctccag

SEQ ID NO: 687717 - DNA, 120 bp, Artificial Sequence
  ENSG00000187800_26 (sequence is synthesized)
tacggcatcccccatcacctccacttcgacgccaggaccgttgaggagccaggatggtatggcagaggccagcacacctggctgttgctgctcaaggctggggacagagcctagtgtacc

SEQ ID NO: 687718 - DNA, 120 bp, Artificial Sequence
  ENSG00000187800_27 (sequence is synthesized)
cctgccaggagcagggagtggaccggcaggctgtgaacatgaacaacgcttaacagagcaagtgatgggagccttgttcctgggttctaccatgggagacgctgatcagcaggatgcctg

SEQ ID NO: 687719 - DNA, 120 bp, Artificial Sequence
  ENSG00000187800_28 (sequence is synthesized)
gctccctttcccaacccactgctcccaaggcctccagggccctgtgtacataaactggtgggttggaagttgctgggtaactctgatttcagacatgcgtgtggggtaccttttctgtgc

SEQ ID NO: 687720 - DNA, 120 bp, Artificial Sequence
  ENSG00000187800_29 (sequence is synthesized)
atgctcagcctgggctctgtgcgtgtgtgtgtttctgtgattttagaagggtaccaggcacaggttctgtcctagggcacttaccatttagtagggagatggaaccaacccaattaactc

SEQ ID NO: 687721 - DNA, 120 bp, Artificial Sequence
  ENSG00000187800_30 (sequence is synthesized)
tagcaatagcctcctaactggcctcctccattgattcagtgaaccttccaatgcatggctcataatttcaaaatacaggctggttagttactccctacctgaaagccttcataggtgcct

SEQ ID NO: 687722 - DNA, 120 bp, Artificial Sequence
  ENSG00000187800_31 (sequence is synthesized)
ctttgctcttctgccagtatcaaaacttttgaaggccttaaaggccctgctttgcctggcccatctgtctctccagcctcaccttgaactgtgttcctgtcactgcacgccagtcacacc

SEQ ID NO: 687723 - DNA, 120 bp, Artificial Sequence
  ENSG00000187800_32 (sequence is synthesized)
ggcctctaggtcctcctgtaggccactcttctttctggcacagggacctgcacacctggagtgcccttcctcccccactcgcctgttcacccctgcttttcctttacacctcctcctcag

SEQ ID NO: 687724 - DNA, 120 bp, Artificial Sequence
  ENSG00000187800_33 (sequence is synthesized)
ggaagtgcccaccctccgtacatctttcacagccctgattgcagctgtgttcactcaccaggtacctgcagaaggcctacagggtgccaggcacttctttaatgtgttctttctttatgt

SEQ ID NO: 687725 - DNA, 120 bp, Artificial Sequence
  ENSG00000187800_34 (sequence is synthesized)
gattatttgattaatctctgcctcccccactagactgtaagctccctgaaggcaagaatcctgtgcttatgctcaatattagctctcccttggcacagagtaggcactcaacaaatgctc

SEQ ID NO: 687726 - DNA, 120 bp, Artificial Sequence
  ENSG00000187800_35 (sequence is synthesized)
cccaaaaggctgagtggctgactgaattaagtaccagtgacatgcagtaactgctaagatagatgagccatctgtatgctctgacagttacagactgaataagttggagacttccctaaa

SEQ ID NO: 687727 - DNA, 120 bp, Artificial Sequence
  ENSG00000187800_36 (sequence is synthesized)
gggtggcatttccccagggtaacaacgcagagctcaggtgtgggaaggtgccaggggcaggggtgcagaggggctgaggctgaggggggtgcagaggctggagaaaggataacaggagag

SEQ ID NO: 687728 - DNA, 120 bp, Artificial Sequence
  ENSG00000187800_37 (sequence is synthesized)
agtatacaggcatgccttgatttattgcacttcacaggtagcagaatttttaaagaaattgaaggttttgggacatatatgtgacagcaataggttaagaaaagcaaagcagagaaattg

SEQ ID NO: 687729 - DNA, 120 bp, Artificial Sequence
  ENSG00000187800_38 (sequence is synthesized)
aagatttgtgtcaacactgctttaagcaaatctgttggcaccatttttccaatagcatgtgcccattttgggtctctacattgcattttggtaattgcttgcaatatttcaagcattttc

SEQ ID NO: 687730 - DNA, 120 bp, Artificial Sequence
  ENSG00000187800_39 (sequence is synthesized)
attgttattatatgtgttatagtgatctgtgatcagtgatctttgatatattattgtaattgtttcggggcgccatgaaccgcacccatataacacggtaaacttaatcagcaaacgttg

SEQ ID NO: 687731 - DNA, 120 bp, Artificial Sequence
  ENSG00000187800_40 (sequence is synthesized)
gggcccccatacttgcccccagcccacaaactcagaggaaactcctggcttctagggattcattctgcatggtctgtgtcggggttgtataccggaccgtgtaccgtcaggtggtgaaga

SEQ ID NO: 687732 - DNA, 120 bp, Artificial Sequence
  ENSG00000187800_41 (sequence is synthesized)
ccccccgcgcccgccgcccacctctcccaccttacccccggtctcttcctctgacccgtcttcagactagttactgcagtgggaaggtgggagggagacggtggggtaagggctgattga

SEQ ID NO: 687733 - DNA, 120 bp, Artificial Sequence
  ENSG00000187800_42 (sequence is synthesized)
cgggaggccagggtctctggcgcgggtggatgtgtgcagcccagatgccgcgtctgagtgtgtgtgtctggagacgggggctctgggccccatttctagaggaagtgtgagccgggggag

SEQ ID NO: 687734 - DNA, 120 bp, Artificial Sequence
  ENSG00000187801_0 (sequence is synthesized)
gtattcgtctctttgtgcttcctgacatgtgcgcggtgctttgaattttgtgggctgtgtctgcccaccgtctccgtgtatcttttggaaacattttacagtgatccatatatgttctag

SEQ ID NO: 687735 - DNA, 120 bp, Artificial Sequence
  ENSG00000187801_1 (sequence is synthesized)
cgttctgccctatgactgagcctccttagtcctttgctgattctaatgtcttctgctcagcatctgcaggggctgctgagagtaaatacttggcgcctccagctgctggccaaggagaca

SEQ ID NO: 687736 - DNA, 120 bp, Artificial Sequence
  ENSG00000187801_2 (sequence is synthesized)
gatggagctcaagttgggagatacgccctgagagccgatgatagacacaagtccagatctcggattttgatactgtatgttccctgggttcctgagagaggacattgaggagtaggagtc

SEQ ID NO: 687737 - DNA, 120 bp, Artificial Sequence
  ENSG00000187801_3 (sequence is synthesized)
ggcgattaaggagatcggtacaattgggaagcctcctgtcagagcttccagcaatttcctcatcagaggtggacaagccctatgggctaagacagagggtcctcagaaaggagtgcggac

SEQ ID NO: 687738 - DNA, 120 bp, Artificial Sequence
  ENSG00000187801_4 (sequence is synthesized)
gccgtcatgctgcagcagctcctgatcaccctgcccaccgaggccagcacctgggtgaagttgcgtcatccaaaggcggccacggagcgggtggccctgtgggaggatgtgactaagatg

SEQ ID NO: 687739 - DNA, 120 bp, Artificial Sequence
  ENSG00000187801_5 (sequence is synthesized)
tttaaagcagaagctctgctgtctcaggatgctgatgagacccagggcgaaagtttagagagtagagtgacccttggatccctgacagcagaatcccaggaactgttaaccttcaaggac

SEQ ID NO: 687740 - DNA, 120 bp, Artificial Sequence
  ENSG00000187801_6 (sequence is synthesized)
gtatctgtggacttcactcaggaggagtgggggcagctggcccctgctcaccggaatctgtaccgggaggtgatgctggagaactatgggaacctggtctcagtgggatgtcagctttcc

SEQ ID NO: 687741 - DNA, 120 bp, Artificial Sequence
  ENSG00000187801_7 (sequence is synthesized)
aaacctggcgtgatttcccagttggagaaaggagaagaaccatggctgatggagagagatatttcaggagttccaagttcagacttgaagagcaaaacaaaaaccaaagagtcagcctta

SEQ ID NO: 687742 - DNA, 120 bp, Artificial Sequence
  ENSG00000187801_8 (sequence is synthesized)
cagaatgatatttcgtgggaagaactacattgtggcctaatgatggaaagatttacaaaaggaagcagcatgtattccaccttgggaagaatctccaaatgtaataagctagaaagccaa

SEQ ID NO: 687743 - DNA, 120 bp, Artificial Sequence
  ENSG00000187801_9 (sequence is synthesized)
actcaggagagaggccaagagtctaatagatttgagaaaagaattaatgtgaagtcagaagttatgccaggaccaataggtcttccaagaaaaagagatcgtaaatatgacacacctgga

SEQ ID NO: 687744 - DNA, 120 bp, Artificial Sequence
  ENSG00000187801_10 (sequence is synthesized)
aagagaagcagatacaacatagatttagttaatcattcaaggagttatacaaaaatgaaaacctttgagtgtaatatttgtgaaaaaatcttcaaacagcttattcaccttactgaacac

SEQ ID NO: 687745 - DNA, 120 bp, Artificial Sequence
  ENSG00000187801_11 (sequence is synthesized)
atgagaattcataccggggagaaacctttcagatgtaaggaatgtggaaaagcctttagccaaagttcatctcttattccgcatcagagaattcatactggtgagaaaccctatgaatgt

SEQ ID NO: 687746 - DNA, 120 bp, Artificial Sequence
  ENSG00000187801_12 (sequence is synthesized)
aaggagtgtgggaaaaccttcagacatccttcatcgcttactcaacatgttagaattcataccggggaaaagccctatgaatgtagggtatgtgagaaagccttcagccagagcattgga

SEQ ID NO: 687747 - DNA, 120 bp, Artificial Sequence
  ENSG00000187801_13 (sequence is synthesized)
ctgatccagcatttgagaactcatgttagagagaaaccttttacatgcaaagactgtggaaaagcgtttttccagattagacaccttaggcaacatgagattattcatactggtgtgaaa

SEQ ID NO: 687748 - DNA, 120 bp, Artificial Sequence
  ENSG00000187801_14 (sequence is synthesized)
ccctatatttgtaatgtatgtagtaaaaccttcagccatagtacatacctaactcaacaccagagaactcatactggagaaagaccatataaatgtaaggaatgtgggaaagcctttagc

SEQ ID NO: 687749 - DNA, 120 bp, Artificial Sequence
  ENSG00000187801_15 (sequence is synthesized)
cagagaatacatctttctatccatcagagagtccatactggagtaaaaccttatgaatgcagtcattgtgggaaagcctttaggcatgattcatcctttgctaaacatcagagaattcat

SEQ ID NO: 687750 - DNA, 120 bp, Artificial Sequence
  ENSG00000187801_16 (sequence is synthesized)
actggagaaaaaccttatgattgtaatgagtgtggaaaagccttcagctgtagttcatcccttattagacactgcaaaacacatttaagaaataccttcagcaatgttgtgtgaaatata

SEQ ID NO: 687751 - DNA, 120 bp, Artificial Sequence
  ENSG00000187801_17 (sequence is synthesized)
ctaaacatcaaagaatctatgttggagcacaagattctaaatcagtggttccctgatccctcaaaaatccatttgtttttggatttccaaaaacgaacattaaaaaaaaatggtttggca

SEQ ID NO: 687752 - DNA, 120 bp, Artificial Sequence
  ENSG00000187801_18 (sequence is synthesized)
ggccgcgcagtgccggaacccggctgcagcggtgggaaggcgggggcgtgccggcccagcggggagaggcatctgcaggggctgctgagagtaaatacttggcgcctccagctgctggcc

SEQ ID NO: 687753 - DNA, 120 bp, Artificial Sequence
  ENSG00000187801_19 (sequence is synthesized)
ggccgcgcagtgccggaacccggctgcagcggtgggaaggcgggggcgtgccggcccagcggggagagggggctgctgagagtaaatacttggcgcctccagctgctggccaaggagaca

SEQ ID NO: 687754 - DNA, 120 bp, Artificial Sequence
  ENSG00000187801_20 (sequence is synthesized)
gtaaggatgggctcctcttgaaaatagaacgtacctattggatgaaaacctttgtttctaaattaagtgctttgtttgggctttcggttctgtattagaggttttgtgtttccttctgaa

SEQ ID NO: 687755 - DNA, 120 bp, Artificial Sequence
  ENSG00000187801_21 (sequence is synthesized)
cacccagtcaggattgctatgctcttttctgctctgttctttctactctactctgctttctttagaaggcccgaataccaaagaaccatatttaaattcttgggatggctctgtgacctc

SEQ ID NO: 687756 - DNA, 120 bp, Artificial Sequence
  ENSG00000187806_0 (sequence is synthesized)
agttagagaactaactgccaagatggagcgaagggaacatttaaccttgactttccacagtcctgaggttcccaaaataaaggggaaccggaaataccaaaggcctaccgtccctgccaa

SEQ ID NO: 687757 - DNA, 120 bp, Artificial Sequence
  ENSG00000187806_1 (sequence is synthesized)
gaaacatccaagtgcctcgatgtcatgccaaaggcagcagcagcttatggatcaggcacacatctacatccgaacgctctgtggcagcctctgtagttttagcctcctaatgctgatcgc

SEQ ID NO: 687758 - DNA, 120 bp, Artificial Sequence
  ENSG00000187806_2 (sequence is synthesized)
catgtccccactgaactgggtacagtttctggtgatcaagaatggccttgagctctacgcaggactctggaccttatgcaaccatgagctgtgctggagccacacacccaagccacccta

SEQ ID NO: 687759 - DNA, 120 bp, Artificial Sequence
  ENSG00000187806_3 (sequence is synthesized)
ttatctccaatattccagggccttctttctcatctctgtctttaccatacttactggccttggctggctcttcagctcttggatccttaatcgaggaagcatgaccaccaacttggatct

SEQ ID NO: 687760 - DNA, 120 bp, Artificial Sequence
  ENSG00000187806_4 (sequence is synthesized)
gaaggtatccatgctcagcttcatctcagctacctgcttgctcctctgcctcaacctgtttgtggcacaggttcactggcatactagggatgccatggagtcagatctcctatggaccta

SEQ ID NO: 687761 - DNA, 120 bp, Artificial Sequence
  ENSG00000187806_5 (sequence is synthesized)
agatcaaggctgggggttggtccggtgactacagtatcacctgctaaagatgaagggccaaggtctgagatggaatctctaagtgtgagagagaaaaatttaccaaagtcaggactgtgg

SEQ ID NO: 687762 - DNA, 120 bp, Artificial Sequence
  ENSG00000187806_6 (sequence is synthesized)
tggtgataggaaaacctaactatagcttgtcttaaaagcaggggagaagctgagttgggaatggtcacataaattctgggaaactctcctaatatcatgtccatattacttgaggagaca

SEQ ID NO: 687763 - DNA, 120 bp, Artificial Sequence
  ENSG00000187806_7 (sequence is synthesized)
gcattaaagctgatgaaatgtcttttgcgtgcattggatccaaaatatatatgatagtcataaagtaaataactcacttaagaaaaacatttctaaaagaaaacaacaatgtttagagtc

SEQ ID NO: 687764 - DNA, 120 bp, Artificial Sequence
  ENSG00000187806_8 (sequence is synthesized)
atgaatgaaagaaactagtgaaagatgcagtgtgtagaccagagacctctttgggtatcagggatctcatggaccagaatggcccgtggagaagaatgttaattacttctgtttggaatt

SEQ ID NO: 687765 - DNA, 120 bp, Artificial Sequence
  ENSG00000187806_9 (sequence is synthesized)
ttctttattatgtgtggctttgggtatactcaggatggaaagcacttggacaaatactgttgaatctgaacttaatagcattaccagaaatggaataaatatcaatggatataagaccta

SEQ ID NO: 687766 - DNA, 120 bp, Artificial Sequence
  ENSG00000187806_10 (sequence is synthesized)
ggcagttagagaactaactgccaagatggagcgaagggaacatttaaccttgactttccacagtcctgaggttcccaaaataaaggggaaccggaaataccaaaggtcataggctgacaa

SEQ ID NO: 687767 - DNA, 120 bp, Artificial Sequence
  ENSG00000187808_0 (sequence is synthesized)
gccagttcctctcccgttggggcccgggaagggcagctaacgctggacactgggacggccgcggcggcagcttcaagaccatggcccagctcggaggggccgcgaaccgggcacccacgg

SEQ ID NO: 687768 - DNA, 120 bp, Artificial Sequence
  ENSG00000187808_1 (sequence is synthesized)
cctctctcgcgccgacctcgcagagcctgcggtgcgccccgcagccccgcccctcgagagcggacactggtagcctgggcaggtactggggcaaagccgcagccgccgcctcccgggagc

SEQ ID NO: 687769 - DNA, 120 bp, Artificial Sequence
  ENSG00000187808_2 (sequence is synthesized)
accccttcccaggcacgctgatgcactctgcagcgggctcagggcgccggcggggagcgctgcgggaactgctggggctgcagcgggcggctcctgcggggtggctgtcggaggagcgcg

SEQ ID NO: 687770 - DNA, 120 bp, Artificial Sequence
  ENSG00000187808_3 (sequence is synthesized)
ccgaggagctgggcgggccgagtgggccgggcagcagcaggctgtgcctggaaccgcgggagcacgcgtggattctggcagccgccgagggccgctatgaggtgctgcgggagctgctgg

SEQ ID NO: 687771 - DNA, 120 bp, Artificial Sequence
  ENSG00000187808_4 (sequence is synthesized)
aggctgagccggagctgctgctgcggggcgacccgatcaccggctactcggttctgcactggctggccaagcacgggcgccacgaggagctcattctggtacacgatttcgccctacgcc

SEQ ID NO: 687772 - DNA, 120 bp, Artificial Sequence
  ENSG00000187808_5 (sequence is synthesized)
gggggctgaggctcgacgtgagcgccccaggcagcggcggcctcacgcccctccacctggcggcccttcagggccacgacatggtcatcaaggtgctggtgggcgccctgggtgctgacg

SEQ ID NO: 687773 - DNA, 120 bp, Artificial Sequence
  ENSG00000187808_6 (sequence is synthesized)
gccttggaggttgcgggagctgtcgggagccgaggaatgggagatggagagcggcagcgggtgcaccaacctgaacaacaacagcagtggcaccactgcgtggagggccgcgagcgcagt

SEQ ID NO: 687774 - DNA, 120 bp, Artificial Sequence
  ENSG00000187808_7 (sequence is synthesized)
gggcgcgacggctgtggagacaagcaggagagtggcagcgtcgcggaccaaggcgaaggacaccgcgggcagccgggtggcgcaaatgcatagccttttccgccatctgttcccctcatt

SEQ ID NO: 687775 - DNA, 120 bp, Artificial Sequence
  ENSG00000187808_8 (sequence is synthesized)
ccaggaccgttgacagggacagagactggagagctaggaggggctgtgacactgtggcgatggctaggtcctgggttgtcccgggttccaccgaaggagaggcgccttggacgctgcttg

SEQ ID NO: 687776 - DNA, 120 bp, Artificial Sequence
  ENSG00000187808_9 (sequence is synthesized)
ggcctgcaaggaacagaacacgtcggggtccgactcaggtacttgtctcaggtctcctgtaaccaccggcctggaggacccggggactcgggcaccacctcaccaagagagagtgaagga

SEQ ID NO: 687777 - DNA, 120 bp, Artificial Sequence
  ENSG00000187808_10 (sequence is synthesized)
ccaagctggcctggctccgagttccaaagctacaggactaaggagttgggagcagggagcgtggtcctgcttgggagagggcaagttaagcttccaggggccatttctgggcaggccgac

SEQ ID NO: 687778 - DNA, 120 bp, Artificial Sequence
  ENSG00000187808_11 (sequence is synthesized)
gcgctgggtttattaggaaacattcgctagaagaatgagttaagattgtaaaccaccaatgcagagaaaacgcctaactctgccggcctcgctcggccattaatgggtcttggggtgcgg

SEQ ID NO: 687779 - DNA, 120 bp, Artificial Sequence
  ENSG00000187808_12 (sequence is synthesized)
gtagagtcagcctctgacaacctcctcctgagacgacccagccttactggtactttttctcatgtatcacaggttacttcttatgtatattaaagtggaatatgtgttcttttcacatga

SEQ ID NO: 687780 - DNA, 120 bp, Artificial Sequence
  ENSG00000187815_0 (sequence is synthesized)
gatgggaatgtggagcagaccctcgtccactccggaggccgagggtcctccgggcttccgaaggaagccgacctcaacgctggacgcttcttggagaatgattgcgttgagtggagatgt

SEQ ID NO: 687781 - DNA, 120 bp, Artificial Sequence
  ENSG00000187815_1 (sequence is synthesized)
ggtctgtctataaaaggccgggagggaacaatatctgttaccactcagtccgtctctaaagagacactctttaccgctgaaaacctcaagagtgagcactcccacgcccccgtctctggt

SEQ ID NO: 687782 - DNA, 120 bp, Artificial Sequence
  ENSG00000187815_2 (sequence is synthesized)
cctacctgggtccaaggccgatgtgaagtggacaagtccagtaaggcaggcatcatgccacagcagctcctgatcaccctgcctaccgaggccagcacctgggtgaagctgcaacatcca

SEQ ID NO: 687783 - DNA, 120 bp, Artificial Sequence
  ENSG00000187815_3 (sequence is synthesized)
aagaaggccgtggagggggcgcccctgtgggaggatgtgactaaaatgtttgaaggagaagctctgctgtctcaggatgctgaggacgtaaagacccagagagaaagtttagaggatgaa

SEQ ID NO: 687784 - DNA, 120 bp, Artificial Sequence
  ENSG00000187815_4 (sequence is synthesized)
gtgacccctggactcccgacagcagaatcccaggaattgttgactttcaaggacatatctattgacttcacccaggaagagtgggggcagctggctcctgctcaccagaatctataccga

SEQ ID NO: 687785 - DNA, 120 bp, Artificial Sequence
  ENSG00000187815_5 (sequence is synthesized)
gaggtgatgctggagaactacagcaacttggtgtcagtgggatatcaactttccaaacctagtgtgatatcccagttagagaaaggagaagagccatggatggcagagaaagaaggccca

SEQ ID NO: 687786 - DNA, 120 bp, Artificial Sequence
  ENSG00000187815_6 (sequence is synthesized)
ggagatcccagttcagacttgaagagtaaaatagaaaccattgagtcaactgcaaagagtaccatttcacaggagcgcttatatcatggcattatgatggaaagtttcatgagggatgat

SEQ ID NO: 687787 - DNA, 120 bp, Artificial Sequence
  ENSG00000187815_7 (sequence is synthesized)
ataatttattccacgttgagaaaagtctccacatatgatgatgtcttagaaaggcaccaggaaacttgtatgagagatgtgagacaagccatcttgacccataagaagagagtccaagaa

SEQ ID NO: 687788 - DNA, 120 bp, Artificial Sequence
  ENSG00000187815_8 (sequence is synthesized)
aatatgatacacctacaaagcggaacacatacaaattagatttgattaatcatccaacaagttacataagaacaaaaacctatgaatgtaatatatgtgaaaaaatcttcaaacaaccta

SEQ ID NO: 687789 - DNA, 120 bp, Artificial Sequence
  ENSG00000187815_9 (sequence is synthesized)
ttcaccttactgaacatatgagaattcatactggtgagaaacctttcagatgtaaggaatgtggaagggcctttagtcaaagtgcatccctcagtacacaccagagaatccatactggtg

SEQ ID NO: 687790 - DNA, 120 bp, Artificial Sequence
  ENSG00000187815_10 (sequence is synthesized)
agaaaccctttgaatgtgaggaatgtgggaaagccttcagacatcgctcatcacttaatcagcatcatagaactcacactggggagaaaccctatgtatgtgataaatgtcagaaagctt

SEQ ID NO: 687791 - DNA, 120 bp, Artificial Sequence
  ENSG00000187815_11 (sequence is synthesized)
tcagccagaacattagcttggttcaacatttgaggactcattctggagagaaaccttttacttgcaatgaatgtgggaaaacctttagacagattagacaccttagtgaacatataagaa

SEQ ID NO: 687792 - DNA, 120 bp, Artificial Sequence
  ENSG00000187815_12 (sequence is synthesized)
ttcataccggggagaagccctatgcatgcactgcatgttgtaaaacctttagtcatagagcgtatctaacacatcaccagagaatccatactggggagagaccctacaaatgtaaagaat

SEQ ID NO: 687793 - DNA, 120 bp, Artificial Sequence
  ENSG00000187815_13 (sequence is synthesized)
gtggaaaagcctttaggcagaggatacaccttagcaaccataaaactgttcatacaggagtgaaagcatatgaatgcaaccgctgtggaaaagcctataggcatgattcatcctttaaaa

SEQ ID NO: 687794 - DNA, 120 bp, Artificial Sequence
  ENSG00000187815_14 (sequence is synthesized)
aacatcagagacatcacactggagaaaaaccttacgaatgtaacgaatgtggaaaagccttcagctataactcttcacttagtcgacatcatgaaatacacaggaggaacgccttccgaa

SEQ ID NO: 687795 - DNA, 120 bp, Artificial Sequence
  ENSG00000187815_15 (sequence is synthesized)
ataaggtgtaaaaacagatatttgacttgagaacaaaagccaagtgtaaattggtgatttagagtgctttaaaatttcaggactcagatatgaggaattgatgtaatgatgccaactttt

SEQ ID NO: 687796 - DNA, 120 bp, Artificial Sequence
  ENSG00000187815_16 (sequence is synthesized)
aatttttcccattgtaaataaacattacattgacaggtattgactactaacacctctaaaaagtacttaagattaaaatctggtccttaaaattaaatgaattcagcattatgaaaaatt

SEQ ID NO: 687797 - DNA, 80 bp, Artificial Sequence
  ENSG00000187815_17 (sequence is synthesized)
caacccgccggaagacgcgcgggttgtggcagctgcagcgggaccgcgtggggtgggccccgggaccgccagggctgcag

SEQ ID NO: 687798 - DNA, 120 bp, Artificial Sequence
  ENSG00000187815_18 (sequence is synthesized)
cggaggcagaggccaggcgagacacccggctgcggcctaagaggccaggctgggtgggcttggctgcagccgccagccccgtgttaaagcggcagccagggaggtgtatcctccccgggg

SEQ ID NO: 687799 - DNA, 120 bp, Artificial Sequence
  ENSG00000187815_19 (sequence is synthesized)
atgtgattctggagttctggagacaagtgcttctggatccctcttcccttcccttttgctcctctaaagagtatggagacatgaactcaaacctaactaactggctgcctcccaaagaaa

SEQ ID NO: 687800 - DNA, 120 bp, Artificial Sequence
  ENSG00000187815_20 (sequence is synthesized)
gtgcttgatttaaaggggagtttgttttccagaattgttaaagtcacatcagtctctaggaacccccaggtcctggtgctgcagggacacaccagagtcctgagggcaggtgattggaat

SEQ ID NO: 687801 - DNA, 120 bp, Artificial Sequence
  ENSG00000187815_21 (sequence is synthesized)
ataacacatttctgtgtagcttccacctagactaagaaatgaaacacagttgaagctccactgtcccccttacaccttttgaaataagcactctgcattgaaatattattcccatgtctt

SEQ ID NO: 687802 - DNA, 120 bp, Artificial Sequence
  ENSG00000187815_22 (sequence is synthesized)
cgtgcttttattacatgtataatgtagtaaaagcagtctatatatcagtgtatacatactaaacaatatatagcattgttttgcatgttctctttctttaaataaatggtatatatactt

SEQ ID NO: 687803 - DNA, 120 bp, Artificial Sequence
  ENSG00000187821_0 (sequence is synthesized)
acctgggacactcgaggaggcacacgaggcggaaaagtggacgggtgccccgcgccaccgcctctcccgagggcgcgtactgaccaggatgtcagacaagctcaaggaacgcaaaagaac

SEQ ID NO: 687804 - DNA, 120 bp, Artificial Sequence
  ENSG00000187821_1 (sequence is synthesized)
ccccgtttctcataaagtgatagaaaagcggaggagggacaggatcaaccgctgcttgaacgagctgggcaagacagtgcccatggccttggcgaagcagagttccgggaagctggagaa

SEQ ID NO: 687805 - DNA, 120 bp, Artificial Sequence
  ENSG00000187821_2 (sequence is synthesized)
ggcggagatcctcgagatgaccgttcagtacctgagagcactgcactccgctgattttccccggggaagggaaaaagcagaacttctagcggagtttgccaactacttccactatggcta

SEQ ID NO: 687806 - DNA, 120 bp, Artificial Sequence
  ENSG00000187821_3 (sequence is synthesized)
cacgagtgcatgaagaacctggtgcattacctcaccacggtggagcggatggagaccaaggacacgaagtacgcgcgcatcctcgccttcttgcagtccaaggcccgcctgggcgcggag

SEQ ID NO: 687807 - DNA, 120 bp, Artificial Sequence
  ENSG00000187821_4 (sequence is synthesized)
cccgcctttccgccgctgggttcgctcccggagccggatttctcctatcagctgcaccctgcggggcccgaattcgctggtcacagcccgggcgaggccgctgtgttcccgcagggctct

SEQ ID NO: 687808 - DNA, 120 bp, Artificial Sequence
  ENSG00000187821_5 (sequence is synthesized)
ctctggtgccgggcctttcccctggccgcctggcgcggcccgcagccccgcgctgccctacctgcccagcgcgccagtgccgctcgctagcccagcgcagcagcacagccccttcctgac

SEQ ID NO: 687809 - DNA, 120 bp, Artificial Sequence
  ENSG00000187821_6 (sequence is synthesized)
gtgcagggcctggaccggcattacctcaacctgatcggccacgcgcaccccaacgcccttaacctgcacacgccccagcaccccccggtgctctgacgcccactcgcccgccagatttct

SEQ ID NO: 687810 - DNA, 120 bp, Artificial Sequence
  ENSG00000187821_7 (sequence is synthesized)
ccgggtgccaggcgttgggaggcctctgcggccactctgcggagacgcccgagcccgcggacacagaggacctcacttgcgggcccctcccaggcggggggcctgagcgcagggcgaacc

SEQ ID NO: 687811 - DNA, 120 bp, Artificial Sequence
  ENSG00000187821_8 (sequence is synthesized)
tcaggaggctctggcgcagatccgcagccgcgtccgctcgctggtcctctccagcgccacagtgcccgaccagcaggcgctgggccgctgcgaggggcccttcctccttttgcagagttc

SEQ ID NO: 687812 - DNA, 120 bp, Artificial Sequence
  ENSG00000187821_9 (sequence is synthesized)
atgtcagacaagctcaaggaacgcaaagtgagtcggctgagcccaaatggcacttgcgccctggtggtggaggcatctgactcaccgacccgccacttgggtggaccgatggcagggaag

SEQ ID NO: 687813 - DNA, 120 bp, Artificial Sequence
  ENSG00000187821_10 (sequence is synthesized)
tgcccgcacgggactttgagtgtggaggaatctcgagtgagaacccccgtttctcataaagtgatagaaaagcggaggagggacaggatcaaccgctgcttgaacgagctgggcaagaca

SEQ ID NO: 687814 - DNA, 120 bp, Artificial Sequence
  ENSG00000187823_0 (sequence is synthesized)
accattggccttttccatgaagaagaggcaacattgagtggcggacaacactttttggcatctctccaattcagctgttagcatctcctagtgtcttcttcacagctaacagctttggct

SEQ ID NO: 687815 - DNA, 120 bp, Artificial Sequence
  ENSG00000187823_1 (sequence is synthesized)
acttgctcatgacactccgtctctgatcacagagcaaatccactgtctccattggtttccagtactagtactcaattctactcaatcccacctgattccaggagacataatggagaagtg

SEQ ID NO: 687816 - DNA, 120 bp, Artificial Sequence
  ENSG00000187823_2 (sequence is synthesized)
cacgaaatcatcatctaccatgcaggtagagccttcctttcttcaggcagagaatctgattctgcggcttcaaatgcagcatccaaccacggagaacactgctaaaaggggccaagtcat

SEQ ID NO: 687817 - DNA, 120 bp, Artificial Sequence
  ENSG00000187823_3 (sequence is synthesized)
gcctgccctggccaccacagtgatgcctgtaccatactcacttgagcatctcacccagtttcatggtgaccctgccaattgctcagagttcctcactcaggtgactacctacttgacagc

SEQ ID NO: 687818 - DNA, 120 bp, Artificial Sequence
  ENSG00000187823_4 (sequence is synthesized)
tctccaaatctctaatcctgcaaatgatgcccagatcaaactcttttttgattacctatctcagcagttagaaagttgtgggatcatatctgggcctgacaagagtaccttactgaagca

SEQ ID NO: 687819 - DNA, 120 bp, Artificial Sequence
  ENSG00000187823_5 (sequence is synthesized)
atatgagaatcttattcttgagttccagcagtcatttggtaaacccacaaaacaggaaatcaatcctctgatgaatgctaagtttgacaaaggagacaactcctctcagcaggaccctgc

SEQ ID NO: 687820 - DNA, 120 bp, Artificial Sequence
  ENSG00000187823_6 (sequence is synthesized)
tactttccacctcctcgctcaaaatctgatctgtaatgaaaccaatcagagtggtcagttcgaaaaggcactagctgatcccaaccaggatgaagagagtgtcactgatatgatggacaa

SEQ ID NO: 687821 - DNA, 120 bp, Artificial Sequence
  ENSG00000187823_7 (sequence is synthesized)
tcttccagacctgatcactcagtgcattcagttggacaagaaacatagtgacaggccagagctcctacagtcagagacccagctcccattgttggcttccttgatccaacaccaagccct

SEQ ID NO: 687822 - DNA, 120 bp, Artificial Sequence
  ENSG00000187823_8 (sequence is synthesized)
ctttagccccacagatccaccacccaagaaagggcctatacagctgcgagaaggccagctgcctctcaccccagccaaacgagcccgccagcaagaaactcagttgtgcctctactgcag

SEQ ID NO: 687823 - DNA, 120 bp, Artificial Sequence
  ENSG00000187823_9 (sequence is synthesized)
ccaatctggtcacttcacaagagattgccttgccaaacgttctcgagctccggcaacgacaaataacacagctcaccagtaagaggagaccaggaaagtcactttttaaacttacatccc

SEQ ID NO: 687824 - DNA, 120 bp, Artificial Sequence
  ENSG00000187823_10 (sequence is synthesized)
ggggaatttaaacaatcagatcttgttcattggcaaattacccctcacgaaacctaacccgagaatgatgaaaacaattcacaggcactttctgcagttgggattaattctccaagagca

SEQ ID NO: 687825 - DNA, 120 bp, Artificial Sequence
  ENSG00000187823_11 (sequence is synthesized)
ccaaaaacctgcaggcaaaactttgcccagtctgagccaatgaaaataaccgtggaagcacattgggaaccttatcctgaccaatgggtgacatctgggttgagtttgtgtcccaaatcc

SEQ ID NO: 687826 - DNA, 120 bp, Artificial Sequence
  ENSG00000187823_12 (sequence is synthesized)
tgaatcttgtgtgcctagaaatgagcccaagacttttaccttcacctttattggtctgtatcctagtttcctgttggcttaggacctttggctgaagtccaaatgacattcctataatct

SEQ ID NO: 687827 - DNA, 120 bp, Artificial Sequence
  ENSG00000187823_13 (sequence is synthesized)
gcttatattctcctcctagagtttggaccatgcttcacctattgactacgatctaccttcagcataaatcaaccttcctggaaccacagctctgccacccttccatagagctatatgttt

SEQ ID NO: 687828 - DNA, 120 bp, Artificial Sequence
  ENSG00000187823_14 (sequence is synthesized)
tgtttccatctaaagactcatgctttcccaacaaacagaacctcctggctatttacaaaccagattgaatgggcatttgaatactgcttggaactgttggtccctttttctttgcaggct

SEQ ID NO: 687829 - DNA, 120 bp, Artificial Sequence
  ENSG00000187823_15 (sequence is synthesized)
agcccatcaggcaggtgtatgcttttagccaagcccaccaattccaacttattcctctcttctccaacaaccctacttgaggttccagcatgtcttatagccaagtcaatatgctctagg

SEQ ID NO: 687830 - DNA, 120 bp, Artificial Sequence
  ENSG00000187823_16 (sequence is synthesized)
ataaggatttctgaaaggtatttagtgagagttggggatggtgtgtcataattactgtatctgtagcatgtccttgctgccttggacaagggacctggccaaataaatctccactgaaga

SEQ ID NO: 687831 - DNA, 120 bp, Artificial Sequence
  ENSG00000187823_17 (sequence is synthesized)
ctgacagccagaccctgcagtagtttctaactctagaagcctcaatgtagtcaccatctaggattactactcattgctattgagctctacctttatggaccacctctgaagtccttcatc

SEQ ID NO: 687832 - DNA, 120 bp, Artificial Sequence
  ENSG00000187823_18 (sequence is synthesized)
taattgaggatcttaaaaaacaatgaatggcaaaaaacttcctacactatctcatctgaaaaatcctggggcacatacattaaaaccatttgtgcacaaaactcaggaagtcgggatttt

SEQ ID NO: 687833 - DNA, 120 bp, Artificial Sequence
  ENSG00000187823_19 (sequence is synthesized)
attgcttatgttttactcttggtacacaccagctttgtgtagattcctgatgcttctgaacaaaagtagtgttatgctagaaaggcaaaactccctaaaatgttaaaactgttcagcaat

SEQ ID NO: 687834 - DNA, 120 bp, Artificial Sequence
  ENSG00000187823_20 (sequence is synthesized)
gatcactgctggtaattaccagccctctgttccctgcttcttgtttctgatgtatgtccccaaaatggatatcctggagaaatatcagtaatcacatattccctagcaaccatcaaggcc

SEQ ID NO: 687835 - DNA, 82 bp, Artificial Sequence
  ENSG00000187824_0 (sequence is synthesized)
ctgccttccttccttttttcaggaaggtagctttagtgaaaacagggtttggagttgaacctatacgggttcaaattcgact

SEQ ID NO: 687836 - DNA, 120 bp, Artificial Sequence
  ENSG00000187824_1 (sequence is synthesized)
cagggtttggagttgaacctatacgggttcaaattcgacttccgtccaccaccgagacctgcgctccctgagggactcgctttcccatccgcgaaaccaggacggcgccgcctacacccc

SEQ ID NO: 687837 - DNA, 120 bp, Artificial Sequence
  ENSG00000187824_2 (sequence is synthesized)
gcggcgttcggggcgggctgaatgggtcgctgagtgggggctacacccacgcccttcgctccccgcccccgggcggagcgacggccacggcagtgtccccaaggcaccgaaaccgaggcg

SEQ ID NO: 687838 - DNA, 120 bp, Artificial Sequence
  ENSG00000187824_3 (sequence is synthesized)
ggggtctcggtccctccgcgcaaggaggaaggcggaccgtacgtggcaggactcaccgccccgcacgtggcaggactcaccgccccgcgccgtgttctccgagccatggcgccagcgctg

SEQ ID NO: 687839 - DNA, 120 bp, Artificial Sequence
  ENSG00000187824_4 (sequence is synthesized)
tggcgggcctgcaacggactcatggccgccttcttcgcgctggcggccttggtgcaggtaaatgacccagatgcagaggtgtgggtggtggtgtacacaatccctgcagtactgaccctg

SEQ ID NO: 687840 - DNA, 120 bp, Artificial Sequence
  ENSG00000187824_5 (sequence is synthesized)
cttgttggacttaaccctgaagtcacaggtaatgttatttggaaaagtatctctgcaatacacatactcttttgtacggtgtgggctgttggcttggcgtcctacctcttgcatcgtaca

SEQ ID NO: 687841 - DNA, 120 bp, Artificial Sequence
  ENSG00000187824_6 (sequence is synthesized)
caacagaacatcttacatgaggaagaaggcagggagctgtctggtctggtgattattacagcatggattatcctgtgccacagttcctcaaagaatccagttggtggaagaattcaattg

SEQ ID NO: 687842 - DNA, 120 bp, Artificial Sequence
  ENSG00000187824_7 (sequence is synthesized)
gctattgccattgtaatcacacttttcccatttatctcatgggtctacatatatattaacaaggaaatgcggtcctcttggccaactcactgcaagacagtaatttaaataaattcaaga

SEQ ID NO: 687843 - DNA, 120 bp, Artificial Sequence
  ENSG00000187824_8 (sequence is synthesized)
acttcgtttttaaaatgaatattttcaatcaattttttataaacattaggggaacaagccaggagtttatttcaggtaatttgggctaatagttttaaaactccaaataactttttaagg

SEQ ID NO: 687844 - DNA, 120 bp, Artificial Sequence
  ENSG00000187824_9 (sequence is synthesized)
gtgcatataattcgatgtaagattggatgggacaagtaagagatggtctgatattttccagacgactttctgcagggtcttgtgtcataatgtagtggaaaaggctagagaatagaagtt

SEQ ID NO: 687845 - DNA, 120 bp, Artificial Sequence
  ENSG00000187824_10 (sequence is synthesized)
taaaaatacgagttctaacttaactttgtaactatgtaatttgggcaaatatataaacctcctggtggatatttatctataaaataggattaatgccagatctacttacttacacagtaa

SEQ ID NO: 687846 - DNA, 120 bp, Artificial Sequence
  ENSG00000187824_11 (sequence is synthesized)
caaggatcaatctagataatgtaagaacactctgaagatataaagtgtttggaaagattacggagggctgcccatgattaaaatagaggggagcagggattgggtaatatactgaaatag

SEQ ID NO: 687847 - DNA, 120 bp, Artificial Sequence
  ENSG00000187824_12 (sequence is synthesized)
ctcaggtgatcctcctacctcagcctcccaagaagctacgactacaagtgtgcaccaccatgcccggctaaatttttttaaattttttgtagaggcagggtttcaccgtgttgtccaggc

SEQ ID NO: 687848 - DNA, 76 bp, Artificial Sequence
  ENSG00000187824_13 (sequence is synthesized)
taaatttttttaaattttttgtagaggcagggtttcaccgtgttgtccaggctggtcttgaattcctgagttcaag

SEQ ID NO: 687849 - DNA, 120 bp, Artificial Sequence
  ENSG00000187824_14 (sequence is synthesized)
cagagctggcatagtgcagtgaactaaaggagaactctagatgaatcaaatgagcaggcatgtcttggaaagaaagggaagctggatagaataaaggaattagggaccaaacaagaaggc

SEQ ID NO: 687850 - DNA, 120 bp, Artificial Sequence
  ENSG00000187824_15 (sequence is synthesized)
aatagggactataactacattctaaatgagaaataaggtcaaaatctatatacattctttataaatggatgtccaaagtaatcctagggaggagagcttttttttttttcatttccattt

SEQ ID NO: 687851 - DNA, 120 bp, Artificial Sequence
  ENSG00000187824_16 (sequence is synthesized)
tcatttaaaaatggatacttgattattggaaaacttacaattgtgtttggaacaacttgggtatttgaatctaattttccaattgcaaattttatgatacctaaatacagataaagtatt

SEQ ID NO: 687852 - DNA, 120 bp, Artificial Sequence
  ENSG00000187824_17 (sequence is synthesized)
tccaatgaaaatttagtgtccaaatgagtggggctataaatgtaaaatacactggattttaaagacatggtagaaaaagaacagaaaatattttttgtattgattacatgttgaaacaat

SEQ ID NO: 687853 - DNA, 120 bp, Artificial Sequence
  ENSG00000187824_18 (sequence is synthesized)
attttggctataatgggttaaatatactattaaagttgattttatctgtttctgtttacttttatttacgtggcttacattgcatttctgttggacagtcctgtatttaagtatctagat

SEQ ID NO: 687854 - DNA, 120 bp, Artificial Sequence
  ENSG00000187824_19 (sequence is synthesized)
ggcaacattttacatacacaagcatcaaactctgtggtcagatactgttttttctgatctaggaaagagatctgggaaatacttcactcaaaaagaacgagtagtgccttccacaggtta

SEQ ID NO: 687855 - DNA, 120 bp, Artificial Sequence
  ENSG00000187824_20 (sequence is synthesized)
ggagagtgtaaatgagtctggtagtttgtctatttttattgtctttattactatagtaaatattctataaatatttgttaaaggaggtatgtgtattttgtttttgttattggcacagtg

SEQ ID NO: 687856 - DNA, 120 bp, Artificial Sequence
  ENSG00000187824_21 (sequence is synthesized)
gccactgaatggtgagaaattatctaagattaagacttgaatgagtaaaaagggggaaaacaaatctagttgatattaaaacagtcaaagtgaaacttaagggtcagtaaaatacacata

SEQ ID NO: 687857 - DNA, 120 bp, Artificial Sequence
  ENSG00000187824_22 (sequence is synthesized)
aaggatttgagttttccagtgtatattttgcttacatatttgtggcttttataactcctttagtattaataaactactgaagtcacatgcaaaaaaaaaacagactcatttgcaaattcc

SEQ ID NO: 687858 - DNA, 120 bp, Artificial Sequence
  ENSG00000187824_23 (sequence is synthesized)
ctgtgggctctatccattgaccaagtcatgtttacttctgtgcttaaagacagtaatgttcaagatgtgctttcatcatgtatgcctctcccatatcagactacgaaattatgtgactat

SEQ ID NO: 687859 - DNA, 120 bp, Artificial Sequence
  ENSG00000187824_24 (sequence is synthesized)
tcatagtctctttcgcatcttcagttaagcatataaaaggcacttttggtggaatagtcttttgaagagtattaatgaaattgaatttaagtattattattaaatttaatatttctatta

SEQ ID NO: 687860 - DNA, 120 bp, Artificial Sequence
  ENSG00000187824_25 (sequence is synthesized)
aaagtatctctgcaatacacatactcttttgtacggtgtgggctgttggcttggcgtcctacctcttgcatcgtacacaacagaacatcttacatgaggaagaaggcaggttcaagctat

SEQ ID NO: 687861 - DNA, 120 bp, Artificial Sequence
  ENSG00000187824_26 (sequence is synthesized)
cagccactgatctcatctttctttacttcctgtatctctgaacatctcatatattgggcatacatcttaactcatgtaatttcctccctttttgctaacaggtggtgtacacaatccctg

SEQ ID NO: 687862 - DNA, 120 bp, Artificial Sequence
  ENSG00000187824_27 (sequence is synthesized)
aaaaggcagagtcttgctttgttgcccagactggaaggcagtggcccgatcacagctcactgcagcttcaaactcctaggctccagtgacccactcacctcagcctcccaaagtgatggg

SEQ ID NO: 687863 - DNA, 120 bp, Artificial Sequence
  ENSG00000187824_28 (sequence is synthesized)
accacatctggccccaagaactgttttcaatgatagcattttatttaatattataaaattaatatgaagaagttgctactaaaagaagcactttagcaaataaaatttaatagatcaggt

SEQ ID NO: 687864 - DNA, 120 bp, Artificial Sequence
  ENSG00000187833_0 (sequence is synthesized)
ccaccaaaccgaccaccacctggtagcatcttggggtttcctgggcgtggcctgtaaatttgtatcatcacaaggggccagtgaccagtaaccagtgaccagtggccttcatactggaca

SEQ ID NO: 687865 - DNA, 120 bp, Artificial Sequence
  ENSG00000187833_1 (sequence is synthesized)
catgcactggttggcttcagccacccagacatccgctagtatcgtctcttcttcccttctatctgcagttgatgtttcttcttctctgaccatgtcagaatatttccaaaatacgtcttt

SEQ ID NO: 687866 - DNA, 120 bp, Artificial Sequence
  ENSG00000187833_2 (sequence is synthesized)
acctggaactgcaaattctcggcagttctctcttcctgtggtgagcaatgcagctttcttaacaggaagcatctccaacttctccagagcctctgctccagccatcagctcagcatggct

SEQ ID NO: 687867 - DNA, 120 bp, Artificial Sequence
  ENSG00000187833_3 (sequence is synthesized)
acagccatcagcctctggcacctccttccagccactcatgggcagtgcctacctttaccaacattctagcacaactatgttgtctggggttactggccagagccatatctgtacttcagc

SEQ ID NO: 687868 - DNA, 120 bp, Artificial Sequence
  ENSG00000187833_4 (sequence is synthesized)
tgcctcttatccaggcgtttttgagtgggatagtacagcaagcacagtaaagaagtcatcctcactcagggacttcactgtgactgtcattgatcagaacacagctgtctcttccatgtc

SEQ ID NO: 687869 - DNA, 120 bp, Artificial Sequence
  ENSG00000187833_5 (sequence is synthesized)
tatgacagcccagtattataaaacttcagataccaatactatggtccctctgtatccatcactatctgccagccttgttcaggggacactaactcaaattccaaatcagcagggccataa

SEQ ID NO: 687870 - DNA, 120 bp, Artificial Sequence
  ENSG00000187833_6 (sequence is synthesized)
cctgtcacttccctgccagataggaagccaggtctattactataatcaaggcacactggggcctcaactatcctgcctgcaatcttatggctctgtgtcatacacaggatatagggcttc

SEQ ID NO: 687871 - DNA, 120 bp, Artificial Sequence
  ENSG00000187833_7 (sequence is synthesized)
tgcccatcaaccagaaatggtgatggtgctgaaggaggttcagcccacaaatgtcctaccaccagtctctacttctgggatgtattactctgtgtcttctcaacccatcacagaaaccag

SEQ ID NO: 687872 - DNA, 120 bp, Artificial Sequence
  ENSG00000187833_8 (sequence is synthesized)
tgttcaagtgatggaaacttccctggggatggatacttccctgggattgcaatctccaagccagacattttgtctgccacaaactccagaattctccaagtccttcagtagcagaaatac

SEQ ID NO: 687873 - DNA, 120 bp, Artificial Sequence
  ENSG00000187833_9 (sequence is synthesized)
ccagacacttgagagtaacccatcacctgagcttggggacatttcaataactccagtccagagtcctactaatctcttgacactgtctccagctccaagccaggaaaaaaatgagaatga

SEQ ID NO: 687874 - DNA, 120 bp, Artificial Sequence
  ENSG00000187833_10 (sequence is synthesized)
gaatttggatgagattaaaaccaacctttcaaagcctctagatgtccaccagatcctaataggaaatcaagatcctccactacttcctgtagaaatccccgatattcacccgcttctggc

SEQ ID NO: 687875 - DNA, 120 bp, Artificial Sequence
  ENSG00000187833_11 (sequence is synthesized)
ctgcattgatcctcttggccaagaggagcagcctggttctgaaaatgccaatctaagaaataagagcctgagtcttgaggaccaagggatatttgaaaatgggattgagtctagcagtga

SEQ ID NO: 687876 - DNA, 120 bp, Artificial Sequence
  ENSG00000187833_12 (sequence is synthesized)
gatcttcagttccttacaagatcttgaccaacctgaaagtccctcagcaaagaaagccaaagataccagtgccatcaaggtaaatcaggtgcaggaaaagtcatgtgtcataaagggtca

SEQ ID NO: 687877 - DNA, 120 bp, Artificial Sequence
  ENSG00000187833_13 (sequence is synthesized)
ctctgatcaagtcaggaagaacaagcataaagcttccgagcctatccagggtgctcccaaggccaaaatccagccaaagaacccagagtgcctattagagagagaagtggttgttggcag

SEQ ID NO: 687878 - DNA, 120 bp, Artificial Sequence
  ENSG00000187833_14 (sequence is synthesized)
tgctacagtcagtaacagcgcttctgtgaacaaggccaagcattctagcaacaaacctcacaaggctgcatccagcaggatcagcaaaactaagagccatgggcaggaaaagaccaaagg

SEQ ID NO: 687879 - DNA, 120 bp, Artificial Sequence
  ENSG00000187833_15 (sequence is synthesized)
gaacagaaagaacagctccaagaaatctgaagagagtaagcagtcagggaaaaaagtcaaggtagaagagaagcaaaccattcccaatatgaaacggaagaaaaatcaacctgagcttag

SEQ ID NO: 687880 - DNA, 120 bp, Artificial Sequence
  ENSG00000187833_16 (sequence is synthesized)
ccaaaagacccttaaaaagccccgaagctccctaggcatgcacatgctagagtccgtgcaagttttccatgcactcgggaaaaagatcgatatgaaaactggattctcttcctccaggac

SEQ ID NO: 687881 - DNA, 120 bp, Artificial Sequence
  ENSG00000187833_17 (sequence is synthesized)
cctgggaagctcaagcaacacccaaaaccgccagccattcccagctctcaaaccatggctggatatccaacatgagggtaaaggcccggagaaaattcaagtcaaggcccagaaactaga

SEQ ID NO: 687882 - DNA, 120 bp, Artificial Sequence
  ENSG00000187833_18 (sequence is synthesized)
tggtagtgctgaaaaagagtgtacatctccatcccactctgagttgccaccacctgggaaggtcaagttgatacctttgccctttctgaccctggaccaacctcaagctcgacatgtttc

SEQ ID NO: 687883 - DNA, 120 bp, Artificial Sequence
  ENSG00000187833_19 (sequence is synthesized)
tcggcggccaaaccctctagcctcacgtaggcctgctgtggcttaccctgctcgacctgattctactaactcagctcaatcgaatgcagtcaatccatcccgaccagctcctaccaacac

SEQ ID NO: 687884 - DNA, 120 bp, Artificial Sequence
  ENSG00000187833_20 (sequence is synthesized)
atctttgacaggtcctgccacaccagctcagccaatttcagccaaagcaacccaacccagttcagccaaccctacccagcctactgtccctcaatctgctgcttctaggccatcagccta

SEQ ID NO: 687885 - DNA, 120 bp, Artificial Sequence
  ENSG00000187833_21 (sequence is synthesized)
caaaacatcatcttgttcttctctgcagcgggagcctgtttccactgctgtgaccagtctccggtcactgcccaagcctcaaaatcaatttctaatccaagacttcagcctccaaccccg

SEQ ID NO: 687886 - DNA, 120 bp, Artificial Sequence
  ENSG00000187833_22 (sequence is synthesized)
tccatggaggaaacccactgttcctgagccagtaatgtcaacgcccatcacagaagagcagaggccagagcgtgaggccatgaagagaaaggctcaacaagagcgtgagaatgctgccaa

SEQ ID NO: 687887 - DNA, 120 bp, Artificial Sequence
  ENSG00000187833_23 (sequence is synthesized)
atacacctctttggggaaagtgcagtttttcattgaaagggaaagagatatggaaattgctgaatactatggctacacaatctaagagctgagattgttggttttactttggataccgct

SEQ ID NO: 687888 - DNA, 120 bp, Artificial Sequence
  ENSG00000187833_24 (sequence is synthesized)
ctgagattgttggttttactttggataccgctggttttccacatatatagatagatactaatttatttattctgatatatttttaaaacataataaagaaatgtaatagaattgattaat

SEQ ID NO: 687889 - DNA, 120 bp, Artificial Sequence
  ENSG00000187837_0 (sequence is synthesized)
atgtccgagactgctcctgccgctcccgctgccgcgcctcctgcggagaaggcccctgtaaagaagaaggcggccaaaaaggctgggggtacgcctcgtaaggcgtctggtcccccggtg

SEQ ID NO: 687890 - DNA, 120 bp, Artificial Sequence
  ENSG00000187837_1 (sequence is synthesized)
tcagagctcatcaccaaggctgtggccgcctctaaagagcgtagcggagtttctctggctgctctgaaaaaagcgttggctgccgccggctatgatgtggagaaaaacaacagccgtatc

SEQ ID NO: 687891 - DNA, 120 bp, Artificial Sequence
  ENSG00000187837_2 (sequence is synthesized)
caaacgaaaggcaccggtgcttctggctcctttaaactcaacaagaaggcagcctccggggaagccaagcccaaggttaaaaaggcgggcggaaccaaacctaagaagccagttggggca

SEQ ID NO: 687892 - DNA, 120 bp, Artificial Sequence
  ENSG00000187837_3 (sequence is synthesized)
gccaagaagcccaagaaggcggctggcggcgcaactccgaagaagagcgctaagaaaacaccgaagaaagcgaagaagccggccgcggccactgtaaccaagaaagtggctaagagccca

SEQ ID NO: 687893 - DNA, 120 bp, Artificial Sequence
  ENSG00000187837_4 (sequence is synthesized)
aagaaggccaaggttgcgaagcccaagaaagctgccaaaagtgctgctaaggctgtgaagcccaaggccgctaagcccaaggttgtcaagcctaagaaggcggcgcccaagaagaaatag

SEQ ID NO: 687894 - DNA, 120 bp, Artificial Sequence
  ENSG00000187838_0 (sequence is synthesized)
cggggccggggtccgagctcgggcccgcctccgcctccgccagctcctgtgagctgccgagtgctaggcacccgggctcttctgggggctccagaactaagccacccagacaccatcatc

SEQ ID NO: 687895 - DNA, 120 bp, Artificial Sequence
  ENSG00000187838_1 (sequence is synthesized)
tcgaaaaccccagcccttctcccatggcaggctacttgccccccaaaggctacgccccttcgcccccacctccctaccctgtcacccctgggtacccggagccggcgctacatcctgggc

SEQ ID NO: 687896 - DNA, 120 bp, Artificial Sequence
  ENSG00000187838_2 (sequence is synthesized)
ccgggcaggcgccagtgcccgcccaggtacctgccccagctcccggcttcgccctcttcccctcgcctggccccgtggccttggggtctgctgcccccttcttgccactgccaggggtgc

SEQ ID NO: 687897 - DNA, 120 bp, Artificial Sequence
  ENSG00000187838_3 (sequence is synthesized)
cttctggcctcgaattcctggtgcagattgatcagattttgattcaccagaaggctgagcgagtggaaacgttcctaggctgggagacctgtaatcggtatgaactgcgctctggggccg

SEQ ID NO: 687898 - DNA, 120 bp, Artificial Sequence
  ENSG00000187838_4 (sequence is synthesized)
ggcagcccctgggtcaggcggccgaggagagcaactgctgcgcccgtctgtgctgtggcgcccgccggccgctgcgtgtccgcctggccgaccccggggaccgtgaggtgctgcgtttgc

SEQ ID NO: 687899 - DNA, 120 bp, Artificial Sequence
  ENSG00000187838_5 (sequence is synthesized)
tccgcccgctgcactgtggctgcagctgctgcccctgtggcctccaggagatggaagtacaggctccaccaggcaccaccattggccacgtgctacagacctggcatcccttcctcccca

SEQ ID NO: 687900 - DNA, 120 bp, Artificial Sequence
  ENSG00000187838_6 (sequence is synthesized)
agttctccatccaggatgccgatcgccagacagtcttgcgagtggtggggccctgctggacctgtggctgtggcacagacaccaactttgaggtgaagactcgggatgaatcccgcagtg

SEQ ID NO: 687901 - DNA, 120 bp, Artificial Sequence
  ENSG00000187838_7 (sequence is synthesized)
tcagcaagcagtgggggggcctggtccgagaagccctcacagatgcagatgactttggcctacagttcccgctggacctggatgtgagggtgaaggctgtgctgctgggagccacattcc

SEQ ID NO: 687902 - DNA, 120 bp, Artificial Sequence
  ENSG00000187838_8 (sequence is synthesized)
tcattgactacatgttctttgagaagcgaggaggcgctgggccctctgccgtcaccagttagaggccaccatggtgtgaggagaccatcacctcgaccagaactccagatggtcacctgc

SEQ ID NO: 687903 - DNA, 120 bp, Artificial Sequence
  ENSG00000187838_9 (sequence is synthesized)
cctggcccctcctctgggcagcccctttcctccatgtacactgcaggggacagaaggggggccccatccctaccctactccctggccgcctgcccctgtggttcccaaggaggggtatgt

SEQ ID NO: 687904 - DNA, 120 bp, Artificial Sequence
  ENSG00000187838_10 (sequence is synthesized)
atgagagccgctctcctgctacctcccaccactgtcccagcagtccctcggcacacaggcatatcagctttcacactttccccatgcactctctcccacccccttccagggcctctgctc

SEQ ID NO: 687905 - DNA, 120 bp, Artificial Sequence
  ENSG00000187838_11 (sequence is synthesized)
caaaggaggcctctggaacccaggactctggggttttacaagagggctggggtgtggaagggcaagctgcaccaaagacggtggatatagccaccgcccccccgccgctgcctagcatct

SEQ ID NO: 687906 - DNA, 120 bp, Artificial Sequence
  ENSG00000187838_12 (sequence is synthesized)
gcttggccaattagttcagcctcagaccatggcactttgagggggtctctacctccccatcaacagctgcagggggaccccagtgccaacttcctctcccactagggccctgccttcagc

SEQ ID NO: 687907 - DNA, 120 bp, Artificial Sequence
  ENSG00000187838_13 (sequence is synthesized)
tggtgcttgctgcgattcctgtgccttatgtaactgcccttccttcccttgccctaggaaaaaggctgcatctttatatgttacattcatataaactttgtaactttttggacattgaaa

SEQ ID NO: 687908 - DNA, 120 bp, Artificial Sequence
  ENSG00000187838_14 (sequence is synthesized)
cagggcgctgagcacgcacgccgccggcctggcggcgttcgcggggcccgggaccagccgccgccttctccaggcgctcctactctctgggcatctgcagtccgagcggaaggggcggga

SEQ ID NO: 687909 - DNA, 120 bp, Artificial Sequence
  ENSG00000187838_15 (sequence is synthesized)
tccgccagctcctgtgagctgccgagtgctaggcacccgggctcttctgggggctccaggtgagcgggggcacagaggggtcagggagaccgcccttggggtggggctgtcggtctgacc

SEQ ID NO: 687910 - DNA, 120 bp, Artificial Sequence
  ENSG00000187838_16 (sequence is synthesized)
gcgggtccatctgtcctgccgtcggcccacagcctcctccgcaggatgggagaacaaagggagggggcggttctggggcccccgagggaatccagggtcccaggtacccggtcccgccca

SEQ ID NO: 687911 - DNA, 120 bp, Artificial Sequence
  ENSG00000187838_17 (sequence is synthesized)
ctgacacttgggtttctccccgagtcagaggcgccgcccaagagaccctgggccggcgccgggcgcagctgcctctccgtctttgtgtctgtctctgtgtctgtctggctatctccgagt

SEQ ID NO: 687912 - DNA, 120 bp, Artificial Sequence
  ENSG00000187838_18 (sequence is synthesized)
gccgagtgctaggcacccgggctcttctgggggctccagaactaagccacccagacaccatcatctcgaaaaccccagcccttctcccatggcaggtaagtgcgcgcaagtctgggggtc

SEQ ID NO: 687913 - DNA, 120 bp, Artificial Sequence
  ENSG00000187838_19 (sequence is synthesized)
tccgttatcccccccacggacttgggagccgggtttgaacacatcctcccggaatgtgctcggactggctgggtggggcccctcccttccttccggggaacctccaccctgctcccctgc

SEQ ID NO: 687914 - DNA, 120 bp, Artificial Sequence
  ENSG00000187838_20 (sequence is synthesized)
cccatctttctctgcctcttgccaccacgtttcccccgaagcctcgcggcccatgggctgaggaataaggggatgaggccttgagtccctttctaatctatcctgctcccaccgctttac

SEQ ID NO: 687915 - DNA, 120 bp, Artificial Sequence
  ENSG00000187838_21 (sequence is synthesized)
agccacccagacaccatcatctcgaaaaccccagcccttctcccatggcagattgatcagattttgattcaccagaaggctgagcgagtggaaaatggaagtacaggctccaccaggcac

SEQ ID NO: 687916 - DNA, 120 bp, Artificial Sequence
  ENSG00000187838_22 (sequence is synthesized)
tcctggcctcttgctaggggaaagtcaggaataggtgttgtgggggttgaggttctagagctggcctgtgacagccaagctgggctggcccagccggatctcccattgacagtggcctcc

SEQ ID NO: 687917 - DNA, 120 bp, Artificial Sequence
  ENSG00000187838_23 (sequence is synthesized)
aggagtgggaggttggacctcatgatggtggcccggatggtgggctcctgggcgcgcgaggctctacgagtctccccgtgtcacctcgggcagcgttcctaggctgggagacctgtaatc

SEQ ID NO: 687918 - DNA, 120 bp, Artificial Sequence
  ENSG00000187840_0 (sequence is synthesized)
agggcagcgagaggttcgcgggtgcagcgcacaggagaccatgtccgggggcagcagctgcagccagaccccaagccgggccatccccgccactcgccgggtggtgctcggcgacggcgt

SEQ ID NO: 687919 - DNA, 120 bp, Artificial Sequence
  ENSG00000187840_1 (sequence is synthesized)
gcagctcccgcccggggactacagcacgacccccggcggcacgctcttcagcaccaccccgggaggtaccaggatcatctatgaccggaaattcctgatggagtgtcggaactcacctgt

SEQ ID NO: 687920 - DNA, 120 bp, Artificial Sequence
  ENSG00000187840_2 (sequence is synthesized)
gaccaaaacacccccaagggatctgcccaccattccgggggtcaccagcccttccagtgatgagccccccatggaagccagccagagccacctgcgcaatagcccagaagataagcgggc

SEQ ID NO: 687921 - DNA, 120 bp, Artificial Sequence
  ENSG00000187840_3 (sequence is synthesized)
aggccttatgaaagtgatcatactgggcaggcgttggcgtggggtcggacaccccagccctttctccctcactcagggcacctgccccctcctcttcgtgaacaccagcagatacctcct

SEQ ID NO: 687922 - DNA, 120 bp, Artificial Sequence
  ENSG00000187840_4 (sequence is synthesized)
tgtgcctccactgatgcaggagctgccaccccaaggggagtgacccctgccagcacaccctgcagccaagggccaggaagtggacaagaacgaacccttccttccgaatgatcagcagtt

SEQ ID NO: 687923 - DNA, 120 bp, Artificial Sequence
  ENSG00000187840_5 (sequence is synthesized)
ccagcccctcgctgctgggggcgcaaccaccccttccttaggttgatgtgcttgggaaagctccctccccctccttccccaagagaggaaataaaagccaccttcgccctagggccaaga

SEQ ID NO: 687924 - DNA, 120 bp, Artificial Sequence
  ENSG00000187848_0 (sequence is synthesized)
atggccgccgcccagcccaagtaccccgccggggcgaccgcccggcgcctggcccggggctgctggtccgccctctgggactacgagacgcccaaggtgatcgtggtgaggaaccggcgc

SEQ ID NO: 687925 - DNA, 120 bp, Artificial Sequence
  ENSG00000187848_1 (sequence is synthesized)
ctgggggtcctgtaccgcgccgtgcagctgctcatcctgctctacttcgtgtggtacgtattcatcgtgcagaaaagctaccaggagagcgagacgggccccgagagctccatcatcacc

SEQ ID NO: 687926 - DNA, 120 bp, Artificial Sequence
  ENSG00000187848_2 (sequence is synthesized)
aaggtcaaggggatcaccacgtccgagcacaaagtgtgggacgtggaggagtacgtgaagccccccgaggggggcagcgtgttcagcatcatcaccagggtcgaggccacccactcccag

SEQ ID NO: 687927 - DNA, 120 bp, Artificial Sequence
  ENSG00000187848_3 (sequence is synthesized)
acccagggaacctgccccgagagcataagggtccacaacgccacctgcctctccgacgccgactgcgtggctggggagctggacatgctgggaaacggcctgaggactgggcgctgtgtg

SEQ ID NO: 687928 - DNA, 120 bp, Artificial Sequence
  ENSG00000187848_4 (sequence is synthesized)
ccctattaccaggggccctccaagacctgcgaggtgttcggctggtgcccggtggaagatggggcctctgtcagccaatttctgggtacgatggccccaaatttcaccatcctcatcaag

SEQ ID NO: 687929 - DNA, 120 bp, Artificial Sequence
  ENSG00000187848_5 (sequence is synthesized)
aacagcatccactaccccaaattccacttctccaagggcaacatcgccgaccgcacagacgggtacctgaagcgctgcacgttccacgaggcctccgacctctactgccccatcttcaag

SEQ ID NO: 687930 - DNA, 120 bp, Artificial Sequence
  ENSG00000187848_6 (sequence is synthesized)
ggtggtgtcatcggggtcattatcaactgggactgtgacctggacctgcctgcatcggagtgcaaccccaagtactccttccggaggcttgaccccaagcacgtgcctgcctcgtcaggc

SEQ ID NO: 687931 - DNA, 120 bp, Artificial Sequence
  ENSG00000187848_7 (sequence is synthesized)
tacaacttcaggtttgccaaatactacaagatcaatggcaccaccacccgcacgctcatcaaggcctacgggatccgcattgacgtcattgtgcatggacaggccgggaagttcagcctg

SEQ ID NO: 687932 - DNA, 120 bp, Artificial Sequence
  ENSG00000187848_8 (sequence is synthesized)
attcccaccattattaatctggccacagctctgacttccgtcggggtggtaaggaaccctctctggggtcccagcgggtgcggggggtccaccaggcccttacacaccggtctctgctgg

SEQ ID NO: 687933 - DNA, 120 bp, Artificial Sequence
  ENSG00000187848_9 (sequence is synthesized)
ccccagggctccttcctgtgcgactggatcttgctaacattcatgaacaaaaacaaggtctacagccataagaaatttgacaaggtgtgtacgccgagccacccctcaggtagctggcct

SEQ ID NO: 687934 - DNA, 120 bp, Artificial Sequence
  ENSG00000187848_10 (sequence is synthesized)
gtgacccttgcccgtgtattgggccaggcccctcccgaacccggccaccgctccgaggaccagcaccccagccctccatcaggccaggagggccaacaaggggcagagtgtggcccagcc

SEQ ID NO: 687935 - DNA, 120 bp, Artificial Sequence
  ENSG00000187848_11 (sequence is synthesized)
ttcccgcccctgcggccttgccccatctctgccccttctgagcagatggtggacactcctgcctccgagcctgcccaagcctccacacccacagaccccaaaggtttggctcaactctga

SEQ ID NO: 687936 - DNA, 120 bp, Artificial Sequence
  ENSG00000187848_12 (sequence is synthesized)
acaaaaacaaggtctacagccataagaaatttgacaagatggtggacactcctgcctccgagcctgcccaagcctccacacccacagaccccaaaggtttggctcaactctgagctcctt

SEQ ID NO: 687937 - DNA, 120 bp, Artificial Sequence
  ENSG00000187848_13 (sequence is synthesized)
agctagggacctgcacgtggacgtgggcacctcagtagcggagcatctccacgaaacggggcaccacaggatccctgtgcaagggctgggggcacgctctggccccaggcttgtgcccca

SEQ ID NO: 687938 - DNA, 120 bp, Artificial Sequence
  ENSG00000187848_14 (sequence is synthesized)
ccctggcatacagcccctgacacctcctccccagctggtccctacagggctgctcacttcccatcacctctcacagccacctggaacccaagccagctgagctctgaggggctctgctcc

SEQ ID NO: 687939 - DNA, 120 bp, Artificial Sequence
  ENSG00000187848_15 (sequence is synthesized)
cggtcttgggccctgggaaccccaccccaccccaccccacaggcgttgtaaccttgaatctgcccagactcttcccttagaagtcacaacatactcagtccaataaacctgtgagcagaa

SEQ ID NO: 687940 - DNA, 120 bp, Artificial Sequence
  ENSG00000187848_16 (sequence is synthesized)
atggccgccgcccagcccaagtaccccgccggggcgaccgcccggcgcctggcccggggctgctggtccgccctctgggactacgagacgcccaaggtgatcgtgagcataagggtccac

SEQ ID NO: 687941 - DNA, 120 bp, Artificial Sequence
  ENSG00000187848_17 (sequence is synthesized)
atggccgccgcccagcccaagtaccccgccggggcgaccgcccggcgcctggcccggggctgctggtccgccctctgggactacgagacgcccaaggtgatcgtggtacgtattcatcgt

SEQ ID NO: 687942 - DNA, 120 bp, Artificial Sequence
  ENSG00000187855_0 (sequence is synthesized)
tatgttggaacataatatgcagacccttatattctttgctacagtctgtatttttcctatacccttcaaacatgcctcattgagtttttaaaagattcggtttggaagaagaaaaacctc

SEQ ID NO: 687943 - DNA, 120 bp, Artificial Sequence
  ENSG00000187855_1 (sequence is synthesized)
aagcctcgccccgggtcttccttgacttgacacattttataaccgcaagagagcagtttttcctttgatgaggctaagaccccagaaatgaaagagcaagtttaagtttgcaaacactct

SEQ ID NO: 687944 - DNA, 120 bp, Artificial Sequence
  ENSG00000187855_2 (sequence is synthesized)
aaaagctccttccattagacctggtcgcgggaaaccacaaaggacagtcaagtgattttcaaggagaaagcctctggtccactttccctccgccgccagatctgcaggttcctgggagga

SEQ ID NO: 687945 - DNA, 120 bp, Artificial Sequence
  ENSG00000187855_3 (sequence is synthesized)
gctcttctcaaatcctgaagattgctaggctcttggcgaacgactcatctcttgaagacctagagtggtggattacaggcattgaaaagcttttggtggctttggaagatgactctggtg

SEQ ID NO: 687946 - DNA, 120 bp, Artificial Sequence
  ENSG00000187855_4 (sequence is synthesized)
tgagctcacctttccaggctgggggaccaggcagaggaaccccctttgttatcttctgaaagaagatcagtggggaagacggggtttgaagtgtggattaggagatcctacgtctttgcc

SEQ ID NO: 687947 - DNA, 120 bp, Artificial Sequence
  ENSG00000187855_5 (sequence is synthesized)
taccacctctgcctaaatcataaaaagatcgaggagtgcaatgaacttcaggaatcatgcaccgtttccctgaagcctgtccaggaacctaacttctggacccagaaacttctgcaaaga

SEQ ID NO: 687948 - DNA, 120 bp, Artificial Sequence
  ENSG00000187855_6 (sequence is synthesized)
cagacccactgagccaggcagtctgcaccagcacctctgcttctaagattctgtttcgtcttcttctattgagagattgacctcttgagtgatttgtgtgctttccggcaaatgatggag

SEQ ID NO: 687949 - DNA, 120 bp, Artificial Sequence
  ENSG00000187855_7 (sequence is synthesized)
acgcgtaaaccggcggaacggctggccttgccatactcgctgcgcaccgcgcccctgggcgttccggggaccctgcccggactcccgcggagggaccccctcagggtcgccctgcgtctg

SEQ ID NO: 687950 - DNA, 120 bp, Artificial Sequence
  ENSG00000187855_8 (sequence is synthesized)
gacgccgcgtgctgggagtgggcgcgcagcggctgcgcacggggatggcagtacttgcccgtgccgctggacagcgccttcgagcccgccttcctccgcaagcgcaacgagcgcgagcgg

SEQ ID NO: 687951 - DNA, 120 bp, Artificial Sequence
  ENSG00000187855_9 (sequence is synthesized)
ctgccatcgactacatcaagcacctgcaggagctgctggagcgccaggcctgggggctcgagggcgcggccggcgccgtcccccagcgcagggcggaatgcaacagcgacggggagtcca

SEQ ID NO: 687952 - DNA, 120 bp, Artificial Sequence
  ENSG00000187855_10 (sequence is synthesized)
aggcctcttcggcgccttcgcccagcagcgagcccgaggaggggggcagctagcgagcgcccgaactggccaggacccccgcgcccgccgcacagcgcgcagccgggcgctcaacctaag

SEQ ID NO: 687953 - DNA, 120 bp, Artificial Sequence
  ENSG00000187855_11 (sequence is synthesized)
gtcctcttcgaaggtggtttgcattcttaatctggcatcttctccaggcctaaatcttaagaaaaagaaatgggtgctggggtttgggggatgggggagttgttttgacatttgggaatt

SEQ ID NO: 687954 - DNA, 120 bp, Artificial Sequence
  ENSG00000187855_12 (sequence is synthesized)
tctcccctgcccttattggttacgtgcctgcaacttataggtgcttattaaggagactcttttcctatacttctaaaatgcaaactgtttcagattctgagcacctcattgtaaatacga

SEQ ID NO: 687955 - DNA, 120 bp, Artificial Sequence
  ENSG00000187855_13 (sequence is synthesized)
ttattctaaaaactcaaagggcgagaacaactggaatttcccaccttccgtggtgtgggtaaatggtatacataaacattaaaccttaaccaaagaagaactttaccgccaccaaaacag

SEQ ID NO: 687956 - DNA, 120 bp, Artificial Sequence
  ENSG00000187855_14 (sequence is synthesized)
aaacaaccccaaacagccaaaaacagtccttaaaaatgagaggaacattttcttgcattccttccttcgggaattgtattcaaaatgtaatggaaagtaattgttgacctcctgctttgg

SEQ ID NO: 687957 - DNA, 120 bp, Artificial Sequence
  ENSG00000187855_15 (sequence is synthesized)
gtgaaggagactgtaagctggtacttgagaacgaatttgccagcatgtgctgttgttgactgtgtgaatgatggtgccagggaatccgtggcttggtacacactgtttcatccagtggcc

SEQ ID NO: 687958 - DNA, 120 bp, Artificial Sequence
  ENSG00000187855_16 (sequence is synthesized)
acgtggaagctttgtagcattgagcagatagtaaaatatcttagaattaatgatctctttggaagagagcccagatttgtatgaaaacttgtttttcctctcaattgttttgtccactgt

SEQ ID NO: 687959 - DNA, 120 bp, Artificial Sequence
  ENSG00000187855_17 (sequence is synthesized)
tttcttcattttccttttctctgcataccccccgccccccaacgtgtagctctccatctaagttttggataaactgaagtggcactgtgactttaaaaataaaaaagaaatctacttgga

SEQ ID NO: 687960 - DNA, 120 bp, Artificial Sequence
  ENSG00000187857_0 (sequence is synthesized)
atgagaaattccacagcagtaacagactttattcttcttggattgacaagtgacccacagtggcaggttgtacttttcatatttcttcttgttacctacatgttaagtgtgactgggaac

SEQ ID NO: 687961 - DNA, 120 bp, Artificial Sequence
  ENSG00000187857_1 (sequence is synthesized)
ctgatcattatcaccctcaccctttcagatccccatctgcagactcccatgtatttcttccttcggaacttctcattcctggaaatttcattcacgtctgtctgcattcccagattcctt

SEQ ID NO: 687962 - DNA, 120 bp, Artificial Sequence
  ENSG00000187857_2 (sequence is synthesized)
gtcactgttgtgacaggaaacagaaccatttcttataatgggtgtgtggctcagctattttttttcatcttcttgggggtgacagaattttaccttctggctgccatgtcctatgaccgc

SEQ ID NO: 687963 - DNA, 120 bp, Artificial Sequence
  ENSG00000187857_3 (sequence is synthesized)
atctttccaccagtaatgcttctgctgcagttggatttctgtgcctccaatgtaattgatcattttatctgtgactcttctccaatgctgcagctctcttgcacaaacactcactttcta

SEQ ID NO: 687964 - DNA, 120 bp, Artificial Sequence
  ENSG00000187857_4 (sequence is synthesized)
gaactcatggcattttttttagctgtggtaacactgatggtcaccttgacattagttattctctcctacacaaacatcatccggacaattctgaaaattccttctatgagtcaaaggaaa

SEQ ID NO: 687965 - DNA, 120 bp, Artificial Sequence
  ENSG00000187857_5 (sequence is synthesized)
aaagccttttccacttgctcctcccatatgatagttgtctccatctcttacagtagctgtatcttcatgtacattaagacttctgccagagaaagggtgactttaagcaaaggagtagct

SEQ ID NO: 687966 - DNA, 120 bp, Artificial Sequence
  ENSG00000187857_6 (sequence is synthesized)
gtgctcaatacctcagtggctcctctcttgaatcccttcatatacacactgagaaataagcaagtgaagcaagccttcaagagcatggtccagaagatgattttttctttaaataaatga

SEQ ID NO: 687967 - DNA, 120 bp, Artificial Sequence
  ENSG00000187857_7 (sequence is synthesized)
ctcggaaagccactacattagccttcatttcaactaaaatttgtatcaaggtaatactttttaaagcggcgatagggaatatactgaaacatttagaagacagagatgtattctgaaata

SEQ ID NO: 687968 - DNA, 120 bp, Artificial Sequence
  ENSG00000187857_8 (sequence is synthesized)
tataaaaatataatgaaggaaatacagaaataattgatttataagatagatgcatcagcggatagctagacacaatggaatgttatccagcctcataaaagaaggagatactgccacact

SEQ ID NO: 687969 - DNA, 120 bp, Artificial Sequence
  ENSG00000187857_9 (sequence is synthesized)
gccatttgtgacattacggatgaacctggaaggcattatggtaaatggaaagagccagacagaaaaaaaataataattttctttactggtgtcatagttttctggtttcttcacctattt

SEQ ID NO: 687970 - DNA, 120 bp, Artificial Sequence
  ENSG00000187857_10 (sequence is synthesized)
tagttagacatagttacatatcatcaacacttcttaatgaaattagcctaaaaaccaagatttagctcttctaaactatatagaaagtgttcgctctctcacctatgtaactaaatttta

SEQ ID NO: 687971 - DNA, 80 bp, Artificial Sequence
  ENSG00000187857_11 (sequence is synthesized)
aaggcaaaatagattcttcattcataaaatagaggtagctataaattaaaaacttactaaaaccacattcaactatgaaa

SEQ ID NO: 687972 - DNA, 120 bp, Artificial Sequence
  ENSG00000187857_12 (sequence is synthesized)
aaccacattcaactatgaaattaattttatatgaaatgtttaaactatgtatcttaattaatatatctaaaattttttcttcaatgtcaccaggaaaaacatgttataaaactaaaagca

SEQ ID NO: 687973 - DNA, 120 bp, Artificial Sequence
  ENSG00000187857_13 (sequence is synthesized)
tcattaaaatgtctccttgtatttgtcaataaaatgtagttaaaatgtgtgtaaacattaaataaaagtgtaagacaaatgtgcagagatattatctctgttgtttgaattaaggctgta

SEQ ID NO: 687974 - DNA, 120 bp, Artificial Sequence
  ENSG00000187857_14 (sequence is synthesized)
ttactttttgtcttagctttcctagaaaaaaagagcaaagcgtaatcaaagagttgatattatttatcttatattttcctttgataatatttccttaaaaatagattatttaacagagaa

SEQ ID NO: 687975 - DNA, 120 bp, Artificial Sequence
  ENSG00000187857_15 (sequence is synthesized)
cttttctgtttctgccaatattttaaaagaaaaaccatgatctatgaaggcaattcatatttgtgttcagattccttatattgatacaaaattgccttactactgatatgatgaagaaaa

SEQ ID NO: 687976 - DNA, 120 bp, Artificial Sequence
  ENSG00000187857_16 (sequence is synthesized)
aagagtctacaatggtgtgatactgcccttttataaggtattcggcgaatgatgacgtggtttattaatgtcttggtttttccttttctagtaaacctataatattttatttatctttcc

SEQ ID NO: 687977 - DNA, 120 bp, Artificial Sequence
  ENSG00000187857_17 (sequence is synthesized)
attgtctccttcacaggtttcactcccctcacctatatccaagaaaatgacttttagaggtatttgagaactgtaaaaaatgtgttcaagcccacttcctatagttaatgagtccctcaa

SEQ ID NO: 687978 - DNA, 120 bp, Artificial Sequence
  ENSG00000187857_18 (sequence is synthesized)
ctcccatgtatcattaagaaaattggttgttgaatccagcagcacatcaaaaagataattcaccacgatcaagtgggctttaaacctggatgcaaggatggtttaacatacacgaatcaa

SEQ ID NO: 687979 - DNA, 120 bp, Artificial Sequence
  ENSG00000187857_19 (sequence is synthesized)
accacataaacagaactaaaaacaaaaaccatatgatcatctcaatagacacagaaaaaatagtcaataaatccaacatccctttatgacaaaaacactcaacaaaccacgcattgaagg

SEQ ID NO: 687980 - DNA, 120 bp, Artificial Sequence
  ENSG00000187857_20 (sequence is synthesized)
acgcattgaaggaaaatagcccaaaataataacagccatctgtgacagacccacagccaatatcataataaactagcaaaagttgtatgcattcttcctgagaactggaacaagacaagg

SEQ ID NO: 687981 - DNA, 120 bp, Artificial Sequence
  ENSG00000187857_21 (sequence is synthesized)
atgtcccctctcagcactcctattcaacatagtactgaaagccctagccagagcaatcaggcaagagagagaaatgaaaggcatccaaataggaaaagaagaagtcaaattatctccgtt

SEQ ID NO: 687982 - DNA, 120 bp, Artificial Sequence
  ENSG00000187857_22 (sequence is synthesized)
tactgaaaatataatcctgtacctaaaaaactttaaaggttcctccaaaaaactcctaggcctgataaactacttgagtaaagtttgaggatataaaatcaacatagaaaagtcagtagc

SEQ ID NO: 687983 - DNA, 120 bp, Artificial Sequence
  ENSG00000187857_23 (sequence is synthesized)
ctatacaccaataacattcaagctgagaaccaaataaaaaacgcaatcttggctgggtgtggtggctcatgcccgaaatctcagcactttgggaggccaagcggggaggattgcttgagc

SEQ ID NO: 687984 - DNA, 120 bp, Artificial Sequence
  ENSG00000187857_24 (sequence is synthesized)
gagcccagaagtttaagaccagccttggcaacatagtgagactctgtctacacaaaaaaatttaaaaattagctaagcatggtagcatacacctgtggtcccagctactcaagaagatga

SEQ ID NO: 687985 - DNA, 120 bp, Artificial Sequence
  ENSG00000187857_25 (sequence is synthesized)
ggtcccagctactcaagaagatgaggtgggagaattgcttggaccttggaggttgaggctgcagtgagctctcatcatgccactgcactccaccctggacaacagagtgagaccctgtct

SEQ ID NO: 687986 - DNA, 68 bp, Artificial Sequence
  ENSG00000187857_26 (sequence is synthesized)
gcatagcaagaccctatctctacttaaaaataaaaaaacaagatgcctgtaattccagcactttggga

SEQ ID NO: 687987 - DNA, 90 bp, Artificial Sequence
  ENSG00000187857_27 (sequence is synthesized)
agcactttgggaggccaaggcaggcaaattacttgagtacaagagttcaagacaagtctgagcaacatggtgaaaccccatcacgctggc

SEQ ID NO: 687988 - DNA, 120 bp, Artificial Sequence
  ENSG00000187857_28 (sequence is synthesized)
aatacaaaaattagctggtcacgctggcatgcacctgtagtcccagctacttaagaggctgaggtggaagaatcgcttgagtacaggaggtggaggctacagtgagccaagattgcacca

SEQ ID NO: 687989 - DNA, 120 bp, Artificial Sequence
  ENSG00000187857_29 (sequence is synthesized)
ctgcactccagcctgggcgatagagcgaaactctatctcgataaaataaaacaaaataaaaaagttattttaaaatttctaaaacaagaaaagaaaattggctgtcttgggacagtagct

SEQ ID NO: 687990 - DNA, 120 bp, Artificial Sequence
  ENSG00000187857_30 (sequence is synthesized)
atgaatctgactagatacaggataaatggattttagtttgattccttgattttcagctttgtctgatatacaggtgaatgtaaagagctctacaggttttctaagtctgtgacaaatact

SEQ ID NO: 687991 - DNA, 120 bp, Artificial Sequence
  ENSG00000187857_31 (sequence is synthesized)
tttttttatagatgtgagcgtccttcagcacttgtctatttcttaccattgtgttttatggaatggcatacttttttttaaaacagattataatataatatcatcacaaaatgaaaatta

SEQ ID NO: 687992 - DNA, 120 bp, Artificial Sequence
  ENSG00000187857_32 (sequence is synthesized)
catgataatgattacatgattatttcattatgaattctttattgtggcaatttgtaaagaaatgagacattgtaagtttgcttttattaagattacaacaagtaagcagaaatgcaaaag

SEQ ID NO: 687993 - DNA, 120 bp, Artificial Sequence
  ENSG00000187857_33 (sequence is synthesized)
tgaaaatcaggagtgtggaaacaacatgcaaacgttaactaagtgaagataaagtatatatacatatacaactacatgatagatagatagataaagagagatagagggaaagagagggaa

SEQ ID NO: 687994 - DNA, 120 bp, Artificial Sequence
  ENSG00000187857_34 (sequence is synthesized)
agaagagaaactggaaaattagagagtaagggaaagtaaattttcttaatccacaaaaacttatctgaagaagttgattctaatgttcaataaatgtaaacccatgaaaatcactatgaa

SEQ ID NO: 687995 - DNA, 120 bp, Artificial Sequence
  ENSG00000187857_35 (sequence is synthesized)
tataaaaatataatgaaggaaatacagaaataattgatttataagcgaaaatacagaatacttttctaaagaaaaaaataatgagaaattccacagcagtaacagactttattcttcttg

SEQ ID NO: 687996 - DNA, 120 bp, Artificial Sequence
  ENSG00000187860_0 (sequence is synthesized)
cccttcatagcggccggccgcttattcctgtgcgagtaaggagcgcccaggccaaccctccggctgcaggctgaggggcgggggagaggtacctgtttgggctccgtgggcacgggcggc

SEQ ID NO: 687997 - DNA, 120 bp, Artificial Sequence
  ENSG00000187860_1 (sequence is synthesized)
ggcgggggcaccgcctgcacgggtccggccggcatgactgcgacgctcagggctgccagtccgcctcggtgtcggtgagcggtgccgcctcaagacagcctccccgctcggtcagtacga

SEQ ID NO: 687998 - DNA, 120 bp, Artificial Sequence
  ENSG00000187860_2 (sequence is synthesized)
cgagctcgcaagatggcggcggccgagcgagttgcggccgcgaaggtacgactggcgcacttccgggaccgtcccctcgccgtgacgcgcttcccgcccctccccgcgggcaccgcggcg

SEQ ID NO: 687999 - DNA, 120 bp, Artificial Sequence
  ENSG00000187860_3 (sequence is synthesized)
tccgacgccgttgccaaggcagcggcctgagcgcccggctagggcttttcggggatcccggtggccgcaggcgcaccgggggcagttccgggagccgaccagacacgaaggctgaagccg

SEQ ID NO: 688000 - DNA, 120 bp, Artificial Sequence
  ENSG00000187860_4 (sequence is synthesized)
cgacgccgaagacagggtctgaagagctactcagagccaaccctgcactggagacaggaagccgggcacctggatgagcctctgacccagagccctggagcccataggctcgtctgagaa

SEQ ID NO: 688001 - DNA, 120 bp, Artificial Sequence
  ENSG00000187860_5 (sequence is synthesized)
ctagacacactcagtcactccagctccacgggcagacacctgcacagaggatctgtgaggatggcgcacctgctgggcagccaggcctgcatggagagcctgcgcacagacctcaccgac

SEQ ID NO: 688002 - DNA, 120 bp, Artificial Sequence
  ENSG00000187860_6 (sequence is synthesized)
ctgcagggtgccatcgtagacgtcttctcccgcgccgggcctgtgcgcttcccctcctggaagttccctgaccgcatggcctgtgacctcgacatggtggccctgctggagcactatgac

SEQ ID NO: 688003 - DNA, 120 bp, Artificial Sequence
  ENSG00000187860_7 (sequence is synthesized)
catgttccgggtgaccccgagttcacgcagctgtcccatgccgtgctgctggagctggtcatcgacaggctcctgctgctgcttcaaagctgtatgagctacttggagaaccttggctca

SEQ ID NO: 688004 - DNA, 120 bp, Artificial Sequence
  ENSG00000187860_8 (sequence is synthesized)
gagcagatgatgccccctgcacaggctgcggggccctgcatgtccgtggggctcacggtgcggcgcttctgggacagcctgctgaggctgggcacgctccaccagcagccactcccccag

SEQ ID NO: 688005 - DNA, 120 bp, Artificial Sequence
  ENSG00000187860_9 (sequence is synthesized)
aaaggggcaaaccaaagggagactcccacctccaagcccaccaccaagggcgagccagccaggagccctgaatatctgactaccaagttaatcaagccctcctccccagtgctaggcttg

SEQ ID NO: 688006 - DNA, 120 bp, Artificial Sequence
  ENSG00000187860_10 (sequence is synthesized)
ccccagacctgccaagagccagagagcatccctgtcagagcctccctgcagttcccagccacgaccttcaagaacaccaggagtgtccactcccagaccattgagacggccctggtgccc

SEQ ID NO: 688007 - DNA, 120 bp, Artificial Sequence
  ENSG00000187860_11 (sequence is synthesized)
tgtgacgcatgcgccagcgtccagggaagcctgcagaaggtgggcaaggtggtcatcagcctgtgtcagagccagaacctgccctcgtccttaggccagttccagcaactggtgcaggac

SEQ ID NO: 688008 - DNA, 120 bp, Artificial Sequence
  ENSG00000187860_12 (sequence is synthesized)
gcatggggctcaggccactgccggctgccaccgtgggccgctgggcagcagagcagaggaaagacctgacgcgcctcagtaagcatgtggaggccctcagggcccagctggaggaggctg

SEQ ID NO: 688009 - DNA, 120 bp, Artificial Sequence
  ENSG00000187860_13 (sequence is synthesized)
aagggcagaaggatggcctgaggaagcaggcgggcaagctggagcaggcgctgaaacaggagcagggggcacggcggcgacaggcggaggaggatgagcagtgcctgtctgagtgggagc

SEQ ID NO: 688010 - DNA, 120 bp, Artificial Sequence
  ENSG00000187860_14 (sequence is synthesized)
acgacaaacagcagctgctcacagaaacaagtgacctaaagacaaagatggccaccctggagagagaactgaaacagcagcgggagtccacacaggctgtggaggcaaaggcccagcagc

SEQ ID NO: 688011 - DNA, 120 bp, Artificial Sequence
  ENSG00000187860_15 (sequence is synthesized)
tgcaggaggaaggtgagcgcagggcggcagcggagaggcaggtgcagcagctggaggagcaggtgcagcagttggaggcgcaggtgcagctgttggtgggtcggctggagggcgctggcc

SEQ ID NO: 688012 - DNA, 120 bp, Artificial Sequence
  ENSG00000187860_16 (sequence is synthesized)
agcaggtctgctgggccagcacggagctggataaggagaaggcccgtgtcgacagcatggtccgccaccaggagtctctgcaggccaagcagcgagccctgctaaagcagctggacagcc

SEQ ID NO: 688013 - DNA, 120 bp, Artificial Sequence
  ENSG00000187860_17 (sequence is synthesized)
tggaccaggaacgtgaggagctgcggggcagcctggacgaggctgaggcccagcgggcccgcgtggaggagcagctgcagagcgagcgggagcaggggcaatgccagctcagggcccagc

SEQ ID NO: 688014 - DNA, 120 bp, Artificial Sequence
  ENSG00000187860_18 (sequence is synthesized)
aggagctgctgcagagcctgcagagggagaagcaaggcctggagcaggcgactacggacctgcggctaaccatcctggagctagaacgggagctggaggagctgaaggagcgggagcggc

SEQ ID NO: 688015 - DNA, 120 bp, Artificial Sequence
  ENSG00000187860_19 (sequence is synthesized)
tgctggtggccttcccagacctgcacaggcccaccgagacccagatccatggaggcagatccagcagcgtggaatcccagataacatgtcccacagactctggcaacgtcacagatcaca

SEQ ID NO: 688016 - DNA, 120 bp, Artificial Sequence
  ENSG00000187860_20 (sequence is synthesized)
tggagaggcaagtgcagtccaacgacatccgcatccgggtcctacaggaggagaacgggcggctccaatcaatgctgtccaaaatccgggaagtggcccagcagggtggcctcaagctga

SEQ ID NO: 688017 - DNA, 120 bp, Artificial Sequence
  ENSG00000187860_21 (sequence is synthesized)
tcccgcaggaccggctctggtccccttccagcaagggaacccagggagcaacaccaccagtccaggccaagagcacatccccagggcctctgggcagacagcaccttcctagcagcagga

SEQ ID NO: 688018 - DNA, 120 bp, Artificial Sequence
  ENSG00000187860_22 (sequence is synthesized)
cgggtaggaccctgctgggccagccctgcacatccccacctcggcagccctgcacatccccacctcggcagccctgcacatccccacctcggcagccctgcacatccccatctcggcagc

SEQ ID NO: 688019 - DNA, 120 bp, Artificial Sequence
  ENSG00000187860_23 (sequence is synthesized)
cctgcagccagcccagcaagtccttgctggagggtgtgacccacttggacacctgcacccagaaccccatcaaggtcttggtcaggctgagaaagagactgtcacctggccggggacagg

SEQ ID NO: 688020 - DNA, 120 bp, Artificial Sequence
  ENSG00000187860_24 (sequence is synthesized)
ccagctctgcacaccagccccaggagcggcccatgtagcctgtggcccagggctgaggctggatgggaggtggctggcagcccacccactgtaataaagccccagccattggcccacagc

SEQ ID NO: 688021 - DNA, 120 bp, Artificial Sequence
  ENSG00000187860_25 (sequence is synthesized)
cttgaccaagcctggtcatctcaggatgccagcacctgcccctgaaaccagtggcagctacggaagcccctccagaggcaggggtgatgttggaacaacagtcaccattgagtacctgtc

SEQ ID NO: 688022 - DNA, 120 bp, Artificial Sequence
  ENSG00000187860_26 (sequence is synthesized)
ggggccacatcagctcaggactttcaaagtggtcttaccttttatcatgtgtcttgtgttgtgtgctgtgctatcctgtgttaggctctcctagcctgtccacctcaggcagttgatttc

SEQ ID NO: 688023 - DNA, 120 bp, Artificial Sequence
  ENSG00000187860_27 (sequence is synthesized)
cattccatcggtctctgtggcaccacagctgtgaccacggtctctcagcctctcccagctgcctcctcagggtttctatgttggggaccccatagttgcttctcagagtttccattccgg

SEQ ID NO: 688024 - DNA, 120 bp, Artificial Sequence
  ENSG00000187860_28 (sequence is synthesized)
gctctctttcctgttgtcctgtgggttgtgctgttccctctgcatatcacaaggccggacacgggatgtggttttccaaatcctgacccgctgggaagagccttgctgattctcctgcag

SEQ ID NO: 688025 - DNA, 85 bp, Artificial Sequence
  ENSG00000187860_29 (sequence is synthesized)
tcctgacccgctgggaagagccttgctgattctcctgcagcctcatcacttctaagctatcattaaagttaacatggtcactttg

SEQ ID NO: 688026 - DNA, 66 bp, Artificial Sequence
  ENSG00000187860_30 (sequence is synthesized)
atgcactccagcctcggtaatggagtaagactttctcaaaaaaaaaaaaaagtgaaaataaaaata

SEQ ID NO: 688027 - DNA, 120 bp, Artificial Sequence
  ENSG00000187860_31 (sequence is synthesized)
ccagcgggcccgcgtggaggagcagctgcagagcgagcgggagcaggggcaatgccagctcagggcccagcaggtgagggtgggggtcttcctttttgccagagaagtctccggccaact

SEQ ID NO: 688028 - DNA, 120 bp, Artificial Sequence
  ENSG00000187860_32 (sequence is synthesized)
ctgctcacaggtctgtgccccagaggccagacgcctggtgcccaggggctctgccacagcctttgcatggatgtttgtgagacagggcttccagggcaagtggtttgtgtggaagaaccc

SEQ ID NO: 688029 - DNA, 120 bp, Artificial Sequence
  ENSG00000187860_33 (sequence is synthesized)
aggctgggacacaggcaagaggcagggaagggagggcagcaaggaagggggtgttcatccggtggtgacactgtgatctcagtcccactggggccaccaggagctgggctaggacgcttg

SEQ ID NO: 688030 - DNA, 120 bp, Artificial Sequence
  ENSG00000187860_34 (sequence is synthesized)
cccagactcgtccatcggtcagtgagggaaccgaggtatgtatccacttgcactgtcagtcattgagggctacttccagagagttattcccctggcacttccagccaagcagagcagcct

SEQ ID NO: 688031 - DNA, 120 bp, Artificial Sequence
  ENSG00000187860_35 (sequence is synthesized)
ctctggttgtggcaaaagccattagagacaaagttcctggcaccagaagatggccagtgcccactgatgggaggcctgagggatttgccctttctgagcctcatcacagttgcctccatg

SEQ ID NO: 688032 - DNA, 120 bp, Artificial Sequence
  ENSG00000187860_36 (sequence is synthesized)
gacgacaccaaggcccagagaggtgtagacacatggcagccagcccatgagaagcagggtgggtaagggcccagccgcttccaccagcctccctagagctcctcccatggccgcaggcgg

SEQ ID NO: 688033 - DNA, 120 bp, Artificial Sequence
  ENSG00000187860_37 (sequence is synthesized)
cccctctgcaggcgatgggctgcctccactccacggggcacactgggcatgaaggccgccggccaggtccatgggaccctctgaagggcctctctcttggctgccatagaaacaagtgac

SEQ ID NO: 688034 - DNA, 120 bp, Artificial Sequence
  ENSG00000187860_38 (sequence is synthesized)
gaaagaacccttccttccctgtcctgggcaggggccactgagtccccagccatgtagttcagtcagtcagcagagtcctggcactatgggccctcagtaaaaggggccttcctgcttccc

SEQ ID NO: 688035 - DNA, 120 bp, Artificial Sequence
  ENSG00000187860_39 (sequence is synthesized)
tcccgacagaggctgtgggataggagagtacacccagggcagaggaagctcctaagacctgggccaggtgaaggtccgtttttctatccccagagcaagggtcgaggggtgaaccttggc

SEQ ID NO: 688036 - DNA, 120 bp, Artificial Sequence
  ENSG00000187860_40 (sequence is synthesized)
tcagtggcccgcactgactcaggaaggggtcaggtgggagtggacagaggaagggccggtgaggatgtctgaagcaggcagagggcagcaacgccttcagcctcccaccctggctctgga

SEQ ID NO: 688037 - DNA, 120 bp, Artificial Sequence
  ENSG00000187860_41 (sequence is synthesized)
cctgcgctgggcacattaaggacccaagaggtcaggcctcctttcactgaggaactccttgcctttaggaaatggtgaccgtcatgaaggtttctctaaatcctggagatcatagcccca

SEQ ID NO: 688038 - DNA, 120 bp, Artificial Sequence
  ENSG00000187860_42 (sequence is synthesized)
ggaggccactgaaggcggggcaaggcctccaccaagcagaggacaccctgccagccctggctttcccatccctgtcccttgggggtctcttcagcccagggtgccatgcggccaagcatc

SEQ ID NO: 688039 - DNA, 120 bp, Artificial Sequence
  ENSG00000187860_43 (sequence is synthesized)
tggggctctggttttcctcatgaagccaccagcctaccctgagccacctcacctgtgaaggacaatctccaaaaacttgctgaggccttctcagggcgcacgctcccaaatgcctgaagc

SEQ ID NO: 688040 - DNA, 120 bp, Artificial Sequence
  ENSG00000187860_44 (sequence is synthesized)
attttcccttggtgaagaggccgtcaggtagagcacctcagttcacagagaagggtcaagaggggccatgtatatagctgagctaccacagctttggtcagcccaacttcctgcttctga

SEQ ID NO: 688041 - DNA, 120 bp, Artificial Sequence
  ENSG00000187860_45 (sequence is synthesized)
ggggcctgggagttcctgagggaggctggggtgccccgggcacccccctcacaggggagcaccatccctcagcaccctgagccagaaggcctgtgctcaagtccaggggaaggacctcac

SEQ ID NO: 688042 - DNA, 120 bp, Artificial Sequence
  ENSG00000187860_46 (sequence is synthesized)
agctgagtagctctctcaggcgcccaccaactccgtgccatgtattcattagctcccagttctggcagtcagaagtccaggttctgtgtggctgggtttttttgctccgggtcccagagg

SEQ ID NO: 688043 - DNA, 120 bp, Artificial Sequence
  ENSG00000187860_47 (sequence is synthesized)
gctgaaattgaggcatctaccaggttgcgttcctttctgccggttctggggaagaattggcttccaagctccacttgttggcagaattccgatccttgcggctgtgggactgaggtcccc

SEQ ID NO: 688044 - DNA, 120 bp, Artificial Sequence
  ENSG00000187860_48 (sequence is synthesized)
atgtcctcgctggctggctgtaagccaggtcctctcacggctcctagaggccgtccaccttccttgccatggggctccctccatcttcaagtcaacaacagaggatttctcatgtgctga

SEQ ID NO: 688045 - DNA, 120 bp, Artificial Sequence
  ENSG00000187860_49 (sequence is synthesized)
atcccccacatgcttcaaatccctgacttcctcctcttctaccagcagaaaactactttgaataggctcatgtggttagggcaaggctcacactcaaatactttccctatcttcaggtca

SEQ ID NO: 688046 - DNA, 88 bp, Artificial Sequence
  ENSG00000187860_50 (sequence is synthesized)
gcaaggctcacactcaaatactttccctatcttcaggtcagcttgctataagacagaacccaaccatgggcataaaatccctttgaga

SEQ ID NO: 688047 - DNA, 120 bp, Artificial Sequence
  ENSG00000187862_0 (sequence is synthesized)
cagagagccagctgcggagaagacccaaggagccctatgtcttcccccaaccctgaggatgtgccccggaggccagaacctgagccctcaagctccaataagaaaaagaagaaaagaaag

SEQ ID NO: 688048 - DNA, 120 bp, Artificial Sequence
  ENSG00000187862_1 (sequence is synthesized)
tggctgcggcaagaagccagcatccaagccctcaccagggctggccatggggcccttcaggctggccagaaccatgaagccttgaacaacttccagagggccttccttctggcctccaag

SEQ ID NO: 688049 - DNA, 120 bp, Artificial Sequence
  ENSG00000187862_2 (sequence is synthesized)
gccccacaaaccagggatacccctgtgctccaggcctgcgccttcaacctgggggctgcctatgtggagactggggacccagccagaggccttgagctactcctgcgagcccaccctgaa

SEQ ID NO: 688050 - DNA, 120 bp, Artificial Sequence
  ENSG00000187862_3 (sequence is synthesized)
gagaaggcacagggcaggcgacacggcgaccaatgtttcaatgtggctttggcctaccatgccctcggcgagctgcctcaagctttggcctggtaccacagggccctgggccactaccag

SEQ ID NO: 688051 - DNA, 120 bp, Artificial Sequence
  ENSG00000187862_4 (sequence is synthesized)
ccacagggtgaccagggagaagcctgggcaaaaatgggagcctgctaccaggctctgggacagcctgagctagcagcccactgcctgcaggaagcaagccaggcctatgctcaagagaga

SEQ ID NO: 688052 - DNA, 120 bp, Artificial Sequence
  ENSG00000187862_5 (sequence is synthesized)
cagctgcgggccgcagccctggcactgggggctgcggcaggatgtatgctgaagagtgggcggcatcgggtgggggaagttgtgcaggtgctggagaaaagccggaggcttgccgagagg

SEQ ID NO: 688053 - DNA, 120 bp, Artificial Sequence
  ENSG00000187862_6 (sequence is synthesized)
agcactgagaggcgactgctggggcacctctataacgatctaggcctgggctactcccagctccagctgttcccgctggccgtggaggccttcctgcaggccctgcccctgtgctgggtg

SEQ ID NO: 688054 - DNA, 120 bp, Artificial Sequence
  ENSG00000187862_7 (sequence is synthesized)
ccaggagagcaggccacagtgctaagaaacctcgggatggcccacaatgccctcggcaactatcaggaagctcgggagtttcaccagaaggctgctgacctacacggctctgtggggcag

SEQ ID NO: 688055 - DNA, 120 bp, Artificial Sequence
  ENSG00000187862_8 (sequence is synthesized)
tgcatgccctgcaggctgcccgggactctggggacatgaagggacagtggcaggcctgtgagggtctgggggctgctgcagccaggctggggcagtatgaccaggccttgaagtactata

SEQ ID NO: 688056 - DNA, 120 bp, Artificial Sequence
  ENSG00000187862_9 (sequence is synthesized)
aggaagcactggcccagtgtcagaaggagccagattctgtgcgagaacggctggtggccaagctggcagacaccgtgaggacgcgcttggcccaggtggggctggtccagactcacaccc

SEQ ID NO: 688057 - DNA, 120 bp, Artificial Sequence
  ENSG00000187862_10 (sequence is synthesized)
tgacttcggctccgggaagactccaggctccaggtggggccagccaggcggaggggaccccagcaaaggcaggaagcagcacagcaggtgtccagcacagatcttccagtgggtgggaag

SEQ ID NO: 688058 - DNA, 120 bp, Artificial Sequence
  ENSG00000187862_11 (sequence is synthesized)
atgaagagtttgaggagggccaccagaagaaaaaagaggagaggtcggcaaacgttccggtgagggctgggccgggaagaccagagctgtgtttccttccaggcacagtgaatcattcgc

SEQ ID NO: 688059 - DNA, 120 bp, Artificial Sequence
  ENSG00000187862_12 (sequence is synthesized)
accatctagcttctagttgccccacgtttaccaagcacacgccctgcagagggacagtcctcggcaaagcctccatctatagtccaggacccagggcccatcttccatttgtaggtccag

SEQ ID NO: 688060 - DNA, 120 bp, Artificial Sequence
  ENSG00000187862_13 (sequence is synthesized)
gccctcccagagcggagtaccctagcatcttggtacccaatggccctcaagccaataggtcatccaggtggcccagggaaagcctcagcaggagccgccagaggagacccatggagtcgg

SEQ ID NO: 688061 - DNA, 120 bp, Artificial Sequence
  ENSG00000187862_14 (sequence is synthesized)
gcatctgcactattgtgtgacctccccctgccagcctcagccctcatccctgaagcacctgtccaacacgcacacactagggggtcctggggaccaagcctcttcccagttgctcagccc

SEQ ID NO: 688062 - DNA, 120 bp, Artificial Sequence
  ENSG00000187862_15 (sequence is synthesized)
tgcagggatgtggaacacagtgcagccagtggactcctgaggaggctggccaagggctttgcaggctcggccctgagaggttctgtttgttcctccttgggatttttggactcagtaggt

SEQ ID NO: 688063 - DNA, 120 bp, Artificial Sequence
  ENSG00000187862_16 (sequence is synthesized)
gcctggcacaacctcgcgccacccctgaccctggctgtcccagttcgcaagtccccaacagccctcccatgatttctgcttgtctctcaaggccctggaccattttccctgaacccttct

SEQ ID NO: 688064 - DNA, 120 bp, Artificial Sequence
  ENSG00000187862_17 (sequence is synthesized)
agaactccctcttccttcctgctctcatggctttcctaacttctagaactttgcatcttggaccccagggttttgctgaaagcctactctgtgcccaacacagcgctgggtgctgttggt

SEQ ID NO: 688065 - DNA, 120 bp, Artificial Sequence
  ENSG00000187862_18 (sequence is synthesized)
aaaccccagctcactactcaatagcatctcccacaaagacttgcaactcagggagcagagttctttgctacttgttgagctgacctgaatttaccgatgtctccttttcagtgtgtttcc

SEQ ID NO: 688066 - DNA, 120 bp, Artificial Sequence
  ENSG00000187862_19 (sequence is synthesized)
ttccaggcacagtgaatcattcgcaccatctagcttctagttgccccacgtttaccaagcacacgccctgcagagggacagtcctcggcaaagcctccatctatagtgagcagtgcatcc

SEQ ID NO: 688067 - DNA, 120 bp, Artificial Sequence
  ENSG00000187862_20 (sequence is synthesized)
agaggattggattgaggggtcagaatacctgggtcccagccaatgtctgccacctattttctgtgactttacggtatcaggccccagaagggatggggtggtcatcaggcgctggccagg

SEQ ID NO: 688068 - DNA, 120 bp, Artificial Sequence
  ENSG00000187862_21 (sequence is synthesized)
tctgctagtccctaaatctgaattcaagcctgagagttactagcagggaccttaatagaacaaagagcctcaccccagaattgtattctccgagacaagcggcagagcccgaattgtctc

SEQ ID NO: 688069 - DNA, 120 bp, Artificial Sequence
  ENSG00000187866_0 (sequence is synthesized)
agattctcggtggcggcggcagcggcggcggccctggactgcggggaatgggaatcctaggtccctgactgagcacctcccccgcctccctgcccccgacatggctcaggagaagatgga

SEQ ID NO: 688070 - DNA, 120 bp, Artificial Sequence
  ENSG00000187866_1 (sequence is synthesized)
gctagacctggagctgcctccgggtacgggcgggagcccggcggagggcggtggcagcggcggcggcgggggcctcaggaggtctaacagcgcccccctgatccacggcctcagtgacac

SEQ ID NO: 688071 - DNA, 120 bp, Artificial Sequence
  ENSG00000187866_2 (sequence is synthesized)
ttcgccggtgttccaggccgaggcgccgagcgccaggcggaacagcacaacgttcccgagccgccacggcctgctgctgccggcctcccctgtccgcatgcacagcagccgcttgcacca

SEQ ID NO: 688072 - DNA, 120 bp, Artificial Sequence
  ENSG00000187866_3 (sequence is synthesized)
gatcaaacaagaagagggcatggacttgatcaaccgagagacggtccacgaacgggaggtgcagaccgcaatgcagataagccactcctgggaggaaagtttcagcctgagtgacaacga

SEQ ID NO: 688073 - DNA, 120 bp, Artificial Sequence
  ENSG00000187866_4 (sequence is synthesized)
cgtggagaaatccgcctcccccaagcgcatcgatttcattcctgtgtcaccagcaccgtcacccactcggggaattgggaagcagtgtttttcgccatccttgcaaagttttgtaagtag

SEQ ID NO: 688074 - DNA, 120 bp, Artificial Sequence
  ENSG00000187866_5 (sequence is synthesized)
caacggattgcctccaagccctattcccagcccaacgacccgatttaccacccggagaagccagagccccatcaattgcattagaccaagtgttcttggaccattgaaaagaaaatgtga

SEQ ID NO: 688075 - DNA, 120 bp, Artificial Sequence
  ENSG00000187866_6 (sequence is synthesized)
aatggaaactgaatatcagccaaagagatttttccagggcatcaccaacatgctttcttctgacgttgcacagctgtcagatcctggtgtgtgtgtatcttcggatacccttgatggaaa

SEQ ID NO: 688076 - DNA, 120 bp, Artificial Sequence
  ENSG00000187866_7 (sequence is synthesized)
cagcagcagtgccggatcttcttgtaactcaccagcgaaagtcagcactaccaccgactctcctgtgtcacctgcccaagcggcttctccatttattccactagatgaactttcgtctaa

SEQ ID NO: 688077 - DNA, 120 bp, Artificial Sequence
  ENSG00000187866_8 (sequence is synthesized)
gtgattcactcatcctgagactttctttttgcagtggagagagagaataatctagttggggcaaacactgaactttgtcaattaatttgaggctatttcctatttgaccccttttctttt

SEQ ID NO: 688078 - DNA, 120 bp, Artificial Sequence
  ENSG00000187866_9 (sequence is synthesized)
ttgaaattccctgaaatgatgttattctagagaacttctatgtcaggttcctttggatacccttgaattcagtgtagtaatattttcagacgtttccccaataagtgtgttgaagcatac

SEQ ID NO: 688079 - DNA, 120 bp, Artificial Sequence
  ENSG00000187866_10 (sequence is synthesized)
atctttacgctgctaatatgtctaaatacatatgttatcccttgatttttttaaataactgagagctctatttatttatgggattattaagttctgatgaaaatataaatgttgacttaa

SEQ ID NO: 688080 - DNA, 120 bp, Artificial Sequence
  ENSG00000187866_11 (sequence is synthesized)
tcagcatagtaaactgatgtttaaaattccatacttcatgcccacactaatttttaatgttattttcagtggttgccgatttccatttgatgaagaactatacagcttaaaaaaatacgt

SEQ ID NO: 688081 - DNA, 120 bp, Artificial Sequence
  ENSG00000187866_12 (sequence is synthesized)
tagttatatctatctagtggttgtctgttttacccaggaattcttggatatttagttttctgggtactgaagtggatgggagggggaatgattaaagaacaaattataaaagtttgaaca

SEQ ID NO: 688082 - DNA, 120 bp, Artificial Sequence
  ENSG00000187866_13 (sequence is synthesized)
aaacttttaagaaaaacatttttaatgagattttaatagtaattctagtcagtcatacaactataactactatagagaaaataaaattttttcctttttttttttaaccggaaagtgcat

SEQ ID NO: 688083 - DNA, 120 bp, Artificial Sequence
  ENSG00000187866_14 (sequence is synthesized)
cctttttttttttaaccggaaagtgcatttgcttgggtgtaatcctaaagtgaaatgggacagtgccttgcagtctttgcccactatacataggctaaggctaagctctttgtactactg

SEQ ID NO: 688084 - DNA, 120 bp, Artificial Sequence
  ENSG00000187866_15 (sequence is synthesized)
caaacttaaaagtttttcaaatgtgggaaacgtgtgggaaggcttgttgaactttggcgcactcaggtaaacaatactctctcaattgttgatatactttaaaatattcagttgtgcctc

SEQ ID NO: 688085 - DNA, 120 bp, Artificial Sequence
  ENSG00000187866_16 (sequence is synthesized)
agttccagaaattattgccaaacaggagccacagcaatttttggctacttttctgctctgcccatctgtcaccttactggttttcccttgttcaggaaggaagcagctgtttccttgcca

SEQ ID NO: 688086 - DNA, 120 bp, Artificial Sequence
  ENSG00000187866_17 (sequence is synthesized)
acaggtcccttcctctccatctcccaccaaactagggcaccattgattagacaaaggtacagtgtaacttgggtttctgacagcaacaacaggactgtgaattgtttaacctctgtggtt

SEQ ID NO: 688087 - DNA, 120 bp, Artificial Sequence
  ENSG00000187866_18 (sequence is synthesized)
aaagctacagcttgagttgactgccttggggatgtcagttaattaaggggtgatgatttgcaagagaaaattagtggagagtcacataggtaaatcattatttaacttaggttttcctaa

SEQ ID NO: 688088 - DNA, 120 bp, Artificial Sequence
  ENSG00000187866_19 (sequence is synthesized)
agttagaatagtcgaatgttcttttctttacctttacaattaagacaaaatgtttaataagaatagcaaaaatttttttatattatgcatccttatacctcacatatcttccttaactag

SEQ ID NO: 688089 - DNA, 120 bp, Artificial Sequence
  ENSG00000187866_20 (sequence is synthesized)
atagtttgacagaaagaatggcatacaaagaggaaaggggaaaaatgactcagaacaagacaaaagctctgactgtttaaagttatcgcttacagagactttaacaattttgtggaattt

SEQ ID NO: 688090 - DNA, 120 bp, Artificial Sequence
  ENSG00000187866_21 (sequence is synthesized)
ttacaactatgagagtaaatggaactggtcaactcttgacagttgcctcaagatggagtgaaattgcatcgagggtaagactgtgtccacaggtttaaaattctctcttctgagtaatag

SEQ ID NO: 688091 - DNA, 120 bp, Artificial Sequence
  ENSG00000187866_22 (sequence is synthesized)
cattatcttcaacacaggaattgttaatcttctcacttcacctgttcttgcattagctcaattgatgtcatcactgatttcctaaactagaaactatggaagcatctttgacttttcctt

SEQ ID NO: 688092 - DNA, 120 bp, Artificial Sequence
  ENSG00000187866_23 (sequence is synthesized)
ttctctgttggattagcttaatcaccaagtcctgtcaacttctgaaatgaatctcaaatttcttcccttctctatctgttgcccctgattttgccttaagttcttgcctgagtgatctcc

SEQ ID NO: 688093 - DNA, 120 bp, Artificial Sequence
  ENSG00000187866_24 (sequence is synthesized)
cagcctgtcttctgtctccttttggttcagtctttatactgcctcttgagtaatctttctgaaatttaaacttgatatttttcgccctcttgcttgaaaacttcacttgcttccccattt

SEQ ID NO: 688094 - DNA, 120 bp, Artificial Sequence
  ENSG00000187866_25 (sequence is synthesized)
cctactctttaaggaatgatttctttagcctcagatagaaggacctttatgatctggccatattctgaaatagcttcaatcctctcctcatctctgttccagtatacatctttccttctt

SEQ ID NO: 688095 - DNA, 120 bp, Artificial Sequence
  ENSG00000187866_26 (sequence is synthesized)
attctgcaaacattagaccacttgatattctttaaatatgtcatgtacttttcttgtgtctgttctttgggataattcctatccttttcagggaggcaaattgcacgtgagtttaagtat

SEQ ID NO: 688096 - DNA, 120 bp, Artificial Sequence
  ENSG00000187866_27 (sequence is synthesized)
gaaggcaatgtatacctgctgattgtaaaatatttaaacattgtacatatctgtgtggttttaaaagtctgcttttaattatgtaaaattcatcttccctttccacagataacttctgtt

SEQ ID NO: 688097 - DNA, 120 bp, Artificial Sequence
  ENSG00000187866_28 (sequence is synthesized)
aacaacttgatatctattgtacaagatgtgttactggcatttccatgtatatatgtatataaatgcaggaaaccaacatgtcattgacacctctcttctttacttttccccatatctaat

SEQ ID NO: 688098 - DNA, 120 bp, Artificial Sequence
  ENSG00000187866_29 (sequence is synthesized)
cattcctcaagtcttactgatttttatcagctagaatctatctccttatttctacctctattgccactctgatccaggctaccagcatttccctcttaggcttctgaagcaacttcctaa

SEQ ID NO: 688099 - DNA, 120 bp, Artificial Sequence
  ENSG00000187866_30 (sequence is synthesized)
ctcccacttgtgctcctcacactcactctggtcggctatccattcattctccatacagcaactagagtcattcttttaaaattgcggacctgatccttccatctcccagctgaacgcttt

SEQ ID NO: 688100 - DNA, 120 bp, Artificial Sequence
  ENSG00000187866_31 (sequence is synthesized)
tcatttgcttcctgttctcatgagtatgccaaaatgtattaattctgggctaggaggccctgaggaatttggtccttccctcctcccccctcgttttctgtgcttcgccctcactggctt

SEQ ID NO: 688101 - DNA, 120 bp, Artificial Sequence
  ENSG00000187866_32 (sequence is synthesized)
gcctttcttttccttaaatacatcatgttctctcctattttagatccttttccccgaaggtatggaaacattatttctgtaagcttattcttctatatagatgggaagtttttaaatcag

SEQ ID NO: 688102 - DNA, 120 bp, Artificial Sequence
  ENSG00000187866_33 (sequence is synthesized)
ataaggttctaagggcatgtggacaatttacgttatcatagtattgttcataacgtccatcattattctgtagactgtaagggcttacttagctcgtgtaagaattatccttcaaaaagc

SEQ ID NO: 688103 - DNA, 120 bp, Artificial Sequence
  ENSG00000187866_34 (sequence is synthesized)
atttttaaggtattagtattgctaatctataaactttgtgcaagaagtcctaaagtcaatagcaacatttatttaaagtacagtttgtcatacttaataaacctctggtatattttcctt

SEQ ID NO: 688104 - DNA, 120 bp, Artificial Sequence
  ENSG00000187866_35 (sequence is synthesized)
tattatgcttgttaaaaacacagtataaatgggagaaatcattaaagatcattaactccaaggctgctggatgttaggacccttaagcatacttaaaagattgattgtaatcaagaataa

SEQ ID NO: 688105 - DNA, 120 bp, Artificial Sequence
  ENSG00000187866_36 (sequence is synthesized)
cttgtatcagattgccttccagtgattcacatttattagttcaaccagttacatacctgtagcaagagaccagtttatttggcaataaaattggggaaggaatcaagacttaaatgagga

SEQ ID NO: 688106 - DNA, 120 bp, Artificial Sequence
  ENSG00000187866_37 (sequence is synthesized)
aagtgagtctgagaacattttttttcagggtgtgtttatagattagtagaacaattttgaagatctaacagaggtgggagtcaggggaatggttgccagacaattgaaccaagaagatga

SEQ ID NO: 688107 - DNA, 120 bp, Artificial Sequence
  ENSG00000187866_38 (sequence is synthesized)
tgatcatttcttgagtagcaccagagaacagaagaaagagttggccttggaaaggaggtctggaaacttatttttcttctgaaacaggagggagagtgaaaaggctaggcaaagatatcc

SEQ ID NO: 688108 - DNA, 120 bp, Artificial Sequence
  ENSG00000187866_39 (sequence is synthesized)
ataaatgttgaattgatttgttgttgcaggggtttaggagtatggaggtaggtatatgaaaagtagaatttgtttctgattgtgcctattttccaattattgaggaatctaagatacatg

SEQ ID NO: 688109 - DNA, 120 bp, Artificial Sequence
  ENSG00000187866_40 (sequence is synthesized)
aggatagggacaggagatcatttggaagcttgagtgcagtaaaggtttaatgttgcctctgagaatctaaaggagtaagttaaggacaagtagaaggcttattaggctatgatggatgcc

SEQ ID NO: 688110 - DNA, 120 bp, Artificial Sequence
  ENSG00000187866_41 (sequence is synthesized)
aggttgcagttggatggcaggcacaaggaagtgggttggattgactaggtttgggaattggttaagtgggtactaggtaaagcccagtgtgtgaagtagttaagggttctgctgaaagtg

SEQ ID NO: 688111 - DNA, 120 bp, Artificial Sequence
  ENSG00000187866_42 (sequence is synthesized)
tagtttgaatgattggctgaggcattgaggataagagaagggagcagaggcttatggactagaccacttttttcagggctttaccttatcagccatgacaaagtatagagaatctggtct

SEQ ID NO: 688112 - DNA, 120 bp, Artificial Sequence
  ENSG00000187866_43 (sequence is synthesized)
caatgtaggtctctcactccagcagttttgcccacatttttcatggctgttagagaatcagggctgaaggcaagccttgagtgccacttacttggtaaaaaattgtgtcagattgctcac

SEQ ID NO: 688113 - DNA, 120 bp, Artificial Sequence
  ENSG00000187866_44 (sequence is synthesized)
tgtagccaagacagagttctttgtggcttctgtaacttgccatccaagtaaaaaaattttcttaaaagttgaaatgacctttgtataaaaagtaataaaatacttgctatgtgtcaggga

SEQ ID NO: 688114 - DNA, 120 bp, Artificial Sequence
  ENSG00000187867_0 (sequence is synthesized)
atggcggagagctccctctaccggcagcggctagaagtcatcgctgagaagcggcggctgcaggaggagatccgcgccgcgcgccgggaggtggaggaggagaaactccgcgtggagcgt

SEQ ID NO: 688115 - DNA, 120 bp, Artificial Sequence
  ENSG00000187867_1 (sequence is synthesized)
ctcaagaggaagtctctccgggaacgttggctaatggatggggcagctgcagtgccagagccatccgaagaccccacctcgaaggacccccagtcacccgagggccaggctcaggcccga

SEQ ID NO: 688116 - DNA, 120 bp, Artificial Sequence
  ENSG00000187867_2 (sequence is synthesized)
atccggaacctggaagacagtttgttcacactccagtcccagctgcaactgttgcaaagtgcttccacaggtgcccagcacaagccctcaggcaggcccagctggcgcagacagggtcac

SEQ ID NO: 688117 - DNA, 120 bp, Artificial Sequence
  ENSG00000187867_3 (sequence is synthesized)
cgtcctctctcccagtccattgtcgaggcaggttctgtaggccagactgatctgaacaagagagcctccctgccggctggactagtgggcacgcctccagagtccccctctgagcccagg

SEQ ID NO: 688118 - DNA, 120 bp, Artificial Sequence
  ENSG00000187867_4 (sequence is synthesized)
gaggatgtcttggggtttctgccaggcccgaggcaggtccccggggcagcaggagactcctcagaagccaatggcccatgccccagccccatccccactccagagcaggggctaagtcag

SEQ ID NO: 688119 - DNA, 120 bp, Artificial Sequence
  ENSG00000187867_5 (sequence is synthesized)
agggcagtgccatccgaagggcgggtgggtgaggccaaaggagggggcgtggtgagtgtggtgtgggaagggctgagggccacagaggactgtgccacaggggccacgggccccgagctg

SEQ ID NO: 688120 - DNA, 120 bp, Artificial Sequence
  ENSG00000187867_6 (sequence is synthesized)
gaggctaaggtggaggaagtggtgctggaagccatcggagacaggaagggagctggtagcctggagctcccggcctgggtgaaggaggacaggggcatcgtggaggtggtctgggagggg

SEQ ID NO: 688121 - DNA, 120 bp, Artificial Sequence
  ENSG00000187867_7 (sequence is synthesized)
gtgggtggcagtgatgcagaggccatgggggagataggcagggtccctgaggtcgtgcagactagctcgcctaggctccaggagagattagaggcagcagcttccatagaaggggaagat

SEQ ID NO: 688122 - DNA, 120 bp, Artificial Sequence
  ENSG00000187867_8 (sequence is synthesized)
gtgccccagggcagccctgagggtgatgggcagggaggctctggaggagaggagggatccttcatttgggtggagagagtgaccctcagtgaagagtgggaggagctgctggtggagggg

SEQ ID NO: 688123 - DNA, 120 bp, Artificial Sequence
  ENSG00000187867_9 (sequence is synthesized)
agaagagaaaagcggaagaatccatgggaataggaagtgaggaaaagccagggacagggagggatgaagcggagatgtcaccagtggtagagaggaaaggaggagagaagaagttggagc

SEQ ID NO: 688124 - DNA, 120 bp, Artificial Sequence
  ENSG00000187867_10 (sequence is synthesized)
tggagagcagaggaagtgcagaaaagctgggaacagagagggaaggaggtgaggaaccactgggcatagagagaaaagttgagggacatttgagggcagagaaggaaggagatgaggaaa

SEQ ID NO: 688125 - DNA, 120 bp, Artificial Sequence
  ENSG00000187867_11 (sequence is synthesized)
agcgaggggcagaggaggaggaggtagaagaaccattgggagtagagaagaaaggaggtgaggaagagccagaggcaaccaaagaaccactggaggcagagagaaagggaggggaggaga

SEQ ID NO: 688126 - DNA, 120 bp, Artificial Sequence
  ENSG00000187867_12 (sequence is synthesized)
cactggaggcagagaaaaggggaggtgaggaatcattggagacagagaagacccaagggacggagggagatctgaatctagaacaagggtctagggaaggaagtgaatcccaggcagagg

SEQ ID NO: 688127 - DNA, 120 bp, Artificial Sequence
  ENSG00000187867_13 (sequence is synthesized)
agatgaatgaggcagggcctccccttgaggctaacacggagacaaggccagagaaggaaggaccccagccccaggagaagccagtaggagccctggaggaggaaggagtgaagccccaaa

SEQ ID NO: 688128 - DNA, 120 bp, Artificial Sequence
  ENSG00000187867_14 (sequence is synthesized)
ccgctgctgagggccaaggccccttgggggatgccacacctcttctggcagagaccccagccccagagcagcccgccgaatgccagccactgcttcagggggaggggcccagcgccaacc

SEQ ID NO: 688129 - DNA, 120 bp, Artificial Sequence
  ENSG00000187867_15 (sequence is synthesized)
ccagtgcccaccctgtgcccacctacgcgcctgcccggcagcctgagccatctgcccccaccgagggtgaagaggcaagtggccctaagcaaaagacgtgccagtgttgtgcggtcatgt

SEQ ID NO: 688130 - DNA, 120 bp, Artificial Sequence
  ENSG00000187867_16 (sequence is synthesized)
gaacccatgcccctccaccccatgtccagctcctctcacagctacctcggcctcttggcacccagaagagggtcccaggcacagacagggaccacaggactggccatggcacctgggagc

SEQ ID NO: 688131 - DNA, 120 bp, Artificial Sequence
  ENSG00000187867_17 (sequence is synthesized)
cagctagcctgcacgtccacctaaacctgggcttccagaccccttgcccactgcctgtaaccctggcctccttctgcgatgaagcctttatacttgaaaataaaatgtgaaagcactcaa

SEQ ID NO: 688132 - DNA, 120 bp, Artificial Sequence
  ENSG00000187867_18 (sequence is synthesized)
ctttggaagtgcccgtttcattttggaagggtttggaacaagggatgtctgcccacttgcagcgttggggggcactgtggccatgtatcccagcctgatgtatgtcgcaactggttgtga

SEQ ID NO: 688133 - DNA, 120 bp, Artificial Sequence
  ENSG00000187867_19 (sequence is synthesized)
gccctgggtgcagacccgcgctgggccacccccgccgggctcgctgcctcgggagccccgggagctccggtgagccccgcggaggagggaggggaaagggagggaagaggaggtggtgga

SEQ ID NO: 688134 - DNA, 120 bp, Artificial Sequence
  ENSG00000187867_20 (sequence is synthesized)
actccaggcagccaagtcacagcctccggggcaccttcaggcaagcgggtggtgggtccagaactcggagaccagaaagtgaacttctgggcagagatggccctgcagagccaggtgtgg

SEQ ID NO: 688135 - DNA, 120 bp, Artificial Sequence
  ENSG00000187871_0 (sequence is synthesized)
ttattctggacagttactcttaagaaagttgtcagaagaaacgcatctgcctttttttccaggtgaactgccgtgagttgtccagcatgatagtgtttattttcttggctatggggttaa

SEQ ID NO: 688136 - DNA, 120 bp, Artificial Sequence
  ENSG00000187871_1 (sequence is synthesized)
gcttggaaaatgaatacacttcccaaaccaataattgcacatatttaagagagcaatgcttacgtgatgcaaatggatgtaaacatgcttggagagtaatggaagatgcctgcaatgatt

SEQ ID NO: 688137 - DNA, 120 bp, Artificial Sequence
  ENSG00000187871_2 (sequence is synthesized)
cagatccaggtgacccctgcaagatgaggaattcatcatactgtaacctgagtatccagtacttagtggaaagcaatttccaatttaaagagtgtctttgcactgatgacttctattgta

SEQ ID NO: 688138 - DNA, 120 bp, Artificial Sequence
  ENSG00000187871_3 (sequence is synthesized)
ctgtgaacaaactgcttggaaaaaaatgtatcaataaatcagataacgtgaaagaggataaattcaaatggaatctaactacacgttcccatcatggattcaaagggatgtggtcctgtt

SEQ ID NO: 688139 - DNA, 120 bp, Artificial Sequence
  ENSG00000187871_4 (sequence is synthesized)
tggaagtggcagaggcatgtgtaggggatgtggtctgtaatgcacagttggcctcttaccttaaagcttgctcagcaaatggaaatccgtgtgatctgaaacagtgccaagcagccatac

SEQ ID NO: 688140 - DNA, 120 bp, Artificial Sequence
  ENSG00000187871_5 (sequence is synthesized)
ggttcttctatcaaaatataccttttaacattgcccagatgttggctttttgtgactgtgctcaatctgatataccttgtcagcagtccaaagaagctcttcacagcaagacatgtgcag

SEQ ID NO: 688141 - DNA, 120 bp, Artificial Sequence
  ENSG00000187871_6 (sequence is synthesized)
tgaacatggttccaccccctacttgcctcagtgtaattcgcagctgccaaaatgatgaattatgcaggaggcactatagaacatttcagtcaaaatgctggcagcgtgtgactagaaagt

SEQ ID NO: 688142 - DNA, 120 bp, Artificial Sequence
  ENSG00000187871_7 (sequence is synthesized)
tgcaatgtacctgtaggaccattacacaaagtgaggaatctttgtgtaagattttccagcacatgcttcatagaaaatcatgtttcaattatccaaccctgtctaatgtcaaaggcatgg

SEQ ID NO: 688143 - DNA, 120 bp, Artificial Sequence
  ENSG00000187871_8 (sequence is synthesized)
cattgtatacaagaaaacatgcaaacaaaatcactttaactggatttcattcccccttcaatggagaagtaatctatgctgccatgtgcatgacagtcacctgtggaatccttctgttgg

SEQ ID NO: 688144 - DNA, 120 bp, Artificial Sequence
  ENSG00000187871_9 (sequence is synthesized)
ttatggtcaagcttagaacttccagaatatcaagtaaagcaagagatccttcatcgatccaaatacctggagaactctgattcattaggagtcatggacctataacaatcactcttttct

SEQ ID NO: 688145 - DNA, 120 bp, Artificial Sequence
  ENSG00000187871_10 (sequence is synthesized)
ctgcttttcttctttcctcttttcttctctcctctcctctcctctcttctcctctcctcccctcccctctctgtttctttttctttttcttttcttttttgtggcggagttttgctcttg

SEQ ID NO: 688146 - DNA, 120 bp, Artificial Sequence
  ENSG00000187871_11 (sequence is synthesized)
acaggcgtgagcaaccacgtcaagacaacaatcactttctttaaagcaaatcctacagctggtcaacaccctattccatctgtcatcgagaaagaaaatgttaaaatagacttaaaaata

SEQ ID NO: 688147 - DNA, 120 bp, Artificial Sequence
  ENSG00000187871_12 (sequence is synthesized)
ttgctttgttacatataataatatggcatgatgatgttatttttttcttaatactcaagaaaaaatatatggtggtatcttttacaacactggaacagaaataaagtttcccttgaaggc

SEQ ID NO: 688148 - DNA, 120 bp, Artificial Sequence
  ENSG00000187889_0 (sequence is synthesized)
gtgggaagtgattgctccctggctagcagagacagaggaaagcggattgttggccccaggacccagctctgagaggctgggcttgtttccctgactctgccttggaggaaagcaatggaa

SEQ ID NO: 688149 - DNA, 120 bp, Artificial Sequence
  ENSG00000187889_1 (sequence is synthesized)
ggggaaggggtaagaaacttcaaggaacttcgagccaaatttcaaaatcttgatgctccacctcttccaggacctattaaattcccagcaggtgtttctccaaagggtgacattggaggc

SEQ ID NO: 688150 - DNA, 120 bp, Artificial Sequence
  ENSG00000187889_2 (sequence is synthesized)
acacagtcaactcaaattttggccaatgggaaacccctctcatccaaccacaagcagcgcacaccatactgttccagtagtgagtcccagcctcttcaacctcagaaaataaagttggct

SEQ ID NO: 688151 - DNA, 120 bp, Artificial Sequence
  ENSG00000187889_3 (sequence is synthesized)
cagaagagtgaaattccaaaatgttctaactccccagggcctctgggaaagtctactgtatgttctgcaacaagttcacagaaggcttctctgctgttagaggtgactcaatcaaatgtt

SEQ ID NO: 688152 - DNA, 120 bp, Artificial Sequence
  ENSG00000187889_4 (sequence is synthesized)
gagataatcactaaggaaaaagtaatggtggccaatagcttcagaaacaaactctggaactgggagaaggtttcatctcagaaaagtgaaatgtcttcagcccttctccttgccaactat

SEQ ID NO: 688153 - DNA, 120 bp, Artificial Sequence
  ENSG00000187889_5 (sequence is synthesized)
ggaagtaaggccatccatctggaagggcaaaaaggcatggggcttactccagaggaacccaggaaaaagctggaaacaaaaggagcccagactcttccttcccagaagcacgtggtggcc

SEQ ID NO: 688154 - DNA, 120 bp, Artificial Sequence
  ENSG00000187889_6 (sequence is synthesized)
cccaaaatattacataacgtctctgaagatccctcttttgtaatttctcaacatatcagaaaaagctgggaaaacccacctcctgagaggagcccggcaagcagcccctgccagcccatc

SEQ ID NO: 688155 - DNA, 120 bp, Artificial Sequence
  ENSG00000187889_7 (sequence is synthesized)
tatgagtgtgagcttgccagtcaggccccagaaaaacagccagatgtcaggcatcaccaccttcccaaaacaaagccattgccctccatcgactccctgggtcctcctcccccaaagcct

SEQ ID NO: 688156 - DNA, 120 bp, Artificial Sequence
  ENSG00000187889_8 (sequence is synthesized)
tcaagacctcccatcgtgaacctccaggcctttcagaggcagccagctgctgttcccaagactcagggggaagtgactgtggaagagggctccctgtctccagagaggcttttcaatgca

SEQ ID NO: 688157 - DNA, 120 bp, Artificial Sequence
  ENSG00000187889_9 (sequence is synthesized)
gaatttgaagaaccacataattacgaggcaacaatttcatatctgagacactctggcaactccattaacctgtgcactgcaaaagaaattgctgatccaacttatgaagttggaattgaa

SEQ ID NO: 688158 - DNA, 120 bp, Artificial Sequence
  ENSG00000187889_10 (sequence is synthesized)
gaactccaaaagcctgggaagaattttccctatccagaacctagtgctaaacatgaagataaaaaaatgaaggaaaaacaaccatgtgaattgaaacctaaaaacacagaaaaggaacca

SEQ ID NO: 688159 - DNA, 120 bp, Artificial Sequence
  ENSG00000187889_11 (sequence is synthesized)
tattcaaaccatgttttcaaggtagatgcctgtgaagggacacctgaaaaaattcagatgaccaacgtccacacaggtagaaggaacatgttggctggaaagcaagaggccatgattgac

SEQ ID NO: 688160 - DNA, 120 bp, Artificial Sequence
  ENSG00000187889_12 (sequence is synthesized)
atcatccagacaaatccctgccctgagggcccaaagctggccaggcactcccaaggccactgtgggcatctggaggttttggagtcaactaaagaaactccagacctaggggtctctaag

SEQ ID NO: 688161 - DNA, 120 bp, Artificial Sequence
  ENSG00000187889_13 (sequence is synthesized)
ctgaactactctagctcacttgcctcaagtagtgaagaaaatagagaactgtatgaagatgtctacaaaacaaagaacaactacccaaagatagatttagatggaaaagaagcactcaaa

SEQ ID NO: 688162 - DNA, 120 bp, Artificial Sequence
  ENSG00000187889_14 (sequence is synthesized)
agactgcagcaattcttcaagaaagaaaaggatagatttaaaataaagaaaaccaagtcgaaagaaaacttaagtgcattttccattttgctgcctgatttagaacttaagtctcaggaa

SEQ ID NO: 688163 - DNA, 120 bp, Artificial Sequence
  ENSG00000187889_15 (sequence is synthesized)
gttattatttatgatgatgtagacctgagtgaaaaagagtcaaaagatgaagataaactgaaaatgtggaagcccaagtttctgacaccaaaggaaaaaaaagagaaaaacggtgctgaa

SEQ ID NO: 688164 - DNA, 120 bp, Artificial Sequence
  ENSG00000187889_16 (sequence is synthesized)
gaatcagaaagtttctctcctagaaatttcttcaaaaccaagaagcaaaacttagaaaagaacagaatgaaaagagaagaaaaactatttagagaaaggtttaagtacgacaaagagatt

SEQ ID NO: 688165 - DNA, 120 bp, Artificial Sequence
  ENSG00000187889_17 (sequence is synthesized)
attgtcatcaatacagcagtggcctgttccaataattcaagaaatggaatatttgatttgccaataagtcctggagaagaattggaagtcattgataccaccgaacaaaatctagtgata

SEQ ID NO: 688166 - DNA, 120 bp, Artificial Sequence
  ENSG00000187889_18 (sequence is synthesized)
tgtcgtaattctaaaggcaaatatggatatgtgctcattgaacatctagatttcaagcatcaaagttggtcaccttagaaaaatcaagatcaaatgctatggactgcacaaaggagaact

SEQ ID NO: 688167 - DNA, 120 bp, Artificial Sequence
  ENSG00000187889_19 (sequence is synthesized)
agtcctaagatcctagtcctgcgttacatcagtttcagtttacatgtcaaaattttgagatggtggaatctgtggaaactttcgttctgaacttaaaagagaaaaataaaaacaaatcct

SEQ ID NO: 688168 - DNA, 120 bp, Artificial Sequence
  ENSG00000187889_20 (sequence is synthesized)
caacatttagatgttggttttactcctaaaaggttatctttcaatgtctatttcagtatctacttcactgtcagttcaagagaatgtgaaacagtatgtgttagcatttgagcacttatt

SEQ ID NO: 688169 - DNA, 120 bp, Artificial Sequence
  ENSG00000187889_21 (sequence is synthesized)
taatgagccatatccaaagttagaaatcatgccttatggcacctagtcagttgtgcagatggttagtttgcttctaatattagtatatgagcatttgtaatttctagatgttgtgcactc

SEQ ID NO: 688170 - DNA, 120 bp, Artificial Sequence
  ENSG00000187889_22 (sequence is synthesized)
aaacttggtataatttaattctgaacagtaaacagtgtaaccaaggtcttttaaatactcaagtttaaggtataatcttaattatggctcagtctttaaaaaagtataaatgtcctttta

SEQ ID NO: 688171 - DNA, 120 bp, Artificial Sequence
  ENSG00000187889_23 (sequence is synthesized)
ctttatcacaaaaataaactcatatgaatactgttccacatttgtttcttttgggaatagtttgcagaaaaataatttattcctaaattcacccatcattttaagaagtgcccaaatgta

SEQ ID NO: 688172 - DNA, 120 bp, Artificial Sequence
  ENSG00000187889_24 (sequence is synthesized)
tttaacaaaataatatatatgctgtattactttaaaacatctttttgtccaaaataagaacaattgtcattattttgtctatgcccaaataactattcaaataatagcattcatatgtac

SEQ ID NO: 688173 - DNA, 120 bp, Artificial Sequence
  ENSG00000187889_25 (sequence is synthesized)
tttcatttatatggaattaaataaaaatttaaaagctgacatctattctgttttttaaatgaggtgcactgcatgtcaataagagaaataaattctacatatgcatttaacagtttaaaa

SEQ ID NO: 688174 - DNA, 120 bp, Artificial Sequence
  ENSG00000187889_26 (sequence is synthesized)
gtcagattcaacattatgcaagattattgtataggagcaattgccaatgatttgaaataaaaaccatggaagaaaaatcaacattactgttctattaagctgtttctcccccctaggagt

SEQ ID NO: 688175 - DNA, 120 bp, Artificial Sequence
  ENSG00000187889_27 (sequence is synthesized)
taagaaaagacctctcactattctagcagtatagcatatttgttcaattccagaaagatgggaacttagtctaaaaatgactctttgagcaactcatatttttctggaactctatgtaaa

SEQ ID NO: 688176 - DNA, 120 bp, Artificial Sequence
  ENSG00000187889_28 (sequence is synthesized)
tatctgtattttatgatcagattttgctaaaacagacctgaagatgcacctggataattaggtaattgagtataatttggaaagtcagtgcttatataaaccatgcttaataatggacta

SEQ ID NO: 688177 - DNA, 120 bp, Artificial Sequence
  ENSG00000187889_29 (sequence is synthesized)
ttttgattctgtcttgaccctagaacttaagtctcaggaagttattatttatgatgatgtagacctgagtgaaaaagagtcaaaagatgaagataaactgaaaatgtggaagcccaagtt

SEQ ID NO: 688178 - DNA, 120 bp, Artificial Sequence
  ENSG00000187889_30 (sequence is synthesized)
ctatgttacaacctcatccagcagggctcattctagtacaattaaataacggttgtgcaaacactggggtctgtctggggatagggtgcggggagggagagtattagaaaggatggctaa

SEQ ID NO: 688179 - DNA, 76 bp, Artificial Sequence
  ENSG00000187889_31 (sequence is synthesized)
aggtgcagtaaaccactatggcacactacctaaaaagaataattttaaaaaagatttgagagaaaaaataataata

SEQ ID NO: 688180 - DNA, 120 bp, Artificial Sequence
  ENSG00000187889_32 (sequence is synthesized)
aattttaaaaaagatttgagagaaaaaataataataatggttgtgaaaacactttgaaagtataatcataccaaacaaatgtgagattgcaccattttactattattttcttaaacgact

SEQ ID NO: 688181 - DNA, 120 bp, Artificial Sequence
  ENSG00000187889_33 (sequence is synthesized)
tgttatttaactagtcaatagtatcttgagttaattttgaagttactatattatatcctccattaattttgttatgaaaaataacaactatgcaagaatggtctgattagtaatttctca

SEQ ID NO: 688182 - DNA, 120 bp, Artificial Sequence
  ENSG00000187889_34 (sequence is synthesized)
gtactaacaggagcctgccatccccattccttcacagctcctgctgcctgggcacaaatgccctggagagtgagtgactgtcagaccagccggaggggagcaacgggaagagccgcttgc

SEQ ID NO: 688183 - DNA, 120 bp, Artificial Sequence
  ENSG00000187889_35 (sequence is synthesized)
tgagaagaggtgggcttggcaggactgcaggtggagtactctccccagtcccctgcaggtgctggtctaagccaagctgggaggatggcggccggccctggcccagccccaggcaaggga

SEQ ID NO: 688184 - DNA, 120 bp, Artificial Sequence
  ENSG00000187889_36 (sequence is synthesized)
caaatactttgttgaataagaatggagagagtgggcatccatgtcttattccagaaaagctggaagcttttccctgttagagatgaagataaactgaaaatgtggaagcccaagtttctg

SEQ ID NO: 688185 - DNA, 120 bp, Artificial Sequence
  ENSG00000187889_37 (sequence is synthesized)
gatgatgtcgagtactccaggaaagaggtaccgaagctgaactactctagctcacttgcctcaagtagtgtttagatggaaaagaagcactcaaaagactgcagcaattcttcaagaaag

SEQ ID NO: 688186 - DNA, 80 bp, Artificial Sequence
  ENSG00000187902_0 (sequence is synthesized)
atgccggccctcctgctcctcgtactcctggcctctagcgccggccaggccagggcgcgcccgtccaacgccacgagcgc

SEQ ID NO: 688187 - DNA, 80 bp, Artificial Sequence
  ENSG00000187902_1 (sequence is synthesized)
cgggcggggcgggcgcggcggcccgggcgccccctcccgccgagctctgccacggctactacgatgtcatgggccagtac

SEQ ID NO: 688188 - DNA, 120 bp, Artificial Sequence
  ENSG00000187902_2 (sequence is synthesized)
ctctgccacggctactacgatgtcatgggccagtacgacgccaccttcaactgcagcaccggctcctaccgcttctgctgtggcacctgccactaccgcttctgctgtgagcaccgtcac

SEQ ID NO: 688189 - DNA, 120 bp, Artificial Sequence
  ENSG00000187902_3 (sequence is synthesized)
ctgtgagcaccgtcacatgcgcctggcgcaggcctcctgctccaactacgacacgccgcgctgggccaccacgccgccgccgctagctgggggcgccgggggcgctgggggtgcgggcgg

SEQ ID NO: 688190 - DNA, 120 bp, Artificial Sequence
  ENSG00000187902_4 (sequence is synthesized)
cggactgggggtgccgggggccgcgggggcgagggccccgggggcagcacagcctacgtcgtgtgcggggtcatcagcttcgccctggccgtgggcgtcggcgccaaagtggccttcagc

SEQ ID NO: 688191 - DNA, 120 bp, Artificial Sequence
  ENSG00000187902_5 (sequence is synthesized)
gtcggcgccaaagtggccttcagcaaggcgtcccgtgcgccccgggcgcaccgggatatcaacgtgcccagagctctggtggacattctgagacatcaggcggggcctgggacccgcccg

SEQ ID NO: 688192 - DNA, 120 bp, Artificial Sequence
  ENSG00000187902_6 (sequence is synthesized)
gaccgggcccgaagcagctccctgaccccggggatcggcggtcccgacagcatgccccccaggacgcccaagaacctctacaacaccgtgaagacccccaacctcgactggcgagccttg

SEQ ID NO: 688193 - DNA, 120 bp, Artificial Sequence
  ENSG00000187902_7 (sequence is synthesized)
ccgccgcccagcccctccttgcactactccacgctgtcctgctctcggtccttccacaacctctcgcatctgcccccgtcctacgaggctgccgtgaaatccgagctgaaccgctactct

SEQ ID NO: 688194 - DNA, 120 bp, Artificial Sequence
  ENSG00000187902_8 (sequence is synthesized)
tccctcaagaggctggccgagaaggatctggacgaggcctacctgaagcgccggcccctggaattgccccgcggcacgctgcccctgcacgcgctgcggcggccgggcacggggggcggc

SEQ ID NO: 688195 - DNA, 120 bp, Artificial Sequence
  ENSG00000187902_9 (sequence is synthesized)
tatcgcatggaggcctggggcggcccagaggagctgggcctggcgcccgcgcccaacccccggcgggtcatgtcccaggagcacctgctgggcgatggtggccgttcgcgctacgagttc

SEQ ID NO: 688196 - DNA, 120 bp, Artificial Sequence
  ENSG00000187902_10 (sequence is synthesized)
gttcacgctgccgcgcgcgcgcctggtgtcgcaggagcacctgctgctgtcctcgcccgaggccctgcgccagagtcgcgagcacctgctgtcgcccccgcgcagccccgcgctgccccc

SEQ ID NO: 688197 - DNA, 80 bp, Artificial Sequence
  ENSG00000187902_11 (sequence is synthesized)
tgctgctggggcccggggggcccccaacaccgctgcgcgggctgccgccaccgtccagcctgcacgcccaccaccaccac

SEQ ID NO: 688198 - DNA, 120 bp, Artificial Sequence
  ENSG00000187902_12 (sequence is synthesized)
gcctggatgtccgacgccggcgggggcgggggcacactggcccgcaggccgcccttccagcgccagggcacgctggagcagctgcagttcatcccgggccaccacctgccccagcacctg

SEQ ID NO: 688199 - DNA, 120 bp, Artificial Sequence
  ENSG00000187902_13 (sequence is synthesized)
ggccaccacctgccccagcacctgcgcacggccagcaagaacgaggtgactgtctgaggccagggccgggtctggggggctgcggcctcccgggccccccgtcccagcctggatcccccg

SEQ ID NO: 688200 - DNA, 120 bp, Artificial Sequence
  ENSG00000187902_14 (sequence is synthesized)
acacaggcgcacacatgccaggggcctggggcccagatcggcccttggacaggagtgaaagcctccttctgggatgtcctggcagacaagattcctcctcctattacttcactgcttgag

SEQ ID NO: 688201 - DNA, 120 bp, Artificial Sequence
  ENSG00000187902_15 (sequence is synthesized)
ccaaggcctccttcccatgatgtcatcccagaggaagaggccggctcatgaggtcatcactagcaaaaatgtctgtgttctgtgatgtcatcacagggacaaagcctcgttcccatgagg

SEQ ID NO: 688202 - DNA, 120 bp, Artificial Sequence
  ENSG00000187902_16 (sequence is synthesized)
tcatcacagaggaagaggccggcccgtgaggtcagcgctggaggccatgtccatgttctatggtgtcctcagaggcttccttcttgtggtataataacagagacgacgccttgttccatg

SEQ ID NO: 688203 - DNA, 120 bp, Artificial Sequence
  ENSG00000187902_17 (sequence is synthesized)
acattccttcctgtggtgtcactgcagagacaatctcacctggatgatgtcatctctaactccaaggcctcttttggcatcatcgccatggggaagatattttctccctgtgtctttgca

SEQ ID NO: 688204 - DNA, 120 bp, Artificial Sequence
  ENSG00000187902_18 (sequence is synthesized)
gcagagaagatgcctctgtcctatgatgtcatcattacagacaaagccatcttcctgggacacgtcgcaggggaaaatgcctcaccgattgtgtcctcactagacataaggtcccctttt

SEQ ID NO: 688205 - DNA, 120 bp, Artificial Sequence
  ENSG00000187902_19 (sequence is synthesized)
cacaacatcatcacagggaccctgcctccttcctgtgatgccatcaccagagaaggtgccttgccctatgacgtcatcagagggaccgtgcctcttcctgtgatgtcatcaccagagatg

SEQ ID NO: 688206 - DNA, 120 bp, Artificial Sequence
  ENSG00000187902_20 (sequence is synthesized)
accacccactctgggacctctccaggaggaggtcccttctgtgatgtcgcccagatgctatgtgctctgagatggcacaaagagatgcctccactgctgccaccatgttgtagaaggcag

SEQ ID NO: 688207 - DNA, 120 bp, Artificial Sequence
  ENSG00000187902_21 (sequence is synthesized)
ggcaggcccagagtccaggaccaccccagggaagatgccagagagcagagaggggccctgtcctgagatgttgtctgaaggaagcatcgctggggagccgcccatgtggagggcctcctc

SEQ ID NO: 688208 - DNA, 120 bp, Artificial Sequence
  ENSG00000187902_22 (sequence is synthesized)
cagagatgatggtctgtgtaggctgttggcagtgacacccctacccccaatgctgtgatggcatcaccagagcttcctcctcagaggcactgcccactctggaaggccatcggtattggt

SEQ ID NO: 688209 - DNA, 120 bp, Artificial Sequence
  ENSG00000187902_23 (sequence is synthesized)
ggtgtcaccagagttactgccttgtcccaccatgacttagcttggttgctccctccccagactccagggacatgtccagcaggatctctgccagaccctctgaggggaaatggggccttg

SEQ ID NO: 688210 - DNA, 120 bp, Artificial Sequence
  ENSG00000187902_24 (sequence is synthesized)
gatcccacatctgtgccatgactcctgggagacaggacctccagatggccttctgctcccaggaggccactctggatcaccaggatcctggagttctggcactcataggtgtcccatagc

SEQ ID NO: 688211 - DNA, 120 bp, Artificial Sequence
  ENSG00000187902_25 (sequence is synthesized)
acaatcacctctgtcaacaaagtcctagccttctactggggggaggtgcttggggtacacctactcttgccctcactgacactgtcagcatcacacaacacccgccactcatgatggcac

SEQ ID NO: 688212 - DNA, 120 bp, Artificial Sequence
  ENSG00000187902_26 (sequence is synthesized)
cacacccggggtcaagtgttacccatgtctgaggatggaatccttccccaggattacctatgacccacaactatggtatcatcttcttccaggatttaccatgactaatggtgtcaccat

SEQ ID NO: 688213 - DNA, 120 bp, Artificial Sequence
  ENSG00000187902_27 (sequence is synthesized)
ctgccaagactccccatagccaatggtgtcaccatcctccatgattcctcacaaccatggtgtcatcatctttcaggagccaccacagctgacggtgtcatcatctcctagattccacca

SEQ ID NO: 688214 - DNA, 120 bp, Artificial Sequence
  ENSG00000187902_28 (sequence is synthesized)
tgaccagtgatgacattaccttccagaatccactacacctgacagagacatcctctactgaaatccactaggactgatgattccaccatttcccataatccctcatgattttggtgtcat

SEQ ID NO: 688215 - DNA, 120 bp, Artificial Sequence
  ENSG00000187902_29 (sequence is synthesized)
cacctcccaagacccatgatgcccaatagtgtcatcatcatttgcagggatgcatggtgtcatcatctccagggatccacttcaaccatgtgccaccacctcccaggatttcattcaaac

SEQ ID NO: 688216 - DNA, 120 bp, Artificial Sequence
  ENSG00000187902_30 (sequence is synthesized)
atgtgccactacctcccagtatccacttcaactatggtgttatcacctgccaggatccacgagagccaatgctgtcaccatccactaggatccaccataaccctggtgtcatcatctcct

SEQ ID NO: 688217 - DNA, 120 bp, Artificial Sequence
  ENSG00000187902_31 (sequence is synthesized)
gtgatccatgaggtccagtgctgtcaccatccactaggatccaccatgaccctggtgtcatcatctcctgtgatccatgaggtccagtgctgtcaccatccactaggatccaccataacc

SEQ ID NO: 688218 - DNA, 120 bp, Artificial Sequence
  ENSG00000187902_32 (sequence is synthesized)
ctggtgtcatcatctcccaggatccatgaggtccagtgctgtctgtcaccatccactagtatccaccataaccctggtgtcatcttctcccaggatccatgaggtccagtgctgtcacca

SEQ ID NO: 688219 - DNA, 120 bp, Artificial Sequence
  ENSG00000187902_33 (sequence is synthesized)
tccactaggatccgccataaccctggtgtcatcatccgtgatccatgaggtccagtgctgtcaccatccactaggatccaccataaccctggtgtcatcatctcccaggatccatgaggt

SEQ ID NO: 688220 - DNA, 120 bp, Artificial Sequence
  ENSG00000187902_34 (sequence is synthesized)
ccagtgttgtcaccatctactaggatccaccatgaccctggtgttatcatctcccaggatccatgaggtccagtgttgtcaccatctattaggatccaccatgaccctggtgttatcatc

SEQ ID NO: 688221 - DNA, 120 bp, Artificial Sequence
  ENSG00000187902_35 (sequence is synthesized)
tcccaggatccatgaggtccagtgctgtcaccacccactaggatccaccataaccctggtgtcatcccagagtccactgcaaccatgtgccatcatcccccaagagccatcatcttagga

SEQ ID NO: 688222 - DNA, 120 bp, Artificial Sequence
  ENSG00000187902_36 (sequence is synthesized)
gccaagtaccgtgacgggctgtatttcagttgtcctctggggccgcatggtacttacagttgttcacttaaggggaaccagcacaacaggccatattcccgtttccactaaaaggacagg

SEQ ID NO: 688223 - DNA, 120 bp, Artificial Sequence
  ENSG00000187902_37 (sequence is synthesized)
ggtggggccagctgtccccctctgaagacttcacccctactctggccctccttatgtcactgcctcactcctgaccgaggatgatgcctgcatcaatcccaccacagatgtggcctcagc

SEQ ID NO: 688224 - DNA, 120 bp, Artificial Sequence
  ENSG00000187902_38 (sequence is synthesized)
caacctcaccttaccccccggtgaggcacccaggcccctcctgacagcagcgctgtccctcacccagccatctgattggtgacagggtcaacccagcaacctctcattatcaccagagag

SEQ ID NO: 688225 - DNA, 120 bp, Artificial Sequence
  ENSG00000187902_39 (sequence is synthesized)
gaagcatttcaaccctcaggtgacgccactgccccctgcccaatccctgtcacttgggcccctaccaggatcagcactccactggccccggccaaattctcctcagagatccctgacccc

SEQ ID NO: 688226 - DNA, 120 bp, Artificial Sequence
  ENSG00000187902_40 (sequence is synthesized)
cgcgggataggtcaaagctggtgaccgactggggccttcagtgctgtcttctgctggcctcatcctgcagcagggacactggagagcaatggtccctgccagcacatctgcgggaccagg

SEQ ID NO: 688227 - DNA, 120 bp, Artificial Sequence
  ENSG00000187902_41 (sequence is synthesized)
ggtgctccttcacctccctccctaacaccttaacacccggggagcctccgggggtggcaggaagtccccagcacccaatgcacaatcttccctcaattctctttgtacatagccatgttg

SEQ ID NO: 688228 - DNA, 120 bp, Artificial Sequence
  ENSG00000187902_42 (sequence is synthesized)
cgggggcggccattcccccactcttaaagggctacacgcccctcccccagcccctagggcgaggtggggggggcctcttcttcctcccctgggccgtccccctccctcttatgtctcccc

SEQ ID NO: 688229 - DNA, 120 bp, Artificial Sequence
  ENSG00000187902_43 (sequence is synthesized)
gcaaacactggcacctcacactccttcttgtcaggagcttggggcagacaactggcccttggttcccaccacactgaggaaatgggggttacccaaatccacctgggccctggtgccagt

SEQ ID NO: 688230 - DNA, 120 bp, Artificial Sequence
  ENSG00000187902_44 (sequence is synthesized)
ttttcaaccccacggcttctagctgctctgaggggctcctcccatcccttccagggcctccccagccccgcactgctcaggccaactgtgacttccccagaaaggagccagcttgagcac

SEQ ID NO: 688231 - DNA, 120 bp, Artificial Sequence
  ENSG00000187902_45 (sequence is synthesized)
ccaccccctcccagccccctcccctctgctcaacacctccgcggaacactcagctttctccagctgccgggatttgggggtctgggcctttcagcttttttatcccccctccactagctc

SEQ ID NO: 688232 - DNA, 120 bp, Artificial Sequence
  ENSG00000187902_46 (sequence is synthesized)
tagcccagcctggattccagggatcccacccctagccctgtccctattcagttggcacaggctgcctgaccctggggccttgatttgatctcaaataagccatagaggagagaggtcttg

SEQ ID NO: 688233 - DNA, 120 bp, Artificial Sequence
  ENSG00000187902_47 (sequence is synthesized)
aggggtgggagcaggtgtgtactgacaattcccctccacatgtcttgagctgggacctcgtcatctgagacttccccatgccccaacaaatgcaaatgcacacaaacccatgcatacaca

SEQ ID NO: 688234 - DNA, 120 bp, Artificial Sequence
  ENSG00000187902_48 (sequence is synthesized)
agcacacacacacaggcatctccccgtctggttgggggagcatgggagggggcacttcacagggagaagataaatagttccacacctgaagaccctccaacagcttctgcctccctcctc

SEQ ID NO: 688235 - DNA, 120 bp, Artificial Sequence
  ENSG00000187902_49 (sequence is synthesized)
atcacttcctctctccaccccctctccaacactggccccttcccctaattaattccctggtgaggacagccagaggagctgcgacttggtattttttggaataaatagacattttcctga

SEQ ID NO: 688236 - DNA, 120 bp, Artificial Sequence
  ENSG00000187905_0 (sequence is synthesized)
atgaggggttcctgtgagaggtctggggaggatgaagagcagaaagaagaggctatggtggcctgtgggcgtctttcaggggtccccgaggccgagcagggtcccgaggccaattgggac

SEQ ID NO: 688237 - DNA, 120 bp, Artificial Sequence
  ENSG00000187905_1 (sequence is synthesized)
tccgacctggagacggaaggcaccgatgggcttggagaactggtcagggacacactgtacctgaggtcttgccgggcccatagtgttgtgcccatctcctgctttctgcgccaagggagc

SEQ ID NO: 688238 - DNA, 120 bp, Artificial Sequence
  ENSG00000187905_2 (sequence is synthesized)
gcccaagagctgaacctccggcaccgtggcctggggccccagggcgcccgggctctggcttcctcattgagctccaatccatatgtcaagcggctggaccttcgagacaatgggctctgt

SEQ ID NO: 688239 - DNA, 120 bp, Artificial Sequence
  ENSG00000187905_3 (sequence is synthesized)
ggggcaggtgcagaggccctggcaggtgccctgagcaaaagcagcagcatccatgatgtggacctgtcggagaaccagctgggagtggcaggagcccaggccctctgtgccgccctcaca

SEQ ID NO: 688240 - DNA, 120 bp, Artificial Sequence
  ENSG00000187905_4 (sequence is synthesized)
aagtccctggacctgagctacaaccagctgaatgaccaagcaggggagacacttggaccagccctggcagaaaacacaggactcaccgagcttaacgtgagctggaatcacctccggggc

SEQ ID NO: 688241 - DNA, 120 bp, Artificial Sequence
  ENSG00000187905_5 (sequence is synthesized)
ccaggagctgtggcatttgccaggggactggaggcaaacatcttccttaaagttctagacatctcatacaatggctttggggatcctggagcctctgcggtgggtgaggctctgaaggcc

SEQ ID NO: 688242 - DNA, 120 bp, Artificial Sequence
  ENSG00000187905_6 (sequence is synthesized)
aacaacgtgttggaggaactcaacatgagtaacaaccgcatctctgcgatgggagccctgagcctgggcctgggcctccgggtcaaccagacgctgaggattcttgtagtgtccaggaat

SEQ ID NO: 688243 - DNA, 120 bp, Artificial Sequence
  ENSG00000187905_7 (sequence is synthesized)
cccatgcgaagtgaaggctgctttggtctcctcaagtctgtccaggacaatccagcctctgccctggaactgctggatttctcagatatccaggtgaacgcagagtttgatggccttgct

SEQ ID NO: 688244 - DNA, 120 bp, Artificial Sequence
  ENSG00000187905_8 (sequence is synthesized)
agctcagtgaggggaattcttccagaactctgcataaagactggcgcttgcagagtggagtataaaaaggagttgctgccagtcttcagatcagccctgccagcgtctgtccctaagtga

SEQ ID NO: 688245 - DNA, 120 bp, Artificial Sequence
  ENSG00000187905_9 (sequence is synthesized)
tccttttcctcagggatgtgcctccatcgttgaaagctgggccgtgtcacctggggcctgctggtgttgctggtggatagaagaggggcctcatcacaggagggggcatgtggggtggag

SEQ ID NO: 688246 - DNA, 120 bp, Artificial Sequence
  ENSG00000187905_10 (sequence is synthesized)
ttagaccctctgctgtgcagccgatgcctgatagaagtcctttcctcacccaccccacaccatcactcccctcccttgctggccagcatccccctcttcacctagcacatgggagactcc

SEQ ID NO: 688247 - DNA, 120 bp, Artificial Sequence
  ENSG00000187905_11 (sequence is synthesized)
cagtacctgaatgcaggatgggagagtccttccacacagagaggtgggagttgggcattgtaagaagcaggtaggcaatgtgggagtttgatggggctggatccaaatgccagttctgcc

SEQ ID NO: 688248 - DNA, 120 bp, Artificial Sequence
  ENSG00000187905_12 (sequence is synthesized)
actgaagagctggatacctgggcaagcagcttaacctctctgagcttcagtttctgatctgtgaaatggcccccaaaataccttatgggcttggggctgtggtgagcatgaagtgaaatg

SEQ ID NO: 688249 - DNA, 120 bp, Artificial Sequence
  ENSG00000187905_13 (sequence is synthesized)
cactcctgaagtggtcagaagagtgtgtgacccatgtacgtgctccatgcatggccacttgggctattattgccaatcctggcaacggggctgtgagggcttctgaagtgggtggtgata

SEQ ID NO: 688250 - DNA, 120 bp, Artificial Sequence
  ENSG00000187905_14 (sequence is synthesized)
tcactgccagatgcagccatcgacggtatagctgccccccaccacagcagtctctacagtaccaggaggtaggcggttttaaccacttgacacagaagctggtgggcacacagggagggg

SEQ ID NO: 688251 - DNA, 120 bp, Artificial Sequence
  ENSG00000187905_15 (sequence is synthesized)
gaggtcaggggcagaggggacccagccattgggagccagagccaccatgcaaccccaggacagttaacctgtaagtccccttcctcagcctcagacctggaggtttgggggatggcagaa

SEQ ID NO: 688252 - DNA, 120 bp, Artificial Sequence
  ENSG00000187905_16 (sequence is synthesized)
ggagacaccttctgagccgaaacagtgtggccatagtggctgtgtcctcagagatgaggagcccctccttccctttcacattgctctctggccttcccggacctggcttctcgcagcttt

SEQ ID NO: 688253 - DNA, 120 bp, Artificial Sequence
  ENSG00000187905_17 (sequence is synthesized)
gtgcatgaatatccatagcaacattatttataatattctaagagtgaaaatgcccaccagtggataaatgcaatgtggtatatccatacagtggaatattatttggcaataaaaaggaat

SEQ ID NO: 688254 - DNA, 120 bp, Artificial Sequence
  ENSG00000187905_18 (sequence is synthesized)
ttgaggtgataccaatgttctaaaatgtattgtggtgatggctacgtaactgtgcatattctaaaggcaattgaattacagatgctttacatgaatgaaccgtatggtatgtgaacggca

SEQ ID NO: 688255 - DNA, 120 bp, Artificial Sequence
  ENSG00000187905_19 (sequence is synthesized)
tctcaataaaactgtttcgaaaagaaggaaaaggacggacacatgctgaaaacgggtgaaactagaaaacatggcgctaagtgaaagaagccagccacaagatcacgtgtcgcatgaccg

SEQ ID NO: 688256 - DNA, 120 bp, Artificial Sequence
  ENSG00000187905_20 (sequence is synthesized)
catttatgtgaaacatccggagtatgcaaatctatacagacagaaagtagattatacattgcctaggtgcagagaaatggaagtattggaggttgacggctaaaggatgtggatttcttt

SEQ ID NO: 688257 - DNA, 120 bp, Artificial Sequence
  ENSG00000187905_21 (sequence is synthesized)
ggggggtgataaaagtgttctaaaattgattgtggtgatgtgcgactctatgaatacgctaaaaaccgctcgattgtacattttaaatgggtgatttatgcggtatgtgaaatacatctc

SEQ ID NO: 688258 - DNA, 120 bp, Artificial Sequence
  ENSG00000187905_22 (sequence is synthesized)
gatttatgcggtatgtgaaatacatctcaagaaagctgctgcaaaaaatatcatacgggttgagcctagtggtattaaaaaagtataaatatggccaggcgcggtggctcacgcccataa

SEQ ID NO: 688259 - DNA, 88 bp, Artificial Sequence
  ENSG00000187905_23 (sequence is synthesized)
tgggcggagagagttacttgaacacagaaggtggaggttgcagtgagccaagctcacttcactgcactccagtctgggtgacagagca

SEQ ID NO: 688260 - DNA, 89 bp, Artificial Sequence
  ENSG00000187905_24 (sequence is synthesized)
tataatcccagaaaagccaggagttccagaccagcctgggcagcatcgtgagacccccgtttctacaaaaaacatttaaaaattagctg

SEQ ID NO: 688261 - DNA, 85 bp, Artificial Sequence
  ENSG00000187905_25 (sequence is synthesized)
attagctgggcatggtggcatgtgcctgtcgttccagctacctgggatgctgaggtgggaggatcactcaaacctgggagtttga

SEQ ID NO: 688262 - DNA, 120 bp, Artificial Sequence
  ENSG00000187905_26 (sequence is synthesized)
tgattgcaccactgcactccagtctggttgagagagtgggaacctgtctcgaaaaaaaaaaaaaaagaatggaaggatcaaactgggcatggtgatgcatgcttgcctgtaggcccagcc

SEQ ID NO: 688263 - DNA, 120 bp, Artificial Sequence
  ENSG00000187905_27 (sequence is synthesized)
gtaggcccagcctacaagggacgctgaggcaggaggatcatttgagcctgggaatttgagcccagcttgagcaacatagtgaaatcctgtctaaaaaagaaaaaaaggaagaatcaaata

SEQ ID NO: 688264 - DNA, 120 bp, Artificial Sequence
  ENSG00000187905_28 (sequence is synthesized)
attgttccaaagtctttcaaaaggagtattgagtcccaactcggcactttcctgagcagggatatgtctcctctccttctcactaaggagccagaaactcaccccttctcactaaaaaag

SEQ ID NO: 688265 - DNA, 120 bp, Artificial Sequence
  ENSG00000187905_29 (sequence is synthesized)
tgagaaaaataaaaatagctcagagaactttgagctatgtgaggcacgcagaatttatcaggtccggagacatgaatatgggacttcaggcagggcatgatggctcacgcctgtagactc

SEQ ID NO: 688266 - DNA, 120 bp, Artificial Sequence
  ENSG00000187905_30 (sequence is synthesized)
aggaggccaaggtgagcccaaggtgggaggatcactttagtccaggagttttgagaccagcctgggcaacatcaggagatccttgtctcctcaaaaacttaaaaaaaaaaaaagctgggc

SEQ ID NO: 688267 - DNA, 120 bp, Artificial Sequence
  ENSG00000187905_31 (sequence is synthesized)
aggttgaggctgcagtgagctatgaccataccagtgcattccagcctgggtacacagcgagaccctgtctcaaaataataataacaataatatgctgggtgcagaggctcattcctgtaa

SEQ ID NO: 688268 - DNA, 120 bp, Artificial Sequence
  ENSG00000187905_32 (sequence is synthesized)
cacagcgagaccctgtctcaaaataataataacaataatatgctgggtgcagaggctcattcctgtaatcccagctctttgggaggctgaagtgggtgaatcacttgaggtcaggagttc

SEQ ID NO: 688269 - DNA, 84 bp, Artificial Sequence
  ENSG00000187905_33 (sequence is synthesized)
taattataataatgaaaagaaaaagaaatgaatatgggacttcagtaacatatttcttatccatgcccgggggcaattgtttaa

SEQ ID NO: 688270 - DNA, 120 bp, Artificial Sequence
  ENSG00000187905_34 (sequence is synthesized)
gtaacatatttcttatccatgcccgggggcaattgtttaaaggcattttgttcctgactagcttaacccattatcttcctgtttctggaatttatgatacaaagaataatgtatagacaa

SEQ ID NO: 688271 - DNA, 120 bp, Artificial Sequence
  ENSG00000187905_35 (sequence is synthesized)
cggtgggtgaggctctgaaggccaacaacgtgttggaggaactcaacatgagagacagtctcctgctggccttgaactcttgggctgaagcagtcttcctgcctcagcctcccaaagtgc

SEQ ID NO: 688272 - DNA, 120 bp, Artificial Sequence
  ENSG00000187905_36 (sequence is synthesized)
atcgttgttacatagagacctgtgattcctatagcacaggcggatggctgcgaattgcacacggtgtataaagcatctccggcagagcctggtgcatgtaacaaccgcatctctgcgatg

SEQ ID NO: 688273 - DNA, 68 bp, Artificial Sequence
  ENSG00000187905_37 (sequence is synthesized)
tcatgggggatctgggctctgccagcccctctcttccaagttcagtgctctcaccccaagcttgctat

SEQ ID NO: 688274 - DNA, 120 bp, Artificial Sequence
  ENSG00000187905_38 (sequence is synthesized)
ttttcacccctgcctttgttcctctgctgttcttgctgaagtgtccagctccggccacctcacctgggaagctccgctgagccctgcccagatacacctcccctcccagcctttccctcc

SEQ ID NO: 688275 - DNA, 120 bp, Artificial Sequence
  ENSG00000187908_0 (sequence is synthesized)
tttatagcagcagtagaaatataccaccctagaggacacacctccttttagctaggtacctataaatgtccaggattttctattcaattgagaagaacccagcaaaatggggatctccac

SEQ ID NO: 688276 - DNA, 120 bp, Artificial Sequence
  ENSG00000187908_1 (sequence is synthesized)
agtcatccttgaaatgtgtcttttatggggacaagttctatctacaggtgggtggatcccaaggactacagactacgcttcactgattccctcggaggtgcccttggatccaactgtagc

SEQ ID NO: 688277 - DNA, 120 bp, Artificial Sequence
  ENSG00000187908_2 (sequence is synthesized)
agaaggttctccatttccctcggagtcgaccctggagtcaactgtagcagaaggttctccgatttccttggagtcaaccctggagtcaaccgtagcagaaggttctctgattccctcaga

SEQ ID NO: 688278 - DNA, 120 bp, Artificial Sequence
  ENSG00000187908_3 (sequence is synthesized)
gtcaaccctggagtcaactgtagcagaaggatctgattctggtttggccctgaggctggtgaatggagatggcaggtgtcagggccgagtggagatcctataccgaggctcctggggcac

SEQ ID NO: 688279 - DNA, 120 bp, Artificial Sequence
  ENSG00000187908_4 (sequence is synthesized)
cgtgtgtgatgacagctgggacaccaatgatgccaacgtggtctgtaggcagctgggttgtggctgggccatgtcagctccaggaaatgcctggtttggccagggctcaggacccattgc

SEQ ID NO: 688280 - DNA, 120 bp, Artificial Sequence
  ENSG00000187908_5 (sequence is synthesized)
cctggatgatgtgcgctgctcaggacacgaatcctacctgtggagctgcccccacaatggctggctctcccataactgtggccatggtgaagatgctggtgttatctgctcagctgccca

SEQ ID NO: 688281 - DNA, 120 bp, Artificial Sequence
  ENSG00000187908_6 (sequence is synthesized)
gcctcagtcaacactcaggccagaaagttggcctgtcaggatatcaccacctgtacccacagaaggatctgaatccagtttggccctgaggctggtgaatggaggcgacaggtgtcgagg

SEQ ID NO: 688282 - DNA, 120 bp, Artificial Sequence
  ENSG00000187908_7 (sequence is synthesized)
ccgagtggaggtcctataccgaggctcctggggcaccgtgtgtgatgactactgggacaccaatgatgccaatgtggtctgcaggcagctgggctgtggctgggccatgtcagccccagg

SEQ ID NO: 688283 - DNA, 120 bp, Artificial Sequence
  ENSG00000187908_8 (sequence is synthesized)
aaatgcccagtttggccagggctcaggacccattgtcctggatgatgtgcgctgctcaggacatgagtcctacctgtggagctgcccccacaatggctggctcacccacaactgtggcca

SEQ ID NO: 688284 - DNA, 120 bp, Artificial Sequence
  ENSG00000187908_9 (sequence is synthesized)
tagtgaagacgctggtgtcatctgctcagctccccagtcccggccgacacccagcccagatacttggccgacctcacatgcatcaacagcaggacctgaatccagtttggccctgaggct

SEQ ID NO: 688285 - DNA, 120 bp, Artificial Sequence
  ENSG00000187908_10 (sequence is synthesized)
ggtgaatggaggtgacaggtgtcagggccgagtggaggtcctataccgaggctcctggggcaccgtgtgtgatgatagctgggacaccagtgacgccaatgtggtctgccggcagctggg

SEQ ID NO: 688286 - DNA, 120 bp, Artificial Sequence
  ENSG00000187908_11 (sequence is synthesized)
ctgtggctgggccacgtcagccccaggaaatgcccggtttggccagggttcaggacccattgtcctggatgacgtgcgctgctcaggctatgagtcctacctgtggagctgcccccacaa

SEQ ID NO: 688287 - DNA, 120 bp, Artificial Sequence
  ENSG00000187908_12 (sequence is synthesized)
tggctggctctcccataactgtcagcacagtgaagacgctggtgtcatctgctcagctgcccactcctggtcgacgcccagtccagacacgttgccgaccatcaccttacctgcatcgac

SEQ ID NO: 688288 - DNA, 120 bp, Artificial Sequence
  ENSG00000187908_13 (sequence is synthesized)
agtaggatctgaatccagtttggccctgaggctggtgaatggaggtgacaggtgtcagggccgagtggaggtcctataccgaggctcctggggcaccgtgtgtgatgacagctgggacac

SEQ ID NO: 688289 - DNA, 120 bp, Artificial Sequence
  ENSG00000187908_14 (sequence is synthesized)
caatgatgccaatgtggtctgcaggcagctgggctgtggctgggccatgttggccccaggaaatgcccggtttggtcagggctcaggacccattgtcctggatgacgtgcgctgctcagg

SEQ ID NO: 688290 - DNA, 120 bp, Artificial Sequence
  ENSG00000187908_15 (sequence is synthesized)
gaatgagtcctacttgtggagctgcccccacaatggctggctctcccataactgtggccatagtgaagacgctggtgtcatctgctcaggacctgaatccagtttggccctgaggctggt

SEQ ID NO: 688291 - DNA, 120 bp, Artificial Sequence
  ENSG00000187908_16 (sequence is synthesized)
gaatggaggtgacaggtgtcagggccgagtggaggtcctataccgaggctcttggggcaccgtgtgtgatgacagctgggacaccaatgatgccaatgtggtctgcaggcagctgggctg

SEQ ID NO: 688292 - DNA, 120 bp, Artificial Sequence
  ENSG00000187908_17 (sequence is synthesized)
tggctgggccacgtcagccccaggaaatgcccggtttggtcagggctcaggacccattgtcctggatgatgtgcgctgctcaggacatgagtcctacctgtggagctgccccaacaatgg

SEQ ID NO: 688293 - DNA, 120 bp, Artificial Sequence
  ENSG00000187908_18 (sequence is synthesized)
ctggctctcccacaactgtggccatcatgaagatgctggtgtcatctgctcagctgcccagtcccggtcgacgcccaggccagacacgttgtcgaccatcacgttacctccatcgacagt

SEQ ID NO: 688294 - DNA, 120 bp, Artificial Sequence
  ENSG00000187908_19 (sequence is synthesized)
aggatctgaatccagtttgaccctgaggctggtgaatggaagtgacaggtgtcagggccgagtagaggtcctataccgaggctcctggggcaccgtgtgtgatgacagctgggataccaa

SEQ ID NO: 688295 - DNA, 120 bp, Artificial Sequence
  ENSG00000187908_20 (sequence is synthesized)
tgatgccaatgtggtctgcaggcagctgggctgtggctgggccacgtcggccccaggaaatgcccggtttggccagggctcaggacccattgttctggatgatgtgcgctgctcaggaca

SEQ ID NO: 688296 - DNA, 120 bp, Artificial Sequence
  ENSG00000187908_21 (sequence is synthesized)
cgagtcctacctgtggagctgcccccacaatggctggctctcccacaactgtggccatcatgaagatgctggtgtcatctgctcagtttcccagtcccggccgacacccagtccagatac

SEQ ID NO: 688297 - DNA, 120 bp, Artificial Sequence
  ENSG00000187908_22 (sequence is synthesized)
ttggccgacctcacatgcatcaacagcaggacctgaatccagtttggccctgaggctggtgaatggaggtgacaggtgtcagggccgagtggaggtcctataccgaggctcctggggcac

SEQ ID NO: 688298 - DNA, 120 bp, Artificial Sequence
  ENSG00000187908_23 (sequence is synthesized)
cgtgtgtgatgatagctgggacaccagtgacgccaatgtggtctgccggcagctgggctgtggctgggccacgtcagccccaggaaatgcccggtttggccagggttcaggacccattgt

SEQ ID NO: 688299 - DNA, 120 bp, Artificial Sequence
  ENSG00000187908_24 (sequence is synthesized)
cctggatgacgtgcgctgctcaggctatgagtcctacctgtggagctgcccccacaatggctggctctcccataactgtcagcacagtgaagacgctggtgtcatctgctcagctgccca

SEQ ID NO: 688300 - DNA, 120 bp, Artificial Sequence
  ENSG00000187908_25 (sequence is synthesized)
ctcctggtcgacgcccagtccagacacattgccgaccatcaccttgcctgcatcgacagtaggatctgaatccagtttggccctgaggctggtgaatggaggtgacaggtgtcagggccg

SEQ ID NO: 688301 - DNA, 120 bp, Artificial Sequence
  ENSG00000187908_26 (sequence is synthesized)
agtggaggtcctataccaaggctcctggggcaccgtgtgcgatgacagctgggacaccaatgatgccaatgtcgtctgcaggcaactgggctgtggctgggccatgtcagccccaggaaa

SEQ ID NO: 688302 - DNA, 120 bp, Artificial Sequence
  ENSG00000187908_27 (sequence is synthesized)
tgcccggtttggtcagggctcaggacccattgtcctggatgatgtgcgctgctcaggacacgagtcttacctgtggagctgcccccacaatggctggctctcccacaactgtggccatag

SEQ ID NO: 688303 - DNA, 120 bp, Artificial Sequence
  ENSG00000187908_28 (sequence is synthesized)
gcccccacaatggctggctctcccacaactgtggccatagtgaagacgctggtgtcatctgctcagcttcccagtcccggccaacacctagtccagacacttggccaacctcacatgcat

SEQ ID NO: 688304 - DNA, 120 bp, Artificial Sequence
  ENSG00000187908_29 (sequence is synthesized)
gaatggaggtgacaggtgtcagggccgagtggaggtcctataccgaggctcctggggcaccgtgtgtgatgactactgggacaccaatgatgccaatgtggtttgcaggcagctgggctg

SEQ ID NO: 688305 - DNA, 120 bp, Artificial Sequence
  ENSG00000187908_30 (sequence is synthesized)
tggctgggccatgtcagccccaggaaatgcccggtttggccagggttcaggacccattgtcctggatgatgtgcgctgctcaggacatgagtcctatctgtggagctgcccccacaatgg

SEQ ID NO: 688306 - DNA, 86 bp, Artificial Sequence
  ENSG00000187908_31 (sequence is synthesized)
caggacatgagtcctatctgtggagctgcccccacaatggctggctctcccacaactgtggccatcatgaagacgctggtgtcatc

SEQ ID NO: 688307 - DNA, 120 bp, Artificial Sequence
  ENSG00000187908_32 (sequence is synthesized)
cagtttggccctgaggctggtgaatggaggtgacaggtgtcagggccgagtggaggtcctataccgaggctcctggggcaccgtgtgtgatgactactgggacaccaatgatgccaatgt

SEQ ID NO: 688308 - DNA, 120 bp, Artificial Sequence
  ENSG00000187908_33 (sequence is synthesized)
ggtttgcaggcagctgggctgtggctgggccacgtcagccccaggaaatgcccggtttggccagggttcaggacccattgtcctggatgatgtgcgctgctcaggacatgagtcctatct

SEQ ID NO: 688309 - DNA, 120 bp, Artificial Sequence
  ENSG00000187908_34 (sequence is synthesized)
ctgctcaggacatgagtcctatctgtggagctgcccccacaatggctggctctcccacaactgtggccatcatgaagacgctggtgtcatctgctcagcttcccagtcccagccgacacc

SEQ ID NO: 688310 - DNA, 120 bp, Artificial Sequence
  ENSG00000187908_35 (sequence is synthesized)
gcatcaacagcaggatctgaatccagtttggccctgaggctggtgaatggaggtgacaggtgtcagggccgagtggaggtcctataccgaggctcctggggcaccgtgtgtgatgactac

SEQ ID NO: 688311 - DNA, 120 bp, Artificial Sequence
  ENSG00000187908_36 (sequence is synthesized)
ctactgggacaccaatgatgccaatgtggtttgcaggcagctgggctgtggctgggccacgtcagccccaggaaatgcccggtttggccagggttcaggacccattgtcctggatgatgt

SEQ ID NO: 688312 - DNA, 120 bp, Artificial Sequence
  ENSG00000187908_37 (sequence is synthesized)
gcgctgctcaggacatgagtcctatctgtggagctgcccccacaatggctggctctcccacaactgtggccatcatgaagacgctggtgtcatctgctcagcttcccagtcccagccgac

SEQ ID NO: 688313 - DNA, 120 bp, Artificial Sequence
  ENSG00000187908_38 (sequence is synthesized)
acccagcccagacacttggccaacctctcgtgcatcaacagcaggatctgaatccactttggccctgagactggtgaatggaggtgacaggtgtcgaggccgagtggaggtcctatacca

SEQ ID NO: 688314 - DNA, 120 bp, Artificial Sequence
  ENSG00000187908_39 (sequence is synthesized)
aggctcctggggcaccgtgtgtgatgactactgggacaccaatgatgccaacgtggtctgcaggcagctgggctgtggctgggccatgtcagccccaggaaatgcccagtttggccaggg

SEQ ID NO: 688315 - DNA, 120 bp, Artificial Sequence
  ENSG00000187908_40 (sequence is synthesized)
ctcaggacccattgtcctggatgatgtgcgctgctcaggacacgagtcttacctgtggagctgcccccacaatggctggctctcccacaactgtggccatcatgaagatgctggtgtcat

SEQ ID NO: 688316 - DNA, 120 bp, Artificial Sequence
  ENSG00000187908_41 (sequence is synthesized)
ctgctcagctgctcagtcccagtcaacgcccaggccagatacttggctgaccaccaacttaccggcattgacagtaggatctgaatccagtttggctctgaggctggtgaatggaggtga

SEQ ID NO: 688317 - DNA, 120 bp, Artificial Sequence
  ENSG00000187908_42 (sequence is synthesized)
caggtgtcgaggccgagtggaggtcctgtatcgaggctcctggggaaccgtgtgtgatgacagctgggacaccaatgatgccaatgtggtctgcaggcagctgggctgtggctgggccat

SEQ ID NO: 688318 - DNA, 120 bp, Artificial Sequence
  ENSG00000187908_43 (sequence is synthesized)
gtcggccccaggaaatgcccggtttggccagggctcaggacccattgtcctggatgatgtgcgctgctcagggaatgagtcctacctgtggagctgcccccacaaaggctggctcaccca

SEQ ID NO: 688319 - DNA, 120 bp, Artificial Sequence
  ENSG00000187908_44 (sequence is synthesized)
caactgtggccatcacgaagacgctggtgtcatctgctcagccacccaaataaattctactacgacagattggtggcatccaacaactacaaccactgcaagaccctcttcaaattgtgg

SEQ ID NO: 688320 - DNA, 120 bp, Artificial Sequence
  ENSG00000187908_45 (sequence is synthesized)
tggcttcttattctatgccagtgggacattctccagcccatcctaccctgcatactaccccaacaatgctaagtgtgtttgggaaatagaagtgaattctggttatcgcataaacctggg

SEQ ID NO: 688321 - DNA, 120 bp, Artificial Sequence
  ENSG00000187908_46 (sequence is synthesized)
cttcagtaatctgaaattggaggcacaccataactgcagttttgattatgttgaaatctttgatggatcattgaatagcagtctcctgctggggaaaatctgtaatgataccaggcaaat

SEQ ID NO: 688322 - DNA, 120 bp, Artificial Sequence
  ENSG00000187908_47 (sequence is synthesized)
atttacatcttcttacaaccgaatgaccattcactttcgaagtgacatcagtttccaaaacactggctttttggcttggtataactccttcccaagcgatgccaccttgaggttggtcaa

SEQ ID NO: 688323 - DNA, 120 bp, Artificial Sequence
  ENSG00000187908_48 (sequence is synthesized)
tttaaattcatcctatggtctatgtgccgggcgtgtagaaatttaccatggtggcacctgggggacagtttgtgatgactcctggaccattcaggaagctgaggtggtctgcagacagct

SEQ ID NO: 688324 - DNA, 120 bp, Artificial Sequence
  ENSG00000187908_49 (sequence is synthesized)
agggtgtggacgtgcagtttcagcccttggaaatgcatattttggctctggctctggccccatcaccctggacgatgtagagtgctcagggacggaatccactctctggcagtgccggaa

SEQ ID NO: 688325 - DNA, 120 bp, Artificial Sequence
  ENSG00000187908_50 (sequence is synthesized)
ccgaggctggttctcccacaactgtaatcatcgtgaagatgctggtgtcatctgctcaggaaaccatctatcgacacctgctccttttctcaacatcacccgtccaaacacagattattc

SEQ ID NO: 688326 - DNA, 120 bp, Artificial Sequence
  ENSG00000187908_51 (sequence is synthesized)
ctgcggaggcttcctatcccaaccatcaggggacttttccagcccattctatcccgggaactatccaaacaatgccaagtgtgtgtgggacattgaggtgcaaaacaactaccgtgtgac

SEQ ID NO: 688327 - DNA, 120 bp, Artificial Sequence
  ENSG00000187908_52 (sequence is synthesized)
tgtgatcttcagagatgtccagcttgaaggtggctgcaactatgattatattgaagttttcgatggcccctaccgcagttcccctctcattgctcgagtttgtgatggggccagaggctc

SEQ ID NO: 688328 - DNA, 120 bp, Artificial Sequence
  ENSG00000187908_53 (sequence is synthesized)
cttcacttcttcctccaacttcatgtccattcgcttcatcagtgaccacagcatcacaaggagagggttccgggctgagtactactccagtccctccaatgacagcaccaacctgctctg

SEQ ID NO: 688329 - DNA, 120 bp, Artificial Sequence
  ENSG00000187908_54 (sequence is synthesized)
tctgccaaatcacatgcaagccagtgtgagcaggagctatctccaatccttgggcttttctgccagtgaccttgtcatttccacctggaatggatactacgagtgtcggccccagataac

SEQ ID NO: 688330 - DNA, 120 bp, Artificial Sequence
  ENSG00000187908_55 (sequence is synthesized)
gccgaacctggtgatattcacaattccctactcaggctgcggcaccttcaagcaggcagacaatgacaccatcgactattccaacttcctcacagcagctgtctcaggtggcatcatcaa

SEQ ID NO: 688331 - DNA, 120 bp, Artificial Sequence
  ENSG00000187908_56 (sequence is synthesized)
gaggaggacagacctccgtattcacgtcagctgcagaatgcttcagaacacctgggtcgacaccatgtacattgctaatgacaccatccacgttgctaataacaccatccaggtcgagga

SEQ ID NO: 688332 - DNA, 120 bp, Artificial Sequence
  ENSG00000187908_57 (sequence is synthesized)
agtccagtatggcaattttgacgtgaacatttccttttatacttcctcatctttcttgtatcctgtgaccagccgcccttactacgtggacctgaaccaggacttgtacgttcaggctga

SEQ ID NO: 688333 - DNA, 120 bp, Artificial Sequence
  ENSG00000187908_58 (sequence is synthesized)
aatcctccattctgatgctgtactgaccttgtttgtggacacctgcgtggcatcaccatactccaatgacttcacgtctttgacttatgatctaatccggagtggatgcgtgagggatga

SEQ ID NO: 688334 - DNA, 120 bp, Artificial Sequence
  ENSG00000187908_59 (sequence is synthesized)
cacctacggaccctactcctcgccatctcttcgcattgcccgcttccggttcagggccttccacttcctgaaccgcttcccctccgtgtacctgcgttgtaaaatggtggtgtgcagagc

SEQ ID NO: 688335 - DNA, 120 bp, Artificial Sequence
  ENSG00000187908_60 (sequence is synthesized)
gtatgacccctcttcccgctgctaccgaggctgtgtgttgaggtcgaagagggatgtgggctcctaccaggaaaaggtggacgtcgtcctgggtcccatccagctgcagacccccccacg

SEQ ID NO: 688336 - DNA, 120 bp, Artificial Sequence
  ENSG00000187908_61 (sequence is synthesized)
ccgagaagaggagcctcggtaggtggtcgctctcagaccccactgtccaccggggcgcagacccctgactcggggacttgggatgttcctcttggtgtcatattccaactcagattgagc

SEQ ID NO: 688337 - DNA, 120 bp, Artificial Sequence
  ENSG00000187908_62 (sequence is synthesized)
cctacattgtgctgcacctggtcatacggagttgaatcagacctggttcccgcctcccccaaggctcatggtccttggaggacccgttgcagggtgaggtcaagagagttctgacctgga

SEQ ID NO: 688338 - DNA, 120 bp, Artificial Sequence
  ENSG00000187908_63 (sequence is synthesized)
tggcccatagacctgacgtcccagaatccatgcttctcatctgcaaaatgaaaatgtcaatacttacttcttagcactgttgagagggttacttacataaaggaattttggtgaaactgc

SEQ ID NO: 688339 - DNA, 120 bp, Artificial Sequence
  ENSG00000187908_64 (sequence is synthesized)
aagtgcacactagaccatgcctatgaggcttggtggatttacccagctgcctctttgggggcaccatggttccccaaggaaatcaaagaagggcctcagcgatgcacggcccattctctt

SEQ ID NO: 688340 - DNA, 120 bp, Artificial Sequence
  ENSG00000187908_65 (sequence is synthesized)
tctcttggcactgactgtgtgggcaggcccttgggaaggcagcaaagggtgcagactgggggttccacctggccttgggtctgccaccaactctccaggggacctggtgactctccttca

SEQ ID NO: 688341 - DNA, 120 bp, Artificial Sequence
  ENSG00000187908_66 (sequence is synthesized)
tctttaaccagcatcttgatagcaatgaccatcaccatttgtgacattttacaaagcccttttctgtatgttgttttatttgagcttcaccatagccctcttcagtgtgcatggatcaga

SEQ ID NO: 688342 - DNA, 120 bp, Artificial Sequence
  ENSG00000187908_67 (sequence is synthesized)
ttactttgcctttgtaaataggaaaagctttagagagattatttgacttgcccagtatttatttattcaattatttatttctctcactatgaattcatgcatattgattttattctgtgg

SEQ ID NO: 688343 - DNA, 120 bp, Artificial Sequence
  ENSG00000187908_68 (sequence is synthesized)
gggcactagggacttttcgatggaagaaaaatggtctaaatcaggatgcgagcccttcctttcctgatgtaaagggctgacaggtgaggggctgtagatttcatatgtgtgattgcaaag

SEQ ID NO: 688344 - DNA, 120 bp, Artificial Sequence
  ENSG00000187908_69 (sequence is synthesized)
ggcaggactaagacccaggcatggaggttgagggaagatgagactctcttgatttaaggatacctatgactttcttttgtttcaatttttatttttctttttattttttgagacagggcc

SEQ ID NO: 688345 - DNA, 62 bp, Artificial Sequence
  ENSG00000187908_70 (sequence is synthesized)
ttcaatttttatttttctttttattttttgagacagggcctcactctgtcgcccatgatttt

SEQ ID NO: 688346 - DNA, 120 bp, Artificial Sequence
  ENSG00000187908_71 (sequence is synthesized)
tgctgggattataagtgtgagctactgcgcccagccaaggagacctatgactttcatcgatgaactttgtcagagtttctggcacagaggtgtgaccccaccctgagatctgaccccctg

SEQ ID NO: 688347 - DNA, 120 bp, Artificial Sequence
  ENSG00000187908_72 (sequence is synthesized)
gtacggtgaagctaaagccaatttctgtgacttgtaggaaatcatttctaaacagtgtttctaagacgaatttgtgttctttccaggtgggtggatcccaaggactacagactacgcttc

SEQ ID NO: 688348 - DNA, 120 bp, Artificial Sequence
  ENSG00000187912_0 (sequence is synthesized)
agccctggctgccacttgtcaggttccctgtgctagacatgcataatctgtattccatcactgggtacccggacccaccagggaccatggaggaggaggaggaggatgatgactatgaga

SEQ ID NO: 688349 - DNA, 120 bp, Artificial Sequence
  ENSG00000187912_1 (sequence is synthesized)
actcaacacctccctacaaggaccttcctcccaagccagggaccatggaggaggaggaggaggatgatgactatgagaactcaacacctccctacaaggaccttcctcccaagccaggga

SEQ ID NO: 688350 - DNA, 120 bp, Artificial Sequence
  ENSG00000187912_2 (sequence is synthesized)
ccatggaggaggaggaggaggatgatgactatgagaactcaacacctccctacaaggaccttcctcccaagccaggttcaagtgctccaccaagacctccaagggcagcaaaggaaacag

SEQ ID NO: 688351 - DNA, 120 bp, Artificial Sequence
  ENSG00000187912_3 (sequence is synthesized)
agaaacccccacttccttgcaagccccggaacatgacaggcctggacctcgccgctgtcacctgtccacctcctcaactggctgtgaatcttgagccttctccattgcagccatccctgg

SEQ ID NO: 688352 - DNA, 120 bp, Artificial Sequence
  ENSG00000187912_4 (sequence is synthesized)
ccgcaactccagtcccctggctcaatcagaggtctggaggtcctggctgctgccagaagaggtggatggtgtacctgtgtctgctggtggtgacttccctgttcctgggctgccttggtc

SEQ ID NO: 688353 - DNA, 120 bp, Artificial Sequence
  ENSG00000187912_5 (sequence is synthesized)
aaatatgactggcatggcagggctagctggcctgaagcatgacattgcccgtgtaagagctgacaccaaccagtccctggtggaactttggggcttattagactgccgccgaattacctg

SEQ ID NO: 688354 - DNA, 120 bp, Artificial Sequence
  ENSG00000187912_6 (sequence is synthesized)
tcctgaaggctggctgccctttgagggcaagtgttactacttctccccaagcaccaagtcatgggatgaggcccggatgttctgccaggagaattactctcacttggtcatcatcaatag

SEQ ID NO: 688355 - DNA, 120 bp, Artificial Sequence
  ENSG00000187912_7 (sequence is synthesized)
ctttgctgagcacaattttgtggccaaggcccatggctctccacgggtgtactggctggggctgaatgacagggcccaggaaggggactggaggtggctggatgggtctcctgtgacatt

SEQ ID NO: 688356 - DNA, 120 bp, Artificial Sequence
  ENSG00000187912_8 (sequence is synthesized)
aagcttctgggagccagaggaacccaataacatccacgatgaggactgtgctaccatgaacaaaggtggcacctggaatgatctctcttgctacaaaactacgtattggatttgtgagcg

SEQ ID NO: 688357 - DNA, 120 bp, Artificial Sequence
  ENSG00000187912_9 (sequence is synthesized)
gaaatgttcctgttgaagcccagggccgaggctgggggtccatatctgagtgtctctttgagatgagaatctcctgccctttcgtggacggccttgcctcttcgtgagtggacacacaga

SEQ ID NO: 688358 - DNA, 120 bp, Artificial Sequence
  ENSG00000187912_10 (sequence is synthesized)
tgtgcctcaaacaggattggcaccctggatgcagcaagttcccaggggtgcaagtcaggctgtttctagagtgaggacttgggcttgccctagtagatggtgagctgggaggatgctcag

SEQ ID NO: 688359 - DNA, 120 bp, Artificial Sequence
  ENSG00000187912_11 (sequence is synthesized)
tcactgtgaccctgattaagtaccaggagttgatggaagaactgagaatgttaagctttcagcagatgacgtggcgaacaaatatccgtggtggatgggtaggatgggttctcagtctgt

SEQ ID NO: 688360 - DNA, 120 bp, Artificial Sequence
  ENSG00000187912_12 (sequence is synthesized)
tctcccacttctggggttgaaaggatcttcactaagttcctgatcatgactcttgggaagtgatactagccctgaggaccctggggctggtgttgaacctgggatgaaatatcctggcgc

SEQ ID NO: 688361 - DNA, 120 bp, Artificial Sequence
  ENSG00000187912_13 (sequence is synthesized)
ctggggctggtgttgaacctgggatgaaatatcctggcgcctgtgaaccacaaagagctgggactgggctccttttcctgcagcctcaaacttctgggctcaggtgatcctcccatctca

SEQ ID NO: 688362 - DNA, 120 bp, Artificial Sequence
  ENSG00000187912_14 (sequence is synthesized)
cctggccaattttttgtagcatttaaagagagggagtctcactatgttgcccaggccagtctcaaactccttgcctcaatggatcctcctacttgggcttcccaaattgtgaggattaca

SEQ ID NO: 688363 - DNA, 120 bp, Artificial Sequence
  ENSG00000187912_15 (sequence is synthesized)
ggtgtgagccactgtgcctggctcaaaattattattattatttttatagagatgaggtctcactctgttgccgaggctggtctcaaactcctggggtcaagcaatccttccgtgatggcc

SEQ ID NO: 688364 - DNA, 120 bp, Artificial Sequence
  ENSG00000187912_16 (sequence is synthesized)
tcccaaagtgctgggattacaggcatgtgtcaccgtacctggccgatatttttatttttatttttactttccccatcttttccttttttttttttttccaaacaaaagctttgaaagtgg

SEQ ID NO: 688365 - DNA, 120 bp, Artificial Sequence
  ENSG00000187912_17 (sequence is synthesized)
tgacagaaaaatttccctttgagctagacctctagatctgcctcgcacagaaatacattaagtgggctggtctcatgtagtccccacatcattgcaaattacaaacctaaaaatacagaa

SEQ ID NO: 688366 - DNA, 120 bp, Artificial Sequence
  ENSG00000187918_0 (sequence is synthesized)
ttgtcctccagcaagtgcaactgttagaattctccaagtcagaagatctgactctgaaaagtaccctaagtttgttttgctatggggttgttcaatgtcactcaccctgcattcttcctc

SEQ ID NO: 688367 - DNA, 120 bp, Artificial Sequence
  ENSG00000187918_1 (sequence is synthesized)
ctgactggtatccctggtctggagagctctcactcctggctgtcagggcccctctgcgtgatgtatgctgtggcccttgggggaaatacagtgatcctgcaggctgtgcgagtggagccc

SEQ ID NO: 688368 - DNA, 120 bp, Artificial Sequence
  ENSG00000187918_2 (sequence is synthesized)
agcctccatgagcccatgtactacttcctgtccatgttgtccttcagtgatgtggccatatccatggccacactgcccactgtactccgaaccttctgcctcaatgcccgcaacatcact

SEQ ID NO: 688369 - DNA, 120 bp, Artificial Sequence
  ENSG00000187918_3 (sequence is synthesized)
tttgatgcctgtctaattcagatgtttcttattcacttcttctccatgatggaatcaggtattctgctggccatgagttttgaccgctatgtggccatttgtgaccccttgcgctatgca

SEQ ID NO: 688370 - DNA, 120 bp, Artificial Sequence
  ENSG00000187918_4 (sequence is synthesized)
atccaatgttctttctcactcctactgcctgcacccagacatgatgaggcttgcctgtgctgatatcagtatcaacagcatctatggactctttgttcttgtatccacctttggcatgga

SEQ ID NO: 688371 - DNA, 120 bp, Artificial Sequence
  ENSG00000187918_5 (sequence is synthesized)
cctgttttttatcttcctctcctatgtgctcattctgcgttctgtcatggccactgcttcccgtgaggaacgcctcaaagctctcaacacatgtgtgtcacatatcctggctgtacttgc

SEQ ID NO: 688372 - DNA, 120 bp, Artificial Sequence
  ENSG00000187918_6 (sequence is synthesized)
attttatgtgccaatgattggggtctccacagtgcaccgctttgggaagcatgtcccatgctacatacatgtcctcatgtcaaatgtgtacctatttgtgcctcctgtgctcaaccctct

SEQ ID NO: 688373 - DNA, 120 bp, Artificial Sequence
  ENSG00000187918_7 (sequence is synthesized)
catttatagcgccaagacaaaggaaatccgccgagccattttccgcatgtttcaccacatcaaaatatgactttcacacttggctttagaatctgttattttggccataggctctcatca

SEQ ID NO: 688374 - DNA, 120 bp, Artificial Sequence
  ENSG00000187918_8 (sequence is synthesized)
ggaagaacttgttctgtgggtgtctcatcagtctctcttctgagggaaatattagctcagcctgcaggctgatcatcataaaatatgaagaaaaggagtttgcctgcatcatctcaaaag

SEQ ID NO: 688375 - DNA, 120 bp, Artificial Sequence
  ENSG00000187918_9 (sequence is synthesized)
ggccaggagatggtgatgcaaaacttataacacaaaacaaggagttccaaatgaatagtacattcactaaataccaacagtattcttagaaagataaatattgggggcaattgagtaatt

SEQ ID NO: 688376 - DNA, 120 bp, Artificial Sequence
  ENSG00000187918_10 (sequence is synthesized)
gggcaattgagtaattagacaagttttacagaggaagactaatttaagctaggaattattttctataataatgaatattactaatataataattaacaaacttagtcctaaaatgtatca

SEQ ID NO: 688377 - DNA, 120 bp, Artificial Sequence
  ENSG00000187918_11 (sequence is synthesized)
aattcttcagcctaacacagataatatgtggtccagttgacattcaacactaatctctctctagtgtcagtgcagcacccaaccggtataaatatggcctgacggtcaaattggcatcat

SEQ ID NO: 688378 - DNA, 120 bp, Artificial Sequence
  ENSG00000187918_12 (sequence is synthesized)
ttaacattaccattgctgcctttgctttccccaccactgtcattctcaaacactcatacattgctttaacttcacaaagtgaaatcagcttaactattagaactcaccataaaatgtatg

SEQ ID NO: 688379 - DNA, 120 bp, Artificial Sequence
  ENSG00000187918_13 (sequence is synthesized)
aacaaatgtgatccaggtaaactgatagatattgccatttaggaaaatctccagattcttctttacttcttttatctgcccaccactcaatccttaccaacagaaaacaatgttcaatat

SEQ ID NO: 688380 - DNA, 120 bp, Artificial Sequence
  ENSG00000187918_14 (sequence is synthesized)
ctgaaatatctgactcatagaattttgggggaaagggggaattgtggtaggggcacaatttctatttctctttccttcttgagattttaactgtcttccacaaaatgacatgttaagaga

SEQ ID NO: 688381 - DNA, 120 bp, Artificial Sequence
  ENSG00000187918_15 (sequence is synthesized)
tgttagaaattaagtcagtctaggatttccagttgcaaaaaaaaaaagcctaggatagacagactagagcacttatggtttagataccagaaaataattctttcagaccttctcatacgc

SEQ ID NO: 688382 - DNA, 120 bp, Artificial Sequence
  ENSG00000187918_16 (sequence is synthesized)
ttcccttgataccagaggtaggatatagtaagaaattccttggtgctaattttggtgctgtcatactaagtttagatctacttgtagatcaaaagagagcgagggattgggggagaaaga

SEQ ID NO: 688383 - DNA, 120 bp, Artificial Sequence
  ENSG00000187918_17 (sequence is synthesized)
aggggggagagagagagagaaagagaaagagagaaagagaaaaagagaaagagaaagagagaaagagagagagagagatgcactaggtagtctaacttaactcaccatggaaactcatcc

SEQ ID NO: 688384 - DNA, 120 bp, Artificial Sequence
  ENSG00000187918_18 (sequence is synthesized)
agaaaccacgtagtagcaaagcatattgttatctagaggttttttctctttgtattgaggaaataccaacaagagagagagtcagaaagagggagctattttaaaaatgagataatgtaa

SEQ ID NO: 688385 - DNA, 120 bp, Artificial Sequence
  ENSG00000187918_19 (sequence is synthesized)
gtacttgggattcagatttttttcaaaaatgtctacaggtacaataagacaccaataatatatgtgtcctggcccactaaatagattgcttttagaagaatgtttggatagcataactta

SEQ ID NO: 688386 - DNA, 120 bp, Artificial Sequence
  ENSG00000187918_20 (sequence is synthesized)
gtatgatttccaatggaaaattattagaatatttagtggtttaaagtatggtcttcagtcaatttaaataataacttttctgattcatattagaagctcctatttcaacatgaaataata

SEQ ID NO: 688387 - DNA, 120 bp, Artificial Sequence
  ENSG00000187918_21 (sequence is synthesized)
attttaatgctttgatattttagtttcaaatatatacaacaaatacataaatgcaaaggcaaggcttagggaagccgccaaatgaaagtaaactctcactgattcctacctcagaagcag

SEQ ID NO: 688388 - DNA, 120 bp, Artificial Sequence
  ENSG00000187918_22 (sequence is synthesized)
cgagggatacattcttttgaccataggccttacttagaaacccaatggtgtaacatagaaagggcaaggaacaagaaaatatgagcctcccaaaaagcctctggctcctttgtaccttaa

SEQ ID NO: 688389 - DNA, 120 bp, Artificial Sequence
  ENSG00000187918_23 (sequence is synthesized)
tttcaccttccttttttcagcattaattaaaagagctactgattttcaggttctaatggaaaatgcacatttatatttttccctccctcatgagacagatgccataagaaaaatgtaggg

SEQ ID NO: 688390 - DNA, 120 bp, Artificial Sequence
  ENSG00000187918_24 (sequence is synthesized)
ccactcctgcagctctaatcctaaaaaggtctaagctaagccctgtttttgtttttttgaccttgggttaaaaactctttaacttctttttatttaacataatcttttttgaactcaaca

SEQ ID NO: 688391 - DNA, 120 bp, Artificial Sequence
  ENSG00000187922_0 (sequence is synthesized)
atgaggcaggggctgctggtgctggcgctggtgctggtgctggtgctagtgctggctgcagggtcccaggtgcaggagtggtaccccagggagtcccacgccctcaactggaacaagttt

SEQ ID NO: 688392 - DNA, 120 bp, Artificial Sequence
  ENSG00000187922_1 (sequence is synthesized)
tcagggttctggtacattctggccactgccactgatgcccagggattcttgccggccagggacaagaggaagctgggggcgtccgtggtaaaggtgaacaaagtgggccagctccgcgtg

SEQ ID NO: 688393 - DNA, 120 bp, Artificial Sequence
  ENSG00000187922_2 (sequence is synthesized)
tcagtgaaaggggtgaaggccttccacgtgctgtccactgactacagctacggcttggtctacctccgcctggggcgtgcaacccaaaactacaagaacctgctgctcttccataggcag

SEQ ID NO: 688394 - DNA, 120 bp, Artificial Sequence
  ENSG00000187922_3 (sequence is synthesized)
aatgtttcgagcttccagagtctgaaggaattcatggacgcttgtgacattctggggctctccaaggccgccgtcatcctcccgaaagacgcgtcccgtacacacaccatcctgccatga

SEQ ID NO: 688395 - DNA, 120 bp, Artificial Sequence
  ENSG00000187922_4 (sequence is synthesized)
accacggcttgttgagaggtgtttggtgactctaggtcattgacagtgtgaaaatcaagtggctcaagggatcctttatgatcacagaaagatgggggaaggaggatacaggctgaccgg

SEQ ID NO: 688396 - DNA, 120 bp, Artificial Sequence
  ENSG00000187922_5 (sequence is synthesized)
gtggcgagatgtcagccaggccccttccccactgtcttctggagcacactgcaggctgctgctattccctgtctgctgtgaaacagaccacaggccggcccaacgcagtcctcgccgtgt

SEQ ID NO: 688397 - DNA, 120 bp, Artificial Sequence
  ENSG00000187922_6 (sequence is synthesized)
gcatatccacccaacatggaggagcccccatgacgtgccaggcagcgtgctggcccctgcggctgcgttagggaacagaatcggcaaacgcagtcccagagttgatgcctgatcaggaga

SEQ ID NO: 688398 - DNA, 120 bp, Artificial Sequence
  ENSG00000187922_7 (sequence is synthesized)
agccaacttcagcagtgtggtcacctggatactcgagtatagaccctagatcacctggatactcgagtatagaccctagaagtgtatctaggcgcggccagggccccacaacagcaggtc

SEQ ID NO: 688399 - DNA, 120 bp, Artificial Sequence
  ENSG00000187922_8 (sequence is synthesized)
tgactcattccatccagggcagcatcagggagagcttcctgggggaagtggcatttgggctgacctgggaagggtggtgggtgttaagtcagtttgggtggggctggaggagcaggggtg

SEQ ID NO: 688400 - DNA, 120 bp, Artificial Sequence
  ENSG00000187922_9 (sequence is synthesized)
catccccagaacaggatgtgacttctgaaaagacatcagagtagagaaaatggtttctcaaggagattggggacgccagtatcagaatggcggcggggagagccacagaggagcaggagg

SEQ ID NO: 688401 - DNA, 120 bp, Artificial Sequence
  ENSG00000187922_10 (sequence is synthesized)
gggcccaccagaccacggcacctcgaaggctgcggtgaaggcttaggtctcactcaaggggtgatgacgggaggttgtctgagatgaaccccccaactgaatgaatggaccttcttctgg

SEQ ID NO: 688402 - DNA, 120 bp, Artificial Sequence
  ENSG00000187922_11 (sequence is synthesized)
ccaaggggatcccaaagaaaccctgaacccgagtcctcagccatgacggggtaaggggtcagcccctccttctggcccgagaagagatcagagattggttctgggcagtccatggagaat

SEQ ID NO: 688403 - DNA, 120 bp, Artificial Sequence
  ENSG00000187922_12 (sequence is synthesized)
ttgctcagctggaccagtacacgcttctcctttcatgaatattcatgactcctcctgaagcttattgaacatctctatttggccatctccttcagcgtaaattcctgtcccctctgtccc

SEQ ID NO: 688404 - DNA, 120 bp, Artificial Sequence
  ENSG00000187922_13 (sequence is synthesized)
tcccctccaagtgtctgttccaggcttctggcctgaggctacgcttcctagcctgtcagaagggctgccctgctggctgcaatctcttatgagaaataaagctctcctgtgtgcaaaaaa

SEQ ID NO: 688405 - DNA, 120 bp, Artificial Sequence
  ENSG00000187922_14 (sequence is synthesized)
gacgtgaaaggggtgaaggccttccacgtgctgtccactgactacagctacggcttggtctacctccgcctggggcgtgcaacccaaaactacaagaacctgctgctcttccgtgagcag

SEQ ID NO: 688406 - DNA, 120 bp, Artificial Sequence
  ENSG00000187922_15 (sequence is synthesized)
gcacagcggatggcagaggatggtggagggggtgcagagggaggcatagaggggcgctgggcacagggggccgggcaggaggtgaggcgggcagggagagtgggggttggggcggtggtc

SEQ ID NO: 688407 - DNA, 120 bp, Artificial Sequence
  ENSG00000187922_16 (sequence is synthesized)
agggcaggggcaatggaagccgagaccacagcagtcaggtcctggaggtcgctgaagcaaggataggggacgtcaggaagaggctgcagagaaaggtgggccatccagggggagcggagg

SEQ ID NO: 688408 - DNA, 120 bp, Artificial Sequence
  ENSG00000187922_17 (sequence is synthesized)
ccaccaggatggtggcgggtgcaggtgcaacgttctgggtgagggacacagtggggatgaggaggcgtgggaggggtcccaggtaagggtctgcccgggatggaggggtgtggaagtgac

SEQ ID NO: 688409 - DNA, 120 bp, Artificial Sequence
  ENSG00000187922_18 (sequence is synthesized)
ccagtgtgggttaagggccacaaacccaattctagacaccaaccacttggggtacacggaaaggagtggccctcccggttggaacgggtagaggggaggtggggtcctggggtctcagtc

SEQ ID NO: 688410 - DNA, 120 bp, Artificial Sequence
  ENSG00000187922_19 (sequence is synthesized)
gaggcagggcacgctcagggtgcagcaagctggggcacagctgaggggctggctggaggggactctgcaggcagagagggttccccaggtgacagcgtggtgaccctggcttcccgagcc

SEQ ID NO: 688411 - DNA, 120 bp, Artificial Sequence
  ENSG00000187922_20 (sequence is synthesized)
tggctgcctcgtaagtggggaggggcccagcggccgctgtcctcccctggccaacccctgcttcacgcctaagctctgaggacatttcagcagctcctggggtagggatgggggtcaggg

SEQ ID NO: 688412 - DNA, 120 bp, Artificial Sequence
  ENSG00000187922_21 (sequence is synthesized)
gctcaggtgcttggtgccaggccctcaagaaggtggtgggggctgtgtgtgtggctgccgcgcagagctcaccatgtccacatctgccccagaagggccacgaccagccctttgcctgtc

SEQ ID NO: 688413 - DNA, 120 bp, Artificial Sequence
  ENSG00000187922_22 (sequence is synthesized)
acctgggaggtctaggatgagggccagggcttaatgagtctcaggggcacacacagtgaccccaggccgggcactgagggcaggagggtcctggggcctcagaggggcctctgtctgcca

SEQ ID NO: 688414 - DNA, 120 bp, Artificial Sequence
  ENSG00000187922_23 (sequence is synthesized)
gggcagcccaggccagcagtgaccaccaggtggggcagtgccggcttccctggagtgtctgggggtggtccctgggcggggagagggtagcagagcccaaggccacacctgttgcctccc

SEQ ID NO: 688415 - DNA, 120 bp, Artificial Sequence
  ENSG00000187922_24 (sequence is synthesized)
ggcgccggctctggagctggagcaggctcctgcacagtctcccggcagccgcccaggagcagggctaccagcagttccaggcacgggcgctgcccacctggcctctcccactgcagcctc

SEQ ID NO: 688416 - DNA, 120 bp, Artificial Sequence
  ENSG00000187922_25 (sequence is synthesized)
cagcacaggggccccgcaagttgcagggcaaaggcagggagcctcgagggggttcgggggcccaggggggtcagggagggccagggtggaggggcccagagagctgtggccgaggaggtc

SEQ ID NO: 688417 - DNA, 120 bp, Artificial Sequence
  ENSG00000187922_26 (sequence is synthesized)
gggagacgcccagagtgcagagtgggtgtggagcaagcggggcatattctgtagcgggagggcccgggcacctgctgagtgagccgtgggagcagcactcattggcacggcggtgcccag

SEQ ID NO: 688418 - DNA, 120 bp, Artificial Sequence
  ENSG00000187922_27 (sequence is synthesized)
ggcgctagggttggcagcaggcagagttgggggccgggggccggcaggaagggaagtggccgagcagtacccagcccccaggaggccatgtgggaaggagccggggcctctgaggtaggg

SEQ ID NO: 688419 - DNA, 120 bp, Artificial Sequence
  ENSG00000187922_28 (sequence is synthesized)
ggcctcccacctgctggcgcccacagcccagccctttgctgcctggggtccctgaccagccgggcacctgcttctctgcagccctgctccagtggccagggcttgagtggccgggaccga

SEQ ID NO: 688420 - DNA, 120 bp, Artificial Sequence
  ENSG00000187922_29 (sequence is synthesized)
ggcggcacctgggcggagctgggactccggctcacagaagggtcatttgtctcctgggttctctagctgggaacctcgggggtggggacagcccccggtggcagctcctgtccccgccca

SEQ ID NO: 688421 - DNA, 120 bp, Artificial Sequence
  ENSG00000187922_30 (sequence is synthesized)
cactgatgcccagggattcttgccggccagggacaagaggaagctgggggcgtccgtggtaaaggtgaacaaagtgggccagctccgcgtgctcctcgccttcagacggtgagtgggcag

SEQ ID NO: 688422 - DNA, 120 bp, Artificial Sequence
  ENSG00000187922_31 (sequence is synthesized)
cgccccccaggcaagggtctccccttccaggaggagggagctgcctcggggctggaaaggagtctgggaggagcctgtctgtctggaagttccacaagaaccgtccccccacttcctccc

SEQ ID NO: 688423 - DNA, 120 bp, Artificial Sequence
  ENSG00000187942_0 (sequence is synthesized)
ctgaaccaaatgaagaggatctggaaggcaaagcactaagatcatagtgaagacttgcctcccccttctccttgtgtcccaccagcctccctgctggcctgaccaggccccatactccag

SEQ ID NO: 688424 - DNA, 120 bp, Artificial Sequence
  ENSG00000187942_1 (sequence is synthesized)
tctccccagagaccccaagctgaagattctgtgggtctgccccattgctgggcacagcagagcctggatggaggcttgttgtcttctgcagttgccccaaaggttgctcttgctgggggc

SEQ ID NO: 688425 - DNA, 120 bp, Artificial Sequence
  ENSG00000187942_2 (sequence is synthesized)
agccgccctgactgcaactgctttggagacagccgacctggcggaactgtgcgggcagacgtggcagggggacgggctgctgctgcgctcgcacgccgcatcgcgcaggttctacttcgt

SEQ ID NO: 688426 - DNA, 120 bp, Artificial Sequence
  ENSG00000187942_3 (sequence is synthesized)
ggctccggacaccgactgcgggctctgggtgcaggcggcagcccccggcgaccggatccgcttccagttccgcttcttcctggtctacagcctgacccccgcgcccccggcgctcaacac

SEQ ID NO: 688427 - DNA, 120 bp, Artificial Sequence
  ENSG00000187942_4 (sequence is synthesized)
ctcaacacctcctccccggccccggccgacccgtgcgcccccggctcctacctgcagttctacgagggcccgccgggggcgccccggcccctggggtccccactgtgcggcctgaacatc

SEQ ID NO: 688428 - DNA, 120 bp, Artificial Sequence
  ENSG00000187942_5 (sequence is synthesized)
tgtggcatcctccggaccctttctaggcctgcgcctggtcacgagaggccgccagccccgcgtggacttcgtgggcgaagtcacctctttccgtctgggaccttgtggtgcctacttccg

SEQ ID NO: 688429 - DNA, 120 bp, Artificial Sequence
  ENSG00000187942_6 (sequence is synthesized)
ctgccagaatggcaggtgcatcccctcaagcctcgtgtgtgacccctggggcatggacaactgtggcgatggcagtgaccagggctcctggtcaccagctgactgcagaggtccctctcc

SEQ ID NO: 688430 - DNA, 120 bp, Artificial Sequence
  ENSG00000187942_7 (sequence is synthesized)
ggtgcccagccagacaggaagtacagatgcccatacctccagatccctgactccctccccagctctcgggtctgcaggatccctctggattgcagctgagaggagttccccagcaggcag

SEQ ID NO: 688431 - DNA, 120 bp, Artificial Sequence
  ENSG00000187942_8 (sequence is synthesized)
ggaccccacgagacaagacgcagctttggaaggctccactgagtgaagccctcatcaaagactcaggaggcccctggcggggatagcaccgtttattaagaaaaatcaagacaaagacca

SEQ ID NO: 688432 - DNA, 120 bp, Artificial Sequence
  ENSG00000187942_9 (sequence is synthesized)
caggagggtcccttctaggacacagaggccaggcgtcccaaccccacagtctgggggccactggcaggatggcacttgagctggatcttcaggctcctgcagatggggcagggtggtcat

SEQ ID NO: 688433 - DNA, 120 bp, Artificial Sequence
  ENSG00000187942_10 (sequence is synthesized)
atccccctcctctctctctcagtcgtgagtcctgccttcccccacctaaggcactagctcttcctgagcaccagcggcatccgtccgtccgttgtctgttggaggagtccctgggccttc

SEQ ID NO: 688434 - DNA, 120 bp, Artificial Sequence
  ENSG00000187942_11 (sequence is synthesized)
acttccagatgggtggggatgtggcctggggtgggcggggcccggtgggcggggccctatcagtgctgggctctgcctgtagcagctcctggtaagagttggggtgggccttcccttaca

SEQ ID NO: 688435 - DNA, 120 bp, Artificial Sequence
  ENSG00000187942_12 (sequence is synthesized)
gcccctgagggagggaccccaggctgtgtgctggcaggagggggtgggaatgcaggccaggaggacgtggtaggagggggagtctgccagaggaggtgccaggggctgggtggaggtggg

SEQ ID NO: 688436 - DNA, 120 bp, Artificial Sequence
  ENSG00000187942_13 (sequence is synthesized)
tgggggtgctgaaaaacgagctggtggggatggggaccgcctgcccaggggtgagctgccttttgctccacagccggcactaaagacaattcccaatcctgagtgggtggcagagactcc

SEQ ID NO: 688437 - DNA, 120 bp, Artificial Sequence
  ENSG00000187942_14 (sequence is synthesized)
tgcgatgcccgtctcaggtagctgtggggcaccagcccacaagccgaggttggctctcctaggagtgagaactgcccaagggctgcagaaacaggccacccagctctatctgggggctcc

SEQ ID NO: 688438 - DNA, 120 bp, Artificial Sequence
  ENSG00000187942_15 (sequence is synthesized)
atcggtgggtagggggacagtgggggcagttctgggcccacccagccactgttcctgaccccaagtcctggtgactttctgaggtgcccactcccatccaacctgccttgctggccagcc

SEQ ID NO: 688439 - DNA, 120 bp, Artificial Sequence
  ENSG00000187942_16 (sequence is synthesized)
cagggcggtagcagcaaagcgtggcatcgcctcggtttcttacaaaaattcataataatattaataataatatactcgacattgtcgggctggggcgtggcccgggagtccgtgtggggc

SEQ ID NO: 688440 - DNA, 120 bp, Artificial Sequence
  ENSG00000187942_17 (sequence is synthesized)
aggcaggtgcctacgaggggcaggggcgtgtgttggccccggcctgggcgcggtgctgcaggtccaggggctgtgggggcggggcgccgggtcgggccgagtgcagcaccaggttcttga

SEQ ID NO: 688441 - DNA, 120 bp, Artificial Sequence
  ENSG00000187942_18 (sequence is synthesized)
cacagcctgtgatgcctgaggagaatctgcccccggtcagcgtggccacgtcaggggctccgcctgccgggaggtgagaggacagggcctgtgggctccagcagcccaggaggcgaggaa

SEQ ID NO: 688442 - DNA, 120 bp, Artificial Sequence
  ENSG00000187942_19 (sequence is synthesized)
ggctgggcgagctctagccctaagggagtgccgttcctgcccctgccctgagaaggagccccagacttaccgatgtagacgctgcccttggcgttgactgccacgttgggacctggggac

SEQ ID NO: 688443 - DNA, 120 bp, Artificial Sequence
  ENSG00000187942_20 (sequence is synthesized)
cggccgctgaccagctcctcaccgtcgacttggatggaacctctgcggccctccctgcagtggaactgggtcaggcccctttccacaaacttcctggtcctccccggccccacgacagag

SEQ ID NO: 688444 - DNA, 120 bp, Artificial Sequence
  ENSG00000187942_21 (sequence is synthesized)
tcccctccctctgatatcgagactccagactcagaagtctgtccctgtttcccaagctctttctttcccccgctgaacgagagatcgggccccacaaacacagcttcctcatttctgcac

SEQ ID NO: 688445 - DNA, 120 bp, Artificial Sequence
  ENSG00000187942_22 (sequence is synthesized)
ccaggtttcctcccactcctggggcactcgcctgcccccagcggagttcagtccgagatggaagcccgagccctggctggtgggttctcccctcccctggcttcaagttctgtctccaca

SEQ ID NO: 688446 - DNA, 120 bp, Artificial Sequence
  ENSG00000187942_23 (sequence is synthesized)
gagctcaatacctgcctctctgcccatggtagggggcgtcctgccccactccagaacgctgggccccatcccgagtgcccggcagggtcccttaccgcagtgctgtcacccggtgccact

SEQ ID NO: 688447 - DNA, 120 bp, Artificial Sequence
  ENSG00000187942_24 (sequence is synthesized)
cgccgtcattgatggggtcctcagagaccaggcgggcctccccactacccagctggtacctgcagtcatccaggcccaagaagtatgagctggggcaggaccggggggtggggtgctggg

SEQ ID NO: 688448 - DNA, 120 bp, Artificial Sequence
  ENSG00000187942_25 (sequence is synthesized)
accagggaagggagaggaagggccaggtgccaggacctacctgaagacaaggtgcccgtcttgaagcccgaggctgatgaagtccttgccttggccggcctctcccacctcctgccaggg

SEQ ID NO: 688449 - DNA, 120 bp, Artificial Sequence
  ENSG00000187942_26 (sequence is synthesized)
aagcacagggtctctggggtccccagcctggagagcagaggctgccgaggccagggggctctgctttcccctccccccaccactccggccaccaggaagccagcttcctgccccaggagc

SEQ ID NO: 688450 - DNA, 120 bp, Artificial Sequence
  ENSG00000187942_27 (sequence is synthesized)
cccaagagcccagccggatacccacactcaccacaccctgccagagcaggaggccactggctgtgctggtccgaacctccagctcgatggtctcgggcacctcgggcaggctgcggagga

SEQ ID NO: 688451 - DNA, 120 bp, Artificial Sequence
  ENSG00000187942_28 (sequence is synthesized)
agagcgggtgaggggacagaagtcccagattcccatcctccccattaggcccatgggcccttccaatgccagtctcacctcctggagaagacatggccagggaaggcgaggaagccatca

SEQ ID NO: 688452 - DNA, 120 bp, Artificial Sequence
  ENSG00000187942_29 (sequence is synthesized)
tcgtggaaataggctccgtactgcccaggggcatctgtgggagagaggagggtggtgccatacctgctgcatcaggcatcaaaatcccccgtcagttcccctgacccccacctccacgcc

SEQ ID NO: 688453 - DNA, 120 bp, Artificial Sequence
  ENSG00000187942_30 (sequence is synthesized)
aacatgcaggactagggggctccgagcctgcagtccctggggacccacgggggctgccaacagaattcagggagcctatgaccttggatgggaaagcattacacctcaatttcactcact

SEQ ID NO: 688454 - DNA, 120 bp, Artificial Sequence
  ENSG00000187942_31 (sequence is synthesized)
tctcactgaaattgagcagttctttcaatgagatgtaggcaagaaaccaaagtagcagtggtaggacctgcaactttgttactagtatttgcttatcacatgacagtagctgcaaatatt

SEQ ID NO: 688455 - DNA, 120 bp, Artificial Sequence
  ENSG00000187942_32 (sequence is synthesized)
tcaaaatatcatttacacatattgctgctttgaaattgtggtagctactgagatcaccagatcttgttatttgatgtgttaataaagaagcacatatatagcaagtcaggaaacttaaaa

SEQ ID NO: 688456 - DNA, 120 bp, Artificial Sequence
  ENSG00000187942_33 (sequence is synthesized)
tccagatccctgactccctccccagctctcgggtctgcaggatccctctggattgcagctgagaggagttccccagcaggcagggaccccacgagacaagacgcagctttggaaggcccc

SEQ ID NO: 688457 - DNA, 120 bp, Artificial Sequence
  ENSG00000187942_34 (sequence is synthesized)
cagctctgaggggtggcgctggcctcctcgatgctcctggcctctgctggcctcctcctgggcctcctctggtgctgttgctctcccagctggctggcctggcaacctggtgcccgtggc

SEQ ID NO: 688458 - DNA, 120 bp, Artificial Sequence
  ENSG00000187942_35 (sequence is synthesized)
ctctgcctccactgcagcacagcctgtaccacgtgctacccatgtcccagccaggtctccccagggggctgcagttgagtggcccagccttataggatcagggaggccatccctagaggg

SEQ ID NO: 688459 - DNA, 120 bp, Artificial Sequence
  ENSG00000187942_36 (sequence is synthesized)
tgagactcagctgcccctctagaaaataggacaattcctgcctcacagggttgggggcctgggggcctcgctgatcccaagccagcttgcttcacccccagatctcacctgccctgctct

SEQ ID NO: 688460 - DNA, 120 bp, Artificial Sequence
  ENSG00000187944_0 (sequence is synthesized)
catatttccagctataatccatcatatttccaggtgtatcccttcccttaaaagtaaaaaaggagaaaatcactttgctgtgtggaagtgctttgtgtgttttataaaatccacataaaa

SEQ ID NO: 688461 - DNA, 120 bp, Artificial Sequence
  ENSG00000187944_1 (sequence is synthesized)
tgttcgtggttcaaggagtggctgccgcatttctaaggcaaataagcttatccctgaagaagcttgaagatctgactctcaagaatctttgtgttctggatgaaaaaggaatcattattt

SEQ ID NO: 688462 - DNA, 120 bp, Artificial Sequence
  ENSG00000187944_2 (sequence is synthesized)
tttaactcccctgctcaagtcagtgacttccactggcacccaatccattggttataagtacccatgaattgccttgccaattataggcaggataacctaggaggaccaaccaaaaccaaa

SEQ ID NO: 688463 - DNA, 120 bp, Artificial Sequence
  ENSG00000187944_3 (sequence is synthesized)
ctcctggtaagctttattagccttttctacaatgtgtctcagtttctctttcacaccttggagtggaagacaatctctactcacactgttgtggtatgtgtctgtctgtctcagatgtgt

SEQ ID NO: 688464 - DNA, 120 bp, Artificial Sequence
  ENSG00000187944_4 (sequence is synthesized)
gtataaggtgtatttctcagctcggtatctgaagtaatttctttttcttttcttttttttaaagactgctgtcttaaggcttaaaagtaatttaaggttttgttttttgttattttaaga

SEQ ID NO: 688465 - DNA, 120 bp, Artificial Sequence
  ENSG00000187944_5 (sequence is synthesized)
gttgcagtttctttggagacaacaaagtactttttttccaaagatgaaaaaggcatattcagactttctatgttatgttccataattgttttgcttatcactgtataacattctcattat

SEQ ID NO: 688466 - DNA, 120 bp, Artificial Sequence
  ENSG00000187944_6 (sequence is synthesized)
ccttgtctgcctttacagatgtttcctctttctctctctcttccctgactatctctctcaatgatcattgacagctcccgcatcccctctttcactcagcttcactccaccatgaccaga

SEQ ID NO: 688467 - DNA, 120 bp, Artificial Sequence
  ENSG00000187944_7 (sequence is synthesized)
gcacctctcctgctactatgtgttgccctggtgctgcttgggcatgtgaatggagccacagtaagaaatgaggacaaatggaagccactcaacaaccccagaaacagagatctgtttttc

SEQ ID NO: 688468 - DNA, 120 bp, Artificial Sequence
  ENSG00000187944_8 (sequence is synthesized)
agaaggcttcaggcatattttaagggcagaggtcttgatcttggaacatttccaaatcctttccccacgaatgaaaatcctagacctctctctttccagtcagaacttactgcttctgca

SEQ ID NO: 688469 - DNA, 120 bp, Artificial Sequence
  ENSG00000187944_9 (sequence is synthesized)
tctgcagattatgaagagcagaaaaactcctttcacaattatctcaaaggctgaaagtttcttctgagctcaggtgtctggctattttaaaactacagatgaagcttctcattagaaaaa

SEQ ID NO: 688470 - DNA, 120 bp, Artificial Sequence
  ENSG00000187944_10 (sequence is synthesized)
ttcaaccattgtcatagctaaactttcatggagtttctttccccctcacttttatttttcagtttgtaatgattttattccacatttccatatttacatataaatcgctggaactatgat

SEQ ID NO: 688471 - DNA, 120 bp, Artificial Sequence
  ENSG00000187944_11 (sequence is synthesized)
ttctatgcatatttatggagtttttttcctatgaaaccataaatattgatgtagagcaccgcatgtatttgtaggagttacaaaaacatcacaaactgaaaaaagattataatctaaatt

SEQ ID NO: 688472 - DNA, 120 bp, Artificial Sequence
  ENSG00000187944_12 (sequence is synthesized)
agatgtttctttaagcttgtttttaaaacttgtcttttatgtttattatcttttatcgaccaatatatttttttaaagggacatgctcacttttagtatagtaaaattcattatatgtga

SEQ ID NO: 688473 - DNA, 120 bp, Artificial Sequence
  ENSG00000187944_13 (sequence is synthesized)
agggcaagtgataaacagccacaattaagttaaaatggaagcaaacaacaacaacaaacatgggattctagaagttgtcaacgcctccaaagatgctctttgccagagtattcagaggtg

SEQ ID NO: 688474 - DNA, 120 bp, Artificial Sequence
  ENSG00000187944_14 (sequence is synthesized)
gacattgtgccacatcaaatattctagcaatgcccgagcccttgctctcatacacaacctcctcaggaaggaaaagtagaaacaggtgatttcctctctttccaaccagcccctgctctc

SEQ ID NO: 688475 - DNA, 120 bp, Artificial Sequence
  ENSG00000187944_15 (sequence is synthesized)
cttactctagctcatgctgagttattctgattcccatactcacatttggaatagctgcttttcctgtatctttatagatagctgcatcatcttctctgtgattcctgcaaaaggaatgtt

SEQ ID NO: 688476 - DNA, 120 bp, Artificial Sequence
  ENSG00000187944_16 (sequence is synthesized)
gcactaaaatgcaacattgtcctaacattagtctgtgcatttcaaaatattttaatgtggcttttttgggtggattattgatattgtatatgaagaataaaatatttgtgcaagaacaga

SEQ ID NO: 688477 - DNA, 120 bp, Artificial Sequence
  ENSG00000187950_0 (sequence is synthesized)
atgggcctgctggccagtgctggtttgttgctgttgctggtcatcggccaccccagaagcctaggactgaagtgtggaattcgcatggtcaacatgaaaagtaaggaacctgccgtggga

SEQ ID NO: 688478 - DNA, 120 bp, Artificial Sequence
  ENSG00000187950_1 (sequence is synthesized)
tctagattcttctctagaattagtagttggagaaattcaacagtgactggacatccatggcaggtctccctaaaatcagatgagcaccacttctgtggaggaagcttgattcaagaagat

SEQ ID NO: 688479 - DNA, 120 bp, Artificial Sequence
  ENSG00000187950_2 (sequence is synthesized)
cgggttgttacagcagcacactgcctggacagcctcagtgagaagcagctgaagaatataactgtgacttctggggagtacagcctctttcagaaggataagcaagaacagaatattcct

SEQ ID NO: 688480 - DNA, 120 bp, Artificial Sequence
  ENSG00000187950_3 (sequence is synthesized)
gtctcaaaaattattacccatcctgaatacaacagccgtgaatatatgagtcctgatattgcactgctgtatctaaaacacaaagtcaagtttggaaatgctgttcagccaatctgtctt

SEQ ID NO: 688481 - DNA, 120 bp, Artificial Sequence
  ENSG00000187950_4 (sequence is synthesized)
cctgacagcgatgataaagttgaaccaggaattctttgcttatccagtggatggggcaagatttccaaaacatcagaatattcaaatgtcctacaagaaatggaacttcccatcatggat

SEQ ID NO: 688482 - DNA, 120 bp, Artificial Sequence
  ENSG00000187950_5 (sequence is synthesized)
gacagagcgtgtaatactgtgctcaagagcatgaacctccctcccctgggaaggaccatgctgtgtgctggcttccctgattggggaatggacgcctgccagggggactctggaggacca

SEQ ID NO: 688483 - DNA, 120 bp, Artificial Sequence
  ENSG00000187950_6 (sequence is synthesized)
ctggtttgtagaagaggtggtggaatctggattcttgctgggataacttcctgggtagctggttgtgctggaggttcagttcccgtaagaaacaaccatgtgaaggcatcacttggcatt

SEQ ID NO: 688484 - DNA, 120 bp, Artificial Sequence
  ENSG00000187950_7 (sequence is synthesized)
ttctccaaagtgtctgagttgatggattttatcactcaaaacctgttcacaggtttggatcggggccaacccctctcaaaagtgggctcaaggtatataacaaaggccctgagttctgtc

SEQ ID NO: 688485 - DNA, 120 bp, Artificial Sequence
  ENSG00000187950_8 (sequence is synthesized)
caagaagtgaatggaagccagagaggaaagggtattttagacatggaaaagcaagttggatgtgatcatgactatgtatctttacgatcaagcagtggagtgctttttaatcagagatct

SEQ ID NO: 688486 - DNA, 120 bp, Artificial Sequence
  ENSG00000187950_9 (sequence is synthesized)
ctcatggaagacgatggaaaacaaaacaaacgtgtctgtggaaaaatattgccttcaccattgctggcagagaccagtgaggccatggttccatttgtttctgatacagaagacagtggc

SEQ ID NO: 688487 - DNA, 120 bp, Artificial Sequence
  ENSG00000187950_10 (sequence is synthesized)
agtggctttgagcttaccgttactgctgtacagaagtcagaagcagggtcaggttgtgggagtctggctatattggtagaagaagggacaaatcactctgccaagtatcctgatttgtat

SEQ ID NO: 688488 - DNA, 120 bp, Artificial Sequence
  ENSG00000187950_11 (sequence is synthesized)
cccagtaacacaaggtgtcattggttcatttgtgctccagagaagcacattataaagttgacatttgaggactttgctgtcaaatttagtccaaactgtatttatgatgctgttgtgatt

SEQ ID NO: 688489 - DNA, 120 bp, Artificial Sequence
  ENSG00000187950_12 (sequence is synthesized)
tacggtgattctgaagaaaagcacaagttagctaaactttgtggaatgttgaccatcacttcaatattcagttctagtaacatgacggtgatatactttaaaagtgatggtaaaaatcgt

SEQ ID NO: 688490 - DNA, 120 bp, Artificial Sequence
  ENSG00000187950_13 (sequence is synthesized)
ttacaaggcttcaaggccagatttaccattttgccctcagagtctttaaacaaatttgaaccaaagttacctccccaaaacaatcctgtatctaccgtaaaagctattctgcatgatgtc

SEQ ID NO: 688491 - DNA, 120 bp, Artificial Sequence
  ENSG00000187950_14 (sequence is synthesized)
gcaggaggggaagaagcctgcccccactgttggccatggcaggtgggtctgaggtttctaggcgattaccaatgtggaggtgccatcatcaacccagtgtggattctgaccgcagcccac

SEQ ID NO: 688492 - DNA, 120 bp, Artificial Sequence
  ENSG00000187950_15 (sequence is synthesized)
tgtgtgcaattgaagaataatccactctcctggactattattgctggggaccatgacagaaacctgaaggaatcaacagagcaggtgagaagggccaaacacataatagtgcatgaagac

SEQ ID NO: 688493 - DNA, 120 bp, Artificial Sequence
  ENSG00000187950_16 (sequence is synthesized)
tttaacacactaagttatgactctgacattgccctaatacaactaagctctcctctggagtacaactcggtggtgaggccagtatgtctcccacacagcgcagagcctctattttcctcg

SEQ ID NO: 688494 - DNA, 120 bp, Artificial Sequence
  ENSG00000187950_17 (sequence is synthesized)
gagatctgtgctgtgaccggatggggaagcatcagtgcagatggtggcctagcaagtcgcctacagcagattcaagtgcatgtgttagaaagagaggtctgtgaacacacttactattct

SEQ ID NO: 688495 - DNA, 120 bp, Artificial Sequence
  ENSG00000187950_18 (sequence is synthesized)
gcccatccaggagggatcacagagaagatgatctgtgctggctttgcagcatctggagagaaagatttctgccagggagactctggtgggccactagtatgtagacatgaaaatggtccc

SEQ ID NO: 688496 - DNA, 120 bp, Artificial Sequence
  ENSG00000187950_19 (sequence is synthesized)
tttgtcctctatggcattgtcagctggggagctggctgtgtccagccatggaagccgggtgtatttgccagagtgatgatcttcttggactggatccaatcaaaaatcaatggtcctgct

SEQ ID NO: 688497 - DNA, 120 bp, Artificial Sequence
  ENSG00000187950_20 (sequence is synthesized)
tcacttcagacaaataataaatgcaaaaccttaaaacaacaattgccaccacccacaccttcaccagacagtgcatcttggccaggttgttgctctgaagcagagctagaaaagcctaga

SEQ ID NO: 688498 - DNA, 120 bp, Artificial Sequence
  ENSG00000187950_21 (sequence is synthesized)
ggcttttttcccacaccacggtatctactggattatagaggaagactggaatgttcttgggtgctcagagtttcagcaagcagtatggcaaaatttaccattgagtatctgtcactcctg

SEQ ID NO: 688499 - DNA, 120 bp, Artificial Sequence
  ENSG00000187950_22 (sequence is synthesized)
gggtctcctgtgtgtcaagactcagttctaattatttatgaagaaagacacagtaagagaaagacggcaggtggattacatggaagaagactttactcaatgactttcatgagtcctgga

SEQ ID NO: 688500 - DNA, 120 bp, Artificial Sequence
  ENSG00000187950_23 (sequence is synthesized)
ccgctggtgagggtgacattccatgcccttgtacgaggtgcatttggtataagctatattgtcttgaaagtcctaggtccaaaggacagtaaaataaccagactttcccaaagttcaaac

SEQ ID NO: 688501 - DNA, 120 bp, Artificial Sequence
  ENSG00000187950_24 (sequence is synthesized)
agagagcacttggtcccttgtgaggatgttcttctgaccaagccagaagggatcatgcagatcccaagaaattctcacagaactactatgggttgccaatggagattagtagccccttta

SEQ ID NO: 688502 - DNA, 120 bp, Artificial Sequence
  ENSG00000187950_25 (sequence is synthesized)
aatcacatcattcagcttaatattattaacttcccgatgaagccaacaacttttgtctgtcatggtcatctgcgtgtttacgaaggatttggaccaggaaaaaaattaatagcttcattc

SEQ ID NO: 688503 - DNA, 120 bp, Artificial Sequence
  ENSG00000187950_26 (sequence is synthesized)
gctggaactctggcaatgatactgacaaaagacatattaaaaagagaaaaactgaattttattaacacatatatcatgcatatatgggaaaattcagtgtatgataatgtaagaagtgtt

SEQ ID NO: 688504 - DNA, 120 bp, Artificial Sequence
  ENSG00000187950_27 (sequence is synthesized)
ggaaaaagaaaacagaagaaatttgcatcaaatttaagttatagtatggaggctgagaagtccaggatccaggtgccagcagatttggtgcctgctaagggctcactttctggttcttag

SEQ ID NO: 688505 - DNA, 120 bp, Artificial Sequence
  ENSG00000187950_28 (sequence is synthesized)
aagcttattttagaagagatgattcaggagcaatcacagaagagcaatattgagacccaatttcctatcagtggagagttttcactactaatctggtgccagaggaagatgataaaataa

SEQ ID NO: 688506 - DNA, 120 bp, Artificial Sequence
  ENSG00000187950_29 (sequence is synthesized)
attgactttacatgtatgactgctggatggggaacaactgaacttcacatttttctctatttttaatacgaataatggtgggaaaagtcttttaaaataatggatctaaaggtgacttcc

SEQ ID NO: 688507 - DNA, 120 bp, Artificial Sequence
  ENSG00000187950_30 (sequence is synthesized)
aaaatgatgtatacttctatctttcttgccctacagaacacctgttaccatgcactgcctcatgaggttgttttgagaattaaataagagaaggcatgttaatcaatactaagaaaccaa

SEQ ID NO: 688508 - DNA, 120 bp, Artificial Sequence
  ENSG00000187954_0 (sequence is synthesized)
aatggggacctggaacctgggcttactagagtgccgcgcgtagggctccaggtcgctggcttctgcgcttccttcctctccaaagttgagtatctcctatctgtgtcctcgtacatactg

SEQ ID NO: 688509 - DNA, 120 bp, Artificial Sequence
  ENSG00000187954_1 (sequence is synthesized)
ccgcctgaggtgccatggcccccaagccgggggccgagtggagcacagccctgtcccatctggtgctgggagtggtgtctctgcacgcagccgtgagcacagccgaggcaagtcgagggg

SEQ ID NO: 688510 - DNA, 120 bp, Artificial Sequence
  ENSG00000187954_2 (sequence is synthesized)
ctgctgctggcttcctgctccaggtcttggctgccaccaccacgctggccccagggctgagcacacacgaagactgccttgctggagcctgggtggccaccgtcatcggccttccccttc

SEQ ID NO: 688511 - DNA, 120 bp, Artificial Sequence
  ENSG00000187954_3 (sequence is synthesized)
tggccttcgatttccactggtgtactaatggtcacttgatgtgcgctggctgttttatccacctactagcagatgcccggctgaaggaggagcaggccacgtgccccaattgtcgttgtg

SEQ ID NO: 688512 - DNA, 120 bp, Artificial Sequence
  ENSG00000187954_4 (sequence is synthesized)
agatcagtaagagcctctgctgccggaacctggccgtggagaaagccgtgagcgagctgccttcagagtgtggcttctgcctgcgccagtttccccgctccctcctggagaggcaccaga

SEQ ID NO: 688513 - DNA, 120 bp, Artificial Sequence
  ENSG00000187954_5 (sequence is synthesized)
aagaggaatgccaggacagggtaacccagtgcaagtacaaacgcatcggctgcccatggcacggccccttccatgagctgacggtgcacgaggctgcgtgcgcccacccgaccaagacag

SEQ ID NO: 688514 - DNA, 120 bp, Artificial Sequence
  ENSG00000187954_6 (sequence is synthesized)
gcagtgagctgatggagatcctggatgggatggaccagagccaccgcaaggagatgcagctgtacaacagcatcttcagcctgctcagcttcgagaagattggctacacagaggtccagt

SEQ ID NO: 688515 - DNA, 120 bp, Artificial Sequence
  ENSG00000187954_7 (sequence is synthesized)
tccggccgtaccgcacagacgacttcatcacgcgcctgtactatgagacgcccaggttcacagtgctgaaccagacgtgggtcctgaaggctcgagtcaacgactcggagcgtaacccca

SEQ ID NO: 688516 - DNA, 120 bp, Artificial Sequence
  ENSG00000187954_8 (sequence is synthesized)
cgacgtgaggatcagccccgtcatctaccactttgtcttcaccaacgagagcaacgagacggactacgtgccactgcccatcattgactccgtggagtgcaacaagctgctggctgccaa

SEQ ID NO: 688517 - DNA, 120 bp, Artificial Sequence
  ENSG00000187954_9 (sequence is synthesized)
gaacatcaacctgcggctcttcctgttccagatacagaagtagggcggggcctcaggatgtccgaggagcccacgggcggcatcccagcaccgctgccctgtccacctggctggcagctg

SEQ ID NO: 688518 - DNA, 120 bp, Artificial Sequence
  ENSG00000187954_10 (sequence is synthesized)
cttcacaggactatctgatcactttagcaaaggaggagaacaaacgaagccaacacagggcaagtctgcatgcgtgcgcgacggggcccccgcctccggctcacccccccgacccctgcc

SEQ ID NO: 688519 - DNA, 120 bp, Artificial Sequence
  ENSG00000187954_11 (sequence is synthesized)
tcccctccttccgagggccgccagaggctgggctgacccgaagaggagacggtgcaccaggcgccccgaggctcagagacggtggcagcaaggaggccgagaggcacagcgaccctgccc

SEQ ID NO: 688520 - DNA, 120 bp, Artificial Sequence
  ENSG00000187954_12 (sequence is synthesized)
cagcccttctgtgcagtcaggcggcggtgctgctccatccctgcgggttccggcggggcgcgggggccttgctgacatcagacgggatatccgaatatctgatagcaattaaaaggcagc

SEQ ID NO: 688521 - DNA, 120 bp, Artificial Sequence
  ENSG00000187954_13 (sequence is synthesized)
cttgtttcgtactttctgttttgttcgaggggaaggcatggctgtgaatggacagcgtgggggctttggtttggcctgggggtcagagcctgccccgcccccatctgtgtgcccgcacac

SEQ ID NO: 688522 - DNA, 120 bp, Artificial Sequence
  ENSG00000187954_14 (sequence is synthesized)
gtcccccgaggaaagactcagagacactgcctccccctacactctgtcatggggtcttgagactgaggcttgggcaggaagatccaggtagggtcggggctgccctggccaaccggccgc

SEQ ID NO: 688523 - DNA, 120 bp, Artificial Sequence
  ENSG00000187954_15 (sequence is synthesized)
tcccagggagacaggactcagccaccagggctcagcaggcattttccgaaagcagggtgaaattgtctcttcccaggaaaaagattaaactccttgcaggctcttggataagttacacaa

SEQ ID NO: 688524 - DNA, 80 bp, Artificial Sequence
  ENSG00000187954_16 (sequence is synthesized)
cgaaaacaaagatggcggccgtgccggggtcggtggccgcggcggctgtggggctacgcgcgggccgggcccactgaggc

SEQ ID NO: 688525 - DNA, 80 bp, Artificial Sequence
  ENSG00000187954_17 (sequence is synthesized)
ggcaggagagcggcgggagcgcgcggcgcccctaacttctagtcgggggagcgcgccggcatccgcccgccgggccggcc

SEQ ID NO: 688526 - DNA, 80 bp, Artificial Sequence
  ENSG00000187954_18 (sequence is synthesized)
ctcccggacgaggcgggcttggcgggcgcccggcagctacagctgcaggaggcggccggcgaccccgacgcgccgcccaa

SEQ ID NO: 688527 - DNA, 120 bp, Artificial Sequence
  ENSG00000187954_19 (sequence is synthesized)
cgacctctgtcaagggcctgtgggtccctgacccctgggtgagcgagggcactgctcccatgggcctgggcactgtgccatcctccagtggcaaacaggaggtccccagggtctgagaga

SEQ ID NO: 688528 - DNA, 120 bp, Artificial Sequence
  ENSG00000187954_20 (sequence is synthesized)
accatgcagtccaggtgtgaaaggggtcctacaaggtcagctgaccatagagaccttgggaccaccaggaaatcgtgggggccctcagccaggggatggggtcagggctccttgagcctg

SEQ ID NO: 688529 - DNA, 120 bp, Artificial Sequence
  ENSG00000187954_21 (sequence is synthesized)
ttccgcccatctagctcccctttaaccccagggaagaagtagctcaggtggagaccctgggtctgcatgggggtcacgtgagctgcctgtagccagcaggggggagggctgggtgctgtc

SEQ ID NO: 688530 - DNA, 120 bp, Artificial Sequence
  ENSG00000187954_22 (sequence is synthesized)
ctgaggatgcaggtgcaaatggccatttctgggccacctgtgtgtatcagcatctgcagaggggcctggggtctggctcctggggttggcagccccaggggctctgccatggctgcccaa

SEQ ID NO: 688531 - DNA, 120 bp, Artificial Sequence
  ENSG00000187954_23 (sequence is synthesized)
ggtggtgatatttcctgtctgcctgttgggtgtggggcagtgccaccctgtcccatcccacctcatcagcacagaatgaagctggtcctatactcatcacctgtgcacatgaggaaactg

SEQ ID NO: 688532 - DNA, 120 bp, Artificial Sequence
  ENSG00000187954_24 (sequence is synthesized)
aggccccaagaggggagcccaaggtcatattactggggatctgtgggctggcgtctgagcccagcactgtggcttcaagcccacatctgccctaggagggcccaggaggccctgtgatgt

SEQ ID NO: 688533 - DNA, 120 bp, Artificial Sequence
  ENSG00000187954_25 (sequence is synthesized)
cattcccccgtgatgtcattcccccatgacatcattcccctgtgatgtcatacatgtgacgtcattcccgtgctgtcaccacatgatgtcatcccctgtggtatcacctctgtgatgtca

SEQ ID NO: 688534 - DNA, 120 bp, Artificial Sequence
  ENSG00000187954_26 (sequence is synthesized)
atacctcttttaatgtcatccccatggtgtcattccccccatgatgccatccccccatgatgtcagtcccccatgatgtcaatttcccacaatgtcatcccctgtaatgtcaatactccc

SEQ ID NO: 688535 - DNA, 120 bp, Artificial Sequence
  ENSG00000187954_27 (sequence is synthesized)
tttgatgtcatccccgtaatgtcatcccctgtgatgtcattccctcatgatgccagtgtgatgtcatctctgtgatgtcattccgtgatgtcaccccccatgatgcaattcccctgcaat

SEQ ID NO: 688536 - DNA, 120 bp, Artificial Sequence
  ENSG00000187954_28 (sequence is synthesized)
gtcatgcccctgtgatgtcatcccccggtgatgtcatccccccatgtgatgccagtctcccatgatgtcccccctgtgatgtcattcatgtgacatcatcccgtgatatcattcccgtga

SEQ ID NO: 688537 - DNA, 120 bp, Artificial Sequence
  ENSG00000187954_29 (sequence is synthesized)
tgtctcccccatgatgtcattccccatgtgatgtcaatttcccacgatgtcacccctctgacatcatcctctgtgatgtctcgcccatgatgtcatcccccatggcgtcattcttggtcg

SEQ ID NO: 688538 - DNA, 120 bp, Artificial Sequence
  ENSG00000187954_30 (sequence is synthesized)
tggggggttgtggatcccctcctctcccctcccttggggtcttcctggctggtggggagaggtggcctggcctgggtgccacagcagctgctctggaaggtgcccgggctcttgggggcc

SEQ ID NO: 688539 - DNA, 120 bp, Artificial Sequence
  ENSG00000187954_31 (sequence is synthesized)
ttggcccacgccatcccctggactgtgcggcgccctccagggcccagcttctgttgggtgttgggcacaagtcagaatcaagtgcatctggccagatgctgccagggccaaggatgcagc

SEQ ID NO: 688540 - DNA, 120 bp, Artificial Sequence
  ENSG00000187954_32 (sequence is synthesized)
tgcctgtggcctggccttggtgtagagccagagtcttgcgcaggggctgaggggacccagatggtggggaggctccggagcatgtgaccagggaccgtcctgctgtggacagacctcctg

SEQ ID NO: 688541 - DNA, 120 bp, Artificial Sequence
  ENSG00000187954_33 (sequence is synthesized)
ggctgagtgttggtcgggaccgggccatgcacctagagatgtcctttgaccagtggggagggtctgggggtgagtgtggctgtgtcccttggctactgggccagtgtagtccagggcact

SEQ ID NO: 688542 - DNA, 120 bp, Artificial Sequence
  ENSG00000187954_34 (sequence is synthesized)
ctagggactccctgtgttctgacttgaatggagctattggggctgaaggggcaatggccctgtgtctcctcggagcttgcaggtcctcttggaggcccagagagagccagaggagggcag

SEQ ID NO: 688543 - DNA, 120 bp, Artificial Sequence
  ENSG00000187954_35 (sequence is synthesized)
ggtcactgctgcctcctcatggtatggaattgactgagcccatgctgggatctggaggccccaaaggaatgaggcctgtggccaggggccggcccaggagctggggtggctttcggggga

SEQ ID NO: 688544 - DNA, 120 bp, Artificial Sequence
  ENSG00000187954_36 (sequence is synthesized)
gaggcccgcagtgctgggaggtaagtggtgatgtgcttggcagcctcagtgctcccttaggagggtctaggaccccacctcgaatcttcctgggctatgcagagccaggaagagaggcca

SEQ ID NO: 688545 - DNA, 120 bp, Artificial Sequence
  ENSG00000187954_37 (sequence is synthesized)
ggtggccttggtgggtggcattagatgctccagccctgcctggaactcccttgggggtcgggccacagccaagaagagtgctgttttgcctgtgctaaggccactgtacgtgcagagctg

SEQ ID NO: 688546 - DNA, 120 bp, Artificial Sequence
  ENSG00000187954_38 (sequence is synthesized)
gacccagaacctcgtccaaggcccccggcagtctcaccaggaggtgtttagagctggccacgtggagtggcatacctccggggggcggggggctgtgagaggacagtggtgtgggccctt

SEQ ID NO: 688547 - DNA, 120 bp, Artificial Sequence
  ENSG00000187954_39 (sequence is synthesized)
ggtctgtgcctcccacaggacagctgcttcaatagcatctgtgccccctcctgcctgtagtccacccaccactgacccctggacttggctggcggattttcacaccttctcctgggggca

SEQ ID NO: 688548 - DNA, 120 bp, Artificial Sequence
  ENSG00000187954_40 (sequence is synthesized)
ggtctcagcttgtccccaacccagtcagagccagtctcactccctgcctcaggcaactgtgtatgttttaatttttatttatttatgtattcatgagatagagtctcactctgtctccca

SEQ ID NO: 688549 - DNA, 67 bp, Artificial Sequence
  ENSG00000187954_41 (sequence is synthesized)
atgttggccaggctggtcatgaactcctaacctcaggtgatgtaattttaatttttaaccaaactga

SEQ ID NO: 688550 - DNA, 120 bp, Artificial Sequence
  ENSG00000187954_42 (sequence is synthesized)
gccaccgcctgtaattttaatttttaaccaaactgagaacttgaggattgaatgcaggtaacgggtggtgttcatgtggatgtggattccatgaaagagggctttgtcctcactgtcggt

SEQ ID NO: 688551 - DNA, 120 bp, Artificial Sequence
  ENSG00000187954_43 (sequence is synthesized)
cctagtccacaggtgctgagtgaacagccccagcgtctgacagctccttagcttggggtgcacaggcagctgaagcagtaggatggcagctcagacttcccagggccccacgtgtgcagg

SEQ ID NO: 688552 - DNA, 120 bp, Artificial Sequence
  ENSG00000187954_44 (sequence is synthesized)
gctggcctcccagcaccaccaggcagggccggcctcccagcgccaccaggcagggccctgtgagtgtcccctccctgacacacaccttgtagagaggctgggcctgggcaggctgctctg

SEQ ID NO: 688553 - DNA, 120 bp, Artificial Sequence
  ENSG00000187954_45 (sequence is synthesized)
ctgcaccacatcccattctcaagagggtcccaggtcccaaaggaagcctgtagcccagtggctttctggaggtttgcatggctggcaagcctgggccggctgctggagaggcatcaggac

SEQ ID NO: 688554 - DNA, 120 bp, Artificial Sequence
  ENSG00000187954_46 (sequence is synthesized)
aggagcaactctgctgactgctcccctcagcgagctctaagagtctttgggtgggaggcacatcacatccctgtcactcctggctggccctggaatgcctcagcccacacaccccactcc

SEQ ID NO: 688555 - DNA, 120 bp, Artificial Sequence
  ENSG00000187954_47 (sequence is synthesized)
agccagggctgtgggaactgtgtctgctcaggtacaaaaggctttgtttgttcttggacctcttggttctggtctgggcttcccacctcccatgctgtgagcccccacgggctgggaccg

SEQ ID NO: 688556 - DNA, 120 bp, Artificial Sequence
  ENSG00000187954_48 (sequence is synthesized)
cagcttgccatgtgtctctcagtggcaccaagtggacgctcgaggcttatgttgagggagtgagagccaggataggccactgggcgtgctgggagcccacacaggcagggagcccagcgg

SEQ ID NO: 688557 - DNA, 120 bp, Artificial Sequence
  ENSG00000187954_49 (sequence is synthesized)
gaggtgccctgctcctgccagccccggttaccccagcaggctcggcacccactcagagcccccatttctgctccccaggcactccctgtgtgcctacctgcccttgtccttgtcctgggc

SEQ ID NO: 688558 - DNA, 120 bp, Artificial Sequence
  ENSG00000187954_50 (sequence is synthesized)
cagcttggctcctgcctcccagctctgaggaggtctctgcaggtagccaacctccctggacgagggggcagctgcctcctctcacctgggctcaccctgagccaagtcctctcaacccag

SEQ ID NO: 688559 - DNA, 120 bp, Artificial Sequence
  ENSG00000187954_51 (sequence is synthesized)
gataaatggcctttctgaaggcccagagagcatgcctgccccagtgtgggagctgcatccgctccccacctgacagtgatggccaagagcccagtgttcctggagggctcccaaactctg

SEQ ID NO: 688560 - DNA, 120 bp, Artificial Sequence
  ENSG00000187954_52 (sequence is synthesized)
gacctgtaggggggtcagggcagtcgctggtccctaagggaaaagcgtgaccctcggccccaggtggctgaacccgtcactgccagggcgagctgtcacctctgtgagctgatgaggcct

SEQ ID NO: 688561 - DNA, 120 bp, Artificial Sequence
  ENSG00000187954_53 (sequence is synthesized)
tgcttttaggacctctaatctctgcaagaacccaagctggctctgcctgtttctcctgagcagctcgcagtgttcaccacactccagcacgactcgggacaggcacgtgcgcccctctgc

SEQ ID NO: 688562 - DNA, 120 bp, Artificial Sequence
  ENSG00000187954_54 (sequence is synthesized)
accagctggagtccctcaggacacctggctggagctgatgggcatgggcgggtgtgtgcgagcatgagcccgcaggtctgtgagcttcgtctccctttccttcttcgcagtgtactaatg

SEQ ID NO: 688563 - DNA, 120 bp, Artificial Sequence
  ENSG00000187954_55 (sequence is synthesized)
gggttggggggctggcagccaggagtctgggggcagcaggctctgggcactgggcactgacagcgccggacagccgggctctggacaagctcccggtggacaggtggacacctcggtcga

SEQ ID NO: 688564 - DNA, 120 bp, Artificial Sequence
  ENSG00000187954_56 (sequence is synthesized)
gaagacaggccggagactgagtggaaggaggggccgaggcagaccccaggtgcacacctgtgtggctctcacagcagccccgcccacctgtcctcgccaccctggcttcaccatccctgc

SEQ ID NO: 688565 - DNA, 120 bp, Artificial Sequence
  ENSG00000187954_57 (sequence is synthesized)
aaggtggcatctcactgtggggctccagagcctcaagacagtcagggtctaaccagaaagtgggcaggtctcagggggcctgggagctaggggcctgcccctcggaccctggggcaagaa

SEQ ID NO: 688566 - DNA, 120 bp, Artificial Sequence
  ENSG00000187954_58 (sequence is synthesized)
gagcaccctgccgagtgaggtcctacctgcaggcagtcactgccccggccatgggcctctcaaggctggcacgaagccattcagggagagggctccacaacaagctgagggtgcccgact

SEQ ID NO: 688567 - DNA, 120 bp, Artificial Sequence
  ENSG00000187954_59 (sequence is synthesized)
caaactgtagaaccgggagtggacacccacagacgcccaggctggatgcgtgcgcaggcacactggatctcgtggctctctgggccgctgccaccgcctttgaacgtgtcggggagcagg

SEQ ID NO: 688568 - DNA, 120 bp, Artificial Sequence
  ENSG00000187954_60 (sequence is synthesized)
agccaggccagagcctggcccagaggacagcgagaagcacctgttgatgctggggccactggaggaagctccatccctctactctcagcccacaccaggcggccagctcagagcaccagg

SEQ ID NO: 688569 - DNA, 120 bp, Artificial Sequence
  ENSG00000187954_61 (sequence is synthesized)
cgtggcgcaagcagggtggtcgtgggcagccagtcccgccctgctgcctggactgtgcccagcgggatgtgggcccgagcaggccagagaggccgagggcctggggtctctgcggcagcc

SEQ ID NO: 688570 - DNA, 120 bp, Artificial Sequence
  ENSG00000187954_62 (sequence is synthesized)
acagcccgtggtgagtagcagccttagctgtcctggagataccggggcctcgtggagtctaggcaggctggggcactgtggctgtggccgtggccaggtgagaagccccattcgcgcagg

SEQ ID NO: 688571 - DNA, 120 bp, Artificial Sequence
  ENSG00000187954_63 (sequence is synthesized)
aaagactggccacctgggaacccacgcctccacggagggacttgccggccacaggctgtgggctgcccaagaggactgtgcaggcagggctgcctgctgattggcagctccggatcaggc

SEQ ID NO: 688572 - DNA, 120 bp, Artificial Sequence
  ENSG00000187954_64 (sequence is synthesized)
ccggtgcctgcagacctggtgctcccctcgggcagggctgggtgccgcagccgcctgctggcttttctggcagctcctctgtatcagaaccaataaagtgcacttgttctcggaaccgca

SEQ ID NO: 688573 - DNA, 120 bp, Artificial Sequence
  ENSG00000187954_65 (sequence is synthesized)
cccaaacagagcgttttctggtccccgagctcctcccgaccccacccgctcctacggcctccaaccggccccccccaggtgtgtgcagtggcctcagggatccggaaagtctaggactga

SEQ ID NO: 688574 - DNA, 120 bp, Artificial Sequence
  ENSG00000187954_66 (sequence is synthesized)
gcatggtgctggcagtggctggcggccacctcggccctgagggccgctctgtggctggtcaggcaatgctgttggtggtcgcagtgaccatcctcattgtagctgtcttcacggccaaca

SEQ ID NO: 688575 - DNA, 120 bp, Artificial Sequence
  ENSG00000187954_67 (sequence is synthesized)
cttatgggatgtgggggggggcgatgctgggtgtggcaggcctcctgagccggctggaggaggacaggctgctgctgctaccgaaggaggatgtctgtcgctgggccttggctgtaggca

SEQ ID NO: 688576 - DNA, 120 bp, Artificial Sequence
  ENSG00000187954_68 (sequence is synthesized)
gctgggcttactgccgggccctgcatacacagcgcctccagtgggagtgacagttggatacagccaggcagggtttctgccctgccgaacactttccctcccacctgcctgctcctggcg

SEQ ID NO: 688577 - DNA, 120 bp, Artificial Sequence
  ENSG00000187954_69 (sequence is synthesized)
ccttctccctaggggtagactcttctgcctactgaagtgggtttgctgcacattgactggtcaggggcagagtctgggtgctgtcctttggccacgtgtggggacttgtctagaccagaa

SEQ ID NO: 688578 - DNA, 120 bp, Artificial Sequence
  ENSG00000187954_70 (sequence is synthesized)
tgaaagggacagggtcccagacacgtttgggggtcctgattctgggctggacacggttgtggatccagagaagaggcctagtctccaataaatcttaggaattttgcaggaatatgaaaa

SEQ ID NO: 688579 - DNA, 120 bp, Artificial Sequence
  ENSG00000187954_71 (sequence is synthesized)
atgcccacgcacgcacccacccaaacagagcgttttctggtccccgagctcctcccgaccccacccgctcctacggcctccaaccggccccccccaggtctcgaccctctcccccaggcc

SEQ ID NO: 688580 - DNA, 120 bp, Artificial Sequence
  ENSG00000187954_72 (sequence is synthesized)
tcgaccctccccccccagccgctctagccccgcccggccgctctagcctccgctcctctcgctggtggaggttcccgaccgcgctcgctcccgcaactgggggcacggcagaggaggcag

SEQ ID NO: 688581 - DNA, 120 bp, Artificial Sequence
  ENSG00000187954_73 (sequence is synthesized)
tctccatggaagccccaaaccctttcctgtttaaaagggtgaccccggcctctttttcccacgtgttctcccttccctgtgttgacaggcaagtcgaggggctgctgctggcttcctgct

SEQ ID NO: 688582 - DNA, 120 bp, Artificial Sequence
  ENSG00000187954_74 (sequence is synthesized)
tgggaccgcgcagcccggtaactgcgcacggctggcctcccggagtcctgcgccgtcgctcctcctggacccgggttcccaggacaacgcctcccggaacgcagggagcaggccgaggcc

SEQ ID NO: 688583 - DNA, 120 bp, Artificial Sequence
  ENSG00000187954_75 (sequence is synthesized)
gccgcgtgggcctgcagcgcctcgccgctctctcttccccaggcccgcactcccacttgggctccagggccccagggctgacgttccccccagcttagaccctgagtcgttttcccccgt

SEQ ID NO: 688584 - DNA, 120 bp, Artificial Sequence
  ENSG00000187955_0 (sequence is synthesized)
cctcttatctgatcctgggctcccagctggagaggcggaggcagctccagggggctggaagtggaagcgcagcggcagaaggagagggagagagaaagagagagaggctaattaaaaaag

SEQ ID NO: 688585 - DNA, 120 bp, Artificial Sequence
  ENSG00000187955_1 (sequence is synthesized)
gatactccgagggaagagagcaagggcggtgcgccgccaaggaccaactagcggcggagcttcgatcttgcctaggcgcggagagctcccaacctgggctggaaccttgcccagcacagg

SEQ ID NO: 688586 - DNA, 120 bp, Artificial Sequence
  ENSG00000187955_2 (sequence is synthesized)
tggctgctacaccccatgtaaaaagcggaaaataaaatgaagattttccagcgcaagatgcggtactggttgcttccaccttttttggcaattgtttatttctgcaccattgtccaaggt

SEQ ID NO: 688587 - DNA, 120 bp, Artificial Sequence
  ENSG00000187955_3 (sequence is synthesized)
caagtggctccacccacaaggttaagatataatgtaatatctcatgacagtatacagatttcatggaaggctccaagagggaaatttggtggttacaaacttcttgtgactccaacttca

SEQ ID NO: 688588 - DNA, 120 bp, Artificial Sequence
  ENSG00000187955_4 (sequence is synthesized)
ggtggaaaaactaaccagctgaatctgcagaacactgcaactaaagcaattattcaaggccttatgccagaccagaattacacagttcaaattattgcatacaataaagataaagaaagc

SEQ ID NO: 688589 - DNA, 120 bp, Artificial Sequence
  ENSG00000187955_5 (sequence is synthesized)
aagccagctcaaggccaattcagaattaaagatttagaaaaaagaaaggatccaaagcccagagtcaaagttgtggacagaggaaatgggagtagaccatcttcaccagaagaagtgaaa

SEQ ID NO: 688590 - DNA, 120 bp, Artificial Sequence
  ENSG00000187955_6 (sequence is synthesized)
tttgtctgtcaaactccagcaattgctgacattgtaatcctggtcgatggttcatggagtattggaagattcaacttcagactggttcggcatttcttggaaaacctggttacagcattc

SEQ ID NO: 688591 - DNA, 120 bp, Artificial Sequence
  ENSG00000187955_7 (sequence is synthesized)
gatgtgggctcagagaagacacgaattggtcttgcacagtatagtggtgaccccagaatagaatggcacttgaatgcatttagcacaaaagatgaagtgattgaagctgtccgaaacctc

SEQ ID NO: 688592 - DNA, 120 bp, Artificial Sequence
  ENSG00000187955_8 (sequence is synthesized)
ccatataaaggaggaaatacactaacaggtcttgctttgaactacatttttgaaaatagcttcaaaccagaagcaggatcaaggactggagtatccaaaattggcattttaatcacagat

SEQ ID NO: 688593 - DNA, 120 bp, Artificial Sequence
  ENSG00000187955_9 (sequence is synthesized)
ggaaaatcccaagatgacattattccaccatctagaaatcttcgtgagtctggtgtagaactgtttgccataggggtgaaaaacgcggatgtgaatgagctgcaggagatcgcctctgaa

SEQ ID NO: 688594 - DNA, 120 bp, Artificial Sequence
  ENSG00000187955_10 (sequence is synthesized)
ccagacagcactcatgtgtacaatgttgccgaattcgatctgatgcacacagttgtggagagtctgaccaggactctctgctctagagtggaagaacaggacagagaaattaaagcctca

SEQ ID NO: 688595 - DNA, 120 bp, Artificial Sequence
  ENSG00000187955_11 (sequence is synthesized)
gcccatgccatcactgggccgcctacggagttgattacttctgaagtcactgccagaagctttatggttaactggactcatgccccaggaaatgtggaaaaatacagagttgtgtattat

SEQ ID NO: 688596 - DNA, 120 bp, Artificial Sequence
  ENSG00000187955_12 (sequence is synthesized)
cctaccaggggtggaaaaccagacgaggtggtggtagatggaactgtatcttccacagtgttgaaaaacttgatgtctttaactgaatatcagatagcagtctttgcaatctatgcccac

SEQ ID NO: 688597 - DNA, 120 bp, Artificial Sequence
  ENSG00000187955_13 (sequence is synthesized)
actgctagtgaaggcctacggggaactgaaactacacttgctttaccgatggcttctgaccttctactgtacgacgtgactgagaacagcatgcgagtcaaatgggatgcagtgcctggg

SEQ ID NO: 688598 - DNA, 120 bp, Artificial Sequence
  ENSG00000187955_14 (sequence is synthesized)
gcctcaggttacctgatcctttatgctcctctaacagagggcctggctggggatgaaaaagagatgaaaattggagagacccacacagatattgaattgagtgggttgttgcccaataca

SEQ ID NO: 688599 - DNA, 120 bp, Artificial Sequence
  ENSG00000187955_15 (sequence is synthesized)
gaatacacagtcacagtttatgccatgtttggagaagaggccagtgatcctgttacgggacaagaaacaacattggctttaagtccaccaagaaacctgagaatctccaatgttggctct

SEQ ID NO: 688600 - DNA, 120 bp, Artificial Sequence
  ENSG00000187955_16 (sequence is synthesized)
aacagtgctcgattaacctgggacccaacttcaagacagatcaatggttatcgaattgtatataacaatgcagatgggactgaaatcaatgaggttgaagtcgatcctattactaccttc

SEQ ID NO: 688601 - DNA, 120 bp, Artificial Sequence
  ENSG00000187955_17 (sequence is synthesized)
cctctgaagggcttgacacctctcacagagtatactattgctattttctccatctatgatgaaggacagtcagagcctctgactggagtttttaccaccgaggaagttccagcccagcaa

SEQ ID NO: 688602 - DNA, 120 bp, Artificial Sequence
  ENSG00000187955_18 (sequence is synthesized)
tacttagaaattgatgaggtgacgacagacagttttagggtgacctggcatcccctctcagctgatgaagggctacacaaattgatgtggattccagtctatggggggaagactgaggag

SEQ ID NO: 688603 - DNA, 120 bp, Artificial Sequence
  ENSG00000187955_19 (sequence is synthesized)
gttgtcctgaaagaagagcaggactcacatgttattgaaggcctggagcccggtacggagtatgaagtttcactattggccgtacttgatgatggaagcgagagtgaggtggtgactgct

SEQ ID NO: 688604 - DNA, 120 bp, Artificial Sequence
  ENSG00000187955_20 (sequence is synthesized)
gtcgggaccacacttgacagtttttggacagaaccagctacaaccatagtgcctaccacatctgtgacttcagttttccagacgggaatcagaaacctagttgtaggtgatgaaactact

SEQ ID NO: 688605 - DNA, 120 bp, Artificial Sequence
  ENSG00000187955_21 (sequence is synthesized)
tctagcctgcgggtaaaatgggacatttctgacagcgatgtgcagcagtttagggtgacctacatgacagctcaaggggaccctgaggaagaagtcataggaacggttatggtgcctgga

SEQ ID NO: 688606 - DNA, 120 bp, Artificial Sequence
  ENSG00000187955_22 (sequence is synthesized)
agccagaacaacctccttctgaagcctctgcttcctgatactgaatacaaagtcacagtgactcccatctacacggatggcgaaggcgtcagcgtctccgctcctggaaaaaccttacca

SEQ ID NO: 688607 - DNA, 120 bp, Artificial Sequence
  ENSG00000187955_23 (sequence is synthesized)
tcctcggggccccagaacttgcgggtgtccgaggaatggtataaccggttgcgcattacgtgggaccccccatcttccccggtgaaaggctatagaattgtctacaaacctgtcagtgtt

SEQ ID NO: 688608 - DNA, 120 bp, Artificial Sequence
  ENSG00000187955_24 (sequence is synthesized)
cctggtccaacactggaaacgtttgtgggagctgacattaacaccatccttatcacaaacctcctcagcggaatggactacaatgtgaagatatttgcctcccaggcctcaggcttcagc

SEQ ID NO: 688609 - DNA, 120 bp, Artificial Sequence
  ENSG00000187955_25 (sequence is synthesized)
gacgccctgacaggcatggtgaaaacattgttcttgggtgttaccaatctccaagccaaacatgttgaaatgaccagcttgtgtgcccactggcaggtacatcgccatgccacagcctat

SEQ ID NO: 688610 - DNA, 120 bp, Artificial Sequence
  ENSG00000187955_26 (sequence is synthesized)
agggttgttatagaatccctccaggataggcaaaagcaagaatccactgtgggtggagggacaaccaggcattgcttctatggacttcagcctgattctgaatataaaatcagtgtttat

SEQ ID NO: 688611 - DNA, 120 bp, Artificial Sequence
  ENSG00000187955_27 (sequence is synthesized)
acaaagctccaggagattgaaggacctagtgtgagcataatggaaaaaacacaatcacttcctacacgaccaccaacttttcctccaaccattccaccagcaaaagaagtatgtaaggcg

SEQ ID NO: 688612 - DNA, 120 bp, Artificial Sequence
  ENSG00000187955_28 (sequence is synthesized)
gccaaggctgacctggtatttatggtggatggatcctggagcattggagatgaaaatttcaataagatcatcagctttctatacagcactgttggagccctgaacaagattggcacagat

SEQ ID NO: 688613 - DNA, 120 bp, Artificial Sequence
  ENSG00000187955_29 (sequence is synthesized)
ggaacccaagttgcaatggttcagttcactgatgatcccagaacagaatttaaactaaatgcttacaaaaccaaagagactcttcttgatgcaattaaacacatttcatacaaaggagga

SEQ ID NO: 688614 - DNA, 120 bp, Artificial Sequence
  ENSG00000187955_30 (sequence is synthesized)
aatacaaaaacaggaaaagcaattaagtatgttcgagataccttgttcactgcagagtcaggtacaagaaggggcatcccaaaggttatcgtggttataactgatggaagatcacaagat

SEQ ID NO: 688615 - DNA, 120 bp, Artificial Sequence
  ENSG00000187955_31 (sequence is synthesized)
gatgtgaacaaaatctccagggagatgcaattagatggctatagcatttttgcaattggtgtggccgatgcagattactcggagttggttagcattggcagtaagcccagcgcacgccat

SEQ ID NO: 688616 - DNA, 120 bp, Artificial Sequence
  ENSG00000187955_32 (sequence is synthesized)
gtcttctttgtggatgactttgacgcctttaagaaaatcgaagatgagttaattacttttgtctgcgaaacagcatcagcaacctgtccagtggtacacaaggatggcattgatcttgca

SEQ ID NO: 688617 - DNA, 120 bp, Artificial Sequence
  ENSG00000187955_33 (sequence is synthesized)
gtttccatgttaccaactccataaagatgccctggtttcccagccaaccaggtacttgcacccagaaggattgccctccgactacacaatcagttttctattccggattcttcctgacac

SEQ ID NO: 688618 - DNA, 120 bp, Artificial Sequence
  ENSG00000187955_34 (sequence is synthesized)
tccacaggagccatttgctctttgggagattttaaataaaaattctgacccattggttggggttattttagacaatggtgggaaaactctaacatatttcaactatgaccagagtgggga

SEQ ID NO: 688619 - DNA, 120 bp, Artificial Sequence
  ENSG00000187955_35 (sequence is synthesized)
ttttcaaactgttactttcgaaggacctgaaattaggaaaattttttatggaagctttcacaagctacacattgttgtcagtgagactttggtcaaagtggttattgactgcaagcaagt

SEQ ID NO: 688620 - DNA, 120 bp, Artificial Sequence
  ENSG00000187955_36 (sequence is synthesized)
gggtgagaaggcaatgaacgcatcagctaatatcacgtcagatggtgtagaagtgctagggaaaatggttcgatcaagaggaccaggtggaaactctgcaccgttccagttacagatgtt

SEQ ID NO: 688621 - DNA, 120 bp, Artificial Sequence
  ENSG00000187955_37 (sequence is synthesized)
tgatattgtttgctccacatcatgggccaatacagacaaatgctgtgaacttccaggcctgagagatgatgagtcttgcccagaccttccccattcctgctcctgttctgaaaccaatga

SEQ ID NO: 688622 - DNA, 120 bp, Artificial Sequence
  ENSG00000187955_38 (sequence is synthesized)
agtggctctgggaccagcgggcccaccaggtggtccaggactccgaggaccaaagggccagcaaggtgaaccgggtccaaagggaccagatggccctcggggtgaaattggtctgccagg

SEQ ID NO: 688623 - DNA, 120 bp, Artificial Sequence
  ENSG00000187955_39 (sequence is synthesized)
acctcagggtccacctggacctcaaggaccaagtggtctgtccattcaaggaatgcccggaatgccaggagaaaaaggagagaaaggagatactggccttccaggtccacagggtatccc

SEQ ID NO: 688624 - DNA, 120 bp, Artificial Sequence
  ENSG00000187955_40 (sequence is synthesized)
aggaggcgttggttcaccaggacgtgatggctcaccaggccagaggggccttccgggaaaggatggatcctcgggacctccaggaccaccagggccaataggcattcctggcacccctgg

SEQ ID NO: 688625 - DNA, 120 bp, Artificial Sequence
  ENSG00000187955_41 (sequence is synthesized)
agtcccagggatcacaggaagcatgggaccgcaaggcgccctgggaccacctggtgtccctggagcaaagggggaacgaggagagcggggtgacctgcagtctcaagccatggtgagatc

SEQ ID NO: 688626 - DNA, 120 bp, Artificial Sequence
  ENSG00000187955_42 (sequence is synthesized)
agtggcgcgtcaagtatgcgaacagctcatccagagtcacatggccaggtacactgccatcctcaaccagattcccagccactcctcatccatccggactgtccaagggcctcctgggga

SEQ ID NO: 688627 - DNA, 120 bp, Artificial Sequence
  ENSG00000187955_43 (sequence is synthesized)
gcctgggaggccaggctcacctggagcccctggtgaacaaggacccccaggcacaccaggcttccccggaaatgcaggcgtgccagggaccccaggagaacgaggtctaactggtatcaa

SEQ ID NO: 688628 - DNA, 120 bp, Artificial Sequence
  ENSG00000187955_44 (sequence is synthesized)
aggagaaaaaggaaatccaggcgttggaacccaaggtccaagaggcccccctggaccagcaggaccttcaggggagagtcggcctggcagccctgggccccctggctctcctggaccaag

SEQ ID NO: 688629 - DNA, 120 bp, Artificial Sequence
  ENSG00000187955_45 (sequence is synthesized)
aggcccaccaggtcatctgggggttcctggaccccaaggtccttctggccagcctggatattgtgacccctcatcatgttctgcctatggtgtgagagctccccatccagatcagccaga

SEQ ID NO: 688630 - DNA, 120 bp, Artificial Sequence
  ENSG00000187955_46 (sequence is synthesized)
gttcacccctgtccaagatgagctggaagccatggaactgtggggccctggagtctgatagcctcaggagaaatttgaagaccaactgcaagaactcttaaggaatcttgtttgagaaaa

SEQ ID NO: 688631 - DNA, 120 bp, Artificial Sequence
  ENSG00000187955_47 (sequence is synthesized)
tgttgttatgtggtttgtatgctacttttggggggcagggctcatttcagcagcctaaatctcctccttggataatgttaatattattattattattaacaaaaaatatatatttttaaa

SEQ ID NO: 688632 - DNA, 120 bp, Artificial Sequence
  ENSG00000187955_48 (sequence is synthesized)
aagttcccttaatctatgacatggtagcaatgatttccctttggtgtcttaatggcatgtcagataatttgtttttccagagaagagagctcaaagaggaattgggaaaaataaattgaa

SEQ ID NO: 688633 - DNA, 120 bp, Artificial Sequence
  ENSG00000187955_49 (sequence is synthesized)
ctctggaatcttctctctcaagtcctaaaatgaacaaacagatatgattgtgtttgagggaaatatgtccctagcaggaaaagaattcaaagaggttcaaagaatatgtcacttactcct

SEQ ID NO: 688634 - DNA, 120 bp, Artificial Sequence
  ENSG00000187955_50 (sequence is synthesized)
acttgctgtaggaataaccttgctgataagaaaaaaagggacaatattggagaaactacctcttgtttaattgatctgtccaactctgagatcacttggtaactggtttcatgtgtatcc

SEQ ID NO: 688635 - DNA, 120 bp, Artificial Sequence
  ENSG00000187955_51 (sequence is synthesized)
aaaaatcagcatttggatttaagctttctgaatttggtagtttaagaaacagatttagtttttcagtggttttaactcatgtgaaataatgattttccaccagctctgatgcaaagagat

SEQ ID NO: 688636 - DNA, 120 bp, Artificial Sequence
  ENSG00000187955_52 (sequence is synthesized)
ataattttaatgaacgatttatccagcagtgtgttccaggggttgcctctccttatctacggggattactttgtacatgcagataagttttcgcaaacctatttccattttcttttgtaa

SEQ ID NO: 688637 - DNA, 120 bp, Artificial Sequence
  ENSG00000187955_53 (sequence is synthesized)
gcaaataaaactttaaaacaatgtatgtggattctttttcctgcatttctaagtatcaccttaagcttttgtagtcttaactgagtgtccaccagaaagacaacagttgtcttcctttag

SEQ ID NO: 688638 - DNA, 120 bp, Artificial Sequence
  ENSG00000187955_54 (sequence is synthesized)
gtaagcattcaaactttcattcattcgtttactcactcactcattcattcattctgagtgcagtagaaaacagaagaagcagttaacttgggactaagagattagcgacattttattgtt

SEQ ID NO: 688639 - DNA, 120 bp, Artificial Sequence
  ENSG00000187955_55 (sequence is synthesized)
catttataatctagcaggcagcaaagaccctgcaaatgcatgacctctgctaaataaatgtttatcaatagttgactgaggagcccacctatcttctgatattgaggaaagcctaaaaac

SEQ ID NO: 688640 - DNA, 120 bp, Artificial Sequence
  ENSG00000187955_56 (sequence is synthesized)
ccctagaaggcagagcagaaatgaggttgaatctaatagactctaacccttaaaccatactttgtcttttgctcacaaaggaaaaatctaggtatttgagaaagatttgaattctattat

SEQ ID NO: 688641 - DNA, 120 bp, Artificial Sequence
  ENSG00000187955_57 (sequence is synthesized)
gtgctagttgaaatagaaacaaaagagaaccataaatttaatacgtgctccttctctgtaacatctccctagtaacagctaactttagaaagtagggatgggatcatttacaactagaag

SEQ ID NO: 688642 - DNA, 120 bp, Artificial Sequence
  ENSG00000187955_58 (sequence is synthesized)
ctggattctttctggatcaggaaaaggctaacacgaaggatggtgtctgtctgatcaccaggttctctttctgtccttctcataatctcctgatctttggagatgaaagatctcctttca

SEQ ID NO: 688643 - DNA, 120 bp, Artificial Sequence
  ENSG00000187955_59 (sequence is synthesized)
tcttcatctgaaggattcttcagatgattcatcttcagacttcatctgaaggattcaaacaatctacttgtgtgcctttggtggggtggggcaggggcggggggcggttctaaacaaatc

SEQ ID NO: 688644 - DNA, 120 bp, Artificial Sequence
  ENSG00000187955_60 (sequence is synthesized)
agtttttttggtgtctttgcagggaatgaaagaagataatgagcagataatcagcagccatttcctttcagttatggtatatgattctgcctgagaaagcaggatttatgggaaggaaaa

SEQ ID NO: 688645 - DNA, 120 bp, Artificial Sequence
  ENSG00000187955_61 (sequence is synthesized)
cttgtctaaggctcatcaagatggcctgacccagagtcacctaagagaactcttccaacttaaatgactagggtgtgtaatcagttgcttcttattctgtgtctcagatttcctagtcca

SEQ ID NO: 688646 - DNA, 120 bp, Artificial Sequence
  ENSG00000187955_62 (sequence is synthesized)
tgacatttaatagtgagtatagagtaggatattctatacattttagtatttggcccttggaaacaaagttaaataccatgtcactcagaagactctcaaagtttgtgtataaatggcgaa

SEQ ID NO: 688647 - DNA, 120 bp, Artificial Sequence
  ENSG00000187955_63 (sequence is synthesized)
gtatacactatgagagattctaatccattcacatcattcttgagttgtgcaaatacacttggctttgatttcacttggtgatctaaatttgtttatttaagctgcaagaaagttacatta

SEQ ID NO: 688648 - DNA, 120 bp, Artificial Sequence
  ENSG00000187955_64 (sequence is synthesized)
atttggaatgtgtcatcacttggacccagtatatcagatttttattgagtaaaatgttaaaaataataagtgtaactcagattctggatgttcgagtttacaatacattgcctgtaataa

SEQ ID NO: 688649 - DNA, 120 bp, Artificial Sequence
  ENSG00000187955_65 (sequence is synthesized)
aagctgattctgaagtgcatttttcttgacttactttggcagaaatatacttatatcttaatttatagtttgtaagtttatactgttttctaaaagtaataaatcatttcatgaaaaata

SEQ ID NO: 688650 - DNA, 120 bp, Artificial Sequence
  ENSG00000187955_66 (sequence is synthesized)
ctgcctatggtgtgagagatctgatcccctacaatgattaccagcactgaagtggaaatcctccactctggttccattggccccagacatttagctgtggatacagaactgtcctgtcaa

SEQ ID NO: 688651 - DNA, 120 bp, Artificial Sequence
  ENSG00000187955_67 (sequence is synthesized)
ccaccaccaccaccaagcccctgcccctaacaatggacactctgcttccctgcttcttctgcatccctgccttcccactttcaaacctcttgcccactctgctccaaacatgatggagtg

SEQ ID NO: 688652 - DNA, 120 bp, Artificial Sequence
  ENSG00000187955_68 (sequence is synthesized)
ataacatcggaacttaaccaaatcatatatgtctattttaatagacactgactgctccatgtcagcctggatagaggtatatgatcgtgtgccaagaatttatcccagactcccctgtgt

SEQ ID NO: 688653 - DNA, 120 bp, Artificial Sequence
  ENSG00000187955_69 (sequence is synthesized)
gacagcttcataataaagttacttaactgtgcctcttcctccttcctctccccacacaggatggatgggcatctttctccttgaccaccctactctcccttcctcccctgatcacctccc

SEQ ID NO: 688654 - DNA, 120 bp, Artificial Sequence
  ENSG00000187955_70 (sequence is synthesized)
ctccctgctcttccctggtgatggacttctaacatgagattttttaaaaaaatttctatttcttttataattttgctgagttttcagggtttcttctgtaaataaaacataatatttaaa

SEQ ID NO: 688655 - DNA, 120 bp, Artificial Sequence
  ENSG00000187955_71 (sequence is synthesized)
tggaatgcccatcaatggtggactgcgtaaagaaaatgtggtgaacatacagcaagaaatactacgcagccataaaaaagaacaaaatcatgttctttgcagcaacacgggtgcctctgg

SEQ ID NO: 688656 - DNA, 120 bp, Artificial Sequence
  ENSG00000187955_72 (sequence is synthesized)
aagccattatcttgtgcaaattaacacagaaacatgaaaccaaatactgcatgctctcacttagaagtgggagctaaacatcgagtacacacggacgtaaagacgggaacaatagacact

SEQ ID NO: 688657 - DNA, 120 bp, Artificial Sequence
  ENSG00000187955_73 (sequence is synthesized)
aggggctactagtagggggagaatagaaggaggctgaaggttgaaaaactgcctattgggaactatgctcactacctgggggacagaatcatttgtacaccacctctcagtgacatgccg

SEQ ID NO: 688658 - DNA, 120 bp, Artificial Sequence
  ENSG00000187955_74 (sequence is synthesized)
aacatcaaatacatttaatttaaaatgaattaaaattatcatatagatatctatttctatcatttttcttcccttcttttcacaggtgttgatagatatctatttttaaacatggaaaga

SEQ ID NO: 688659 - DNA, 120 bp, Artificial Sequence
  ENSG00000187955_75 (sequence is synthesized)
tcctacaagatctttattgtcaaagaatcagtatgtattgaattaatgaaagaactgggctttgaggttaggaaacatcatgcttcgtggctatggctgtggctttaagtccaccaagaa

SEQ ID NO: 688660 - DNA, 120 bp, Artificial Sequence
  ENSG00000187955_76 (sequence is synthesized)
tcataggaacggtctgtataaattcaactgactagaaactctgcagatgttactaacacagctaataagactgtcttcggagatcaatgcaaactttactgctcttttctcagtgactct

SEQ ID NO: 688661 - DNA, 120 bp, Artificial Sequence
  ENSG00000187955_77 (sequence is synthesized)
gccatctccagaaactaatgttctctgttaatctgactccactactggcttcttagtgacctttataaatccaaaacttgctccatgtacaacttgctccaagttaataacctctgaaca

SEQ ID NO: 688662 - DNA, 120 bp, Artificial Sequence
  ENSG00000187955_78 (sequence is synthesized)
ttgtttcaaatattgcttctcttctgctgccttgcacctgttcgagcaccaaagttgggtcataaaaggccatatgcacttgtgtctgtatatatgtatgtatagacatgtataaaagtt

SEQ ID NO: 688663 - DNA, 120 bp, Artificial Sequence
  ENSG00000187955_79 (sequence is synthesized)
taatatagaaaataatttcttctgcccttggaaatctgataaaaaaacttttaagcaaaggacacagaaaaggtcttctatatggtatagtgaaaatattcttaataaaataccatccgt

SEQ ID NO: 688664 - DNA, 80 bp, Artificial Sequence
  ENSG00000187955_80 (sequence is synthesized)
cccatcggaactatactgttcctaagagcatctgccccagtcaacttctcatccacagatattaatctcagtcaacctcc

SEQ ID NO: 688665 - DNA, 120 bp, Artificial Sequence
  ENSG00000187955_81 (sequence is synthesized)
tcaacttctcatccacagatattaatctcagtcaacctccagatttttagacatattttgaaagtctttcatcaccagatttcaaaggtgttgatagatatctatttttaaacatggaaa

SEQ ID NO: 688666 - DNA, 120 bp, Artificial Sequence
  ENSG00000187955_82 (sequence is synthesized)
ctttcccttcgtctatttactaactgtctgaaaccttatggggaaggtacaaggggcgtggtggattaagacatccactgctttttacccagcaggatatctctgtgtctctaaggaccc

SEQ ID NO: 688667 - DNA, 120 bp, Artificial Sequence
  ENSG00000187955_83 (sequence is synthesized)
agcaaaagaaggtaaaagaataatagaataattatctgattctaggtttaggatttgtgttggttttgtttgcctgttcatttcaaaccaggatattaataaagtatatttattgtgcta

SEQ ID NO: 688668 - DNA, 120 bp, Artificial Sequence
  ENSG00000187957_0 (sequence is synthesized)
ccggcggagcagccctagccgccaccgtcgctctcgcagctctcgtcgccactgccaccgccgccgccgtcactgcgtcctggctccggctcccgcgccctcccggccggccatgcagcc

SEQ ID NO: 688669 - DNA, 80 bp, Artificial Sequence
  ENSG00000187957_1 (sequence is synthesized)
gtgcgcagctgctgcccgcgctggccctgctgctgctgctgctcggagcggggccccgaggcagctccctggccaacccg

SEQ ID NO: 688670 - DNA, 120 bp, Artificial Sequence
  ENSG00000187957_2 (sequence is synthesized)
gtgcgccgcgcagccctgccggaatgggggtgtgtgcacctcgcgccctgagccggacccgcagcacccggcccccgccggcgagcctggctacagctgcacctgccccgccgggatctc

SEQ ID NO: 688671 - DNA, 120 bp, Artificial Sequence
  ENSG00000187957_3 (sequence is synthesized)
ggctacagctgcacctgccccgccgggatctccggcgccaactgccagcttgttgcagatccttgtgccagcaacccttgtcaccatggcaactgcagcagcagcagcagcagcagcagc

SEQ ID NO: 688672 - DNA, 120 bp, Artificial Sequence
  ENSG00000187957_4 (sequence is synthesized)
gatggctacctctgcatttgcaatgaaggctatgaaggtcccaactgtgaacaggcacttcccagtctcccagccactggctggaccgaatccatggcaccccgacagcttcagcctgtt

SEQ ID NO: 688673 - DNA, 120 bp, Artificial Sequence
  ENSG00000187957_5 (sequence is synthesized)
cctgctactcaggagcctgacaaaatcctgcctcgctctcaggcaacggtgacactgcctacctggcagccgaaaacagggcagaaagttgtagaaatgaaatgggatcaagtggaggtg

SEQ ID NO: 688674 - DNA, 120 bp, Artificial Sequence
  ENSG00000187957_6 (sequence is synthesized)
atcccagatattgcctgtgggaatgccagttctaacagctctgcgggtggccgcctggtatcctttgaagtgccacagaacacctcagtcaagattcggcaagatgccactgcctcactg

SEQ ID NO: 688675 - DNA, 120 bp, Artificial Sequence
  ENSG00000187957_7 (sequence is synthesized)
attttgctctggaaggtcacggccacaggattccaacagtgctccctcatagatggacgaagtgtgaccccccttcaggcttcagggggactggtcctcctggaggagatgctcgccttg

SEQ ID NO: 688676 - DNA, 120 bp, Artificial Sequence
  ENSG00000187957_8 (sequence is synthesized)
gggaataatcactttattggttttgtgaatgattctgtgactaagtctattgtggctttgcgcttaactctggtggtgaaggtcagcacctgtgtgccgggggagagtcacgcaaatgac

SEQ ID NO: 688677 - DNA, 120 bp, Artificial Sequence
  ENSG00000187957_9 (sequence is synthesized)
ttggagtgttcaggaaaaggaaaatgcaccacgaagccgtcagaggcaactttttcctgtacctgtgaggagcagtacgtgggtactttctgtgaagaatacgatgcttgccagaggaaa

SEQ ID NO: 688678 - DNA, 120 bp, Artificial Sequence
  ENSG00000187957_10 (sequence is synthesized)
ccttgccaaaacaacgcgagctgtattgatgcaaatgaaaagcaagatgggagcaatttcacctgtgtttgccttcctggttatactggagagctttgccagtccaagattgattactgc

SEQ ID NO: 688679 - DNA, 120 bp, Artificial Sequence
  ENSG00000187957_11 (sequence is synthesized)
atcctagacccatgcagaaatggagcaacatgcatttccagtctcagtggattcacctgccagtgtccagaaggatacttcggatctgcttgtgaagaaaaggtggacccctgcgcctcg

SEQ ID NO: 688680 - DNA, 120 bp, Artificial Sequence
  ENSG00000187957_12 (sequence is synthesized)
tctccgtgccagaacaacggcacctgctatgtggacggggtacactttacctgcaactgcagcccgggcttcacagggccgacctgtgcccagcttattgacttctgtgccctcagcccc

SEQ ID NO: 688681 - DNA, 120 bp, Artificial Sequence
  ENSG00000187957_13 (sequence is synthesized)
ccgcagcgtgggcaccagctacaaatgcctctgtgatccaggttaccatggcctctactgtgaggaggaatataatgagtgcctctccgctccatgcctgaatgcagccacctgcaggga

SEQ ID NO: 688682 - DNA, 120 bp, Artificial Sequence
  ENSG00000187957_14 (sequence is synthesized)
cctcgttaatggctatgagtgtgtgtgcctggcagaatacaaaggaacacactgtgaattgtacaaggatccctgcgctaacgtcagctgtctgaacggagccacctgtgacagcgacgg

SEQ ID NO: 688683 - DNA, 120 bp, Artificial Sequence
  ENSG00000187957_15 (sequence is synthesized)
cctgaatggcacgtgcatctgtgcacccgggtttacaggtgaagagtgcgacattgacataaatgaatgtgacagtaacccctgccaccatggtgggagctgcctggaccagcccaatgg

SEQ ID NO: 688684 - DNA, 120 bp, Artificial Sequence
  ENSG00000187957_16 (sequence is synthesized)
ttataactgccactgcccgcatggttgggtgggagcaaactgtgagatccacctccaatggaagtccgggcacatggcggagagcctcaccaacatgccacggcactccctctacatcat

SEQ ID NO: 688685 - DNA, 120 bp, Artificial Sequence
  ENSG00000187957_17 (sequence is synthesized)
cattggagccctctgcgtggccttcatccttatgctgatcatcctgatcgtggggatttgccgcatcagccgcattgaataccagggttcttccaggccagcctatgaggagttctacaa

SEQ ID NO: 688686 - DNA, 120 bp, Artificial Sequence
  ENSG00000187957_18 (sequence is synthesized)
ctgccgcagcatcgacagcgagttcagcaatgccattgcatccatccggcatgccaggtttggaaagaaatcccggcctgcaatgtatgatgtgagccccatcgcctatgaagattacag

SEQ ID NO: 688687 - DNA, 120 bp, Artificial Sequence
  ENSG00000187957_19 (sequence is synthesized)
tcctgatgacaaacccttggtcacactgattaaaactaaagatttgtaatctttttttggattatttttcaaaaagatgagatactacactcatttaaatatttttaagaaaataaaaag

SEQ ID NO: 688688 - DNA, 120 bp, Artificial Sequence
  ENSG00000187957_20 (sequence is synthesized)
cttaagaaatttaaaatgctagctgctcaagagttttcagtagaatatttaagaactaattttctgcagcttttagtttggaaaaaatattttaaaaacaaaatttgtgaaacctataga

SEQ ID NO: 688689 - DNA, 120 bp, Artificial Sequence
  ENSG00000187957_21 (sequence is synthesized)
cgatgttttaatgtaccttcagctctctaaactgtgtgcttctactagtgtgtgctcttttcactgtagacactatcacgagacccagattaatttctgtggttgttacagaataagtct

SEQ ID NO: 688690 - DNA, 120 bp, Artificial Sequence
  ENSG00000187957_22 (sequence is synthesized)
aatcaaggagaagtttctgtttgacgtttgagtgccggctttctgagtagagttaggaaaaccacgtaacgtagcatatgatgtataatagagtatacccgttacttaaaaagaagtctg

SEQ ID NO: 688691 - DNA, 120 bp, Artificial Sequence
  ENSG00000187957_23 (sequence is synthesized)
aaatgttcgttttgtggaaaagaaactagttaaatttactattcctaacccgaatgaaattagcctttgccttattctgtgcatgggtaagtaacttatttctgcactgttttgttgaac

SEQ ID NO: 688692 - DNA, 120 bp, Artificial Sequence
  ENSG00000187957_24 (sequence is synthesized)
tttgtggaaacattctttcgagtttgtttttgtcattttcgtaacagtcgtcgaactaggcctcaaaaacatacgtaacgaaaaggcctagcgaggcaaattctgattgatttgaatcta

SEQ ID NO: 688693 - DNA, 120 bp, Artificial Sequence
  ENSG00000187957_25 (sequence is synthesized)
tatttttctttaaaaagtcaagggttctatattgtgagtaaattaaatttacatttgagttgtttgttgctaagaggtagtaaatgtaagagagtactggttccttcagtagtgagtatt

SEQ ID NO: 688694 - DNA, 120 bp, Artificial Sequence
  ENSG00000187957_26 (sequence is synthesized)
tctcatagtgcagctttatttatctccaggatgtttttgtggctgtatttgattgatatgtgcttcttctgattcttgctaatttccaaccatattgaataaatgtgatcaagtcaagga

SEQ ID NO: 688695 - DNA, 120 bp, Artificial Sequence
  ENSG00000187957_27 (sequence is synthesized)
atctctcggccctttcttgtctagatcatattatcttaccttgataaacctttccaaattttctggtcttctatctcgttaaatgcttttgtttttttcctctcaacaaacctgccattc

SEQ ID NO: 688696 - DNA, 120 bp, Artificial Sequence
  ENSG00000187957_28 (sequence is synthesized)
tctgagactcccttaagctgcagaacgggaccgaattagcagagtctgactcagacgaagtgagatgggagtgccgaatgacctgagggcactgaattcacttgtgggggttactagctc

SEQ ID NO: 688697 - DNA, 120 bp, Artificial Sequence
  ENSG00000187957_29 (sequence is synthesized)
cttacgctttcatttcctcatgaatttagtcactgatcaaagctttactgagcccctgctgcacgccaggagccctgtgctgggggagcggatctgtgcggagtctactgtgatcttctc

SEQ ID NO: 688698 - DNA, 120 bp, Artificial Sequence
  ENSG00000187957_30 (sequence is synthesized)
ggagcactggggagaatgggcagctgttgggatgttgggaagtggtcaggagtctctgggaagaggtaatatgtgggctaggaacacatttccaaggtggagaaggagacaaagcttggg

SEQ ID NO: 688699 - DNA, 120 bp, Artificial Sequence
  ENSG00000187957_31 (sequence is synthesized)
tcatttcttcaggattatagccatcaaattaaccatggaaccctggaaatcaacaatttgcaggtctttctaattgacgtcttaactggattagaaggtttcccagtcagcccatgactc

SEQ ID NO: 688700 - DNA, 120 bp, Artificial Sequence
  ENSG00000187959_0 (sequence is synthesized)
gctatattgggcccacctgcctgggttccagcagcttccgcagccccagcaggagacggaagatgcaagaggtcattgcggggctagagcggttcacctttgccttcgagaaggatgtcg

SEQ ID NO: 688701 - DNA, 120 bp, Artificial Sequence
  ENSG00000187959_1 (sequence is synthesized)
agatgcagaagggcactgggctcctgcctttccagggcatggacaagtcggcctcagctgtgtgcaacttcttcactaaagggctctgtgagaaagggaaactctgccccttccgacatg

SEQ ID NO: 688702 - DNA, 120 bp, Artificial Sequence
  ENSG00000187959_2 (sequence is synthesized)
tgcaagaagggtgatcactgcaagttcctgcaccagtatgacctcaccaggatgcctgagtgctacttctactccaagtttggtgactgcagcaacaaggagtgttccttcctccatgtg

SEQ ID NO: 688703 - DNA, 120 bp, Artificial Sequence
  ENSG00000187959_3 (sequence is synthesized)
aagccagctttcaagtcccaggactgtccttggtatgaccaaggtttctgcaaggacggtcctctgtgtaaataccgccatgtccccagaataatgtgtctcaactatttagttggcttc

SEQ ID NO: 688704 - DNA, 120 bp, Artificial Sequence
  ENSG00000187959_4 (sequence is synthesized)
tgccccgagggacccaagtgccaatttgctcagaagattcgggaattcaagctgctgcctggaagcaagatctaagcgttgcttcttacctagcggggcactccaatgccacagacaggg

SEQ ID NO: 688705 - DNA, 120 bp, Artificial Sequence
  ENSG00000187959_5 (sequence is synthesized)
gggtgtcaggggccccagagggagaccccttccctcatgggaagaagcggggaggtgggacggctccctccctctgcaaacccccaccacccccagctctggcagaataacagccttgct

SEQ ID NO: 688706 - DNA, 120 bp, Artificial Sequence
  ENSG00000187959_6 (sequence is synthesized)
gcggttggtttgtgcaactctttgctaacctgtggctgtgtcttcatggacaaagtatgagcccaggtttggtaatgtctgtgtgcacgccacgtttgtgttcggtaacatgcaaagata

SEQ ID NO: 688707 - DNA, 120 bp, Artificial Sequence
  ENSG00000187959_7 (sequence is synthesized)
ctcctatttctgctgtggaagcttggaaacccccatccccaacagagtgcctgctctcctgcctggggatcaggggtcaagggcagggcctgtgccacagggccattatgccagtaagta

SEQ ID NO: 688708 - DNA, 120 bp, Artificial Sequence
  ENSG00000187959_8 (sequence is synthesized)
cagtaagactcaactgataggagttattaaaaactaacctatggtcaggagaagatgctcaatggtcttactatgggattctgtttcccaagttccacagtaagcctgctgtcatcctaa

SEQ ID NO: 688709 - DNA, 120 bp, Artificial Sequence
  ENSG00000187959_9 (sequence is synthesized)
gcagggtatgagtgaggtgcagaagtagcctgtggcaggcaggtttatttcttttgatcctgtaagtgaacgagctactaaaaatacaacaggtttggaggcagattggcaggaacgagt

SEQ ID NO: 688710 - DNA, 120 bp, Artificial Sequence
  ENSG00000187959_10 (sequence is synthesized)
tatccataaaacgggagcaaaatgtacataaaaccaaaagctcgagtctatgggaaatccacgatcattatactttgctcagctcctaccaacaggtctgggttgcacgtggcagctcct

SEQ ID NO: 688711 - DNA, 120 bp, Artificial Sequence
  ENSG00000187959_11 (sequence is synthesized)
ctgtatatggcttcagctgccgctatcaactggcaattaactcaaatggctttctttagcatgacagctgcttccctgtatggcttatttaaatctaagaatatactctgtaccttatgt

SEQ ID NO: 688712 - DNA, 120 bp, Artificial Sequence
  ENSG00000187961_0 (sequence is synthesized)
gggagtgagcgacacagagcgggccgccaccgccgagcagccctccggcagtctccgcgtccgttaagcccgcgggtcctccgcgaatcggcggtgggtccggcagccgaatgcagcccc

SEQ ID NO: 688713 - DNA, 80 bp, Artificial Sequence
  ENSG00000187961_1 (sequence is synthesized)
ggtccggcagccgaatgcagccccgcagcgagcgcccggccggcaggacgcagagcccggagcacggcagcccggggccc

SEQ ID NO: 688714 - DNA, 120 bp, Artificial Sequence
  ENSG00000187961_2 (sequence is synthesized)
cccggcaggctcggcccgcagcccccatggagggagccgtgcagctgctgagccgcgagggccacagcgtggcccacaactccaagcggcactaccacgatgccttcgtggccatgagcc

SEQ ID NO: 688715 - DNA, 120 bp, Artificial Sequence
  ENSG00000187961_3 (sequence is synthesized)
gcatgcgccagcgcggcctcctgtgcgacatcgtcctgcacgtggctgccaaggagatccgtgcgcacaaagtggtgctggcctcctgcagcccctacttccacgccatgttcacaaatg

SEQ ID NO: 688716 - DNA, 120 bp, Artificial Sequence
  ENSG00000187961_4 (sequence is synthesized)
agatgagcgagagccgccagacccacgtgacgctgcacgacatcgaccctcaggccttggaccagctggtgcagtttgcctacacggctgagattgtggtgggcgagggcaatgtgcaga

SEQ ID NO: 688717 - DNA, 120 bp, Artificial Sequence
  ENSG00000187961_5 (sequence is synthesized)
ctctgctcccagccgccagtctcctgcagctgaatggcgtccgagacgcttgctgcaagtttctactgagtcagctcgacccctccaactgcctgggtatccggggctttgccgatgcgc

SEQ ID NO: 688718 - DNA, 120 bp, Artificial Sequence
  ENSG00000187961_6 (sequence is synthesized)
actcctgcagcgacctgctcaaggccgcccacaggtacgtgctgcagcacttcgtggacgtggccaagaccgaggagtttatgctgctgcccctgaaacaggttctggaactggtctcta

SEQ ID NO: 688719 - DNA, 120 bp, Artificial Sequence
  ENSG00000187961_7 (sequence is synthesized)
gcgacagcctgaacgtgccttcagaggaggaggtctaccgagccgtcctgagctgggtgaaacacgacgtggacgcccgcaggcagcatgtcccacggctcatgaagtgtgtgcggctgc

SEQ ID NO: 688720 - DNA, 120 bp, Artificial Sequence
  ENSG00000187961_8 (sequence is synthesized)
ccttgctgagccgcgacttcctgctgggccacgtggatgccgagagcctggtgaggcaccaccctgactgcaaggacctcctcatcgaggccctgaagttccacctgctgcctgagcaga

SEQ ID NO: 688721 - DNA, 120 bp, Artificial Sequence
  ENSG00000187961_9 (sequence is synthesized)
ggggcgtcctaggcaccagccgcacacgtccccggcgctgcgagggggccgggcctgtgctttttgctgtgggcggcgggagcctgtttgccatccacggagactgtgaggcctacgaca

SEQ ID NO: 688722 - DNA, 120 bp, Artificial Sequence
  ENSG00000187961_10 (sequence is synthesized)
gcccgggtgggagtggctgcggtggggaaccggctctatgctgtgggcggctatgatgggacctcagacctggctaccgtggagtcctacgaccccgtgactaacacgtggcagccggag

SEQ ID NO: 688723 - DNA, 120 bp, Artificial Sequence
  ENSG00000187961_11 (sequence is synthesized)
gtgtccatgggcacaaggcgaagctgcctgggtgtggccgccttgcatggactcctgtactcggccggcggctatgacggggcctcctgcctgaacagtgctgaacgctacgaccccctg

SEQ ID NO: 688724 - DNA, 120 bp, Artificial Sequence
  ENSG00000187961_12 (sequence is synthesized)
accggaacgtggacgtccgtcgctgccatgagcacccggaggcgctatgtgcgagtggccacgcttgatgggaacctgtatgctgtgggcggctacgacagctcctcacacctggccact

SEQ ID NO: 688725 - DNA, 120 bp, Artificial Sequence
  ENSG00000187961_13 (sequence is synthesized)
gtggagaagtatgagccccaggtgaacgtgtggtcgcccgtggcgtccatgctgagccgacgcagctcagcgggcgtggccgtgctggagggtgccctgtacgtggcagggggcaacgac

SEQ ID NO: 688726 - DNA, 120 bp, Artificial Sequence
  ENSG00000187961_14 (sequence is synthesized)
ggcaccagctgcctcaactcggtagagagatacagtccaaaggctggagcctgggaaagcgtggcgcccatgaatatccgcaggagcacgcatgacctggtggccatggacggatggttg

SEQ ID NO: 688727 - DNA, 120 bp, Artificial Sequence
  ENSG00000187961_15 (sequence is synthesized)
tacgccgtggggggtaacgacggtagctccagcctcaactccatcgagaagtacaacccgaggaccaacaagtgggtggccgcatcctgcatgttcacccggcgcagcagtgtgggtgtg

SEQ ID NO: 688728 - DNA, 120 bp, Artificial Sequence
  ENSG00000187961_16 (sequence is synthesized)
gcggtgctggagctgctcaatttcccgccgccatcctccccgacgctgtccgtgtcctccaccagcctctgacccacctaccaccagaggcctgcagcctcccacatgccttaaggggac

SEQ ID NO: 688729 - DNA, 120 bp, Artificial Sequence
  ENSG00000187961_17 (sequence is synthesized)
cgtggcccccaccagggacgtcctgcgccatccgttcacgtctctgcatccattccttcatgtctttatttagttgtttatttatttagttatttatcttatttattgaggggtgaggag

SEQ ID NO: 688730 - DNA, 120 bp, Artificial Sequence
  ENSG00000187961_18 (sequence is synthesized)
tgccacggctgcccgtttacacctttagcgtctggtcctcctgcgtgtcctcccctccactgcctgcatggggggcgcggggagtgaccaggcgggggcctcaccgccccagggccgttg

SEQ ID NO: 688731 - DNA, 120 bp, Artificial Sequence
  ENSG00000187961_19 (sequence is synthesized)
cctgctcagaccttgcaggctgtggagcaagaggccctgggtctctccaagcagctgcagaccccagctcgaattttgcacatggcggggtcccgggaagggtggggagcagttgtcctt

SEQ ID NO: 688732 - DNA, 120 bp, Artificial Sequence
  ENSG00000187961_20 (sequence is synthesized)
cctgtcgtcgtctgccgtgtgccatctttcctggatcttgtagtgggtgcacacgcgtgcactgggaccccacacagcaatacgagtccaacttaataaacacatttctggggttcctca

SEQ ID NO: 688733 - DNA, 120 bp, Artificial Sequence
  ENSG00000187961_21 (sequence is synthesized)
cgcgtccgttaagcccgcgggtcctccgcgaatcggcggtgggtccggcagccgaatgcagcccaccccaccccagtctttgtctttgactcccgaccccgttttgttcctgacacagcc

SEQ ID NO: 688734 - DNA, 120 bp, Artificial Sequence
  ENSG00000187961_22 (sequence is synthesized)
ctgcccacaatccttagtgcctgctgtgtgtccccgagacctttctggatctgggccccccaggagcctcgtctgtggctcctgactctgctcggcccctcccagtatgaacactcagcc

SEQ ID NO: 688735 - DNA, 120 bp, Artificial Sequence
  ENSG00000187961_23 (sequence is synthesized)
cggcctcctgtgcgacatcgtcctgcacgtggctgccaaggagatccgtgcgcacaaagtggtgctggcctcctgcagcccctacttccacgccatgttcacaagcaagtacccgcctgg

SEQ ID NO: 688736 - DNA, 120 bp, Artificial Sequence
  ENSG00000187961_24 (sequence is synthesized)
aggcaagtttgtgtcaccatcacaggggtcgtatctgatggggtgttaaaggaggtgatccgcgaggccgtttcaccccaggccactgccacactgggcctgaactcttggctttgctgc

SEQ ID NO: 688737 - DNA, 120 bp, Artificial Sequence
  ENSG00000187961_25 (sequence is synthesized)
cccagtgccctttcctctctcgggtccttacccccagtccagaggctgggcccaggtgggtgtgcacccagggttgttcaggcagccagggtcctgtgcccaccagcgggccctgcctgg

SEQ ID NO: 688738 - DNA, 120 bp, Artificial Sequence
  ENSG00000187969_0 (sequence is synthesized)
aattctttctaagccgcccaaagcggggttgcgccggggcctccggggccgaggtgggcctgctcattggaagatcgcatcgcagccatgagcagtaaggatttcttcgcgtgtggacac

SEQ ID NO: 688739 - DNA, 120 bp, Artificial Sequence
  ENSG00000187969_1 (sequence is synthesized)
tctggccattgggctcggggatgccctagaggaggagctggagggcgaagaggtggaggccatggcagaggttctcaatgtggttccaccaccctatcttacacctgttactgctgtggt

SEQ ID NO: 688740 - DNA, 120 bp, Artificial Sequence
  ENSG00000187969_2 (sequence is synthesized)
gagtccggtcgtaatgctaagaactgtgtccttctcggaaacatctgctacaactgtgggagaagcggccacatcgccaaagactgtaaggatcctaaacgagagagacgccaacactgt

SEQ ID NO: 688741 - DNA, 120 bp, Artificial Sequence
  ENSG00000187969_3 (sequence is synthesized)
ctaggacatctggctcgtgactgtgatcgtcagaaagagcagaaatgctactcttgcggcaaacttgggcacattcagaaagactgcgcccaggtcaagtgttaccgatgcggcgagatt

SEQ ID NO: 688742 - DNA, 120 bp, Artificial Sequence
  ENSG00000187969_4 (sequence is synthesized)
ggccacgtggccatcaattgcagcaaggcgaggccaggtcaactgctaccgctgcggcaaatcccgacatctagccaaggaatgtcccagtgaggttaccacttaaatcttcccccccac

SEQ ID NO: 688743 - DNA, 120 bp, Artificial Sequence
  ENSG00000187969_5 (sequence is synthesized)
cccccacccttttgctgattgataattgtattattttctccgaaaacttcactcaccgaaaggtcgatagattgaggctactctcaggcaagtgagctttaattaccatgttaaaggagg

SEQ ID NO: 688744 - DNA, 120 bp, Artificial Sequence
  ENSG00000187969_6 (sequence is synthesized)
aaagagctagaaaaaaaaacctcaaaaaagttaatcattggtagatgccccacaattaacgtgttgcttctgccccacgggcaaatctagttattaaatagtcattctgagcaccaatca

SEQ ID NO: 688745 - DNA, 120 bp, Artificial Sequence
  ENSG00000187980_0 (sequence is synthesized)
atgctcattgcaacttccttcttcctttttttctcatcggtggtggcagcccccacccacagcagtttctggcagtttcagaggagggtcaaacacatcacggggcgaagtgccttcttc

SEQ ID NO: 688746 - DNA, 120 bp, Artificial Sequence
  ENSG00000187980_1 (sequence is synthesized)
aagctgaaggagttcagctgccagcctgtgttgaacagctaccagttccacatcgtcaatggcgcagtggtttgtggatgcacccttggtcctggtgccagctgccactgcaggctgaag

SEQ ID NO: 688747 - DNA, 120 bp, Artificial Sequence
  ENSG00000187980_2 (sequence is synthesized)
gcctgtgagtgtgacaagcaatccgtgcactgcttcaaagagagcctgcccacctatgagaaaaacttcaagcagttctccagccagcccaggtgtggcagacataagccctggtgctag

SEQ ID NO: 688748 - DNA, 120 bp, Artificial Sequence
  ENSG00000187980_3 (sequence is synthesized)
acccctcacacacaggtgaaggcgtggctgtagaacctcagaccccctggtctcctcaggaatgaaggtcattgccatcctcaccctcctcctcttctgctcccccacccacagcagttt

SEQ ID NO: 688749 - DNA, 120 bp, Artificial Sequence
  ENSG00000187980_4 (sequence is synthesized)
gttcttccactgggagggaggacaaaatgtctcccgcagggcagctcacccttcagcattctgaccaaggggactccctgtcgttcagcatcagagggctggagagcagaaatgggaaag

SEQ ID NO: 688750 - DNA, 120 bp, Artificial Sequence
  ENSG00000187980_5 (sequence is synthesized)
atgagatgcctgccctgcaggagctggcattctgtggagtggggaggactacaaatgcatggatatagaagtaagagacacattagactgtagtaagtgctatgatgcagtaaaacaaag

SEQ ID NO: 688751 - DNA, 120 bp, Artificial Sequence
  ENSG00000187980_6 (sequence is synthesized)
ggacgggatagagatgcacccaaccccacatcccagggtttccaggaggggagaagccccaggatctaccccaaactctctcttcacccccactgcaaaccgggacacagagcagacttg

SEQ ID NO: 688752 - DNA, 120 bp, Artificial Sequence
  ENSG00000187980_7 (sequence is synthesized)
agcgccaggcccatgcccagctctagctggcaacaaagccaccactttccttgcccctctgcgtcctcagtttttatgatgtcattcttagcttttcttatcaagaggcagaatctgttt

SEQ ID NO: 688753 - DNA, 120 bp, Artificial Sequence
  ENSG00000187980_8 (sequence is synthesized)
tccccatcccatgaatctgaactggtcttgtggcttagtttggtcaatagaatgttgtgggagggatggtttaccagttttgagctaggcctcaggaggtctagggcatgtctactctct

SEQ ID NO: 688754 - DNA, 120 bp, Artificial Sequence
  ENSG00000187980_9 (sequence is synthesized)
cttaggacagctgcccccaccctgcaaaaaagcctgggctagcctgctggaggatgagagcccacctggatcagttgtctcagctgatttcagacacgtgagagagagctcagcgagact

SEQ ID NO: 688755 - DNA, 120 bp, Artificial Sequence
  ENSG00000187980_10 (sequence is synthesized)
cagcttgtagctgactacagatgtgtgagggaacctggctgagaccaaaacaactgtccagctgagcccaggctaaactgccaacatgcagaattgtgagctaaataaaggctgctgttc

SEQ ID NO: 688756 - DNA, 120 bp, Artificial Sequence
  ENSG00000187980_11 (sequence is synthesized)
taagtcactgggttttggtatggtttgttaggcagccataactaacaggtgtaattggtccttattcccttattcactgagagtgatgggttctcagccctgagctggacttggaggcca

SEQ ID NO: 688757 - DNA, 120 bp, Artificial Sequence
  ENSG00000187980_12 (sequence is synthesized)
agtggacatggcctttgttccttaccttgaaggtgtggaaggaggtcaagttcatggaataatggagaacacacagctgtaatcgtttgcttgttcagggaacacacatttattgagcac

SEQ ID NO: 688758 - DNA, 120 bp, Artificial Sequence
  ENSG00000187980_13 (sequence is synthesized)
ttgctatgtgccaggcacagtgccaggcagtagggatccagatatttaaagaaaacaaacaaaaatcaggtccaaaactcctggggagaatgctgagagtggtatcagcttttaggaatt

SEQ ID NO: 688759 - DNA, 120 bp, Artificial Sequence
  ENSG00000187980_14 (sequence is synthesized)
cagacacaaaatctggattgaaaaatggacagatgtgaagacagaaaaagacaccagatgtggagtgtcagtggagggtctgggggcccaggctcctgcgctctggctggctcagcttgt

SEQ ID NO: 688760 - DNA, 120 bp, Artificial Sequence
  ENSG00000187980_15 (sequence is synthesized)
actatcatgtgggtgactggcctgctcttctgtcccacacacatgggtggaaattgcaactgcagatgggcagcttgaggtttacgaacatcagggagactgtaagccggccatgaggga

SEQ ID NO: 688761 - DNA, 120 bp, Artificial Sequence
  ENSG00000187980_16 (sequence is synthesized)
agcagctgtagaaaggtgggcatggaaccaaggtggccaggcccaagccagcaggcacccccccaccttggggatcctgaccactgcagagaccagctccagactgtgaaggtgcctggc

SEQ ID NO: 688762 - DNA, 120 bp, Artificial Sequence
  ENSG00000187980_17 (sequence is synthesized)
tgaccgacacaatggaggaagaggggtgagggccaggcttagggtgggggatagggttcccgtgtgagatccaggccgtgtttttaaaaaaaatttttgagacagagtctcactctgtca

SEQ ID NO: 688763 - DNA, 120 bp, Artificial Sequence
  ENSG00000187980_18 (sequence is synthesized)
atgagccactgcacccagccccaggccatctttttcactccctcctctcttccatcccctaaatctataagacagaaatgatgggcccttgatggtatgcaagccccatttgtttggcat

SEQ ID NO: 688764 - DNA, 120 bp, Artificial Sequence
  ENSG00000187980_19 (sequence is synthesized)
tgatgccctgattcttggagagctgagatgggagtgtagaagaatgggcagactctctctgggaaagcctactgtcctcgaagggaaatcatccattccatgagcacatgttactgaaga

SEQ ID NO: 688765 - DNA, 120 bp, Artificial Sequence
  ENSG00000187980_20 (sequence is synthesized)
cctactccaagccaggccctctgcaccagactccacggagctcttggaccaaagggaaaacaagtaagcaggggattgcagaacaagctgggggtgccaggattggggtgggcatgggga

SEQ ID NO: 688766 - DNA, 120 bp, Artificial Sequence
  ENSG00000187980_21 (sequence is synthesized)
gcaatgcccacctcctggaggatgagggaagctttcctgaggactgctgggggtctgacatctcatctgagacttgaagatgaggaggagttaggagggccggtggggccatgcagagcc

SEQ ID NO: 688767 - DNA, 120 bp, Artificial Sequence
  ENSG00000187980_22 (sequence is synthesized)
tcccaggttgaggtctggagaaaagcagcatatgtctatgcaagctccttgtccacctgccttgcccatctctgctgaaggctctttatcatttgtccctgcagcccaaaaacctgggtg

SEQ ID NO: 688768 - DNA, 120 bp, Artificial Sequence
  ENSG00000187980_23 (sequence is synthesized)
ttgaattatcatattccacatcccacacccaatctgttggcactaccttcacaatgcatctagattctgtatttataaaatgcttccatcaaatgtttacatggaaaaaaaaaaagagag

SEQ ID NO: 688769 - DNA, 120 bp, Artificial Sequence
  ENSG00000187987_0 (sequence is synthesized)
ctgcggttgtcaaggattcagagcagatgtgatctgcgctaggtggcatctcctctcacggatgcctcgatctcggggtttccagaagaaaagatcaagggagaattatcaagaatagat

SEQ ID NO: 688770 - DNA, 120 bp, Artificial Sequence
  ENSG00000187987_1 (sequence is synthesized)
tatttttctgaatagttaaacctttgatggccataaccttgacccttcagactgcagagatgcaggaaggacttctggcagtgaaggtaaaggaggaagaggaggaacattcctgtgggc

SEQ ID NO: 688771 - DNA, 120 bp, Artificial Sequence
  ENSG00000187987_2 (sequence is synthesized)
cagaatcaggcctgtcaagaaataaccctcataccagagagatctttcgtagacgcttcaggcagttctgctatcaggagtcccctgggccccgggaggctcttcaaagactccaggagc

SEQ ID NO: 688772 - DNA, 120 bp, Artificial Sequence
  ENSG00000187987_3 (sequence is synthesized)
tctgccatcagtggctgagaccagagatgcacaccaaggagcagatcctagagctgctggtgctggagcagttcctgactatcctgcctgaggagctccaggcctgggtcagacagcacc

SEQ ID NO: 688773 - DNA, 120 bp, Artificial Sequence
  ENSG00000187987_4 (sequence is synthesized)
gtcctgtgagtggagaggaggcagtgactgtgctggaggatttggagagagagctggatgacccaggagagcaggtcctgagccatgctcatgaacaggaagagtttgtaaaggagaagg

SEQ ID NO: 688774 - DNA, 120 bp, Artificial Sequence
  ENSG00000187987_5 (sequence is synthesized)
caactccaggagcagctcaggagtcatcaaatgaccaattccaaaccttggaagagcaacttgggtataatttgcgagaggtgtgcccagttcaagagattgatggcaaggctgggactt

SEQ ID NO: 688775 - DNA, 120 bp, Artificial Sequence
  ENSG00000187987_6 (sequence is synthesized)
ggaatgtggagttagccccaaagagggagatttctcaggaagtgaaatctcttatacaagttcttggaaaacagaatggtaatattactcagattcctgagtatggagatacctgtgacc

SEQ ID NO: 688776 - DNA, 120 bp, Artificial Sequence
  ENSG00000187987_7 (sequence is synthesized)
gtgagggcagattggaaaagcaaagggtgagctcttcagtggagagaccctatatctgtagtgaatgtggaaaaagcttcacccagaattccatccttatcgagcaccagagaacacaca

SEQ ID NO: 688777 - DNA, 120 bp, Artificial Sequence
  ENSG00000187987_8 (sequence is synthesized)
caggtgagaagccttatgaatgtgatgagtgtgggcgggccttcagccagaggtcaggcctattccagcaccagagactccacactggggagaagcgctaccagtgcagtgtttgtggca

SEQ ID NO: 688778 - DNA, 120 bp, Artificial Sequence
  ENSG00000187987_9 (sequence is synthesized)
aagccttcagccagaatgccgggcttttccatcacctcagaattcacactggggagaagccttaccagtgcaatcagtgcaataagagttttagtcgacgttcagtcctcattaagcatc

SEQ ID NO: 688779 - DNA, 120 bp, Artificial Sequence
  ENSG00000187987_10 (sequence is synthesized)
agagaattcacactggagagagaccttatgaatgtgaagaatgtggcaagaacttcatttaccattgcaacctaatccagcatcggaaagtccacccagtggctgaatcaagctagctcc

SEQ ID NO: 688780 - DNA, 120 bp, Artificial Sequence
  ENSG00000187987_11 (sequence is synthesized)
ttggaacaggtaggggataatatttcttactttgtccctgctgtgtcctctagcatagaaaagttcaagggaaagccagtaaaaattcccttacttttatgcagagagaagcataatatc

SEQ ID NO: 688781 - DNA, 120 bp, Artificial Sequence
  ENSG00000187987_12 (sequence is synthesized)
ttaaatacatctgccgagttctctgatcagtgacatccacagctttgcaatactgaatgttgcctcttgtgttgatttcatcatgtatgctgtagacctagtttcacacacatctgtgca

SEQ ID NO: 688782 - DNA, 120 bp, Artificial Sequence
  ENSG00000187987_13 (sequence is synthesized)
tttctatttcaggaaaacttcttcatcctagtttttaaaaactttttttaaaagtttaaaatagttatatgtaggctgagtacaaaataatctcaaatgcagttcaccgagtatttaaaa

SEQ ID NO: 688783 - DNA, 120 bp, Artificial Sequence
  ENSG00000187987_14 (sequence is synthesized)
attaacttaaaaataattgtaataaaattcataatataggtttcctgacttctttccattcacataaaatatgataatttgttttgtaacctacaaaaaggggcagatgaatcctcctat

SEQ ID NO: 688784 - DNA, 120 bp, Artificial Sequence
  ENSG00000187987_15 (sequence is synthesized)
ataaatgtagatttatagtaagttagatttctatagattttttagttagcctttaggaaccaaggaactgaagcagccatatgttattagcagctcagtggctcctcataacaaatattg

SEQ ID NO: 688785 - DNA, 120 bp, Artificial Sequence
  ENSG00000187987_16 (sequence is synthesized)
ctcatgattttaaatttacgcagaggctaagaaacttagctaaaaatctgatatctcacctcagatttcttattggaaaatacaggcctctttgtatttttcccgtaacatataatgagc

SEQ ID NO: 688786 - DNA, 120 bp, Artificial Sequence
  ENSG00000187987_17 (sequence is synthesized)
atttttttgtttttgcctttttctcctttattcaatattttgtatggaaaatttgaaacatattcaagattgaagagaagagtatgatcactctttcatgttgattgtttttataacctc

SEQ ID NO: 688787 - DNA, 120 bp, Artificial Sequence
  ENSG00000187987_18 (sequence is synthesized)
cacattttctcagcatttactattgattaccaccaagatcataaataaaaaaatttatttcccttaacattgacttagtaactctttacaaagctttacacaaggtccaggagacaaaga

SEQ ID NO: 688788 - DNA, 120 bp, Artificial Sequence
  ENSG00000187987_19 (sequence is synthesized)
aatggaaaacctatggtgaaaacaatctggtttggaatacacccaaatacccaatacatagcaagtaactttagaataacagaatcactctaagggaccttagagatcacttctgcttgc

SEQ ID NO: 688789 - DNA, 120 bp, Artificial Sequence
  ENSG00000187987_20 (sequence is synthesized)
tcttatttgacagataagagaaaaggaagttctgggaagtaactaagatcatacagccagttaaaagcagagctggaactagaaccctgtctcctacttcctagtgtaacattctattaa

SEQ ID NO: 688790 - DNA, 120 bp, Artificial Sequence
  ENSG00000187987_21 (sequence is synthesized)
gccactggaggcattatatcaccaaataaaaattacaagtatatggaatttataggatttataagtcactgaagttgctcaacaaacccacccatttatatgtttcaataaagcacaact

SEQ ID NO: 688791 - DNA, 120 bp, Artificial Sequence
  ENSG00000187987_22 (sequence is synthesized)
cctctatttaatttacagtggagtccaggaaagactcttctcatttattcctcattgaaagcattttatttttgtaattattatttttagcttttaaaatttaatttactcagtaggact

SEQ ID NO: 688792 - DNA, 120 bp, Artificial Sequence
  ENSG00000187987_23 (sequence is synthesized)
tttttaaaaagataattcattcttcacctggttcaaaaatcaaaataatacaaaaaggtctactttccctttataagtagccattgtactagtttcttatgtatctttcagtgtttcttt

SEQ ID NO: 688793 - DNA, 120 bp, Artificial Sequence
  ENSG00000187987_24 (sequence is synthesized)
atgtaaatataggcaaatatgaatgtataatcttatttcttccattactcaggaagatggcatattatttatactcttctaataccttgctgttttcatgaaagaatataatctttagag

SEQ ID NO: 688794 - DNA, 120 bp, Artificial Sequence
  ENSG00000187987_25 (sequence is synthesized)
atgtccacatcataacagaacttcttcattctttttataagtgaatagaattttatttgttcatactccatagtttaacaaactcctatagatgaaaaatctcactattttaaaatgtta

SEQ ID NO: 688795 - DNA, 120 bp, Artificial Sequence
  ENSG00000187987_26 (sequence is synthesized)
gcatttccggcctttgtagtttatcattctttgggctgcggttgtcaaggattcagagcagatgtgatctgcgctaggtggcatctcctctcacggatgcctcggtcctgagccatgctc

SEQ ID NO: 688796 - DNA, 120 bp, Artificial Sequence
  ENSG00000187987_27 (sequence is synthesized)
acttacacttggagccctgagacccactgtaggcatctgcaaacaacagcaacaacaaagtgggatggaaagaaaaaagaacaaaatataagaacataaaaaagaatcagacagaaggta

SEQ ID NO: 688797 - DNA, 120 bp, Artificial Sequence
  ENSG00000187994_0 (sequence is synthesized)
aggccaggtcatgactcactggcttcctgcaacctgacgatggcccagccagaagacaaggcacctgaagtccccacagagggggtgaggtgaacaaagcagacaggacccctctagggg

SEQ ID NO: 688798 - DNA, 120 bp, Artificial Sequence
  ENSG00000187994_1 (sequence is synthesized)
tcctcagcaccctagagccacttactcgcctgcagaggacatggggggtgtggcatgtgccagagctggatacccaggatgcggaggcccttgtggggctgtggccactagggagtttct

SEQ ID NO: 688799 - DNA, 120 bp, Artificial Sequence
  ENSG00000187994_2 (sequence is synthesized)
tggtcacaggacgtgaccccagccaggccctggtgttgaggtcaggacctttaccaggagaagtcaatacctaccagatccagaagattcccagaggtgtgtccctggaatcctccaacc

SEQ ID NO: 688800 - DNA, 120 bp, Artificial Sequence
  ENSG00000187994_3 (sequence is synthesized)
tctgcatgccagacctgccccatctcctggcctttctatcagccagcagggatgttctgcccagaaccctgctcttgccccctcccactctagggcccagagatgaacacacagatcctg

SEQ ID NO: 688801 - DNA, 120 bp, Artificial Sequence
  ENSG00000187994_4 (sequence is synthesized)
tgcagatcggcagggtccaacaggacaccccagggaaggtgctttccattgtgaaccagctctacctggagacccacagaggctgggggagggagcagacccctcaagaaacagagccag

SEQ ID NO: 688802 - DNA, 120 bp, Artificial Sequence
  ENSG00000187994_5 (sequence is synthesized)
aggctgctcagagacatgatccagcccccaggaaccctgcgcctcacggggtctcctgggtgaaaggcccgctcagcccggaagtggaccatcctgggccggctctcgccagcctactgg

SEQ ID NO: 688803 - DNA, 120 bp, Artificial Sequence
  ENSG00000187994_6 (sequence is synthesized)
aagaggaggaggaagaccttgaaggaaaggaggaaggaagggaggacgaccctgaagaggaaggccctgaggacgtgctcaccattcacgtccagtctctggtcagggcccggagcagct

SEQ ID NO: 688804 - DNA, 120 bp, Artificial Sequence
  ENSG00000187994_7 (sequence is synthesized)
ttctgggggtccccacgggtctggggacccggccacggagctgcttcaggatgtgcggcacctccttactgacctccaggatcacctggcaaaggactcctacatcagggctgtctttgg

SEQ ID NO: 688805 - DNA, 120 bp, Artificial Sequence
  ENSG00000187994_8 (sequence is synthesized)
aagcaggggtcctgggctccccaagaaggacgaggatccaggccccgcgctggagacggcggtgtgccaggcggtgctggcgcccctgaagccggccctgtggacacgactccgcacact

SEQ ID NO: 688806 - DNA, 80 bp, Artificial Sequence
  ENSG00000187994_9 (sequence is synthesized)
cactccgagcaccggagctgcggcggctgcggcggcgacagacagccctgcgggcgggggcggggcctccgggggcacag

SEQ ID NO: 688807 - DNA, 120 bp, Artificial Sequence
  ENSG00000187994_10 (sequence is synthesized)
ccgcatccacgagcgccttgcgcacctccacgctgcctgcgccccgcgccgcaaggtggcgctcctcttggaggtgtgcagagatgtctatgcgggcctggctcgaggcgagaaccaaga

SEQ ID NO: 688808 - DNA, 120 bp, Artificial Sequence
  ENSG00000187994_11 (sequence is synthesized)
tcccctgggggccgacgccttcctgccggcgctgaccgaggaactcatctggagcccggacattggggacacgcagctggacgtagagtttcttatggagctcttagatccagatgagct

SEQ ID NO: 688809 - DNA, 120 bp, Artificial Sequence
  ENSG00000187994_12 (sequence is synthesized)
gcggggagaggctgggtactacctgaccacgtggtttggggcgctgcaccacattgcccactaccagcccgaaacagaccgcgctccccgggggctcagctccgaggcccgcgcctccct

SEQ ID NO: 688810 - DNA, 120 bp, Artificial Sequence
  ENSG00000187994_13 (sequence is synthesized)
gcaccagtggcaccgcaggcggacgctgcacagaaaggatcatcccagagcccaggccaacctgccctttaaggagccatgggcagaagagactgtgacagggaccagtgacaactaggg

SEQ ID NO: 688811 - DNA, 120 bp, Artificial Sequence
  ENSG00000187994_14 (sequence is synthesized)
caggagtttgagaccagcctgggcaaaacagtgggacccccatctaccaaaaaaaaaaaaaaacaaaaattagccgggcgtggtggcgtactcctgtggtaccagctactcaggaggctt

SEQ ID NO: 688812 - DNA, 120 bp, Artificial Sequence
  ENSG00000187994_15 (sequence is synthesized)
tgcagttttagacaggcgtatcagagaaagcctcactgaggtgacatctgcagaaaggcctgaaggaggggaggggaagggaggagcagagtgggtattaggaagagcattccgagaagc

SEQ ID NO: 688813 - DNA, 120 bp, Artificial Sequence
  ENSG00000187994_16 (sequence is synthesized)
aggatgagccagtgcaaaggcccagaggtaggctgttcccttttcctgggacccctccctcctccttgctgctcctaaaccacataggtcaggagtctggactgacccaggtacgtctgg

SEQ ID NO: 688814 - DNA, 120 bp, Artificial Sequence
  ENSG00000187994_17 (sequence is synthesized)
cacataggtcaggagtctggactgacccaggtacgtctggcatcttgcttgaggaacagggggttttgttttgttttgaaagaacgtctctgtctgttgcccaggctggagtgtagtggc

SEQ ID NO: 688815 - DNA, 120 bp, Artificial Sequence
  ENSG00000187994_18 (sequence is synthesized)
caagccccctgcctctgcctaccaagtagctgagactacaggcacctaccaccgtgcctgtctaatttttaaaattttttataaagatgaggtctctctttgttgcccaggctggtctca

SEQ ID NO: 688816 - DNA, 84 bp, Artificial Sequence
  ENSG00000187994_19 (sequence is synthesized)
attgtgatcgtttttcccaaagaatgtatcacatgctaacaaaccatatatttatgtatttcattgttcatagtaactacaatt

SEQ ID NO: 688817 - DNA, 120 bp, Artificial Sequence
  ENSG00000187994_20 (sequence is synthesized)
ccaaagaatgtatcacatgctaacaaaccatatatttatgtatttcattgttcatagtaactacaatttaaaaaactaaaaagaaacaagtgaggccgggtgcggttgctcatgcctgta

SEQ ID NO: 688818 - DNA, 120 bp, Artificial Sequence
  ENSG00000187994_21 (sequence is synthesized)
acaccatctcaaaaataaataaataaataaaaagaaacaagtgaagttaacgttaataataatatatttgatttaacacaatgtatcccaaatattatcacttcaacatgtatccatatt

SEQ ID NO: 688819 - DNA, 120 bp, Artificial Sequence
  ENSG00000187994_22 (sequence is synthesized)
catctgaggcactaagggggacccttccctaagacaccccactgacactgtggctcccacctctttattctcagggatgttctgcccagaaccctgctcttgccccctcccactctaggg

SEQ ID NO: 688820 - DNA, 120 bp, Artificial Sequence
  ENSG00000187994_23 (sequence is synthesized)
cccagagatgaacacacaggtgaggcacggttctctaaagagggcacagccaacctgccaatttccttgctccaagggaatgaatggggctttggggcccagactactgggtttgaggag

SEQ ID NO: 688821 - DNA, 120 bp, Artificial Sequence
  ENSG00000187994_24 (sequence is synthesized)
aatatagaactggagactagagagagctgggggcctggactttgtagtcccagagggaggaggggatgggggcctgtattcctaggtcctaacagaggagaggattggaggaggaaggaa

SEQ ID NO: 688822 - DNA, 120 bp, Artificial Sequence
  ENSG00000187994_25 (sequence is synthesized)
ctgggggtcccggacgcctgggcctaagtgagaaggggactaggggcctggactcctgggtctgactgaggaggggccaggagctaagcctcagcacctccagcaatgaagctgggaagt

SEQ ID NO: 688823 - DNA, 120 bp, Artificial Sequence
  ENSG00000187994_26 (sequence is synthesized)
gagggggtgaggtgaggctactagggctgaggctatgccctccttcccctgcatccagaaaccctttccatccaatacctccctcactacagaatcctgaatcacatctctgagcctctg

SEQ ID NO: 688824 - DNA, 120 bp, Artificial Sequence
  ENSG00000187994_27 (sequence is synthesized)
ggagcagctacgtggccaggcagtaccgaagccttcgggatcacctggcaaaggactcctacatcagggctgtctttggaagcaggggtcctgggctccccaagaaggacgaggatccag

SEQ ID NO: 688825 - DNA, 120 bp, Artificial Sequence
  ENSG00000187994_28 (sequence is synthesized)
gcggacgctgcacagaaaggatcatcccagagcccaggtgactgcccatctggctgcaagtagaagggagggtgagacctggtgcccttctgacccagctcccacctctccccacaggcc

SEQ ID NO: 688826 - DNA, 88 bp, Artificial Sequence
  ENSG00000187994_29 (sequence is synthesized)
taccagatccagaagattcccagaggtaaggcacctcccctgaggttccagcccacagtcaattgatcactaagaactatcagctgga

SEQ ID NO: 688827 - DNA, 120 bp, Artificial Sequence
  ENSG00000187994_30 (sequence is synthesized)
gtctagcgtggtggggagagccttgagagttggagccaggcgggagagggtagcactggtgggaggaatctatgcggtcctgaagattctggtaggaggcgctgtcatgcccgacaaggt

SEQ ID NO: 688828 - DNA, 120 bp, Artificial Sequence
  ENSG00000187997_0 (sequence is synthesized)
gccaggaactaggaggttctcactgcccgagcagaggccctacacccaccgaggcatggggctccctgggctgttctgcttggccgtgctggctgccagcagcttctccaaggcacggga

SEQ ID NO: 688829 - DNA, 120 bp, Artificial Sequence
  ENSG00000187997_1 (sequence is synthesized)
ggaagaaattacccctgtggtctccattgcctacaaagtcctggaagttttccccaaaggccgctgggtgctcataacctgctgtgcaccccagccaccaccgcccatcacctattccct

SEQ ID NO: 688830 - DNA, 120 bp, Artificial Sequence
  ENSG00000187997_2 (sequence is synthesized)
ctgtggaaccaagaacatcaaggtggccaagaaggtggtgaagacccacgagccggcctccttcaacctcaacgtcacactcaagtccagtccagacctgctcacctacttctgctgggc

SEQ ID NO: 688831 - DNA, 120 bp, Artificial Sequence
  ENSG00000187997_3 (sequence is synthesized)
gtcctccacctcaggtgcccatgtggacagtgccaggctacagatgcactgggagctgtggtccaagccagtgtctgagctgcgggccaacttcactctgcaggacagaggggcaggccc

SEQ ID NO: 688832 - DNA, 120 bp, Artificial Sequence
  ENSG00000187997_4 (sequence is synthesized)
gtcctcgggcagcccacctatcaccaacagcctgatcgggaaggatgggcaggtccacctgcagcagagaccatgccacaggcagcctgccaacttctccttcctgccgagccagacatc

SEQ ID NO: 688833 - DNA, 120 bp, Artificial Sequence
  ENSG00000187997_5 (sequence is synthesized)
ggactggttctggtgccaggctgcaaacaacgccaatgtccagcacagcgccctcacagtggtgcccccaggtggtgaccagaagatggaggactggcagggtcccctggagagccccat

SEQ ID NO: 688834 - DNA, 120 bp, Artificial Sequence
  ENSG00000187997_6 (sequence is synthesized)
ccttgccttgccgctctacaggagcacccgccgtctgagtgaagaggagtttggggggttcaggatagggaatggggaggtcagaggacgcaaagcagcagccatgtagaatgaaccgtc

SEQ ID NO: 688835 - DNA, 120 bp, Artificial Sequence
  ENSG00000187997_7 (sequence is synthesized)
cagagagccaagcacggcagaggactgcaggccatcagcgtgcactgttcgtatttggagttcatgcaaaatgagtgtgttttagctgctcttgccacaaaaaaaaaaaaaaaaaaaaaa

SEQ ID NO: 688836 - DNA, 120 bp, Artificial Sequence
  ENSG00000187997_8 (sequence is synthesized)
gtggtgcccccaggtgagagggcccttggatttccagaggggcagctggcgcttctgtgccgggagggtgctagtgtccaagacacaggtcgatgggaagtgggacagctctacccggcc

SEQ ID NO: 688837 - DNA, 120 bp, Artificial Sequence
  ENSG00000187997_9 (sequence is synthesized)
actgctgagagcagagagggcacaggaggcaaccatgcccaccctggcccctgcctaaaggaagcccaacccagctgcctccgccccctcccaggagggttgcccagggcacccaccatc

SEQ ID NO: 688838 - DNA, 120 bp, Artificial Sequence
  ENSG00000187997_10 (sequence is synthesized)
gtgctggttggcagccttgcctccactgcggccatcacctccaggatgctgggctggaccacgtgggccaggtaggaaatgggtgctcgatgcagggaggagggagagctgctgatggcc

SEQ ID NO: 688839 - DNA, 120 bp, Artificial Sequence
  ENSG00000187997_11 (sequence is synthesized)
tgagaggtccaaccgggccctggctgcagagctcaggtggtggggcttgcagggcagggctgtggccagggcaaagagcggccatcaccgcttacgcatgactcgaaggtgtttatgagg

SEQ ID NO: 688840 - DNA, 120 bp, Artificial Sequence
  ENSG00000187997_12 (sequence is synthesized)
acctactgtgtgccatgtgcctactgaggcttacacattcaaggcgttatcggaccctgaccagtgctcccaggtgccctgtaacacagtctgctggcctctgggagggcagtctcctaa

SEQ ID NO: 688841 - DNA, 120 bp, Artificial Sequence
  ENSG00000187997_13 (sequence is synthesized)
tttatggggtctgagcagggattgcagggatgatgcctccaggagaccaaggtggaccaggagctcctgccttctgtgagaaccaccttgggcagtctttccgaggtggtggcaagagcc

SEQ ID NO: 688842 - DNA, 120 bp, Artificial Sequence
  ENSG00000187997_14 (sequence is synthesized)
tggggcccagcctcccagggtcccctctccaaggccatggctttactaacatgtaaagtgaccaaggcctttgtagtgtctgagtgcaggcaccacaggcctgtgtgctctgcctgtctg

SEQ ID NO: 688843 - DNA, 120 bp, Artificial Sequence
  ENSG00000187997_15 (sequence is synthesized)
gctttggtggtggccagccctgcctctgtgaactcatctctctttgtttgggagacactgccgtgtcctggttctcatcctctgcccgtggcccaggcccttacgtggctctaccaggag

SEQ ID NO: 688844 - DNA, 120 bp, Artificial Sequence
  ENSG00000187997_16 (sequence is synthesized)
tctgtccttggcactttcccatctcacttctaccaagtctgttctttccagaagccagactcgtgggtgagccatgtcacctcgccgagcctcagtttttccttctgtaaaatggggtac

SEQ ID NO: 688845 - DNA, 120 bp, Artificial Sequence
  ENSG00000187997_17 (sequence is synthesized)
agccttcatttagtggggtgagtaagcctcatgtctcttctgctggggcactgatgtgcttggcaccataaaactcccagaggcaggccgggcacagtggctcatgcctggaatctcagc

SEQ ID NO: 688846 - DNA, 120 bp, Artificial Sequence
  ENSG00000187997_18 (sequence is synthesized)
ccgtctcaaaacaaacgaacactctcagacgcctcgggaggggatggctgggaggtgagcctgcctgacttgagtctccactgctttgtcaaggtggtgaccagaagatggaggactggc

SEQ ID NO: 688847 - DNA, 120 bp, Artificial Sequence
  ENSG00000187997_19 (sequence is synthesized)
cctcccaggagggttgcccagggcacccaccatcgtgctggttggcagccttgcctccactgcggccatcacctccaggatgctgggctggaccacgtgggccaggtggtgaccagaaga

SEQ ID NO: 688848 - DNA, 120 bp, Artificial Sequence
  ENSG00000187997_20 (sequence is synthesized)
ggcatggggctccctgggctgttctgcttggccgtgctggctgccagcagcttctccaaggcacgggaggaagagacagactttcaccatgttggctacactggttttgaactcctgacc

SEQ ID NO: 688849 - DNA, 120 bp, Artificial Sequence
  ENSG00000187997_21 (sequence is synthesized)
ggacctcccaaacactgggattacaggtgtttgccaccgagcctggccaaaccagtaccttcttaaggtgcttgatcaatgtcggtttctttcttcctccttggaccttttcatctccca

SEQ ID NO: 688850 - DNA, 84 bp, Artificial Sequence
  ENSG00000188000_0 (sequence is synthesized)
tgagacagtaaacatagctccctgcagttgcaaattcctgggctcaagtgatccttccatctcagcctcccgagtagctgggac

SEQ ID NO: 688851 - DNA, 120 bp, Artificial Sequence
  ENSG00000188000_1 (sequence is synthesized)
ggtgtccaccaccatgcctggctaatgacctcttcttttgtagatacatcagctacatggaagcaggaaaccaaacaggatttttagagtttatccttctcggactctctgaggatccag

SEQ ID NO: 688852 - DNA, 120 bp, Artificial Sequence
  ENSG00000188000_2 (sequence is synthesized)
ctgaggatccagaactacagccgttcatatttgggctgttcctgtccatgtacctggtgacggtgctgggaaacctgctcatcatcctggccatcagctctgactcccacctccacaccc

SEQ ID NO: 688853 - DNA, 120 bp, Artificial Sequence
  ENSG00000188000_3 (sequence is synthesized)
gtacttcttcctctccaacctgtcctgggttgacatctgtttcagcacttgcatcgtccccaagatgctggtgaacatccagaccgagaacaaagccatctcctacatggactgcctcac

SEQ ID NO: 688854 - DNA, 120 bp, Artificial Sequence
  ENSG00000188000_4 (sequence is synthesized)
tcacacaggtctatttctccatgttttttcctattctggacacgctactcctgaccgtgatggcctatgaccggtttgtggctgtctgccaccctctgcactatatgatcatcatgaacc

SEQ ID NO: 688855 - DNA, 120 bp, Artificial Sequence
  ENSG00000188000_5 (sequence is synthesized)
cccacctctgtggcctcctggtttttgtcacctggctcattggtgtcatgacatccctcctccatatttctctgatgatgcatctaatcttctgtaaagattttgaaattccacattttt

SEQ ID NO: 688856 - DNA, 120 bp, Artificial Sequence
  ENSG00000188000_6 (sequence is synthesized)
tctgcgaactgacgtacatcctccagctggcctgctctgataccttcctgaacagcacgttgatatactttatgacgggtgtgctgggcgtttttcccctccttgggatcattttctctt

SEQ ID NO: 688857 - DNA, 120 bp, Artificial Sequence
  ENSG00000188000_7 (sequence is synthesized)
attcacgaattgcttcatccataaggaagatgtcctcatctgggggaaaacaaaaagcactttccacctgtgggtctcacctctccgtcgtttctttattttatgggacaggcattgggg

SEQ ID NO: 688858 - DNA, 120 bp, Artificial Sequence
  ENSG00000188000_8 (sequence is synthesized)
tccacttcacttctgcggtgactcactcttcccagaaaatctccgtggcctcggtgatgtacactgtggtcacccccatgttgaaccccttcatctacagcctgaggaacaaggatgtga

SEQ ID NO: 688859 - DNA, 120 bp, Artificial Sequence
  ENSG00000188000_9 (sequence is synthesized)
agggagccctggggagtctcctcagcagggcagcctcttgtttgtgatggatcccttggccccaggactaagaagttttgtgagcaccaatggcaaaaatgttttattttgaaattctta

SEQ ID NO: 688860 - DNA, 120 bp, Artificial Sequence
  ENSG00000188000_10 (sequence is synthesized)
ctctttaaaattaaaaacatttttttatactttgagagtacaaatgcagatttcttaacatgcatttgcataagggtgaagtctgagcttttggcgtaccaattacctgaatagtgaaca

SEQ ID NO: 688861 - DNA, 120 bp, Artificial Sequence
  ENSG00000188000_11 (sequence is synthesized)
attctgttataatgcccatgcgtatacattgtttagctcccaattataagtgagatcatgcagcatttgactttgtttctttactaccttacttaagagaatggcttccagtcccatcga

SEQ ID NO: 688862 - DNA, 120 bp, Artificial Sequence
  ENSG00000188000_12 (sequence is synthesized)
tgttgctgcaaaagacatgatttcatccttttttatggctgagtagtactccattgtatatatcctcgatatctatatagatatagacatatgtagatacataccatgttttcttttttt

SEQ ID NO: 688863 - DNA, 120 bp, Artificial Sequence
  ENSG00000188000_13 (sequence is synthesized)
aaaaaaatttatttttatgtcagtagtttttggggtacatgtggtttttcattacacggatgagttctttagtggtgacttctgagtttttagtgtacccgtcacccaagtggtagtagt

SEQ ID NO: 688864 - DNA, 120 bp, Artificial Sequence
  ENSG00000188000_14 (sequence is synthesized)
ctcttattcctcacccccctcccaacctttctcccttcaagtcaccaaagttcattatattgttcatatccctttgtgtcctcatagcttagctcccacttataactgagaacatacgat

SEQ ID NO: 688865 - DNA, 120 bp, Artificial Sequence
  ENSG00000188000_15 (sequence is synthesized)
atgttcatatggatcttatgtatgttggttgaacatacaaacaagtccaggtttttcattcctgagttacttcacctagagtaatgacctccagttccatccaagttgctacaaaagaca

SEQ ID NO: 688866 - DNA, 120 bp, Artificial Sequence
  ENSG00000188000_16 (sequence is synthesized)
ctccagttccatccaagttgctacaaaagacattatttggttcctttttatggataagtagtattccatgctgtacatataccacaatctttatcactcattggttgatgggcacttagg

SEQ ID NO: 688867 - DNA, 120 bp, Artificial Sequence
  ENSG00000188000_17 (sequence is synthesized)
ttgctataaacatgcaggtgtatgtgtctttttcacataatgactttgtttcctttgggtagatacccagtagtggaactgctggactgaaaggtagttctacttttagttctttttttt

SEQ ID NO: 688868 - DNA, 120 bp, Artificial Sequence
  ENSG00000188000_18 (sequence is synthesized)
caggtgtgagccactgtgcctggccttctagttctttaagataccactttaaaaaaagtccagtcctccattgatggacacgtaggttgattccatatctttgctaatgtgaatagtgcc

SEQ ID NO: 688869 - DNA, 120 bp, Artificial Sequence
  ENSG00000188000_19 (sequence is synthesized)
ccatatctttgctaatgtgaatagtgccgtgataaacatgggggtgtaagttaacaattaatctccaagtaatttccttgatggcacttctgtcctatgtgctattcaaaaattgtgtcc

SEQ ID NO: 688870 - DNA, 120 bp, Artificial Sequence
  ENSG00000188000_20 (sequence is synthesized)
ttgatcatcgttcttaattctccattagtgagttctgaacttgggtttgaagcatttgctatagctttgttatctcaagtggtggcacagagttcttaagctattgattgttcactgact

SEQ ID NO: 688871 - DNA, 120 bp, Artificial Sequence
  ENSG00000188000_21 (sequence is synthesized)
ttatttctatgtgtttgcatgtgggtttttgttgtttgtgtgttcgatcatgaacagatcaacagtgtttatttgttttcctactggatgaagtatgattaaaatacgtatttaaatata

SEQ ID NO: 688872 - DNA, 120 bp, Artificial Sequence
  ENSG00000188000_22 (sequence is synthesized)
ccacactcatgcatcttagagaggagagttaggatgacttcatgacaagttccatctccccgcctttccctgctagattctgtcttcagcattcaacagtcaggggaggaagacgtcata

SEQ ID NO: 688873 - DNA, 120 bp, Artificial Sequence
  ENSG00000188000_23 (sequence is synthesized)
ccagcatttttttttttcaagcaatctttccatgatgagtacaaagccttggggaatatctggataaagtaaaattttctagaatgtgatctggacttgccacaaagaaacttcagatac

SEQ ID NO: 688874 - DNA, 120 bp, Artificial Sequence
  ENSG00000188001_0 (sequence is synthesized)
ctacttggtgaagtgagattcagactgagtggggtcacagcacagggcactgtcttgcctggctttatctgagccaatcacacctctcctggccactatctgtggtctagccccctttgt

SEQ ID NO: 688875 - DNA, 120 bp, Artificial Sequence
  ENSG00000188001_1 (sequence is synthesized)
gcagaaagagaaagaagagccttgaggaccagcctagtcaggctgaagaaatgtcaacaattgggagttttgaaggattccaggctgtgtctctgaagcaagagggagatgaccaaccct

SEQ ID NO: 688876 - DNA, 120 bp, Artificial Sequence
  ENSG00000188001_2 (sequence is synthesized)
ctgagactgaccacctatcgatggaggaagaggacccgatgccaagacagatttcaaggcagtcaagtgtgaccgaatcaactctttaccccaatccttatcatcagccttatatctcac

SEQ ID NO: 688877 - DNA, 120 bp, Artificial Sequence
  ENSG00000188001_3 (sequence is synthesized)
ggaagtactttgctacacggccgggggccattgagactgccatggaagacttgaaaggtcacgtagctgagacttctggagagaccattcaaggcttctggctcttgacaaagatagacc

SEQ ID NO: 688878 - DNA, 120 bp, Artificial Sequence
  ENSG00000188001_4 (sequence is synthesized)
actggaacaatgagaaggagagaattctactggtcacagacaagactctcttgatctgcaaatacgacttcatcatgctgagttgtgtgcagctgcagcggattcctctgagcgctgtct

SEQ ID NO: 688879 - DNA, 120 bp, Artificial Sequence
  ENSG00000188001_5 (sequence is synthesized)
atcgcatctgcctgggcaagttcaccttccctgggatgtccctggacaagagacaaggagaaggccttaggatctactgggggagtccggaggagcagtctcttctgtcccgctggaacc

SEQ ID NO: 688880 - DNA, 120 bp, Artificial Sequence
  ENSG00000188001_6 (sequence is synthesized)
catggtccactgaagttccttatgctactttcactgagcatcctatgaaatacaccagtgagaaattccttgaaatttgcaagttgtctgggttcatgtctaagcttgttccagctatcc

SEQ ID NO: 688881 - DNA, 120 bp, Artificial Sequence
  ENSG00000188001_7 (sequence is synthesized)
agaatgcccacaagaattcaactggatctggaagaggaaagaaactgatggtgttaactgaacccattttgattgagacctacacagggctgatgtcattcattggaaaccgcaacaaac

SEQ ID NO: 688882 - DNA, 120 bp, Artificial Sequence
  ENSG00000188001_8 (sequence is synthesized)
ttggctattcccttgcccgtgggagtattggtttttgagagtctttttggtaccataagcatatcatccacagatatgtcactttgaaaattccagtttgacccacgctatttttggact

SEQ ID NO: 688883 - DNA, 120 bp, Artificial Sequence
  ENSG00000188001_9 (sequence is synthesized)
gaaacaattaattatttttaaatgacgctttatgatttagaaatttagtatttccgaaaatttaaaagcttgattggactgatagatacacactttagacctcatacaagaataatcaaa

SEQ ID NO: 688884 - DNA, 120 bp, Artificial Sequence
  ENSG00000188001_10 (sequence is synthesized)
ttttcttaaaactagaaaataaatgctgctgagcctatcaaatactgttatcaaatgagtgcctgatcatcaactcaggaaagaagactctaagtcctgttgcttcagctctctaaatgt

SEQ ID NO: 688885 - DNA, 120 bp, Artificial Sequence
  ENSG00000188001_11 (sequence is synthesized)
aggcttttttttttttttttttttaggtcttggtcttcagccctcttatcctgatttattctctcattggggtctcactgtctctagtattttagctaccacttgataaggatgacttcc

SEQ ID NO: 688886 - DNA, 120 bp, Artificial Sequence
  ENSG00000188001_12 (sequence is synthesized)
aaatttatattcccattcccaatatttattccaagactcagttttgcatttctgactgctaatcatctatatatcagtgtcccagtggcctcttaattgagcattatcaaaatcctgtgg

SEQ ID NO: 688887 - DNA, 120 bp, Artificial Sequence
  ENSG00000188001_13 (sequence is synthesized)
tatttatatggtcccagttatccatccctgaagtctgtcaattttgatttctctaaattccttgccatgacatcctatatatgatcacatctctatacggcttagcattgtattccgatg

SEQ ID NO: 688888 - DNA, 120 bp, Artificial Sequence
  ENSG00000188001_14 (sequence is synthesized)
cccagatgtcaaacttgaagctcattctcttatcaaaattgttcatgtattcctcctttccattcttatagctgtattattagatcaggtttttaattctgctcaaccaattattaccac

SEQ ID NO: 688889 - DNA, 120 bp, Artificial Sequence
  ENSG00000188001_15 (sequence is synthesized)
agcctgttaaatggaatccctactccaaggctgactgtttcaatctatcctacacttggtttctagctcatttacttataccatcttttgttcaaatatatattttttaataacagacct

SEQ ID NO: 688890 - DNA, 120 bp, Artificial Sequence
  ENSG00000188001_16 (sequence is synthesized)
ttttcttctaaagaaatcttttgtagaagcagcatatacgaagcagataaaagtaggttcaatgcggttggagtgaagatgagaatgccacaggcatctttctttctaggcctcagaggt

SEQ ID NO: 688891 - DNA, 120 bp, Artificial Sequence
  ENSG00000188001_17 (sequence is synthesized)
gctgcatatggaatgtccatggatcgcagagggttttgaagaccatgttttcaaaaacactgtcttaacactctattgtcattgctcttttccctcttatttcctctttgtctcttcccg

SEQ ID NO: 688892 - DNA, 120 bp, Artificial Sequence
  ENSG00000188001_18 (sequence is synthesized)
acttagatctaattttcaacaacccaggaaattatctcatatgtttgcatctctcaagtttcttttcttttttctttcagagtcttattttatctaaatttatgtagaaaaaaaagcttt

SEQ ID NO: 688893 - DNA, 120 bp, Artificial Sequence
  ENSG00000188001_19 (sequence is synthesized)
gaatgttgactacatagacattactacaataagctttttgcctttcccaagactcaaaattgacacatctttgttgatgtttaagttgaaattccagccaacttttttttgacttttatg

SEQ ID NO: 688894 - DNA, 120 bp, Artificial Sequence
  ENSG00000188001_20 (sequence is synthesized)
tgaagtttaaagtcttttctttgaaaagcttgcttcctcaatttcaaagatttgtcctctgatatatttataaacatcaatttaatgcagacattcaaaccctaaaccttgaataactct

SEQ ID NO: 688895 - DNA, 120 bp, Artificial Sequence
  ENSG00000188001_21 (sequence is synthesized)
tattttattttgtctttgtttacttccattaatttttttttctttccctctcttccgcctttacagcacccactttttcttccccccatgatggcaaatattgttatagtccccaaggca

SEQ ID NO: 688896 - DNA, 120 bp, Artificial Sequence
  ENSG00000188001_22 (sequence is synthesized)
attgttttggcactggttctgaagcaggcataattggcaaattattataatactgctgcccgaaaatccccatttgcctcaagatagtggcatttattggcagaagcctctgaaatgtcc

SEQ ID NO: 688897 - DNA, 120 bp, Artificial Sequence
  ENSG00000188001_23 (sequence is synthesized)
agcacattcttttgagttaccatttaaggatcagcctgacaatcgacttctctctgcacatttgccccctttgtaacctaagccagactgttcccaaatgaccttctaaaggacacagtg

SEQ ID NO: 688898 - DNA, 120 bp, Artificial Sequence
  ENSG00000188001_24 (sequence is synthesized)
caccatcatcaatggaaacagttcagaaaggatgacaggagggagatgtttcttagttctgagagccagtctgtaacaatgggataagcatttaatggaatcaaagctgttttgcataaa

SEQ ID NO: 688899 - DNA, 120 bp, Artificial Sequence
  ENSG00000188001_25 (sequence is synthesized)
gagtgaactcagagacgacaagagggtctttatgaattcccttcacattttgtaaaaactgtcatatataggctatccccttaattgataaatgggatctagaaagcggtattatgacca

SEQ ID NO: 688900 - DNA, 120 bp, Artificial Sequence
  ENSG00000188001_26 (sequence is synthesized)
gagggtgagaagatttaggaatttggatagcagttcaagataagaaagaacttcttatagttataaattttcaatgatggaatgggttgcttctttaaacagtgagcccaccatcacttg

SEQ ID NO: 688901 - DNA, 120 bp, Artificial Sequence
  ENSG00000188001_27 (sequence is synthesized)
gtatgttcaaggaaagactagataaagtcgatattgtgagaggaattgctgtatgataccgtttggagaaatgattgacataatcttttaaggccggtgaccctatcattttccaaataa

SEQ ID NO: 688902 - DNA, 120 bp, Artificial Sequence
  ENSG00000188001_28 (sequence is synthesized)
ttgttgctagtacttagttaattagacccatttttttcttaggaaagagttggatcaatcatgggagaccctgaaaaatttccttacctttcctaaggtttaatttcctcttctgcgaaa

SEQ ID NO: 688903 - DNA, 120 bp, Artificial Sequence
  ENSG00000188001_29 (sequence is synthesized)
tggagacaattatattacttttgcttatttcataaagatcttgtgaggattcaatgaaatgaggttaaattcttttattaaacagaaagttttgagtatttgcctagagagtgatgtgac

SEQ ID NO: 688904 - DNA, 120 bp, Artificial Sequence
  ENSG00000188001_30 (sequence is synthesized)
ttttgcagcagaaggtgggaaaacatccaagggaactacatttcctccagaaattgtttcttcattaccatcgacctactgattatggttttctcattttacacttggtgttcttacttg

SEQ ID NO: 688905 - DNA, 120 bp, Artificial Sequence
  ENSG00000188001_31 (sequence is synthesized)
ggatctttgtccttaagctcaacagggagccacaacccaggggacctatgtgtacacttggagtttttatcagactatcatttgaacttaccactacagtttagcaaatggcatgatgag

SEQ ID NO: 688906 - DNA, 120 bp, Artificial Sequence
  ENSG00000188001_32 (sequence is synthesized)
tttgattgataataggagtagacgcaagatacattaagtagagtacaaagcatttcataaccaaaatgtcatggttggaggtcttcattattcggtctttatctcattcaggaatttcca

SEQ ID NO: 688907 - DNA, 120 bp, Artificial Sequence
  ENSG00000188001_33 (sequence is synthesized)
cttgaaaaatctctgataagctttatttcagaaactgcttgaacagctccactgacaaatgcctcactatcttctgatacatcgtaggcagttctgagggtgagaaagttcaaagcagat

SEQ ID NO: 688908 - DNA, 120 bp, Artificial Sequence
  ENSG00000188001_34 (sequence is synthesized)
agatgttttaacacaacaggaggacttttaaacaatcaccaggactcactcctcggtggtcaattgggcctgtttggaggcctgacctttggtcatcttaaggtcatctaaggcagaaaa

SEQ ID NO: 688909 - DNA, 120 bp, Artificial Sequence
  ENSG00000188001_35 (sequence is synthesized)
gagaagctcacttataagttggcacttctgaatcatttgccttgaggtccattttttattcagcctttgtttaaaccttcttaggaagccagtttgtagagttctggggataagaaggca

SEQ ID NO: 688910 - DNA, 120 bp, Artificial Sequence
  ENSG00000188001_36 (sequence is synthesized)
gaaaaaccatgtcaattcagtgcttttatttcacagaaaatgaagcaaaggcctagaaactagaaagacatttctcaaaaagaagatggtgaacttttggaaatactgagattagactac

SEQ ID NO: 688911 - DNA, 120 bp, Artificial Sequence
  ENSG00000188001_37 (sequence is synthesized)
attttccaatttctatccctagcccactgctctttccaatataatatctgtattccatgggaaagacatgccatctgaattgatgtatcgtagttgttgagataattttgaaatgagaaa

SEQ ID NO: 688912 - DNA, 120 bp, Artificial Sequence
  ENSG00000188001_38 (sequence is synthesized)
acaatagggcacagtcgtttgggaagaatttccagaaattgccatcattttcttaaaggctaaggacacttatagagctctccgatttcctatctgataaaaaaagcccaaacaaagctg

SEQ ID NO: 688913 - DNA, 120 bp, Artificial Sequence
  ENSG00000188001_39 (sequence is synthesized)
cggaagctggcagagccagcagatattttgtaaggcagcttcacctctgctggcattttgtggggcaggagagggggagggcaaaggtattaaatttaggcttaaaagctcctcagaaat

SEQ ID NO: 688914 - DNA, 120 bp, Artificial Sequence
  ENSG00000188001_40 (sequence is synthesized)
tctttacacacaagagaccaagttggagaaaagaagatgacttgtgccaaggggaagaaagagagagactaatgcctgtggttttcaaaggttaacaacaacataaaaaagccaaggtat

SEQ ID NO: 688915 - DNA, 120 bp, Artificial Sequence
  ENSG00000188001_41 (sequence is synthesized)
ttgcacagggatgaatgctcattggctcttggccaacaattatacaagggcttgtgcccacatcctgtagctgtggtttagggacgctgctcatgagtgacttcttatgcttagtggcag

SEQ ID NO: 688916 - DNA, 120 bp, Artificial Sequence
  ENSG00000188001_42 (sequence is synthesized)
gaaactttagtcactgatgtgtaaactcacctttggtctgcacctcccacaacgtgctccgaaagcagttaggggactaggcctcttgatttccttgtagataccagttccccagaagct

SEQ ID NO: 688917 - DNA, 120 bp, Artificial Sequence
  ENSG00000188001_43 (sequence is synthesized)
aaggaaaaactctgaggccttggagttactgagagtggaccaatacttgtcttattctacctgattttggcaactgcttagggttcttctgtatccacaaaaaggaattatgatatcctc

SEQ ID NO: 688918 - DNA, 120 bp, Artificial Sequence
  ENSG00000188001_44 (sequence is synthesized)
tgctaaaccctctctttagcctcaaagcccaagaccaaaaaaaatgagccatatttcattgcaggcctgctgccaatgtgaaatataaggaataaagtcatgagactgcttctcaaccta

SEQ ID NO: 688919 - DNA, 120 bp, Artificial Sequence
  ENSG00000188001_45 (sequence is synthesized)
agacttgcttcaggttccaacccggtaaggcaaatggagaggctgtcaggagaccagaagtttacctcagctattgcaccgacgcaccacgtgctctggtgcacatccaccgcctcttcc

SEQ ID NO: 688920 - DNA, 120 bp, Artificial Sequence
  ENSG00000188001_46 (sequence is synthesized)
tgcctcagtttctccttttgtaaaacaacagcttgtaaaggcctggggatcttctcatccacgggagttttctaaggatgcaggcgaaagaggatctcactctgttgcctaggctggaat

SEQ ID NO: 688921 - DNA, 75 bp, Artificial Sequence
  ENSG00000188001_47 (sequence is synthesized)
caggcgaaagaggatctcactctgttgcctaggctggaatgtggtggcatgatcacagctcactgcagccacaaa

SEQ ID NO: 688922 - DNA, 120 bp, Artificial Sequence
  ENSG00000188001_48 (sequence is synthesized)
ctggctgaatgtagaggactctgaaggcttaggcaagaggggagttataaggcaccacagaaccctgaatgactgcatggagcagaacccttcgcaaacctgctcttcaggcctcctttt

SEQ ID NO: 688923 - DNA, 120 bp, Artificial Sequence
  ENSG00000188001_49 (sequence is synthesized)
tgagacagctggaaaagattctttctccttttctagcaattacttcctccctccgactcaaatgcctactcagcctctagtattcagtggctgctgcagtttgcggggttcttctccaga

SEQ ID NO: 688924 - DNA, 120 bp, Artificial Sequence
  ENSG00000188001_50 (sequence is synthesized)
ccatagatgcctcagtttttgcagtacctggaggtttcaccagtgaaagctctgaaacagcaaagatggcagcctgccctttcctctgggagttccatcctaggggtgtacagaactgtt

SEQ ID NO: 688925 - DNA, 120 bp, Artificial Sequence
  ENSG00000188001_51 (sequence is synthesized)
gctggcctgaatacacctgcatgaggtggctgaagactccagttggattatttatgaggatggcctgtgcaaaaagacacccagagatttcatgctgttgattcacagaaagcctgttcc

SEQ ID NO: 688926 - DNA, 120 bp, Artificial Sequence
  ENSG00000188001_52 (sequence is synthesized)
tcttcactccgtagagtcctcagagtctggatcatcccttacagaagatccttgataatatttctgatatacctccaaggttccgtttgtcaaatgtgtgcgacccttctgataagtcac

SEQ ID NO: 688927 - DNA, 120 bp, Artificial Sequence
  ENSG00000188001_53 (sequence is synthesized)
cagaggtgatgagggagagagagaaagaaagcaaattacaactgtaaagagtctctgaacagtgaaagatcaaaacagacagtctctggctttactggatgagtcaccattgcagcccga

SEQ ID NO: 688928 - DNA, 120 bp, Artificial Sequence
  ENSG00000188001_54 (sequence is synthesized)
ggcttctgtacttagcagcagtcttcctgtctggaaaggaaacattgctcagattggagatactggccattttatagacttcaaagcaacttaggccactgaactgtcaggcgggaaaac

SEQ ID NO: 688929 - DNA, 120 bp, Artificial Sequence
  ENSG00000188001_55 (sequence is synthesized)
aaccatcatgatctacagaccaaccatttgtactcttttcttgtatttctatccatcttttcaaggggatcatgtaaatgaaccaatgttttagcaattaaatttaactttatactctta

SEQ ID NO: 688930 - DNA, 120 bp, Artificial Sequence
  ENSG00000188001_56 (sequence is synthesized)
agtttctgcattcccagtttttctggacattttaaacaagattgccatcgcaacccaaacctgacaggaccaaagccaacctcaactccttctgaacctggtcccactcttgctcttgat

SEQ ID NO: 688931 - DNA, 120 bp, Artificial Sequence
  ENSG00000188001_57 (sequence is synthesized)
agtatgacaaaaagaatgatatgaaagtgtgaaaagttgtttaagtaatcatgactagtctcctgggtgactggaaaatagagacagtagtggaagagaggagaacatgctcatggacag

SEQ ID NO: 688932 - DNA, 120 bp, Artificial Sequence
  ENSG00000188001_58 (sequence is synthesized)
atctccatctggaatgtgagaggatgagtactttgatccagttgtctgggttcatgtctaagcttgttccagctatccagaatgcccacaagaattcaactggatctggaagaggaaaga

SEQ ID NO: 688933 - DNA, 120 bp, Artificial Sequence
  ENSG00000188001_59 (sequence is synthesized)
aggcttgaaaaagaggtcaggccccaggagctgggctggagcagtgaggagtgtttcttccaagagaagatgactgcctgagaggattatttatgaggatggcctgtgcaaaaagacacc

SEQ ID NO: 688934 - DNA, 120 bp, Artificial Sequence
  ENSG00000188001_60 (sequence is synthesized)
agtttctccgaggccagatggtcacattgattttctggaatcattttgaataaaaatgagcgaggtggtgaacacaatgcaaggctctccacgtactgtctggtattgttcaaccagctc

SEQ ID NO: 688935 - DNA, 120 bp, Artificial Sequence
  ENSG00000188001_61 (sequence is synthesized)
ggatactccggaagacaatatttctcagcctccttgaggttaggttaggactgagttttatgtgatggaattttggccaatggaatctttggtaggcagcctgaaattgctcatcaagga

SEQ ID NO: 688936 - DNA, 120 bp, Artificial Sequence
  ENSG00000188001_62 (sequence is synthesized)
tgatgttataacatttctcctacagccccaaatctcccaactcctgcatgtgtgacctgagtaagactcggtgcaagaagacatcagtgttcccatctgtgaaatgaaggaattgacccc

SEQ ID NO: 688937 - DNA, 120 bp, Artificial Sequence
  ENSG00000188001_63 (sequence is synthesized)
cgaggatcttccatttctgacagtgctttggatttcattggttttgtcacaggtaccccccaaaagcctccatctttggataagtgattaaaactgctgagtaattttcaattaataaaa

SEQ ID NO: 688938 - DNA, 120 bp, Artificial Sequence
  ENSG00000188001_64 (sequence is synthesized)
agatgaaagaaaacaagtgacatgatgactagaaccgccaccactgaattttctaaactttaagaaaaggcaagaaaattgcttttagaagaagagaagttgagaatatgccccagtgaa

SEQ ID NO: 688939 - DNA, 120 bp, Artificial Sequence
  ENSG00000188001_65 (sequence is synthesized)
tcctccccacctgcagttatgaggtttccccatgccctcttttggacttgatgggggtcatttgggacaataaggcctgataactccttggacttaggaagcgagagagcaggaatcaag

SEQ ID NO: 688940 - DNA, 120 bp, Artificial Sequence
  ENSG00000188001_66 (sequence is synthesized)
taaacaaacatgcaggcccagaaagaacggatccattaagccagcaccaaggagaacatcttgacactttatggaatttcaaaaagtatgatatgatggcaataaagtggctcttcagca

SEQ ID NO: 688941 - DNA, 120 bp, Artificial Sequence
  ENSG00000188001_67 (sequence is synthesized)
attttgaatttgtcagcgtccccctcaaaaatcatgtatattctaccatttaagaagtcccatgtcttttctcagtcagttattgcttctgtggaaactgttattgtcatggcagctcct

SEQ ID NO: 688942 - DNA, 120 bp, Artificial Sequence
  ENSG00000188001_68 (sequence is synthesized)
ttcttcttgaaactgtctcccacctgaactgttctgttactgttcacctctttgatacctcctctctttctcttttaattcttaccatcagaatcttggtgtgacatcaatatccgtatt

SEQ ID NO: 688943 - DNA, 120 bp, Artificial Sequence
  ENSG00000188001_69 (sequence is synthesized)
gggtcttgaagaatattgaatccagaatccaacctttgatgcacacaaatgaggtatgacttggtgccaaggtcaacaagcaacctctgggccacgcaagaactagaagacaggcctgga

SEQ ID NO: 688944 - DNA, 120 bp, Artificial Sequence
  ENSG00000188001_70 (sequence is synthesized)
agatccaaactacttgccatcagtctgcttggataaccttttcctttggtttcagttcatctgctattattgcttagacgtatctaaaaaaaggcctagtgccttctctgaacaaaagta

SEQ ID NO: 688945 - DNA, 120 bp, Artificial Sequence
  ENSG00000188001_71 (sequence is synthesized)
cccctcaaggctaataactagaggtatattatgataatcttggttgtggagactgatattcaaaagcaacttcttatgaaaggaacaatacttagtccacatggggaaagatatttttaa

SEQ ID NO: 688946 - DNA, 120 bp, Artificial Sequence
  ENSG00000188001_72 (sequence is synthesized)
actctctgtaggactctatatttgcagataccttatcagaaagttgaaagcgatttgggatggggaattatctctaaatttatactcgagaatgtaaattacatacaaactaatgggact

SEQ ID NO: 688947 - DNA, 120 bp, Artificial Sequence
  ENSG00000188010_0 (sequence is synthesized)
gcaaccaagtcgcacctggagctgtcctagcgcctagttctctcccggccgcagagctggccgcccagggggagtcgcagagtttggaagatctctctaacacctctcggccaacttcag

SEQ ID NO: 688948 - DNA, 120 bp, Artificial Sequence
  ENSG00000188010_1 (sequence is synthesized)
aagtgtataagatcagctttatctttccaaatggagacaagtatgatggtgactgtacaagaacatcttctggaatctacgagagaaatggaataggtattcataccactcctaatggga

SEQ ID NO: 688949 - DNA, 120 bp, Artificial Sequence
  ENSG00000188010_2 (sequence is synthesized)
tggactggggacttacacattcccaaatggggcaaagtatactggaaatttcaatgaaaatagggtggaaggtgaaggggaatatactgatatccaaggactagaatggagtggtaactt

SEQ ID NO: 688950 - DNA, 120 bp, Artificial Sequence
  ENSG00000188010_3 (sequence is synthesized)
tcattttacagctgctccagacctgaaattaaagcttcacatgtagatgtgatgttaaattaaagttgaaatgtagtaattgaagcttttagttgtaaggaaagcaacttaatctgttat

SEQ ID NO: 688951 - DNA, 120 bp, Artificial Sequence
  ENSG00000188010_4 (sequence is synthesized)
ttgaaatgacttcatacactacccctataagtttgccaataaaaccatcacctgcttacacctttttgaactttatattcattgtcttacaattagtttaaaataaatgacatgattcaa

SEQ ID NO: 688952 - DNA, 120 bp, Artificial Sequence
  ENSG00000188010_5 (sequence is synthesized)
tctttttataacctttaagttaattcagaacccagataagccttgatctgaggatgatataaccaccgcaggcaacatgggaacttctagagaaaacaagaagaagacttcaaaaaacat

SEQ ID NO: 688953 - DNA, 120 bp, Artificial Sequence
  ENSG00000188010_6 (sequence is synthesized)
gctgtgatgtctcccagtggagacagggcacgaggtgcagggaagaggaggtggcctgagccaggacgatgaggatgcaatgttgaagaataagctggagaagagaagtaaccggcacta

SEQ ID NO: 688954 - DNA, 120 bp, Artificial Sequence
  ENSG00000188010_7 (sequence is synthesized)
tggaaaaaaccaaaacaaagcaaggagagaatgaacatatgccggtgaataatccttccacgcagatttaccagttgcaggccctagcctccgaactcaaaactggtttcacagaagcaa

SEQ ID NO: 688955 - DNA, 120 bp, Artificial Sequence
  ENSG00000188010_8 (sequence is synthesized)
tgcaagaactgtcaagaattcaacatggagaatatgctttggaagaaaaggttaagagctgcagatgttccatggaagaaaaagttactgagatgaagaattcattaaactatttcaagg

SEQ ID NO: 688956 - DNA, 120 bp, Artificial Sequence
  ENSG00000188010_9 (sequence is synthesized)
ctcccggccgcagagctggccgcccagggggagtcgcagagtttggaagatctctctaacacctctcggccaaatggtgactgtacaagaacatcttctggaatctacgagagaaatgga

SEQ ID NO: 688957 - DNA, 120 bp, Artificial Sequence
  ENSG00000188011_0 (sequence is synthesized)
agcccacactgcggagccaggcggcagcatggaccgggctggggcagacatgtgggccagcaccttcaccctggccatggccgagaggaagccccaggacgtctgggttctgctacctga

SEQ ID NO: 688958 - DNA, 120 bp, Artificial Sequence
  ENSG00000188011_1 (sequence is synthesized)
gcacagcctggtcccgggatgcctggacggcggtggtgtccagtacctgctggtggggctctcgaggctccagtgcggtcactgtccggggacctgggactcggcccatgtgcacgtcct

SEQ ID NO: 688959 - DNA, 120 bp, Artificial Sequence
  ENSG00000188011_2 (sequence is synthesized)
cttccacctgtggtgggacagggccagccaccgggggctggtgaagatgcgcatctggggccagcggtgcaggctgtgccccgcacccggggactgccaggtgaggcccccgggcgagca

SEQ ID NO: 688960 - DNA, 120 bp, Artificial Sequence
  ENSG00000188011_3 (sequence is synthesized)
gcccttcctcagcaggctggtcttgcacatcctgcaggactgctacggggatggccccggcccagcccggcaccccagggaggcctatgagggctgctgtgaggcctgtgagctgggggt

SEQ ID NO: 688961 - DNA, 120 bp, Artificial Sequence
  ENSG00000188011_4 (sequence is synthesized)
ctgcttcctccagaaggccccagaccccgcctggagcgccaacgccacaaaaggcaacttccccgccacggcctggggtggcactggcaccgtctccaggggcaaaccgctgtccacccc

SEQ ID NO: 688962 - DNA, 120 bp, Artificial Sequence
  ENSG00000188011_5 (sequence is synthesized)
tggcgacgaccttggcaagggtggcgttgtcatcgccatccccttctcccttgtgggtaccagcaatgaccaggtgcccatcgctgagggccctgccccccctgcgggggcctctctccc

SEQ ID NO: 688963 - DNA, 120 bp, Artificial Sequence
  ENSG00000188011_6 (sequence is synthesized)
tgtgactggcagctgtgaggccctggtcatcggccagggctccatcttcctgtctggggattcagtggccatgcctgggggcaaaggcttcccggtggccattggagaccccctcttcca

SEQ ID NO: 688964 - DNA, 120 bp, Artificial Sequence
  ENSG00000188011_7 (sequence is synthesized)
cggccccggcctcctcggcagcagcatccagaccttcgagctcaagggcttcctcttcaaaggccggggctccctctgcagcccggttggcgtggcccagggctggggccccatctccct

SEQ ID NO: 688965 - DNA, 120 bp, Artificial Sequence
  ENSG00000188011_8 (sequence is synthesized)
caacaatggcctcgtccctgtggggaaacacacgccaaccgtgttctactgtgtgggcctctcggccagcggggagggctccctcaccttcccctcctccctcaccagcatcttcaccaa

SEQ ID NO: 688966 - DNA, 120 bp, Artificial Sequence
  ENSG00000188011_9 (sequence is synthesized)
accgatggccctgtggccactaaagaggcctccatcaccttccccttcatctttactgatgtcaaggatgccgttgctgaggtggctgaaggcaacgggaaggaaggaggcggccagggc

SEQ ID NO: 688967 - DNA, 120 bp, Artificial Sequence
  ENSG00000188011_10 (sequence is synthesized)
ctcgtcccagtgggtcacgacgccctgccagagaccaatgctggtggcctcccctcccaggtcaagggctcccttgccctccccttccctgctgatgtccaaggcaaagatgcctttact

SEQ ID NO: 688968 - DNA, 120 bp, Artificial Sequence
  ENSG00000188011_11 (sequence is synthesized)
gacatcactgaaggcaaagagaaggaaggtggcctggtcaccgcgggtcacgacgcccctctggaggccaatgccgagggccccatcacggttagtgagggctgcatcaccatccccttc

SEQ ID NO: 688969 - DNA, 120 bp, Artificial Sequence
  ENSG00000188011_12 (sequence is synthesized)
gcagtcttcgatgtcataaagcgcaagggcggtggccacgttgcctacggcccccagggcaatggctgcttctcccaaggctattaccagaagaggcagctgaggtccaggttccacaag

SEQ ID NO: 688970 - DNA, 120 bp, Artificial Sequence
  ENSG00000188011_13 (sequence is synthesized)
gcccgctgtgggtgccgccgggaggaagacgagcgccctggccgtgcctgccgtaggccgcacgccgagccctacgaggacttctggatctgggtgtccatgaccgtgtgcgtcttctgg

SEQ ID NO: 688971 - DNA, 120 bp, Artificial Sequence
  ENSG00000188011_14 (sequence is synthesized)
ctgatgtgcatgtgtcggctgaaccccgggatctacccgcagcaagtgtgacgccccgaagttcaggcaaccctcgcctctgggaccccgcctcgcctctgagacaccccccaaccccgc

SEQ ID NO: 688972 - DNA, 120 bp, Artificial Sequence
  ENSG00000188011_15 (sequence is synthesized)
ctttgagatgcccgccccgcctccgagaccccgcctccacctccgagacccctttctctgagacccccgcctctgaggccccgccccccgcctccgagaccccgccctgcctctgagacc

SEQ ID NO: 688973 - DNA, 120 bp, Artificial Sequence
  ENSG00000188011_16 (sequence is synthesized)
ccgcctcacctctgagacaccccccaaccccacctttgagatgcccgccccgcctccgtggccccgcctccacctccgagaccccgcctccacctccgagacccctttctctgagacccc

SEQ ID NO: 688974 - DNA, 120 bp, Artificial Sequence
  ENSG00000188011_17 (sequence is synthesized)
gagacccctgcctctgaagccccgccccccgcctccgagaccccgcttcacctccgaggccccgccccccgcctccgagaccccgccccccgcctccgagaccccgcctcacctctgaga

SEQ ID NO: 688975 - DNA, 120 bp, Artificial Sequence
  ENSG00000188011_18 (sequence is synthesized)
ccgccagcagctcagcccctcctgtctcttgcccctggttttgtgggtctgccctgagctgtgcctgtgtgctccagcctcttcctatgtgtgtaacttcaataaaaccaagcaaagcca

SEQ ID NO: 688976 - DNA, 120 bp, Artificial Sequence
  ENSG00000188011_19 (sequence is synthesized)
ttcctttctgcttcccatttctcggagacaaatctggttgccatggagaccatgctgttgtcaaggtggctgattggccggcgcgggatgcggggacgtttccttgggcccccggcgggc

SEQ ID NO: 688977 - DNA, 120 bp, Artificial Sequence
  ENSG00000188011_20 (sequence is synthesized)
ccggtctgatgaccgccatggacaagccaatccctcccagtgctctccccaaacctctcctcgcctggtgacgcccagcagggctgcccgggccatgaccgcaggcctccgtgacatcct

SEQ ID NO: 688978 - DNA, 120 bp, Artificial Sequence
  ENSG00000188015_0 (sequence is synthesized)
aaatggctcaccaaggttgcacagctggcgacaggcagagaggatcccacaagtttttcttctgggtgcagcttcctcgagttcagggcaggaggcaggtgaggatggccaggcctctgg

SEQ ID NO: 688979 - DNA, 120 bp, Artificial Sequence
  ENSG00000188015_1 (sequence is synthesized)
agcaggcggtagctgccatcgtgtgcaccttccaggaatacgcagggcgctgtggggacaaatacaagctctgccaggcggagctcaaggagctgctgcagaaggagctggccacctgga

SEQ ID NO: 688980 - DNA, 120 bp, Artificial Sequence
  ENSG00000188015_2 (sequence is synthesized)
ttgcctgcctctgtctctactgccacgagtacttcaaggactgcccctcagagcccccctgctcccagtagcctctgctccagggggtgcgctggctgtcgggggctgggcatgtctccc

SEQ ID NO: 688981 - DNA, 120 bp, Artificial Sequence
  ENSG00000188015_3 (sequence is synthesized)
acaccccctcctaccctctctcctgtacccctttcaatctggacttgcccaggtcttctgcgatcagttaacccattttacctaggaggcccagagatgtgagggctccttcctcaggat

SEQ ID NO: 688982 - DNA, 120 bp, Artificial Sequence
  ENSG00000188015_4 (sequence is synthesized)
ccttgtggatgggaggaggcgggatctgctctgaggccctcgaggctcagcagagcgtgcaccaatgagaccacgatgggaaagggcctatttaactcctaataaaaaactggcatcagc

SEQ ID NO: 688983 - DNA, 120 bp, Artificial Sequence
  ENSG00000188021_0 (sequence is synthesized)
cggaggaggcccagagaccggagcgcggagacctcagccagcggcctacgcccaggcctttctccaccggaggaccagggaaccgcagtcttcatcacagaggtaccgtgctccgcgctc

SEQ ID NO: 688984 - DNA, 120 bp, Artificial Sequence
  ENSG00000188021_1 (sequence is synthesized)
cccgcctgacccggcccagcccgctgcggcggtgcctccttccttcctccttccctcgcgctctctctttcgcccgcccgcgccttccctgcccgcctgcgtcaccgcggccgccatggc

SEQ ID NO: 688985 - DNA, 120 bp, Artificial Sequence
  ENSG00000188021_2 (sequence is synthesized)
tgagaatggcgagagcagcggccccccgcgcccctcccgcggccctgctgcggcccaaggctcggctgctgccccggctgagcctaaaatcatcaaagtcacggtgaagactcccaaaga

SEQ ID NO: 688986 - DNA, 120 bp, Artificial Sequence
  ENSG00000188021_3 (sequence is synthesized)
gaaagaggagttcgcggtgcccgagaacagctcggttcagcagtttaaggaagcgatttcgaaacgcttcaaatcccaaaccgatcagctagtgctgatttttgccggaaaaatcttaaa

SEQ ID NO: 688987 - DNA, 120 bp, Artificial Sequence
  ENSG00000188021_4 (sequence is synthesized)
agatcaagataccttgatccagcatggcatccatgatgggctgactgttcaccttgtcatcaaaagccagaaccgacctcagggccagtccacgcagcctagcaatgccgcgggaactaa

SEQ ID NO: 688988 - DNA, 120 bp, Artificial Sequence
  ENSG00000188021_5 (sequence is synthesized)
cactacctcggcgtcgactcccaggagtaactccacacctatttccacaaatagcaacccgtttgggttggggagcctgggaggacttgcaggccttagcagcctgggcttgagctcgac

SEQ ID NO: 688989 - DNA, 120 bp, Artificial Sequence
  ENSG00000188021_6 (sequence is synthesized)
caacttctctgagctccagagccagatgcagcagcagcttatggccagccctgagatgatgatccaaataatggaaaatccctttgttcagagcatgctttcgaatcccgatctgatgag

SEQ ID NO: 688990 - DNA, 120 bp, Artificial Sequence
  ENSG00000188021_7 (sequence is synthesized)
gcagctcattatggctaatccacagatgcagcaattgattcagagaaacccagaaatcagtcacctgctcaacaacccagacataatgaggcagacactcgaaattgccaggaatccagc

SEQ ID NO: 688991 - DNA, 120 bp, Artificial Sequence
  ENSG00000188021_8 (sequence is synthesized)
catgatgcaagagatgatgagaaatcaagacctggctcttagcaatctagaaagcatcccaggtggctataatgctttacggcgcatgtacactgacattcaagagccgatgctgaatgc

SEQ ID NO: 688992 - DNA, 120 bp, Artificial Sequence
  ENSG00000188021_9 (sequence is synthesized)
cgcacaagagcagtttgggggtaatccatttgcctccgtggggagtagttcctcctctggggaaggtacgcagccttcccgcacagaaaatcgcgatccactacccaatccatgggcacc

SEQ ID NO: 688993 - DNA, 120 bp, Artificial Sequence
  ENSG00000188021_10 (sequence is synthesized)
accgccagctacccagagttctgcaactaccagcacgaccacaagcactggtagtgggtctggcaatagttccagcaatgctactgggaacaccgttgctgccgctaattatgtcgccag

SEQ ID NO: 688994 - DNA, 120 bp, Artificial Sequence
  ENSG00000188021_11 (sequence is synthesized)
catctttagtaccccaggcatgcagagcctgctgcaacagataactgaaaacccccagctgattcagaatatgctgtcggcgccctacatgagaagcatgatgcagtcgctgagccagaa

SEQ ID NO: 688995 - DNA, 120 bp, Artificial Sequence
  ENSG00000188021_12 (sequence is synthesized)
tccagatttggctgcacagatgatgctgaatagcccgctgtttactgcaaatcctcagctgcaggagcagatgcggccacagctcccagccttcctgcagcagatgcagaatccagacac

SEQ ID NO: 688996 - DNA, 120 bp, Artificial Sequence
  ENSG00000188021_13 (sequence is synthesized)
actatcagccatgtcaaacccaagagcaatgcaggctttaatgcagatccagcaggggctacagacattagccactgaagcacctggcctgattccgagcttcactccaggtgtgggggt

SEQ ID NO: 688997 - DNA, 120 bp, Artificial Sequence
  ENSG00000188021_14 (sequence is synthesized)
gggggtgctgggaaccgctataggccctgtaggcccagtcacccccataggccccataggccctatagtcccttttacccccataggccccattgggcccataggacccactggccctgc

SEQ ID NO: 688998 - DNA, 120 bp, Artificial Sequence
  ENSG00000188021_15 (sequence is synthesized)
agccccccctggctccaccggctctggtggccccacggggcctactgtgtccagcgctgcacctagtgaaaccacgagtcctacatcagaatctggacccaaccagcagttcattcagca

SEQ ID NO: 688999 - DNA, 120 bp, Artificial Sequence
  ENSG00000188021_16 (sequence is synthesized)
aatggtgcaggccctggctggagcaaatgctccacagctgccgaatccagaagtcagatttcagcaacaactggaacagctcaacgcaatggggttcttaaaccgtgaagcaaacttgca

SEQ ID NO: 689000 - DNA, 120 bp, Artificial Sequence
  ENSG00000188021_17 (sequence is synthesized)
tgcagccattgaaaggctgctgggctcccagccatcgtaatcacatttctgtacctggaaaaaaaatgtatcttatttttgataatggctcttaaatctttaaacacacacacaaaatcg

SEQ ID NO: 689001 - DNA, 120 bp, Artificial Sequence
  ENSG00000188021_18 (sequence is synthesized)
ttctttactttcattttgattcttttaaatctgtctagttgtaagtctaatatgatgcattttaagatggagtccctccctcctacttccctcactccctttctcctttgcttatttttc

SEQ ID NO: 689002 - DNA, 120 bp, Artificial Sequence
  ENSG00000188021_19 (sequence is synthesized)
ctaccttcccttcctcttgtctccccactccctccctctttgtttccttccttccttatttcctttagtttccttccttagccgttttgagtggtgggaatcaatgctgtttcactcaaa

SEQ ID NO: 689003 - DNA, 120 bp, Artificial Sequence
  ENSG00000188021_20 (sequence is synthesized)
agtgttgcatgcaaacacttctctttattctgcatttattgtgatttttggaaacaggtatcaaccttcacagttgggtgaacaagtgttgtcctacagatgtccaatttatttgcattt

SEQ ID NO: 689004 - DNA, 120 bp, Artificial Sequence
  ENSG00000188021_21 (sequence is synthesized)
ttaaacattagcctatgatagtaatttaatgtagaatgaagatattaaaaacagaagcaaattatttgaagctctctaatttgtggtacgatattgcttattgtgactttggcatgtatt

SEQ ID NO: 689005 - DNA, 120 bp, Artificial Sequence
  ENSG00000188021_22 (sequence is synthesized)
tttgctagcaaaatgctgtaagatttataccattgatcttttttgctatatttgtatacagtacagtaagcacaattggcactgtacatctaaaaatattacagtagaatctgagtgtaa

SEQ ID NO: 689006 - DNA, 120 bp, Artificial Sequence
  ENSG00000188021_23 (sequence is synthesized)
tatgtgtaaccaaaatgagaaagaatacaagaaatgtttctggagctagttatgtctcacaattttgtagaatcttacagcatctttgataaacttctcagtgaaaatgttggctaggca

SEQ ID NO: 689007 - DNA, 120 bp, Artificial Sequence
  ENSG00000188021_24 (sequence is synthesized)
agttcagttaaaatatagtagaaatgtttatcctggtatctctaagtatacatttaattgtacagaaaatttacagtgtaacattgtgtcaacatttgcagattgactgtatatgacctt

SEQ ID NO: 689008 - DNA, 120 bp, Artificial Sequence
  ENSG00000188021_25 (sequence is synthesized)
aatctttgtgcagcctgaaggatcagtgtagtaatgccaggaaagtgctttttacctaagacttccttctcagcttctcccataaagagaccctaatatgcattttgatttgtaattgga

SEQ ID NO: 689009 - DNA, 120 bp, Artificial Sequence
  ENSG00000188021_26 (sequence is synthesized)
aatgtaactttcactgaaagtgtcatgtgatgtttgcattacttttaactgctatgtataaaggaaagtgtgtcttttgacttcatcagttatttctcttgtgcacagagaaaaatgcat

SEQ ID NO: 689010 - DNA, 120 bp, Artificial Sequence
  ENSG00000188021_27 (sequence is synthesized)
taaaaatgactaaaaaaaataaaaaattaaaaaatggataaatcttttctttttgccttttggccctaggatcgtgtttaggaggattatcccaccccgagattatataaatcttatcct

SEQ ID NO: 689011 - DNA, 120 bp, Artificial Sequence
  ENSG00000188021_28 (sequence is synthesized)
atatttctctaacttatatggttttatttagaaaatgttttgtcctgtctggaattatcttgatgtatggatttaggtattctaacttttttgccccaaagggttagccagttgttaaca

SEQ ID NO: 689012 - DNA, 120 bp, Artificial Sequence
  ENSG00000188021_29 (sequence is synthesized)
tatttaccttttcccccaacatatgaaatgtcatacatgtatatactttattctgtgtttggattccctttagttccattgaacattgtggcaccagtacaccagcctgtagatgagtta

SEQ ID NO: 689013 - DNA, 120 bp, Artificial Sequence
  ENSG00000188021_30 (sequence is synthesized)
gaaatgggactttgtatcttttaatgtgagacctcctcttgatcttttttattttttacaatattctgacgattctgacatgtttattttaccagatgaattttacagttaatagattct

SEQ ID NO: 689014 - DNA, 120 bp, Artificial Sequence
  ENSG00000188021_31 (sequence is synthesized)
tcccccaaaaatatattgagaatttggttgggattctcttaaattgatatgactgtgaggactacagaattgcattgctttccagaaacatgttgccttgtttctgaaaaactttatata

SEQ ID NO: 689015 - DNA, 120 bp, Artificial Sequence
  ENSG00000188021_32 (sequence is synthesized)
tccttcaagagagttttacttaaatcctatataatttgtaataaatatgttcctaggtaatacagacatacagggaacacgttgatactgcttattggagcttttaatatgttacctatg

SEQ ID NO: 689016 - DNA, 120 bp, Artificial Sequence
  ENSG00000188021_33 (sequence is synthesized)
tggtcatttttgctatataggagaagaatttatttgcatcgattattttaaattggcaatttattgaaatctattaattttagagatattcatttgatccttttgagtttttccaggtga

SEQ ID NO: 689017 - DNA, 120 bp, Artificial Sequence
  ENSG00000188021_34 (sequence is synthesized)
gaaatcctatcaattatgttataattatatgttttccttttcaaaatttataacataatttctgactgcatgggttaaacattttcataacagtgctaaataataaaggtggcagtggca

SEQ ID NO: 689018 - DNA, 120 bp, Artificial Sequence
  ENSG00000188026_0 (sequence is synthesized)
ctgagcgcgcccgcccgcggcccaggctgggcccggccggcccggccctcgacagcggcaagtttgggagttgcacgagtttgcggggcgggggacaggccaggagggtggccatggagg

SEQ ID NO: 689019 - DNA, 120 bp, Artificial Sequence
  ENSG00000188026_1 (sequence is synthesized)
gaggaggagcgggggtcggcgctggcggccgagtcggcgctggagaagaacgtggccgagctgaccgtcatggacgtgtacgacatcgcgtcgcttgtgggccacgagttcgagcgggtc

SEQ ID NO: 689020 - DNA, 120 bp, Artificial Sequence
  ENSG00000188026_2 (sequence is synthesized)
attgaccagcacggctgcgaggccatcgcgcgcctcatgcccaaggtcgtgcgcgtcctggagatcctggaggtgctggtcagccgccaccacgtcgcgcccgagctggacgagctgcgc

SEQ ID NO: 689021 - DNA, 120 bp, Artificial Sequence
  ENSG00000188026_3 (sequence is synthesized)
ctggagctggaccgcctgcgcctggagaggatggaccgcatcgagaaggagcgcaagcaccagaaggagctggagctggtggaggatgtgtggcgaggggaggcgcaggacctcctctcc

SEQ ID NO: 689022 - DNA, 120 bp, Artificial Sequence
  ENSG00000188026_4 (sequence is synthesized)
cagatcgcccagctgcaggaggagaacaagcagctcatgaccaacctctcccacaaggatgtcaatttctcagaggaggagttccagaagcatgaaggcatgtcagagcgggagcgacag

SEQ ID NO: 689023 - DNA, 120 bp, Artificial Sequence
  ENSG00000188026_5 (sequence is synthesized)
gtgatgaagaagctgaaggaggtggtggacaaacaacgcgacgagatccgcgccaaggacagggagctgggcctgaaaaatgaggacgttgaggctttacagcagcagcagacacggctg

SEQ ID NO: 689024 - DNA, 120 bp, Artificial Sequence
  ENSG00000188026_6 (sequence is synthesized)
atgaagatcaaccatgaccttcggcaccgggtcacggtggtggaggcccaggggaaagccctgatcgaacagaaggtggagctggaggcagacctgcagaccaaggagcaggagatgggc

SEQ ID NO: 689025 - DNA, 120 bp, Artificial Sequence
  ENSG00000188026_7 (sequence is synthesized)
agcctgcgagcagagctggggaagttgcgagagaggctgcagggggagcacagccagaatggggaggaggagcctgagacggagccggtgggagaggagagcatctccgacgcagagaag

SEQ ID NO: 689026 - DNA, 120 bp, Artificial Sequence
  ENSG00000188026_8 (sequence is synthesized)
gtggccatggatctcaaggaccccaaccgcccccggttcaccctgcaggagctgcgggacgtgctgcacgagaggaacgagctcaagtccaaggtgttcttgctgcaggaggagctggct

SEQ ID NO: 689027 - DNA, 120 bp, Artificial Sequence
  ENSG00000188026_9 (sequence is synthesized)
tactataagagtgaagaaatggaagaggaaaaccgaataccccaacccccacccatcgcccacccgaggacgtccccccagccggagtcgggcatcaagcgactgtttagcttcttctcc

SEQ ID NO: 689028 - DNA, 120 bp, Artificial Sequence
  ENSG00000188026_10 (sequence is synthesized)
cgagataagaagcgcctggccaacacacagagaaacgtgcacatccaggagtcctttggacagtgggcaaacacccaccgcgatgacggttacacagagcaaggacaggaagccctgcag

SEQ ID NO: 689029 - DNA, 120 bp, Artificial Sequence
  ENSG00000188026_11 (sequence is synthesized)
catctgtgaccttggcccatctccaccctccaacctggactgcccgccaccagcgcctgcaaccgaactgcagcccaggggtcattgctgcctcaagcctctcggtgcagatgcaccctg

SEQ ID NO: 689030 - DNA, 120 bp, Artificial Sequence
  ENSG00000188026_12 (sequence is synthesized)
aaaactgacccctcaaacagactgtctgatttgaggatggacattgaaaaactgacgccaaactctaaagaaatgtttatttatacccagggctatcactgtttctaatagatgactctg

SEQ ID NO: 689031 - DNA, 120 bp, Artificial Sequence
  ENSG00000188026_13 (sequence is synthesized)
atcccgtaggatatatatttaataatcccacaaacggaggccagacttctgcgttaacttcagtaacacaagcttctttaagccaaatacatcacttgccactatcattgctgtttgact

SEQ ID NO: 689032 - DNA, 120 bp, Artificial Sequence
  ENSG00000188026_14 (sequence is synthesized)
tgctttgtataaaatgctatgtgtagaggttttattatcacaggtgacatagttcagcaggaggcatggaagggctagatcttcattagttacattcatgaaattgtgatggtaacgtat

SEQ ID NO: 689033 - DNA, 120 bp, Artificial Sequence
  ENSG00000188026_15 (sequence is synthesized)
ggtcctcttacccagaaactggagacaactttgcaggcaccctggctgcgttcctgataatgcctagagcatgtagcaatgttcaaggcaggtgccttggaatctgctgtgagttatgca

SEQ ID NO: 689034 - DNA, 120 bp, Artificial Sequence
  ENSG00000188026_16 (sequence is synthesized)
gtactaaccaaacaaagttgctaaggatgagatgttgcaacatttcttgtgtgcacttttttttcctgacatctttttttccttttaggattcattaagtcatatacttagtcccctgca

SEQ ID NO: 689035 - DNA, 120 bp, Artificial Sequence
  ENSG00000188026_17 (sequence is synthesized)
aagaagaagacagatgtcccagagcagactgaaagcggggcgtgggatcctaggcaatgcaggagggcaggtgggggagctgtagcagaacaagggtgctaggtgggaagctggcttggg

SEQ ID NO: 689036 - DNA, 120 bp, Artificial Sequence
  ENSG00000188026_18 (sequence is synthesized)
gaccacacgtctggctgactcacagggctatagcagcagacagagagccagatgctctactgcaactggtgagttggaggcttgcccacataacactgtctttctctccacccgccaagc

SEQ ID NO: 689037 - DNA, 120 bp, Artificial Sequence
  ENSG00000188026_19 (sequence is synthesized)
atccagggcacagggctggttgctcacagattgagcgaggtagcacctcctaccagcactcaagtttatcagggccgcgttctaaacattctactgaagtttgctaagaaaccattaggt

SEQ ID NO: 689038 - DNA, 73 bp, Artificial Sequence
  ENSG00000188026_20 (sequence is synthesized)
tctaaacattctactgaagtttgctaagaaaccattaggtgaggctgggcacagtggctcacgcctgcggagt

SEQ ID NO: 689039 - DNA, 87 bp, Artificial Sequence
  ENSG00000188026_21 (sequence is synthesized)
tctacaaaaatacaaaaaaattagccaggcgaggtggtgcatgcctataatcccagctgctcaggaggccgagacaggagaattcta

SEQ ID NO: 689040 - DNA, 86 bp, Artificial Sequence
  ENSG00000188026_22 (sequence is synthesized)
attcaggtgaatttgcagaatctagaatggactctgcttccagattgccgaaaaaaagaaatgatcagacagggtaattattgctg

SEQ ID NO: 689041 - DNA, 120 bp, Artificial Sequence
  ENSG00000188026_23 (sequence is synthesized)
gccgaaaaaaagaaatgatcagacagggtaattattgctgcgttagagcagtgtttctcaaacctgagtgcccattagaattattagaatttattctcaaagagtatagaagcaggtata

SEQ ID NO: 689042 - DNA, 120 bp, Artificial Sequence
  ENSG00000188026_24 (sequence is synthesized)
ctgatgaatttctctcccacccctggccacctttgttgcccttccaacaggtaaccaaaattgccagtttcttggttatctttcctaaacactaaatgtctctcttttttttgagatagt

SEQ ID NO: 689043 - DNA, 120 bp, Artificial Sequence
  ENSG00000188026_25 (sequence is synthesized)
cttgctctattgcccaagccaaagtatagtggcaccatctctgctcactgcaacttccgcctcttgagttcaagcaattctcatgcctgagcctcccaagtagctgggactacatgtgtg

SEQ ID NO: 689044 - DNA, 79 bp, Artificial Sequence
  ENSG00000188026_26 (sequence is synthesized)
ttacaggtgtgagccactgtggctggccttttttttttttttttttttggacctatcatagctcattgcagctatgaac

SEQ ID NO: 689045 - DNA, 87 bp, Artificial Sequence
  ENSG00000188026_27 (sequence is synthesized)
tactgatgtgcaccaccatgcccagctaattattttttgtagagaccaggtcttactttgttgcctaagctggtctcaaactcctgg

SEQ ID NO: 689046 - DNA, 120 bp, Artificial Sequence
  ENSG00000188026_28 (sequence is synthesized)
tcaaactcctgggctcaagtgatcctcacaccccagcctcccaaagtgctgggaattcaggtgtgagccaccgtgcctggccaaatgtcacttttttgataagtcagcagatccagctct

SEQ ID NO: 689047 - DNA, 120 bp, Artificial Sequence
  ENSG00000188026_29 (sequence is synthesized)
cagcagatccagctcttgagcacatcagaggctagataatcgggacagaaaggaaaaatcaatccatcagaaagtttatacatgcaattatgtaaaataaaatcaagaacaaaaagcata

SEQ ID NO: 689048 - DNA, 120 bp, Artificial Sequence
  ENSG00000188026_30 (sequence is synthesized)
tggctcatgcctgtcatcccagcactttgcgaggccgaggcaggcggatcacttgaacccaggactcgaaaccagcctgggcaacatagtgggacccccatctctacacaaaaattttta

SEQ ID NO: 689049 - DNA, 120 bp, Artificial Sequence
  ENSG00000188026_31 (sequence is synthesized)
aaaatcatgacagtgttgtacaaccatcacctgttttgttccaaaacactttcaccaccttcctgaggtgactgcacctggcaggtctctccccagcctcttgtctctgccctccctccc

SEQ ID NO: 689050 - DNA, 120 bp, Artificial Sequence
  ENSG00000188026_32 (sequence is synthesized)
tgcaggtacaaccactggcagcctctaatctgctttctgcctctgtggatttgccagttctggatatttcctatcgatgaaatcacactgtatgcaaccttggggtctgatcttagaccc

SEQ ID NO: 689051 - DNA, 120 bp, Artificial Sequence
  ENSG00000188026_33 (sequence is synthesized)
cacgtcatttttgaggttcatccgtgctgtggcgtgtcagagctgctttcctcgttatggctgaattgtcctccactgtgtggactgagcgcgttgtgcttatccattcttagcgggggg

SEQ ID NO: 689052 - DNA, 120 bp, Artificial Sequence
  ENSG00000188026_34 (sequence is synthesized)
acatttgggtggcttccatctttcatctgctacagatagtgctgctgtgaactttgtcacttaacagtctatctcagtgttttcgacggcacatcgtgtctcatggtgtcccactgcctg

SEQ ID NO: 689053 - DNA, 120 bp, Artificial Sequence
  ENSG00000188026_35 (sequence is synthesized)
gacagtgccttgctggtggacagtagctcactgccagattctcactcccacacgtgtggctgctgtggctggccacggacgagcttctccatggtgcccctgcccaagtgtctcttaaaa

SEQ ID NO: 689054 - DNA, 120 bp, Artificial Sequence
  ENSG00000188026_36 (sequence is synthesized)
tctaggtccctagatcctgaattgctgggtgtgtatgatggctcacaactcttccagcttttaacagtgtctgttaagaatacttggccttctcttagttttccaaagcactcttgtact

SEQ ID NO: 689055 - DNA, 120 bp, Artificial Sequence
  ENSG00000188026_37 (sequence is synthesized)
ttctcttagcagtgacctgtgaagcggggaggcctggtctttccgtatcaggataaaatgacttagacactctggccctgggcccctctgttgtgagcacttcacatcgatgaagcgtgc

SEQ ID NO: 689056 - DNA, 120 bp, Artificial Sequence
  ENSG00000188026_38 (sequence is synthesized)
acaggcctctcgagagcaccgaggcctgaagggaaagcaactaagaggccgaagctgggataggagtcaggcgccaggcttctgcctcggtctcatagctcctacggctgccgcccagga

SEQ ID NO: 689057 - DNA, 120 bp, Artificial Sequence
  ENSG00000188026_39 (sequence is synthesized)
aggtgatgaggctgctgggcttccacatagacccagccgcccctctctcctcatgctcgcctcccgcccacctctcggggagccaaggcagccccagcaaggagtaaatgagcatgtcag

SEQ ID NO: 689058 - DNA, 77 bp, Artificial Sequence
  ENSG00000188026_40 (sequence is synthesized)
tgaatttagaggcaggtgacacaattcaaccgctaacttagaccctaatcaaacccttccactggtgtctgtggagt

SEQ ID NO: 689059 - DNA, 120 bp, Artificial Sequence
  ENSG00000188026_41 (sequence is synthesized)
ttagaccctaatcaaacccttccactggtgtctgtggagtttgtttctttttcatgcctcccgtttttatcttctctgtgtctatctgtacttctctaaccaggatctttacagccataa

SEQ ID NO: 689060 - DNA, 120 bp, Artificial Sequence
  ENSG00000188026_42 (sequence is synthesized)
tgcctatggtagcagcgggactgataatagatgaccccacactgcagcctgtccgacgacttgtttcccttgtaggcactgtgtgtgttttgggttttgtttgagctgcccccttggaat

SEQ ID NO: 689061 - DNA, 120 bp, Artificial Sequence
  ENSG00000188026_43 (sequence is synthesized)
gtctgcttcggctactgctggggctgacctgtctccccctggccacttaagctgcatggccgccacctgtgtgctccatttgacgtggatgttgagtgtgatttcagctgtgccactggc

SEQ ID NO: 689062 - DNA, 120 bp, Artificial Sequence
  ENSG00000188026_44 (sequence is synthesized)
tgcgctcggtctactcgagcgaagcctcagaattctcggctctgtcaccgataattctttttgtctcttctgtttctgttttaaaaccaccttgcccatgatccagtaaagaaggtcctt

SEQ ID NO: 689063 - DNA, 120 bp, Artificial Sequence
  ENSG00000188026_45 (sequence is synthesized)
taagtgacgggtcagtaatcaacgcccactgcggtccccgagtgacactaaccctatgtttttgatgttcaccctgtagctttctaaactgctttgttttccaagccatcttcaagtcag

SEQ ID NO: 689064 - DNA, 120 bp, Artificial Sequence
  ENSG00000188026_46 (sequence is synthesized)
ccatttgatcttgttttaaaaagaaaggcagaggaggggaccagtgttttgattctgtctgtgtcagaagtgctaagtggccttcctgtttacctgagtcagagagaggtgaagcgtaac

SEQ ID NO: 689065 - DNA, 120 bp, Artificial Sequence
  ENSG00000188026_47 (sequence is synthesized)
cgtgaggtgttgctgctgtatttttcgccagttaattgcctggattactctatggaaggagctcacaaataacccagtgtgagaattgtgccttcattcaccagcacacttacctgtcac

SEQ ID NO: 689066 - DNA, 120 bp, Artificial Sequence
  ENSG00000188026_48 (sequence is synthesized)
agagaaaaggcatcttagtcgctagggagagtttcatcagataaacttggcttgccgtggctttgcaatgaaagatcagtttattcctggtagaaagtgagtgtaggatccagtaaccac

SEQ ID NO: 689067 - DNA, 120 bp, Artificial Sequence
  ENSG00000188026_49 (sequence is synthesized)
agaagagtgaaatcattttcacccagatgtgattaaaactaaactctggaggctgcaacactagcaaccagcaaacagagggaaccaaaaatagtttatccgaagctttgatttcgcagt

SEQ ID NO: 689068 - DNA, 120 bp, Artificial Sequence
  ENSG00000188026_50 (sequence is synthesized)
ggctttgttcctattcttgcctcccaggaaacataacatgctattatatgatatctcttaccaagttcagagccataattcacatagtggctaacgcctgtgatcccaggtgttggtgac

SEQ ID NO: 689069 - DNA, 76 bp, Artificial Sequence
  ENSG00000188026_51 (sequence is synthesized)
tgtaatcccagctgtggttgcagtgaactgagatcaagccactgcactgcagcctggatgacagagcgagactccg

SEQ ID NO: 689070 - DNA, 120 bp, Artificial Sequence
  ENSG00000188026_52 (sequence is synthesized)
agcgagactccgtctcaaaaaaaaagagtagaacttggtgacaacagaaggaatcttaatagagcctggtagtatcaaaggacagttttaggaagagcttttgggaattcctcaaggtag

SEQ ID NO: 689071 - DNA, 120 bp, Artificial Sequence
  ENSG00000188026_53 (sequence is synthesized)
aagagcttttgggaattcctcaaggtaggccaatttcaggttcactgaccagggtcctagtttgtttacatgacctcaaagcagaccttgttttaaagggactactttggccaggcacag

SEQ ID NO: 689072 - DNA, 68 bp, Artificial Sequence
  ENSG00000188026_54 (sequence is synthesized)
taaaaaataaaaataaaaataaatggactaccttgcaggctttttgcttgtgacttttttttttcttt

SEQ ID NO: 689073 - DNA, 120 bp, Artificial Sequence
  ENSG00000188026_55 (sequence is synthesized)
cttttgtttttttctttcttttttctatggtaacaaactcaagtatgcttatgacttctgcctttatctttcaggcatctgaaagttcctgatggctctctctgatcaatatgcaacagt

SEQ ID NO: 689074 - DNA, 120 bp, Artificial Sequence
  ENSG00000188026_56 (sequence is synthesized)
gttcctgatggctctctctgatcaatatgcaacagtcacagctgttttaaaaagacctctgtctacctcagttaaagtctgaggccagactaactgtggctctgtagctggttacagtga

SEQ ID NO: 689075 - DNA, 120 bp, Artificial Sequence
  ENSG00000188026_57 (sequence is synthesized)
tacggcctaaaggctttcaccattagatctatttttgaaagtgcaaatggatgtttccctaattttatatcagagaaccatgcgtaccatgttttacttatatatatatatttattttat

SEQ ID NO: 689076 - DNA, 71 bp, Artificial Sequence
  ENSG00000188026_58 (sequence is synthesized)
tgcgtaccatgttttacttatatatatatatttattttatttttttagacagagtcttgtctccgcctccc

SEQ ID NO: 689077 - DNA, 120 bp, Artificial Sequence
  ENSG00000188026_59 (sequence is synthesized)
cccaaagtgctggggttacaggcgtgacccatcgcgctcagcccatagtatatgttttattgttcatttttcttaagtacttcctttagcctcatctaagcagtaatgtccatgaaatct

SEQ ID NO: 689078 - DNA, 120 bp, Artificial Sequence
  ENSG00000188026_60 (sequence is synthesized)
atctgggccacagtttcctgactgacattaaacaaatacagaactatttaaattagaaatactcattcgtttacaacagaatcctcttatattccacacggttttcaagtattcctttct

SEQ ID NO: 689079 - DNA, 120 bp, Artificial Sequence
  ENSG00000188026_61 (sequence is synthesized)
ctgcgtcattagggtaattaaagaaacccaagatttgtttcagcagcttttgatttccactggtaacgggataaatcctccatagcggctaacgtggaagacacctcacacatcacatca

SEQ ID NO: 689080 - DNA, 120 bp, Artificial Sequence
  ENSG00000188026_62 (sequence is synthesized)
gcatgcatgccttgcccataccgcgtgacctccaaggtaccgtgtccaaatgacacgcagaataccctgctgctttcttggaataactttgacctgcacccccaactttgtctttcacac

SEQ ID NO: 689081 - DNA, 120 bp, Artificial Sequence
  ENSG00000188026_63 (sequence is synthesized)
cttgaattgatttgctcccttctaagtttgctgctatatgtctccggcattgcaaaaaacgtgacttgcacagcaaagggtcagctctcatttctgtgtttgctttcccttccaaaggtt

SEQ ID NO: 689082 - DNA, 120 bp, Artificial Sequence
  ENSG00000188032_0 (sequence is synthesized)
aaaagaggcgaacggcccccggcgcggcggcgcggctccggtggagaggtcaaggcaggggccagtcggaggctcccggggcggggtcgaacccgcggccaacctgagcagcagcggaag

SEQ ID NO: 689083 - DNA, 120 bp, Artificial Sequence
  ENSG00000188032_1 (sequence is synthesized)
cttaaagagctcaggttcccgccccccggccctaccatggctacagagcagtggttcgaggggtcgctccccctggaccctggagaaacaccgcctccagacgccttggaacctgggacg

SEQ ID NO: 689084 - DNA, 120 bp, Artificial Sequence
  ENSG00000188032_2 (sequence is synthesized)
ccgccctgcggagacccctccaggtcgacgccccctggcaggcctgggaacccatctgagccggatcctgaagatgccgaggggcggctggctgaggcccgggcctccacgtcttccccc

SEQ ID NO: 689085 - DNA, 120 bp, Artificial Sequence
  ENSG00000188032_3 (sequence is synthesized)
aaacctctggtcccccggcctgggccagcacctccccgcctatccctggacactttgttcagccccatcacccaacagctgcgctacctactgaagaaggcagatgatttccagagctac

SEQ ID NO: 689086 - DNA, 120 bp, Artificial Sequence
  ENSG00000188032_4 (sequence is synthesized)
ttgctctacagcagagaccaagtacagaaggagcagctggccaaggccatgcccaccttcttacagatgtgtgagccctacttcctgtacctggaggcagccgcgagaagcatacccccc

SEQ ID NO: 689087 - DNA, 120 bp, Artificial Sequence
  ENSG00000188032_5 (sequence is synthesized)
atctatggacccctgcaggagctggtccgaaaggggctgttagagatctcccaacagctgaccctgcgcctggaacagctggtcctcatgtacgcttcctttgggttcgtggacctggag

SEQ ID NO: 689088 - DNA, 120 bp, Artificial Sequence
  ENSG00000188032_6 (sequence is synthesized)
atgaacccccttagcatctcctgtttcttttgcgggaggttctccatcagcctgtcccatgaggtctccatcttcagatactgtgccccaaccgcctacactgccagccgcttcccccgc

SEQ ID NO: 689089 - DNA, 120 bp, Artificial Sequence
  ENSG00000188032_7 (sequence is synthesized)
tacctctataagaagatgcgctggcacctggaagccaccccagaggcccctggtcggggacaagattcccttgtggattactactttctgtgctatcgagatacttgggaagacacaggc

SEQ ID NO: 689090 - DNA, 120 bp, Artificial Sequence
  ENSG00000188032_8 (sequence is synthesized)
cagagtccagccaattcgtgcccacagatccagaagctgtggtccatcggccgatgggtgcccctaggaccagccgaggatgacctttattcatggattttgtgcccgcagccgcttggg

SEQ ID NO: 689091 - DNA, 120 bp, Artificial Sequence
  ENSG00000188032_9 (sequence is synthesized)
gactaccagcagctgctgaccatcggcttcgaggagcccacgcccacgctggccaccgacctgctggtgcagatcctcacgggccaggcaggccaggcccggcctccgagcgcagccggg

SEQ ID NO: 689092 - DNA, 120 bp, Artificial Sequence
  ENSG00000188032_10 (sequence is synthesized)
cctgcggggtgggcagcgcaggggtcttgaacctggggaagagggtaggagctggaacttgacagttccaaactccagaatagggggcaggggaggggctcactcgttctcgcagtgcag

SEQ ID NO: 689093 - DNA, 120 bp, Artificial Sequence
  ENSG00000188032_11 (sequence is synthesized)
cccggcctcgccttccaaagggccaggccgagctgacctgtctgcaccgagtccggcttggccgtggggccctgaatgcggacacgtcagttttgtgttaaataaaagaaagaaagaggt

SEQ ID NO: 689094 - DNA, 120 bp, Artificial Sequence
  ENSG00000188033_0 (sequence is synthesized)
aggcagatctcgcttccgccggtgggacggaactggtgccctccgtggacaattgtgttgaagcagaaattgttccggatctcgggtcggacacggaagtcttcctgcagtgtttctgga

SEQ ID NO: 689095 - DNA, 120 bp, Artificial Sequence
  ENSG00000188033_1 (sequence is synthesized)
tgcggggacagggatgcgcaggaattccagtctcagtttccagatggagcgacccctcgaggagcaagtccagagcaagtggtcgtctagtcaaggccgcacaggaacaggagggtctga

SEQ ID NO: 689096 - DNA, 120 bp, Artificial Sequence
  ENSG00000188033_2 (sequence is synthesized)
tgtcctccagatgcagaacagtgaacaccatggacaaagcatcaagactcaaactgactccatctcccttgaggatgtggctgtgaacttcaccctggaggagtgggctttgctggatcc

SEQ ID NO: 689097 - DNA, 120 bp, Artificial Sequence
  ENSG00000188033_3 (sequence is synthesized)
tggccagaggaatatctacagagatgtgatgcgggcaaccttcaagaacctggcctgtataggggaaaaatggaaagaccaggatattgaagatgaacacaaaaaccagggaagaaatct

SEQ ID NO: 689098 - DNA, 120 bp, Artificial Sequence
  ENSG00000188033_4 (sequence is synthesized)
aagaagtcctatggttgaagcactctgtgaaaataaagaagattgtccatgtggaaaaagcactagccagattcctgatcttaatacgaacctggaaactcctactggattaaaaccatg

SEQ ID NO: 689099 - DNA, 120 bp, Artificial Sequence
  ENSG00000188033_5 (sequence is synthesized)
tgactgcagtgtgtgtggggaagtcttcatgcatcaggtctcccttaataggcacatgagatctcacactgaacagaaaccaaatgagtgtcacgaatatggagagaagccacataaatg

SEQ ID NO: 689100 - DNA, 120 bp, Artificial Sequence
  ENSG00000188033_6 (sequence is synthesized)
tgagtgtcacgaatatggagagaagccacataaatgcaaagaatgtgggaaaaccttcactcgcagctccagtattcgaacccatgaaagaattcacactggagagaaaccctatgaatg

SEQ ID NO: 689101 - DNA, 120 bp, Artificial Sequence
  ENSG00000188033_7 (sequence is synthesized)
ctttcgaaaccatataagaattcatactggagagacaccctatgaatgtaaggaatgtgggaaggcattcagatatctcactgctcttcggcgccatgaaaaaaatcacactggagagaa

SEQ ID NO: 689102 - DNA, 120 bp, Artificial Sequence
  ENSG00000188033_8 (sequence is synthesized)
accctacaaatgtaaacagtgtggaaaagcctttatatattaccagccttttctaacccacgaaaggactcacactggagagaaaccttatgaatgtaagcaatgtgggaaagccttcag

SEQ ID NO: 689103 - DNA, 120 bp, Artificial Sequence
  ENSG00000188033_9 (sequence is synthesized)
ttgtcccacgtacttacggagtcatgagaaaactcatactggagagaaaccttttgtatgtagggaatgtgggagagccttcttttctcactcaagccttcgaaaacacgtgaaaaccca

SEQ ID NO: 689104 - DNA, 120 bp, Artificial Sequence
  ENSG00000188033_10 (sequence is synthesized)
caccggagttcaaccttatacatgtaagaaatgtggggaagccttcaagtcatctagttcctgtgaagtgcacgaaagaactcattttggagaaaaaccctatgaatgtaaacaatgtgg

SEQ ID NO: 689105 - DNA, 120 bp, Artificial Sequence
  ENSG00000188033_11 (sequence is synthesized)
taaagccttcaattcttcaagttaccttcagttgcacgaaagagttcacactggcgagaaaacttacgaatgtaaagaatgtggtaaagcctttctttattccactcactttcgaatcca

SEQ ID NO: 689106 - DNA, 120 bp, Artificial Sequence
  ENSG00000188033_12 (sequence is synthesized)
tgaaagaacccatactagagagaaaccctatgaatgcaaacagtgtggtcgggtcttcatttacttcagtcaccttcgaaggcacgaaagaagtcacactggagtgaaaccatgtgagtg

SEQ ID NO: 689107 - DNA, 120 bp, Artificial Sequence
  ENSG00000188033_13 (sequence is synthesized)
taagcagtgtggcaaagctttcacttgtttaaattccctgaaagtacacaaaagaattcatactggagaaagaccctttcagtgtagacaatgtggtaaagccttcagttactcaaagtc

SEQ ID NO: 689108 - DNA, 120 bp, Artificial Sequence
  ENSG00000188033_14 (sequence is synthesized)
tttgcacgtgcacgaaaggactcatagtagacagaagccctaagaaagtaaagtgtggtaatgctgtcagttgtattagttccttttggatgtatgagagtacttacgctggagagaaat

SEQ ID NO: 689109 - DNA, 120 bp, Artificial Sequence
  ENSG00000188033_15 (sequence is synthesized)
tcaaggaatgtaaacggtgtgattaagccttcagttgtcctaattccctttgaagacgtgactcatgcggcaatgaaatatttaacaaatgggggaggaacttgcactctcctgcgggat

SEQ ID NO: 689110 - DNA, 120 bp, Artificial Sequence
  ENSG00000188033_16 (sequence is synthesized)
tgcagatatgtgaatggactccatggacagaaaagctacgaatgtatggagtgtaggaaagccttcacttcacgtaatcttttaaagacacctgagaatatatactggagagaaactata

SEQ ID NO: 689111 - DNA, 120 bp, Artificial Sequence
  ENSG00000188033_17 (sequence is synthesized)
aatatatactggagagaaactataaagaaaattctatatccatcccatcttttgtggggtttgttttttgtttttgtttttgttgagatgtaattttgctcttgttgcccaggctggagt

SEQ ID NO: 689112 - DNA, 61 bp, Artificial Sequence
  ENSG00000188033_18 (sequence is synthesized)
acctttttttccccgccgcaccccaagatggtgtctcactctgttgccccaggctggagtg

SEQ ID NO: 689113 - DNA, 82 bp, Artificial Sequence
  ENSG00000188033_19 (sequence is synthesized)
gtgtgagccacagcacccaacctttttttccccgccgcaccccaagatggtgtctcactctgttgctaacctctgggttcaa

SEQ ID NO: 689114 - DNA, 120 bp, Artificial Sequence
  ENSG00000188033_20 (sequence is synthesized)
gttttacttttttttttttttttttttgagctggagtcttactctgttgcctaggctggagtgaaagtggcgcaacctctgcctcccaggtcaaagcaatcctgcctcaggccccctagt

SEQ ID NO: 689115 - DNA, 76 bp, Artificial Sequence
  ENSG00000188033_21 (sequence is synthesized)
caacctctgcctcccaggtcaaagcaatcctgcctcaggccccctagtagctggcattacaggcacatgccaccac

SEQ ID NO: 689116 - DNA, 120 bp, Artificial Sequence
  ENSG00000188033_22 (sequence is synthesized)
gcccggcctccagttcattttaaaaccatgaaaccacccacactggagagccaccttcttaaatgtaagcaatatgggaacatcttcaatgacatctgcaaccattgtcgagattcttcg

SEQ ID NO: 689117 - DNA, 120 bp, Artificial Sequence
  ENSG00000188033_23 (sequence is synthesized)
taggaagaattaaaggaatggggaagaaggacttgggccccagcaggccttttgtggcatccagtcagaagttaggaaacaccctctagggcagtgcctgccctcagctctcacacatga

SEQ ID NO: 689118 - DNA, 120 bp, Artificial Sequence
  ENSG00000188033_24 (sequence is synthesized)
ctggagagaagtgagaagactcccagaatctgccttttaagtttccatcagtgtcctcgggtcagactgtgggaatgctgtacttctaagacaaaggttcgcatcttacagtttttcccc

SEQ ID NO: 689119 - DNA, 120 bp, Artificial Sequence
  ENSG00000188033_25 (sequence is synthesized)
aagtgggatctgcctatgcacatcctaattcacagacattgtcagcattgcattattccagggctgttttgaggtcatctccagctccatttcccatctcaaacctacactttggacact

SEQ ID NO: 689120 - DNA, 120 bp, Artificial Sequence
  ENSG00000188033_26 (sequence is synthesized)
tgtttaaacattcacatctgaatttctctgtggcaaccgcaggtggctctgaggtgagagactgaagaagcagagcctgtatcatgggacacacaccccttgaccacacagcatccactc

SEQ ID NO: 689121 - DNA, 120 bp, Artificial Sequence
  ENSG00000188033_27 (sequence is synthesized)
tcctgcggttaccagccctgcaccaaccaccacagtcagaataatctcaaaactgctagtggagtcacagacacactctgccatgtcttagctgtaggacactcagaattcttacctccc

SEQ ID NO: 689122 - DNA, 120 bp, Artificial Sequence
  ENSG00000188033_28 (sequence is synthesized)
ctaacttgctttccctgttttctggcacattctaccctgagatattcagcggcatatgcactgatgatgctccggccttctcacgtcagtgcatgtcacatgcatcctgctccaggactg

SEQ ID NO: 689123 - DNA, 120 bp, Artificial Sequence
  ENSG00000188033_29 (sequence is synthesized)
gtttcctagcctcccgctaagactagcacttagctcttcttggaaaaggacccaccctgcagcgctccagctctgttgtgtatgggaggtgctggtgtcagggttcacaagccatggaac

SEQ ID NO: 689124 - DNA, 120 bp, Artificial Sequence
  ENSG00000188033_30 (sequence is synthesized)
taccttgcttcacatcacaaggcaaggtgaactcaactcccaataaactgcttgctggagcctccgaattctccgttttctgaattgcataggcacgataggggtcgggtctgtcctttg

SEQ ID NO: 689125 - DNA, 120 bp, Artificial Sequence
  ENSG00000188033_31 (sequence is synthesized)
ttggagtcagtccccccttttcttagcaagtcagtgtgttttagaagggaggtggcagcattgagggaaaccaggtcaccatccaccctcgtaacaacagtctccctgggtgggtcccag

SEQ ID NO: 689126 - DNA, 120 bp, Artificial Sequence
  ENSG00000188033_32 (sequence is synthesized)
aagtgatctttgtgtcgctcgggtcggaactctttaggcctctggcctccaccctcccccaacagcagggatgggtcaggtggcagcatccaaaaccacggtgaagatactagggtccag

SEQ ID NO: 689127 - DNA, 120 bp, Artificial Sequence
  ENSG00000188033_33 (sequence is synthesized)
aggccgactggagcaaggtttgctggcagatgaggcctcagtggaagtgacggctactgtggagatgcagtggaggacctggtggctgagccaggagatgcacaccttcgcttctctcac

SEQ ID NO: 689128 - DNA, 120 bp, Artificial Sequence
  ENSG00000188033_34 (sequence is synthesized)
caggaacattcgcttctctcaccaggaacatttatggtagtatgaggggttggaacattattactcaacccatttcaggtcctttcacattcttgagctgccatgttgtgcttttgtaga

SEQ ID NO: 689129 - DNA, 120 bp, Artificial Sequence
  ENSG00000188033_35 (sequence is synthesized)
gagatgattattgtactgtgggaggtcaggaagttcgagattccttcactgtcagaatgggctcaaggagccatcttttgtgataggtattggggaactaaggggtatctctgctacagg

SEQ ID NO: 689130 - DNA, 120 bp, Artificial Sequence
  ENSG00000188033_36 (sequence is synthesized)
aatgggagtgagaacattcactttttgaaggacaagtatatgtgggtctatgatgatgtttttgtaaaacccttttgtgtatgtgtctgtgtgagtcctaatattcagtaagtattttcc

SEQ ID NO: 689131 - DNA, 120 bp, Artificial Sequence
  ENSG00000188033_37 (sequence is synthesized)
tctgtgtaactccctctaataggtgtagtcaacaaagctgtgctaatatctctgtccccttgatcctggcattctggaagacacgaaagcaagcaaggatatataaggcactgtggtggt

SEQ ID NO: 689132 - DNA, 120 bp, Artificial Sequence
  ENSG00000188033_38 (sequence is synthesized)
tattcccgaggagccagagaaacctggagaagagatcagaacacctggggtccttctatttgggagaatcttttagtatctgggctgttacacctgtgggtttgtgaatttgtgtctgtc

SEQ ID NO: 689133 - DNA, 120 bp, Artificial Sequence
  ENSG00000188033_39 (sequence is synthesized)
cacctgtatgtacagtgataacgtgtgtgatttttgtatatttgtctagagggctgtgtgtatatatatttatatatatttttaaatatggaatgcttttaggttttttttttttttttt

SEQ ID NO: 689134 - DNA, 90 bp, Artificial Sequence
  ENSG00000188033_40 (sequence is synthesized)
ggattacaggcgtgagccactctgcctggctggttattttgtttgtttgttgtaagctggactgcagtggcatgatctcggctcactgca

SEQ ID NO: 689135 - DNA, 120 bp, Artificial Sequence
  ENSG00000188033_41 (sequence is synthesized)
cttgcattttcttgcctgatttccctgggagcaccccccttaacactgaatggagctggtgagagcaaatatccttgtttctgatattagatattaaaaatatggtttttcaccatcaaa

SEQ ID NO: 689136 - DNA, 120 bp, Artificial Sequence
  ENSG00000188033_42 (sequence is synthesized)
agctctgaatgcgcgtgtgaacatccttattctagcggttcgctaggattgcgtcccagcctcggactgtctgtggctctgcgtatgctttgtctcactgggacctgcaggtagtgaggg

SEQ ID NO: 689137 - DNA, 120 bp, Artificial Sequence
  ENSG00000188033_43 (sequence is synthesized)
ctccgcccgtggggactggctgctgccgtcgcagttctcaggagatctgatggtttaaagatgtgcggcacttcccacttcgtgctctctcctgatccctcctgcttcaagtgaagactg

SEQ ID NO: 689138 - DNA, 120 bp, Artificial Sequence
  ENSG00000188033_44 (sequence is synthesized)
actcgatccccagtagccttccgccttgataagtttcctgaggcctcccagccttgcttcctgtacagcctgcagaactgtgtgaccgtggtgattgctggcaatagggcactgaaaata

SEQ ID NO: 689139 - DNA, 120 bp, Artificial Sequence
  ENSG00000188033_45 (sequence is synthesized)
ttatgacaaaatatggtctcgctctgctacctaggctggagtgcagtggtacaatcacagttcattggagcctagtcctcccggctcaagcaatcctccaacctcagcctcctgagtagc

SEQ ID NO: 689140 - DNA, 120 bp, Artificial Sequence
  ENSG00000188037_0 (sequence is synthesized)
agacgccttggggacagcaagagcagaggcttaaggagctacactgggggaaggacaggggcaagcaggccaaggcctggccggggctcggggggagggaatatggagcaatcccggtca

SEQ ID NO: 689141 - DNA, 120 bp, Artificial Sequence
  ENSG00000188037_1 (sequence is synthesized)
cagcagcgtgggggtgaacaaagctggtggggtagtgacccccagtaccagtatatgccctttgaacactgcaccagctacggactgccctctgagaatgggggcctccagcacaggctc

SEQ ID NO: 689142 - DNA, 120 bp, Artificial Sequence
  ENSG00000188037_2 (sequence is synthesized)
cggaaggatgcaggcccccgccacaacgtccaccccacacagatttatggccatcacaaagaacaattctcagacagggagcaggacatagggatgcccaagaagacaggctccagttct

SEQ ID NO: 689143 - DNA, 120 bp, Artificial Sequence
  ENSG00000188037_3 (sequence is synthesized)
accgtggacagcaaggatgaggatcactattctaaatgtcaagattgtatccaccgcctgggacaggtggtgagaagaaaattaggggaagacgggatctttctggtgcttctgggactg

SEQ ID NO: 689144 - DNA, 120 bp, Artificial Sequence
  ENSG00000188037_4 (sequence is synthesized)
ctgatggctctggtcagctggagcatggactacgtcagtgccaaaagccttcaggcctacaagtggtcctacgcgcagatgcagcccagccttcctctgcagttcctggtctgggtcacc

SEQ ID NO: 689145 - DNA, 120 bp, Artificial Sequence
  ENSG00000188037_5 (sequence is synthesized)
ttcccactagtcctcatcctcttcagcgccctcttctgccacctcatctctccccaggctgttggctctggaatccccgaaatgaagacaatacttcgtggggttgtcctgaaggaatac

SEQ ID NO: 689146 - DNA, 120 bp, Artificial Sequence
  ENSG00000188037_6 (sequence is synthesized)
ctcacaatgaaagcctttgtggccaaggttgtcgccctgactgcgggcctgggcagtggcatccccgtggggaaagagggccccttcgtccacattgccagcatctgtgctgctgtcctc

SEQ ID NO: 689147 - DNA, 120 bp, Artificial Sequence
  ENSG00000188037_7 (sequence is synthesized)
agcaaattcatgtctgtgttctgcggggtatatgagcagccatactactactctgatatcctgacggtgggctgtgctgtgggagtcggctgttgttttgggacaccacttggaggagtg

SEQ ID NO: 689148 - DNA, 120 bp, Artificial Sequence
  ENSG00000188037_8 (sequence is synthesized)
ctatttagcatcgaggtcacctccacctactttgctgttcggaactactggagaggattctttgcagccacgttcagcgcctttgtgtttcgagtgctggcagtgtggaacaaggatgct

SEQ ID NO: 689149 - DNA, 120 bp, Artificial Sequence
  ENSG00000188037_9 (sequence is synthesized)
gtcaccatcactgctctgttcagaaccaatttccgaatggatttcccctttgacctgaaggaactaccagcttttgctgccatcgggatttgctgtgggctcctgggagctgtatttgtg

SEQ ID NO: 689150 - DNA, 120 bp, Artificial Sequence
  ENSG00000188037_10 (sequence is synthesized)
tatctgcatcgccaagtcatgctcggtgtccgaaagcacaaggccctcagccagtttcttgctaagcaccgcctgctgtatcctggaattgttacctttgtcattgcctcattcaccttc

SEQ ID NO: 689151 - DNA, 120 bp, Artificial Sequence
  ENSG00000188037_11 (sequence is synthesized)
ccaccaggaatgggtcaattcatggctggagagttgatgccccgcgaagccatcagtactttgtttgacaacaatacatgggtgaaacacgcgggtgatcctgagagcctgggccagtca

SEQ ID NO: 689152 - DNA, 120 bp, Artificial Sequence
  ENSG00000188037_12 (sequence is synthesized)
gctgtgtggattcacccccgggtcaacgttgtcatcatcatctttctcttcttcgtcatgaagttctggatgtccatcgtggccaccactatgcccataccctgcggaggcttcatgcct

SEQ ID NO: 689153 - DNA, 120 bp, Artificial Sequence
  ENSG00000188037_13 (sequence is synthesized)
gtattttgtttgatgacatcatctacaagatcctacctgggggctatgcagtaattggagcagcagcgctgactggtgccgtttcccacacagtctccacagctgtgatttgcttcgaat

SEQ ID NO: 689154 - DNA, 120 bp, Artificial Sequence
  ENSG00000188037_14 (sequence is synthesized)
taacgggtcagattgctcacatcctgcccatgatggtggctgttatcttggccaacatggtggcccagagcctgcagccctctctctatgacagcatcatccaggtcaagaagctaccct

SEQ ID NO: 689155 - DNA, 120 bp, Artificial Sequence
  ENSG00000188037_15 (sequence is synthesized)
acttgcctgaccttggctggaaccagctcagcaaatataccatctttgttgaggacatcatggtacgtgatgtgaagtttgtttcagcttcttacacatatggggagttgcgaaccctgc

SEQ ID NO: 689156 - DNA, 120 bp, Artificial Sequence
  ENSG00000188037_16 (sequence is synthesized)
tccagaccaccacagtcaagactttaccactggttgactcaaaagattcaatgatcctgctgggctcggtggagcggtcggaactgcaggccctcctgcagcgccacctgtgtcctgagc

SEQ ID NO: 689157 - DNA, 120 bp, Artificial Sequence
  ENSG00000188037_17 (sequence is synthesized)
gcaggctgcgcgcagcccaagagatggcgcggaagttgtcggagctgccttacgacgggaaggcgcggctggctggggaggggctccccggcgcgcctccaggccggcccgagtccttcg

SEQ ID NO: 689158 - DNA, 120 bp, Artificial Sequence
  ENSG00000188037_18 (sequence is synthesized)
cctttgtggatgaggatgaggacgaagacctctctggcaagagcgagcttcctccttcccttgctctccacccctctactactgcccctctgtccccagaagagcccaatgggcctctgc

SEQ ID NO: 689159 - DNA, 120 bp, Artificial Sequence
  ENSG00000188037_19 (sequence is synthesized)
ctggccacaaacagcagccggaagcaccagagcctgcaggtcaaagaccctccatcttccagtccctgcttcactgcttgctgggcagagctcgccccacaaagaagaaaacaacccagg

SEQ ID NO: 689160 - DNA, 120 bp, Artificial Sequence
  ENSG00000188037_20 (sequence is synthesized)
attccacagatttagtggataacatgtcacctgaagagattgaggcctgggagcaggagcagctgagccagcctgtctgttttgattcctgctgtattgaccagtctcccttccagctgg

SEQ ID NO: 689161 - DNA, 120 bp, Artificial Sequence
  ENSG00000188037_21 (sequence is synthesized)
tggagcagacaaccctgcacaagactcataccctgttttcactccttggcctccacctcgcttacgtgaccagcatggggaagctcaggggcgtcctggccctggaggagctacagaagg

SEQ ID NO: 689162 - DNA, 120 bp, Artificial Sequence
  ENSG00000188037_22 (sequence is synthesized)
ccattgaggggcacaccaagtctggggtgcagctccgccctccccttgccagcttccggaacacgacttcaactcgaaagagtaccggggcacctccatcttctgcagagaactggaacc

SEQ ID NO: 689163 - DNA, 120 bp, Artificial Sequence
  ENSG00000188037_23 (sequence is synthesized)
tgcctgaggacaggcctggggccactggaacaggggatgtgattgctgcctccccagagacccctgtgccatctccttccccagagccccctctctccctggccccaggcaaggtagagg

SEQ ID NO: 689164 - DNA, 120 bp, Artificial Sequence
  ENSG00000188037_24 (sequence is synthesized)
gcgagttggaggagctggagctggtggagagtccagggctggaagaggagctggccgacatcttgcagggccccagcctgcgatccacagacgaggaggatgaggatgaactgatccttt

SEQ ID NO: 689165 - DNA, 120 bp, Artificial Sequence
  ENSG00000188037_25 (sequence is synthesized)
gaccccctcccacgacctcctcataaagaccgtggagaggcccagcctgagggtgaacttgtgtggggcagggtgcgtcctgaatgtggcgaggtcatgccaatgtcgtggcctcttcca

SEQ ID NO: 689166 - DNA, 120 bp, Artificial Sequence
  ENSG00000188037_26 (sequence is synthesized)
gggcctgggcagtggcatccccgtggggaaagagcctgtgcctgtcctccaaatgtccacccctctttcacctgtggccccacatggagaccgtgcctgggcagcttgacctcctggtgt

SEQ ID NO: 689167 - DNA, 120 bp, Artificial Sequence
  ENSG00000188038_0 (sequence is synthesized)
actaggctctcagccagggatgatgcgctgctgccgccgccgctgctgctgccggcaaccaccccatgccctgaggccgttgctgttgctgcccctcgtccttttacctcccctggcagc

SEQ ID NO: 689168 - DNA, 120 bp, Artificial Sequence
  ENSG00000188038_1 (sequence is synthesized)
agctgcagcgggcccaaaccgatgtgacaccatataccagggcttcgccgagtgtctcatccgcttgggggacagcatgggccgcggaggcgagctggagaccatctgcaggtcttggaa

SEQ ID NO: 689169 - DNA, 120 bp, Artificial Sequence
  ENSG00000188038_2 (sequence is synthesized)
tcctgtcaggctgtccggaggaggcagctgcagtgtgggaatcactacagcaagaagctcgccaggccccccgtccgaataacttgcacactctgtgcggtgccccggtgcatgttcggg

SEQ ID NO: 689170 - DNA, 120 bp, Artificial Sequence
  ENSG00000188038_3 (sequence is synthesized)
agcgcggcacaggctccgaaaccaaccaggagacgctgcgggctacagcgcctgcactccccatggcccctgcgcccccactgctggcggctgctctggctctggcctacctcctgaggc

SEQ ID NO: 689171 - DNA, 120 bp, Artificial Sequence
  ENSG00000188038_4 (sequence is synthesized)
ctctggcctagcttgttgggttgggtagcagcgcccgtacctccagccctgctctggcggtggttgtccaggctctgcagagcgcagcagggcttttcattaaaggtatttatatttgta

SEQ ID NO: 689172 - DNA, 120 bp, Artificial Sequence
  ENSG00000188038_5 (sequence is synthesized)
cagacttgccctttagttccctggggcaccctttttccgctgagtcacatccccagagtgctcccaggtaaacaagcccctgggggctgggggatgagcctggctcatcctatctaccat

SEQ ID NO: 689173 - DNA, 120 bp, Artificial Sequence
  ENSG00000188038_6 (sequence is synthesized)
tctgcattaatatatctcttcacctaaggacctccctcctgctcttctccagagcccagaccagcacatagtaagggttcaataaatatttgttaattaatgcgctgaatgtctgtaaaa

SEQ ID NO: 689174 - DNA, 120 bp, Artificial Sequence
  ENSG00000188039_0 (sequence is synthesized)
atgcagagagggaagccctgcagagcactgcctaccctgaagtgccagaccttctgccagaggcacggcttgatgtttgaggtcgttgatctgaggtggggtattcggaacattgaagcc

SEQ ID NO: 689175 - DNA, 120 bp, Artificial Sequence
  ENSG00000188039_1 (sequence is synthesized)
actgaccacttgaccacagaactctgcttggaggaggttgaccggtgttggaaaacatccatagggccagcttttgttgccctcatcggtgatcagtacggcccctgtctgattccctcg

SEQ ID NO: 689176 - DNA, 120 bp, Artificial Sequence
  ENSG00000188039_2 (sequence is synthesized)
cggatcgatgagaaggagtgggaggtattgagggaccatctgactgccaggccaagtgacctggagctggtggcacgatacttccagagggacgagaatgcgtttcctcccacctacgtc

SEQ ID NO: 689177 - DNA, 120 bp, Artificial Sequence
  ENSG00000188039_3 (sequence is synthesized)
ctgcaggcaccaggtactggggaggcctgtgaaccagaggaggccaccttaacttctgtcctacgctctggagcccaggaggcccggaggctggggctcatcacccaggagcagtggcag

SEQ ID NO: 689178 - DNA, 120 bp, Artificial Sequence
  ENSG00000188039_4 (sequence is synthesized)
cactaccaccggtcagtcattgagtgggagatagagcggagcctgctgagctcagaggaccgggaacagggagccaccgtcttccttagagagatccaagacctccacaaacacatcctt

SEQ ID NO: 689179 - DNA, 120 bp, Artificial Sequence
  ENSG00000188039_5 (sequence is synthesized)
gaagactgcgcccttaggatggtggaccggctcgcggatggctgcctggacgctgatgcccagaaccttctcagcagcctcaaaagtcacatcactgacatgcacccaggggtcctcaag

SEQ ID NO: 689180 - DNA, 120 bp, Artificial Sequence
  ENSG00000188039_6 (sequence is synthesized)
acccaccgcctgccgtggagccgcgacttggtgaaccccaagaacaagactcacgcctgctacctgaaggagctgggtgagcagtttgtggtgagggccaatcaccaggtcctcacacgc

SEQ ID NO: 689181 - DNA, 120 bp, Artificial Sequence
  ENSG00000188039_7 (sequence is synthesized)
ctccgtgagctggatacggccggacaggagttggcgtggctctaccaagagatccgccaccacctttggcagagctcggaggtcattcagaccttctgcggacgccaggaactcctggcc

SEQ ID NO: 689182 - DNA, 120 bp, Artificial Sequence
  ENSG00000188039_8 (sequence is synthesized)
cggcttgggcagcagctcaggcacgatgacagcaagcagcacacccccctggtactctttgggcccccaggcattggaaagacagccctgatgtgcaagctggctgagcagatgccaagg

SEQ ID NO: 689183 - DNA, 120 bp, Artificial Sequence
  ENSG00000188039_9 (sequence is synthesized)
ctgctggggcacaagacagtgaccgtcctgcggctgctggggacgtcacaaatgagctcagatgcccgtggcctgctgaagagcatctgcttccaggtgtgcctggcctatgggctgccc

SEQ ID NO: 689184 - DNA, 120 bp, Artificial Sequence
  ENSG00000188039_10 (sequence is synthesized)
ttgccccctgcccaggttctggacgcccacaccagggtggtccagtttttccataccctcctccacactgtctcttgcagaaacttcgagtctctcgtgctcctgctggatgctatggat

SEQ ID NO: 689185 - DNA, 120 bp, Artificial Sequence
  ENSG00000188039_11 (sequence is synthesized)
gacctggactctgtccgccatgctcggagggttccctggctgcctctcaactgccccccgagggtgcacctcatcctctcagcttgctcgggggcactgggggttttggacaccttgcag

SEQ ID NO: 689186 - DNA, 120 bp, Artificial Sequence
  ENSG00000188039_12 (sequence is synthesized)
cgggtgctcctggacccggaggcctactgggaggtgaagcccctttccggaaaccaaggccagcagatgatccaactcctgctggcagctgcaaggaggacgctgagcccggtgcacaca

SEQ ID NO: 689187 - DNA, 120 bp, Artificial Sequence
  ENSG00000188039_13 (sequence is synthesized)
gatttgctctgggccagcctcccagagtgtgggaacccagggcggctgaggctggcgtttgaggaagcccggaaatgggcctctttcaccgtgcctgtcccgctggccaccaccgcagag

SEQ ID NO: 689188 - DNA, 120 bp, Artificial Sequence
  ENSG00000188039_14 (sequence is synthesized)
gaagccacgcaccaactctgcacccgcctggagcagacacacgggcagctcctcgtggcccacgtgctgggctacattgtgtcttcccgacacggtctctcggaggcggagctgaaggat

SEQ ID NO: 689189 - DNA, 120 bp, Artificial Sequence
  ENSG00000188039_15 (sequence is synthesized)
gttttgtccctggacgacgaggtcctgcaggatgtgtaccgagattggaccccgcccagcaaggagctgctgcgcttcccgcccctgctgtgggtgcggcttcgtcgggatctgggatac

SEQ ID NO: 689190 - DNA, 120 bp, Artificial Sequence
  ENSG00000188039_16 (sequence is synthesized)
tacttggcccggcggcccgtggatggcttcaccctcctggccattgcccacagacagctggtcgaggtggtccgtgagcgctacctgtcaggatccgagagagccaagaggcatggcgtc

SEQ ID NO: 689191 - DNA, 120 bp, Artificial Sequence
  ENSG00000188039_17 (sequence is synthesized)
ctggccgacttcttctcagggacctggagccagggtaccaagaagctcatcactctgccacttgtggggaaaccactgaacttggaccgaaaggtggccccgcagcctctgtggttctca

SEQ ID NO: 689192 - DNA, 120 bp, Artificial Sequence
  ENSG00000188039_18 (sequence is synthesized)
catacggttgcaaacctgcggaagctgaaggagttgccctatcacctgcttcactcgggccgcctggaggagctgaaacaggaggttctgggcagcatgagctggatttcctgccggggc

SEQ ID NO: 689193 - DNA, 120 bp, Artificial Sequence
  ENSG00000188039_19 (sequence is synthesized)
atctctgggggcattgaagacctgctggatgactttgacctgtgtgcccctcacctggactcccctgaggttggcctggtccgtgaagccctccagctctgccgccctgctgtggagctc

SEQ ID NO: 689194 - DNA, 120 bp, Artificial Sequence
  ENSG00000188039_20 (sequence is synthesized)
cgaggcatggagaggagcctcctgtacacagaactgctggccagactccatttcttcgccacctcacatccagcactggtgggacagctatgccaacaggcccagagctggttccagttg

SEQ ID NO: 689195 - DNA, 120 bp, Artificial Sequence
  ENSG00000188039_21 (sequence is synthesized)
tgcgcacaccctgtgctggtgcccctcggaggattcctccagcccccgggaggacccctccgggcaactctcagcggctgtcacaaaggcatcaccgccatggcatggggtgtggaggag

SEQ ID NO: 689196 - DNA, 120 bp, Artificial Sequence
  ENSG00000188039_22 (sequence is synthesized)
aagctgctggtgattggcacccaggatggcatcatggctgtgtgggacatggaagagcagcatgtgatccacatgctaactggacacacaggagaggtgaggtgtgtgaaaatatttgcc

SEQ ID NO: 689197 - DNA, 120 bp, Artificial Sequence
  ENSG00000188039_23 (sequence is synthesized)
aaagggaccctcgccaactctgcttcaaaggattacacgctgcacttgtggaacttactctctggccaggagaaatttaccatttgggatggaggctcaaaaaatcccgctgaacctcag

SEQ ID NO: 689198 - DNA, 120 bp, Artificial Sequence
  ENSG00000188039_24 (sequence is synthesized)
atctggaaccttcatgtggatgaggcacacaaagttgtgtattcagcatctggctcaaagatcaatgcttggaatctggaaactgcagagccggtattccatatcctgggagatgcctct

SEQ ID NO: 689199 - DNA, 120 bp, Artificial Sequence
  ENSG00000188039_25 (sequence is synthesized)
gatccttggatgtgcatggccgtgctggcctcccaggccacactgctgacagtgtccagggatggtgtggtcagtctgtggagctcagctacgggaaaacttcaggggaagcaacatatg

SEQ ID NO: 689200 - DNA, 120 bp, Artificial Sequence
  ENSG00000188039_26 (sequence is synthesized)
tccagcatcaaagaagaaacacctacctgtgccgtctcagtccagaagcaaggaaagcttgttaccgggtttagcaatggctccatctctttggtttcctccaaaggggacagattgctg

SEQ ID NO: 689201 - DNA, 120 bp, Artificial Sequence
  ENSG00000188039_27 (sequence is synthesized)
gagaagcttccagatgctgtgaggttcctggtggtctctgaagatgagtccctcctcgccgcaggctttggaagatcggtgcggatattcttggcggactcgaggggctttcgccgattc

SEQ ID NO: 689202 - DNA, 120 bp, Artificial Sequence
  ENSG00000188039_28 (sequence is synthesized)
atggccatggatctggaacatgaagacatggtggagacggctgtttttggtactgagaacaacctgatcatcacggggtcccttgatgcgctcattcaggtgtggagtctgtcagaacag

SEQ ID NO: 689203 - DNA, 120 bp, Artificial Sequence
  ENSG00000188039_29 (sequence is synthesized)
cccttctggacatcctggaaggcgtcggggcccccgtgagcctgctggcccgcggcggggctttggtggcatctgcttccccacagtcctcatctttcaaggtctgggatctcagcgatg

SEQ ID NO: 689204 - DNA, 120 bp, Artificial Sequence
  ENSG00000188039_30 (sequence is synthesized)
ctcataggtcccgggtgcctgcaccatttctggaccgcaccggcctcaccgcagtgtcccacaatggaagctacgtctacttccccaaaattggggacaaaaacaaagtcactatttggg

SEQ ID NO: 689205 - DNA, 120 bp, Artificial Sequence
  ENSG00000188039_31 (sequence is synthesized)
acttggcagaaggcgaggaacaagattccctggacacctccagtgagatcaggtgtctggaggttgctgagcagcgcaagctcctatttacgggcctcgtgtcgggggtcgtccttgtgt

SEQ ID NO: 689206 - DNA, 120 bp, Artificial Sequence
  ENSG00000188039_32 (sequence is synthesized)
tccccctgaattccaggcaggacgtgatatgcattccccctcccgaggcccggaaagcaatcaactgcatgtccctgagcaagtgcgaggaccgcctggccatcgcctatgacaacatcg

SEQ ID NO: 689207 - DNA, 120 bp, Artificial Sequence
  ENSG00000188039_33 (sequence is synthesized)
tcctggtgctggacatcacctccggggacccctgcccggtcatcgatgggccaagatacaccttttacactcagctgcccgagaccctctccagcgtggccattctgacggactaccgcg

SEQ ID NO: 689208 - DNA, 120 bp, Artificial Sequence
  ENSG00000188039_34 (sequence is synthesized)
tggtctacagcatgaccaatggggacctctttctttacgagtgtgcaacttccaaagcgtttcccttggagacccacaggagccgagttgcctgtgtggaggtcagccacaaggagcagc

SEQ ID NO: 689209 - DNA, 120 bp, Artificial Sequence
  ENSG00000188039_35 (sequence is synthesized)
tggtggtcagcgggtctgaggatgccctgctgtgtctctgggacctgcaggcacgcaagtggaaattcgagatgagctacacgagttcttactgcagaggggtccaatgtgcttgcttct

SEQ ID NO: 689210 - DNA, 120 bp, Artificial Sequence
  ENSG00000188039_36 (sequence is synthesized)
ccaaggatgacaagtatgtgtacgtgggcttaaaggatcgctctatacttgtttggagtgtgctggatggcaccctgctgacagtccagtttgtccatgctgtggtaaacagaatcatcc

SEQ ID NO: 689211 - DNA, 120 bp, Artificial Sequence
  ENSG00000188039_37 (sequence is synthesized)
caaccaccagtggcttcattgcccccaccaggcatggttatctgatccgagagaatttccagtgcctttcagcaaaagcctcaccgcaggaccctcttaagaacttcaagaaggcaatgt

SEQ ID NO: 689212 - DNA, 120 bp, Artificial Sequence
  ENSG00000188039_38 (sequence is synthesized)
ggatggtcaaatccaggcagagagaggagctagttgcagctgcaggagctccccaggacttggagtcagaaagtgcccagggaaatgaaaccaaatcaaacaaatgctcacaagtgtgcc

SEQ ID NO: 689213 - DNA, 120 bp, Artificial Sequence
  ENSG00000188039_39 (sequence is synthesized)
tgatagtgtaaaaaaataaaaataaaaaaaccctgtgggggtatggggctccagtgagttagccccatttaatctagttaaagcaaaaagaatacgtttgctggtgtatatctggaccca

SEQ ID NO: 689214 - DNA, 120 bp, Artificial Sequence
  ENSG00000188039_40 (sequence is synthesized)
tggcttcagattatggcttcagaccttgtctcttctcatctttccattattctttcctctttttcattttcattctcagacttgccacccccaggttagcaacatggtggccaatatgct

SEQ ID NO: 689215 - DNA, 120 bp, Artificial Sequence
  ENSG00000188039_41 (sequence is synthesized)
gctgtctccaatttcaatagaaaagagagcttctctttcccaacagtcctagcctcaactctactggtcccaattggcccatacgcctagccctaaaccaattattatatctgggagaat

SEQ ID NO: 689216 - DNA, 120 bp, Artificial Sequence
  ENSG00000188039_42 (sequence is synthesized)
gcagagctctaatcggctagactgatccaatgtccaccactgggactgagaatagaagagattactcctgagatgcaaactggagttctggtaccagatgaagggggaacggatgaatgt

SEQ ID NO: 689217 - DNA, 120 bp, Artificial Sequence
  ENSG00000188039_43 (sequence is synthesized)
gagatacagcaaatcactgatgtggaccacagaacctcacagtttataaagctgtaggtgctgtcatctgatcctcatcacaactcatactttagggagggcaggagtttctgtatctat

SEQ ID NO: 689218 - DNA, 120 bp, Artificial Sequence
  ENSG00000188039_44 (sequence is synthesized)
tttacagatgaggaaactgagccttgcggaagtagttataatttgattcaggtcacaagtccaaggtgcaagagctctgagagtgagccttctgtcccattcctgttagacctcactcca

SEQ ID NO: 689219 - DNA, 120 bp, Artificial Sequence
  ENSG00000188039_45 (sequence is synthesized)
atttcagtctgcagagcacaaccatctcttccacaggcaccacactcaaatgctcacaggagctagtgactaatctagacacttccatgcacctgggtgagcagcagggagagacagaga

SEQ ID NO: 689220 - DNA, 120 bp, Artificial Sequence
  ENSG00000188039_46 (sequence is synthesized)
ctggacatgtggaaggcagagattgtgtctagggtgggtatgagcagcctgactgtagcccagaatcaccatggccaaacaagcccactgctgtcagtgcttccagttgtaataagcaaa

SEQ ID NO: 689221 - DNA, 120 bp, Artificial Sequence
  ENSG00000188039_47 (sequence is synthesized)
gccagaaatccagacttttatgcaaaaatgttctgacttttaaagttggcgattggttgaatttatatctatagtgcatttggcatgtgcgtctttggttaatgagctgacttcaggact

SEQ ID NO: 689222 - DNA, 120 bp, Artificial Sequence
  ENSG00000188039_48 (sequence is synthesized)
cacgctggcagtaaaacaatcaacatgttatagttcatccctctctattccttggctcccaaacttttgggataaagatgtgggtttttaatcttaaaaactggaggctcttggaagtag

SEQ ID NO: 689223 - DNA, 120 bp, Artificial Sequence
  ENSG00000188039_49 (sequence is synthesized)
aaagagctgctgatctctccctgctttgcttttgaactgtctgccttgtgcaagttcaacagtcaaactgttttcattccacttaagtggatctttcttctttgcccacagccttctaaa

SEQ ID NO: 689224 - DNA, 120 bp, Artificial Sequence
  ENSG00000188039_50 (sequence is synthesized)
agcccttctcagtcttctcaggcttttactttaatgctaggatagtctaaatcttcaaggtggctatcccttctcccctccgtggaattcctgatagagtctcaataaaagcaaccttag

SEQ ID NO: 689225 - DNA, 120 bp, Artificial Sequence
  ENSG00000188039_51 (sequence is synthesized)
aaacagaggcttttgagctgaacaagaccctactgctgtcttattcatccattttccaaaccagttttccaaggcaggttttggtagttctgcaaatgttagtgtcaaatttcatttaaa

SEQ ID NO: 689226 - DNA, 120 bp, Artificial Sequence
  ENSG00000188039_52 (sequence is synthesized)
aatattttaaactgtaattttaagatgtatgcttggatgtattgggcagcagcttctaaggtgttgaagattactaaggttggtgcaaaaagtaactgtggttttcgccattaaaaatat

SEQ ID NO: 689227 - DNA, 120 bp, Artificial Sequence
  ENSG00000188039_53 (sequence is synthesized)
gcaaaaagtaactgtggttttcgccattaaaaatattaaaaataatggcaaaaactggctgggcacagtggctcacacctgtggtcccagctctttggaaggccgaggcaggtggatcac

SEQ ID NO: 689228 - DNA, 120 bp, Artificial Sequence
  ENSG00000188039_54 (sequence is synthesized)
gctgacactgcaaagggcctctgtccttactggggaagcccagtcctgctcagctgtcttcttcagcaacaaacagaagtccagaaagagaaacagttgtggaggaagctgttgtgatga

SEQ ID NO: 689229 - DNA, 120 bp, Artificial Sequence
  ENSG00000188039_55 (sequence is synthesized)
taatttactgagcacctactatgtgccaggcacgccagccttaccagacaagatccttgggctcatggaattcactttctcgtgggacagacaaacaataacatgtagaaacatatcagc

SEQ ID NO: 689230 - DNA, 120 bp, Artificial Sequence
  ENSG00000188039_56 (sequence is synthesized)
aaaaaaaaaaaaaaagtaatggcaaaaaccacaattaattttgcatcaacctaataatttaggattcttctgccattttcatttaactgatttaactgaagagcccaattaaattgtgaa

SEQ ID NO: 689231 - DNA, 120 bp, Artificial Sequence
  ENSG00000188039_57 (sequence is synthesized)
gggagccctgaaaaaattagctactctttgccactgcttctctgtgaatcaagggcttacccaatgcagaaataaagtagatgttgagaccaattaagatttcacctacaaattctgatt

SEQ ID NO: 689232 - DNA, 120 bp, Artificial Sequence
  ENSG00000188039_58 (sequence is synthesized)
ttaaatgcctgtgtccatctccacagcctcagtgagaattgattgttttgtagataaatcctaatttaaacattggaaatgcctttttactaataaaatgctacaacaaattattgctta

SEQ ID NO: 689233 - DNA, 120 bp, Artificial Sequence
  ENSG00000188039_59 (sequence is synthesized)
tcgggtccaaggagcctgctgggacccaggaaaacgagagaaggaacagaaattgtggtggaggcaaattcaagatcagaagattggggaggaggtgctaagagaggtctggagagatgc

SEQ ID NO: 689234 - DNA, 120 bp, Artificial Sequence
  ENSG00000188039_60 (sequence is synthesized)
tgggacccagaactggggcctcagtgagatcagcaggctgcagctaaactgtggtatccagaccatgcggccgatgccctgggagggagaccacttgcttaagtcctccaggagggcgat

SEQ ID NO: 689235 - DNA, 120 bp, Artificial Sequence
  ENSG00000188039_61 (sequence is synthesized)
atccatcccctgttggcaaaaatgcaacagtctgcatttcttgcaaatgccaaaccagtcaacctctggtccctcggctctgagaaaggctgttttactgatccaagatagttcagccat

SEQ ID NO: 689236 - DNA, 120 bp, Artificial Sequence
  ENSG00000188039_62 (sequence is synthesized)
gttcctgatcaatcttggtctcaggatcttcctctcctcgctggctctttcttcttgtctcccagggaggttcctggcacaggggccgtattagtctgttctcatgccactaataaaggc

SEQ ID NO: 689237 - DNA, 65 bp, Artificial Sequence
  ENSG00000188039_63 (sequence is synthesized)
ggagaagcaaagaggcacatcttacatggtggcagtcattgagtgggagatagagcggagcctgc

SEQ ID NO: 689238 - DNA, 120 bp, Artificial Sequence
  ENSG00000188039_64 (sequence is synthesized)
actcccgtgcctagaggagccaacatccagaggtcttggcggggaggccactgtctaatatccctccatgagtgcttgcagaccaaggaaagcagtggagaggagctggttcagctcccc

SEQ ID NO: 689239 - DNA, 120 bp, Artificial Sequence
  ENSG00000188039_65 (sequence is synthesized)
agaggcactggaggtggtgggggctgcaggtcactgggggagcctcggaaggtgaaactggctccccgttcctgatggccctgcccggctggcctaccaggaaggctgcctggctgctgg

SEQ ID NO: 689240 - DNA, 120 bp, Artificial Sequence
  ENSG00000188039_66 (sequence is synthesized)
cgtgaggtctctgagccccacgccctttccaggggaagggtcatcttggtgggtgggcggcaatgagcgtgggccctctcagcccgagtacccgccggcggcttctgcggggtgaagccg

SEQ ID NO: 689241 - DNA, 120 bp, Artificial Sequence
  ENSG00000188042_0 (sequence is synthesized)
gactgtgaggctgccgagcggacagcgactcccggggaagcccgcgctccgggagcgggagcgggagcaggagcaggagcagcgccgtcccaggccagaggcgagcgccgggcgccggga

SEQ ID NO: 689242 - DNA, 120 bp, Artificial Sequence
  ENSG00000188042_1 (sequence is synthesized)
gagcggagagcccgggcagctgccggagcgcgggggcgcggcccgaggaaaccacagagcgagcccaggcctggggagggcgccgaacatctgaggcggcttcgcgggagacaaagccgc

SEQ ID NO: 689243 - DNA, 120 bp, Artificial Sequence
  ENSG00000188042_2 (sequence is synthesized)
ttcgcgggagacaaagccgcgcgtagagacgcgatgcccgccgatcgcgagcccggccggcgagggcgcggggactgcggcgtctgagcgcgccaagccgtgcgcccgcggggacgccga

SEQ ID NO: 689244 - DNA, 120 bp, Artificial Sequence
  ENSG00000188042_3 (sequence is synthesized)
ggcccaggtgcgcccggccgcgtcgggcccgtgactgctcggggggcggcgccctcccgccgcagccgcagtggctggcgccgcagccaggagccatgggcaacatctcctctaacatct

SEQ ID NO: 689245 - DNA, 120 bp, Artificial Sequence
  ENSG00000188042_4 (sequence is synthesized)
cctctaacatctcggccttccagtccctgcatatcgtcatgttgggcttggactcggccggcaagaccacggtgctctaccggctcaagttcaacgagttcgtgaacacggtgcccacca

SEQ ID NO: 689246 - DNA, 120 bp, Artificial Sequence
  ENSG00000188042_5 (sequence is synthesized)
tcggcttcaacaccgagaagatcaagctgagcaacggcacggccaagggcatcagctgccacttctgggacgtgggcggccaggagaagctgcggccgctgtggaagtcctacagccgct

SEQ ID NO: 689247 - DNA, 120 bp, Artificial Sequence
  ENSG00000188042_6 (sequence is synthesized)
gcacggacggcatcatctacgtggtggactcggtggacgtggaccggctggaggaggccaagacggagctgcacaaggtgaccaagttcgccgagaaccagggcacgccgctgctggtca

SEQ ID NO: 689248 - DNA, 120 bp, Artificial Sequence
  ENSG00000188042_7 (sequence is synthesized)
tcgccaacaagcaggacctgcccaagtcgctgccggtggcagagattgagaagcagctggcgctgcacgagcttatcccggccaccacctatcacgtccagccggcgtgcgccatcatcg

SEQ ID NO: 689249 - DNA, 120 bp, Artificial Sequence
  ENSG00000188042_8 (sequence is synthesized)
gcgagggcctcaccgagggcatggacaagctctatgagatgatcctgaaacgcaggaagtccctcaagcagaagaagaagcggtaatgcgcccggagcgaccggggagcgagcgagtgcg

SEQ ID NO: 689250 - DNA, 120 bp, Artificial Sequence
  ENSG00000188042_9 (sequence is synthesized)
ggatggttggatggatggatggatggatgagcgagaacccgcgcccgcgaacaaagagcgaaccaaagcgatgcttcgaatttttaaaacggaatctctgcacccaaatgcaggactggt

SEQ ID NO: 689251 - DNA, 120 bp, Artificial Sequence
  ENSG00000188042_10 (sequence is synthesized)
tctgcacccaaatgcaggactggtgacttaaggagctgcgaagtctgatttaccggcctactctcgacctgccccccacccccagctcaggggaccttttgtctgaacgccagagctact

SEQ ID NO: 689252 - DNA, 120 bp, Artificial Sequence
  ENSG00000188042_11 (sequence is synthesized)
gaccaggtcggggggccgcggtggggagtggaagagccggtcctgctgtccgccctcccagccccaggtggaaggctcagttgtcggaaagacaaaagcgatttcttcccactcctgcag

SEQ ID NO: 689253 - DNA, 120 bp, Artificial Sequence
  ENSG00000188042_12 (sequence is synthesized)
ggccagaagttcaggctgccccgcctccactgggggatcgcacctgtgaattacctgaggtatgcatttcccagaaccgtgggcgtacccaccttggggggcatgttggttctgggggga

SEQ ID NO: 689254 - DNA, 120 bp, Artificial Sequence
  ENSG00000188042_13 (sequence is synthesized)
ccacctctccttgcattcaggggctgtgaagctgagtaattttcggtcacagggcaggcccctgttgaaatttcatttgtcctgctctgggcccaaaggtggtggtggtttgggtcatca

SEQ ID NO: 689255 - DNA, 120 bp, Artificial Sequence
  ENSG00000188042_14 (sequence is synthesized)
gaggactgcctgggacggttcagcgggcacggagcgctgtgctggcctggctggggatggccgcggaggtgcccttttcctggtgctttgtggtggctgcagaagaccagttttgttgag

SEQ ID NO: 689256 - DNA, 120 bp, Artificial Sequence
  ENSG00000188042_15 (sequence is synthesized)
agttttgttgagaactgcttttcagcctggaatcagacatcttccagatggtttggaccctgtccatgtgtaggtcattatcacacaaagagaccaataaaaataaaaaaaataaaaaaa

SEQ ID NO: 689257 - DNA, 120 bp, Artificial Sequence
  ENSG00000188042_16 (sequence is synthesized)
tgtttaaagggtaaggcttttggtgtaaatgctggatggggtgtgtgtgtgtgtggatatagggacctccctctgtactgtgtactgtgtaatcggcattaatacctagactcatatgta

SEQ ID NO: 689258 - DNA, 120 bp, Artificial Sequence
  ENSG00000188042_17 (sequence is synthesized)
tggaattttaaattctcttagcctactgattggtttggatgagcacaccagctgcaggtgtgtgctgaattgcaagatggtatttttttttttaaccaagggatgtctcttgtaatacta

SEQ ID NO: 689259 - DNA, 120 bp, Artificial Sequence
  ENSG00000188042_18 (sequence is synthesized)
accgcgtgataatgggttttcagacatgatgaaaaaaaaaaacttttacaaatgaatacttaccttagaaatattcaccttaggaaaaaagactttgctctgcccttttatattccttta

SEQ ID NO: 689260 - DNA, 120 bp, Artificial Sequence
  ENSG00000188042_19 (sequence is synthesized)
tgctgcaagtggtgacatgttcagatttctaatttggttcattgtggcctatctggtttaagtctttcattaaaaatgtctcgttagagtatttgatgtcatgcaccaaaaaaataaaac

SEQ ID NO: 689261 - DNA, 120 bp, Artificial Sequence
  ENSG00000188042_20 (sequence is synthesized)
cccaccttgttgcaaaagctgacctcgttgcatggaattaaaagagaaggaaaaacacaaggatgaagtctttccgaattcattcttgtgggaactggccttcggagccagccagcactt

SEQ ID NO: 689262 - DNA, 120 bp, Artificial Sequence
  ENSG00000188042_21 (sequence is synthesized)
tgggcaaatgcaaacaacaatgagtgcttgagataaaagaaagtgtgacgtcatggtcactggtactcaggcacttcacagtttacttgaaagaggctttggaaaatagataaagtgaaa

SEQ ID NO: 689263 - DNA, 120 bp, Artificial Sequence
  ENSG00000188042_22 (sequence is synthesized)
gaagaataaatacatatttttaataatgtaattttaaaaatcctttataatcaggactgagtcttggtttgcagaagctgtcacttaccctgaaacacagtatcaaaagggaaacttaaa

SEQ ID NO: 689264 - DNA, 120 bp, Artificial Sequence
  ENSG00000188042_23 (sequence is synthesized)
acatactgtttgatttttttatttcctcttacaatccatgttttcaggtagaattatgactttccccccattgttacacatttctttacaaaggaggcctgtagaaattggacacgatca

SEQ ID NO: 689265 - DNA, 120 bp, Artificial Sequence
  ENSG00000188042_24 (sequence is synthesized)
tgcttgagcatgtgagttagtcaaattatgagtccctgcctattgtccattacacaccgaatgttaatttaagaaccagaggcagaagttctggcttcctgcttgaaacccaattcttat

SEQ ID NO: 689266 - DNA, 120 bp, Artificial Sequence
  ENSG00000188042_25 (sequence is synthesized)
atgaaattttttaaaagcagaaacctagcagcccatctgctttttctcttttgtcggtgtatttggtacccctccaatgctggtctttttgtagaaactcagtagagaaagtctagctaa

SEQ ID NO: 689267 - DNA, 120 bp, Artificial Sequence
  ENSG00000188042_26 (sequence is synthesized)
gcagtgttgaaaagcctgcaagatttcagtttacatatcgacagcatatccactgatttctaaatgggctggtcccatcatctgaagattctgtatagaattattaaaaaaaaaatccat

SEQ ID NO: 689268 - DNA, 120 bp, Artificial Sequence
  ENSG00000188042_27 (sequence is synthesized)
ctttctttattttcttcacatgcgacaatttcttaagcactttgacattttggtagttccacactattgagagaataatatatttattttgtgacattgcagatgccaaatactgtaacc

SEQ ID NO: 689269 - DNA, 120 bp, Artificial Sequence
  ENSG00000188042_28 (sequence is synthesized)
ttctcatgataacaatacttaggttcaagatcactgttcaaaccctgtcatgctttaaaactgatgcgagatgattttgttttttgcataatcaatacttaagggtgcaatcaactgtta

SEQ ID NO: 689270 - DNA, 120 bp, Artificial Sequence
  ENSG00000188042_29 (sequence is synthesized)
gtaattgtgcagtaaagtaaagccctgtggtgtatcaactactagttaagagtctcagttgatttctgtaatgtttgacctaataatagcccgtttcgtctctgacccaacagaggaagc

SEQ ID NO: 689271 - DNA, 120 bp, Artificial Sequence
  ENSG00000188042_30 (sequence is synthesized)
acagatcaaatcaccttggagtggtcaccagggggacagggagccccccaccaatgtatcaatgggtgatttatgatgccttctgccctttggcgagtgaatgggtttcccataggggaa

SEQ ID NO: 689272 - DNA, 120 bp, Artificial Sequence
  ENSG00000188042_31 (sequence is synthesized)
gttggcctccctccgtgagctttggaaatgttttctaatagacacagggaggccagttctgtttcagagcaattatcttcccaaattctctgttctggtgttggaactgtgtgccctggt

SEQ ID NO: 689273 - DNA, 120 bp, Artificial Sequence
  ENSG00000188042_32 (sequence is synthesized)
ttctgttttcctttctactgctgtaattctctgtctcatcatccttctcttttgtttccatagccttttataatgcatatatgatgctgtgaacagaaataaattatttatacaatcaaa

SEQ ID NO: 689274 - DNA, 120 bp, Artificial Sequence
  ENSG00000188050_0 (sequence is synthesized)
aatctaaagtttttcacctctctctagtaagacatctgaaactcataagccatctttaagaatttcttacaaaaacatgctggaagacagtggatcttgtttgtatcctgaagatttttt

SEQ ID NO: 689275 - DNA, 120 bp, Artificial Sequence
  ENSG00000188050_1 (sequence is synthesized)
tctcttcgttattttaaattaattgtcaacagatgtgcaactgttaggttggttcttaagtcactcggagaagagagagatgcatctactcaaggttggcacttggagaaacaacactgc

SEQ ID NO: 689276 - DNA, 120 bp, Artificial Sequence
  ENSG00000188050_2 (sequence is synthesized)
ctcttcctggcttatgaagttcagtgttctttggcttgttagtcagaactgttgcagagcaagtgttgtttggatggcttatatgaacatatcatttcatgttgggaatcatgtgttgtc

SEQ ID NO: 689277 - DNA, 120 bp, Artificial Sequence
  ENSG00000188050_3 (sequence is synthesized)
agagttgggagagactggagtctttggaagaagctccactttgaagagagtggcaggagttatagtgccaccagagggaaaaatccaaaatgcatgtaatcccaataccattttcagccg

SEQ ID NO: 689278 - DNA, 120 bp, Artificial Sequence
  ENSG00000188050_4 (sequence is synthesized)
atcaaagtactcagagacctggcttgcacttattgaacggggaggttgtaccttcacacagaaaattaaagtggcaactgagaagggagccagtggagtgatcatctataacgttccagg

SEQ ID NO: 689279 - DNA, 120 bp, Artificial Sequence
  ENSG00000188050_5 (sequence is synthesized)
tggtaacttaaaaggcacggaaattttccatttaattaagaagggagttctcattacagccgtggttgaggtggggagaaagcacatcatctggatgaatcactatttggtctcttttgt

SEQ ID NO: 689280 - DNA, 120 bp, Artificial Sequence
  ENSG00000188050_6 (sequence is synthesized)
gattgtcacaactgctaccttagcatatttcatcttttatcacattcatagactttgtttagcaaggattcagaaccggagatggcagcgattaacaacagatcttcagaacacatttgg

SEQ ID NO: 689281 - DNA, 120 bp, Artificial Sequence
  ENSG00000188050_7 (sequence is synthesized)
acaactccaacttcgagtagtaaaagagggggatgaagaaataaatccaaatggggatagctgcgtaatttgctttgaacgctataagcctaatgacatagttcgtattctgacttgtaa

SEQ ID NO: 689282 - DNA, 120 bp, Artificial Sequence
  ENSG00000188050_8 (sequence is synthesized)
acattttttccacaagaattgcattgacccctggattttaccccatgggacatgccccatttgcaaatgtgatattcttaaagttttggggattcaagtggttgttgaaaatggaacaga

SEQ ID NO: 689283 - DNA, 120 bp, Artificial Sequence
  ENSG00000188050_9 (sequence is synthesized)
acctttgcaagttctaatgtcaaatgaactgcctgaaaccttatcacctagtgaagaggagacaaataatgaagtttctcctgcaggaacctcagataaagtaatccatgtggaggagaa

SEQ ID NO: 689284 - DNA, 120 bp, Artificial Sequence
  ENSG00000188050_10 (sequence is synthesized)
ccctacttctcagaataatgacatccagcctcattcagtagtggaagatgttcatccttcaccttgatggcatgacttttgaggaagtgtattaaacctgtatgtgaaatcaggtcctaa

SEQ ID NO: 689285 - DNA, 120 bp, Artificial Sequence
  ENSG00000188051_0 (sequence is synthesized)
gagattcggcgtcccggctgcgaccagcaccccggagcccccgtccgtctggcgacccccagcccagtccccgaactttcagacactccctgcggccccgccccctcggggaccccctga

SEQ ID NO: 689286 - DNA, 120 bp, Artificial Sequence
  ENSG00000188051_1 (sequence is synthesized)
ggaccctcggattccccccaactcccctgccctctaaaaccacttcaattcctcaactcttcccccggcccgcaggaacccccgccatggcccgttcttacggcggccgggtgctggctg

SEQ ID NO: 689287 - DNA, 120 bp, Artificial Sequence
  ENSG00000188051_2 (sequence is synthesized)
cttacggcggccgggtgctggctgcaatgaccctgctgggcatcgcggcggccgtgctggcggcgctgggcgcgcagctgctgtttcagctgcaggcgggccgcgccgagctgcgggggc

SEQ ID NO: 689288 - DNA, 120 bp, Artificial Sequence
  ENSG00000188051_3 (sequence is synthesized)
cgggctgccagaggacgcggccgggacgctgctgccgctggccgccgcgctggccgcgctggtgctcgtgctggggttcacctgcttgctgctcgccgcgctctgtggccacctgggcgc

SEQ ID NO: 689289 - DNA, 120 bp, Artificial Sequence
  ENSG00000188051_4 (sequence is synthesized)
gtggccacctgggcgccgagctggcgcgggggcctggccccaggaggtctgactggtttctctacgactgccgcctcctcagacatgtggcccttggccttttctgctgtgggatctccg

SEQ ID NO: 689290 - DNA, 120 bp, Artificial Sequence
  ENSG00000188051_5 (sequence is synthesized)
tctatttagcagcactgtccatctatgccttgctacttttcgagatcgagacaggcgcagcagctgcttccatcctcggctcgggcaccctggttctggtggctgtgctgacccacactc

SEQ ID NO: 689291 - DNA, 120 bp, Artificial Sequence
  ENSG00000188051_6 (sequence is synthesized)
tcctccgggctgcccgggctgcccgccgtgggctccatgagttgtccccgccatcctttgaagacgacctcgcccgccctgccgaagtctccaaggccagccccagagctcagcctcagc

SEQ ID NO: 689292 - DNA, 120 bp, Artificial Sequence
  ENSG00000188051_7 (sequence is synthesized)
agggtatccatcgtcggaccccctattcaacctgtccagagcctggggacccctttgggtccatggccactgccacagcacctgcagccctggagggaggctgggagagcagcctgcctg

SEQ ID NO: 689293 - DNA, 120 bp, Artificial Sequence
  ENSG00000188051_8 (sequence is synthesized)
cactggtgtgagcccagggatgaggaatagagacctggtgtaagaaaaggataccatagagataggttcgggttcagctgcagtagcagtaggacttgatttttctctcattttattgca

SEQ ID NO: 689294 - DNA, 120 bp, Artificial Sequence
  ENSG00000188051_9 (sequence is synthesized)
tccttggcttttgtcctcaaggttgcctcgtggcacaaaataattgccagagctccagccttcacctcctcattctgagggaaagtcagaggccagcgctggctaggtgtctcctggaag

SEQ ID NO: 689295 - DNA, 120 bp, Artificial Sequence
  ENSG00000188051_10 (sequence is synthesized)
tcttcccaggaagcctcgaaacccttctttttatatcccactggccagaacagagcgaaatggccataccttgctgcaggggaggctgggaaatgtggctgtccagatggatgagattct

SEQ ID NO: 689296 - DNA, 120 bp, Artificial Sequence
  ENSG00000188051_11 (sequence is synthesized)
gttacaggcataaggggagcggggggcttaggcagtgattctctaagtgtctccatccatttcacagatgaggaaacggaggccccaagagaggcagtgactcaccagggggcccacggc

SEQ ID NO: 689297 - DNA, 120 bp, Artificial Sequence
  ENSG00000188051_12 (sequence is synthesized)
caggactgagcaccagagccaggattctcacctgaaccccataatctccatgctgctgatgtgcaagtctcagactctgcaaaatccactgcaccccctcgggctgtgaacatttcaaat

SEQ ID NO: 689298 - DNA, 120 bp, Artificial Sequence
  ENSG00000188051_13 (sequence is synthesized)
ccatgtgtgccaagcttggagcagcccagggccaggggcacggctggagagctggacccaggttcctggctgtggacccatggctgagggcttagctgctttgtgcctcagtttcctcat

SEQ ID NO: 689299 - DNA, 120 bp, Artificial Sequence
  ENSG00000188051_14 (sequence is synthesized)
ctgtaatatggggacacgaagtggccctgtctccaagggctctgacaagacacatgacttcatgtgaggcattccggggacccccacacaataggtcctcaatgtgtgttaatcgttctc

SEQ ID NO: 689300 - DNA, 120 bp, Artificial Sequence
  ENSG00000188051_15 (sequence is synthesized)
atgctgctgctgcttttggggtgtaggcatgggtagtttctggggctcaaggaaataacagaggggtctccaaaggtctcctgtcttgcacaacccacaagtaaactctgatattcacta

SEQ ID NO: 689301 - DNA, 120 bp, Artificial Sequence
  ENSG00000188051_16 (sequence is synthesized)
tgggaccctgggctgggtagagagcagcaatggtcccctaactgggatcaactctgcagacagcctccttgagttcaactccaggctctgacacttctttgctttggtgccttgggcaaa

SEQ ID NO: 689302 - DNA, 120 bp, Artificial Sequence
  ENSG00000188051_17 (sequence is synthesized)
gtctctctgtgccttgatttcctcatcagtacaatgggaataactgtcattacctcacagaatcacttgaggagattctgagatttaatcctcatgaaagcccataggaccaggcatagt

SEQ ID NO: 689303 - DNA, 73 bp, Artificial Sequence
  ENSG00000188051_18 (sequence is synthesized)
agatttaatcctcatgaaagcccataggaccaggcatagtagctcacatctgtaatcccagcaatatgggaga

SEQ ID NO: 689304 - DNA, 120 bp, Artificial Sequence
  ENSG00000188056_0 (sequence is synthesized)
agacccagcgtctgactcctcctgagagggctcccttttttctcctctcctccgctgtcagaaacagatctgggctggaatggcctggggtggggtccacacctgctgcttccacctgtg

SEQ ID NO: 689305 - DNA, 120 bp, Artificial Sequence
  ENSG00000188056_1 (sequence is synthesized)
ctgctgctgctcctggcctcagggtgctgtgcctgaagaacttcacaaacacccaggacagaccctcctcctgcaatgccagtactcacccaagagagggccctatcagcccaaatcctg

SEQ ID NO: 689306 - DNA, 120 bp, Artificial Sequence
  ENSG00000188056_2 (sequence is synthesized)
gtgtcagcagacatctccaagtcggtgtaccttacttgtcaccagctccaagccctggacagcagttcagaagtctcattacacaatctgggacaagcccaatgctggcttcttcaacat

SEQ ID NO: 689307 - DNA, 120 bp, Artificial Sequence
  ENSG00000188056_3 (sequence is synthesized)
caccatgattcagctgacacagaatgactcgggattctactggtgtggaatctacaacgcttccgaaaacatcatcactgttcttagaaatatcagcctggtggtgtctccagccccaac

SEQ ID NO: 689308 - DNA, 120 bp, Artificial Sequence
  ENSG00000188056_4 (sequence is synthesized)
cacgtctcctatgtggactcttccctggctcccaacaagcacagttctgatcacttctccagaggggacctctggccatccctccatcaatggctctgagaccaggaaatcaagagcccc

SEQ ID NO: 689309 - DNA, 120 bp, Artificial Sequence
  ENSG00000188056_5 (sequence is synthesized)
tgcctgccttggctcaggtggccccagattcctggtcttggtgctatgtggactcctcctggccaagggcctgatgttgtgagtcctgttagtgctcctgatctgcaggtgccacaggac

SEQ ID NO: 689310 - DNA, 120 bp, Artificial Sequence
  ENSG00000188056_6 (sequence is synthesized)
agcagtgacgaggtttctgattgtcccagcacagccttgtcccaggacccttgggtgcatgagccacaacatggatcctggatgaatcccagttcttcccctgcccagctattgggagct

SEQ ID NO: 689311 - DNA, 120 bp, Artificial Sequence
  ENSG00000188056_7 (sequence is synthesized)
ggcctaagtattgctccccacctccttgtgaggaaaggctagcgctaagcctattggagagaactttcagcccctgaactccccggtggtgacccctcacccctgcactgagccccctta

SEQ ID NO: 689312 - DNA, 120 bp, Artificial Sequence
  ENSG00000188056_8 (sequence is synthesized)
gatctactgcccctgccctgactttcgccattgggaagacctggggtgggggtttctgcatccgggtcaatgcccagctcagcatcttcagctgtgcccaggctcctctccagcactctg

SEQ ID NO: 689313 - DNA, 120 bp, Artificial Sequence
  ENSG00000188056_9 (sequence is synthesized)
tcgttctctgagccccacctcagcaggtctccaggatccctcacatttcccctgtttgttgcctgtggtctgccctagagtcctatgaatttcctcttgtgcttaattaaattcaacctc

SEQ ID NO: 689314 - DNA, 120 bp, Artificial Sequence
  ENSG00000188056_10 (sequence is synthesized)
tgagcaagacagcagttgtatcccctcaccttcctcccgtcccaccccagatatcctaaatgagagagaaatgacttaaaaataaatgataaaattgaaactaagaaaggctgtaatcag

SEQ ID NO: 689315 - DNA, 120 bp, Artificial Sequence
  ENSG00000188056_11 (sequence is synthesized)
cagactggaagctgaggaagatctagaagtaaaagaaaaaattagatgcgttaaaatgacatgagcaggcgactcagtggcccaaaacaggacccagaacattcatccgtaaatggaatc

SEQ ID NO: 689316 - DNA, 120 bp, Artificial Sequence
  ENSG00000188056_12 (sequence is synthesized)
tgataatctggggcccaaattctgtttacttaacatgtgagaagattcacagcctaaaagagaaaatcaagttgaactaacaataaatgatggtgggtgaaagataaatgttttagggaa

SEQ ID NO: 689317 - DNA, 120 bp, Artificial Sequence
  ENSG00000188056_13 (sequence is synthesized)
cagaagaggagcacatatttatgaagcaagaataggtacagtcattttccaactaacatctagtgagactgggattcaccactcagaatgggggtccaccatgagcaacagatttgaggt

SEQ ID NO: 689318 - DNA, 120 bp, Artificial Sequence
  ENSG00000188056_14 (sequence is synthesized)
accagtgcatagcagctgaatgccagccctgtaaaagaccaccataaagagagctccatgttcttttgctcttttggggatgggacatcaaacaaaagtctcttcgtgtatatctcagct

SEQ ID NO: 689319 - DNA, 120 bp, Artificial Sequence
  ENSG00000188056_15 (sequence is synthesized)
cctgccacatgatcatcacctatctgtgagaggcatcgcttttgctttgtttatttatttttttaatcctcattccctatgtccacttgccttcctctccgaggcaactactctaatgca

SEQ ID NO: 689320 - DNA, 120 bp, Artificial Sequence
  ENSG00000188056_16 (sequence is synthesized)
tttggtatgtaactttaaatttgaatgtattcttgtaaaacatccagtatttttttttctgtgactatgttttcacttacataaaagaaattgtgatagacctttttcatatgcttgtct

SEQ ID NO: 689321 - DNA, 120 bp, Artificial Sequence
  ENSG00000188056_17 (sequence is synthesized)
tactccttgctgggcacatatacacagcccacttcttttcagtgcttattccattgcgtacatatcccacagtgcatcattccgaacccagggtgcatgtgcttttttgccttcactttt

SEQ ID NO: 689322 - DNA, 120 bp, Artificial Sequence
  ENSG00000188056_18 (sequence is synthesized)
ctatatcataaatgatgctgtgatgaataccctccttcacgttctcttgtggaatcatgtgagacttcctttaggacttatacacaggtggcatcagctgggttgtgggatctcagacat

SEQ ID NO: 689323 - DNA, 120 bp, Artificial Sequence
  ENSG00000188056_19 (sequence is synthesized)
ctaattaatactgccagcttgtgttgcctgaaccaagaatctagacactagcgattatgtgttttctctgagtctatgtgaagtacacagcacaacctatggaatggtattgccaattaa

SEQ ID NO: 689324 - DNA, 120 bp, Artificial Sequence
  ENSG00000188056_20 (sequence is synthesized)
aaaaaaaatggaaggcaagaataaacgtagctgagtgatgctacatggggctagatatatgattatctctacttttgtgtatgcttggaaattttcataattaaaatggtacctaaaatt

SEQ ID NO: 689325 - DNA, 120 bp, Artificial Sequence
  ENSG00000188060_0 (sequence is synthesized)
gggtggcggacgcggccatggaggccgagggctgccgctaccaatttcgggtcgcgctgctgggggacgcggcggtgggcaagacgtcgctgctgcggagctacgtggcaggcgcgcctg

SEQ ID NO: 689326 - DNA, 120 bp, Artificial Sequence
  ENSG00000188060_1 (sequence is synthesized)
gagccggagcccgagcccgagcccacggtgggcgccgagtgctaccgccgcgcgctgcagctgcgggccgggccgcgggtcaagctgcaactctgggacaccgcgggccacgagcgcttc

SEQ ID NO: 689327 - DNA, 120 bp, Artificial Sequence
  ENSG00000188060_2 (sequence is synthesized)
agcgcttcaggtgcatcaccaggtccttttaccggaatgtggtgggtgtcctgctggtctttgatgtgacaaacaggaagtcctttgaacacatccaagactggcaccaggaggtcatgg

SEQ ID NO: 689328 - DNA, 120 bp, Artificial Sequence
  ENSG00000188060_3 (sequence is synthesized)
aaggtcatcttcctgctggttggccacaagagtgacctgcagagcacccgctgtgtctcagcccaggaggccgaggagctagctgcctccctgggcatggccttcgtggagacctcggtt

SEQ ID NO: 689329 - DNA, 120 bp, Artificial Sequence
  ENSG00000188060_4 (sequence is synthesized)
aaaaacaactgcaatgtggacctggcctttgacaccctcgctgatgctatccagcaggccctgcagcagggggacatcaagctagaagagggctgggggggtgtccggctcatccacaag

SEQ ID NO: 689330 - DNA, 120 bp, Artificial Sequence
  ENSG00000188060_5 (sequence is synthesized)
acccaaatccccaggtcccccagcaggaagcagcactcaggcccatgccagtgttgactctaggagagaaagggttaaagcagtcccagccttagcccacctggtgggatggggagtgtt

SEQ ID NO: 689331 - DNA, 120 bp, Artificial Sequence
  ENSG00000188060_6 (sequence is synthesized)
aatatctctctggaggacaaatgacagaagggttcatataaacagtatcctgacacagtcatgcttcctggattttggagtcgaggctttctacagaaaagaaagttctgatggccaggc

SEQ ID NO: 689332 - DNA, 120 bp, Artificial Sequence
  ENSG00000188060_7 (sequence is synthesized)
aagaaatgagtgaggtggatgcttcagcgctgttagtctcctccccatgcccctcctcacttcatctagtttagtccctttatcctgtgaagtaggggtcatcattagcccccttttaca

SEQ ID NO: 689333 - DNA, 120 bp, Artificial Sequence
  ENSG00000188060_8 (sequence is synthesized)
ctgagagaccagatgtgcaacttcctgtccttgagcctcagtgtccctatctatcgatggggctcataaaagatcccaccttgaagggaggtggtgaccacaaatgagacagtggacagg

SEQ ID NO: 689334 - DNA, 120 bp, Artificial Sequence
  ENSG00000188060_9 (sequence is synthesized)
atgtgctcacccagagcctgccgcgctgtgaattgaatgacaaaagctctcattcccactccctttttcttggctgcgatgtggccactctggcagcattcctgggctcagacactgaga

SEQ ID NO: 689335 - DNA, 120 bp, Artificial Sequence
  ENSG00000188060_10 (sequence is synthesized)
agccagcgtcaggaagctgatgcatgggcaaaggcaggtgcggggaattccagggggagcttggcttggaggcttcttatgtcctcaggctaaaatgattctgggcatgggattaatatg

SEQ ID NO: 689336 - DNA, 120 bp, Artificial Sequence
  ENSG00000188060_11 (sequence is synthesized)
tgacgtcaaacccagggttgctggccaatgcccccccgaccaggcccaggggctgaaaaatggatgttggaggctgggatgaacatgaatgtgtagcaactatgttgggcacacagtggc

SEQ ID NO: 689337 - DNA, 120 bp, Artificial Sequence
  ENSG00000188060_12 (sequence is synthesized)
cactgtgatgagccaccaagatccccctttctggctggggaacccatcaaccctctccccagctgctggagtgccactggatgatggacttcagcttgccccactctctgggaaaggccc

SEQ ID NO: 689338 - DNA, 120 bp, Artificial Sequence
  ENSG00000188060_13 (sequence is synthesized)
tcccttcagggcagcttgtatccaaagttcatctcctggggggccttaaaggactccctcttgccccagctctggacaactctgaaagtcaaaaccaactttatcagtctctgtgggctt

SEQ ID NO: 689339 - DNA, 120 bp, Artificial Sequence
  ENSG00000188060_14 (sequence is synthesized)
cattgaggacactgttgtgacatcatagccaagttatccccttgcccaatcctgcttccttttcttccccaaacaggtatccatttcaagaatatcccctaataaacatctgcacactca

SEQ ID NO: 689340 - DNA, 120 bp, Artificial Sequence
  ENSG00000188064_0 (sequence is synthesized)
gagtcacctggggcggccgacaagtgcggacacattggccgccgcggcgctcggcgaggcgctcacggcctcaggcggctgcgcctagtgcaggctgcacccgcccgccagccgcgcccg

SEQ ID NO: 689341 - DNA, 120 bp, Artificial Sequence
  ENSG00000188064_1 (sequence is synthesized)
cccggcccgcgcttgcaggggtccacggtcgctcaaccgggcttcgaggtcgcggcccccagcctgggtcaattccccgggctcacgcggcggtggcggcggcggcatcccgggctcacc

SEQ ID NO: 689342 - DNA, 80 bp, Artificial Sequence
  ENSG00000188064_2 (sequence is synthesized)
caccatggtggcagcgcgcgccgagtgcccgcgcgtcgccggccgcccgagccgcagcgcgggctgagcgcagtctgccc

SEQ ID NO: 689343 - DNA, 120 bp, Artificial Sequence
  ENSG00000188064_3 (sequence is synthesized)
gtcccctccggccgccgctgtctatggcgcagcccccctccctggatcatgcacagaaactttcgcaagtggattttctacgtgtttctctgctttggcgtcctgtacgtgaagctcgga

SEQ ID NO: 689344 - DNA, 120 bp, Artificial Sequence
  ENSG00000188064_4 (sequence is synthesized)
gcactgtcatccgtggtggccctgggagccaacatcatctgcaacaagattcctggcctagccccgcggcagcgtgccatctgccagagtcggcccgatgccatcattgtgattggggag

SEQ ID NO: 689345 - DNA, 120 bp, Artificial Sequence
  ENSG00000188064_5 (sequence is synthesized)
ggggcgcagatgggcatcaacgagtgccagtaccagttccgcttcggacgctggaactgctctgccctcggcgagaagaccgtcttcgggcaagagctccgagtagggagccgtgaggct

SEQ ID NO: 689346 - DNA, 120 bp, Artificial Sequence
  ENSG00000188064_6 (sequence is synthesized)
gccttcacgtacgccatcaccgcggctggcgtggcgcacgccgtcaccgctgcctgcagccaagggaacctgagcaactgcggctgcgaccgcgagaagcagggctactacaaccaagcc

SEQ ID NO: 689347 - DNA, 120 bp, Artificial Sequence
  ENSG00000188064_7 (sequence is synthesized)
gagggctggaagtggggcggctgctcggccgacgtgcgttacggcatcgacttctcccggcgcttcgtggacgctcgggagatcaagaagaacgcgcggcgcctcatgaacctgcataac

SEQ ID NO: 689348 - DNA, 120 bp, Artificial Sequence
  ENSG00000188064_8 (sequence is synthesized)
aatgaggccggcaggaaggttctagaggaccggatgcagctggagtgcaagtgccacggcgtgtctggctcctgcaccaccaaaacctgctggaccacgctgcccaagttccgagaggtg

SEQ ID NO: 689349 - DNA, 120 bp, Artificial Sequence
  ENSG00000188064_9 (sequence is synthesized)
ggccacctgctgaaggagaagtacaacgcggccgtgcaggtggaggtggtgcgggccagccgtctgcggcagcccaccttcctgcgcatcaaacagctgcgcagctatcagaagcccatg

SEQ ID NO: 689350 - DNA, 120 bp, Artificial Sequence
  ENSG00000188064_10 (sequence is synthesized)
gagacagacctggtgtacattgagaagtcgcccaactactgcgaggaggacgcggccacgggcagcgtgggcacgcagggccgtctctgcaaccgcacgtcgcccggcgcggacggctgt

SEQ ID NO: 689351 - DNA, 120 bp, Artificial Sequence
  ENSG00000188064_11 (sequence is synthesized)
gacaccatgtgctgcggccgaggctacaacacccaccagtacaccaaggtgtggcagtgcaactgcaaattccactggtgctgcttcgtcaagtgcaacacctgcagcgagcgcaccgag

SEQ ID NO: 689352 - DNA, 120 bp, Artificial Sequence
  ENSG00000188064_12 (sequence is synthesized)
gtcttcacctgcaagtgaggccaggcccggaggcggccgcgggcaccctggaacccggcggcattttgcacatccactcctcaccttccctgccttggtgctgccagcagcagacataga

SEQ ID NO: 689353 - DNA, 120 bp, Artificial Sequence
  ENSG00000188064_13 (sequence is synthesized)
cgggtgcagaagcggggagctccaggtgcaggagggcaccggccggggcccacgccctctgcccgcctccctggggctccttcctgccacctcctcccatcacctcctgcggcagaacag

SEQ ID NO: 689354 - DNA, 120 bp, Artificial Sequence
  ENSG00000188064_14 (sequence is synthesized)
cacccgtgacccacccagagagcaaggccaggggtcttggtgctccccgacggggcccggcaagttctctttcttctctctgggaaaatgaacgtccaggacacacctgtatcccagaga

SEQ ID NO: 689355 - DNA, 120 bp, Artificial Sequence
  ENSG00000188064_15 (sequence is synthesized)
gcaaagtgatgaggagactgagcgtccccagccccacctggcggcatggacacagaaaagctacgccggctggcctctccagaccagttcccaggctgggtctgccgctgggccctgggg

SEQ ID NO: 689356 - DNA, 120 bp, Artificial Sequence
  ENSG00000188064_16 (sequence is synthesized)
tcccctagacaccctctgtttcctttcccggccccacctggccggccctctgcccctgcagagctgaggcagcctggggttgatggggaccacgcggtgcctgcaggtcctagaagtgag

SEQ ID NO: 689357 - DNA, 120 bp, Artificial Sequence
  ENSG00000188064_17 (sequence is synthesized)
ctgggcaggggctcttcagaccacacagccctgaccgggccttggaggagagccatggacaggctcctccatgccgtctttccttcttttgaaaatcctatcaatggctgggcgcggtgg

SEQ ID NO: 689358 - DNA, 67 bp, Artificial Sequence
  ENSG00000188064_18 (sequence is synthesized)
aggaggctgagacaggacaattccaacttgggtgacagagcacgactctgtctcaaaaaaagaaaag

SEQ ID NO: 689359 - DNA, 120 bp, Artificial Sequence
  ENSG00000188064_19 (sequence is synthesized)
ttgggtgacagagcacgactctgtctcaaaaaaagaaaagaaaataatatcaagcaaatcaaaatatcacccacgtcaggttccaggagtccttcgttccctccctcatcctgtcaccct

SEQ ID NO: 689360 - DNA, 120 bp, Artificial Sequence
  ENSG00000188064_20 (sequence is synthesized)
cccggcctggcacctccagtttacagagacccccttccccctggagccagcctgacccctgggacagtgctgccgcgggggtcaggcaggtggtgagtggtcagggatgtttgtcccact

SEQ ID NO: 689361 - DNA, 120 bp, Artificial Sequence
  ENSG00000188064_21 (sequence is synthesized)
tgacagatgggaactctgaggcccagagtggcacaaggacctaccagagaccctgcagctgtgactggaggcttccacctttctcctgcccagcctggggctctggacctgggagaacac

SEQ ID NO: 689362 - DNA, 120 bp, Artificial Sequence
  ENSG00000188064_22 (sequence is synthesized)
atcaggatgcccggggtggcagtaggtagctcccatgccttgaggcacttggctgctccctccaccccctgacagcctcattggggcctgcactcccctcggtgcctttgaggcttcgcc

SEQ ID NO: 689363 - DNA, 120 bp, Artificial Sequence
  ENSG00000188064_23 (sequence is synthesized)
tagccctgtcctggtccttttaccctgaccccagtgctgagaaaatctggatccagagctggacatgtcctttctggatgctcccacccctgtctctgaggagcatgagtgacagaggga

SEQ ID NO: 689364 - DNA, 120 bp, Artificial Sequence
  ENSG00000188064_24 (sequence is synthesized)
ggaacttgtccgaggccagagaggatggtctgcagctggctcctggtgcacccccactgcccacggcctggcccccatttagggtgtgttctcttggaagcccgtaggaatgtgttcttg

SEQ ID NO: 689365 - DNA, 120 bp, Artificial Sequence
  ENSG00000188064_25 (sequence is synthesized)
agcagccgacaagccaagggcctgggctcagcctggggcaagtgggtccctcctgggctctggccctgtggtccagcccatgtgcctctaaccatgcctggacgctctgagtctccgggc

SEQ ID NO: 689366 - DNA, 120 bp, Artificial Sequence
  ENSG00000188064_26 (sequence is synthesized)
caccgtgaatgccccaccctcagcctggccccatccccttaccttccccaagtcccagaacacacctgagtccataggcccggcagcctctgcaaggaacctggttaacttatgttgtta

SEQ ID NO: 689367 - DNA, 120 bp, Artificial Sequence
  ENSG00000188064_27 (sequence is synthesized)
tatagcgtcgaaatgtctatagtgtctttaaattattgtgacctacactgggtaccggagagggggatggctgcggcccccatccctcatcccccatcccatcccatccctcatctcatc

SEQ ID NO: 689368 - DNA, 120 bp, Artificial Sequence
  ENSG00000188064_28 (sequence is synthesized)
cctcatcccatcccccatcccatccctgaccccatcccccatcccatccctcatccctattccccatacccaccccccatcccatcccccatctcccgaaccaggctcctcctgcttcaa

SEQ ID NO: 689369 - DNA, 120 bp, Artificial Sequence
  ENSG00000188064_29 (sequence is synthesized)
cagacccttggggcccctgatgccaccgagacactcgcactgtcccttggctgccgggcaccccactgagcccctgcccaccccaaagtctgccagcaacaggccctttgcctgggtgag

SEQ ID NO: 689370 - DNA, 120 bp, Artificial Sequence
  ENSG00000188064_30 (sequence is synthesized)
acgggggtcagggtggcccagatgggggtgatggcgaccaaggtgctgcgtccccacccttctgacggcagcctcccctggaggggagtgctcggcccaataaaagctggaatcggaaaa

SEQ ID NO: 689371 - DNA, 120 bp, Artificial Sequence
  ENSG00000188064_31 (sequence is synthesized)
gggtgtcccagccaaggcaacttgggcaagccctggaggcggctcccaccgcacgctccggtcagcctcccctttaaaaaaacccgccgggggaggaggcggatgtaggggcggcccgtc

SEQ ID NO: 689372 - DNA, 120 bp, Artificial Sequence
  ENSG00000188064_32 (sequence is synthesized)
caatggcagctgcgcgcctcgggagacttggagaagtgagccagagcgagcgacagagccggttcgcaccgacagacggacggaggtccagaccgcagccaaggcgcgcccgctgccccc

SEQ ID NO: 689373 - DNA, 80 bp, Artificial Sequence
  ENSG00000188064_33 (sequence is synthesized)
gctgccccagacccagcgccatgcgcggccctagcggcggggcacgggcgacaactgcgcccgggcccacgagacccggc

SEQ ID NO: 689374 - DNA, 120 bp, Artificial Sequence
  ENSG00000188064_34 (sequence is synthesized)
gcggggaccccggcctcagctggcccaggcgcccggcccgcggagcctgttcagccccgccaggcacgccggcccaccatgcttctactgtcgccgcgcagcgcgctcgtctccgtctat

SEQ ID NO: 689375 - DNA, 120 bp, Artificial Sequence
  ENSG00000188064_35 (sequence is synthesized)
gccgcgatctcctttagacagaatctgtctcggcttcgctcgaagtgggggtggagaaacggcgtgacggagagggggtgcggtgcacctcgcctggggcgcccaccgcccgctgctggc

SEQ ID NO: 689376 - DNA, 120 bp, Artificial Sequence
  ENSG00000188064_36 (sequence is synthesized)
ccccgccgcgccctgcgcgcctactgtgcgccgccggctgccccgaggcgagccccgtccaggccacaggcaaggcggtgaacagacccgcgggaggggcaggtgcaggtaccactggtg

SEQ ID NO: 689377 - DNA, 120 bp, Artificial Sequence
  ENSG00000188070_0 (sequence is synthesized)
ctgccgcccgccggatcgagcggcagcgcggagccagaggaagacgaaggcgggcaagatcttcagctggaagggggtgccttggggtcctgggggagtgcccccctgccctcctccagg

SEQ ID NO: 689378 - DNA, 120 bp, Artificial Sequence
  ENSG00000188070_1 (sequence is synthesized)
gccaggggaccagcatcttcaggcaggaaatattcagaccactgtgaggcccgggcctcgaggcctggaaagagccgcatccctggccgtgaccaccggcgctactaccacgaccactgg

SEQ ID NO: 689379 - DNA, 120 bp, Artificial Sequence
  ENSG00000188070_2 (sequence is synthesized)
cggctggagtacctgatggacttcaaccctgcccggcacggcatggtgtgcatggtgtgcggcagctccctggccaccctcaagctcagcaccatcaagcgccacatccgccaaaagcac

SEQ ID NO: 689380 - DNA, 120 bp, Artificial Sequence
  ENSG00000188070_3 (sequence is synthesized)
ccctactccttgcattggagtccccgggagaaggaagtcatcagcaacagctgggatgcacacctggggctgggggcctgcggagaggccgagggcctgggggtccagggggctgaggag

SEQ ID NO: 689381 - DNA, 120 bp, Artificial Sequence
  ENSG00000188070_4 (sequence is synthesized)
gaggaggaggaggaagaagaggaggaggaggagggggccggtgtcccagcttgcccgcccaagggcccaggcaaagccccagctggtgggggctgccggcgccagcggcgagggggccca

SEQ ID NO: 689382 - DNA, 120 bp, Artificial Sequence
  ENSG00000188070_5 (sequence is synthesized)
gtggcaccccgggctcggcgtctgcgcctctcagcctcccggagggccgggggcagcagggggctgggggcccggcgcctggagaggaggctgaaggagtccctgcagaactggttccgg

SEQ ID NO: 689383 - DNA, 120 bp, Artificial Sequence
  ENSG00000188070_6 (sequence is synthesized)
gccgagtgtctcatggactatgacccgcgggggaaccggctggtgtgcatggcctgtggccgggcactgcccagcctgcacctggacgacatccgtgcccacgtgctggaggtgcaccct

SEQ ID NO: 689384 - DNA, 120 bp, Artificial Sequence
  ENSG00000188070_7 (sequence is synthesized)
ggctccctggggctcagcggcccccagcgcagtgccctgctgcaggcctgggggggccagcccgaggcgctgtctgagctcacccagtccccaccaggcgatgacctcgccccccaggac

SEQ ID NO: 689385 - DNA, 120 bp, Artificial Sequence
  ENSG00000188070_8 (sequence is synthesized)
ctgaccggaaagagccgggactcggcctccgctgctggagccccctcctctcaggatctcagccccccagacgtaaaggaagaggctggctgggtccctgagaggcccgggcccgcagag

SEQ ID NO: 689386 - DNA, 80 bp, Artificial Sequence
  ENSG00000188070_9 (sequence is synthesized)
gggtcccgggccggtcgccgcggggccgcgcccaccgccgccacccccaggagcgctggcggctggagtacctcatggag

SEQ ID NO: 689387 - DNA, 120 bp, Artificial Sequence
  ENSG00000188070_10 (sequence is synthesized)
ggagttggacggcggccggcgcggcctggtgtgcggggtgtgcgggggcgcgctggcctcgctcaagatgagcaccatcgagcgccacatccgccggcgccacccgggctccacgcgcct

SEQ ID NO: 689388 - DNA, 80 bp, Artificial Sequence
  ENSG00000188070_11 (sequence is synthesized)
gggcctgtccaggccctcatcgcccgggagtggagcgagaaggccgcccacctgctggccctggggccgccccgccccga

SEQ ID NO: 689389 - DNA, 120 bp, Artificial Sequence
  ENSG00000188070_12 (sequence is synthesized)
tccgacgaggggggaggggacgaggaggaggagccagaggaggaggaggaggagtggggcgacgttccgctgtcccctggagctcccttggagcggcccgccgaagaagaggaggacgaa

SEQ ID NO: 689390 - DNA, 120 bp, Artificial Sequence
  ENSG00000188070_13 (sequence is synthesized)
gaggaggacgaagaggacggccaggagcctgggggactcgccttgccgccgccgcctcctcccccgcctccgcccccgccccgcagccgggagcagcggcggaactaccagccgcggtgg

SEQ ID NO: 689391 - DNA, 120 bp, Artificial Sequence
  ENSG00000188070_14 (sequence is synthesized)
ctgatggactacgacggcagccggcgcggcctggtgtgtatggtgtgcgggggcgcgctggccacgctcaaggtgagcaccatcaagcgccacatcctgcaggtgcaccccttctccatg

SEQ ID NO: 689392 - DNA, 120 bp, Artificial Sequence
  ENSG00000188070_15 (sequence is synthesized)
gacttcacgcctgaggagcgccagactatcctggaggcctacgaggaggcggcgctgcgctgctacggccacgagggcttcgggccgcccgccccggcgccgcgtgacggcggcgcggac

SEQ ID NO: 689393 - DNA, 120 bp, Artificial Sequence
  ENSG00000188070_16 (sequence is synthesized)
ctcaagtctggcgctgtgtgtcgggcgtagcggcctagcgggcccccgggtcaggtcgggtcgggtcggatcggccccgccccgccctgtgctcgcccggcccttcggctgggagaccct

SEQ ID NO: 689394 - DNA, 120 bp, Artificial Sequence
  ENSG00000188070_17 (sequence is synthesized)
ccccccgctggccgggccgggcggagacgggggatcgggtggggccaccggcgtctgcgcggtgccacttgggtccctgagccagtcggtgcgctgcgggaagcgcactctcccatcggc

SEQ ID NO: 689395 - DNA, 120 bp, Artificial Sequence
  ENSG00000188070_18 (sequence is synthesized)
gtgcgctgcgggaagcgcactctcccatcggcccggagccctgccctccccgcgcagggcccacgttttccgagaatcctcagtggcctccacgtgttagcgccgagcgctcccggccgc

SEQ ID NO: 689396 - DNA, 120 bp, Artificial Sequence
  ENSG00000188070_19 (sequence is synthesized)
accccgcgagggggttctccgcaggccgggactgggggcgccgtcagtcagtattagggccgaaggggggccgtgcgggctctggctctggccctggctgggggcccagttccctgcagc

SEQ ID NO: 689397 - DNA, 120 bp, Artificial Sequence
  ENSG00000188070_20 (sequence is synthesized)
cttgcacgctggcaggcacggctcccggcttgggggctgctggctgcccttccctaattgggattctcggcctctcggaggccccggctgcggactggggcttccagcgggaggctgggc

SEQ ID NO: 689398 - DNA, 120 bp, Artificial Sequence
  ENSG00000188070_21 (sequence is synthesized)
tggaccagctgcgcttacctccccggcaggctcagtgagaaccgtgcgcccggcggccccactctcctcccaggccgctgccacgccctccaggaaagctcttgtaaagggattagcact

SEQ ID NO: 689399 - DNA, 120 bp, Artificial Sequence
  ENSG00000188070_22 (sequence is synthesized)
tttttcctttgctcctcttgccccgagggtctctgcttacccctaaaccaagtccgtgggagcccggggcacaggcggtcccggcagtcagccttcgattcccgccccatccccatcccc

SEQ ID NO: 689400 - DNA, 120 bp, Artificial Sequence
  ENSG00000188070_23 (sequence is synthesized)
ctttgtccgcggtggatgcggcgtccgttctcaacccgcagggcctggggccgggcctcggcctcttttccccgtggcagccgcaggccctgtgtggcagggatggggccccgcgatctc

SEQ ID NO: 689401 - DNA, 120 bp, Artificial Sequence
  ENSG00000188070_24 (sequence is synthesized)
ccaggcaggtccgagagggatgtgtagattcattctcctgtggagaacaggtggccccgagatcaggcccttttttgctctttgtattttattttgaaactgtatttaatgcttttatat

SEQ ID NO: 689402 - DNA, 120 bp, Artificial Sequence
  ENSG00000188070_25 (sequence is synthesized)
gaaagggggaggggcggggacagagctgacccagtcacccttatgtgcaaatgtcttatttattatgcgtgtatcagagataagctgtgaggtggtggagggaggacctgaaggaaggag

SEQ ID NO: 689403 - DNA, 120 bp, Artificial Sequence
  ENSG00000188070_26 (sequence is synthesized)
gagcgagggcagaggcggggacgggaggaccccaactagctgtgctgatgttaatcccgctgggagactccgggccctactgtctgctcttcacaaagccaggctgctgcaggaacagtt

SEQ ID NO: 689404 - DNA, 120 bp, Artificial Sequence
  ENSG00000188070_27 (sequence is synthesized)
cccgcggtcctaaagccggggcggggaggctagtgggtggaacttgagggttgggtctggaggaagagatgcctgggcagcgtggtccagcccctgcctcggggtggaaaggcagagagc

SEQ ID NO: 689405 - DNA, 120 bp, Artificial Sequence
  ENSG00000188070_28 (sequence is synthesized)
aaagaggaggcccctcttattccggacccccaggccagagcccaggagtgggaaagcagagggcaaagaggaggcccctcctctcatccctgacccccaggccagagcctaaggttcaag

SEQ ID NO: 689406 - DNA, 120 bp, Artificial Sequence
  ENSG00000188070_29 (sequence is synthesized)
tgcctcaggcccagtccccttgacgcttcctgtttgggagttggattttataccacggattttatagcatttttatataattgaggattgtcagaattggaaagggccctggagatcact

SEQ ID NO: 689407 - DNA, 120 bp, Artificial Sequence
  ENSG00000188070_30 (sequence is synthesized)
agtactaccctcctcaccttcacagataggtaaattggagcccaggaaccgagatgatcacacagccaggtagggacagtacaagaactagaatgaaaatcctagctcctgactcagtgt

SEQ ID NO: 689408 - DNA, 120 bp, Artificial Sequence
  ENSG00000188070_31 (sequence is synthesized)
tctttgcacgatgccacactgcttcccaattcgctggtcagttattaaaatttgtcaggcctgccgaaggattgacatgctgggcaatgcaggccaccacggtggatctgtgactcctga

SEQ ID NO: 689409 - DNA, 120 bp, Artificial Sequence
  ENSG00000188070_32 (sequence is synthesized)
aggtggcaaagccctgcacactgccttgggatgagcacactgagctctgcagggcctcagctggaaggcgccatccaatcgtccttcccctccccagcagaactccagaggtggggcggc

SEQ ID NO: 689410 - DNA, 120 bp, Artificial Sequence
  ENSG00000188070_33 (sequence is synthesized)
tgccgcagggcccaaggctgcctcggcagggggctttgtgctttttgttgtggaggccaccagggattcaggaagatcctgaatgggttgtcaattgactgaaaagtaaattcccagtga

SEQ ID NO: 689411 - DNA, 120 bp, Artificial Sequence
  ENSG00000188070_34 (sequence is synthesized)
gtttgaacctccacggtttttgagacagtattaaaagcttgagaacggagattatggatggcaccaggctgggcactgccattcttttactttccttcatgcattttttcggatccagag

SEQ ID NO: 689412 - DNA, 120 bp, Artificial Sequence
  ENSG00000188070_35 (sequence is synthesized)
tattaacaccactttttttactctgcccattcaaaaacagtaggcaaattgggggaaccaatttataatcactcaagcccactgccaaagttcggataagccagggcagaggggttagat

SEQ ID NO: 689413 - DNA, 120 bp, Artificial Sequence
  ENSG00000188070_36 (sequence is synthesized)
tcccccccctccgtaggcagagagaggcctcaggagagtggacatctttactgagacagccccaaacacaccagtggctctcaaagtgtgtccctgagaccagcagcatcaccttaggaa

SEQ ID NO: 689414 - DNA, 120 bp, Artificial Sequence
  ENSG00000188070_37 (sequence is synthesized)
tctgctagaaataaaaattcttgggccataccccagggttactgaatcagaaacttggttggggcctagcagtgttttcatgagccctccattgatcttgatgcagctgaagtgccgggc

SEQ ID NO: 689415 - DNA, 120 bp, Artificial Sequence
  ENSG00000188070_38 (sequence is synthesized)
accagtgaaagggaagggctgcggtagtgattccattgattcctgctttgatggaagttatggcctcacaggttagacgttgcaagttgagttggccctcttgcctaggtgtgcctcctt

SEQ ID NO: 689416 - DNA, 120 bp, Artificial Sequence
  ENSG00000188070_39 (sequence is synthesized)
gccttgggattctgacatgaacaggtgaagtctcttcatgattttttttgttgttgttgttaatggtatgcttgctattatggccaatatgtaaatgttactctgaatacatatttatat

SEQ ID NO: 689417 - DNA, 120 bp, Artificial Sequence
  ENSG00000188070_40 (sequence is synthesized)
accatgttacttagtgacattattcaaacatttgtatgcgtatttgtgaaattgtttgcatcagtcatttaaaaaatatttcagcctaagttttctaagaggtatgttgaatacattttt

SEQ ID NO: 689418 - DNA, 120 bp, Artificial Sequence
  ENSG00000188070_41 (sequence is synthesized)
aaaagccagcttaagggtcacagcagccttagtttaggagaagagctaatcacaggtgaccactcaagttctttcaatgaagacctgatgatgtatttagttcccattttccacggtgat

SEQ ID NO: 689419 - DNA, 120 bp, Artificial Sequence
  ENSG00000188070_42 (sequence is synthesized)
tgactcaatttaagtgtattgtggctatatgtaatttacaggctgctttgcgttgcaggtgggaaaatctcccaggctggtgtgaggctgaactggggtaaaagaccccctgacccctcc

SEQ ID NO: 689420 - DNA, 120 bp, Artificial Sequence
  ENSG00000188070_43 (sequence is synthesized)
tcattcttctaaggtcaccacctcttagagggtctcttattttctttcagagatcaaatgcacagttatgctgtacaactaaattctgcagtcttgggaatccttacgagtaccaactat

SEQ ID NO: 689421 - DNA, 120 bp, Artificial Sequence
  ENSG00000188070_44 (sequence is synthesized)
tagtcactttttaaagtccccaaagtggagtgaggatagggggagtggaagcagtgtttggttcttactttacccaaactgtgtataaagaataaagttagcagaatgatgccacagtca

SEQ ID NO: 689422 - DNA, 120 bp, Artificial Sequence
  ENSG00000188070_45 (sequence is synthesized)
cgaaggcgactagcctggatccagcgctggaaggatgcttagagaccagccagctagccagtgtcgttgcagacaaagaagctcaggcccagagtgcggacatgacctatcaaaggtcac

SEQ ID NO: 689423 - DNA, 120 bp, Artificial Sequence
  ENSG00000188070_46 (sequence is synthesized)
agagcaagttaccagtgaagccaggacttgaacccaggcctatgactccgaagccagtggattctatggatctacttaaataaaaactaaaacaaaaaaacttccacaagggtgacagga

SEQ ID NO: 689424 - DNA, 120 bp, Artificial Sequence
  ENSG00000188076_0 (sequence is synthesized)
ggcagctcctgagactgctggcatgaaggggagccgtgccctcctgctggtggccctcaccctgttctgcatctgccggatggccacaggggaggacaacgatgagtttttcatggactt

SEQ ID NO: 689425 - DNA, 120 bp, Artificial Sequence
  ENSG00000188076_1 (sequence is synthesized)
tgccaaggcagcaatgactgaactcaagtcctgtatagatggcctgcagccaatgcacaaggcggagctggtcaagctgctggtgcaagtgctgggcagtcaggacggtgcctaagtgga

SEQ ID NO: 689426 - DNA, 120 bp, Artificial Sequence
  ENSG00000188076_2 (sequence is synthesized)
cctcagacatggctcagccataggacctgccacacaagcagccgtggacacaacgcccactaccacctcccacatggaaatgtatcctcaaaccgtttaatcaataaagcctcttccgca

SEQ ID NO: 689427 - DNA, 120 bp, Artificial Sequence
  ENSG00000188086_0 (sequence is synthesized)
atgacccgccattggccctgggaggtgagcctccggatggaaaatgagcacgtgtgtggaggggccctcattgaccccagctgggtggtgactgcggcccactgcatccaaggcaccaaa

SEQ ID NO: 689428 - DNA, 120 bp, Artificial Sequence
  ENSG00000188086_1 (sequence is synthesized)
gagtactcagtggtgcttggcacctccaagctgcagcccatgaacttcagcagggccctctgggtccctgtgagggacatcattatgcaccccaagtactggggccgggccttcatcatg

SEQ ID NO: 689429 - DNA, 120 bp, Artificial Sequence
  ENSG00000188086_2 (sequence is synthesized)
ggtgacgttgcccttgtccaccttcaaacacctgtcaccttcagtgagtacgtgcagcccatctgcctcccggagcccaatttcaacctgaaggttgggacgcagtgttgggtgactggc

SEQ ID NO: 689430 - DNA, 120 bp, Artificial Sequence
  ENSG00000188086_3 (sequence is synthesized)
tggagccaggttaagcagcgcttttcagccaactccatgctgaccccagagctgcaggaggctgaggtgtttatcatggacaacaagaggtgtgaccggcattacaagaagtccttcttc

SEQ ID NO: 689431 - DNA, 120 bp, Artificial Sequence
  ENSG00000188086_4 (sequence is synthesized)
gggccattggcttgtgaagttgagggcagatggattctggctggggtgttgtcctgggaaaaggcctgcgtgaaggcacagaatccaggtgtgtacacccgcatcaccaaatacaccaaa

SEQ ID NO: 689432 - DNA, 120 bp, Artificial Sequence
  ENSG00000188086_5 (sequence is synthesized)
tggatcaagaagcaaatgagcaatggagccttctcaggtccctgtgcctctgcctgcctcctgttcctgtgctggctgctgcagccccagatgggctcctgacctccctaccttttcctc

SEQ ID NO: 689433 - DNA, 120 bp, Artificial Sequence
  ENSG00000188086_6 (sequence is synthesized)
ctcctgccttgcctctgctgaatggggccagatggtttgaccaaggtcatgtgtccatcttcaaaaagagtcagggtggggaagagtaacccctgggagaatgggtctggctttggcatc

SEQ ID NO: 689434 - DNA, 120 bp, Artificial Sequence
  ENSG00000188086_7 (sequence is synthesized)
ccggtgaggagaagtgtggtggatgactaggccttgggtgagcaggagaagggaagtgtggcctagaaggattctggaatctgggaccaggagagcagggattaaacatgtgcaaacttg

SEQ ID NO: 689435 - DNA, 120 bp, Artificial Sequence
  ENSG00000188086_8 (sequence is synthesized)
atggccgtctcacggtcgagcctcgatcccccagcctcatggccttatgatggcccccagcctcatggcctcgaccctccagcctcatggccgggcgtggggcccggaacctccaggccc

SEQ ID NO: 689436 - DNA, 120 bp, Artificial Sequence
  ENSG00000188086_9 (sequence is synthesized)
tcggtcctgagccgccgcgtcctgctgccgctgctttttctgctgccgctgagctcgggttataaagaggacacaaccaatccagtttgtggtgagccctggtggtcggaggatttggaa

SEQ ID NO: 689437 - DNA, 120 bp, Artificial Sequence
  ENSG00000188089_0 (sequence is synthesized)
gtgaggctccttcaggggcctggatggcctcagccatttcacccccagccctctctccctccctctcccactgacatattgagtttcgcactttaaaaatagctctgcagcactaagaag

SEQ ID NO: 689438 - DNA, 120 bp, Artificial Sequence
  ENSG00000188089_1 (sequence is synthesized)
ctttctctgagcgtggatcccagccctgaaacgcaggcctcccttgacggagaactgtcctatgtgagcataatgctagctccctgcttgtctttcaggcagcgcaagaaatttctctcc

SEQ ID NO: 689439 - DNA, 120 bp, Artificial Sequence
  ENSG00000188089_2 (sequence is synthesized)
acaaaataggtccagatggtttgaaatattcacagagatagacgtggggctcctttagttaagccctggcttccttcagctccttaataattcatcctggcttagcttcaggaggagtct

SEQ ID NO: 689440 - DNA, 120 bp, Artificial Sequence
  ENSG00000188089_3 (sequence is synthesized)
ggtggcactgcttccctttcacacaaaactcccttgaaattaccccaggaggctccaacaacaccttactttgaggaccagcctcagctccacacagcccgtcctgagtcccagagagga

SEQ ID NO: 689441 - DNA, 120 bp, Artificial Sequence
  ENSG00000188089_4 (sequence is synthesized)
ggctgggatgagtctccaggcctcggaaggctgtcctggcctgggaactaatgtgtttgtcccacagagcccacaaacggatgaagaaggcagcaggtcaggaagaagtttcagtgagtt

SEQ ID NO: 689442 - DNA, 120 bp, Artificial Sequence
  ENSG00000188089_5 (sequence is synthesized)
cgaggatacacaggacctggacactcctggtctcccacctttctgtcctatggctccttggggctctgaggaggggctgtctccatgccacctgttgacagtgagggtcatccggatgaa

SEQ ID NO: 689443 - DNA, 120 bp, Artificial Sequence
  ENSG00000188089_6 (sequence is synthesized)
aaatgtccggcaggctgatatgctgagccagacagactgttttgtgagcctctggctgcccaccgcctctcagaagaagctgaggacaaggaccatctccaactgcccaaatccagagtg

SEQ ID NO: 689444 - DNA, 120 bp, Artificial Sequence
  ENSG00000188089_7 (sequence is synthesized)
gaatgaaagcttcaacttccagatccagagccgagtgaagaacgtgctagagttgagtgtctgtgatgaagacacagtgacaccagatgaccatctcctgacagttctctatgacctcac

SEQ ID NO: 689445 - DNA, 120 bp, Artificial Sequence
  ENSG00000188089_8 (sequence is synthesized)
caagctctgtttccgaaagaaaacccacgtgaagtttccactcaacccgcagggcatggaagagctggaggtggagttcctgctggaggagagtccctctccacctgagaccctcgtcac

SEQ ID NO: 689446 - DNA, 120 bp, Artificial Sequence
  ENSG00000188089_9 (sequence is synthesized)
caatggcgtgctggtgtctcgacaagtctcctgcctggaggttcatgcacaatccaggaggcggaggaagagggagaaaatgaaggacctcctggtgatggtgaacgaatcctttgagaa

SEQ ID NO: 689447 - DNA, 120 bp, Artificial Sequence
  ENSG00000188089_10 (sequence is synthesized)
cacccagcgtgtccggccctgcttggaaccctgctgcccaacctctgcctgcttccaaaccgctgcctgcttccactaccccaagtacttccagtcccaggtgcacgtggaagtgcccaa

SEQ ID NO: 689448 - DNA, 120 bp, Artificial Sequence
  ENSG00000188089_11 (sequence is synthesized)
gagtcactggagctgtgggctttgctgccgctctcgcaagaagggccccatcagccagcccctcgactgcctttccgatggtcaggtgatgaccctgcctgtgggtgagagttatgaatt

SEQ ID NO: 689449 - DNA, 120 bp, Artificial Sequence
  ENSG00000188089_12 (sequence is synthesized)
acacatgaagtctacaccctgccctgagacactggacgtgcggctgggcttcagcctgtgcccagcagagctggagtttctgcagaagcggaaggtcgtggtggccaaggccctgaagca

SEQ ID NO: 689450 - DNA, 120 bp, Artificial Sequence
  ENSG00000188089_13 (sequence is synthesized)
ggtgctgcagctggaggaagacctgcaggaggacgaggtgccgctgatagccatcatggccactgggggtggaacaagatccatgacctccatgtatggccacctgctggggctgcagaa

SEQ ID NO: 689451 - DNA, 120 bp, Artificial Sequence
  ENSG00000188089_14 (sequence is synthesized)
gctgaacctcctggactgtgccagctacatcaccggtctatcaggggccacctggaccatggctaccttgtaccgtgaccctgactggtcctccaaaaacttggagcctgctatctttga

SEQ ID NO: 689452 - DNA, 120 bp, Artificial Sequence
  ENSG00000188089_15 (sequence is synthesized)
ggctcggagacatgtggtaaaggacaagctaccctccctgttcccagaccagctccgcaaattccaggaggagctccggcagcgcagccaggaaggctacagggtcacctttacagactt

SEQ ID NO: 689453 - DNA, 120 bp, Artificial Sequence
  ENSG00000188089_16 (sequence is synthesized)
ctggggcctgctgatagagacctgcctgggggacgagagaaatgaatgcaaactgtcagatcagcgtgctgctttgagctgcggccagaaccccctgcccatctacctcaccatcaatgt

SEQ ID NO: 689454 - DNA, 120 bp, Artificial Sequence
  ENSG00000188089_17 (sequence is synthesized)
caaggatgatgtaagcaaccaggacttcagagagtggttcgagttctccccctacgaggtgggcctgcagaagtatggggccttcatcccctccgagctcttcggctccgagttcttcat

SEQ ID NO: 689455 - DNA, 120 bp, Artificial Sequence
  ENSG00000188089_18 (sequence is synthesized)
ggggcggctggtgaagaggatcccggagtctcgaatctgctacatgctaggcctgtggagcagcatcttctccctgaacctgctggatgcctggaacctgtcacacacctcggaggagtt

SEQ ID NO: 689456 - DNA, 120 bp, Artificial Sequence
  ENSG00000188089_19 (sequence is synthesized)
tttccacaggtggacaagggagaaagtgcaggacatcgaagacgagccgatcctgcctgaaatccccaaatgtgatgctaacatcctggagaccacggtagtgatcccagggtcatggct

SEQ ID NO: 689457 - DNA, 120 bp, Artificial Sequence
  ENSG00000188089_20 (sequence is synthesized)
gtccaattctttccgagaaatccttacccatcggtccttcgtgtctgagtttcacaacttcctgtctgggctgcagctgcacaccaactacctccagaatggccagttctctaggtggaa

SEQ ID NO: 689458 - DNA, 120 bp, Artificial Sequence
  ENSG00000188089_21 (sequence is synthesized)
aggccagagcgaaaagccgacctcatcatccacctcaactactgtgctgggtcccagacaaagcccctgaaacaaacctgtgagtactgcactgtgcagaacatccccttccccaaatac

SEQ ID NO: 689459 - DNA, 120 bp, Artificial Sequence
  ENSG00000188089_22 (sequence is synthesized)
gagctgccagatgagaatgaaaatctcaaggaatgctacctgatggagaacccccaggaacccgatgcccccatcgtgactttcttcccactcatcaatgacactttccgaaaatacaag

SEQ ID NO: 689460 - DNA, 120 bp, Artificial Sequence
  ENSG00000188089_23 (sequence is synthesized)
gcaccaggtgtagagcgaagccctgaggagctggagcagggccaggtggacatttatggtcccaaaactccctatgccaccaaggagctgacatacacagaggccacctttgacaagctg

SEQ ID NO: 689461 - DNA, 120 bp, Artificial Sequence
  ENSG00000188089_24 (sequence is synthesized)
gtgaaactctcagagtataacatcctgaataataaggacactctcctccaggctctgcggctcgcagtggagaagaagaagcgcctgaagggccagtgtccctcctaggccccagggagc

SEQ ID NO: 689462 - DNA, 120 bp, Artificial Sequence
  ENSG00000188089_25 (sequence is synthesized)
ctcccctgttctgtgtcagcttctaccatcagaggtgcaggacccctcagggctgaccaggttactacgcagccagctctgctctccggcaatgggtgtgagcaggttggcctgggcttt

SEQ ID NO: 689463 - DNA, 120 bp, Artificial Sequence
  ENSG00000188089_26 (sequence is synthesized)
ctaacgaaaagtaaaaaattttaaaaagttgagaaagtcagaaagagagagagaggagctctgttggggttttatacccactagagtttcttcaagtgcttccctatagagaaggtggtc

SEQ ID NO: 689464 - DNA, 120 bp, Artificial Sequence
  ENSG00000188089_27 (sequence is synthesized)
tcatagccacaggctcccacacatctgtggagaggaaaagcctggggaagaggctgggcccccagaaacctcgactcagaggcagagcccagggctggcagccctcctctctctgtcctc

SEQ ID NO: 689465 - DNA, 120 bp, Artificial Sequence
  ENSG00000188089_28 (sequence is synthesized)
tacctcgtgtggcgggcctagggaaatgcacagaaggacctgagaggcactcggcgtttcactggaaaaacacttcaaaatttaaggcaattctagtcttgtgatttttgggttttttta

SEQ ID NO: 689466 - DNA, 120 bp, Artificial Sequence
  ENSG00000188089_29 (sequence is synthesized)
agccaacgcacccggccctagtctcattatttttataggcaattatatttcatgatttttatttttatgaatcggagtattaataggaagcatgaagctagaagatctagatggagccct

SEQ ID NO: 689467 - DNA, 120 bp, Artificial Sequence
  ENSG00000188089_30 (sequence is synthesized)
agaaataagccagtctctgccacaacaaagccaaataggtggccggtttcagtggctctctccagctacccagagctccagggctggtgatccatgtcatcatgaccagacagccatgcc

SEQ ID NO: 689468 - DNA, 120 bp, Artificial Sequence
  ENSG00000188089_31 (sequence is synthesized)
caagcatccagctccaaacaaatgccaggcaaagcctaagtctatagcccaggttcaccaaatgaggatctgggatggagttcagcaaggtcaggcaggctgtgggtaaatgaggttggg

SEQ ID NO: 689469 - DNA, 120 bp, Artificial Sequence
  ENSG00000188089_32 (sequence is synthesized)
ggccaggcaggcgatgcatccagcgctgcccactccagctgtcggtgctcactgacgaccctgctccaagagcatctctcagcctcttactgcccatctctctggctgcctcatgggatt

SEQ ID NO: 689470 - DNA, 120 bp, Artificial Sequence
  ENSG00000188089_33 (sequence is synthesized)
acttatttctaaatgtgattcctcttatctgtgttgtcaacaccgtgaccagtgcattccaactcttggagagtcacccacagagactgaaactgggaagaattagtgaaaaaggactag

SEQ ID NO: 689471 - DNA, 120 bp, Artificial Sequence
  ENSG00000188089_34 (sequence is synthesized)
gttagccgtcagaggaagaagcccgccctttaagattgcttcctaatgaatctctgggaaaaccctgggacacagagaaacccaaagtcagcaggtctcccttcaggctgggaacataac

SEQ ID NO: 689472 - DNA, 120 bp, Artificial Sequence
  ENSG00000188089_35 (sequence is synthesized)
caaggaaatgtataaccggagccactgacaggcccaggctgatagaaggtgaaagcagaaaggcaggaagacatgaggtctgcaggaaacccagcaaccctggaaggcggagtccccttt

SEQ ID NO: 689473 - DNA, 120 bp, Artificial Sequence
  ENSG00000188089_36 (sequence is synthesized)
ctgggccaccatgctccctaagcagtctttgggttgtgaggaaaccagtggtgacaggtaccaaaagtttagaaaaattggcctccgatgtacatccttgctactcaaagtgcagtgggg

SEQ ID NO: 689474 - DNA, 120 bp, Artificial Sequence
  ENSG00000188089_37 (sequence is synthesized)
agctggttggaaatgcggaatctcaggccttagcccagctgtactaaattagaagctgcatttttcaggagattcccatccccaggcgccccccgtgattcctgtgcatattgaagtttg

SEQ ID NO: 689475 - DNA, 120 bp, Artificial Sequence
  ENSG00000188089_38 (sequence is synthesized)
agaggcctggatttacgccactccctcccatgagcttggaacgtatgaatcagtgctcccttgagccactgataaactgagctctggacctgcaaaactggtccccatccaggtaatgct

SEQ ID NO: 689476 - DNA, 120 bp, Artificial Sequence
  ENSG00000188089_39 (sequence is synthesized)
aacctgggacaccagccctcccctccaccagagcaactggctgcctccactttgacatcttttctttctgactgcaacagactctccttccagtatcaaagagtgagccaagcaacagac

SEQ ID NO: 689477 - DNA, 120 bp, Artificial Sequence
  ENSG00000188089_40 (sequence is synthesized)
aggacttgtttatcgtaaggcgaaggcagccatgccttggattcatcaaaagtttgtgaaacgaggtttataaaatcatcatattatttgtgcatggaataaaatggccatgtgggtgaa

SEQ ID NO: 689478 - DNA, 120 bp, Artificial Sequence
  ENSG00000188089_41 (sequence is synthesized)
tggatgtcaaggctgccatggataaagaataagaaaacttctctggctatgttcactgggccaggcacctctctccccatggtgttttccacatttggtggtgtcgtcttgaacactgta

SEQ ID NO: 689479 - DNA, 120 bp, Artificial Sequence
  ENSG00000188089_42 (sequence is synthesized)
tgtgtctggcagcagggagtggtgtgggtacttaactcactgcatctgtacagtcattctatacagaatctgtacaacagtcctagcaggtagaagttggccccatgttacagatgggga

SEQ ID NO: 689480 - DNA, 120 bp, Artificial Sequence
  ENSG00000188089_43 (sequence is synthesized)
atcttttgttgagtaccagctcgcattgtgccagctaaggctttgggggctttgcatttgttatctctttaagtgctgaagacagtgctgagagttcagcacgattcgccccactttaca

SEQ ID NO: 689481 - DNA, 120 bp, Artificial Sequence
  ENSG00000188089_44 (sequence is synthesized)
gatgggaaagtggagacccaaggtcacagaagtggtcgctggcagaagtaggctttgagcctaggtccaatggaccctgaagctgtgtctactccagggaggtagaggctgcaggcccaa

SEQ ID NO: 689482 - DNA, 120 bp, Artificial Sequence
  ENSG00000188092_0 (sequence is synthesized)
gcagtcccggctgcagcacctgggagaaggcagaccgtgtgagggggcctgtggccccagcgtgctgtggcctccgggagtgggaagtggaggcaggagccttccttacacttcgccatg

SEQ ID NO: 689483 - DNA, 120 bp, Artificial Sequence
  ENSG00000188092_1 (sequence is synthesized)
agtttcctgatcgactccagcatcatgattacctcccagatactattttttggatttgggtggcttttcttcatgcgccaattgtttaaagactatgagatacgtcagtatgttgtacag

SEQ ID NO: 689484 - DNA, 120 bp, Artificial Sequence
  ENSG00000188092_2 (sequence is synthesized)
gtgatcttctccgtgacgtttgcattttcttgcaccatgtttgagctcatcatctttgaaatcttaggagtattgaatagcagctcccgttattttcactggaaaatgaacctgtgtgta

SEQ ID NO: 689485 - DNA, 120 bp, Artificial Sequence
  ENSG00000188092_3 (sequence is synthesized)
attctgctgatcctggttttcatggtgcctttttacattggctattttattgtgagcaatatccgactactgcataaacaacgactgcttttttcctgtctcttatggctgacctttatg

SEQ ID NO: 689486 - DNA, 120 bp, Artificial Sequence
  ENSG00000188092_4 (sequence is synthesized)
tatttcttctggaaactaggagatccctttcccattctcagcccaaaacatgggatcttatccatagaacagctcatcagccgggttggtgtgattggagtgactctcatggctcttctt

SEQ ID NO: 689487 - DNA, 120 bp, Artificial Sequence
  ENSG00000188092_5 (sequence is synthesized)
tctggatttggtgctgtcaactgcccatacacttacatgtcttacttcctcaggaatgtgactgacacggatattctagccctggaacggcgactgctgcaaaccatggatatgatcata

SEQ ID NO: 689488 - DNA, 120 bp, Artificial Sequence
  ENSG00000188092_6 (sequence is synthesized)
agcaaaaagaaaaggatggcaatggcacggagaacaatgttccagaagggggaagtgcataacaaaccatcaggtttctggggaatgataaaaagtgttaccacttcagcatcaggaagt

SEQ ID NO: 689489 - DNA, 120 bp, Artificial Sequence
  ENSG00000188092_7 (sequence is synthesized)
gaaaatcttactcttattcaacaggaagtggatgctttggaagaattaagcaggcagctttttctggaaacagctgatctatatgctaccaaggagagaatagaatactccaaaaccttc

SEQ ID NO: 689490 - DNA, 120 bp, Artificial Sequence
  ENSG00000188092_8 (sequence is synthesized)
aaggggaaatattttaattttcttggttactttttctctatttactgtgtttggaaaattttcatggctaccatcaatattgtttttgatcgagttgggaaaacggatcctgtcacaaga

SEQ ID NO: 689491 - DNA, 120 bp, Artificial Sequence
  ENSG00000188092_9 (sequence is synthesized)
ggcattgagatcactgtgaattatctgggaatccaatttgatgtgaagttttggtcccaacacatttccttcattcttgttggaataatcatcgtcacatccatcagaggattgctgatc

SEQ ID NO: 689492 - DNA, 120 bp, Artificial Sequence
  ENSG00000188092_10 (sequence is synthesized)
actcttaccaagttcttttatgccatctctagcagtaagtcctccaatgtcattgtcctgctattagcacagataatgggcatgtactttgtctcctctgtgctgctgatccgaatgagt

SEQ ID NO: 689493 - DNA, 120 bp, Artificial Sequence
  ENSG00000188092_11 (sequence is synthesized)
atgcctttagaataccgcaccataatcactgaagtccttggagaactgcagttcaacttctatcaccgttggtttgatgtgatcttcctggtcagcgctctctctagcatactcttcctc

SEQ ID NO: 689494 - DNA, 120 bp, Artificial Sequence
  ENSG00000188092_12 (sequence is synthesized)
tatttggctcacaaacaggcaccagagaagcaaatggcaccttgaacttaagcctactacagactgttagaggccagtggtttcaaaatttagatataagaggggggaaaaatggaacca

SEQ ID NO: 689495 - DNA, 120 bp, Artificial Sequence
  ENSG00000188092_13 (sequence is synthesized)
gggcctgacattttataaacaaacaaaatgctatggtagcatttttcaccttcatagcatactccttccccctcaggtgatactatgaccatgagtagcatcagccagaacatgagaggg

SEQ ID NO: 689496 - DNA, 120 bp, Artificial Sequence
  ENSG00000188092_14 (sequence is synthesized)
agaactaactcaagacaatactcagcagagagcatcccgtgtggatatgaggctggtgtagaggcggagaggagccaagaaactaaaggtgaaaaatacactggaactctggggcaagag

SEQ ID NO: 689497 - DNA, 120 bp, Artificial Sequence
  ENSG00000188092_15 (sequence is synthesized)
atgtctatggtagctgagccaaacacgtaggatttccgttttaaggttcacatggaaaaggttatagctttgccttgagattgactcattaaaatcagagactgtaacacttttgcctta

SEQ ID NO: 689498 - DNA, 120 bp, Artificial Sequence
  ENSG00000188092_16 (sequence is synthesized)
cgttcattttatcaagcatagcttggtatttattatgcttgtgtgatctaacatgagttagcatcccacacctcctcttctgatcctgccccattaaaataaccaagaggttatctgttc

SEQ ID NO: 689499 - DNA, 120 bp, Artificial Sequence
  ENSG00000188092_17 (sequence is synthesized)
ttttccgggaaaggggtggtatgcacctgaaatagattttaccaaaagagagatttcagttatgtcattttttcttgatttcctgtgaacttagtattataccctactttcaattcggta

SEQ ID NO: 689500 - DNA, 120 bp, Artificial Sequence
  ENSG00000188092_18 (sequence is synthesized)
agcctatattagaacacagtaaagtattagttcccttttctaacattatattcagataatgtaggagaaagctatgctttattatagttattattctgtaactatttacaatcttgaaca

SEQ ID NO: 689501 - DNA, 120 bp, Artificial Sequence
  ENSG00000188092_19 (sequence is synthesized)
ttacatttgacttaatctaactagataaatcaaaaaacaaatgaaactatctgtttgagctgcttgacttaagagaaactgagtggtaattgtttggtggcgatgctcttgatggagaag

SEQ ID NO: 689502 - DNA, 120 bp, Artificial Sequence; identical to SEQ ID NO: 221218
  ENSG00000188092_20 (sequence is synthesized)

SEQ ID NO: 689503 - DNA, 120 bp, Artificial Sequence; identical to SEQ ID NO: 221219
  ENSG00000188092_21 (sequence is synthesized)

SEQ ID NO: 689504 - DNA, 120 bp, Artificial Sequence; identical to SEQ ID NO: 221220
  ENSG00000188092_22 (sequence is synthesized)

SEQ ID NO: 689505 - DNA, 78 bp, Artificial Sequence; identical to SEQ ID NO: 221221
  ENSG00000188092_23 (sequence is synthesized)

SEQ ID NO: 689506 - DNA, 62 bp, Artificial Sequence; identical to SEQ ID NO: 221222
  ENSG00000188092_24 (sequence is synthesized)

SEQ ID NO: 689507 - DNA, 120 bp, Artificial Sequence
  ENSG00000188092_25 (sequence is synthesized)
agtgagcccagatcacgccactgcactcctgcctaggcaacagagctagaccctgtctcaaaataaaaaagaaaggataaaggagatttgattaatagattaataaattgttctttcctg

SEQ ID NO: 689508 - DNA, 120 bp, Artificial Sequence; identical to SEQ ID NO: 221224
  ENSG00000188092_26 (sequence is synthesized)

SEQ ID NO: 689509 - DNA, 120 bp, Artificial Sequence; identical to SEQ ID NO: 221225
  ENSG00000188092_27 (sequence is synthesized)

SEQ ID NO: 689510 - DNA, 120 bp, Artificial Sequence
  ENSG00000188092_28 (sequence is synthesized)
aagatgattgtggaagagaaagaaaaaggattaatttagatttatttaaccaagaaacatttattttgtatctcctatttccaggctgagtgctaagaaataaaatgatgagtagagtat

SEQ ID NO: 689511 - DNA, 120 bp, Artificial Sequence; identical to SEQ ID NO: 221227
  ENSG00000188092_29 (sequence is synthesized)

SEQ ID NO: 689512 - DNA, 120 bp, Artificial Sequence
  ENSG00000188092_30 (sequence is synthesized)
gaagggcacttactgatttgggtaatagtgggaaaaatcagagaggagggaggatttagattgaagtatgtgcttctattttagaaggggctatatttactatgtttattacttaaaagt

SEQ ID NO: 689513 - DNA, 120 bp, Artificial Sequence
  ENSG00000188092_31 (sequence is synthesized)
actatttaacctccctgagcccctgttctctaaatgggagaataataactctacctgattgagttcttggaaaataacatagtgtaacggaaagagcaggctttggaggaaaagaggatt

SEQ ID NO: 689514 - DNA, 120 bp, Artificial Sequence
  ENSG00000188092_32 (sequence is synthesized)
tgactttgcatctctatcaattaattgtgtgactttgagcaagttatttaactctctgagcttcactttccttatgtgcaaaatggataacaccatggcataagacaatcccatgaagat

SEQ ID NO: 689515 - DNA, 120 bp, Artificial Sequence; identical to SEQ ID NO: 221207
  ENSG00000188092_33 (sequence is synthesized)

SEQ ID NO: 689516 - DNA, 120 bp, Artificial Sequence; identical to SEQ ID NO: 221208
  ENSG00000188092_34 (sequence is synthesized)

SEQ ID NO: 689517 - DNA, 120 bp, Artificial Sequence
  ENSG00000188092_35 (sequence is synthesized)
caattggtgggatagtcagaagaggcttttcaacatttaggaaggtggcacgtaccacctcctactaacctgggataaagatggtagctactttttattcctttataagttagtaatatt

SEQ ID NO: 689518 - DNA, 120 bp, Artificial Sequence
  ENSG00000188092_36 (sequence is synthesized)
ataagagcagtagacacctatctgccatggatggcctagccctattttaaaggatccagatcaataagtgtcgaaactgtaagaagtaactttcctatgtacacctaaaataaaatataa

SEQ ID NO: 689519 - DNA, 120 bp, Artificial Sequence
  ENSG00000188092_37 (sequence is synthesized)
tttaaatgtgcaaaatctgttagtgaagattgcaaacttttaattctttttgaggataactttacaggagtaaccttataggacagaggttaacataggctttggaaacagataaacctg

SEQ ID NO: 689520 - DNA, 120 bp, Artificial Sequence
  ENSG00000188092_38 (sequence is synthesized)
agcctactcaccagctgtgtgactttgagcaagttatcgaacctctcaaagcctcaattttctcatctgtaaaattaagataatagaacgtatctcataagagttgttatgaagattaag

SEQ ID NO: 689521 - DNA, 120 bp, Artificial Sequence
  ENSG00000188092_39 (sequence is synthesized)
tggataatgcatgtaagatgtttatcccagtctctagctaaaagcaagcattcagtaaatgctggccacaactactgttattagtttaatattattgcaatgtatggttttttgactgaa

SEQ ID NO: 689522 - DNA, 120 bp, Artificial Sequence
  ENSG00000188095_0 (sequence is synthesized)
agcctcccagagcctgcagcccggccatggcccagtcgcctcctccgcagagcctcctcggccacgaccactggatcttcgcccagggctggggctgggccggccactgggactccacgt

SEQ ID NO: 689523 - DNA, 120 bp, Artificial Sequence
  ENSG00000188095_1 (sequence is synthesized)
ccccggcctcctcctccgattcgtcgggttcgtgcccctgcgacggcgcccgcggactcccgcagccacagcctccgagctgcagctcccgagccgcagaggcagccgcgacgacgccca

SEQ ID NO: 689524 - DNA, 120 bp, Artificial Sequence
  ENSG00000188095_2 (sequence is synthesized)
gacgagcgcgcaccggaccagcgggcggacagcggcagagcgccagcgagcgggagaaactgcgcatgcgcacgctggcccgcgccctgcacgagttgcgccgctttctgcctccctcct

SEQ ID NO: 689525 - DNA, 120 bp, Artificial Sequence
  ENSG00000188095_3 (sequence is synthesized)
tggcgccggccggccagagcctgaccaagatcgagacgctgcgcctggccatccgctacatcggccacctatcggccgtgctgggtctcagcgaggagagtctgcagtgccggcgcaggc

SEQ ID NO: 689526 - DNA, 120 bp, Artificial Sequence
  ENSG00000188095_4 (sequence is synthesized)
gtctcagcgaggagagtctgcagtgccggcgcaggcagcgcggggacgcggggtccccttggggctgcccgctgtgccccgaccgtggccccgcagaggcgcagacgcaggcggaggggc

SEQ ID NO: 689527 - DNA, 120 bp, Artificial Sequence
  ENSG00000188095_5 (sequence is synthesized)
aggggcaaggacaggggcaaggacaggggcaagggcaggggcgcaggccgggcctggtctccgccgtcctcgccgaggcgtcctggggatccccgtccgcctgccccggagcccaagccg

SEQ ID NO: 689528 - DNA, 120 bp, Artificial Sequence
  ENSG00000188095_6 (sequence is synthesized)
ccgtattcgtcccaagggacaacctccgacgcgtctctttggacgccaccccaaggctgtccctggacgcagtcgtccccagagccccggaacccaccagtgccctggacggcggcccca

SEQ ID NO: 689529 - DNA, 120 bp, Artificial Sequence
  ENSG00000188095_7 (sequence is synthesized)
gcaactttggagctggccgcagtgtaccagggtctctctgtgtctccagagccctgtctgtcgctgggagctccatctctcctgccccacccatcatgccagagactgcagcctcagacc

SEQ ID NO: 689530 - DNA, 120 bp, Artificial Sequence
  ENSG00000188095_8 (sequence is synthesized)
cccgggaggtgctggagccacagtgcagaggtggtgcccaactcagaggaccagggaccgggcgccgccttccagctcagtgaagcaagccctccccagagctcaggcctgcggttcagt

SEQ ID NO: 689531 - DNA, 120 bp, Artificial Sequence
  ENSG00000188095_9 (sequence is synthesized)
ggctgccctgaactttggcaagaagatctggagggggcccgcctgggcatcttctactaaatggcctcggcttccctctttccatccaggaatcagtcctgtagcttgggtgcctcctta

SEQ ID NO: 689532 - DNA, 120 bp, Artificial Sequence
  ENSG00000188095_10 (sequence is synthesized)
tttgttaattagtggcttttcatgttctcctttagccaaggctccctttttccaagtgatgtctttcagggaagcagtgtttgaaatagatagcgggtaccttccctggatggagtcagg

SEQ ID NO: 689533 - DNA, 120 bp, Artificial Sequence
  ENSG00000188095_11 (sequence is synthesized)
gcgggggcactgtcctccactgctagacacccccagaatgcctggcgctctgcagagcacagtctgagctgctctaagaaggggtctcctttaccctaaaggcagctgggcagggacagg

SEQ ID NO: 689534 - DNA, 120 bp, Artificial Sequence
  ENSG00000188095_12 (sequence is synthesized)
tgggagaatgggtgtaggaggcaggccccaggctctgcttcttggtgacagttggccagagccctgtatgctttgatttttttgtacttaaaaagaaaaaacacacacacacaacaaaaa

SEQ ID NO: 689535 - DNA, 120 bp, Artificial Sequence
  ENSG00000188095_13 (sequence is synthesized)
gaggaagtgccgcgtcttggtgggtctggagctggctgacaatgcaggagacaaggtctcgccatgttgcctaggatgttctcgaactcctgaactcaagtaatccaccttggcctccca

SEQ ID NO: 689536 - DNA, 120 bp, Artificial Sequence
  ENSG00000188100_0 (sequence is synthesized)
atcctagttcaccactgtctgctgccacacgatgctgggaggcctggggaagctggctgccgaaggcctggcccaccgcaccgagaaggccaccgagggagccattcatgccgtggaaga

SEQ ID NO: 689537 - DNA, 120 bp, Artificial Sequence
  ENSG00000188100_1 (sequence is synthesized)
gaccaacacagtcacaaatgccatcacccatgcagcagagagtctggacaaacttggacagtgagtgcacctgctaccacggcccttccccagtctcaataaaaagccatgacatgtgta

SEQ ID NO: 689538 - DNA, 120 bp, Artificial Sequence
  ENSG00000188107_0 (sequence is synthesized)
gagaaacaaagtgatacacgctaggcatgtccagacattaaccgtaatcagaagcctcctagggttgcaagcctccttggctaatggttgggctttgtgcctcactcttctcttacacct

SEQ ID NO: 689539 - DNA, 120 bp, Artificial Sequence
  ENSG00000188107_1 (sequence is synthesized)
ggggagtcaagtctggatcctctgctccatatttatttagcaaataaaacactgatctcaaacagcaacggaacctgtgtacttgaggtgttttttgaaaactaatcagaagaggaatgc

SEQ ID NO: 689540 - DNA, 120 bp, Artificial Sequence
  ENSG00000188107_2 (sequence is synthesized)
ttatctcccaagaaaattgaaaccatctgtaaaagaatcttggctgtgctgtgttttgattagattgaagcttggtgtaaagagaaaacacaaaagaccgcagaatatttacaacatttg

SEQ ID NO: 689541 - DNA, 120 bp, Artificial Sequence
  ENSG00000188107_3 (sequence is synthesized)
aattcctgtttctccatcaaagcacattgtcatcaaagctactttgggtatagaaaaaaggtcaattccaattcccaggaatccttaaccacaactttacttggaaatttccggtaatac

SEQ ID NO: 689542 - DNA, 120 bp, Artificial Sequence
  ENSG00000188107_4 (sequence is synthesized)
ttaaaacaccattttgcagcaattctttatgataaactgtaaaatacagctacccgaaaatgactgacaaatcaatcgtcattctgagcctgatggtttttcacagctctttcataaatg

SEQ ID NO: 689543 - DNA, 120 bp, Artificial Sequence
  ENSG00000188107_5 (sequence is synthesized)
gaaaaacatgtagacggcaattggtggaagaatggcatccacaaccctcatcatatgtggtaaattggacactaacagaaaacatctgcttggacttctacagagattgctggtttttgg

SEQ ID NO: 689544 - DNA, 120 bp, Artificial Sequence
  ENSG00000188107_6 (sequence is synthesized)
gtgtaaacactaaaatagatacttcaggcaatcaagctgttccccagatttgccctttgcaaattcaattaggagatatccttgtaatttcttctgaaccatctcttcaatttccagaaa

SEQ ID NO: 689545 - DNA, 120 bp, Artificial Sequence
  ENSG00000188107_7 (sequence is synthesized)
taaatttgatgaatgtttctgaaacatctttcgttggctgtgtgcaaaataccacaacggaagatcagttactttttggctgcagactaaaaggaatgcacactgttaattctaagtggc

SEQ ID NO: 689546 - DNA, 120 bp, Artificial Sequence
  ENSG00000188107_8 (sequence is synthesized)
tgagtgttgggacacattattttatcacagttatggcaagtggtccatcaccttgtccactgggacttcgactaaatgtgacagtgaaacagcagttctgccaggaatctctgagttcag

SEQ ID NO: 689547 - DNA, 120 bp, Artificial Sequence
  ENSG00000188107_9 (sequence is synthesized)
aattttgctctggtcatggtaaatgtcttagtgaagcttggagcaagacatatagctgccattgccagcctccattttctggaaaatactgccaggaacttgatgcatgttcttttaaac

SEQ ID NO: 689548 - DNA, 120 bp, Artificial Sequence
  ENSG00000188107_10 (sequence is synthesized)
catgtaaaaataatggcagttgcattaataaaagagaaaattgggatgagcaagcatatgaatgtgtctgtcacccaccatttacaggaaagaattgctcagaaataattggccagtgtc

SEQ ID NO: 689549 - DNA, 120 bp, Artificial Sequence
  ENSG00000188107_11 (sequence is synthesized)
aaccacatgtctgtttccatggaaactgcagcaatattacttcaaatagtttcatttgtgaatgtgatgagcaattttcaggtccattctgtgaggtgtcagcaaaaccttgtgtttctc

SEQ ID NO: 689550 - DNA, 120 bp, Artificial Sequence
  ENSG00000188107_12 (sequence is synthesized)
tgcttttttggaaaagaggaatttgcccaaatagcagttctgcttatacttatgaatgcccaaaaggatcttccagccaaaatggtgaaactgatgtcagtgagttttcattagtaccat

SEQ ID NO: 689551 - DNA, 120 bp, Artificial Sequence
  ENSG00000188107_13 (sequence is synthesized)
gtcagaatggtactgactgcatcaaaatatcaaatgatgttatgtgcatctgttcaccaatatttacagatttgctttgtaagagcattcaaacatcatgtgagtcatttcctttgagga

SEQ ID NO: 689552 - DNA, 120 bp, Artificial Sequence
  ENSG00000188107_14 (sequence is synthesized)
ataatgctacatgtaagaaatgtgagaaagattatccttgcagctgtatatcaggatttactgaaaaaaactgtgagaaagcaattgaccactgtaaactgctcagcatcaactgtctga

SEQ ID NO: 689553 - DNA, 120 bp, Artificial Sequence
  ENSG00000188107_15 (sequence is synthesized)
atgaagaatggtgtttcaatataattggaagattcaaatatgtatgcattccagggtgcacaaaaaatccatgttggtttttgaagaatgtttacctaattcatcaacacctctgctact

SEQ ID NO: 689554 - DNA, 120 bp, Artificial Sequence
  ENSG00000188107_16 (sequence is synthesized)
gtggagtcaccttccatggtatttgccaagataaaggtcctgctcaatttgaatatgtgtggcaattgggatttgcaggatctgaaggcgaaaagtgccaaggggttattgatgcctatt

SEQ ID NO: 689555 - DNA, 120 bp, Artificial Sequence
  ENSG00000188107_17 (sequence is synthesized)
tctttctggctgcaaactgcactgaagatgcaacctatgtgaacgatcctgaagataataattcttcatgttggttcccacatgaaggcacaaaagagatttgtgcaaatggatgcagtt

SEQ ID NO: 689556 - DNA, 120 bp, Artificial Sequence
  ENSG00000188107_18 (sequence is synthesized)
gtttgagtgaagaagacagtcaggaatatcggtatctatgttttctcagatgggctggcaacatgtatctggaaaatacaactgatgatcaagaaaatgagtgtcaacatgaagctgttt

SEQ ID NO: 689557 - DNA, 120 bp, Artificial Sequence
  ENSG00000188107_19 (sequence is synthesized)
gtaaagatgaaattaatagacccagatgcagctgttctcttagttacattggcagattgtgtgttgtcaatgttgactattgcttagggaaccacagtatatcagtgcatggcctctgcc

SEQ ID NO: 689558 - DNA, 120 bp, Artificial Sequence
  ENSG00000188107_20 (sequence is synthesized)
tggccctttcgcacaattgtaactgtagcggtctgcaaagatatgaaaggaacatctgtgagatagatactgaagactgcaaatctgcgtcctgcaaaaatggaacaactagtacacatt

SEQ ID NO: 689559 - DNA, 120 bp, Artificial Sequence
  ENSG00000188107_21 (sequence is synthesized)
taaggggatatttcttccgcaagtgtgtcccaggatttaaaggtacgcaatgtgaaattgatatagatgagtgtgcttcacatccctgcaaaaatggagccacctgcattgaccaacctg

SEQ ID NO: 689560 - DNA, 120 bp, Artificial Sequence
  ENSG00000188107_22 (sequence is synthesized)
gtaattacttctgccagtgtgtgcctccatttaaagtggttgatggcttttcctgcttatgcaatccaggctatgttgggataagatgtgaacaggacattgatgactgcatcctgaatg

SEQ ID NO: 689561 - DNA, 120 bp, Artificial Sequence
  ENSG00000188107_23 (sequence is synthesized)
cctgtgagcacaattctacctgcaaagacctgcatctcagctaccagtgtgtgtgcctatctgattgggaaggaaatttttgtgaacaagaatccaatgagtgtaaaatgaatccttgca

SEQ ID NO: 689562 - DNA, 120 bp, Artificial Sequence
  ENSG00000188107_24 (sequence is synthesized)
agaacaattccacctgtactgacctttacaaaagctatcgatgtgagtgtacatctggatggactggacagaactgtagtgaagaaataaatgaatgcgactctgatccatgcatgaatg

SEQ ID NO: 689563 - DNA, 120 bp, Artificial Sequence
  ENSG00000188107_25 (sequence is synthesized)
gaggtctttgtcatgaatctaccatccctggacaatttgtatgtctgtgcccacccctttatactggacaattttgccaccaacgctataacctttgtgacctacttcataacccttgca

SEQ ID NO: 689564 - DNA, 120 bp, Artificial Sequence
  ENSG00000188107_26 (sequence is synthesized)
gaaacaactcaacatgcttagctttggtagacgcaaatcagcattgtatttgtagagaagaatttgaaggtaaaaactgtgaaattgatgtgaaagactgcctcttcctttcctgccagg

SEQ ID NO: 689565 - DNA, 120 bp, Artificial Sequence
  ENSG00000188107_27 (sequence is synthesized)
attatggtgactgtgaagatatggtcaacaatttcaggtgtatttgcagacctgggttttctggatctctgtgtgaaattgaaattaatgaatgttcctctgaaccttgcaaaaataatg

SEQ ID NO: 689566 - DNA, 120 bp, Artificial Sequence
  ENSG00000188107_28 (sequence is synthesized)
gaacatgtgtggatctgacaaacagatttttttgtaattgtgaacctgagtaccatgggcccttctgtgaacttgatgtaaataaatgtaaaatctcaccttgtctagatgaagaaaatt

SEQ ID NO: 689567 - DNA, 120 bp, Artificial Sequence
  ENSG00000188107_29 (sequence is synthesized)
gtgtctacaggactgatggatacaactgcctctgtgcccctggttatacaggcatcaactgtgaaataaatctagatgaatgcctatcagagccctgtctccatgatggagtttgtatcg

SEQ ID NO: 689568 - DNA, 120 bp, Artificial Sequence
  ENSG00000188107_30 (sequence is synthesized)
atggcatcaatcattatacctgtgactgcaagagtgggttttttggaacacactgtgaaacaaacgccaatgattgcctttcaaatccttgtctacatggaaggtgcacagaacttatta

SEQ ID NO: 689569 - DNA, 120 bp, Artificial Sequence
  ENSG00000188107_31 (sequence is synthesized)
atgaatatccatgttcatgtgatgcagatgggactagcacacaatgtaagatcaaaattaatgactgcacatcaatcccttgtatgaatgaaggcttctgtcagaagtcagcacatggat

SEQ ID NO: 689570 - DNA, 120 bp, Artificial Sequence
  ENSG00000188107_32 (sequence is synthesized)
ttacttgcatttgcccacgtggatacactggtgcatactgtgaaaaaagcattgataattgtgctgagcctgaacttaattcagtcatctgtcttaatggagggatctgtgttgatgggc

SEQ ID NO: 689571 - DNA, 120 bp, Artificial Sequence
  ENSG00000188107_33 (sequence is synthesized)
ctggacatacttttgactgcagatgtcttcctggattttctggtcaattttgtgaaattaatataaatgaatgctcttcatcaccatgtctacatggtgcagactgtgaagatcacatca

SEQ ID NO: 689572 - DNA, 120 bp, Artificial Sequence
  ENSG00000188107_34 (sequence is synthesized)
atggatatgtttgcaaatgccaaccaggatggtctggacaccactgtgagaatgagcttgagtgcattcccaactcatgtgttcatgaactctgcatggagaatgaacctggctcgacat

SEQ ID NO: 689573 - DNA, 120 bp, Artificial Sequence
  ENSG00000188107_35 (sequence is synthesized)
gtttatgcacacctggatttatgacctgctccattgggcttctttgtggtgatgaaataaggagaattacctgtttaactcccatctttcaaagaacagatcccatttccacacagacat

SEQ ID NO: 689574 - DNA, 120 bp, Artificial Sequence
  ENSG00000188107_36 (sequence is synthesized)
atacaattcccccttctgagactttggtcagcagctttccatctataaaggctactagaataccagccataatggacacttacccagttgatcaaggtccaaaacagacaggcattgtca

SEQ ID NO: 689575 - DNA, 120 bp, Artificial Sequence
  ENSG00000188107_37 (sequence is synthesized)
agcacgacattctcccaaccactggtttggcaacattaagaattagcacacccttggaaagctacttactccaagaactgattgtcactagagagctttcagcaaaacacagtcttcttt

SEQ ID NO: 689576 - DNA, 120 bp, Artificial Sequence
  ENSG00000188107_38 (sequence is synthesized)
cttccgcagatgtttcctcttctcgattcctgaattttggtattcgtgacccagcacaaattgtccaggacaaaacatcggtatcacatatgcctattcgaacttcagcagccacactag

SEQ ID NO: 689577 - DNA, 120 bp, Artificial Sequence
  ENSG00000188107_39 (sequence is synthesized)
gtttcttttttcctgataggagagcaaggaccccatttatcatgtcttccttaatgtcagattttatttttcctacacaatctttattatttgagaactgtcagactgttgctttatctg

SEQ ID NO: 689578 - DNA, 120 bp, Artificial Sequence
  ENSG00000188107_40 (sequence is synthesized)
ctaccccaacgacttcagtaattagaagcattccaggggctgatattgagctaaacaggcagtcattactctcccgtggattcctgcttatagctgcctccataagtgcaactccagttg

SEQ ID NO: 689579 - DNA, 120 bp, Artificial Sequence
  ENSG00000188107_41 (sequence is synthesized)
tctctaggggggctcaagaggatattgaagaatattcagctgattctttaatttcaagaagagagcactggagattgctcagcccctcgatgtctcccatttttcctgctaaggtaatta

SEQ ID NO: 689580 - DNA, 120 bp, Artificial Sequence
  ENSG00000188107_42 (sequence is synthesized)
tatctaaacaggtaaccatcttaaactcatcagctctgcaccggttcagtacaaaagccttcaatcccagtgaatatcaggctattactgaggcttcaagcaaccagagactcacaaaca

SEQ ID NO: 689581 - DNA, 120 bp, Artificial Sequence
  ENSG00000188107_43 (sequence is synthesized)
tcaaatcacaggctgctgattctttaagagaattaagccaaacatgtgcaacatgttctatgactgaaataaaatcctctcgtgaattctcagatcaagttttgcatagcaaacagtccc

SEQ ID NO: 689582 - DNA, 120 bp, Artificial Sequence
  ENSG00000188107_44 (sequence is synthesized)
cgatattagccagctggtatgcactaatgggagctcaaactatcacttctgggcattcattttcttctgctactgaaataacaccatcagtggcattcacagaagtgccatctttatttc

SEQ ID NO: 689583 - DNA, 120 bp, Artificial Sequence
  ENSG00000188107_45 (sequence is synthesized)
cttctaaaaagagtgcaaaaagaacaattttatcctcatccttggaagaatccattaccctatcaagtaatttggatgttaatttatgtttggataagacttgtttatccattgtccctt

SEQ ID NO: 689584 - DNA, 120 bp, Artificial Sequence
  ENSG00000188107_46 (sequence is synthesized)
cacaaactatctcttcagacttgatgaattctgatttgacttcaaaaatgactactgatgaactgtcagtatcagaaaacattttaaaactattgaaaataagacaatatggcataacta

SEQ ID NO: 689585 - DNA, 120 bp, Artificial Sequence
  ENSG00000188107_47 (sequence is synthesized)
tgggacccactgaggtactaaatcaagagagcttattggacatggaaaaaagtaaaggatctcatacactgttcaaacttcacccaagtgatagttctctggattttgagttaaacttac

SEQ ID NO: 689586 - DNA, 120 bp, Artificial Sequence
  ENSG00000188107_48 (sequence is synthesized)
aaatttatccggatgttactttaaagacatattcagaaattacacatgcaaatgacttcaaaaataatctgccaccattgacaggctcagtgcctgatttttcagaagtcaccaccaatg

SEQ ID NO: 689587 - DNA, 120 bp, Artificial Sequence
  ENSG00000188107_49 (sequence is synthesized)
ttgcattttatacagtttcagcaactccagcactttcaatacagacgtcttcctccatgtctgtaattaggccagattggccatattttacagattatatgacctctcttaaaaaagagg

SEQ ID NO: 689588 - DNA, 120 bp, Artificial Sequence
  ENSG00000188107_50 (sequence is synthesized)
tcaagacttcttcagaatggtccaaatgggaacttcagcctagtgtgcaatatcaggaatttcccactgcaagccggcatcttcccttcactagatctcttactttgtcttcactggaat

SEQ ID NO: 689589 - DNA, 120 bp, Artificial Sequence
  ENSG00000188107_51 (sequence is synthesized)
ccattctggcacctcaacggctgatgatttctgatttcagttgtgttcgttattatggagattcttatctagaatttcagaatgtggctttaaatccacaaaataacatctccctagaat

SEQ ID NO: 689590 - DNA, 120 bp, Artificial Sequence
  ENSG00000188107_52 (sequence is synthesized)
ttcagaccttcagctcctatggacttctgctgtatgtcaagcaagactcaaatttagtagatggattttttattcaattgtttattgaaaatggtactttaaagtaccacttttactgtc

SEQ ID NO: 689591 - DNA, 120 bp, Artificial Sequence
  ENSG00000188107_53 (sequence is synthesized)
ctggtgaagcaaaatttaaaagcattaatactactgttagagtggacaacgggcaaaagtatacactgcttatcaggcaagaattggatccatgtaacgctgagctgactattttaggga

SEQ ID NO: 689592 - DNA, 120 bp, Artificial Sequence
  ENSG00000188107_54 (sequence is synthesized)
ggaatacacaaatatgcgaatctatcaatcatgtactcggaaaacccctgccaaaatcaggatctgtcttcattggtggatttccagaccttcatgggaaaatccagatgcctgtaccag

SEQ ID NO: 689593 - DNA, 120 bp, Artificial Sequence
  ENSG00000188107_55 (sequence is synthesized)
tcaagaattttactggctgcatagaagttatagaaataaataactggagatctttcattccatccaaggcagtgaaaaactatcacattaacaattgcagatcccagggatttatgctgt

SEQ ID NO: 689594 - DNA, 120 bp, Artificial Sequence
  ENSG00000188107_56 (sequence is synthesized)
ctccaacagcctcctttgttgatgcttctgatgtgacacaaggggttgataccatgtggacttctgtcagcccctctgttgcagcaccctctgtgtgccagcaggatgtatgccacaatg

SEQ ID NO: 689595 - DNA, 120 bp, Artificial Sequence
  ENSG00000188107_57 (sequence is synthesized)
gaggcacatgccatgccatcttcctctccagtggcatagtgtcattccaatgtgactgtccactacatttcactggccgcttctgtgaaaaagatgcaggtttattctttccatctttca

SEQ ID NO: 689596 - DNA, 120 bp, Artificial Sequence
  ENSG00000188107_58 (sequence is synthesized)
atgggaattcctatttagaactgccctttttgaagtttgtcctggagaaggaacataacagaactgttaccatctacttgactataaaaacaaacagtttaaatggaactattctttaca

SEQ ID NO: 689597 - DNA, 120 bp, Artificial Sequence
  ENSG00000188107_59 (sequence is synthesized)
gtaatgggaataattgtggaaagcagtttcttcatttatttcttgtggaaggaaggccatcagttaaatatgggtgtggaaattctcaaaatattttgactgtttctgctaattacagca

SEQ ID NO: 689598 - DNA, 120 bp, Artificial Sequence
  ENSG00000188107_60 (sequence is synthesized)
ttaacacaaatgcattcacccctatcacaatacgctacacaacgcctgttggcagccctggagttgtttgtatgattgaaatgactgcagatggaaaacctccagtacagaagaaagaca

SEQ ID NO: 689599 - DNA, 120 bp, Artificial Sequence
  ENSG00000188107_61 (sequence is synthesized)
cagagatttcccatgcctctcaggcatattttgaatcaatgttccttggccatattcctgcaaatgttcaaattcataagaaagcaggtcctgtttatgggttcaggggctgcattctag

SEQ ID NO: 689600 - DNA, 120 bp, Artificial Sequence
  ENSG00000188107_62 (sequence is synthesized)
accttcaagtaaacaacaaagaattcttcatcatcgatgaagcacgacatggaaagaatattgagaactgccacgtcccttggtgtgctcatcatctgtgccgcaacaatggcacctgca

SEQ ID NO: 689601 - DNA, 120 bp, Artificial Sequence
  ENSG00000188107_63 (sequence is synthesized)
tcagtgataatgaaaatctgttttgtgagtgtccaaggctgtattcaggcaagctgtgccagtttgcaagttgtgaaaacaacccatgtggaaatggtgccacctgtgttccaaaatccg

SEQ ID NO: 689602 - DNA, 120 bp, Artificial Sequence
  ENSG00000188107_64 (sequence is synthesized)
gaacagatattgtctgcctctgcccatatgggaggtctggacccctctgcactgatgctattaatattactcagccaaggttcagtggcacagatgcctttggatacacctcattcctgg

SEQ ID NO: 689603 - DNA, 120 bp, Artificial Sequence
  ENSG00000188107_65 (sequence is synthesized)
cttattcacggatctcagacatcagcttccattatgaattccacctgaagtttcagctggcaaacaaccactcagcactgcaaaataacttgatattttttactggacagaaaggccatg

SEQ ID NO: 689604 - DNA, 120 bp, Artificial Sequence
  ENSG00000188107_66 (sequence is synthesized)
ggttgaatggcgatgacttcctggctgtgggcctgctcaatggcagtgtggtttatagttataacctggggtctggcatagcaagcatcaggagcgagcccctcaatctgagccttggag

SEQ ID NO: 689605 - DNA, 120 bp, Artificial Sequence
  ENSG00000188107_67 (sequence is synthesized)
tccacactgttcatctgggcaagttcttccaagagggctggctgaaggtagatgatcataaaaataaatccattatcgccccaggaagactggttggtctcaatgtcttcagtcagtttt

SEQ ID NO: 689606 - DNA, 120 bp, Artificial Sequence
  ENSG00000188107_68 (sequence is synthesized)
atgtaggtggctacagtgaatacactccagatctcttaccaaatggagcagattttaaaaatggttttcaaggctgtattttcactcttcaagttcgcactgagaaggatggccatttca

SEQ ID NO: 689607 - DNA, 120 bp, Artificial Sequence
  ENSG00000188107_69 (sequence is synthesized)
gaggactgggaaatcctgagggccacccaaatgctggacgcagtgttggccagtgtcatgcttctccctgcagtttaatgaaatgtggcaatggtgggacatgcatagagagtggaacta

SEQ ID NO: 689608 - DNA, 120 bp, Artificial Sequence
  ENSG00000188107_70 (sequence is synthesized)
gtgtttactgcaattgtaccactgggtggaaaggatcattctgcacagagacagtttctacctgtgatcctgaacatgaccctccacaccactgtagcagaggagcaacctgcatttcat

SEQ ID NO: 689609 - DNA, 120 bp, Artificial Sequence
  ENSG00000188107_71 (sequence is synthesized)
tacctcatggatacacctgtttctgtcctctaggaaccactggaatctactgtgaacaagctttatccataagtgatccatctttcagaagcaatgagttatcctggatgtcttttgctt

SEQ ID NO: 689610 - DNA, 120 bp, Artificial Sequence
  ENSG00000188107_72 (sequence is synthesized)
cctttcatgttcgaaaaaagacacatattcaattgcagtttcagcctctcgctgcagatggtatcctattttatgctgcacaacacttaaaagcccaatcaggtgattttttatgcatct

SEQ ID NO: 689611 - DNA, 120 bp, Artificial Sequence
  ENSG00000188107_73 (sequence is synthesized)
ctttagtaaatagttccgttcaacttcgctacaaccttggcgacagaactatcattctagaaactctccaaaaagtaactataaacggaagtacttggcatataataaaagcaggaagag

SEQ ID NO: 689612 - DNA, 120 bp, Artificial Sequence
  ENSG00000188107_74 (sequence is synthesized)
ttggtgcagaaggctacctggatctagatgggataaatgtaacagaaaaggcctccactaaaatgagttctctggacacaaatacagacttctatattggaggagtatcttctttaaatc

SEQ ID NO: 689613 - DNA, 120 bp, Artificial Sequence
  ENSG00000188107_75 (sequence is synthesized)
ttgtaaatcccatggcaatagaaaatgaacctgtaggttttcaaggctgtatccgacaagttatcataaataatcaagaattacaattaactgaatttggagcaaaaggtggctcaaatg

SEQ ID NO: 689614 - DNA, 120 bp, Artificial Sequence
  ENSG00000188107_76 (sequence is synthesized)
taggtgactgtgatgggacagcctgtgggtacaacacatgcagaaatggaggtgaatgtacagtaaatggcacaactttttcttgcagatgtttgccagattgggctggaaatacatgta

SEQ ID NO: 689615 - DNA, 120 bp, Artificial Sequence
  ENSG00000188107_77 (sequence is synthesized)
accagtctgtgtcctgtttgaataatctttgcctccaccaatctttatgtatacctgaccaatcattttcttacagttgcctgtgtactttgggttgggtgggaaggtattgtgaaaaca

SEQ ID NO: 689616 - DNA, 120 bp, Artificial Sequence
  ENSG00000188107_78 (sequence is synthesized)
aaacttcattttcaactgcaaaatttatgggtaattcttacattaaatacattgatccaaattatagaatgagaaacctccagttcactactatatccttaaatttcagtaccactaaaa

SEQ ID NO: 689617 - DNA, 120 bp, Artificial Sequence
  ENSG00000188107_79 (sequence is synthesized)
cagaaggtctaattgtatggatgggaatagctcaaaatgaagaaaatgattttctggcaattggtctccataatcagaccttgaaaatagcagttaacttgggagaaagaatctctgtgc

SEQ ID NO: 689618 - DNA, 120 bp, Artificial Sequence
  ENSG00000188107_80 (sequence is synthesized)
ctatgagctataacaatggcacattctgttgtaataaatggcaccatgtagttgtaattcaaaatcagactcttatcaaggcctacataaataacagtctaattctttccgaggatattg

SEQ ID NO: 689619 - DNA, 120 bp, Artificial Sequence
  ENSG00000188107_81 (sequence is synthesized)
atccacataaaaactttgtggctctaaactatgatggcatttgttatctagggggctttgaatatggtagaaaggtaaatatcgttactcaagagatttttaaaaccaattttgttggca

SEQ ID NO: 689620 - DNA, 120 bp, Artificial Sequence
  ENSG00000188107_82 (sequence is synthesized)
aaattaaagatgttgtattttttcaggaaccaaaaaacattgaactaattaaattagaaggatacaatgtttatgatggagatgaacaaaatgaggttacataagttaacactagagatt

SEQ ID NO: 689621 - DNA, 120 bp, Artificial Sequence
  ENSG00000188107_83 (sequence is synthesized)
ttagtacacactatacataaatgcagttattttgatagttatttctttgatacattgcttacggggaatcaactgtttactatattacctgaaatagtctaaatgctaacatatcttttt

SEQ ID NO: 689622 - DNA, 120 bp, Artificial Sequence
  ENSG00000188107_84 (sequence is synthesized)
gataagattgtaaaatgtcactgaaggttctgattgtttttcctacatctaatttatctgtatatattttgattcatgttttaactccattagttcagtgcttattcacagaatgtgctt

SEQ ID NO: 689623 - DNA, 120 bp, Artificial Sequence
  ENSG00000188107_85 (sequence is synthesized)
attcactttgcttattcactttttacctatccctaatgcttacattttaaaatcaacgtgtaaacacaattttaaaaatcaatgtgtaagctgaactttaaaatgtttaaaattcagttg

SEQ ID NO: 689624 - DNA, 120 bp, Artificial Sequence
  ENSG00000188107_86 (sequence is synthesized)
ggaatgaattagggataggtacaaataagaaaaaaatcaagttattaatcaaaggaaaaataaaaattatacaaagcaatgtaaccatattgtattacatggcttagctacaacttattt

SEQ ID NO: 689625 - DNA, 120 bp, Artificial Sequence
  ENSG00000188107_87 (sequence is synthesized)
atatgattcaacaatgtaaaacttgaacatagatttaaaccaaaaattattgcatgaatgtagaaagagaaggtgagaggagaggagaacaggctggtaagagctaaatccttatctttt

SEQ ID NO: 689626 - DNA, 120 bp, Artificial Sequence
  ENSG00000188107_88 (sequence is synthesized)
ctctaggaaccactggaatctactgtgaacaagcacttatcctcattgtgatcttggaaaagccaaaaccagcagaacggaaagtgaagaaggaggctttatccataagtgatccatctt

SEQ ID NO: 689627 - DNA, 120 bp, Artificial Sequence
  ENSG00000188107_89 (sequence is synthesized)
gaggcagggatgtcagtatataaggaatttgaaagacatcaatgataatggcaaaaactgctcataaattaaattaagagcttaattaaactggggaaaaaaacatattgccaaattaca

SEQ ID NO: 689628 - DNA, 120 bp, Artificial Sequence
  ENSG00000188107_90 (sequence is synthesized)
tgcagttggtttgtaacagcatttgtccacttgctatgccctgggattttcaaggcacattcctctactaaggaaagaattgctcagaaataattggccagtgtcaaccacatgtctgtt

SEQ ID NO: 689629 - DNA, 120 bp, Artificial Sequence
  ENSG00000188107_91 (sequence is synthesized)
taaagatgaaattaatagacccagaagaatcctcaacacggtgataccacaccaaattcagcaacatatagaaaggtttatacagcatgaccaggtgggatttatcgtaagaatataagt

SEQ ID NO: 689630 - DNA, 120 bp, Artificial Sequence
  ENSG00000188107_92 (sequence is synthesized)
ttgatttagtggcttaaaatcaattaatgtaatttaatgtatcaatagaataaataaagaagaaaatgcatgataatgtagatggagaaaaaaattgtattacagaatctcacaacactt

SEQ ID NO: 689631 - DNA, 120 bp, Artificial Sequence
  ENSG00000188107_93 (sequence is synthesized)
tatgaaacaaacactcaacaaataaagaataaaagggaacttccacaatctgataagagaagttaaaaaaaaataagaagaatgaagaaacataactaacattatactttacggtgaaag

SEQ ID NO: 689632 - DNA, 120 bp, Artificial Sequence
  ENSG00000188107_94 (sequence is synthesized)
cagcaattctacttctagtatatactcaaaaaattgaaaatatatgttctttacaaaaatttatatgtgaatgtttacagttttgttcgaaagagtcaaaaagttgaaacaacccaaatg

SEQ ID NO: 689633 - DNA, 120 bp, Artificial Sequence
  ENSG00000188107_95 (sequence is synthesized)
accatcaactgatgaatggatatataaaatttgttatatccatacaatgaaatgttattcagcaatagacaaagatgaattactgatatgtgcttcaatacgaataaacattgaaaacat

SEQ ID NO: 689634 - DNA, 120 bp, Artificial Sequence
  ENSG00000188107_96 (sequence is synthesized)
tttgataaggaaaagtagtaagccacaaaagacacatagaatagtgctcaacaaatacttgtttaatgaaacaatgattttcagaagcttttttatttactaagaaaattatccttcgtt

SEQ ID NO: 689635 - DNA, 120 bp, Artificial Sequence
  ENSG00000188107_97 (sequence is synthesized)
ttgtgatgttatttccttttttctgattttgtgattctcttttgtttgccattattttttgatatccagagaatcttggataaattacaaaatttttgtaatttatcaacactttaatga

SEQ ID NO: 689636 - DNA, 120 bp, Artificial Sequence
  ENSG00000188107_98 (sequence is synthesized)
gttcttgatattgtctcataattaatactaacaatggagcccaacaaatgttgcagatacaagtattttatataaaattaagtttctctatatcagttgcaatatctagaaattatatgt

SEQ ID NO: 689637 - DNA, 120 bp, Artificial Sequence
  ENSG00000188107_99 (sequence is synthesized)
gtgataccacctgttataatgtcaaaagatatgcaaaatgtttagaattaaaaaaaagatgctctaattctccattaaaaagaccctctatataccactaagctcaatgaaaaagagaaa

SEQ ID NO: 689638 - DNA, 120 bp, Artificial Sequence
  ENSG00000188107_100 (sequence is synthesized)
attatatatacactgaataaatggaaatataatgcatggagttaaatattaggccttaaattagctaaaatattaattcttcccaaattaattcacacatttaatgcaatagtaaaaata

SEQ ID NO: 689639 - DNA, 120 bp, Artificial Sequence
  ENSG00000188107_101 (sequence is synthesized)
ttgcaagttattttagaaactaattatcatgttatatatatttatgaataatattttctaaattatgaagtcatctttgaaaaggaagactaatggggtgggatctgatgaaccatatga

SEQ ID NO: 689640 - DNA, 120 bp, Artificial Sequence
  ENSG00000188107_102 (sequence is synthesized)
catgacagactacataacacatatgggtgcctttaaaggaaaaaaaataataatgggtcaacagagagctctgacaacaacccgagtatatacgggaactcaatatatgagaaatttggc

SEQ ID NO: 689641 - DNA, 120 bp, Artificial Sequence
  ENSG00000188107_103 (sequence is synthesized)
tataatctcatttgaacatacagggttctttagtaaatggtattgaggaaatggctcataataagaccttaaatgaaactggattacaaccttataccttatatagaagtagactctaaa

SEQ ID NO: 689642 - DNA, 120 bp, Artificial Sequence
  ENSG00000188107_104 (sequence is synthesized)
tgtgtatagggatctaaaagtttaaggtaaaatgacgatataaatgaaagaaatgtagaaaaatatctttgtgatttcgggatggagaaatttttcaattaaactcaatttataaggcaa

SEQ ID NO: 689643 - DNA, 120 bp, Artificial Sequence
  ENSG00000188107_105 (sequence is synthesized)
aataatgatagtattataatgatagacactaataatgttgatgatgttaacggacacaaagttaatgaatagcgtataaacattttcttttaaagtgtattttaaatgggtgcagattaa

SEQ ID NO: 689644 - DNA, 120 bp, Artificial Sequence
  ENSG00000188107_106 (sequence is synthesized)
aattcattatataaatgatgtattgcaaacaggtctgcatattaccacatttttttgccctgaaatcttcaaaaaatttttctgggggtttataaaatgtttaatgagccaaagactaaa

SEQ ID NO: 689645 - DNA, 120 bp, Artificial Sequence
  ENSG00000188107_107 (sequence is synthesized)
tcataccagccatattgttacttaagaccaggaaagatttgctaagtctgggatgttaatttcttaataccatgcccagactgtgaagtgttcatgactcccacctgtttttgaagcctc

SEQ ID NO: 689646 - DNA, 120 bp, Artificial Sequence
  ENSG00000188107_108 (sequence is synthesized)
aaatttatgtctaagtcaccaatccctacttgctaccagaaatatcataacagaatgaaatatattcattcatacatttattatttattgaatctcctctaactggaagatatttttcaa

SEQ ID NO: 689647 - DNA, 120 bp, Artificial Sequence
  ENSG00000188107_109 (sequence is synthesized)
aatgttatgacaatgagacatgatacctgtccccaggtaatgtactatacataggtaagattatacactcttcagaacacatctcatggttcttctgtttcatttagaaagtgaacacat

SEQ ID NO: 689648 - DNA, 120 bp, Artificial Sequence
  ENSG00000188107_110 (sequence is synthesized)
ttttaaagtactaaagtaattatttttttcactttctgaacatacaagttgcttgattatagcagtgtgtcttctggctttctttctggaagttttaaatttaacctgtttcctttacag

SEQ ID NO: 689649 - DNA, 120 bp, Artificial Sequence
  ENSG00000188107_111 (sequence is synthesized)
gctattttaggagattcacattttctgtgtaatgttaaatatatccaaaacataattttcagttataagtaagagttctgtttcaaagtgtagaatctaaaagtccataagaaaatcagg

SEQ ID NO: 689650 - DNA, 120 bp, Artificial Sequence
  ENSG00000188107_112 (sequence is synthesized)
tgaagtttcaaaaactatttctgtagagtcaggaggcttgtaaaaatagagctttatgtgaatatggcacaaaagtatagtataatttgaccaggattttcttaaattatttctgatccc

SEQ ID NO: 689651 - DNA, 120 bp, Artificial Sequence
  ENSG00000188107_113 (sequence is synthesized)
aaaagtctaataattatttattctaagactattgtaatttctgccgtgatgtccgtgattttattaacaagttgaatagttggttttaggtttatttatttattttggctatactatgca

SEQ ID NO: 689652 - DNA, 120 bp, Artificial Sequence
  ENSG00000188107_114 (sequence is synthesized)
aacttttctgccttcaagtaaaagttttatgtgggtatatttttacctttaaagcaaaaaagatatcgaactgcatatgaaagtgtcatattgaatgtatttttgggttggggccagtct

SEQ ID NO: 689653 - DNA, 120 bp, Artificial Sequence
  ENSG00000188107_115 (sequence is synthesized)
tgaaaccactagatcaagtgtctaaatctttttgtctaaggcacttacatacactgatatattttctctctttattatgctctagaaaaccaaataatcttggttcttaaatccttatag

SEQ ID NO: 689654 - DNA, 120 bp, Artificial Sequence
  ENSG00000188107_116 (sequence is synthesized)
taaaatgatatagaaatcattcatttaagcaattctagagtacatatcattgtattacccatacacataccaaaattattataacaaacttcattaaatgaagcatttttgaataataaa

SEQ ID NO: 689655 - DNA, 120 bp, Artificial Sequence
  ENSG00000188107_117 (sequence is synthesized)
atacacctgtttctgtcctctaggaaccactggaatctactgtgaacaaggtcatcaatttattggaaaagatgttttcaaataatttatccaacatttttggtggttttcatgatggag

SEQ ID NO: 689656 - DNA, 120 bp, Artificial Sequence
  ENSG00000188107_118 (sequence is synthesized)
ttcatgatggagatgaggtaaatcatgttatctaatctactatactgctggaaacaaaagtcaactattggatttattttaaaagaagcccatctggccgggcgcagtggctcatgcctg

SEQ ID NO: 689657 - DNA, 62 bp, Artificial Sequence
  ENSG00000188107_119 (sequence is synthesized)
atgggtgacagagcagaactctgtctcagaaaaaaaaaaaaaagaaagaaagaagcccttct

SEQ ID NO: 689658 - DNA, 120 bp, Artificial Sequence
  ENSG00000188107_120 (sequence is synthesized)
gtctcagaaaaaaaaaaaaaagaaagaaagaagcccttctgaccagtattgcataaagcattaaaaactatagaagaaagttaaaagtgctatgagaggacattgcaagtgggaacacca

SEQ ID NO: 689659 - DNA, 120 bp, Artificial Sequence
  ENSG00000188107_121 (sequence is synthesized)
tcacttggtcccaagttttgaggagcagatactgctagaccctgatcagtgattttaagggtagggaagggacactgataaagaaaaaggtccttccatagtagtacatttaatgtgcca

SEQ ID NO: 689660 - DNA, 120 bp, Artificial Sequence
  ENSG00000188107_122 (sequence is synthesized)
gcctgtaacttatccctccatcctcattaaagcagcaagaaagaagataaaacagtgtcctttttcctttttaaaatgcatttggtgtaaaaaataatgaggtatgcccaatatcatggt

SEQ ID NO: 689661 - DNA, 120 bp, Artificial Sequence
  ENSG00000188107_123 (sequence is synthesized)
aactcaaagacagcttaactgatgaattaaaaattaaagtatgcttgaacacaagcaagatatggagtatgcatgagaaaaaaatacattataataaaaagaaaagagaagccactaaaa

SEQ ID NO: 689662 - DNA, 120 bp, Artificial Sequence
  ENSG00000188107_124 (sequence is synthesized)
caggtaaaaaatgcatatgtatacaaccatatacacaagtaactttaattttatctatgtatttcaaattaaatgtgaaatatttcctttattattgaaaaatacaatttcagaaggtat

SEQ ID NO: 689663 - DNA, 120 bp, Artificial Sequence
  ENSG00000188107_125 (sequence is synthesized)
caatttggttaatacaattaaatcatattactgctaaatgttttatagcataagaagagtctgaacaacagttcacatgcttttcaccataaaattacttacatctttcttcagacttgc

SEQ ID NO: 689664 - DNA, 120 bp, Artificial Sequence
  ENSG00000188107_126 (sequence is synthesized)
atttatgaccaatgaatttgaaattgttcatgtgtttatttgacacttcttaaccattacattttaaattatggacattttcactgaacacatgttgaggtttctgttaatttctttaaa

SEQ ID NO: 689665 - DNA, 120 bp, Artificial Sequence
  ENSG00000188107_127 (sequence is synthesized)
aaaagtctgctaaaggaagatattattacatctttttttgatataaaatatgcagatgaaatatatatttttaaattacactttaagttctgggttacatgtgaaggatgggcaattttg

SEQ ID NO: 689666 - DNA, 120 bp, Artificial Sequence
  ENSG00000188107_128 (sequence is synthesized)
ttacataggtatgccatgtgccatggtggtttgctcacccatcaacccgtcacctatattaggtatttctcctaatgctatgcctcctctagccgccaacccccaacaggccccaatgtg

SEQ ID NO: 689667 - DNA, 74 bp, Artificial Sequence
  ENSG00000188107_129 (sequence is synthesized)
ggccccacccccatttatgactgagaacttccagcgtttggtttactgatcttgcgatagtttgctgagaatga

SEQ ID NO: 689668 - DNA, 85 bp, Artificial Sequence
  ENSG00000188107_130 (sequence is synthesized)
agttccaagtctttgctattgtgaattgcgtagaatgattataatcctttgggtatatgcccagcaatgggattgctgggtcaaa

SEQ ID NO: 689669 - DNA, 120 bp, Artificial Sequence
  ENSG00000188107_131 (sequence is synthesized)
tcaagttcaaaaggcaagagacagactgcagtcaacccatccataccaccaaggggtagcccacagaggccagagcaagccaagaggattaaggacaacattgtgcttggaaacattaag

SEQ ID NO: 689670 - DNA, 120 bp, Artificial Sequence
  ENSG00000188107_132 (sequence is synthesized)
aggattaaggacaacattgtgcttggaaacattaagattgcacactcctggaagtatgtcaactgccacagtctttatctcgctgtgtcatcaaggctggagtacagtggtgccatctca

SEQ ID NO: 689671 - DNA, 120 bp, Artificial Sequence
  ENSG00000188107_133 (sequence is synthesized)
cctcccaccttagcctctcatgtagctgagccactaaacccagctaacatatccttacaaagctgatttatattgtagtagagttataaaataaagacatgctttaaattgtaataacaa

SEQ ID NO: 689672 - DNA, 120 bp, Artificial Sequence
  ENSG00000188107_134 (sequence is synthesized)
catcatcatctgcagcattaattacaactggtggatgcttggggctaggaacattttcggaactttctactttcataacgctccgcagctgaggggaaggattggactggacagacaatt

SEQ ID NO: 689673 - DNA, 120 bp, Artificial Sequence
  ENSG00000188107_135 (sequence is synthesized)
cccaggatttaaaggcaagttttttttttcctgataaattaaattttctagtaaataatgttgttaatatatttatttgatatatctcaaatatatctcaaatgtgtctattgattggta

SEQ ID NO: 689674 - DNA, 120 bp, Artificial Sequence
  ENSG00000188107_136 (sequence is synthesized)
ttgctcggagcctgttccattcttgagcaatacacagagcccagggatgtggtgcaatactacagaggagaaattaagtaaaaatctactcccaaaacaaagatgcagctgttctcttag

SEQ ID NO: 689675 - DNA, 120 bp, Artificial Sequence
  ENSG00000188112_0 (sequence is synthesized)
atttcccggcaagcggcggcgcccgcagcacctgttgcccggtgcgcgggcggggaggacggcgggggacatggcctggtagagtcccctggggagaccgtgctgagttcagtccggggc

SEQ ID NO: 689676 - DNA, 120 bp, Artificial Sequence
  ENSG00000188112_1 (sequence is synthesized)
agggcagggcgagggagggaaggtccttccctggcgcccgcgcgggctgcggcagcatgaaaaagaagcagacggtgcagggcaccttcagcaaactcttcgggaagaagcacaccacga

SEQ ID NO: 689677 - DNA, 120 bp, Artificial Sequence
  ENSG00000188112_2 (sequence is synthesized)
cccccagcacctccctctacgccaccaatccgccctggatcttcacccaggaggccccggaggaggggaccgggggcttcgatggcatctattatggagacaatcggtttaacacagtga

SEQ ID NO: 689678 - DNA, 120 bp, Artificial Sequence
  ENSG00000188112_3 (sequence is synthesized)
gcgagtcaggaacagccacgctgaaagctcggccaagagtccggcccctgctgaccttccttccgctgaatgcccaggaaaaccatgggctggctgtgcccaccccctcggttccagatg

SEQ ID NO: 689679 - DNA, 120 bp, Artificial Sequence
  ENSG00000188112_4 (sequence is synthesized)
attttgcagacaaagaagtgacaggtaccagctcactagtcaatggcaacctccgactgtacagctctgtgggtgacctgaggcctggacaatatggccaggatctactcatccccccac

SEQ ID NO: 689680 - DNA, 120 bp, Artificial Sequence
  ENSG00000188112_5 (sequence is synthesized)
ctcccccaggcccagccccagggccccctcaggacatttcagaacctccaggggggtcgccactgccatctccaccttccacagcacccccaccacctcccctgctgctggaacccccac

SEQ ID NO: 689681 - DNA, 120 bp, Artificial Sequence
  ENSG00000188112_6 (sequence is synthesized)
ccccgcccagcatggccccacctccacccccagtattggaggccctatccccaccacacactctttcctccccatccatacccacccctcctgacttcattccccctgccccacccttgg

SEQ ID NO: 689682 - DNA, 120 bp, Artificial Sequence
  ENSG00000188112_7 (sequence is synthesized)
cctttctagcccccccaccgcctcctgtgccagccccagcacccccagctccagcatctcctcacacagtggggactcgtctctttccccctgggggtgtcaccaagtggaaatcagatg

SEQ ID NO: 689683 - DNA, 120 bp, Artificial Sequence
  ENSG00000188112_8 (sequence is synthesized)
tagcactgaatggcaggcaggcagaggccaccagagccagccccccgagaagccctgctgagccaaaggggagcgccctgggacctaacccagagccccatctcaccttcccccgttctt

SEQ ID NO: 689684 - DNA, 120 bp, Artificial Sequence
  ENSG00000188112_9 (sequence is synthesized)
tcaaagtgcctcccccaaccccagtcaggacttcgtccatcccagttcaggaagcacaagaggctccccgaaaggaagagggggccaccaagaaggctcccagccgactcccactgcctc

SEQ ID NO: 689685 - DNA, 120 bp, Artificial Sequence
  ENSG00000188112_10 (sequence is synthesized)
ccagcttccacatccgccccgcctcccaggtctacccagacagggcccccgagccagactgccctggggagctcaaggccacagcaccagccagcccaaggcttggccagtcccagtccc

SEQ ID NO: 689686 - DNA, 120 bp, Artificial Sequence
  ENSG00000188112_11 (sequence is synthesized)
aagcagatgaacgagctgggactccgcctccagcccctcccctgccccctcctgcaccccccctccctcccccagcacccccacttcccccagctgcacctcctttgccctgtgctcaga

SEQ ID NO: 689687 - DNA, 120 bp, Artificial Sequence
  ENSG00000188112_12 (sequence is synthesized)
aggcagcccatccacctgctgggtttacaaaaacccctaaatccagctctcctgctctcaaacccaaacccaacccccccagcccagagaacacagcgtcttcagcacctgtggactgga

SEQ ID NO: 689688 - DNA, 120 bp, Artificial Sequence
  ENSG00000188112_13 (sequence is synthesized)
gggaccccagccagatggaaaagctgcggaacgagctggcagcctatctctgtggctccaggagagaggaccgattcctcagtcacaggccaggcccaacagtggcccctcagagcaagg

SEQ ID NO: 689689 - DNA, 120 bp, Artificial Sequence
  ENSG00000188112_14 (sequence is synthesized)
agggcaagaagggcccccgcctgcctgagaaggagactctcctgagcctgccagcaaaggacactcccccaggtgttcctgaaaagagtcttggcggcagcagcctgacagagacagagg

SEQ ID NO: 689690 - DNA, 120 bp, Artificial Sequence
  ENSG00000188112_15 (sequence is synthesized)
ctgcccccagcctgaccctgccctctgtggactacattccccaagactctccaactcccagtgtgcggcagatccggaatgagctggaggcccggctctcctcagcagcagagaaggagg

SEQ ID NO: 689691 - DNA, 120 bp, Artificial Sequence
  ENSG00000188112_16 (sequence is synthesized)
ctaagcccagcataggatctctgccccctaagcctcggctagaagggggaagaatttgtgaaaacggggctgatgatgacaaactctccaagcctgtggccaagaatctgccacctcaat

SEQ ID NO: 689692 - DNA, 120 bp, Artificial Sequence
  ENSG00000188112_17 (sequence is synthesized)
ccaccaccctgctgccaactacatcactccagcccaaggctatgttgggaccagccataccacccaaggccacacctgagccagccataccacccaaggctacactttggccagccacac

SEQ ID NO: 689693 - DNA, 120 bp, Artificial Sequence
  ENSG00000188112_18 (sequence is synthesized)
cacccaaggccacacttgggccagccacaccactcaaggccacatctgggccaaccacaccactcaaggccacatctggccctgccatagcatctacagccacaactctgcccaccacca

SEQ ID NO: 689694 - DNA, 120 bp, Artificial Sequence
  ENSG00000188112_19 (sequence is synthesized)
catcccaactgatggcagagaaggactcaggcccagctggccagccagagaagccagcatctcaagaagtttccactccctcccaggcaaggggagaggggtccccctcagaggccacta

SEQ ID NO: 689695 - DNA, 120 bp, Artificial Sequence
  ENSG00000188112_20 (sequence is synthesized)
ggctgcccacacagggagcccgctcatctgcagccttcccaccaaagacatctcctggtggaggagaggtgccatgtctctacaagccccactgccaccagagcagcctcagccgtgagg

SEQ ID NO: 689696 - DNA, 120 bp, Artificial Sequence
  ENSG00000188112_21 (sequence is synthesized)
ttgctgtggtgatgcccaccctggccagaggaggggctgcagggccaggggagcccgtggaggtgaaggagcccccagggctgccagccaagcctcctgcctcggcccagcccactgatg

SEQ ID NO: 689697 - DNA, 120 bp, Artificial Sequence
  ENSG00000188112_22 (sequence is synthesized)
aactcctcaggcacccggtgactggggaggtggtggagcggggctcgccgatggccctgctcctggcggccaggcagagggctcagaagggaaggtctgtaggggctgccctgggtcggt

SEQ ID NO: 689698 - DNA, 120 bp, Artificial Sequence
  ENSG00000188112_23 (sequence is synthesized)
cctctctgccaggaagtctccgtgaccacagccaccaagccgaggccagctctgacagcatcttccacagccagggcacgcccaactccttcactgtggtgcccaagttacccaaggagg

SEQ ID NO: 689699 - DNA, 120 bp, Artificial Sequence
  ENSG00000188112_24 (sequence is synthesized)
ctgagaaggactccccgctgacgaccgaaatacccaataagtgggggccgcggctgggaagagacgcagagggcacagagctgagccgcaggcacaactggacaaagccagagccccagg

SEQ ID NO: 689700 - DNA, 120 bp, Artificial Sequence
  ENSG00000188112_25 (sequence is synthesized)
cccctgtggcctgggaaagagtagctccctccaacctcccccagggccacccgctgcccaagtccttctcctccccaccttctccttcgaacaagagggaggaggaggaggaggagttca

SEQ ID NO: 689701 - DNA, 120 bp, Artificial Sequence
  ENSG00000188112_26 (sequence is synthesized)
agagttcagcaatgaccctgagcccccggccccggccctccagtatctgggccgccagagctcccctccccggaacaactactcagacttgaggcagctcccgaacgctggccccggggc

SEQ ID NO: 689702 - DNA, 120 bp, Artificial Sequence
  ENSG00000188112_27 (sequence is synthesized)
gcccccggctctcggcttctcgcgctttcccgcgggcgcgcgctacgccggggctgggggcctggagcgcttctcgggagggggccgctcgctcataaagaagcgcctgtacgtcgggga

SEQ ID NO: 689703 - DNA, 120 bp, Artificial Sequence
  ENSG00000188112_28 (sequence is synthesized)
gccgcaccgaggcccagggctaccccacggtggcaccggccgcagcctgagctctcccaactgcttcgggccgcagcccggaggccccgagatgcggcgcgtgaactcggcgggtcgcgc

SEQ ID NO: 689704 - DNA, 120 bp, Artificial Sequence
  ENSG00000188112_29 (sequence is synthesized)
cctgcacgcgccgaggctgtccctggagggcgccgcccggggcgccgcggaggccaagcacaaagcgcccggcagcgccgactacggcttcgccccagctgccggcaggtctccctacac

SEQ ID NO: 689705 - DNA, 120 bp, Artificial Sequence
  ENSG00000188112_30 (sequence is synthesized)
gtctccctacaccaccacccgctatggaagccccatcaacacgttcaccgtgaggcctgggacccgccatcccatctcctatgtctgctcaggggcccatcggaaagccacctcctgagc

SEQ ID NO: 689706 - DNA, 120 bp, Artificial Sequence
  ENSG00000188112_31 (sequence is synthesized)
caggggttctcttagctctactccaacaaactgtgtctttaaggatctgggcacttgtttcttgtggggggtgggaggtacacagcaggtgttgggcgacctgactcagacacagaggag

SEQ ID NO: 689707 - DNA, 120 bp, Artificial Sequence
  ENSG00000188112_32 (sequence is synthesized)
tctttgatccccaaagaccaacgatgagaagcagtggcccaggaagaccgagagtgggcttctgtttcccaaagcgctggtgtgactgtggactgtttacacgtggggggtgggagggga

SEQ ID NO: 689708 - DNA, 120 bp, Artificial Sequence
  ENSG00000188112_33 (sequence is synthesized)
aggagggtagagagaaggaaccattaaggacctgggcgctgagtttctgctctctggtactatctgctttagcaagagttatttaaaacagttttacaagcacggcctactgagcaggtt

SEQ ID NO: 689709 - DNA, 120 bp, Artificial Sequence
  ENSG00000188112_34 (sequence is synthesized)
ctgaaagcaaggggtggggcactgactgaactggaacccatcgagatagctgtgattgcctgtcaggcccttgcaaagggctgaggcccagctctgtctggtgggtgtgcagggcaccga

SEQ ID NO: 689710 - DNA, 120 bp, Artificial Sequence
  ENSG00000188112_35 (sequence is synthesized)
agggagatctttagcctccatcacctgccatcccaagcaagagtggacacctggggttcctagccgcattgaggtgggaccaggaatgtgtatgtataacatgtggagaaggaccatgtg

SEQ ID NO: 689711 - DNA, 120 bp, Artificial Sequence
  ENSG00000188112_36 (sequence is synthesized)
tggggtggggagtgaagctcccacatgtggaatggaagccctttgcattggccaagggcagaggtgggagattgatggttcatttttccttggccctagcccttagctacagggaggcct

SEQ ID NO: 689712 - DNA, 120 bp, Artificial Sequence
  ENSG00000188112_37 (sequence is synthesized)
agagagaggacacttggcaagtttaggatgggaaacaaggttaagcctggctttgctattcagacctgtgcagccctgattttggggactgggcccaaggagccatgagtcttaggcttg

SEQ ID NO: 689713 - DNA, 120 bp, Artificial Sequence
  ENSG00000188112_38 (sequence is synthesized)
acactaggggccttacatggccaggtctcatatgggatttggagaaggcatttttcctaacactgatactacaagtcaccaatactcttgatgccttaagatgctagaaagccttggaga

SEQ ID NO: 689714 - DNA, 120 bp, Artificial Sequence
  ENSG00000188112_39 (sequence is synthesized)
gagagtggaggcagcagagatgggaatggaggtctgaagaagcttgctgctgttggggaatgtgtttgggaaagtcaagagtggtaggattggttggctgggcgcggtggctcacacctg

SEQ ID NO: 689715 - DNA, 87 bp, Artificial Sequence
  ENSG00000188112_40 (sequence is synthesized)
gtcagaagttcgagaccagcctgcccgaaaaaaaaaaaaaaagagtgctaggattgggccagttaagagcaggggagacctggctgg

SEQ ID NO: 689716 - DNA, 72 bp, Artificial Sequence
  ENSG00000188112_41 (sequence is synthesized)
catctctactaaaaatacggaaaaaaaaaaaaaaagagtgctaggattgggccagttaagagcaggggagac

SEQ ID NO: 689717 - DNA, 64 bp, Artificial Sequence
  ENSG00000188112_42 (sequence is synthesized)
ctccagccgggagacctatcagtagggtgaccacgtgtcctttgcctgggcagtccaggtttat

SEQ ID NO: 689718 - DNA, 120 bp, Artificial Sequence
  ENSG00000188112_43 (sequence is synthesized)
gggtgaccacgtgtcctttgcctgggcagtccaggtttatgcttgttttccagtgaattagacccccttccacttttcaaaaaagtcctggtttagatgctgtgatcaccaaacatatca

SEQ ID NO: 689719 - DNA, 120 bp, Artificial Sequence
  ENSG00000188112_44 (sequence is synthesized)
ggaaacaatattccttggtcttgcttccctatcttcaggtactggtgggccaaattcctgggaccaggtcaaggtgggctgcctcagtaagaaggaaggactggagagtgcccatttcag

SEQ ID NO: 689720 - DNA, 120 bp, Artificial Sequence
  ENSG00000188112_45 (sequence is synthesized)
aggagcaggctggtgggggccagccagaaagtagttccctttggggggaagatgttggacctttattatttgtggtaaccagccgaggctggttgtcaggacagcaggtgagccacttta

SEQ ID NO: 689721 - DNA, 120 bp, Artificial Sequence
  ENSG00000188112_46 (sequence is synthesized)
gggaagaaagtgcaggggtgggtggatgcccagattaccaaggccagccaccctgatggggtagggtctggttatctgtgttcaagaagcaaatcccaccccagccccagcactagctct

SEQ ID NO: 689722 - DNA, 120 bp, Artificial Sequence
  ENSG00000188112_47 (sequence is synthesized)
ctatgtatgtattttccctgtacaatgttttataaaagagatcattaatttatctgctatgttaaggctcgaggggtggggcgtagactctcagctgtatattgctctggggtgggcagg

SEQ ID NO: 689723 - DNA, 120 bp, Artificial Sequence
  ENSG00000188112_48 (sequence is synthesized)
gaaggctgagtctcacttgacttggaagataaacaggccagtttggactggcctccagctccgtggctgtgtttgtctaacaaggatttgggtaactactggatacaagccactgtgctt

SEQ ID NO: 689724 - DNA, 120 bp, Artificial Sequence
  ENSG00000188112_49 (sequence is synthesized)
agtatggatagactgccatcagctcacccacatgactcctgttcatggcaagctaatagtctgtctggtggaagaggattgaaaaagcacacaaaaacatcataaattacaaggagtagt

SEQ ID NO: 689725 - DNA, 120 bp, Artificial Sequence
  ENSG00000188112_50 (sequence is synthesized)
aagaaggaaaaaacagggaacgtgagagaataactagcgagtggggagaggagtggatttactttaacagggtagtcagggaaggcctcttgtggtggtgacatactgatttaggcaaag

SEQ ID NO: 689726 - DNA, 120 bp, Artificial Sequence
  ENSG00000188112_51 (sequence is synthesized)
cgtccagcacgtgcctagcgcttagtagttgctcagcaaatggcatctttgggtgatgaatacctcacatttgtatatggcctgtcacagttttccataaagcttttttttttaaggcca

SEQ ID NO: 689727 - DNA, 89 bp, Artificial Sequence
  ENSG00000188112_52 (sequence is synthesized)
ccacgctgaaagctcggccaagagtccggcccctgctgaccttccttccgctgactgtacaatggcgtgatctcggctccctgcaacct

SEQ ID NO: 689728 - DNA, 120 bp, Artificial Sequence
  ENSG00000188112_53 (sequence is synthesized)
caggcgtgagctaccgcgcccagcctgaaatactctatattgggaggttaattagattctctcctatcacttaccctcagcacacatacccagattcatagcagtgtgggcccagagttg

SEQ ID NO: 689729 - DNA, 120 bp, Artificial Sequence
  ENSG00000188112_54 (sequence is synthesized)
cccagattcatagcagtgtgggcccagagttgacacacctctaccagtcggtaaaatactaaaacattcatctgtaaaatgggaataaaaaaaaaaaaacaaataaaatactgaaataca

SEQ ID NO: 689730 - DNA, 120 bp, Artificial Sequence; identical to SEQ ID NO: 683722
  ENSG00000188120_0 (sequence is synthesized)

SEQ ID NO: 689731 - DNA, 120 bp, Artificial Sequence; identical to SEQ ID NO: 683723
  ENSG00000188120_1 (sequence is synthesized)

SEQ ID NO: 689732 - DNA, 120 bp, Artificial Sequence; identical to SEQ ID NO: 683724
  ENSG00000188120_2 (sequence is synthesized)

SEQ ID NO: 689733 - DNA, 120 bp, Artificial Sequence; identical to SEQ ID NO: 683725
  ENSG00000188120_3 (sequence is synthesized)

SEQ ID NO: 689734 - DNA, 120 bp, Artificial Sequence; identical to SEQ ID NO: 683726
  ENSG00000188120_4 (sequence is synthesized)

SEQ ID NO: 689735 - DNA, 120 bp, Artificial Sequence; identical to SEQ ID NO: 683727
  ENSG00000188120_5 (sequence is synthesized)

SEQ ID NO: 689736 - DNA, 120 bp, Artificial Sequence
  ENSG00000188120_6 (sequence is synthesized)
tggcggaatccaaacactgaaacctacctgcagccccaaatcacgccgaatcctgtaactcagcacgttcagtctgctgcaaatcctgagactccaaactcaaccatctccagagaggcc

SEQ ID NO: 689737 - DNA, 120 bp, Artificial Sequence
  ENSG00000188120_7 (sequence is synthesized)
agcacccagtcttcatcagctgcagctagccaaggctgggtgttaccagaaggcaaaatcgtgccaaacactgtttttgttggtggaattgatgctaggatggatgaaactgagattgga

SEQ ID NO: 689738 - DNA, 120 bp, Artificial Sequence
  ENSG00000188120_8 (sequence is synthesized)
agctgctttggtagatacggttcagtgaaagaagtgaagataatcacgaatcgaactggtgtgtccaaaggctatggatttgtttcgtttgttaatgacgtggatgtccagaagatagta

SEQ ID NO: 689739 - DNA, 90 bp, Artificial Sequence
  ENSG00000188120_9 (sequence is synthesized)
ctcgtcatgtgcagccacgtcctttggtagttaatcctcctcctccaccacagtttcagaacgtctggcggaatccaaacactgaaacct

SEQ ID NO: 689740 - DNA, 120 bp, Artificial Sequence
  ENSG00000188120_10 (sequence is synthesized)
cagtttcagaacgtctggcggaatccaaacactgaaacctacctgcagccccaaatcacgccgaatcctgtaactcagcacgttcagtctgctgcaaatcctgagactccaaactcaacc

SEQ ID NO: 689741 - DNA, 120 bp, Artificial Sequence
  ENSG00000188120_11 (sequence is synthesized)
atctccagagaggccagcacccagtcttcatcagctgcagctagccaaggctgggtgttaccagaaggcaaaatcgtgccaaacactgtttttgttggtggaattgatgctaggatggat

SEQ ID NO: 689742 - DNA, 120 bp, Artificial Sequence
  ENSG00000188120_12 (sequence is synthesized)
gaaactgagattggaagctgctttggtagatacggttcagtgaaagaagtgaagataatcacgaatcgaactggtgtgtccaaaggctatggatttgtttcgtttgttaatgacgtggat

SEQ ID NO: 689743 - DNA, 85 bp, Artificial Sequence
  ENSG00000188120_13 (sequence is synthesized)
caaaggctatggatttgtttcgtttgttaatgacgtggatgtccagaagatagtaggatcacagatacatttccatggtaaaaag

SEQ ID NO: 689744 - DNA, 120 bp, Artificial Sequence
  ENSG00000188120_14 (sequence is synthesized)
cctcctcctccaccacagtttcagaacgtctggcggaatccaaacactgaaacctacctgcagccccaaatcacgccgaatcctgtaactcagcacgttcaggcttactctgcttatcca

SEQ ID NO: 689745 - DNA, 120 bp, Artificial Sequence
  ENSG00000188120_15 (sequence is synthesized)
ttactctgcttatccacattcaccaggtcaggtcatcactggatgtcagttgcttgtatataattatcaggaatatcctacttatcccgattcagcatttcaggtcaccactggatatca

SEQ ID NO: 689746 - DNA, 61 bp, Artificial Sequence
  ENSG00000188120_16 (sequence is synthesized)
atcagttgcctgtatataattatcagccatttcctgcttatccaagatcaccatttcaggt

SEQ ID NO: 689747 - DNA, 120 bp, Artificial Sequence
  ENSG00000188120_17 (sequence is synthesized)
agcagttcaggtcaccactggatatcagttccatgtatacaattaccagatgccaccgcagtgccctgttggggagcaaaggagaaatctgtggaccgaagcatacaaatggtggtatct

SEQ ID NO: 689748 - DNA, 120 bp, Artificial Sequence
  ENSG00000188120_18 (sequence is synthesized)
tgtctgtttaatccagagaagagactgataaattccgttgttactcaagatgactgcttcaagggtaaaagagtgcatcgctttagaagaagtttggcagtatttaaatctgttggatcc

SEQ ID NO: 689749 - DNA, 120 bp, Artificial Sequence; identical to SEQ ID NO: 683732
  ENSG00000188120_19 (sequence is synthesized)

SEQ ID NO: 689750 - DNA, 120 bp, Artificial Sequence; identical to SEQ ID NO: 683733
  ENSG00000188120_20 (sequence is synthesized)

SEQ ID NO: 689751 - DNA, 120 bp, Artificial Sequence; identical to SEQ ID NO: 683734
  ENSG00000188120_21 (sequence is synthesized)

SEQ ID NO: 689752 - DNA, 120 bp, Artificial Sequence; identical to SEQ ID NO: 683735
  ENSG00000188120_22 (sequence is synthesized)

SEQ ID NO: 689753 - DNA, 120 bp, Artificial Sequence; identical to SEQ ID NO: 683736
  ENSG00000188120_23 (sequence is synthesized)

SEQ ID NO: 689754 - DNA, 120 bp, Artificial Sequence; identical to SEQ ID NO: 683737
  ENSG00000188120_24 (sequence is synthesized)

SEQ ID NO: 689755 - DNA, 120 bp, Artificial Sequence; identical to SEQ ID NO: 683738
  ENSG00000188120_25 (sequence is synthesized)

SEQ ID NO: 689756 - DNA, 120 bp, Artificial Sequence; identical to SEQ ID NO: 683739
  ENSG00000188120_26 (sequence is synthesized)

SEQ ID NO: 689757 - DNA, 120 bp, Artificial Sequence; identical to SEQ ID NO: 683740
  ENSG00000188120_27 (sequence is synthesized)

SEQ ID NO: 689758 - DNA, 120 bp, Artificial Sequence; identical to SEQ ID NO: 683741
  ENSG00000188120_28 (sequence is synthesized)

SEQ ID NO: 689759 - DNA, 120 bp, Artificial Sequence; identical to SEQ ID NO: 683742
  ENSG00000188120_29 (sequence is synthesized)

SEQ ID NO: 689760 - DNA, 120 bp, Artificial Sequence; identical to SEQ ID NO: 683743
  ENSG00000188120_30 (sequence is synthesized)

SEQ ID NO: 689761 - DNA, 120 bp, Artificial Sequence; identical to SEQ ID NO: 683744
  ENSG00000188120_31 (sequence is synthesized)

SEQ ID NO: 689762 - DNA, 120 bp, Artificial Sequence; identical to SEQ ID NO: 683745
  ENSG00000188120_32 (sequence is synthesized)

SEQ ID NO: 689763 - DNA, 120 bp, Artificial Sequence; identical to SEQ ID NO: 683746
  ENSG00000188120_33 (sequence is synthesized)

SEQ ID NO: 689764 - DNA, 120 bp, Artificial Sequence
  ENSG00000188120_34 (sequence is synthesized)
agaaaaatgatattttaacgtttttaatatttttgttacattgggaatgatatttctttctaattttaaaaaatggtttaccatattcttttttttctgccacctttcttttcaggcatt

SEQ ID NO: 689765 - DNA, 120 bp, Artificial Sequence
  ENSG00000188120_35 (sequence is synthesized)
gcttatccaaattcagcagttcaggtcaccactggatatcagttccatgtatacaattaccagatgccaccgcagtgccctgttggggagcaaaggagacatatcctacttatccaaatt

SEQ ID NO: 689766 - DNA, 120 bp, Artificial Sequence
  ENSG00000188120_36 (sequence is synthesized)
catcactgggtatcagttgcctgtgtataattatcaggcttattctccttatccaaactcaccaggtcaggtcatcactgggtatcagttgcctgtgtataattatcaggcttactctgc

SEQ ID NO: 689767 - DNA, 120 bp, Artificial Sequence
  ENSG00000188120_37 (sequence is synthesized)
cttatccaaattcagcagttcaggtcaccactggatatcagttccatgtatacaattaccagacatatcctacttatccaaattcaccaggtcaggtcaccactgggtgtcagttgcctg

SEQ ID NO: 689768 - DNA, 120 bp, Artificial Sequence
  ENSG00000188124_0 (sequence is synthesized)
tgcacagtgacctagaacaatccaaagctagagtgaacacctttagaaaagcttccactgataatatatttggttctaggcaactaaaaaaacacatcatggagctccggaactccacct

SEQ ID NO: 689769 - DNA, 120 bp, Artificial Sequence
  ENSG00000188124_1 (sequence is synthesized)
tgggaagcggcttcatcttggtggggattctgaatgacagtgggtctcctgaactgctctatgctacatttacaatcctatacatgttggcactgaccagcaatggtctgctgctcctgg

SEQ ID NO: 689770 - DNA, 120 bp, Artificial Sequence
  ENSG00000188124_2 (sequence is synthesized)
ccatcaccatagaagcccggctccacatgcccatgtacctcctgcttgggcagctctctctcatggacctcctgttcacatctgttgtcactcccaaggcccttgcggactttctgcgca

SEQ ID NO: 689771 - DNA, 120 bp, Artificial Sequence
  ENSG00000188124_3 (sequence is synthesized)
gagaaaacactatctcctttggaggctgtgcacttcagatgttcctggcactgacaatgggtagcgctgaggacctcctactggccttcatggcctatgacaggtatgtggccatttgtc

SEQ ID NO: 689772 - DNA, 120 bp, Artificial Sequence
  ENSG00000188124_4 (sequence is synthesized)
gcacctccctttctgtgtgtcctgggaaatcaggcatctgctctgtgagatcccacccttgctgaagttggcctgtgctgatacctccaggtatgagcttataatatacgtgacaggtgt

SEQ ID NO: 689773 - DNA, 120 bp, Artificial Sequence
  ENSG00000188124_5 (sequence is synthesized)
gactttcctcttgctccccatttctgccattgtggcctcctacacactagtcctattcactgtgcttcgtatgccatcaaatgaggggaggaagaaagcccttgtcacctgctcttccca

SEQ ID NO: 689774 - DNA, 120 bp, Artificial Sequence
  ENSG00000188124_6 (sequence is synthesized)
cctgattgtggtcgggatgttctatggagctgccacattcatgtatgtcttgcccagttccttccacagccccaaacaagacaacatcatctctgttttctacacaattgtcactccagc

SEQ ID NO: 689775 - DNA, 120 bp, Artificial Sequence
  ENSG00000188124_7 (sequence is synthesized)
cctgaatccactcatctacagcctgaggaataaggaggtcatgcgggccttgaggagggtcctgggaaaatacatactgctggcacattccacgctctagggaaggatcatggcttgcct

SEQ ID NO: 689776 - DNA, 120 bp, Artificial Sequence
  ENSG00000188124_8 (sequence is synthesized)
atgaaacacagcatgaggggaatatatgaaatctgaggacctggacttaagaactcagctagaaccattccaaagcagtaaggactttctcgcaaggacagtgaatgagagaactttgga

SEQ ID NO: 689777 - DNA, 120 bp, Artificial Sequence
  ENSG00000188124_9 (sequence is synthesized)
agagattcagctcctcacttctgcaggatcctgccctaggttctcagctgcctgtctgcatctatctctacttccagagaggacttgcagtgccagtgactggaggagcctttgatctct

SEQ ID NO: 689778 - DNA, 120 bp, Artificial Sequence
  ENSG00000188124_10 (sequence is synthesized)
gatcctagagacagccatacacacacctacattcatcctggccagaagaagcaacttttctttctttggcttcttgaacctctttacctggaagctatgccccttcccatatgagcagag

SEQ ID NO: 689779 - DNA, 120 bp, Artificial Sequence
  ENSG00000188124_11 (sequence is synthesized)
cagcacttgaagagtccaggtgatcaagcagcccaagaacccagagattctcctactgaggaaagtaatcaacaacaatgagactggtttaagggagaagacagcaaagaggttttttat

SEQ ID NO: 689780 - DNA, 120 bp, Artificial Sequence
  ENSG00000188124_12 (sequence is synthesized)
aaataaaattttaaaaactgaattggaattccaactacattttaagcagaaaaatagctagatcttaaaccaatccccagtatatttgttcattgtgaagaaagagatgctttcatctat

SEQ ID NO: 689781 - DNA, 120 bp, Artificial Sequence
  ENSG00000188124_13 (sequence is synthesized)
ctacaaagatgtttgcttgggcttattcttcaggataccttatttgaagggatttctaaatgattactattaacaacatgtcaaaatacctgataccagtttagctgatggtttatttca

SEQ ID NO: 689782 - DNA, 120 bp, Artificial Sequence
  ENSG00000188124_14 (sequence is synthesized)
attctctactcactcattcttcaatactgtactctgagatgatagatacattttttaaattttacttttattttcaactgtgaatctggtgtgtacaatgatcttgagttaaactcattt

SEQ ID NO: 689783 - DNA, 120 bp, Artificial Sequence
  ENSG00000188124_15 (sequence is synthesized)
aacccatgttataaaaataaccagatgggggaaaagccttgaatgggtgttgtagactcactctgtggtaggcatcgtcctgacacattaccaagtagacatggtaggggattagctttc

SEQ ID NO: 689784 - DNA, 120 bp, Artificial Sequence
  ENSG00000188124_16 (sequence is synthesized)
cattttaacatcacatagcagtgagaagcagcagtagttttggactgaccaaattccaatagcctctcagcatcagaggaggactactccctttgaagcagattcttaaactactaatag

SEQ ID NO: 689785 - DNA, 120 bp, Artificial Sequence
  ENSG00000188124_17 (sequence is synthesized)
agggaagaattttcagaagatatattagacttcctgtttattaagtagatgattatttgagcagttagtggaaatgaataagagttatgtgactgcatttgtactctagacctaagggac

SEQ ID NO: 689786 - DNA, 120 bp, Artificial Sequence
  ENSG00000188124_18 (sequence is synthesized)
ctgcatttgtactctagacctaagggaccttcacattggttacttgagtaatgataaataattacattgaaagagtgtggccaggcgcagtagctcacgcctgtaatccaagcactttgg

SEQ ID NO: 689787 - DNA, 76 bp, Artificial Sequence
  ENSG00000188124_19 (sequence is synthesized)
gtgtggaacccgggtctctactaaaaatacaaaaatgagcggggcatagttgtgggtgcctgtaatcccagctact

SEQ ID NO: 689788 - DNA, 67 bp, Artificial Sequence
  ENSG00000188124_20 (sequence is synthesized)
aggcgagagactccgtttcaataaataaataaataaatagaaagaaagaatggaaaaggataaagaa

SEQ ID NO: 689789 - DNA, 120 bp, Artificial Sequence
  ENSG00000188124_21 (sequence is synthesized)
gaatggaaaaggataaagaaagatatttctacttggaaattttgacagtctttttgaaaatgggcatttttacattgcctaaaattaaaactaaaataaagaatgaataaaatagaattg

SEQ ID NO: 689790 - DNA, 120 bp, Artificial Sequence
  ENSG00000188124_22 (sequence is synthesized)
aaagtaccagttttaaagtgagtacaataacaatgagagaaatttgttgggaatattgtctaagttttttaaaatgtggacttgcagatatgtgaatgtgtttttaaacattaaaacaat

SEQ ID NO: 689791 - DNA, 120 bp, Artificial Sequence
  ENSG00000188124_23 (sequence is synthesized)
tgaaagaggttatattcttgaggtgagtgtatgtacatgtgtgtttccatagaaaaggaagtataaaatttataatttgctttctagctagcctaaataagccttattttttttattcta

SEQ ID NO: 689792 - DNA, 120 bp, Artificial Sequence
  ENSG00000188124_24 (sequence is synthesized)
ctcatcagtgtgggaagatttatagcaaaatttgggaacttaaatttgttgaatgcagaattcccaaaatatcttggcttacataggtgttattattcttgagaatagtgctttgtcaaa

SEQ ID NO: 689793 - DNA, 120 bp, Artificial Sequence
  ENSG00000188124_25 (sequence is synthesized)
ctgagaaaattaaaaaaattagaataaatcaaaaatcacttataaatttttcttttttgttgcacatatatgcattttactgaatttaaatgtccatgatgatgaaggtcctgtgttttt

SEQ ID NO: 689794 - DNA, 120 bp, Artificial Sequence
  ENSG00000188124_26 (sequence is synthesized)
tccatttgaaatttggtgaatcttcttccttgctatgagggaatattttagagtagtgatgagaaagcagaccagagtgcccgcatttgaatccctctcttcctttggtcatctatgcat

SEQ ID NO: 689795 - DNA, 120 bp, Artificial Sequence
  ENSG00000188124_27 (sequence is synthesized)
ctttgaacgctaaattaaactctttgtaccttagtctgctgatgttaaaagtggtgatatttactggcctgctcttgtgatattgttgggtagattaaataagataattaatatcaggta

SEQ ID NO: 689796 - DNA, 120 bp, Artificial Sequence
  ENSG00000188124_28 (sequence is synthesized)
ctgagaccacagcttagtaaactgtgcttaaaacattttggctgctatatggataaatagtaaaaagcctttttaaaaaatcttattttattatttccttttagaaatgaaacatttgtt

SEQ ID NO: 689797 - DNA, 120 bp, Artificial Sequence
  ENSG00000188124_29 (sequence is synthesized)
tattatttttattgacaaaatatgtatgtcttaatgtagtaaaacatgatgttttgaaatatgtatactttatggaattgctaaatcaagccaactaacatatgctttactccacatact

SEQ ID NO: 689798 - DNA, 120 bp, Artificial Sequence
  ENSG00000188124_30 (sequence is synthesized)
tatcttttttgcattaggaaaagttaaaatctactttctcagcaattttcaagcacacaatataatctgattaactataattgccatgatctacaataaatctcttgaacttattcctcc

SEQ ID NO: 689799 - DNA, 120 bp, Artificial Sequence
  ENSG00000188124_31 (sequence is synthesized)
tgtctaactgaagttttgtgtcctttcaccagcatctcccaaatccccctacctcaacatttggtaaccaccattttactctctgtttctgtaaattcagcttacaggttctgcatataa

SEQ ID NO: 689800 - DNA, 120 bp, Artificial Sequence
  ENSG00000188130_0 (sequence is synthesized)
gtcgtgggggcaccgcccgcaggctctgcggggtgggcagctcccgggcctgccatgagctctccgccgcccgcccgcagtggcttttaccgccaggaggtgaccaagacggcctgggag

SEQ ID NO: 689801 - DNA, 120 bp, Artificial Sequence
  ENSG00000188130_1 (sequence is synthesized)
gtgcgcgccgtgtaccgggacctgcagcccgtgggctcgggcgcctacggcgcggtgtgctcggccgtggacggccgcaccggcgctaaggtggccatcaagaagctgtatcggcctttc

SEQ ID NO: 689802 - DNA, 120 bp, Artificial Sequence
  ENSG00000188130_2 (sequence is synthesized)
cagtccgagctgttcgccaagcgcgcctaccgcgagctgcgcctgctcaagcacatgcgccacgagaacgtgatcgggctgctggacgtattcactcctgatgagaccctggatgacttc

SEQ ID NO: 689803 - DNA, 120 bp, Artificial Sequence
  ENSG00000188130_3 (sequence is synthesized)
acggacttttacctggtgatgccgttcatgggcaccgacctgggcaagctcatgaaacatgagaagctaggcgaggaccggatccagttcctcgtgtaccagatgctgaaggggctgagg

SEQ ID NO: 689804 - DNA, 120 bp, Artificial Sequence
  ENSG00000188130_4 (sequence is synthesized)
tatatccacgctgccggcatcatccacagagacctgaagcccggcaacctggctgtgaacgaagactgtgagctgaagatcctggacttcggcctggccaggcaggcagacagtgagatg

SEQ ID NO: 689805 - DNA, 120 bp, Artificial Sequence
  ENSG00000188130_5 (sequence is synthesized)
actgggtacgtggtgacccggtggtaccgggctcccgaggtcatcttgaattggatgcgctacacgcagacggtggacatctggtctgtgggctgcatcatggcggagatgatcacaggc

SEQ ID NO: 689806 - DNA, 120 bp, Artificial Sequence
  ENSG00000188130_6 (sequence is synthesized)
cgatgaggccaagaactacatgaagggcctccccgaattggagaagaaggattttgcctctatcctgaccaatgcaagccctctggctgtgaacctcctggagaagatgctggtgctgga

SEQ ID NO: 689807 - DNA, 120 bp, Artificial Sequence
  ENSG00000188130_7 (sequence is synthesized)
cgcggagcagcgggtgacggcaggcgaggcgctggcccatccctacttcgagtccctgcacgacacggaagatgagccccaggtccagaagtatgatgactcctttgacgacgttgaccg

SEQ ID NO: 689808 - DNA, 120 bp, Artificial Sequence
  ENSG00000188130_8 (sequence is synthesized)
cacactggatgaatggaagcgtgttacttacaaagaggtgctcagcttcaagcctccccggcagctgggggccagggtctccaaggagacgcctctgtgaagatctctgggctccggggt

SEQ ID NO: 689809 - DNA, 120 bp, Artificial Sequence
  ENSG00000188130_9 (sequence is synthesized)
ggcagtgaggaccaccttcaccttccacctgagaggggactctcgttgccaccttgaccttggctggggcttgcatcccaaggcatccatcagagcagacgcccgggttccatggaccct

SEQ ID NO: 689810 - DNA, 120 bp, Artificial Sequence
  ENSG00000188130_10 (sequence is synthesized)
cctccccacggccatgcctctgctcttgggcgcccatcatggaggagcacctgaactttctggacaagacctctggccgacctggggatggcctctgatccctggagcagtggcccactt

SEQ ID NO: 689811 - DNA, 120 bp, Artificial Sequence
  ENSG00000188130_11 (sequence is synthesized)
gcccggtgctctcagaaacctcagagctggtggggctccagatcaggccttggcctctgagccctgcctgctctgggccatgcagaggaaggacagagggtgggcgcagggcaccaactc

SEQ ID NO: 689812 - DNA, 120 bp, Artificial Sequence
  ENSG00000188130_12 (sequence is synthesized)
agggacatcccctctcctgggcgacgtcagtggaccttcctgcacccccagcctggaatgtaaatcagctgtgtggtgcccgcgtggctggaaggaaatagacccttttgtagctccctg

SEQ ID NO: 689813 - DNA, 120 bp, Artificial Sequence
  ENSG00000188130_13 (sequence is synthesized)
ccgcggcctcggcttggttcagctgggctgggttcccccacccggcaacccctcctccaggcagcctgctgtggggccgggcgggggtcgggccgtgggtccccaggggagaaggagagc

SEQ ID NO: 689814 - DNA, 120 bp, Artificial Sequence
  ENSG00000188130_14 (sequence is synthesized)
aggagagcaaggcctgtctctccttgggagacgactcccccaagggccgttccccatcctccgccagccccgggaaggactcagccccttgactcggcgcctcagccaggccctggtcag

SEQ ID NO: 689815 - DNA, 120 bp, Artificial Sequence
  ENSG00000188130_15 (sequence is synthesized)
ggaacacgacttggccaggcccaggggatcctccaggtctcacgccaagccttgcccccagccaggaagcccgcggtgatcgggctgctggacgtattcactcctgatgagaccctggat

SEQ ID NO: 689816 - DNA, 120 bp, Artificial Sequence
  ENSG00000188130_16 (sequence is synthesized)
tcatgccgggtcccaccttaagacctccgggcccttggcctgcatgtagaggaggctggcctgatagctcagacccttagagccaggaggggggcctgagcatcccatctctcccaggcc

SEQ ID NO: 689817 - DNA, 120 bp, Artificial Sequence
  ENSG00000188130_17 (sequence is synthesized)
acaaagctggtgcccacttcccccaggcctgtgccagtgatcttcgaacccccacgttagggcttggcccctccccttttacggggtgacctgctaatggcttagactctaagccactgt

SEQ ID NO: 689818 - DNA, 120 bp, Artificial Sequence
  ENSG00000188130_18 (sequence is synthesized)
gtgtggatcctgaagccagacccaggggcagggcctgatggggaggagtgttaggatctaccctagctctctgcatcctccaatgccagcaggtccctggggggagggggcacgctgggc

SEQ ID NO: 689819 - DNA, 120 bp, Artificial Sequence
  ENSG00000188130_19 (sequence is synthesized)
acgttgagacccctgtggtgaagtggtgagcgccagccagtccctggggggacggggcacattggacatgttgagacccctctggcccctgtggtggattggtgagcgcagagggctggg

SEQ ID NO: 689820 - DNA, 120 bp, Artificial Sequence
  ENSG00000188130_20 (sequence is synthesized)
ttttattcttgatcaaacctctagcccctactaccctgctccagtggtatcttcgtgcccaggccgccctctgcaggccactcggtgtttccaagggtggcggctggaacacaggccatg

SEQ ID NO: 689821 - DNA, 120 bp, Artificial Sequence
  ENSG00000188130_21 (sequence is synthesized)
ggcacctccaaacctgtcccagggcaggggttacagcagagagaccagtgaggggcagggcagggcaggccaggtgtcctcggtggacatgcccacagctggcccagccaaagtggacct

SEQ ID NO: 689822 - DNA, 120 bp, Artificial Sequence
  ENSG00000188130_22 (sequence is synthesized)
gatgagctgccacgacagatgggccttctctgcccagcgaccctcatgcctctccagggcatccgggcctgggggacgtgatcgccatcagttccggagccacgctgacttgtggcatgg

SEQ ID NO: 689823 - DNA, 120 bp, Artificial Sequence
  ENSG00000188130_23 (sequence is synthesized)
ctgctgtccacactgggcccaaagtgtgggcccataggtggcctgaggactgggggccccaaaattctgtgacccagctggatgtgaactcccgcgggggcagggtgtcccctgggctcc

SEQ ID NO: 689824 - DNA, 120 bp, Artificial Sequence
  ENSG00000188130_24 (sequence is synthesized)
agggggcctcaggtttcctctcgggcatcttcctccgtggctgtgcccgtgcctcctatcttcctcagtcccccaccatgctaccgcaaccccggtccagtgtccccacctccaccgacc

SEQ ID NO: 689825 - DNA, 120 bp, Artificial Sequence
  ENSG00000188130_25 (sequence is synthesized)
ttgactctgctcttgggccaggggtcttcttggagctagaaccggactcactccctccttaaacctcgggggcggtgctgcgcctccatgcagccacgaccaccgccctgagccggccgc

SEQ ID NO: 689826 - DNA, 120 bp, Artificial Sequence
  ENSG00000188130_26 (sequence is synthesized)
ccgcagcgccacctgcctccccgcgggctcctcccgcctcgtggcctttgccctgcagacccctcgcccccctcgcctttcaccccaggtcttcctgcgcccgggccgggtgggccttgg

SEQ ID NO: 689827 - DNA, 120 bp, Artificial Sequence
  ENSG00000188130_27 (sequence is synthesized)
gcgctggaccctgacccagctggtgcagaacggggctctcatgggcaggctcggccacgggcgttcgggtggggctgcggcgaccactcgcctaaggccgggggaccccgcccctcttgg

SEQ ID NO: 689828 - DNA, 120 bp, Artificial Sequence
  ENSG00000188130_28 (sequence is synthesized)
gatcggggcggggccaatggggaggcggagccgcagcgcagctccgagggctggcggctcggggcgccgaggcttccgcgcccgctggttcctcgctccggggcggagctcgcgatagcg

SEQ ID NO: 689829 - DNA, 120 bp, Artificial Sequence
  ENSG00000188130_29 (sequence is synthesized)
ggagcagggcgcggggcgggacccaggtccgaggcgaggaagccggaagccaggcgcggggagcctcccccttcgactgcagcctcgctccgtgccttctgcgcgcctgggatcccggag

SEQ ID NO: 689830 - DNA, 120 bp, Artificial Sequence
  ENSG00000188130_30 (sequence is synthesized)
cctaggttctgtgcgctcccgcccaggccggtgcccgccgcccgcctgcgccccaggcaggtcccaggcctccggctgctcccggccgaaggtggggacaggcagtggcaggcaccacta

SEQ ID NO: 689831 - DNA, 120 bp, Artificial Sequence
  ENSG00000188130_31 (sequence is synthesized)
actagcgagggcgtttgggaacccagggtgaccacggcgcagccatggggaccgcgcttgtgtaccatgaggacatgacggccacccggctgctctgggacgagtaagtgggacctggcc

SEQ ID NO: 689832 - DNA, 120 bp, Artificial Sequence
  ENSG00000188130_32 (sequence is synthesized)
gaggtggggtgcggggagggacctctgaactgagctcctcatctgccccagccccgagtgcgagatcgagcgtcctgagcgcctgaccgcagccctggatcgcctgcggcagcgcggcct

SEQ ID NO: 689833 - DNA, 120 bp, Artificial Sequence
  ENSG00000188130_33 (sequence is synthesized)
ggaacagaggtgtctgcggttgtcagcccgcgaggcctcggaagaggagctgggcctggtgcacaggtcaggacgggggcaggccccacgatggggggcggggcgggcagcccagctaga

SEQ ID NO: 689834 - DNA, 120 bp, Artificial Sequence
  ENSG00000188130_34 (sequence is synthesized)
aacctaagaacctgggcctaccccgagcctgccagcctcgaatacagagcctctccctatgcacctcgggtgggctcacaggcttgaggaagtgacagggtggccactcccaccatgaat

SEQ ID NO: 689835 - DNA, 120 bp, Artificial Sequence
  ENSG00000188130_35 (sequence is synthesized)
cccaggtccccgcctcccgcccccctgctcctgctggtgaccctgcctctcctgcctgcccatctgcatgcagcccagagtatgtatccctggtcagggagacccaggtcctaggcaagg

SEQ ID NO: 689836 - DNA, 120 bp, Artificial Sequence
  ENSG00000188130_36 (sequence is synthesized)
aggagctgcaggcgctgtccggacagttcgacgccatctacttccacccggtgcgtgtccccggacacactcacctgtgcagacacacatgcacgtgcctttgagcgttcacagccacgg

SEQ ID NO: 689837 - DNA, 120 bp, Artificial Sequence
  ENSG00000188130_37 (sequence is synthesized)
ccgccaaccccagccagtgtcccctggtccatacacatgacattgccctgcacacctgcctgctggcactgccagagcctggggctggcctgttctgctcagcagctggtgtcttgcagc

SEQ ID NO: 689838 - DNA, 120 bp, Artificial Sequence
  ENSG00000188130_38 (sequence is synthesized)
ctggcacaagtgtgggtatggcctgcaaagggcagcagggaaggcagggggctcatctgcgcccctgcgcccacagagtacctttcactgcgcgcggctggccgcaggggctggactgca

SEQ ID NO: 689839 - DNA, 120 bp, Artificial Sequence
  ENSG00000188130_39 (sequence is synthesized)
gctggtggacgctgtgctcactggagctgtgcaaaatgggcttgccctggtgaggcctcccgggcaccatggccagagggcggctgccaacgggttctgtgtgttcaacaacgtggccat

SEQ ID NO: 689840 - DNA, 120 bp, Artificial Sequence
  ENSG00000188130_40 (sequence is synthesized)
agcagctgcacatgccaagcagaaacacgggctacacaggatcctcgtcgtggactgggatgtgcaccatggccaggggatccagtatctctttgaggatgaccccagcgtcctttactt

SEQ ID NO: 689841 - DNA, 120 bp, Artificial Sequence
  ENSG00000188130_41 (sequence is synthesized)
ctcctggcaccgctatgagcatgggcgcttctggcctttcctgcgagagtcagatgcagacgcagtggggcggggacagggcctcggcttcactgtcaacctgccctggaaccaggtgcc

SEQ ID NO: 689842 - DNA, 120 bp, Artificial Sequence
  ENSG00000188130_42 (sequence is synthesized)
gaaccaggtgcccaccctcaagccccaggtccccacccagccccctccccctgggcccctcccctcccccacagttcaccctcaagccccaggtccccacccaccccctcccccgggccc

SEQ ID NO: 689843 - DNA, 120 bp, Artificial Sequence
  ENSG00000188130_43 (sequence is synthesized)
acagttcaggatgtagcctgggatgtcctgccaggttgggatgggaaacgctgactacgtggctgccttcctgcacctgctgctcccactggcctttgagtttgaccctgagctggtgct

SEQ ID NO: 689844 - DNA, 120 bp, Artificial Sequence
  ENSG00000188130_44 (sequence is synthesized)
ggtctcggcaggatttgactcagccatcggggaccctgaggggcaaatgcaggccacgccagagtgcttcgcccacctcacacagctgctgcaggtgctggccggcggccgggtctgtgc

SEQ ID NO: 689845 - DNA, 120 bp, Artificial Sequence
  ENSG00000188130_45 (sequence is synthesized)
cgtgctggagggcggctaccacctggagtcactggcggagtcagtgtgcatgacagtacagacgctgctgggtgacccggccccacccctgtcagggccaatggcgccatgtcagagtgc

SEQ ID NO: 689846 - DNA, 120 bp, Artificial Sequence
  ENSG00000188130_46 (sequence is synthesized)
cctagagtccatccagagtgcccgtgctgcccaggccccgcactggaagagcctccagcagcaagatgtgaccgctgtgccgatgagccccagcagccactccccagaggggaggcctcc

SEQ ID NO: 689847 - DNA, 120 bp, Artificial Sequence
  ENSG00000188130_47 (sequence is synthesized)
acctctgctgcctgggggtccagtgtgtaaggcagctgcatctgcaccgagctccctcctggaccagccgtgcctctgccccgcaccctctgtccgcaccgctgttgccctgacaacgcc

SEQ ID NO: 689848 - DNA, 120 bp, Artificial Sequence
  ENSG00000188130_48 (sequence is synthesized)
ggatatcacattggttctgccccctgacgtcatccaacaggaagcgtcagccctgagggaggagacagaagcctgggccaggccacacgagtccctggcccgggaggaggccctcactgc

SEQ ID NO: 689849 - DNA, 120 bp, Artificial Sequence
  ENSG00000188130_49 (sequence is synthesized)
acttgggaagctcctgtacctcttagatgggatgctggatgggcaggtgaacagtggtatagcagccactccagcctctgctgcagcagccaccctggatgtggctgttcggagaggcct

SEQ ID NO: 689850 - DNA, 120 bp, Artificial Sequence
  ENSG00000188130_50 (sequence is synthesized)
gtcccacggagcccagaggctgctgtgcgtggccctgggacagctggaccggcctccagacctcgcccatgacgggaggagtctgtggctgaacatcaggggcaaggaggcggctgccct

SEQ ID NO: 689851 - DNA, 120 bp, Artificial Sequence
  ENSG00000188130_51 (sequence is synthesized)
atccatgttccatgtctccacgccactgccagtgatgaccggtggtttcctgagctgcatcttgggcttggtgctgcccctggcctatggcttccagcctgacctggtgctggtggcgct

SEQ ID NO: 689852 - DNA, 120 bp, Artificial Sequence
  ENSG00000188130_52 (sequence is synthesized)
ggggcctggccatggcctgcagggcccccacgctgcactcctggctgcaatgcttcgggggctggcagggggccgagtcctggccctcctggaggagaggacgtccaggccctgatgtac

SEQ ID NO: 689853 - DNA, 120 bp, Artificial Sequence
  ENSG00000188130_53 (sequence is synthesized)
ctgagagggcagctggagcctcagtggaagatgttgcagtgccatcctcacctggtggcttgaaatcggccaaggtgggagcatttacaccgcagaaatgacaccgcacgccagcgcccc

SEQ ID NO: 689854 - DNA, 120 bp, Artificial Sequence
  ENSG00000188130_54 (sequence is synthesized)
gaccctggcaccaagtgtgtggccggtaactggagctgctgaccttttccagcgggtgggggagaagcggtagggaggacccaccctgcccctgccctgcagccgaccaccctgggactc

SEQ ID NO: 689855 - DNA, 120 bp, Artificial Sequence
  ENSG00000188130_55 (sequence is synthesized)
acaccctgtcggccaagagtgaagggccaggccgaggaaggcctggagagggtagcaggcgcctcccgcctgacttgcagaggtcaagtcagtggcctctgggaaggtgctaaataccat

SEQ ID NO: 689856 - DNA, 120 bp, Artificial Sequence
  ENSG00000188130_56 (sequence is synthesized)
atcatccacagagtgagtcccggtggagaagccgctcatcagccctcccccagtgcaatccccccgcctccacgtcccacctgtgaggatgtgatggggtctgggtgctgagccacgccc

SEQ ID NO: 689857 - DNA, 120 bp, Artificial Sequence
  ENSG00000188130_57 (sequence is synthesized)
tgtaccagatgctgaaggggctgagggtacgggccccgggggaggctgcagggaggcaggcagggcctcggggctgggcagaggagggccctgtggctctgagagggtgcgctgaagcct

SEQ ID NO: 689858 - DNA, 120 bp, Artificial Sequence
  ENSG00000188130_58 (sequence is synthesized)
ggccaggtccggtggccccatctttaggtgccacccaggctcttggctgtgcccatgcttgggagggtggggcacagtggccacctttcctctgcccccaggacctgaagcccggcaacc

SEQ ID NO: 689859 - DNA, 120 bp, Artificial Sequence
  ENSG00000188130_59 (sequence is synthesized)
attggatgcgctacacgcagacgggtgagaagctgcccagagatctgggcctctcaggctgcaccatctgcttctccacttcttcacggacagccctgtggtggctgctcccagggaggc

SEQ ID NO: 689860 - DNA, 120 bp, Artificial Sequence
  ENSG00000188130_60 (sequence is synthesized)
tgttgagctggggtgggagccgggcaggtgggctgtgttggtgtctcctccctccccgtctcatcctgtccccctgcccacggagctgaccagggcttctatctcagtggacatctggtc

SEQ ID NO: 689861 - DNA, 120 bp, Artificial Sequence
  ENSG00000188130_61 (sequence is synthesized)
tgtgggctgcatcatggcggagatgatcacaggcaagacgctgttcaagggcagcgaccgtatcctccagccgcagggcggcaccaggggcgggtggggatggctcctgcccaggtgggg

SEQ ID NO: 689862 - DNA, 120 bp, Artificial Sequence
  ENSG00000188130_62 (sequence is synthesized)
gcagtgggggccctgatctctggcccccgagctgtgttcctgacctcggtgcagacctggaccagctgaaggagatcatgaaggtgacggggacgcctccggctgagtttgtgcagcggc

SEQ ID NO: 689863 - DNA, 120 bp, Artificial Sequence
  ENSG00000188130_63 (sequence is synthesized)
cctgtgtggacccgtgagttgggggctccgggtagggcctgtgtggaccctgtgggccctgtgcaggtggccaggctcagagtcctagatccccatccctgggatgcaggtcaggtgagg

SEQ ID NO: 689864 - DNA, 120 bp, Artificial Sequence
  ENSG00000188130_64 (sequence is synthesized)
aggatgggaggtcagggcagcatggggccgtgtggcctggtggagatgacctctggctggagctggaagttgaagggaagggtgttcctggcaggctcagcacagaggctggcacagaag

SEQ ID NO: 689865 - DNA, 120 bp, Artificial Sequence
  ENSG00000188130_65 (sequence is synthesized)
gagccgggagtggtgaaaggcagctgtgagtcagggaaccagggcccacttagcccctcctggcccccagacctgctgcccttccgccatgtccaggccagagacctgggccaccctgac

SEQ ID NO: 689866 - DNA, 120 bp, Artificial Sequence
  ENSG00000188130_66 (sequence is synthesized)
cctgggccaccctgacaccctcaccacgtccgcttgtccctaaggcctctctgctcacacctcctgaatctgtccttgcctctccttgccccatttttgttttttgagacggagtctcac

SEQ ID NO: 689867 - DNA, 120 bp, Artificial Sequence
  ENSG00000188130_67 (sequence is synthesized)
gcgcccagccctctccttgccccactttaggatccctcccccctggacaactgtatacccaagacagtccccagggcctcgcctgtctcccccagcccccgctaagcagtccagactcca

SEQ ID NO: 689868 - DNA, 120 bp, Artificial Sequence
  ENSG00000188130_68 (sequence is synthesized)
accccaactgctggggtccatcatcccctataccaggggctatcccctcaacttggagggctggccaaagcctgtgcagcctcaggctggactcagagaagcctccccagctcccgcagc

SEQ ID NO: 689869 - DNA, 120 bp, Artificial Sequence
  ENSG00000188130_69 (sequence is synthesized)
tatgctgcggcctgaggctgtgctggacctggcttcatttctgctccaggatggcaggctgtgtcttcttcatggctgcatgaccagcctggggtgggtgtgcccggggaaagtaggtgt

SEQ ID NO: 689870 - DNA, 120 bp, Artificial Sequence
  ENSG00000188130_70 (sequence is synthesized)
acactgggagccgtgccatgtttcaggccctgtcctggctctgcctcgggtgcgggaccttggtcctccacactggctgggtggggctggatgggttgagattcacatgtgctccttacg

SEQ ID NO: 689871 - DNA, 120 bp, Artificial Sequence
  ENSG00000188130_71 (sequence is synthesized)
accacgggtccctgggtgcccgcagcagggcctccacccttcgctgtgtgcatattcgtgtgcttatgagtttggctttgtttgattaaaggtttctgctgctagaaagataacttgaaa

SEQ ID NO: 689872 - DNA, 80 bp, Artificial Sequence
  ENSG00000188130_72 (sequence is synthesized)
cacctgggacatccctgagggaagggccgggagcgggagcgccccagcggccggcgggcgggcgggcgagcggacgagcg

SEQ ID NO: 689873 - DNA, 120 bp, Artificial Sequence
  ENSG00000188133_0 (sequence is synthesized)
agactcagtgctccctcctcctcccgcgccccgcgctctgcgcgctgagctggcgccgggctccgcttgcacagcaccgggaccgacgggcactgctgggagagccgctctcccaggttc

SEQ ID NO: 689874 - DNA, 120 bp, Artificial Sequence
  ENSG00000188133_1 (sequence is synthesized)
cacctccccgatgcagagtccgtgggggaaaccaggctttcctcccagaaccaagggagcgagccgagggggcagctgctgtgggggcttctgaggagacagcctggcttctttccctac

SEQ ID NO: 689875 - DNA, 120 bp, Artificial Sequence
  ENSG00000188133_2 (sequence is synthesized)
ttcctggagagggcaggaaacctcagaatagaggaacgctgctccctggtcagcaagcagcccccaacctggatggagtgaaacatgcggcctgatgacattaacccgaggactgggctg

SEQ ID NO: 689876 - DNA, 120 bp, Artificial Sequence
  ENSG00000188133_3 (sequence is synthesized)
gtggtggccctggtcagtgtcttcctcgtctttggtttcatgttcaccgtctctgggatgaaaggggagactttgggaaacatccccctcctggccatcgggccagccatctgcctacca

SEQ ID NO: 689877 - DNA, 120 bp, Artificial Sequence
  ENSG00000188133_4 (sequence is synthesized)
ggcatcgcagccattgccctggccaggaaaaccgagggatgcaccaagtggccagagaacgagctgctgtgggtccgcaaattgccctgcttccggaaacccaaagacaaggaggtggta

SEQ ID NO: 689878 - DNA, 120 bp, Artificial Sequence
  ENSG00000188133_5 (sequence is synthesized)
gagctgctgaggaccccttcagacctagaatccggcaaggggagctcagatgagctggctaagaaggcgggcctcagggggaagcctcccccacaaagccagggtgaggtgtccgtggcc

SEQ ID NO: 689879 - DNA, 120 bp, Artificial Sequence
  ENSG00000188133_6 (sequence is synthesized)
agctccatcaacagccccacacccacggaggaaggagaatgccagagcctcgtccagaatgggcatcaggaggagacgtccagatacctggacggctactgcccctcgggcagttccctc

SEQ ID NO: 689880 - DNA, 120 bp, Artificial Sequence
  ENSG00000188133_7 (sequence is synthesized)
acctacagtgccttggacgtcaagtgctcagcaagggacagatctgagtgccctgagcctgaggatagcatcttctttgtgccccaggacagtatcatcgtttgctcctacaagcagaac

SEQ ID NO: 689881 - DNA, 120 bp, Artificial Sequence
  ENSG00000188133_8 (sequence is synthesized)
agcccgtatgacagatactgttgttatatcaatcagatacaaggcaggtgggaccacgagaccatcgtctaatctctgcctacaaaggtggctggattgatagaatatgactaagcccag

SEQ ID NO: 689882 - DNA, 120 bp, Artificial Sequence
  ENSG00000188133_9 (sequence is synthesized)
ctccccgtggaagcaaattgctctgcttggagagccttcacactgttagaaattgacctggtatgtgatgggtgtgataacctctggtacccgagagtcatgtaaataggcatgttgggg

SEQ ID NO: 689883 - DNA, 120 bp, Artificial Sequence
  ENSG00000188133_10 (sequence is synthesized)
acacattttagggaagggcgatgagggttaaggacactggaagaggcagtgggtaggaaaggaagctactccagttgcttcttaacaatttacacaatgttaaatgttttgtaaaataac

SEQ ID NO: 689884 - DNA, 120 bp, Artificial Sequence
  ENSG00000188133_11 (sequence is synthesized)
ccaaaaagtgctatccagaaccagctgagagcaagataaatctagagtgggctgcagatgtgaggcatcaaatgatgcatgagctgaccacagggaaactgagctgctttatgtttgaat

SEQ ID NO: 689885 - DNA, 120 bp, Artificial Sequence
  ENSG00000188133_12 (sequence is synthesized)
aagttgaaaataaaattaatgatccgttatataaagtaatttttgcctggttaaaagcttatcacacttggtatttgctgaaagaaaaaaaaatcaagatacaagagttaaaccctcctt

SEQ ID NO: 689886 - DNA, 120 bp, Artificial Sequence
  ENSG00000188133_13 (sequence is synthesized)
agatgggatggtttttgggaaaagggtagttaaagagagttggattatgtaactgagtcttgtggcattattgtctgacaagatcatggtctctaataaagtaaaataagtgtgagcagc

SEQ ID NO: 689887 - DNA, 120 bp, Artificial Sequence
  ENSG00000188133_14 (sequence is synthesized)
tatgtgaaaagttaacatttttagatggctatgttacttcttaaactcttcgtttaaatccatttattgcatctttatctgaaatgggttttttctaaacatttactatcattcatgtat

SEQ ID NO: 689888 - DNA, 120 bp, Artificial Sequence
  ENSG00000188133_15 (sequence is synthesized)
tatttccttaccaggtgcaacattatttgaaatgatactttcatagattggaatttgttttcatcaagacaaaatgaattttacatatatatccaagtctttaacattggcagacatgta

SEQ ID NO: 689889 - DNA, 120 bp, Artificial Sequence
  ENSG00000188133_16 (sequence is synthesized)
ctgataattaccattcctacataccttttaaaatctgaaaactataaagtctacacattagccttgaacattgcacataatttgtatgaaatgcaatggttaaacctttggaagtgtcat

SEQ ID NO: 689890 - DNA, 120 bp, Artificial Sequence
  ENSG00000188133_17 (sequence is synthesized)
tatttgtacatttgttcaactcctctcacagactgtaaatgccagtgaaacaagaactcatctactaaatttaactgaagcctagattttattaagctcacctgatcagtgaacattaca

SEQ ID NO: 689891 - DNA, 120 bp, Artificial Sequence
  ENSG00000188133_18 (sequence is synthesized)
tgataaaagtctctttatttcatacatttttgctgctgaggaaaacaacaaatcacaatgatatcctaaaatgtgctttctatttcacttgctcaactgcaatagataagaaggctatca

SEQ ID NO: 689892 - DNA, 120 bp, Artificial Sequence
  ENSG00000188133_19 (sequence is synthesized)
agcagaatgccatttgatccccggtgaagaaaaatatgaattatatataggaatggtgatagagttcatcttgaagatcagaagtattttgtatccttcaaagaatgatcattttaagtg

SEQ ID NO: 689893 - DNA, 120 bp, Artificial Sequence
  ENSG00000188133_20 (sequence is synthesized)
atcatatagtcttagtcactttctcccaaaaggggaattgaggacaaaaatttgggcatatatgttttgtgtatttcaattccaactctgcaattctttcttaagtatagcaattgttct

SEQ ID NO: 689894 - DNA, 120 bp, Artificial Sequence
  ENSG00000188133_21 (sequence is synthesized)
gtcttaagaatcatggtatttttaaaaaatcataattttcaagtcaagttcaagatcaaaaatatgtaattattttagtagggcttaaatatcagaaatgagatgcatgatcttgggcaa

SEQ ID NO: 689895 - DNA, 120 bp, Artificial Sequence
  ENSG00000188133_22 (sequence is synthesized)
gattatttctatcattcattttcagtgtaaatattctatggtgttatgtcaaaggcattttatatattgccaggaaatgagttacagcaaaatgcatgccaaagttatgaaatttatgat

SEQ ID NO: 689896 - DNA, 120 bp, Artificial Sequence
  ENSG00000188133_23 (sequence is synthesized)
aattatgtgacatacattgcacagctactactcaaaaaagaattttgtagatgtatgaaagcagattattcaacacaatgcattcctgagaataaaatgaacataatcagagtaaaatat

SEQ ID NO: 689897 - DNA, 120 bp, Artificial Sequence
  ENSG00000188133_24 (sequence is synthesized)
ttttgaggagaaaacttaaaatgttggtataactcaaagtaatctaatacacaaccttgcactaaatgtgattgacatttggatttgggatggggagagatagtttcctaaaatcacagt

SEQ ID NO: 689898 - DNA, 120 bp, Artificial Sequence
  ENSG00000188133_25 (sequence is synthesized)
aacttttaataattgtaatgcattttgaaaacagagaatcatatttttataatggtgagaactatgcaataactctttaggaatgaaaacttcctttaagaagtttgccaccgttagaga

SEQ ID NO: 689899 - DNA, 120 bp, Artificial Sequence
  ENSG00000188133_26 (sequence is synthesized)
tgaggagatagtgagacagagagatgttcacagagactcagcaaatcttagacaataatgctgcaattttctgaaagaagatgcttgcagtgtcaggtatggtttgggggttggaaaagt

SEQ ID NO: 689900 - DNA, 120 bp, Artificial Sequence
  ENSG00000188133_27 (sequence is synthesized)
tacttttctgatttcttggaaccatttaaaactcctttatatcattctgtctctttccaaattgagggtcaactactagtttagagatataaggtattttatcttgttttcaagttctac

SEQ ID NO: 689901 - DNA, 120 bp, Artificial Sequence
  ENSG00000188133_28 (sequence is synthesized)
ttcagaagaaaacctatttcatgtttcttctcccattacctacttaagatacttaaggtatttaagtatgcatttgaggaaatattttcctgtgctaaaataaaggtttgcaaatgttgg

SEQ ID NO: 689902 - DNA, 120 bp, Artificial Sequence
  ENSG00000188133_29 (sequence is synthesized)
tgtgagaggttttaactttgaccagtgagaataaaatgtatgattgtgtgtgtgaatttctcctaacatattaaccaactcctttctatatgcaacaaggtaacctggtgccccaaatca

SEQ ID NO: 689903 - DNA, 120 bp, Artificial Sequence
  ENSG00000188133_30 (sequence is synthesized)
atacttgtaagtactattcagagttaaacttccaaagtcaaaaaatatatatacacaaaaaaaggggaaaagccacatttttttgaacagaggtagaagagaaagagaaaaaaagtgtct

SEQ ID NO: 689904 - DNA, 120 bp, Artificial Sequence
  ENSG00000188133_31 (sequence is synthesized)
cagccctttagaggaaaagagagcaactcattctgatgagttacacagttttagcaaattgttcttatcaatataatagacatgaggattgttcctggtagccttcaagagctcctagac

SEQ ID NO: 689905 - DNA, 120 bp, Artificial Sequence
  ENSG00000188133_32 (sequence is synthesized)
agatataaatttaagtagacattactttattttgctgttaatccaagtagacattgcgacttgattctgaataggcattttattttcaaaatttttctactgaatttctcttgctctgta

SEQ ID NO: 689906 - DNA, 120 bp, Artificial Sequence
  ENSG00000188133_33 (sequence is synthesized)
tgcctacttattgtgcacatgggttgtttttccaaactgcttcttgattcttaagtgagaattcagacatgatactcaaacgagagcatattagacatctgttttaagatttattttctg

SEQ ID NO: 689907 - DNA, 120 bp, Artificial Sequence
  ENSG00000188133_34 (sequence is synthesized)
ttgcagtcatcttggcaaacaaaatccagatacagttaagttcaggctctcttccaaaccctgctaagcagctgctttgaaaatgttttcaatactatggatcttaatatccactgagat

SEQ ID NO: 689908 - DNA, 120 bp, Artificial Sequence
  ENSG00000188133_35 (sequence is synthesized)
gacaaatgtaggaaaggaagattcattctgttaaatgttttttctcttttgcaatgtccaagctctacttatttattaatagcctccctctgtacccataacatcatttatttggtgaat

SEQ ID NO: 689909 - DNA, 120 bp, Artificial Sequence
  ENSG00000188133_36 (sequence is synthesized)
tcactgttattaatactagtattttatcacagtaaagaaaaggtttctgaaaacccacaacctcactatcctaaagcaactactgtgtttctattttggtatatcatcttccaggcttcc

SEQ ID NO: 689910 - DNA, 120 bp, Artificial Sequence
  ENSG00000188133_37 (sequence is synthesized)
tccacatgcaaatgcagcatacatattataatagtgtgtttttcttttctctttgaattatattccatgcatgtttccatgtttctatgtagtatttctaattatcaatgaacgattgtg

SEQ ID NO: 689911 - DNA, 120 bp, Artificial Sequence
  ENSG00000188133_38 (sequence is synthesized)
taatatgccattttagtgatgttccataatttatcatgccattccttattgctggcaagatactaagttttatggatgattttgtatgtttttttcctattgctggttacactgctatat

SEQ ID NO: 689912 - DNA, 120 bp, Artificial Sequence
  ENSG00000188133_39 (sequence is synthesized)
tatttgttatatgccaatagagaggaactttactattgaacaggtatctccttgtggatgagagagaggaggcagaaatgtgtaaatgaatggaactctccatattgttgtgtgggtctt

SEQ ID NO: 689913 - DNA, 120 bp, Artificial Sequence
  ENSG00000188133_40 (sequence is synthesized)
cccttcactcttgtggatataagacccagggtgggaaacaaaacgatgcttcttccaaaagatcctcccatcaggaccagaactagtatgtttaggagtaagatggaacatttccccagc

SEQ ID NO: 689914 - DNA, 120 bp, Artificial Sequence
  ENSG00000188133_41 (sequence is synthesized)
taagataccagtggtgtgtttctcacaattagattacagtggtgtcagtcttcaagagcatcgtgttcaacaagcaaaatgataaatagatgtaaacaataataatgactttgtaatatg

SEQ ID NO: 689915 - DNA, 120 bp, Artificial Sequence
  ENSG00000188133_42 (sequence is synthesized)
ccaaaagcattttcttaaagtacctcatcatatattttataatagatgtatttcatatgtatatgtattgtcgcctatcagtgacttacaaatgaactggaatttcaggaatctgataga

SEQ ID NO: 689916 - DNA, 120 bp, Artificial Sequence
  ENSG00000188133_43 (sequence is synthesized)
ctctgcccttgagttttctgtgtttcagtttcctactgggaaaaactaaactgaggatggaaatggggacaaatgcttggtttgcccaaatatcttaataaaagactagattccattcaa

SEQ ID NO: 689917 - DNA, 120 bp, Artificial Sequence; identical to SEQ ID NO: 289543
  ENSG00000188152_0 (sequence is synthesized)

SEQ ID NO: 689918 - DNA, 120 bp, Artificial Sequence
  ENSG00000188152_1 (sequence is synthesized)
tctcccggcccaacacacaggccgcccctcgtgactgcagtggttcctccagccggccctctggtgctctctgccttccccagcacccctctagtggcaggacaggatggccgcggccca

SEQ ID NO: 689919 - DNA, 120 bp, Artificial Sequence
  ENSG00000188152_2 (sequence is synthesized)
agtggggctggggcttccaacgtctttgtccagatgaggacagaagtggggcctgtgaagccccctcaggcacagaccttgatcctaactcaggcccccctcgtctggcaggctccaggc

SEQ ID NO: 689920 - DNA, 120 bp, Artificial Sequence; identical to SEQ ID NO: 289546
  ENSG00000188152_3 (sequence is synthesized)

SEQ ID NO: 689921 - DNA, 120 bp, Artificial Sequence
  ENSG00000188152_4 (sequence is synthesized)
ggccttcctcttccaccaccaccaccggctgcccaggtggcccccatcgtgtccccagggaacgctgggccatggccacaaggggctcatggagagggcagcctggctccctcccaggcc

SEQ ID NO: 689922 - DNA, 120 bp, Artificial Sequence; identical to SEQ ID NO: 289548
  ENSG00000188152_5 (sequence is synthesized)

SEQ ID NO: 689923 - DNA, 120 bp, Artificial Sequence
  ENSG00000188152_6 (sequence is synthesized)
tcctgcttcctcatcccagttctccgatccctggcccggcggaagcccaccatgacgctggaggagggactgtggcgggccatgcgggaatggcagcacacgagcaactttgaccggatg

SEQ ID NO: 689924 - DNA, 120 bp, Artificial Sequence
  ENSG00000188152_7 (sequence is synthesized)
attttctacgagatggcggcaaagttcctggagtttgaggctgaggaggagatgcagattcagaaatcgcagtggatgaaggggccccagagcctgcctcctccagccccgccgaggctt

SEQ ID NO: 689925 - DNA, 120 bp, Artificial Sequence; identical to SEQ ID NO: 289551
  ENSG00000188152_8 (sequence is synthesized)

SEQ ID NO: 689926 - DNA, 120 bp, Artificial Sequence
  ENSG00000188152_9 (sequence is synthesized)
accaaggcccacctgccaccacccaggcccccgaggccagcagagaccaaggtccctgaggagatcccccctgaagtggtgcaggagtatgtggacatcatggaggagctgctggggtct

SEQ ID NO: 689927 - DNA, 120 bp, Artificial Sequence
  ENSG00000188152_10 (sequence is synthesized)
gtgttcccaggaagactttgtcaccaaggtggaggccgtcattcacccccgattcctggaagaattgctttccccagatccacagatggatttcttggccctaagccaggagctggagca

SEQ ID NO: 689928 - DNA, 120 bp, Artificial Sequence
  ENSG00000188152_11 (sequence is synthesized)
ggaggaaggactcacccttgcccagctagtggagaagcgcctcctgtccttgaaggagaaagggtgcgggagggcagcccctcgacatggcacggccaggttggactcaagtccttctga

SEQ ID NO: 689929 - DNA, 120 bp, Artificial Sequence
  ENSG00000188152_12 (sequence is synthesized)
gtttgcagctggccaagaagcagcgagagaggtccctgacccccaacaaagggtcagcgtggaaacctccccaccccagacggctgcccaggaccctcagggacagggcagagtgcgcac

SEQ ID NO: 689930 - DNA, 120 bp, Artificial Sequence
  ENSG00000188152_13 (sequence is synthesized)
tggcatggccaggtccgaagaccctgctgtgcttttgggatgtcaggactcccccaggctgaaggctgtccggccaacctctcctccccaggaccacagacccacctgccccggcctggg

SEQ ID NO: 689931 - DNA, 120 bp, Artificial Sequence
  ENSG00000188152_14 (sequence is synthesized)
gaccaaggacgccttgggtctccctggagagtctcctgtcaaggagtcacatgggctggctaaggggtcaagtgaggagacggaactccctggcatggtctatgtcgtgggttcccacca

SEQ ID NO: 689932 - DNA, 120 bp, Artificial Sequence
  ENSG00000188152_15 (sequence is synthesized)
caggctgaggccctggaggctgtcccagagccctgtcccttcctcgggccttctcagcccaggagggagaggaccccagggagctcttcaatctccatctgctcagaaaagaggcctcag

SEQ ID NO: 689933 - DNA, 120 bp, Artificial Sequence
  ENSG00000188152_16 (sequence is synthesized)
cccatcaccttctcctgccagcaagtccaagaagcgacctctctttggaagcccatcccctgctgaaaagacaccgcacccagggcctgggctcagggtctctggggagcaatccctggc

SEQ ID NO: 689934 - DNA, 120 bp, Artificial Sequence
  ENSG00000188152_17 (sequence is synthesized)
ttgggggctgggtggcccctcacagtctcaaaagagaaagggtgaccccttggcctccaggaggaagaagaagcggcattgtagccagtaggggccgccatggggcagactctctgatgc

SEQ ID NO: 689935 - DNA, 120 bp, Artificial Sequence
  ENSG00000188152_18 (sequence is synthesized)
cagtccccaaaagtggggctctgaagtctcggaccctcatggcacccggtgccccaaagcaaaggctgcttctcctccagtgctgatcttgctgggccttagctttggagggtaggggaa

SEQ ID NO: 689936 - DNA, 120 bp, Artificial Sequence
  ENSG00000188152_19 (sequence is synthesized)
ggaggggagggagaaggtggctgaacggggagggcaggaagggagggcctggggggtgggaagcagtgccttgggggccttgtgtgtaaatgtgaataaatgtagttgttttggaaaatg

SEQ ID NO: 689937 - DNA, 120 bp, Artificial Sequence
  ENSG00000188152_20 (sequence is synthesized)
cttcctaagaaaggggacgggaagtaaggctggcctactggtgtggacagattccagcaacatacatgacctgggggcacaaggactgcttcctaaacaatgatgagcacacagccacct

SEQ ID NO: 689938 - DNA, 120 bp, Artificial Sequence
  ENSG00000188152_21 (sequence is synthesized)
aatagcctggatcagctgaggccattctgatttcaaacactcagtccccttgccttcctaagaacccctgtgtttctcagactgaaaacgtgttctgaattttgttaagtaagtgtggcc

SEQ ID NO: 689939 - DNA, 120 bp, Artificial Sequence
  ENSG00000188152_22 (sequence is synthesized)
cctgttgaaattcatcaagagtgggaaagagccaaagtgggaaggagcatgggttgattggcacaaaagtaggtctgttgataaagaatggaagtaaaggggacatcaggtagaagcttt

SEQ ID NO: 689940 - DNA, 120 bp, Artificial Sequence
  ENSG00000188152_23 (sequence is synthesized)
tgctgtgagtcagaaggacaatttaaaagttgcctaaagaggcgcacactgtctgtgttgctgccatccagttggatggcaaccaactgaaccaagggaacctcaggttcttgcctactg

SEQ ID NO: 689941 - DNA, 120 bp, Artificial Sequence
  ENSG00000188152_24 (sequence is synthesized)
gccagagcccttcacagaatgtcccccacccccgccaagcccggctgcccactgcccctccccctctgcagaatgtctggggtcctgtgttccaaacctgtttatatgcaaattatccct

SEQ ID NO: 689942 - DNA, 120 bp, Artificial Sequence
  ENSG00000188152_25 (sequence is synthesized)
gaggaaggactcacccttgcccagggggccccttcagatgctctggggactgacagatgctgaggaagccctgatccctcccaccatccactcacaaggccccgcctgctttagggaggc

SEQ ID NO: 689943 - DNA, 120 bp, Artificial Sequence
  ENSG00000188152_26 (sequence is synthesized)
ttctcggggcctcccatcattatcagtatccctggaaaatcctgggatggagagagctggctggctttttttctgctcggtgggagctgaggagaaggcagctgcctgcaacatggacat

SEQ ID NO: 689944 - DNA, 120 bp, Artificial Sequence
  ENSG00000188152_27 (sequence is synthesized)
ggggagaggcggctgctcctgcttaaccctcatcaggaagagcacgggcactgggctgaggggagacgttgaggtgaccgtccacatgggtgtgtttgggatatgatgaggggcgcagag

SEQ ID NO: 689945 - DNA, 120 bp, Artificial Sequence
  ENSG00000188152_28 (sequence is synthesized)
caggggcctgtttctgggcaggagagagtcttgtccaactggctgaagcagatgctccttgctgtggccacatggaatggcctcaggggccctcagggtcttgcatggagctcccccaac

SEQ ID NO: 689946 - DNA, 120 bp, Artificial Sequence
  ENSG00000188152_29 (sequence is synthesized)
agctatgattcccttcccatatgatgactgaactcgtgtggaattgatgtagacacagatttacattggcatctaaaacagttccctcccaacacaccatcaccaacgggaacaagcatg

SEQ ID NO: 689947 - DNA, 120 bp, Artificial Sequence
  ENSG00000188152_30 (sequence is synthesized)
accagcctgccaggcgcaaggtgggtgtgtctgctggtcccagggccaggagaagctggggcccaggccgagaggggccgagggtcagtcgcccttctgccaggcacagaccccaagggc

SEQ ID NO: 689948 - DNA, 120 bp, Artificial Sequence
  ENSG00000188153_0 (sequence is synthesized)
aggggggaaggaagagtagctccttcttcttcttcttttttttttcttccactcttaaaaagcttctttctcttcacccaagcctcactgtccctctccggctctagctctctccatata

SEQ ID NO: 689949 - DNA, 120 bp, Artificial Sequence
  ENSG00000188153_1 (sequence is synthesized)
aaccctcaagattatgtcaattggttagagccagccgggaatttcgtgcgggtgctgaaggagctgcgggagccggagaagaatgaaactgcgtggagtcagcctggctgccggcttgtt

SEQ ID NO: 689950 - DNA, 120 bp, Artificial Sequence
  ENSG00000188153_2 (sequence is synthesized)
cttactggccctgagtctttgggggcagcctgcagaggctgcggcttgctatgggtgttctccaggatcaaagtgtgactgcagtggcataaaaggggaaaagggagagagagggtttcc

SEQ ID NO: 689951 - DNA, 120 bp, Artificial Sequence
  ENSG00000188153_3 (sequence is synthesized)
aggtttggaaggacacccaggattgcctggatttccaggtccagaagggcctccggggcctcggggacaaaagggtgatgatggaattccagggccaccaggaccaaaaggaatcagagg

SEQ ID NO: 689952 - DNA, 120 bp, Artificial Sequence
  ENSG00000188153_4 (sequence is synthesized)
tcctcctggacttcctggatttccagggacaccaggtcttcctggaatgccaggccacgatggggccccaggacctcaaggtattcccggatgcaatggaaccaagggagaacgtggatt

SEQ ID NO: 689953 - DNA, 120 bp, Artificial Sequence
  ENSG00000188153_5 (sequence is synthesized)
tccaggcagtcccggttttcctggtttacagggtcctccaggaccccctgggatcccaggtatgaagggtgaaccaggtagtataattatgtcatcactgccaggaccaaagggtaatcc

SEQ ID NO: 689954 - DNA, 120 bp, Artificial Sequence
  ENSG00000188153_6 (sequence is synthesized)
aggatatccaggtcctcctggaatacaaggcctacctggtcccactggtataccagggccaattggtcccccaggaccaccaggtttgatgggccctcctggtccaccaggacttccagg

SEQ ID NO: 689955 - DNA, 120 bp, Artificial Sequence
  ENSG00000188153_7 (sequence is synthesized)
acctaaggggaatatgggcttaaatttccagggacccaaaggtgaaaaaggtgagcaaggtcttcagggcccacctgggccacctgggcagatcagtgaacagaaaagaccaattgatgt

SEQ ID NO: 689956 - DNA, 120 bp, Artificial Sequence
  ENSG00000188153_8 (sequence is synthesized)
agagtttcagaaaggagatcagggacttcctggtgaccgagggcctcctggacctccagggatacgtggtcctccaggtcccccaggtggtgagaaaggtgagaagggtgagcaaggaga

SEQ ID NO: 689957 - DNA, 120 bp, Artificial Sequence
  ENSG00000188153_9 (sequence is synthesized)
gccaggcaaaagaggtaaaccaggcaaagatggagaaaatggccaaccaggaattcctggtttgcctggtgatcctggttaccctggtgaacccggaagggatggtgaaaagggccaaaa

SEQ ID NO: 689958 - DNA, 120 bp, Artificial Sequence
  ENSG00000188153_10 (sequence is synthesized)
aggtgacactggcccacctggacctcctggacttgtaattcctagacctgggactggtataactataggagaaaaaggaaacattgggttgcctgggttgcctggagaaaaaggagagcg

SEQ ID NO: 689959 - DNA, 120 bp, Artificial Sequence
  ENSG00000188153_11 (sequence is synthesized)
aggatttcctggaatacagggtccacctggccttcctggacctccaggggctgcagttatgggtcctcctggccctcctggatttcctggagaaaggggtcagaaaggtgatgaaggacc

SEQ ID NO: 689960 - DNA, 120 bp, Artificial Sequence
  ENSG00000188153_12 (sequence is synthesized)
acctggaatttccattcctggacctcctggacttgacggacagcctggggctcctgggcttccagggcctcctggccctgctggccctcacattcctcctagtgatgagatatgtgaacc

SEQ ID NO: 689961 - DNA, 120 bp, Artificial Sequence
  ENSG00000188153_13 (sequence is synthesized)
aggccctccaggccccccaggatctccaggtgataaaggactccaaggagaacaaggagtgaaaggtgacaaaggtgacacttgcttcaactgcattggaactggtatttcagggcctcc

SEQ ID NO: 689962 - DNA, 120 bp, Artificial Sequence
  ENSG00000188153_14 (sequence is synthesized)
aggtcaacctggtttgccaggtctcccaggtcctccaggatctcttggtttccctggacagaaaggggaaaaaggacaagctggtgcaactggtcccaaaggattaccaggcattccagg

SEQ ID NO: 689963 - DNA, 120 bp, Artificial Sequence
  ENSG00000188153_15 (sequence is synthesized)
agctccaggtgctccaggctttcctggatctaaaggtgaacctggtgatatcctcacttttccaggaatgaagggtgacaaaggagagttgggttcccctggagctccagggcttcctgg

SEQ ID NO: 689964 - DNA, 120 bp, Artificial Sequence
  ENSG00000188153_16 (sequence is synthesized)
tttacctggcactcctggacaggatggattgccagggcttcctggcccgaaaggagagcctggtggaattacttttaagggtgaaagaggtccccctgggaacccaggtttaccaggcct

SEQ ID NO: 689965 - DNA, 120 bp, Artificial Sequence
  ENSG00000188153_17 (sequence is synthesized)
cccagggaatatagggcctatgggtccccctggtttcggccctccaggcccagtaggtgaaaaaggcatacaaggtgtggcaggaaatccaggccagccaggaataccaggtcctaaagg

SEQ ID NO: 689966 - DNA, 120 bp, Artificial Sequence
  ENSG00000188153_18 (sequence is synthesized)
ggatccaggtcagactataacccagccggggaagcctggcttgcctggtaacccaggcagagatggtgatgtaggtcttccaggtgaccctggacttccagggcaaccaggcttgccagg

SEQ ID NO: 689967 - DNA, 120 bp, Artificial Sequence
  ENSG00000188153_19 (sequence is synthesized)
gatacctggtagcaaaggagaaccaggtatccctggaattgggcttcctggaccacctggtcccaaaggctttcctggaattccaggacctccaggagcacctgggacacctggaagaat

SEQ ID NO: 689968 - DNA, 120 bp, Artificial Sequence
  ENSG00000188153_20 (sequence is synthesized)
tggtctagaaggccctcctgggccacccggctttccaggaccaaagggtgaaccaggatttgcattacctgggccacctgggccaccaggacttccaggtttcaaaggagcacttggtcc

SEQ ID NO: 689969 - DNA, 120 bp, Artificial Sequence
  ENSG00000188153_21 (sequence is synthesized)
aaaaggtgatcgtggtttcccaggacctccgggtcctccaggacgcactggcttagatgggctccctggaccaaaaggtgatgttggaccaaatggacaacctggaccaatgggacctcc

SEQ ID NO: 689970 - DNA, 120 bp, Artificial Sequence
  ENSG00000188153_22 (sequence is synthesized)
tgggctgccaggaataggtgttcagggaccaccaggaccaccagggattcctgggccaataggtcaacctggtttacatggaataccaggagagaagggggatccaggacctcctggact

SEQ ID NO: 689971 - DNA, 120 bp, Artificial Sequence
  ENSG00000188153_23 (sequence is synthesized)
tgatgttccaggacccccaggtgaaagaggcagtccagggatccccggagcacctggtcctataggacctccaggatcaccagggcttccaggaaaagcaggtgcctctggatttccagg

SEQ ID NO: 689972 - DNA, 120 bp, Artificial Sequence
  ENSG00000188153_24 (sequence is synthesized)
taccaaaggtgaaatgggtatgatgggacctccaggcccaccaggacctttgggaattcctggcaggagtggtgtacctggtcttaaaggtgatgatggcttgcagggtcagccaggact

SEQ ID NO: 689973 - DNA, 120 bp, Artificial Sequence
  ENSG00000188153_25 (sequence is synthesized)
tcctggccctacaggagaaaaaggtagtaaaggagagcctggccttccaggccctcctggaccaatggatccaaatcttctgggctcaaaaggagagaagggggaacctggcttaccagg

SEQ ID NO: 689974 - DNA, 120 bp, Artificial Sequence
  ENSG00000188153_26 (sequence is synthesized)
agtggacaacctggattaccaggaccaccaggtcccaaaggtaaccctggtctccctggacagccaggtcttataggacctcctggacttaaaggaaccatcggtgatatgggttttcca

SEQ ID NO: 689975 - DNA, 120 bp, Artificial Sequence
  ENSG00000188153_27 (sequence is synthesized)
gggcctcagggtgtggaagggcctcctggaccttctggagttcctggacaacctggctccccaggattacctggacagaaaggcgacaaaggtgatcctggtatttcaagcattggtctt

SEQ ID NO: 689976 - DNA, 120 bp, Artificial Sequence
  ENSG00000188153_28 (sequence is synthesized)
ccaggtcttcctggtccaaagggtgagcctggtctgcctggatacccagggaaccctggtatcaaaggttctgtgggagatcctggtttgcccggattaccaggaacccctggagcaaaa

SEQ ID NO: 689977 - DNA, 120 bp, Artificial Sequence
  ENSG00000188153_29 (sequence is synthesized)
ggacaaccaggccttcctggattcccaggaaccccaggccctcctggaccaaaaggtattagtggccctcctgggaaccccggccttccaggagaacctggtcctgtaggtggtggaggt

SEQ ID NO: 689978 - DNA, 120 bp, Artificial Sequence
  ENSG00000188153_30 (sequence is synthesized)
catcctgggcaaccagggcctccaggcgaaaaaggcaaacccggtcaagatggtattcctggaccagctggacagaagggtgaaccaggtcaaccaggctttggaaacccaggaccccct

SEQ ID NO: 689979 - DNA, 120 bp, Artificial Sequence
  ENSG00000188153_31 (sequence is synthesized)
ggacttccaggactttctggccaaaagggtgatggaggattacctgggattccaggaaatcctggccttccaggtccaaagggcgaaccaggctttcacggtttccctggtgtgcagggt

SEQ ID NO: 689980 - DNA, 120 bp, Artificial Sequence
  ENSG00000188153_32 (sequence is synthesized)
cccccaggccctcctggttctccgggtccagctctggaaggacctaaaggcaaccctgggccccaaggtcctcctgggagaccaggtctaccaggtccagaaggtcctccaggtctccct

SEQ ID NO: 689981 - DNA, 120 bp, Artificial Sequence
  ENSG00000188153_33 (sequence is synthesized)
ggaaatggaggtattaaaggagagaagggaaatccaggccaacctgggctacctggcttgcctggtttgaaaggagatcaaggaccaccaggactccagggtaatcctggccggccgggt

SEQ ID NO: 689982 - DNA, 120 bp, Artificial Sequence
  ENSG00000188153_34 (sequence is synthesized)
ctcaatggaatgaaaggagatcctggtctccctggtgttccaggattcccaggcatgaaaggacccagtggagtacctggatcagctggccctgagggggaaccgggacttattggtcct

SEQ ID NO: 689983 - DNA, 120 bp, Artificial Sequence
  ENSG00000188153_35 (sequence is synthesized)
ccaggtcctcctggattacctggtccttcaggacagagtatcataattaaaggagatgctggtcctccaggaatccctggccagcctgggctaaagggtctaccaggaccccaaggacct

SEQ ID NO: 689984 - DNA, 120 bp, Artificial Sequence
  ENSG00000188153_36 (sequence is synthesized)
caaggcttaccaggtccaactggccctccaggagatcctggacgcaatggactccctggctttgatggtgcaggagggcgcaaaggagacccaggtctgccaggacagccaggtacccgt

SEQ ID NO: 689985 - DNA, 120 bp, Artificial Sequence
  ENSG00000188153_37 (sequence is synthesized)
ggtttggatggtccccctggtccagatggattgcaaggtcccccaggtccccctggaacctcctctgttgcacatggatttcttattacacgccacagccagacaacggatgcaccacaa

SEQ ID NO: 689986 - DNA, 120 bp, Artificial Sequence
  ENSG00000188153_38 (sequence is synthesized)
tgcccacagggaacacttcaggtctatgaaggcttttctctcctgtatgtacaaggaaataaaagagcccacggtcaagacttggggacggctggcagctgccttcgtcgctttagtacc

SEQ ID NO: 689987 - DNA, 120 bp, Artificial Sequence
  ENSG00000188153_39 (sequence is synthesized)
atgcctttcatgttctgcaacatcaataatgtttgcaactttgcttcaagaaatgactattcttactggctctctaccccagagcccatgccaatgagcatgcaacccctaaagggccag

SEQ ID NO: 689988 - DNA, 120 bp, Artificial Sequence
  ENSG00000188153_40 (sequence is synthesized)
agcatccagccattcattagtcgatgtgcagtatgtgaagctccagctgtggtgatcgcagttcacagtcagacgatccagattccccattgtcctcagggatgggattctctgtggatt

SEQ ID NO: 689989 - DNA, 120 bp, Artificial Sequence
  ENSG00000188153_41 (sequence is synthesized)
ggttattccttcatgatgcatacaagtgcaggggcagaaggctcaggtcaagccctagcctcccctggttcctgcttggaagagtttcgttcagctcccttcatcgaatgtcatgggagg

SEQ ID NO: 689990 - DNA, 120 bp, Artificial Sequence
  ENSG00000188153_42 (sequence is synthesized)
ggtacctgtaactactatgccaactcctacagcttttggctggcaactgtagatgtgtcagacatgttcagtaaacctcagtcagaaacgctgaaagcaggagacttgaggacacgaatt

SEQ ID NO: 689991 - DNA, 120 bp, Artificial Sequence
  ENSG00000188153_43 (sequence is synthesized)
agccgatgtcaagtgtgcatgaagaggacataacattttgaagaattccttttgtgttttaaaatgtgatatatatatatataaaattcctaggatgcagtgtctcattgtccccaactt

SEQ ID NO: 689992 - DNA, 120 bp, Artificial Sequence
  ENSG00000188153_44 (sequence is synthesized)
tactactgctgccgtcaatggtgctactatatatgatcaagataacatgctgactagtaaccatgaagattcagatgtacctcagcaatgcgccagagcaaagtctctattatttttcta

SEQ ID NO: 689993 - DNA, 120 bp, Artificial Sequence
  ENSG00000188153_45 (sequence is synthesized)
ctaaagaaataaggaagtgaatttactttttgggtccagaatgactttctccaagaattataagatgaaaattatatattttgcccagttactaaaatggtacattaaaaattcaattaa

SEQ ID NO: 689994 - DNA, 120 bp, Artificial Sequence
  ENSG00000188153_46 (sequence is synthesized)
gagaagagtcacattgagtaaaataaaagactgcagtttgtgggaagaattatttttcacggtgctactaatcctgctgtatcccgggtttttaatataaaggtgttaagcttattttgc

SEQ ID NO: 689995 - DNA, 120 bp, Artificial Sequence
  ENSG00000188153_47 (sequence is synthesized)
tttgtaagtaaagaatgtgtatattgtgaacagccttttagctcaaaatgttgagtcatttacatatgacatagcatgaatcactctttacagaaaatgtaggaaaccctagaatacaga

SEQ ID NO: 689996 - DNA, 120 bp, Artificial Sequence
  ENSG00000188153_48 (sequence is synthesized)
cagcaatattttatattcatgtttatcaaagtgagaggacttatattcctacatcaagttactactgagagtaaatttattttgagttttatcccgtaagttctgttttgatttttttta

SEQ ID NO: 689997 - DNA, 120 bp, Artificial Sequence
  ENSG00000188153_49 (sequence is synthesized)
aaaaacaaacccttttagtcactttaatcagaattttaaatgttcatgttacataccaaattataatatctaatggagcaatttgtcttttgctatattctccaagattatctcttaaga

SEQ ID NO: 689998 - DNA, 120 bp, Artificial Sequence
  ENSG00000188153_50 (sequence is synthesized)
ccatatgccccctgttttaatgtttcttacatcttgtttttactcatttctgactggacaaagttcttccaaacaattctgagaaacaaaaacacacacgcagaattaacaattcttttc

SEQ ID NO: 689999 - DNA, 120 bp, Artificial Sequence
  ENSG00000188153_51 (sequence is synthesized)
cctgtgcttcttatgtaagaatcctcctgtggcctctgcttgtacagaactgggaaacaacacttggttagtctcttttaagttacaaaaagccaattgatgtttcttattctttttaaa

SEQ ID NO: 690000 - DNA, 120 bp, Artificial Sequence
  ENSG00000188153_52 (sequence is synthesized)
ttttaaatattttgttataaatactcacaggataccttatttccctagctatcatctcctgacttaatgttttttaaacccaccaatataaatttaattaaagatatatgttgtaaggat

SEQ ID NO: 690001 - DNA, 120 bp, Artificial Sequence
  ENSG00000188153_53 (sequence is synthesized)
agtgttaacatgatgtcttcagtagagttttctattttctggattaacgaagaccaacagcttatcctttagaataagctctatttgaaaaagtttggctctctatacttctgtatggtt

SEQ ID NO: 690002 - DNA, 120 bp, Artificial Sequence
  ENSG00000188153_54 (sequence is synthesized)
ctgtttgcatactgattatgctgtaagtataagaaatgctggcaaagaacattattgttttaacttgtactataatgtgaaccacttctaactcataatcttattttgtactgtgtgatg

SEQ ID NO: 690003 - DNA, 120 bp, Artificial Sequence
  ENSG00000188153_55 (sequence is synthesized)
tctttcctctccaattgctgctaggctgctggttttcaccttgattgtgaggagaggtggtgtgaatagagcaagttaaaatgccacaaagctctgagaggtggtgggaatagagcaagt

SEQ ID NO: 690004 - DNA, 120 bp, Artificial Sequence
  ENSG00000188153_56 (sequence is synthesized)
taaaatgccataaatctctgagaggtggtaggaatagagcaagttaaaatgccacaaagctctgagttctcaccaagattcagctttttttttttttttttttctgagaaaacactcctt

SEQ ID NO: 690005 - DNA, 120 bp, Artificial Sequence
  ENSG00000188153_57 (sequence is synthesized)
gaattgctgcaagctttggttaagttctgaaagttaattctgactgaccatttttgccagtattctcattgcttctatggagaagacaatctttggagatttcctaacaccatcatttgt

SEQ ID NO: 690006 - DNA, 120 bp, Artificial Sequence
  ENSG00000188153_58 (sequence is synthesized)
attaaacaaactatagaatgacatagtatattctggataagagatttattccttttcttttctcttagatgataagaagatatgttttagggtttgtggccagtccaaaataaaaaggga

SEQ ID NO: 690007 - DNA, 120 bp, Artificial Sequence
  ENSG00000188153_59 (sequence is synthesized)
aaactttctggtttctttgtttttcttctatcttaatttctggatatacttcaataatctcaatgcctagatttttctggtcttgttagtccatccctttttagtgatggagttgttggc

SEQ ID NO: 690008 - DNA, 120 bp, Artificial Sequence
  ENSG00000188153_60 (sequence is synthesized)
ctttgtcctaatgttattattaactaatttgaaaagacttataaacaaagtgacagttaatgctaatgtagtagtattcttaactgcgtgtctgagatagtcctctgaatacagttttac

SEQ ID NO: 690009 - DNA, 120 bp, Artificial Sequence
  ENSG00000188153_61 (sequence is synthesized)
aattccctctacttctctcttcaatgtgaaaactttggtggtgtttctcaagtaatcaaatttagaatttgtttcagaatcattggactcaacaggaatttatttgacaattgtttagtt

SEQ ID NO: 690010 - DNA, 120 bp, Artificial Sequence
  ENSG00000188153_62 (sequence is synthesized)
ccatgtcaaaaagtagtaactccttaatcatgtagtcagaccacagacctaaaaagtattagaaaaggaattttggtactcagttttcatggaaatagtgaaagttcccagtgatataag

SEQ ID NO: 690011 - DNA, 120 bp, Artificial Sequence
  ENSG00000188153_63 (sequence is synthesized)
taatattatataaaaatactttattttgatcatctaattgatcaatgtcttataaagagataatcaagagaagtttctgtatgttcattccagtttaacaatgtaaagtttcttgaagtg

SEQ ID NO: 690012 - DNA, 120 bp, Artificial Sequence
  ENSG00000188153_64 (sequence is synthesized)
agaagtttctgtatgttcattccagtttaacaatgtaaagtttcttgaagtgaattttaattttctctgttatatttatattttaccagtgacattgaatatatgattttattaaaaaat

SEQ ID NO: 690013 - DNA, 120 bp, Artificial Sequence
  ENSG00000188153_65 (sequence is synthesized)
cgaggtagagagaccagttggattgaagggtattgctatagccctgatgtgagtaaattggaactcacagtggggtacatgtatcacattattaggctagataggatttgacagttgatt

SEQ ID NO: 690014 - DNA, 120 bp, Artificial Sequence
  ENSG00000188153_66 (sequence is synthesized)
agctatgggaagaaggtggtagctgagatttggagcatgagtaactaagaggagggtgataccattaatagaaatctcttagagttttgccattttgaaacctagtttaactcaatctct

SEQ ID NO: 690015 - DNA, 120 bp, Artificial Sequence
  ENSG00000188153_67 (sequence is synthesized)
taggaatgttggttattgccgtttttattctgatcatgacccaggatttcaataaccataaaggatgaattgctggaaattctcgttcctttgatagtaaatataaagattaaagctggt

SEQ ID NO: 690016 - DNA, 120 bp, Artificial Sequence
  ENSG00000188153_68 (sequence is synthesized)
gatagtaaatataaagattaaagctggttcagccttagtagcaaattcatggtgccctttttaatacattttcctgaatcctttgggaatttgggtgtatgtgtgtgtgtgtgtgtgtgt

SEQ ID NO: 690017 - DNA, 120 bp, Artificial Sequence
  ENSG00000188153_69 (sequence is synthesized)
tcttgggagtaaaagcttgtctaaatgtattaactattttgttaggtaaactgcaaaactggcctcagtaatatgtcaagaggtccactcatgttttttattaaagatatggaagtctca

SEQ ID NO: 690018 - DNA, 120 bp, Artificial Sequence
  ENSG00000188153_70 (sequence is synthesized)
gctatattcattctgttgctatcttacttgattttatagatttcagccacatctccaagtgcctgggtacctgcccagcattctggatatggtgtacttctccagatatagtcaaatgtt

SEQ ID NO: 690019 - DNA, 120 bp, Artificial Sequence
  ENSG00000188153_71 (sequence is synthesized)
tataaatgtcctttggaccaagaataatgagtagagattgagaaagcgtccgtttcttatattttccagtctttctgacattgttcttaccacagtttcagcattactaaatgtctcccc

SEQ ID NO: 690020 - DNA, 120 bp, Artificial Sequence
  ENSG00000188153_72 (sequence is synthesized)
tccaattgagtactttgacaacaagtagtatgtgcaatacaccaaaccaaactcttacggcaattgaggcattgactatagcaagtatgaatagacatttagggcataatggaatattaa

SEQ ID NO: 690021 - DNA, 120 bp, Artificial Sequence
  ENSG00000188153_73 (sequence is synthesized)
aaggccattgcactggttctgcagttttttgaaaaaagtttacagtttattatgtatactgggagacaatacttagcaaatgcaatcctcaaagtgcattttttcaccttttgtgatcat

SEQ ID NO: 690022 - DNA, 120 bp, Artificial Sequence
  ENSG00000188153_74 (sequence is synthesized)
tgaaagagacattaatcggcttccatactaagaaggcttccaatgaagcaggatggctacttctcacatgctcactctgtagattatgttccttctccttttcctttaccagatgtgcag

SEQ ID NO: 690023 - DNA, 120 bp, Artificial Sequence
  ENSG00000188153_75 (sequence is synthesized)
tatgtgaagctccagctgtggtgatcgcagttcacagtcagacgatccagattccccattgtcctcagggatgggattctctgtggattggttattccttcatgatggtattttacactc

SEQ ID NO: 690024 - DNA, 120 bp, Artificial Sequence
  ENSG00000188153_76 (sequence is synthesized)
ttccttgcatttgtcatcatagctgactgtccattccatctacatttcttcccaatatgaggaatccctgtcatttgcataataagaagcttaaacttcaaacagcttctatccaagcac

SEQ ID NO: 690025 - DNA, 120 bp, Artificial Sequence
  ENSG00000188153_77 (sequence is synthesized)
tgtgttccccctcacacattttttgtaacatattttcataatctgcctattacttttttttgactacccttggtgtggatactattgtcttacctctgggcctgttccttcactagattt

SEQ ID NO: 690026 - DNA, 120 bp, Artificial Sequence
  ENSG00000188153_78 (sequence is synthesized)
ctgtagatgtgtcagacatgttcaggtaaagtgcttatagctttaattcaggtccaaagcttccttcagagatgctagggaagaaagagacaatttatggatggtttatcctcaacaaat

SEQ ID NO: 690027 - DNA, 120 bp, Artificial Sequence
  ENSG00000188153_79 (sequence is synthesized)
acttgattattaatattaggtgagtttggtttgtgatagcttagtagtaatccttcaataatgaaacagagataaagaaaggttatgtgaccttcctaataagtcagcagctgttcaact

SEQ ID NO: 690028 - DNA, 120 bp, Artificial Sequence
  ENSG00000188153_80 (sequence is synthesized)
agattgagaccaccccaggaattgaagttacagtctgtcttttccctctcagtccagtggtctcctttcccaggatattttaaagattctcatttaagggtttgaatgagcaagacatac

SEQ ID NO: 690029 - DNA, 120 bp, Artificial Sequence
  ENSG00000188153_81 (sequence is synthesized)
gtaatgtatgtacctcaggatacttcattctgttgatttttttcagtttaaatttatttttatgtgttgcttttgggttatcactacttggtatttttcttatggtccttgttatctatc

SEQ ID NO: 690030 - DNA, 120 bp, Artificial Sequence
  ENSG00000188153_82 (sequence is synthesized)
ataacatcatcagttgcccagatttccctcatcctgtgaatattagaaaaatgtatgagagaaagagaaaaagatagaaaatgagagggaaacacaaatatacaaagataatagtggtgg

SEQ ID NO: 690031 - DNA, 120 bp, Artificial Sequence
  ENSG00000188153_83 (sequence is synthesized)
ggagaatcgttacaaaatatctatgaccactaatggctcttaaaccatactagtcactgcattagatcatattgctgaaaagtaaaccattaagtcaccaagagagctacttaacacaca

SEQ ID NO: 690032 - DNA, 120 bp, Artificial Sequence
  ENSG00000188153_84 (sequence is synthesized)
aaaaatgtttagttataaatttgaaccagtaacagaattgaaataccagaaaatgtggatctgattgtcttatttcttatttcccagtaaacctcagtcagaaacgctgaaagcaggaga

SEQ ID NO: 690033 - DNA, 120 bp, Artificial Sequence
  ENSG00000188153_85 (sequence is synthesized)
ctggccctgagtctttgggggcagcctgcagaggctgcgatgagaaaactacaaattacagacgttgaatacattcccagaaatccagtcatgtaggcagtaacttgtgaagctggaaaa

SEQ ID NO: 690034 - DNA, 120 bp, Artificial Sequence
  ENSG00000188153_86 (sequence is synthesized)
tttgaatccaggcagtttgactctagaatctttgcccttaatgactgtcctatactgcctactttgtatgtggtctatagagatttactggtgtgtaaagtatttggatctctgccactt

SEQ ID NO: 690035 - DNA, 120 bp, Artificial Sequence
  ENSG00000188153_87 (sequence is synthesized)
atagtgtcttcaggtcttggctattacataaagtatgctctgactataattttctatatattgaactatcaataatttcattaaacatgtataattagctgggatattgcattgggttaa

SEQ ID NO: 690036 - DNA, 120 bp, Artificial Sequence
  ENSG00000188153_88 (sequence is synthesized)
tactggccctgagtctttgggggcagcctgcagaggctgcggaagaaacgttatttgcaacaccggtaactcaagccttctgaagtccaacggagaggtttaagtgcttaaaaatagggc

SEQ ID NO: 690037 - DNA, 120 bp, Artificial Sequence
  ENSG00000188153_89 (sequence is synthesized)
tgcttgcttccctgcagctagctcctccgggggcaagagcaaagtcagaagtgggggacgctaattaaaggctcactaggctgtgacaggatctcactctatcacccaggctggagtgca

SEQ ID NO: 690038 - DNA, 120 bp, Artificial Sequence
  ENSG00000188153_90 (sequence is synthesized)
cttaaccttcagggctgaatcaatccttccacttcagcctcctatgtagctgggattacaagtgcacgaccccatgccccgctaatttttgcagagacagggtctcactatgtttcccag

SEQ ID NO: 690039 - DNA, 120 bp, Artificial Sequence
  ENSG00000188153_91 (sequence is synthesized)
tgctgggattacaggcctgagccattgcgtcccttcctatcctccctctcttgtaataaatgttttaggtagtttttaaagttttcttttacttggctttcttaaaggagaacttcagtt

SEQ ID NO: 690040 - DNA, 120 bp, Artificial Sequence
  ENSG00000188153_92 (sequence is synthesized)
ctttcttaaaggagaacttcagttgcttttttccagtaaaaaattccagagactgccagaagaagcctaatgccagtaataattctgtcattgaacataatggagaggagtcatcttaat

SEQ ID NO: 690041 - DNA, 120 bp, Artificial Sequence
  ENSG00000188153_93 (sequence is synthesized)
ttgtatgcactcttttttatatcaagtgtaacacatattcttcttgtccttccctccaagtgggttacaaacagcttttctctttcactttaccaacattaaaaagagtgattttaagaa

SEQ ID NO: 690042 - DNA, 120 bp, Artificial Sequence
  ENSG00000188153_94 (sequence is synthesized)
aagtggtgataatttggtttatatacagatgcatggatatgaactttcagagtattcttttattgaaatgaattttaacttgaaagtatttagtgtaatgctttttagtttcttgatatt

SEQ ID NO: 690043 - DNA, 120 bp, Artificial Sequence
  ENSG00000188153_95 (sequence is synthesized)
tctaacagttttgatatttttcctttttgttaatgatgacattgggccttggtgaactttgatccctatccaggtcctacaggttttcaaggtctaccaggtccagaaggtcctccaggt

SEQ ID NO: 690044 - DNA, 120 bp, Artificial Sequence
  ENSG00000188155_0 (sequence is synthesized)
ctccaccagttcaaccccagcatggccgcgtccaccatgtccgtctgctccagcgacctgagctacggcagccgcgtctgccttcctggttcctgtgactcttgctccgactcctggcag

SEQ ID NO: 690045 - DNA, 120 bp, Artificial Sequence
  ENSG00000188155_1 (sequence is synthesized)
gtggacgactgcccagagagctgctgtgagcccccctgctgcgccccggccccctgcctgagcctggtctgcaccccagtgagccgtgtgtccagcccctgctgcccagtgacctgtgag

SEQ ID NO: 690046 - DNA, 120 bp, Artificial Sequence
  ENSG00000188155_2 (sequence is synthesized)
cccagcccctgccaatcaggctgcaccagctcctgcacgccctcgtgctgccagcagtctagctgccagctggcttgctgtgcctcctccccctgccagcaggcctgctgcgtgcccgtc

SEQ ID NO: 690047 - DNA, 120 bp, Artificial Sequence
  ENSG00000188155_3 (sequence is synthesized)
tgctgcaagactgtctgctgcaagcctgtgtgctgtgtgtccgtctgctgtggggattcttcatgctgccagcagtctagctgccagtcagcttgctgcacctcctccccctgccagcag

SEQ ID NO: 690048 - DNA, 120 bp, Artificial Sequence
  ENSG00000188155_4 (sequence is synthesized)
gcctgctgtgtgcccgtctgctgcaagcctgtctgctctgggatttcctcttcgtgctgccagcagtctagctgtgtgagctgtgtgtccagcccctgctgccaggcggtctgtgagccc

SEQ ID NO: 690049 - DNA, 120 bp, Artificial Sequence
  ENSG00000188155_5 (sequence is synthesized)
ctcatgctgccagcagtctagctgccagccaacttgctgcacctcctccccctgccagcaggcctgctgcgtgcccgtctgctgcgtgcctgtgtgctgtgtgcccacctgctctgagga

SEQ ID NO: 690050 - DNA, 120 bp, Artificial Sequence
  ENSG00000188155_6 (sequence is synthesized)
ttcctcttcatgctgccagcagtctagctgccagccagcttgctgcacctcctccccctgccagcacgcctgctgtgtgcccgtctgctctggggcttccacatcatgctgccagcagtc

SEQ ID NO: 690051 - DNA, 120 bp, Artificial Sequence
  ENSG00000188155_7 (sequence is synthesized)
tagctgccagccggcttgctgcaccgcctcctgctgcagatcctcctcctccgtgtccctcctctgccaccctgtgtgcaagtccacctgctgcgtgcccgtcccctcctgtggtgcctc

SEQ ID NO: 690052 - DNA, 120 bp, Artificial Sequence
  ENSG00000188155_8 (sequence is synthesized)
tgcctcctcctgccagcccagctgctgccgcacggcctcctgtgtttccctcctctgccgccccatgtgctcccgccctgcctgctacagcctctgctctggccagaagtccagctgctg

SEQ ID NO: 690053 - DNA, 120 bp, Artificial Sequence
  ENSG00000188155_9 (sequence is synthesized)
acagccctggatgtgatccggagtcccttcccaccaggggctgacctcccagctgccccagcaagctctgccctctctggctttgacaccctcagaagatggggcaggctctttgtctta

SEQ ID NO: 690054 - DNA, 80 bp, Artificial Sequence
  ENSG00000188157_0 (sequence is synthesized)
tctcgcctgcgccatggccggccggtcccacccgggcccgctgcggccgctgctgccgctccttgtggtggccgcgtgcg

SEQ ID NO: 690055 - DNA, 120 bp, Artificial Sequence
  ENSG00000188157_1 (sequence is synthesized)
tcctgcccggagccggcgggacatgcccggagcgcgcgctggagcggcgcgaggaggaggcgaacgtggtgctcaccgggacggtggaggagatcctcaacgtggacccggtgcagcaca

SEQ ID NO: 690056 - DNA, 120 bp, Artificial Sequence
  ENSG00000188157_2 (sequence is synthesized)
cgtactcctgcaaggttcgggtctggcggtacttgaagggcaaagacctggtggcccgggagagcctgctggacggcggcaacaaggtggtgatcagcggctttggagaccccctcatct

SEQ ID NO: 690057 - DNA, 120 bp, Artificial Sequence
  ENSG00000188157_3 (sequence is synthesized)
gtgacaaccaggtgtccactggggacaccaggatcttctttgtgaaccctgcacccccatacctgtggccagcccacaagaacgagctgatgctcaactccagcctcatgcggatcaccc

SEQ ID NO: 690058 - DNA, 120 bp, Artificial Sequence
  ENSG00000188157_4 (sequence is synthesized)
tgcggaacctggaggaggtggagttctgtgtggaagataaacccgggacccacttcactccagtgcctccgacgcctcctgatgcgtgccggggaatgctgtgcggcttcggcgccgtgt

SEQ ID NO: 690059 - DNA, 120 bp, Artificial Sequence
  ENSG00000188157_5 (sequence is synthesized)
gcgagcccaacgcggaggggccgggccgggcgtcctgcgtctgcaagaagagcccgtgccccagcgtggtggcgcctgtgtgtgggtcggacgcctccacctacagcaacgaatgcgagc

SEQ ID NO: 690060 - DNA, 120 bp, Artificial Sequence
  ENSG00000188157_6 (sequence is synthesized)
tgcagcgggcgcagtgcagccagcagcgccgcatccgcctgctcagccgcgggccgtgcggctcgcgggacccctgctccaacgtgacctgcagcttcggcagcacctgtgcgcgctcgg

SEQ ID NO: 690061 - DNA, 120 bp, Artificial Sequence
  ENSG00000188157_7 (sequence is synthesized)
cagcacctgtgcgcgctcggccgacgggctgacggcctcgtgcctgtgccccgcgacctgccgtggcgcccccgaggggaccgtctgcggcagcgacggcgccgactaccccggcgagtg

SEQ ID NO: 690062 - DNA, 120 bp, Artificial Sequence
  ENSG00000188157_8 (sequence is synthesized)
gcgcccgccaggagaatgtcttcaagaagttcgacggcccttgtgacccctgtcagggcgccctccctgacccgagccgcagctgccgtgtgaacccgcgcacgcggcgccctgagatgc

SEQ ID NO: 690063 - DNA, 120 bp, Artificial Sequence
  ENSG00000188157_9 (sequence is synthesized)
tcctacggcccgagagctgccctgcccggcaggcgccagtgtgtggggacgacggagtcacctacgaaaacgactgtgtcatgggccgatcgggggccgcccggggtctcctcctgcaga

SEQ ID NO: 690064 - DNA, 120 bp, Artificial Sequence
  ENSG00000188157_10 (sequence is synthesized)
aagtgcgctccggccagtgccagggtcgagaccagtgcccggagccctgccggttcaatgccgtgtgcctgtcccgccgtggccgtccccgctgctcctgcgaccgcgtcacctgtgacg

SEQ ID NO: 690065 - DNA, 120 bp, Artificial Sequence
  ENSG00000188157_11 (sequence is synthesized)
gggcctacaggcccgtgtgtgcccaggacgggcgcacgtatgacagtgattgctggcggcagcaggctgagtgccggcagcagcgtgccatccccagcaagcaccagggcccgtgtgacc

SEQ ID NO: 690066 - DNA, 120 bp, Artificial Sequence
  ENSG00000188157_12 (sequence is synthesized)
aggccccgtccccatgcctcggggtgcagtgtgcatttggggcgacgtgtgctgtgaagaacgggcaggcagcgtgtgaatgcctgcaggcgtgctcgagcctctacgatcctgtgtgcg

SEQ ID NO: 690067 - DNA, 120 bp, Artificial Sequence
  ENSG00000188157_13 (sequence is synthesized)
gcagcgacggcgtcacatacggcagcgcgtgcgagctggaggccacggcctgtaccctcgggcgggagatccaggtggcgcgcaaaggaccctgtgaccgctgcgggcagtgccgctttg

SEQ ID NO: 690068 - DNA, 120 bp, Artificial Sequence
  ENSG00000188157_14 (sequence is synthesized)
gagccctgtgcgaggccgagaccgggcgctgcgtgtgcccctctgaatgcgtggctttggcccagcccgtgtgtggctccgacgggcacacgtaccccagcgagtgcatgctgcacgtgc

SEQ ID NO: 690069 - DNA, 120 bp, Artificial Sequence
  ENSG00000188157_15 (sequence is synthesized)
acgcctgcacacaccagatcagcctgcacgtggcctcagctggaccctgtgagacctgtggagatgccgtgtgtgcttttggggctgtgtgctccgcagggcagtgtgtgtgtccccggt

SEQ ID NO: 690070 - DNA, 120 bp, Artificial Sequence
  ENSG00000188157_16 (sequence is synthesized)
gtgagcaccccccgcccggccccgtgtgtggcagcgacggtgtcacctacggcagtgcctgcgagctacgggaagccgcctgcctccagcagacacagatcgaggaggcccgggcagggc

SEQ ID NO: 690071 - DNA, 120 bp, Artificial Sequence
  ENSG00000188157_17 (sequence is synthesized)
cgtgcgagcaggccgagtgcggttccggaggctctggctctggggaggacggtgactgtgagcaggagctgtgccggcagcgcggtggcatctgggacgaggactcggaggacgggccgt

SEQ ID NO: 690072 - DNA, 120 bp, Artificial Sequence
  ENSG00000188157_18 (sequence is synthesized)
gtgtctgtgacttcagctgccagagtgtcccaggcagcccggtgtgcggctcagatggggtcacctacagcaccgagtgtgagctgaagaaggccaggtgtgagtcacagcgagggctct

SEQ ID NO: 690073 - DNA, 120 bp, Artificial Sequence
  ENSG00000188157_19 (sequence is synthesized)
acgtagcggcccagggagcctgccgaggccccaccttcgccccgctgccgcctgtggcccccttacactgtgcccagacgccctacggctgctgccaggacaatatcaccgcagcccggg

SEQ ID NO: 690074 - DNA, 120 bp, Artificial Sequence
  ENSG00000188157_20 (sequence is synthesized)
gcgtgggcctggctggctgccccagtgcctgccagtgcaacccccatggctcttacggcggcacctgtgacccagccacaggccagtgctcctgccgcccaggtgtggggggcctcaggt

SEQ ID NO: 690075 - DNA, 120 bp, Artificial Sequence
  ENSG00000188157_21 (sequence is synthesized)
gtgaccgctgtgagcctggcttctggaactttcgaggcatcgtcaccgatggccggagtggctgtacaccctgcagctgtgatccccaaggcgccgtgcgggatgactgtgagcagatga

SEQ ID NO: 690076 - DNA, 120 bp, Artificial Sequence
  ENSG00000188157_22 (sequence is synthesized)
cggggctgtgctcgtgtaagcccggggtggctggacccaagtgtgggcagtgtccagacggccgtgccctgggccccgcgggctgtgaagctgacgcttctgcgcctgcgacctgtgcgg

SEQ ID NO: 690077 - DNA, 120 bp, Artificial Sequence
  ENSG00000188157_23 (sequence is synthesized)
agatgcgctgtgagttcggtgcgcggtgcgtggaggagtctggctcagcccactgtgtctgcccgatgctcacctgtccagaggccaacgctaccaaggtctgtgggtcagatggagtca

SEQ ID NO: 690078 - DNA, 120 bp, Artificial Sequence
  ENSG00000188157_24 (sequence is synthesized)
catacggcaacgagtgtcagctgaagaccatcgcctgccgccagggcctgcaaatctctatccagagcctgggcccgtgccaggaggctgttgctcccagcactcacccgacatctgcct

SEQ ID NO: 690079 - DNA, 120 bp, Artificial Sequence
  ENSG00000188157_25 (sequence is synthesized)
ccgtgactgtgaccaccccagggctcctcctgagccaggcactgccggccccccccggcgccctccccctggctcccagcagtaccgcacacagccagaccacccctccgccctcatcac

SEQ ID NO: 690080 - DNA, 120 bp, Artificial Sequence
  ENSG00000188157_26 (sequence is synthesized)
gacctcggaccactgccagcgtccccaggaccaccgtgtggcccgtgctgacggtgccccccacggcaccctcccctgcacccagcctggtggcgtccgcctttggtgaatctggcagca

SEQ ID NO: 690081 - DNA, 120 bp, Artificial Sequence
  ENSG00000188157_27 (sequence is synthesized)
ctgatggaagcagcgatgaggaactgagcggggaccaggaggccagtgggggtggctctggggggctcgagcccttggagggcagcagcgtggccacccctgggccacctgtcgagaggg

SEQ ID NO: 690082 - DNA, 120 bp, Artificial Sequence
  ENSG00000188157_28 (sequence is synthesized)
cttcctgctacaactccgcgttgggctgctgctctgatgggaagacgccctcgctggacgcagagggctccaactgccccgccaccaaggtgttccagggcgtcctggagctggagggcg

SEQ ID NO: 690083 - DNA, 120 bp, Artificial Sequence
  ENSG00000188157_29 (sequence is synthesized)
tcgagggccaggagctgttctacacgcccgagatggctgaccccaagtcagaactgttcggggagacagccaggagcattgagagcaccctggacgacctcttccggaattcagacgtca

SEQ ID NO: 690084 - DNA, 120 bp, Artificial Sequence
  ENSG00000188157_30 (sequence is synthesized)
attttcggagtgtccgcttgcgggacctggggcccggcaaatccgtccgcgccattgtggatgtgcactttgaccccaccacagccttcagggcacccgacgtggcccgggccctgctcc

SEQ ID NO: 690085 - DNA, 120 bp, Artificial Sequence
  ENSG00000188157_31 (sequence is synthesized)
ggcagatccaggtgtccaggcgccggtccttgggggtgaggcggccgctgcaggagcacgtgcgatttatggactttgactggtttcctgcgtttatcacgggggccacgtcaggagcca

SEQ ID NO: 690086 - DNA, 120 bp, Artificial Sequence
  ENSG00000188157_32 (sequence is synthesized)
ttgctgcgggagccacggccagagccaccactgcatcgcgcctgccgtcctctgctgtgacccctcgggccccgcaccccagtcacacaagccagcccgttgccaagaccacggcagccc

SEQ ID NO: 690087 - DNA, 120 bp, Artificial Sequence
  ENSG00000188157_33 (sequence is synthesized)
ccaccacacgtcggccccccaccactgcccccagccgtgtgcccggacgtcggcccccggccccccagcagcctccaaagccctgtgactcacagccctgcttccacggggggacctgcc

SEQ ID NO: 690088 - DNA, 120 bp, Artificial Sequence
  ENSG00000188157_34 (sequence is synthesized)
aggactgggcattgggcgggggcttcacctgcagctgcccggcaggcaggggaggcgccgtctgtgagaaggtgcttggcgcccctgtgccggccttcgagggccgctccttcctggcct

SEQ ID NO: 690089 - DNA, 120 bp, Artificial Sequence
  ENSG00000188157_35 (sequence is synthesized)
tccccactctccgcgcctaccacacgctgcgcctggcactggaattccgggcgctggagcctcaggggctgctgctgtacaatggcaacgcccggggcaaggacttcctggcattggcgc

SEQ ID NO: 690090 - DNA, 120 bp, Artificial Sequence
  ENSG00000188157_36 (sequence is synthesized)
tgctagatggccgcgtgcagctcaggtttgacacaggttcggggccggcggtgctgaccagtgccgtgccggtagagccgggccagtggcaccgcctggagctgtcccggcactggcgcc

SEQ ID NO: 690091 - DNA, 120 bp, Artificial Sequence
  ENSG00000188157_37 (sequence is synthesized)
ggggcaccctctcggtggatggtgagacccctgttctgggcgagagtcccagtggcaccgacggcctcaacctggacacagacctctttgtgggcggcgtacccgaggaccaggctgccg

SEQ ID NO: 690092 - DNA, 120 bp, Artificial Sequence
  ENSG00000188157_38 (sequence is synthesized)
tggcgctggagcggaccttcgtgggcgccggcctgagggggtgcatccgtttgctggacgtcaacaaccagcgcctggagcttggcattgggccgggggctgccacccgaggctctggcg

SEQ ID NO: 690093 - DNA, 120 bp, Artificial Sequence
  ENSG00000188157_39 (sequence is synthesized)
tgggcgagtgcggggaccacccctgcctgcccaacccctgccatggcggggccccatgccagaacctggaggctggaaggttccattgccagtgcccgcccggccgcgtcggaccaacct

SEQ ID NO: 690094 - DNA, 120 bp, Artificial Sequence
  ENSG00000188157_40 (sequence is synthesized)
gtgccgatgagaagagcccctgccagcccaacccctgccatggggcggcgccctgccgtgtgctgcccgagggtggtgctcagtgcgagtgccccctggggcgtgagggcaccttctgcc

SEQ ID NO: 690095 - DNA, 120 bp, Artificial Sequence
  ENSG00000188157_41 (sequence is synthesized)
agacagcctcggggcaggacggctctgggcccttcctggctgacttcaacggcttctcccacctggagctgagaggcctgcacacctttgcacgggacctgggggagaagatggcgctgg

SEQ ID NO: 690096 - DNA, 120 bp, Artificial Sequence
  ENSG00000188157_42 (sequence is synthesized)
aggtcgtgttcctggcacgaggccccagcggcctcctgctctacaacgggcagaagacggacggcaagggggacttcgtgtcgctggcactgcgggaccgccgcctggagttccgctacg

SEQ ID NO: 690097 - DNA, 120 bp, Artificial Sequence
  ENSG00000188157_43 (sequence is synthesized)
acctgggcaagggggcagcggtcatcaggagcagggagccagtcaccctgggagcctggaccagggtctcactggagcgaaacggccgcaagggtgccctgcgtgtgggcgacggccccc

SEQ ID NO: 690098 - DNA, 120 bp, Artificial Sequence
  ENSG00000188157_44 (sequence is synthesized)
gtgtgttgggggagtccccggttccgcacaccgtcctcaacctgaaggagccgctctacgtagggggcgctcccgacttcagcaagctggcccgtgctgctgccgtgtcctctggcttcg

SEQ ID NO: 690099 - DNA, 120 bp, Artificial Sequence
  ENSG00000188157_45 (sequence is synthesized)
acggtgccatccagctggtctccctcggaggccgccagctgctgaccccggagcacgtgctgcggcaggtggacgtcacgtcctttgcaggtcacccctgcacccgggcctcaggccacc

SEQ ID NO: 690100 - DNA, 120 bp, Artificial Sequence
  ENSG00000188157_46 (sequence is synthesized)
cctgcctcaatggggcctcctgcgtcccgagggaggctgcctatgtgtgcctgtgtcccgggggattctcaggaccgcactgcgagaaggggctggtggagaagtcagcgggggacgtgg

SEQ ID NO: 690101 - DNA, 120 bp, Artificial Sequence
  ENSG00000188157_47 (sequence is synthesized)
ataccttggcctttgacgggcggacctttgtcgagtacctcaacgctgtgaccgagagcgagaaggcactgcagagcaaccactttgaactgagcctgcgcactgaggccacgcaggggc

SEQ ID NO: 690102 - DNA, 120 bp, Artificial Sequence
  ENSG00000188157_48 (sequence is synthesized)
tggtgctctggagtggcaaggccacggagcgggcagactatgtggcactggccattgtggacgggcacctgcaactgagctacaacctgggctcccagcccgtggtgctgcgttccaccg

SEQ ID NO: 690103 - DNA, 120 bp, Artificial Sequence
  ENSG00000188157_49 (sequence is synthesized)
tgcccgtcaacaccaaccgctggttgcgggtcgtggcacatagggagcagagggaaggttccctgcaggtgggcaatgaggcccctgtgaccggctcctccccgctgggcgccacgcagc

SEQ ID NO: 690104 - DNA, 120 bp, Artificial Sequence
  ENSG00000188157_50 (sequence is synthesized)
tggacactgatggagccctgtggcttgggggcctgccggagctgcccgtgggcccagcactgcccaaggcctacggcacaggctttgtgggctgcttgcgggacgtggtggtgggccggc

SEQ ID NO: 690105 - DNA, 120 bp, Artificial Sequence
  ENSG00000188157_51 (sequence is synthesized)
acccgctgcacctgctggaggacgccgtcaccaagccagagctgcggccctgccccaccccatgagctggcaccagagccccgcgcccgctgtaattattttctatttttgtaaacttgt

SEQ ID NO: 690106 - DNA, 120 bp, Artificial Sequence
  ENSG00000188157_52 (sequence is synthesized)
tgctttttgatatgattttcttgcctgagtgttggccggagggactgctggcccggcctcccttccgtccaggcagccgtgctgcagacagacctagtgccgagggatggacaggcgagg

SEQ ID NO: 690107 - DNA, 120 bp, Artificial Sequence
  ENSG00000188157_53 (sequence is synthesized)
tggcagcgtggagggctcggcgtggatggcagcctcaggacacacacccctgcctcaaggtgctgagcccccgccttgcactgcgcctgccccacggtgtccccgccgggaagcagcccc

SEQ ID NO: 690108 - DNA, 120 bp, Artificial Sequence
  ENSG00000188157_54 (sequence is synthesized)
ggctcctgaatcaccctcgctccgtcaggcgggactcgtgtcccagagaggaaggggctgctgaggtctgatggggcccttcctccgggtgaccccacagggcctttccaagcccccatt

SEQ ID NO: 690109 - DNA, 120 bp, Artificial Sequence
  ENSG00000188157_55 (sequence is synthesized)
tgagctgctccttcctgtgtgtgctctgggccctgcctcggcctcctgcgccaatactgtgacttccaaacaatgttactgctgggcacagctctgcgttgctcccgtgctgcctgcgcc

SEQ ID NO: 690110 - DNA, 120 bp, Artificial Sequence
  ENSG00000188157_56 (sequence is synthesized)
agccccaggctgctgaggagcagaggccagaccagggccgatctgggtgtcctgaccctcagctggccctgcccagccaccctggacgtgaccgtatccctctgccacaccccaggccct

SEQ ID NO: 690111 - DNA, 120 bp, Artificial Sequence
  ENSG00000188157_57 (sequence is synthesized)
gcgaggggctatcgagaggagctcactgtgggatggggttgacctctgccgcctgcctgggtatctgggcctggccatggctgtgttcttcatgtgttgattttatttgacccctggagt

SEQ ID NO: 690112 - DNA, 120 bp, Artificial Sequence
  ENSG00000188157_58 (sequence is synthesized)
ggtgggtctcatctttcccatctcgcctgagagcggctgagggctgcctcactgcaaatcctccccacagcgtcagtgaaagtcgtccttgtctcagaatgaccaggggccagccagtgt

SEQ ID NO: 690113 - DNA, 120 bp, Artificial Sequence
  ENSG00000188157_59 (sequence is synthesized)
ctgaccaaggtcaaggggcaggtgcagaggtggcagggatggctccgaagccagaaatgccttaaactgcaacgtcccgtcccttccccacccccatcccatccccacccccagccccag

SEQ ID NO: 690114 - DNA, 120 bp, Artificial Sequence
  ENSG00000188157_60 (sequence is synthesized)
cccagtcctcctaggagcaggacccgatgaagcgggcggcggtggggctgggtgccgtgttactaactctagtatgtttctgtgtcaatcgctgtgaaataaagtctgaaaactttaaaa

SEQ ID NO: 690115 - DNA, 120 bp, Artificial Sequence
  ENSG00000188157_61 (sequence is synthesized)
ctctcagtgggcctggccctcacccaaagctgcagaaacactttctgcgggagctggggagggaggggcagccggctacactgagagccggcagttgggggtagggcaggacctgcggtg

SEQ ID NO: 690116 - DNA, 120 bp, Artificial Sequence
  ENSG00000188157_62 (sequence is synthesized)
gactcttccagggaagggggtcctgcctgcacccctgtggctggggccccatctgacaggggtcaggccatgactatttggctggaggggcagagaaaagcaggggcctctgtctcagac

SEQ ID NO: 690117 - DNA, 120 bp, Artificial Sequence
  ENSG00000188157_63 (sequence is synthesized)
ctcagccagcccatggggtcagggctggacccttcagcagcctggatccctggggctagcggtgggggggggggggtgggcaggggtgcccctttccaggctgggcaaagggatgggaca

SEQ ID NO: 690118 - DNA, 120 bp, Artificial Sequence
  ENSG00000188157_64 (sequence is synthesized)
ccacctacccactggccttcctccccagatacccagagcagcaccagggcagcccggcttgggcggccccccaagtccttgcctactccctgccacagctggacgacctcttccggaatt

SEQ ID NO: 690119 - DNA, 120 bp, Artificial Sequence
  ENSG00000188157_65 (sequence is synthesized)
ttccaagcgaactggccaatgagatccccgtgtgagtagagctcggcgccccccgctccctctcactcccactcctccatccttcctggtggggagcagagtccggagcccccggggaac

SEQ ID NO: 690120 - DNA, 120 bp, Artificial Sequence
  ENSG00000188157_66 (sequence is synthesized)
tttccatcccttgtggcggaggatgggggtccggcgctatttggctgcaagaggccgtttcctgcctcagaagtgcagtcgcccctcccagggcacaggccgagggtcgccccacagcca

SEQ ID NO: 690121 - DNA, 120 bp, Artificial Sequence
  ENSG00000188157_67 (sequence is synthesized)
acccccaccactgaggctgtacacacctgtgcgcatatgcatgcatgtctgtgtccgtgtgcacttccgcgtgtgtgaacatgcagctgtgtctgtgcgtgtctatgtatatggagtgga

SEQ ID NO: 690122 - DNA, 120 bp, Artificial Sequence
  ENSG00000188157_68 (sequence is synthesized)
tgtgcaagtgtgtgtgaatatccagctgtgtgtgtgcatgggtccatgtatatgtgtgtgtgtatatgtgggggggacatgtagatatgcgtgtgtgactatgcggccgtgtgtgtgcat

SEQ ID NO: 690123 - DNA, 120 bp, Artificial Sequence
  ENSG00000188157_69 (sequence is synthesized)
ggctccatgtatgtgtgtgtatatgagggagacatgcaggtatgtgtccgtgtgtgtgtgtgtgcatatgggtccatgtatgtgtgtgtatatgagggagacacgcaggtgtgtgtctga

SEQ ID NO: 690124 - DNA, 120 bp, Artificial Sequence
  ENSG00000188157_70 (sequence is synthesized)
gtgtgtgcgcacatgggtccatgtatgtgtgtgtataggtgagggagacatgcatgtgtgtgtccgtgtgtgtgcatgggtccatgtgtgtatagtgtgtacacatgggtccatgtatgt

SEQ ID NO: 690125 - DNA, 120 bp, Artificial Sequence
  ENSG00000188157_71 (sequence is synthesized)
gtgtgtatatgagggagacacgcaggtgtgtgtccgagtgtgtgtgcatgggtccatgtgtgtatagtgtgtgcacatgggtccatgtatgtgtgtgtatatgagggagacacgcaggtg

SEQ ID NO: 690126 - DNA, 120 bp, Artificial Sequence
  ENSG00000188157_72 (sequence is synthesized)
tgtgtccgagtgtgtgtccatgggtccatgtatgtgtgtgtatatgtgggggagacaggtgtgtgtccgagtgtgtgcatgggtccgtgtatatgcgtgtatatatggggggatatgtag

SEQ ID NO: 690127 - DNA, 120 bp, Artificial Sequence
  ENSG00000188157_73 (sequence is synthesized)
atgtgtgtgtgtatgaacaggtgtaagtggggagcactcaggtgtgtctgtgtgtgttcgtgtacacgtgtgtatgtgtgtgaacatggaggggtgtgtgtgtccgtgtgtaggtttgcg

SEQ ID NO: 690128 - DNA, 120 bp, Artificial Sequence
  ENSG00000188157_74 (sequence is synthesized)
tgcatgcacacatgcatgtgtgtactggggcatccaagcccctggtctccactccataccaccctacgcctacctccttgatctctgcgcccagccttggctgtgctcccctgctgtctg

SEQ ID NO: 690129 - DNA, 120 bp, Artificial Sequence
  ENSG00000188157_75 (sequence is synthesized)
cacgtgggtgtctgcacgtgggtgtctgcatgtgggtgtctgtgccctcaagtgtctcgtgtctgcacgtgggtgtctgcaccctcacgtgtctcgtgtccgcacaagcatgtgtaggtg

SEQ ID NO: 690130 - DNA, 120 bp, Artificial Sequence
  ENSG00000188157_76 (sequence is synthesized)
tccctgctgggctctttggtgggcggccagtgatcctcgaggtcacgcatgtcttctgtgggtgcctgctccttgcaccccacagtgttgagatgggtttgcattggccccgcctgtccc

SEQ ID NO: 690131 - DNA, 120 bp, Artificial Sequence
  ENSG00000188157_77 (sequence is synthesized)
ctgctcacccgcctccctctcttcctgcttctaagccccgaaactctggattccggggcccttcacaggtgagcacgtggcagcagtgcctgcagacccctggctggcccatctgtcctc

SEQ ID NO: 690132 - DNA, 120 bp, Artificial Sequence
  ENSG00000188157_78 (sequence is synthesized)
ccgcccgtctctctgatctctctctgccaggctgcccctgtctccatccctcttctccctcccactgtcggtgtctgcccaccagccacccctgggtcccgtcacagcccttgtggcctc

SEQ ID NO: 690133 - DNA, 120 bp, Artificial Sequence
  ENSG00000188157_79 (sequence is synthesized)
tgcaaatctctatccagagcctgggcccgtgccagggtgaggcctgacggccactgccccagaactgaccaggaaggcctgacgctgccctaaatccagccccacccgccctgagccacc

SEQ ID NO: 690134 - DNA, 120 bp, Artificial Sequence
  ENSG00000188157_80 (sequence is synthesized)
ctcatgaccatctgactaacatccaccttcccttgcacccttgtggcttgctgctggggcctgtgcctgggccagcctggatgccaggcagatgccaggcagggcctcactgtacctccc

SEQ ID NO: 690135 - DNA, 80 bp, Artificial Sequence
  ENSG00000188157_81 (sequence is synthesized)
tgcccgctcctatcgccgcttccgcctctgccggggacggggacagcagaccctcggcgcccggcccccgcgcacctgcc

SEQ ID NO: 690136 - DNA, 120 bp, Artificial Sequence
  ENSG00000188157_82 (sequence is synthesized)
cgggaagaccgagcgctggcggccagcccggggaggctgtgggcagcaggggtggctgcgggctcccagtccctcctccgcctacctcggagcccacatttgggatttctactccgggag

SEQ ID NO: 690137 - DNA, 120 bp, Artificial Sequence
  ENSG00000188157_83 (sequence is synthesized)
aattctgccctcctcccacgatgagcctggaggactggagccgggacctggcacccccagggctgtgactgggtgaactctgagggcacagctgctgtccgccgccccaggggtcccagg

SEQ ID NO: 690138 - DNA, 120 bp, Artificial Sequence
  ENSG00000188157_84 (sequence is synthesized)
atggggcgagcagccctgaagaggcccaagggcaccccgtgaggagcccccacgctctgagagtggggcgcagagccggagccccgggccatgcctccgctgccgctggcgcgggacacc

SEQ ID NO: 690139 - DNA, 120 bp, Artificial Sequence
  ENSG00000188157_85 (sequence is synthesized)
cggcagccgcctggcgcctccctgctggtgcgaggcttcatggtgccctgcaacgcctgcctgatcctgctggccaccgccacgctcggcttcgcggtgctgctgttcctcaacaactat

SEQ ID NO: 690140 - DNA, 120 bp, Artificial Sequence
  ENSG00000188158_0 (sequence is synthesized)
ggtggcgacggcgagcacagaaacgatggagttgagccagtcgaccctggttggaagcaagtgagaagagaccaggcgcacccctaaatttctgtgcggagcgcttgtcatcctccccag

SEQ ID NO: 690141 - DNA, 120 bp, Artificial Sequence
  ENSG00000188158_1 (sequence is synthesized)
ggaacggtgcacccaaaggaggactggctggactgatttgctagggagagggcggggaagaggaggcaaggtgagcagagaagccccctgcgtatccggactgccagatcgcgcttttgc

SEQ ID NO: 690142 - DNA, 120 bp, Artificial Sequence
  ENSG00000188158_2 (sequence is synthesized)
cggactcctgccccctccctgctcaggtgggcgcgcccggtctccagctcacaggggcgcttggaggagaccagaaagtcgccgcctggctgcgcgggatgcctttcgccaagcggatcg

SEQ ID NO: 690143 - DNA, 120 bp, Artificial Sequence
  ENSG00000188158_3 (sequence is synthesized)
caatggctgtgcaggcagcggcgccctgcgcccggcccagcagtggacgcgagcggaggcagcgctgagccgccgccgcccttgcagccgccgggccggagggacctggacgaggtcgag

SEQ ID NO: 690144 - DNA, 120 bp, Artificial Sequence
  ENSG00000188158_4 (sequence is synthesized)
cggagggacctggacgaggtcgaggcgccagggccagaggagccagcccgcgccgtccctgcaccttcagggctgccaccgccgccgccgccactgcccgcgccggccgaccagactcag

SEQ ID NO: 690145 - DNA, 120 bp, Artificial Sequence
  ENSG00000188158_5 (sequence is synthesized)
cgtggctggcgaggagagcacggcggggatcccggaggcggcgcccgcagccggcgaggcgtcctcggcggcggcggcggcggccgtgctgctcatgctggacctatgcgcggtcagcaa

SEQ ID NO: 690146 - DNA, 120 bp, Artificial Sequence
  ENSG00000188158_6 (sequence is synthesized)
gcaacgccgctctggcccgtgtcctccggcagctctcggacgtggcccggcacgcttgcagcctcttccaggagctcgagagcgacatccagctcacccaccgccgcgtctgggcgctgc

SEQ ID NO: 690147 - DNA, 120 bp, Artificial Sequence
  ENSG00000188158_7 (sequence is synthesized)
agggcaagctcggcggcgtgcagcgcgtcctcagcacgcttgaccctaagcaggaggcagtgcccgtctccaacctggacatagagagtaagctgagtgtgtactaccgcgccccgtggc

SEQ ID NO: 690148 - DNA, 120 bp, Artificial Sequence
  ENSG00000188158_8 (sequence is synthesized)
accagcagcgcaacatcttcctcccagccacaaggccaccctgcgtggaggagctgcaccgccacgcccggcagagcctgcaagccctgcgcagagaacaccggagccggagcgatcgcc

SEQ ID NO: 690149 - DNA, 120 bp, Artificial Sequence
  ENSG00000188158_9 (sequence is synthesized)
gagagcaaagagcagctgcccccctttccattgcagctcctccactgccagcctaccctccagctcacagccagaggaggcgtgagtttaaggaccgtcactttttaacgtcccatcccc

SEQ ID NO: 690150 - DNA, 120 bp, Artificial Sequence
  ENSG00000188158_10 (sequence is synthesized)
cagaggatgaagatacagatgtcatgttagggcagaggccgaaaaacccaatacacaatatcccttccacactggacaagcagaccaactggagcaaagcactacctctcccgacgccag

SEQ ID NO: 690151 - DNA, 120 bp, Artificial Sequence
  ENSG00000188158_11 (sequence is synthesized)
aggagaagatgaaacaagatgcccaagtgatttcttcttgcattattcccatcaatgttactggagttggctttgacagagaggctagtatacgctgctctctggttcattcacaatcgg

SEQ ID NO: 690152 - DNA, 120 bp, Artificial Sequence
  ENSG00000188158_12 (sequence is synthesized)
tactacagcggagacgaaaattgaggaggaggaaaaccatctcgggtatccccagaagagttcaacaagaaatagattctgatgaatcaccagtggccagggaaaggaatgtgattgtgc

SEQ ID NO: 690153 - DNA, 120 bp, Artificial Sequence
  ENSG00000188158_13 (sequence is synthesized)
acacaaacccagacccctccaacactgtcaataggatatccggaaccagggactctgagtgccaaaccgaggatattctgattgctgccccatccagaaggagaatcagagctcaaaggg

SEQ ID NO: 690154 - DNA, 120 bp, Artificial Sequence
  ENSG00000188158_14 (sequence is synthesized)
gtcaaagcattgcagcttccctttctcattctgctggcaacatttctgccctagcagacaaaggtgacaccatgtttactcctgcagtgagcagccgcacaagatctcggagccttcccc

SEQ ID NO: 690155 - DNA, 120 bp, Artificial Sequence
  ENSG00000188158_15 (sequence is synthesized)
gggaaggtaatagaggtggggatgctgagcccaaagttggcgctaaaccctcagcatatgaagagggagagtcttttgtgggtgaccatgaaagaacccctaatgatttcagtgaggctc

SEQ ID NO: 690156 - DNA, 120 bp, Artificial Sequence
  ENSG00000188158_16 (sequence is synthesized)
caagcagcccgagtgcccaggaccaccagcctactttgggcctggcctgctctcaacatcttcacagcccccagcacaaattaagtgagaggggaaggtcacgtctgtcccgaatggctg

SEQ ID NO: 690157 - DNA, 120 bp, Artificial Sequence
  ENSG00000188158_17 (sequence is synthesized)
ctgactctggcagctgtgacatctcctccaactcagacacgtttgggagccccatccactgcatctccacggctggcgtcctccttagcagccacatggaccagaaagatgaccaccagt

SEQ ID NO: 690158 - DNA, 120 bp, Artificial Sequence
  ENSG00000188158_18 (sequence is synthesized)
catccagtggcaactggagtgggagcagctccacgtgcccctcgcagacctcagaaaccatccctcctgcagcttctcctccactcactggctcttcacactgtgactcggagttgtcac

SEQ ID NO: 690159 - DNA, 120 bp, Artificial Sequence
  ENSG00000188158_19 (sequence is synthesized)
taaacacagcccctcatgccaatgaggatgccagtgttttcgtgacagagcaatacaatgaccacttggataaagtgagaggccatcgggcaaactcctttacctccactgttgcagacc

SEQ ID NO: 690160 - DNA, 120 bp, Artificial Sequence
  ENSG00000188158_20 (sequence is synthesized)
tgctggatgatcccaacaacagcaacacaagtgacagtgagtggaattacctacaccaccaccatgatgcctcctgccgccaggattttagtcctgagcgtcccaaggcagacagcctgg

SEQ ID NO: 690161 - DNA, 120 bp, Artificial Sequence
  ENSG00000188158_21 (sequence is synthesized)
gctgcccaagcttcacaagcatggccacttatgacagctttctggaaaagtctccatcagacaaagcggacactagctctcacttttcagtagacacggaaggatactatacctccatgc

SEQ ID NO: 690162 - DNA, 120 bp, Artificial Sequence
  ENSG00000188158_22 (sequence is synthesized)
actttgactgtggtctcaaaggtaataagagctatgtctgtcactatgcagccctgggcccagagaatggccagggtgtaggggcttcccctggtcttccagattgtgcctggcaggact

SEQ ID NO: 690163 - DNA, 120 bp, Artificial Sequence
  ENSG00000188158_23 (sequence is synthesized)
acttagaccacaagaggcagggaagaccaagcatctctttcaggaaaccaaaggcaaagccgaccccacctaaacgtagctcatcattgaggaagtctgatggaaacgcagatatttctg

SEQ ID NO: 690164 - DNA, 120 bp, Artificial Sequence
  ENSG00000188158_24 (sequence is synthesized)
agaagaaagaaccaaagataagcagtggtcagcacctgcctcacagttccagggaaatgaagctgcctcttgatttcgccaacacgccttctcgaatggaaaacgccaatcttcccacca

SEQ ID NO: 690165 - DNA, 120 bp, Artificial Sequence
  ENSG00000188158_25 (sequence is synthesized)
agcaggaaccttcttggataaaccagagtgaacaaggcattaaggaacctcagttagatgcttcggatattccaccattcaaagatgaagttgccgaatccacacactatgcagacctct

SEQ ID NO: 690166 - DNA, 120 bp, Artificial Sequence
  ENSG00000188158_26 (sequence is synthesized)
ggctcctaaatgacttgaaaacaaatgatccttatagatctctatctaattcaagcaccgctacgggtaccacagtcattgaatgcatcaaatctccagagagctctgaatcccaaacat

SEQ ID NO: 690167 - DNA, 120 bp, Artificial Sequence
  ENSG00000188158_27 (sequence is synthesized)
cacaatcagaatcaagagccaccaccccatctcttccttctgttgacaatgagtttaaactggcttcaccagaaaagctggctggcttggcatctccatcaagtggctattcaagccagt

SEQ ID NO: 690168 - DNA, 120 bp, Artificial Sequence
  ENSG00000188158_28 (sequence is synthesized)
ctgaaacgccaacatcctctttccctacagctttcttttcaggtccattgtctcccggaggtagcaaaagaaaacctaaagtcccagaaagaaaatcctcactacagcaaccctctttaa

SEQ ID NO: 690169 - DNA, 120 bp, Artificial Sequence
  ENSG00000188158_29 (sequence is synthesized)
aagatggaactatatcactgagtaaagaccttgaacttccaattatacctcctacccatcttgatctaagtgctcttcataatgtcttgaacaaaccattccaccaccgtcatccactgc

SEQ ID NO: 690170 - DNA, 120 bp, Artificial Sequence
  ENSG00000188158_30 (sequence is synthesized)
atgtttttactcataataagcagaacacagtaggagaaacactgaggtcgaatcctccaccgtcccttgcaattacaccaacgatcctgaaatctgttaaccttaggtccatcaacaagt

SEQ ID NO: 690171 - DNA, 120 bp, Artificial Sequence
  ENSG00000188158_31 (sequence is synthesized)
ctgaagaagttaagcaaaaagaagaaaacaatacagatctcccttatttagaggaaagcacactcacaacggctgccttgtctccaagtaagattaggccgcatacagcaaataaatcag

SEQ ID NO: 690172 - DNA, 120 bp, Artificial Sequence
  ENSG00000188158_32 (sequence is synthesized)
tatctcgtcaatactccactgaagacaccatactgtcctttttagactcttctgcagttgagatgggaccagataaactacatttagaaaaaaactctacttttgatgtgaagaatcgct

SEQ ID NO: 690173 - DNA, 120 bp, Artificial Sequence
  ENSG00000188158_33 (sequence is synthesized)
gcgatccagaaaccataacatcagctggtagcagtcttctagattcaaatgtcacaaaagaccaagtgcgtacagagactgagcctattccagaaaacacgccaaccaaaaactgtgctt

SEQ ID NO: 690174 - DNA, 120 bp, Artificial Sequence
  ENSG00000188158_34 (sequence is synthesized)
ttcccacagaaggatttcagagggtctctgctgcccgcccaaatgatttggatggtaaaataatacaatatggacctggtccagacgaaactctagaacaggtacagaaggcaccctctg

SEQ ID NO: 690175 - DNA, 120 bp, Artificial Sequence
  ENSG00000188158_35 (sequence is synthesized)
caggtctggaggaagttgcacaacctgaatctgtggatgtaatcacatctcagtcagactcaccaactagagcaacagatgtaagcaatcaatttaagcatcaatttgttatgagccgcc

SEQ ID NO: 690176 - DNA, 120 bp, Artificial Sequence
  ENSG00000188158_36 (sequence is synthesized)
ccatgacaaagtgcctggtactatcagctatgaatcggagataacatctgtaaattcattccctgaaaaatgttccaagcaggaaaatattgcttcaggtatttcagccaaaagtgcctc

SEQ ID NO: 690177 - DNA, 120 bp, Artificial Sequence
  ENSG00000188158_37 (sequence is synthesized)
tgataacagcaaagcagaggagacccaaggaaatgtggatgaggcttcattgaaagaatcatcaccgagtgatgactccatcatttcaccacttagtgaagactcccaagctgaagcaga

SEQ ID NO: 690178 - DNA, 120 bp, Artificial Sequence
  ENSG00000188158_38 (sequence is synthesized)
gggtgtgttcgtgtctccaaacaaacctcgaacaactgaggatttatttgcagtcattcacagatccaagaggaaagtacttggaagaaaagattccggggacatgtctgttcgaagcaa

SEQ ID NO: 690179 - DNA, 120 bp, Artificial Sequence
  ENSG00000188158_39 (sequence is synthesized)
atcgagagctcccctcagcagtagcagcagcagcgccagttccatcacttcacccagcagtaatgtgacaacccccaacagccagaggtctcctggtctcatataccgaaatgccaaaaa

SEQ ID NO: 690180 - DNA, 120 bp, Artificial Sequence
  ENSG00000188158_40 (sequence is synthesized)
gtccaacacatccaatgaagagtttaagctgttactgctcaagaaaggcagtcgctcagattctagttaccgcatgtctgccactgagatcctgaagagccccatactgcccaaacctcc

SEQ ID NO: 690181 - DNA, 120 bp, Artificial Sequence
  ENSG00000188158_41 (sequence is synthesized)
tggggagctcacagcagagtcccctcagagcaccgatgatgcccatcaggggtcacaaggggctgaggcattgtccccactctctccatgctccccacgagttaatgcagaaggcttttc

SEQ ID NO: 690182 - DNA, 120 bp, Artificial Sequence
  ENSG00000188158_42 (sequence is synthesized)
ctcgaagagctttgccacctcagcatcagcaagggttggacgttctcgggcccctcctgcagccagcagcagccgctacagtgtccgctgccggctgtacaatacgcccatgcaggcaat

SEQ ID NO: 690183 - DNA, 120 bp, Artificial Sequence
  ENSG00000188158_43 (sequence is synthesized)
ctccgagggagagacggaaaattctgacgggagcccacatgacgaccgttcctcccagagttcaacatagactgcctgtaccaggctgcctggcaaaggccaaaacccttactcacatga

SEQ ID NO: 690184 - DNA, 120 bp, Artificial Sequence
  ENSG00000188158_44 (sequence is synthesized)
ggatggaggaacagaacagaggacttgggaaaagtctcaacttgatggggtagcatcactgctaagcaatgaatgaatttctaaatacagtatgtgctgggtaaacagaaagtggtttag

SEQ ID NO: 690185 - DNA, 120 bp, Artificial Sequence
  ENSG00000188158_45 (sequence is synthesized)
acattcttgattagtttccatattttaagtagctgcagtctttcatgtttttctttagcatagtttgatttacgcaatctccttccttgtgaaaatagaggatacaaaattgtctaattt

SEQ ID NO: 690186 - DNA, 120 bp, Artificial Sequence
  ENSG00000188158_46 (sequence is synthesized)
tcatgacacctagaaaacgttttcccagagctgcctattcagaaactaaagccctcactgtcattattctttaagaagatgaaattactctggatgtttggtatttttttacattaaaac

SEQ ID NO: 690187 - DNA, 120 bp, Artificial Sequence
  ENSG00000188158_47 (sequence is synthesized)
aaactaaagcaaaatttagaagaaagaactacacatatgtaaataccatatttttgataaaaatgtgtaaatagatttatcaatgatgagtggacatgtggtcaattatctactgcacac

SEQ ID NO: 690188 - DNA, 120 bp, Artificial Sequence
  ENSG00000188158_48 (sequence is synthesized)
caactgtttatagaatacacaaaaataaaatgtaataactgtattctgtgaataccattttcatatcaaatgccatatttaaatgtccaccaatatgatttctgagtggtaaacctcaaa

SEQ ID NO: 690189 - DNA, 120 bp, Artificial Sequence
  ENSG00000188158_49 (sequence is synthesized)
tatgaattttaaactggtgaactaaaggaaatcttgaggtcatatactgaaatatgaataaattaaaataatgaattcagatctaatcatttttatgacaaattgcagcaccaaacaaac

SEQ ID NO: 690190 - DNA, 120 bp, Artificial Sequence
  ENSG00000188158_50 (sequence is synthesized)
taatagcaacccatggctgtgatttgttgtgtggtaatttggacagaatgaaaagcatgcttttgattttttttttaatcagtgagagaagtcatcattctcaacacaaagccctgaaca

SEQ ID NO: 690191 - DNA, 120 bp, Artificial Sequence
  ENSG00000188158_51 (sequence is synthesized)
acagcatttgacagtgtcctttagattttaattttttcaatggattgctttaaagagaatgagtagggaaaatagtagttaattttaggttatgttttatattaggctactggggacata

SEQ ID NO: 690192 - DNA, 120 bp, Artificial Sequence
  ENSG00000188158_52 (sequence is synthesized)
aacggtcataactaatgactgtaatcattaaactccttaaacagtttagaaattagctccaggttcttaaactaacaaaaataaaacctaagcatgccacagagctattgattaatcagt

SEQ ID NO: 690193 - DNA, 120 bp, Artificial Sequence
  ENSG00000188158_53 (sequence is synthesized)
aagtacctgtaatgagttttcagtgaagctttctctctgtgctgatgagattcatgctacctaaaaattaacagaaatgacactgtgaacaatgtagttggaaaataggtatgtgtatat

SEQ ID NO: 690194 - DNA, 120 bp, Artificial Sequence
  ENSG00000188158_54 (sequence is synthesized)
gcattatttatactcattgttaaactgggaatggggaacagctctggttcacaatactacatacaactgagtttttgtctggttttactatagtgtctgcttgatggcaaaaggggaggg

SEQ ID NO: 690195 - DNA, 120 bp, Artificial Sequence
  ENSG00000188158_55 (sequence is synthesized)
tggagggtgggagaggaaatgtcagggcatgtgctctgataaaataaaggcagggaaacaagctgaattacttgaaattacttgaattttcttgtcttaaaactgaaaaaaaaatgtagt

SEQ ID NO: 690196 - DNA, 120 bp, Artificial Sequence
  ENSG00000188158_56 (sequence is synthesized)
tacacgttaaaatctgcaaatggtttttacacctctgattttaacatgaacttatactaatgtttggaatcttatgtcagaaatataagcagctatgtacttagaataggttttgaatgg

SEQ ID NO: 690197 - DNA, 120 bp, Artificial Sequence
  ENSG00000188158_57 (sequence is synthesized)
gagaggtagaacagagagagaattaagaagggatctgacttataaaagactagaatgtgattagagtgatagaacataccaatgttaccaagaaattgacaagctgctggctttaagctt

SEQ ID NO: 690198 - DNA, 120 bp, Artificial Sequence
  ENSG00000188158_58 (sequence is synthesized)
atgcaagtggtagttgggaaagtaggaggtgtggaagagggtttgcattttggattaattcatgcaaaatgaaggaggaagcctggtctaagaagatactgtctttcaatagaaatgatt

SEQ ID NO: 690199 - DNA, 120 bp, Artificial Sequence
  ENSG00000188158_59 (sequence is synthesized)
tctaaactgctacagattaagaatagataatctgattgctgttgttttgtttgtttggaaagaaaaaaaatgtctggcttcttctactatttgttttcactaccaaactgtgttactaaa

SEQ ID NO: 690200 - DNA, 120 bp, Artificial Sequence
  ENSG00000188158_60 (sequence is synthesized)
tttcttgtcatccttgtatgtaaaatgggtgctgggggtggaggggtataagaggagggagagtcagagagagtgtgtatgggtgtgtgtgagtgtgagtgtgtgtgtacgcacacacac

SEQ ID NO: 690201 - DNA, 120 bp, Artificial Sequence
  ENSG00000188158_61 (sequence is synthesized)
tggggatagataagctacctggtaaagggtttgaacatttacaaaatgtcacactttttcttaaaagaaaaatattttggggtttgaataaaatggaccaccatttctcattggaaccca

SEQ ID NO: 690202 - DNA, 120 bp, Artificial Sequence
  ENSG00000188158_62 (sequence is synthesized)
ttaattaagaaaaccagcatggtttgacaccacatgggaacatgaataaatctgtctcatgatttgaaaagtacaccttgcaaagttttaaaaataaagtttttaggcaaatgcgataag

SEQ ID NO: 690203 - DNA, 120 bp, Artificial Sequence
  ENSG00000188158_63 (sequence is synthesized)
aaaccgtcatttccagtcacagtaggcgatctttcgtaatttcataaaagcagttcgtttgcagtatggcttttgtgtagttaggggttttttaagtgtgaagaaaggtatgtgggcttt

SEQ ID NO: 690204 - DNA, 120 bp, Artificial Sequence
  ENSG00000188158_64 (sequence is synthesized)
aaaagtgattctaaatcttgaatagaaaacacatgaattggctttaataaaaatgtcacctttttattattgacattaagtaatggtaccatatattttttaaaatacatattgacttga

SEQ ID NO: 690205 - DNA, 120 bp, Artificial Sequence
  ENSG00000188158_65 (sequence is synthesized)
attgtgaggcaataagataccttctatatgtaatgatcacagaactaacccttataatatagttttacttattttgtttactctaaaaatctatagcagagtttctctattttatatttc

SEQ ID NO: 690206 - DNA, 120 bp, Artificial Sequence
  ENSG00000188158_66 (sequence is synthesized)
atagatttaaaaaacccaaataaagatggatttaaaattcactgtggaaaagagtattgagttacaaactgagaagaaaaagcaggaagttccctaataatctggaatattctacatggc

SEQ ID NO: 690207 - DNA, 120 bp, Artificial Sequence
  ENSG00000188158_67 (sequence is synthesized)
ttgattacatagcaaacaagaccaagatttagggctgtctttaacatcactgccgtcttgaagcagggtacacacgttaggtattgtgaagaacatcaatccgaacttttcttctgttgt

SEQ ID NO: 690208 - DNA, 120 bp, Artificial Sequence
  ENSG00000188158_68 (sequence is synthesized)
ttgcactgatgcgattttttgttcttttatgtttatacaacgtatctatgttgtgtaggggaaattttttcattttttaaaaattctactttggttttgttgttgttttgatttgttttt

SEQ ID NO: 690209 - DNA, 120 bp, Artificial Sequence
  ENSG00000188158_69 (sequence is synthesized)
ggctaagtagaggacatggactagttgtagcaaacagaacatgctgtttgctcttgccaaaggtcagtgagtgagtgcatttgctgcagtggtggcacgtagagaactagatggtaataa

SEQ ID NO: 690210 - DNA, 120 bp, Artificial Sequence
  ENSG00000188158_70 (sequence is synthesized)
agatttaaaactatgaagaaggttacagtgtaactattttggtactagaaccagttcatgctggccgaaacgacaatggtttatggacttgcatccattttgtatttttgtaatatttgt

SEQ ID NO: 690211 - DNA, 120 bp, Artificial Sequence
  ENSG00000188158_71 (sequence is synthesized)
aaatatgaactttttaaattgctgcaaagatggtttcttttgtaagatgttttcaacgtttacattcaatccaagcctttgtatattttagagctgtgcaacactttaagtcttgtattt

SEQ ID NO: 690212 - DNA, 120 bp, Artificial Sequence
  ENSG00000188158_72 (sequence is synthesized)
atttttagtaaaaatggtgacagtttcattgtgaacccctctcaaaaaaaatgtatcagaaaagtttgattacctagaaagtgtgtatagaaactgcaaataaacgtgactgcaattaaa

SEQ ID NO: 690213 - DNA, 120 bp, Artificial Sequence
  ENSG00000188158_73 (sequence is synthesized)
ctgatttgccattcaagtgaaccctggagggattagcagccagcctagcacttgggtgagaccatctccccctccaggggggagtcctagatgcagcacagaggttctgtgaaaatctgc

SEQ ID NO: 690214 - DNA, 120 bp, Artificial Sequence
  ENSG00000188158_74 (sequence is synthesized)
catcctccttgcagaaggttgccctctctcgccctccatcccccccgccgtgcttgctgacttaagcagatcagctttcagctctctggcattcagagacgtctttgcataaaagaaaag

SEQ ID NO: 690215 - DNA, 120 bp, Artificial Sequence
  ENSG00000188158_75 (sequence is synthesized)
gcccttccttaaggagcagagcgggaatccaagcatggctctggcctgctgcatgcccaagaatgcagccgtctccaacctggacatagagagtaagctgagtgtgtactaccgcgcccc

SEQ ID NO: 690216 - DNA, 120 bp, Artificial Sequence
  ENSG00000188158_76 (sequence is synthesized)
ctggatctggatagtgtgtctggagggtaaagcagactgggccagttcatgccattcccgaggctgacaggctacccaggtgcttgtgaggtcctctttgcagccatttcttagtaaaaa

SEQ ID NO: 690217 - DNA, 120 bp, Artificial Sequence
  ENSG00000188158_77 (sequence is synthesized)
tcctcctggttcctaacatctgcttccagcagaatttctgtttaactcatggagagttccatcctaggatccctgtgtacatgaagaagatgagagtgagttaaatgctgtgtttggggg

SEQ ID NO: 690218 - DNA, 120 bp, Artificial Sequence
  ENSG00000188158_78 (sequence is synthesized)
aaggaagccttccttccttgatctcttggatgagttgcaaaaactcatcttgcatctgcagtttccctcccttaatactcattacctctatgatggtttctttaatgcgtatgctcaccc

SEQ ID NO: 690219 - DNA, 120 bp, Artificial Sequence
  ENSG00000188158_79 (sequence is synthesized)
ctgggtgaaaccaaggaagagcaatgctttgaaagatgacaggcaatggagccggtaggtgtagggcatgataaggataccttggggacgggaccacaagggacagaggcagggcaaggt

SEQ ID NO: 690220 - DNA, 120 bp, Artificial Sequence
  ENSG00000188158_80 (sequence is synthesized)
ataggccgaagttcaggtggacagcaggggcggcgtgcagaactacagctctgaggccctgcggccagaaggctggagctgaggcagcctttccattcatctctgaggctttcctccaca

SEQ ID NO: 690221 - DNA, 120 bp, Artificial Sequence
  ENSG00000188158_81 (sequence is synthesized)
tttttcagaaacaggacccccatctccacccccaagcaggctagccaggggcttgtcagtgttgatgagcgactgtgccaagggtgaggaatgaaggtacggagaggaaattagctagtc

SEQ ID NO: 690222 - DNA, 120 bp, Artificial Sequence
  ENSG00000188158_82 (sequence is synthesized)
ataggtagacggttggtgtcttggagcctcccgtgcctcggctcaggggcaaaagttgtccctatcagtatcataaatgccaaacctttctccggccttgagttagttcttaatgtgaat

SEQ ID NO: 690223 - DNA, 120 bp, Artificial Sequence
  ENSG00000188158_83 (sequence is synthesized)
gcagtagtctggacttccactccacccagactttactcctgtcctcttccccaccccagggttggccaaaagcacaacttaaagccactgatggacaacgccctgtttcttgcagccgtc

SEQ ID NO: 690224 - DNA, 120 bp, Artificial Sequence
  ENSG00000188158_84 (sequence is synthesized)
tcatagatttggcctaaccagtatacactgtgttgtgtgcacgtttttaattttttctttttttgcatttcatgttcatagtttaacagcacccgttcgccctcccccactgaatgttgc

SEQ ID NO: 690225 - DNA, 120 bp, Artificial Sequence
  ENSG00000188158_85 (sequence is synthesized)
atgcctacctcacctgacggccgcattcccggggagccggcgcggggcccggcggcgcgcccagggcgcacgggcggtaggatttctgcaccaggggaacgatgcacgggcgggctgccc

SEQ ID NO: 690226 - DNA, 120 bp, Artificial Sequence
  ENSG00000188158_86 (sequence is synthesized)
agcgggcgccaggggaggctagcctcggcgtggcgccccaccgcaaccctccgggatgctccgcgactcgcagcccaggccatgcggccgtctccaacctggacatagagagtaagctga

SEQ ID NO: 690227 - DNA, 120 bp, Artificial Sequence
  ENSG00000188162_0 (sequence is synthesized)
atgggagtcctggcgtctgcgctctgctggctgctttgtgtctggctgccctggggtgagcaggcagccgagtccctgcgggtgcagcgcctcgccgcagcacccgttctgtggggcagt

SEQ ID NO: 690228 - DNA, 120 bp, Artificial Sequence
  ENSG00000188162_1 (sequence is synthesized)
gcagagccacagccagagccagccgggcaacccagcagcagccaccaggaggcgacccttgccatgggggacaaggctacagtcgtgggaggccagcaggctgaagccccagactccgtg

SEQ ID NO: 690229 - DNA, 120 bp, Artificial Sequence
  ENSG00000188162_2 (sequence is synthesized)
gccatgtcttcctgggaaaggcggctccatcgggccaagtgtgcaccatcctacttgttctcctgcttcaatggaggcgagtgtgtgcacccagccttctgtgactgcagacgcttcaat

SEQ ID NO: 690230 - DNA, 120 bp, Artificial Sequence
  ENSG00000188162_3 (sequence is synthesized)
gccactggaccgcgctgccagatggtgtacaatgccggccctgagagggacagcatttgccgggcgtgggggcagcaccacgtggagacatttgatgggctctactactacctctccgga

SEQ ID NO: 690231 - DNA, 120 bp, Artificial Sequence
  ENSG00000188162_4 (sequence is synthesized)
aagggcagctacaccctggtgggtcgccatgagcccgagggacagagcttctccatccaggtacacaatgacccgcagtgtggctcttcaccctacacctgctccagggctgtcagcctc

SEQ ID NO: 690232 - DNA, 120 bp, Artificial Sequence
  ENSG00000188162_5 (sequence is synthesized)
ttctttgtgggtgagcaggagatccatctggccaaggaggtcacccatggaggcatgagggtccaactgccacatgtcatggggagcgcgcgtctgcagcagcttgccggctatgtcatc

SEQ ID NO: 690233 - DNA, 120 bp, Artificial Sequence
  ENSG00000188162_6 (sequence is synthesized)
gtgcggcatcagtcagccttcacactggcctgggatggtgcctcggctgtctacatcaagatgagtccagagcttctgggctggacccatgggctgtgtgggaacaacaatgctgacccc

SEQ ID NO: 690234 - DNA, 120 bp, Artificial Sequence
  ENSG00000188162_7 (sequence is synthesized)
aaggatgatctggtgaccagctctgggaagctgactgacgacgtggttgagtttgtgcacagctggcaggagcaggcccctaaccagcctccagggcccacaacttcctccctgcctcgc

SEQ ID NO: 690235 - DNA, 120 bp, Artificial Sequence
  ENSG00000188162_8 (sequence is synthesized)
ccaccgtgcctacagcagaacccaggaaccatgcagggcgtgtacgagcagtgtgaggctctactgcggcccccctttgacgcctgccacgcctacgtcagccctctgcccttcacagcc

SEQ ID NO: 690236 - DNA, 120 bp, Artificial Sequence
  ENSG00000188162_9 (sequence is synthesized)
agttgtaccagtgatctctgccaatcaatgggtgatgtagccacctggtgccgggcactggcggagtatgcccgggcgtgtgcccaggcagggcggcccttgcaaggctggaggacccag

SEQ ID NO: 690237 - DNA, 120 bp, Artificial Sequence
  ENSG00000188162_10 (sequence is synthesized)
ctccggcaatgcactgtgcactgcaaggagaaggcctttacctacaatgagtgcatcgcctgctgccctgcctcctgccatccccgggcatcctgtgtggacagtgagatcgcctgtgtg

SEQ ID NO: 690238 - DNA, 120 bp, Artificial Sequence
  ENSG00000188162_11 (sequence is synthesized)
gacggctgctattgccccaatgggctcatcttcgaggatgggggctgcgtggcaccagctgagtgtccctgtgagtttcacgggactctgtacccacctggctctgtggtgaaggaagac

SEQ ID NO: 690239 - DNA, 120 bp, Artificial Sequence
  ENSG00000188162_12 (sequence is synthesized)
tgcaatacttgcacatgcacctcaggcaagtgggagtgcagcacagctgtctgcccagctgagtgctcagtgactggtgacattcacttcacaacctttgatggccgccggtacacgttc

SEQ ID NO: 690240 - DNA, 120 bp, Artificial Sequence
  ENSG00000188162_13 (sequence is synthesized)
cccgccacatgtcagtacatcctggccaagagccgctcttcgggcaccttcaccgtgacattgcagaatgccccatgtggcctgaaccaagatggagcctgtgtccagtcagtgtcagtg

SEQ ID NO: 690241 - DNA, 120 bp, Artificial Sequence
  ENSG00000188162_14 (sequence is synthesized)
attctgcaccaggaccctcggaggcaggtgaccctgacccaggcaggggatgtccttctgtttgaccagtacaagatcatcccgccatacacagatgatgcctttgagatccgtaggctg

SEQ ID NO: 690242 - DNA, 120 bp, Artificial Sequence
  ENSG00000188162_15 (sequence is synthesized)
tcctccgtgttcctgcgggtgaggacgaacgtgggcgtgcgggtgctctacgaccgtgaagggctccgactgtacctgcaagtggaccagcgatgggtggaggataccgtgggcctctgc

SEQ ID NO: 690243 - DNA, 120 bp, Artificial Sequence
  ENSG00000188162_16 (sequence is synthesized)
ggcaccttcaatggcaacacgcaggatgacttcctgtctccagtgggtgtacctgagagcaccccacaactttttggcaattcctggaaaacactttctgcttgctccccgctggtctct

SEQ ID NO: 690244 - DNA, 120 bp, Artificial Sequence
  ENSG00000188162_17 (sequence is synthesized)
ggctcccctctggacccctgcgatgtgcacctgcaagccgcctcctactcagtgcaggcctgcagcgtgctcacgggggagatgtttgcgccctgctctgcgttcctgagccccgtgccc

SEQ ID NO: 690245 - DNA, 120 bp, Artificial Sequence
  ENSG00000188162_18 (sequence is synthesized)
tactttgagcagtgccgcagggatgcctgccgctgcgggcagccctgcctgtgcgccacactggcccactacgcccacctgtgccggcgccatgggctccccgttgatttccgcgcccgc

SEQ ID NO: 690246 - DNA, 120 bp, Artificial Sequence
  ENSG00000188162_19 (sequence is synthesized)
ctgccagcctgtgcactgtcctgtgaggcctccaaggagtatagcccctgcgtggccccgtgtggacgtacctgccaggacctggccagccctgaggcctgtggggttgatggtggcgat

SEQ ID NO: 690247 - DNA, 120 bp, Artificial Sequence
  ENSG00000188162_20 (sequence is synthesized)
gacctgagcagagacgagtgtgtggagggctgtgcctgcccaccggacacctatctggacacccaggctgacctctgtgtcccccggaaccagtgctcctgccacttccagggagtggac

SEQ ID NO: 690248 - DNA, 120 bp, Artificial Sequence
  ENSG00000188162_21 (sequence is synthesized)
tatccccccggagacagtgacatcccatccctgggccactgccactgcaaagatggagtcatgagctgtgatagcagagccccagctgctgcctgcccagcaggccaggtcttcgtgaac

SEQ ID NO: 690249 - DNA, 120 bp, Artificial Sequence
  ENSG00000188162_22 (sequence is synthesized)
tgcagcgacctgcacacggacctggagctgagcagggagaggacgtgtgagcagcaactgctgaacctgagcgtgtcagcccgtggcccctgcctctcgggctgcgcctgtccccagggt

SEQ ID NO: 690250 - DNA, 120 bp, Artificial Sequence
  ENSG00000188162_23 (sequence is synthesized)
ctgctcagacacggggatgcatgtttcctgccagaggagtgcccctgcacttggaaggggaaggagtatttccctggggaccaggtgatgtctccttgccatacctgtgtgtgccagcgg

SEQ ID NO: 690251 - DNA, 120 bp, Artificial Sequence
  ENSG00000188162_24 (sequence is synthesized)
ggctcattccagtgcaccctgcacccttgcgcctccacctgcactgcctatggggaccggcattaccgcacgtttgatgggctcccgtttgacttcgtgggggcatgcaaagtgcacctg

SEQ ID NO: 690252 - DNA, 120 bp, Artificial Sequence
  ENSG00000188162_25 (sequence is synthesized)
gtcaagagcacatcagatgtcagcttctctgtgattgtagagaatgtgaactgctacagctctggcatgatctgcaggaaatttatttccatcaacgttgggaactcactcattgtcttt

SEQ ID NO: 690253 - DNA, 120 bp, Artificial Sequence
  ENSG00000188162_26 (sequence is synthesized)
gatgatgactccggaaatcctagtccagagagcttcctggatgacaagcaggaggtccacacatggcgagtgggatttttcacactggtgcatttcccacaggagcacatcaccctcttg

SEQ ID NO: 690254 - DNA, 120 bp, Artificial Sequence
  ENSG00000188162_27 (sequence is synthesized)
tgggaccagagaaccacagtgcacgtccaggctgggcctcagtggcagggccagctggcgggcctctgtgggaactttgacttaaaaaccatcaatgagatgaggaccccggagaaccta

SEQ ID NO: 690255 - DNA, 120 bp, Artificial Sequence
  ENSG00000188162_28 (sequence is synthesized)
gagctaactaacccccaggagtttggcagcagttgggctgcagttgagtgcccagacaccctcgatcctcgggatatgtgtgtcctgaatcctctccgagaaccatttgccaagaaggag

SEQ ID NO: 690256 - DNA, 120 bp, Artificial Sequence
  ENSG00000188162_29 (sequence is synthesized)
tgcagcatcctgctcagtgaggtgtttgagatctgccaccctgtggttgatgtcacttggttttactcaaactgcctgacagacacatgtggctgcagccagggtggtgactgtgagtgc

SEQ ID NO: 690257 - DNA, 120 bp, Artificial Sequence
  ENSG00000188162_30 (sequence is synthesized)
ttctgtgccagcgtctccgcttatgcccaccagtgttgccagcatggggtggctgttgactggcgaaccccccgcctctgcccgtatgactgtgacttctttaacaaagtgctaggtaag

SEQ ID NO: 690258 - DNA, 120 bp, Artificial Sequence
  ENSG00000188162_31 (sequence is synthesized)
ggcccctatcagctatccagcttggcagccggtggtgctctggtgggcatgaaggcggtgggcgatgacatagtcctagtgaggacagaggatgtggcgccagcagacattgtgagcttc

SEQ ID NO: 690259 - DNA, 120 bp, Artificial Sequence
  ENSG00000188162_32 (sequence is synthesized)
ctgctgacagctgctctgtacaaggccaaggcccatgacccagatgtggtgtccctggaggcagcagacagacccaacttcttccttcacgtcacagccaacgggtctctggagctggct

SEQ ID NO: 690260 - DNA, 120 bp, Artificial Sequence
  ENSG00000188162_33 (sequence is synthesized)
aagtggcagggccgtgacaccttccaacagcatgcctccttcttgctgcaccgggggacacggcaggcaggcctggtggccctggagtccctggccaagcccagctccttcctctatgtg

SEQ ID NO: 690261 - DNA, 120 bp, Artificial Sequence
  ENSG00000188162_34 (sequence is synthesized)
tcgggcgcggtgctggccctgcggctgtacgaacacacagaggtgttccgccggggcacactcttccgccttctggatgccaagccctcgggggctgcctaccccatctgcgagtggcgc

SEQ ID NO: 690262 - DNA, 120 bp, Artificial Sequence
  ENSG00000188162_35 (sequence is synthesized)
tacgatgcctgtgccagcccctgcttccaaacctgccgggacccacgggcagccagctgccgggacgtacccagggtagaaggctgtgtccctgtgtgccccaccccccaggtcctggat

SEQ ID NO: 690263 - DNA, 120 bp, Artificial Sequence
  ENSG00000188162_36 (sequence is synthesized)
gaagtcacacagagatgtgtctacttggaggactgtgtggagccagcagtttgggttcccacagaggcccttggcaatgagaccctccctcccagtcaagggttgcccactcccagtgat

SEQ ID NO: 690264 - DNA, 120 bp, Artificial Sequence
  ENSG00000188162_37 (sequence is synthesized)
gaggagccacagctgtcacaggaaagccccaggacccccacccacaggccagccctcaccccagctgccccactcaccacagccctgaacccaccagtgacagccactgaggagccagtg

SEQ ID NO: 690265 - DNA, 120 bp, Artificial Sequence
  ENSG00000188162_38 (sequence is synthesized)
gtgtctccaggccccacccagaccaccctgcagcagccactggagctcactgcatctcaactccccgccggccccacggagtccccagccagcaagggagtgactgccagcctcctggcc

SEQ ID NO: 690266 - DNA, 120 bp, Artificial Sequence
  ENSG00000188162_39 (sequence is synthesized)
atcccccatacaccagagtcctcatccctccctgttgcactgcagacacccacacctggcatggtgtcaggtgccatggagacaacaagggtgactgtgatctttgcaggaagccctaac

SEQ ID NO: 690267 - DNA, 120 bp, Artificial Sequence
  ENSG00000188162_40 (sequence is synthesized)
atcacagtctcctcccggtcgccccctgcccctcgcttcccgctcatgaccaaggctgtgacagtccgaggccatggctccttgcctgttaggacgacacccccacagccctccttgaca

SEQ ID NO: 690268 - DNA, 120 bp, Artificial Sequence
  ENSG00000188162_41 (sequence is synthesized)
agcaggacaggggtcccccagcccacccaggcccagagtgcttcaagtcccagcacccctctaactgtggctggaacagcagcagaacaggttcctgtcagtccccttgcaaccaggagc

SEQ ID NO: 690269 - DNA, 120 bp, Artificial Sequence
  ENSG00000188162_42 (sequence is synthesized)
ttggagatagtgctatccacagagaagggcgaagccgggcacagccagcccatgggctcgcctgcctccccacagccacacccactcccctctgcaccaccccgcccagcccagcatacc

SEQ ID NO: 690270 - DNA, 120 bp, Artificial Sequence
  ENSG00000188162_43 (sequence is synthesized)
accatggccaccaggtctccagctctgcccccagagaccccagctgccgccagcctgtcaacagccactgatgggctggcagccacacccttcatgtcccttgagtcaactcgtccctcc

SEQ ID NO: 690271 - DNA, 120 bp, Artificial Sequence
  ENSG00000188162_44 (sequence is synthesized)
cagctcctctctggcctgcctcccgacaccagcctgcccctggccaaggtgggcacatctgccccagtggccacacccggccccaaagcctctgtcatcaccactccactccagccacag

SEQ ID NO: 690272 - DNA, 120 bp, Artificial Sequence
  ENSG00000188162_45 (sequence is synthesized)
gccacgactctgcctgctcagacacttagcccagtactgcctttcactccagcagcaatgacccaggcgcacccacccactcacatagcacccccagcagcaggcacagctccaggcctg

SEQ ID NO: 690273 - DNA, 120 bp, Artificial Sequence
  ENSG00000188162_46 (sequence is synthesized)
ctgctgggagccacattgccaacctctggagtcctgcctgtggctgagggcacggcctccatggtatctgttgtcccacgaaagagcaccacagggaaggtggccatcctatccaagcaa

SEQ ID NO: 690274 - DNA, 120 bp, Artificial Sequence
  ENSG00000188162_47 (sequence is synthesized)
gtgtctctgcccacttccatgtatggttctgcagagggtgggcccacagagctcacgcctgctacgagccaccctctcacgcccttggtggctgagcccgagggagcccaggcaggcaca

SEQ ID NO: 690275 - DNA, 120 bp, Artificial Sequence
  ENSG00000188162_48 (sequence is synthesized)
gctctgccagtgcccacatcctatgccctgagccgtgtctcagccaggacggccccccaagacagcatgctggttctgttgcctcagctggctgaggcccatggaacctcggcagggcct

SEQ ID NO: 690276 - DNA, 120 bp, Artificial Sequence
  ENSG00000188162_49 (sequence is synthesized)
cacctggcagcagagccggtggacgaggccaccacagaaccatctgggcgctcagccccagccctgagcatcgtagagggtttggcggaggctttggcaactaccactgaggccaataca

SEQ ID NO: 690277 - DNA, 120 bp, Artificial Sequence
  ENSG00000188162_50 (sequence is synthesized)
tccaccacctgtgttccaatcgccgagcaggactgcgtccgccacatctgcctggagggccagctgattcgcgtgaatcagtcccagcactgtccccagggtgctgctccccctcgctgt

SEQ ID NO: 690278 - DNA, 120 bp, Artificial Sequence
  ENSG00000188162_51 (sequence is synthesized)
gggatcctgggcctcgccgtgcgggtgggtggggaccgctgctgcccactctgggagtgtgcctgccggtgctcaatcttccctgacctgagcttcgtgaccttcgatgggagccacgta

SEQ ID NO: 690279 - DNA, 120 bp, Artificial Sequence
  ENSG00000188162_52 (sequence is synthesized)
gctctgttcaaggaggccatctacatcctcagccagagcccagatgaaatgctcaccgtccatgtactggactgcaaaagtgccaacctggggcacctgaactggcccccgttctgtctg

SEQ ID NO: 690280 - DNA, 120 bp, Artificial Sequence
  ENSG00000188162_53 (sequence is synthesized)
gtgatgttgaacatgactcacttggcccatcaggtcactattgatcgcttcaaccgaaaggtgactgtggacttgcagcctgtgtggccaccggtgagcaggtatggattcagaattgag

SEQ ID NO: 690281 - DNA, 120 bp, Artificial Sequence
  ENSG00000188162_54 (sequence is synthesized)
gacacaggccacatgtacatgatcctgactccctcagacatccagatccagtggctccacagctcaggactcatgatcgtggaggccagcaaaaccagcaaggcccagggccatggcctg

SEQ ID NO: 690282 - DNA, 120 bp, Artificial Sequence
  ENSG00000188162_55 (sequence is synthesized)
tgcggtatctgtgatggagatgcagccaatgaccttaccctgaaggatggctcagtggtgggtggggctgaggaccctgctccctttctggacagctggcaggtgcccagctccctgacc

SEQ ID NO: 690283 - DNA, 120 bp, Artificial Sequence
  ENSG00000188162_56 (sequence is synthesized)
tcagtgggccagacccgcttccgcccagacagctgcgccacaactgactgctcgccctgccttcgcatggtgtccaaccgcaccttcagtgcctgccaccgctttgtgcctccggagtca

SEQ ID NO: 690284 - DNA, 120 bp, Artificial Sequence
  ENSG00000188162_57 (sequence is synthesized)
ttctgtgagctgtggatccgggacaccaagtacgtgcagcagccctgcgtggccctgactgtgtacgtggccatgtgccacaaatttcatgtgtgcatcgagtggcggcgctctgactac

SEQ ID NO: 690285 - DNA, 120 bp, Artificial Sequence
  ENSG00000188162_58 (sequence is synthesized)
tgccccttcctgtgctccagcgactccacataccaggcatgtgtgacagcctgtgagccacccaagacatgccaggatgggatactagggcctctggacccagagcactgccaggtgctg

SEQ ID NO: 690286 - DNA, 120 bp, Artificial Sequence
  ENSG00000188162_59 (sequence is synthesized)
ggcgagggctgcgtctgctccgagggcaccatcttacaccggcgccactctgcactctgcatcccggaggccaagtgcgcctgcactgacagcatgggggtgccgagggccctgggggag

SEQ ID NO: 690287 - DNA, 120 bp, Artificial Sequence
  ENSG00000188162_60 (sequence is synthesized)
acctggaacagctccctcagcggctgctgccagcaccagtgccaagccccagacaccattgtcccggtggatctgggctgccccagtccccgccctgagagctgcctgcgattcggggag

SEQ ID NO: 690288 - DNA, 120 bp, Artificial Sequence
  ENSG00000188162_61 (sequence is synthesized)
gtggccttgctcctacccaccaaggacccctgctgcctggggactgtctgtgtgtgtaaccagactctgtgtgagggtctcgcccccacatgccgcccaggccaccgcctcctcacccac

SEQ ID NO: 690289 - DNA, 120 bp, Artificial Sequence
  ENSG00000188162_62 (sequence is synthesized)
ttccaggaggactcctgctgccccagctacagctgtgagtgtgacccagatctctgtgaggcagagctggtccccagctgccgacaggaccagatcctgatcacgggccgcctgggggac

SEQ ID NO: 690290 - DNA, 120 bp, Artificial Sequence
  ENSG00000188162_63 (sequence is synthesized)
tcctgctgcacctcctacttctgcgcctgtggtgactgtccagactccatccccgaatgtcaagaaggggaggcgctcactgtgcacaggaataccacggaactctgctgccctctgtac

SEQ ID NO: 690291 - DNA, 120 bp, Artificial Sequence
  ENSG00000188162_64 (sequence is synthesized)
cagtgtgtgtgtgagaacttccgctgtccccaagtgcagtgtggcctgggcactgccctggtggaggtgtggagccccgaccgctgctgcccctacaaatcctgtgaatgtgactgtgac

SEQ ID NO: 690292 - DNA, 120 bp, Artificial Sequence
  ENSG00000188162_65 (sequence is synthesized)
acaatcccggtgccccggtgccatctgtgggagaaatcccagctggatgaggagttcatgcacagcgtggagaatgtgtgtggctgcgccaagtacgagtgtgtgaaggccccggtgtgt

SEQ ID NO: 690293 - DNA, 120 bp, Artificial Sequence
  ENSG00000188162_66 (sequence is synthesized)
ctgagccgcgagctgggtgtgatgcagcccggccagacagtggtggagctctcagcagatggcgtgtgccacacctcccgctgcaccaccgtgctcgaccctctcaccaacttctaccag

SEQ ID NO: 690294 - DNA, 120 bp, Artificial Sequence
  ENSG00000188162_67 (sequence is synthesized)
atcaacaccacctccgtgctctgtgacatccactgtgaggcgaaccaggagtacgagcacccgcgggacctcgctgcctgctgcggctcctgcaggaacgtgtcctgtctcttcaccttc

SEQ ID NO: 690295 - DNA, 120 bp, Artificial Sequence
  ENSG00000188162_68 (sequence is synthesized)
cccaatggcaccacctccctgttcttgcccggggcatcctggatcgcagactgcgcccgccaccactgcagcagcacgcccctgggtgccgtgctggtccgctctcccataagctgccca

SEQ ID NO: 690296 - DNA, 120 bp, Artificial Sequence
  ENSG00000188162_69 (sequence is synthesized)
ccgctcaatgagactgagtgtgccaaggttgggggttccgtggtaccttccttggaaggatgctgcaggacctgtaaggaggatgggcgctcctgcaagaaggtgaccatccgcatgacc

SEQ ID NO: 690297 - DNA, 120 bp, Artificial Sequence
  ENSG00000188162_70 (sequence is synthesized)
atccgcaagaatgaatgcaggagcagcacccctgtgaacctagtgtcctgcgatgggaggtgcccatccgccagcatctacaactacaacatcaacacctatgcccgattctgcaagtgc

SEQ ID NO: 690298 - DNA, 120 bp, Artificial Sequence
  ENSG00000188162_71 (sequence is synthesized)
tgccgtgaggtgggcctgcagcggcgctctgtgcagctcttctgtgccaccaatgccacctgggtgccctatacagtgcaggagcccaccgactgtgcctgccagtggtcctgaggcctg

SEQ ID NO: 690299 - DNA, 120 bp, Artificial Sequence
  ENSG00000188162_72 (sequence is synthesized)
ggggcccgggctagctggaccacctctgccagccccactttctgtttccagctggcccaatgtgaatgggggtattaaaggtggtagaaatctggcacgtgttgagcatggaatggtggg

SEQ ID NO: 690300 - DNA, 120 bp, Artificial Sequence
  ENSG00000188162_73 (sequence is synthesized)
aagaggtcacaggagtaaccagaaagggtcacccctgcccatcctggctccctttctgggctccccattttccgcacatgggaaagtgccacagttgagggctcagggagctcacctctg

SEQ ID NO: 690301 - DNA, 120 bp, Artificial Sequence
  ENSG00000188162_74 (sequence is synthesized)
tccctggtttgagatggaaaatgggctttaggtccaggggcagcagcctctgaacctctgtgaccctggccacagctcttggtggagggggtgagagctgtgggaagatgggaaggtgca

SEQ ID NO: 690302 - DNA, 120 bp, Artificial Sequence
  ENSG00000188162_75 (sequence is synthesized)
tggtgcttacatgggaaccacagctggacccaagaccaagcacaggggcaggatgcagtggcccattctcttggcctttttgactacacaagaaaccagacacagtaaaaggaaagaggg

SEQ ID NO: 690303 - DNA, 120 bp, Artificial Sequence
  ENSG00000188162_76 (sequence is synthesized)
ctatacctgcaacactcaggcctgcagatggctgcccagaaggagttcccaaagacaaagatggtggattctagggcccaggttgtctcaccaagatctgtgaaatcagagtgagctcag

SEQ ID NO: 690304 - DNA, 120 bp, Artificial Sequence
  ENSG00000188162_77 (sequence is synthesized)
tgaccttcgcatctcctgtagtccaaagaaaggtgcctggtgtcctggtattgatatggtaattcaggaaaggatttggaagacctaagcctgtacccttaccccaaggcaaccttccca

SEQ ID NO: 690305 - DNA, 120 bp, Artificial Sequence
  ENSG00000188162_78 (sequence is synthesized)
gcaggcaggccggccttgtgaggcggtgctgggggagtgaaaccctcagtgagggcccagcactacttatctaggatgctggttgacagcccatgccttcaaggccctaggttgctgagg

SEQ ID NO: 690306 - DNA, 120 bp, Artificial Sequence
  ENSG00000188162_79 (sequence is synthesized)
gggtaccttcagcctgcaaatgcagctccaggctttgcagtgtgccttttctccaaggccatgacagagtcgggctcagaggagcctgattatgggttgtgtggctcagccagtgccagt

SEQ ID NO: 690307 - DNA, 120 bp, Artificial Sequence
  ENSG00000188162_80 (sequence is synthesized)
ctctgtgctccatgggactgtttagcaagagagtgtctgttggtgtcagtggaaaacacagccccagcctccctgagcacttgtgagatccttgtcactgaaccagagcgtcccctaaag

SEQ ID NO: 690308 - DNA, 120 bp, Artificial Sequence
  ENSG00000188162_81 (sequence is synthesized)
ccagggccagcgtccccttccacaccccactctgcaagtctcccaccccctgtgccactttgtgccacgtggaaccgaagggcatgaacataaggttgtgcaggccccagcactgccctg

SEQ ID NO: 690309 - DNA, 120 bp, Artificial Sequence
  ENSG00000188162_82 (sequence is synthesized)
atgggagtcctggcgtctgcgctctgctggctgctttgtgtctggctgccctggggtgagcaggcagccgagtccctgcgggtgcagcgcctcggtgagagggttgtggactcagggagg

SEQ ID NO: 690310 - DNA, 120 bp, Artificial Sequence
  ENSG00000188162_83 (sequence is synthesized)
gaaaactcaataaggtgtgaagctcagggtcaggcctgtggcaggagcctgcaaaccagcctctgaactccctactcaggtacacaatgacccgcagtgtggctcttcaccctacacctg

SEQ ID NO: 690311 - DNA, 120 bp, Artificial Sequence
  ENSG00000188162_84 (sequence is synthesized)
gggctgtgtgtggctttgccagcccctagccctggctcctggtcccttgctctagggcgtgtacgagcagtgtgaggctctactgcggcccccctttgacgcctgccacgcctacgtcag

SEQ ID NO: 690312 - DNA, 120 bp, Artificial Sequence
  ENSG00000188162_85 (sequence is synthesized)
aggagacttccgagcccgtctctccctccatcctccagctgctgcccctgtagcccaggagcccatactgaggccccagggcctccgctcccatcttcttctcttccagctgctgcctgc

SEQ ID NO: 690313 - DNA, 120 bp, Artificial Sequence
  ENSG00000188162_86 (sequence is synthesized)
aatggcaacacgcaggatgacttcctgtacgtagccctgccacggaacccgaagaagaggggaaatgggccccttagggctgggtatctagaggcactgcctaaatgtctctcccgtgag

SEQ ID NO: 690314 - DNA, 120 bp, Artificial Sequence
  ENSG00000188162_87 (sequence is synthesized)
ccttcactgtgcccagcatgcaccattagttattgatttctctacatttaaatttaattatgtttctttaaagcagcggttcacagtcctctatgtgtggaatcacctcaggagcttgtt

SEQ ID NO: 690315 - DNA, 120 bp, Artificial Sequence
  ENSG00000188163_0 (sequence is synthesized)
agggactggagccagcaaggccagagtgaaagcaaaatgacaactactcagaaacacgatctcttcacgccggagcctcactatgtccctggctatgccggcttctttccgcagctgcgc

SEQ ID NO: 690316 - DNA, 120 bp, Artificial Sequence
  ENSG00000188163_1 (sequence is synthesized)
taccaggtggggaacacctatgggcgtaccacggggcagctgctcacagaccccagtgtgcagaagagcccctgctctgtgctgtcccccatgtccaaacccaagttcattgaggacttc

SEQ ID NO: 690317 - DNA, 120 bp, Artificial Sequence
  ENSG00000188163_2 (sequence is synthesized)
agccagtccaagcccccgagggttccctgccaagacctgacggagccctacatcccccactacaccagtctgaagccctctaagaactttgagattctgggccagctcccacccttggag

SEQ ID NO: 690318 - DNA, 120 bp, Artificial Sequence
  ENSG00000188163_3 (sequence is synthesized)
gtggacgcccaggagccgccaggggtagagaacatacccagacagattctgctgcctgcaggcttcacgcccgacaccccgcaccctccgtgcccaccaggcaggaagggagactccaga

SEQ ID NO: 690319 - DNA, 120 bp, Artificial Sequence
  ENSG00000188163_4 (sequence is synthesized)
cccagtatacggggaagaggcctggaagagcgccactcctgtttgcgaggcccccaggcagcaccagctgtaccactgccagagggatgagtacccaccccccgcccgccgccagcagga

SEQ ID NO: 690320 - DNA, 120 bp, Artificial Sequence
  ENSG00000188163_5 (sequence is synthesized)
gacgctagatgtgggcagcttccagcggctgccgcagctggaccaccctaacctaatccaacgcaaggccatctcaggctatgctggcttcattccccgtttcacctgggtaatggggtt

SEQ ID NO: 690321 - DNA, 120 bp, Artificial Sequence
  ENSG00000188163_6 (sequence is synthesized)
gaattaccgagacggcgtcatgcaagccatggacgaattcgacaagagccagttcctgtttagaaacccccactgtgacctgggcgagaagctgcctggaacacactggcccagcaacca

SEQ ID NO: 690322 - DNA, 120 bp, Artificial Sequence
  ENSG00000188163_7 (sequence is synthesized)
catctacagcagccaaggcctgatccccttctacatggggttcatccccgccatgcaggacaactacgccctgacattcggcaacagcacccggagggcctactggaaggaatgggcaaa

SEQ ID NO: 690323 - DNA, 120 bp, Artificial Sequence
  ENSG00000188163_8 (sequence is synthesized)
gcgaaaccacacactatgaaaatgctttaatggtggtgtctgtacagcatggatgtggacagggaaaacagcaagtgcacacagtgggacaggccacaggacaggctgggagtgaataaa

SEQ ID NO: 690324 - DNA, 120 bp, Artificial Sequence
  ENSG00000188163_9 (sequence is synthesized)
cctggggggacctcctctgcctcccagctgcttccaggagcccagcttttcccaagacgaggcggtgccttgcctgcctgttcccatttggccacatcagacagtcgccaacgttcaggg

SEQ ID NO: 690325 - DNA, 120 bp, Artificial Sequence
  ENSG00000188163_10 (sequence is synthesized)
gggcaggtgggtgtgcccaggggaaggctaagggggcttggggtagcccgtacatctgcctacccccaggctatgctggcttcattccccgtttcacctgggtaatggggttgaattacc

SEQ ID NO: 690326 - DNA, 120 bp, Artificial Sequence
  ENSG00000188163_11 (sequence is synthesized)
gagacggcgtcatgcaagccatggacgaattcgacaagagccaggtaggaaagcgccatccagggcctgctcccagctcacacacacacttcctctcctgcctggcagcttccctggagg

SEQ ID NO: 690327 - DNA, 120 bp, Artificial Sequence
  ENSG00000188163_12 (sequence is synthesized)
gtgccttgaaggccaggttccctgagaagcctgaggagggggctctgcctggctctctcctgtccccggaggtgccgccccaacccctctctcctgagtcttgcttggatccctgcactc

SEQ ID NO: 690328 - DNA, 120 bp, Artificial Sequence
  ENSG00000188163_13 (sequence is synthesized)
aagttttggagtcgggggtagggggatgcagaaggctgggagcattagcagctttcccacggagtgccggccctccggccaggcccccactgggacaacttgactatctgtttgcctgcc

SEQ ID NO: 690329 - DNA, 120 bp, Artificial Sequence; identical to SEQ ID NO: 566859
  ENSG00000188167_0 (sequence is synthesized)

SEQ ID NO: 690330 - DNA, 120 bp, Artificial Sequence
  ENSG00000188167_1 (sequence is synthesized)
tacgcgcggcttgcgcgtaagtctgcgggacccgggtacggggaggcattgctaggggacaggctggcggggaaccgggctggggtcgcagccacccgcggtcccgcagggcggggagcc

SEQ ID NO: 690331 - DNA, 120 bp, Artificial Sequence
  ENSG00000188167_2 (sequence is synthesized)
gaagtgccccccagcaggctcgcggccggcggaacgcaggcagtggaccggccttcccgtcgggggcgggccgggcggggcgcgcgtccttccaggcagctcggtcgcttgtgcgttccg

SEQ ID NO: 690332 - DNA, 120 bp, Artificial Sequence
  ENSG00000188167_3 (sequence is synthesized)
gcgttccgctccggccgccctttgcgcttggatccacttccccatctgtaacgaggtgttgagacgaggcggagttgacctggaaacctctccttggccactgtcctttctaaggaactc

SEQ ID NO: 690333 - DNA, 120 bp, Artificial Sequence
  ENSG00000188167_4 (sequence is synthesized)
atttccagagtccaccagcacagaactggtgggggagcctactaggagcagagaaaatggccatcttcaggcagctgtccctaggcgcgaaggccaccctggctgctgtcactgtcttcg

SEQ ID NO: 690334 - DNA, 120 bp, Artificial Sequence
  ENSG00000188167_5 (sequence is synthesized)
tgtccatgatcgcctcccgctcgtatctggcagagagccttgagctcagggcctggcgttggctgcttcgcttgcagcttgccctgtttgtcaactcgctcttgctcattggctccctct

SEQ ID NO: 690335 - DNA, 120 bp, Artificial Sequence
  ENSG00000188167_6 (sequence is synthesized)
acatttggcgcagcacagtgagcaacctctgccactccccagctgcagagtcaacctgttttcagctttggaaggtggtggttctggcatttctggccctggcccattccagtttcttta

SEQ ID NO: 690336 - DNA, 120 bp, Artificial Sequence
  ENSG00000188167_7 (sequence is synthesized)
ccatgttctttttagtggccgaagagccctatctcttttccttggcggcctactcctgcctgggtgcttacatcatcatgctcttcttcctcttcatcctcagcggcatggagcaggcct

SEQ ID NO: 690337 - DNA, 120 bp, Artificial Sequence
  ENSG00000188167_8 (sequence is synthesized)
accagctcttggcctggcgcagtggtagggtcgtgggcagccttgagaagacaaggaagctcgtgctcaggcctgccctggcagtgggagtgactgctgtgctcagcgtggccgggattc

SEQ ID NO: 690338 - DNA, 120 bp, Artificial Sequence
  ENSG00000188167_9 (sequence is synthesized)
tgaatgccgcgcagcccccggctgtgaaaactgtggaggtgcccatccatcagctgcctgcctcaatgaacaacctcaagatcgtgctcctctcagacattcacttgggccccacagtgg

SEQ ID NO: 690339 - DNA, 120 bp, Artificial Sequence
  ENSG00000188167_10 (sequence is synthesized)
gcaggaccaagatggaaatgtttgtgaggatggtgaatgtgctggaaccagacatcacggtgattgtgggtgacctctccgactcagaagcctcggtcctgcggacggctgtcgctcctc

SEQ ID NO: 690340 - DNA, 120 bp, Artificial Sequence
  ENSG00000188167_11 (sequence is synthesized)
tgggccagcttcattcacatctcggtgcctacttcgtcacaggcaatcatgagtactacacgtcagatgtcagcaactggtttgcacttctggaatccctgcatgtccagcctcttcata

SEQ ID NO: 690341 - DNA, 120 bp, Artificial Sequence
  ENSG00000188167_12 (sequence is synthesized)
atgagaacgtgaagatttccgccacacgggcccaacgtggtggtggtggcagtggcagtgggagtgaggatgaggactggatctgcttggctggggtggacgatattgaagcagacatcc

SEQ ID NO: 690342 - DNA, 120 bp, Artificial Sequence
  ENSG00000188167_13 (sequence is synthesized)
tgcactactctggccatggcatggatcttgacaaggccctggagggctgcagcccagaccacacaatcatcttgctagctcaccagcccctggctgccaagagagctctccaggctcggc

SEQ ID NO: 690343 - DNA, 120 bp, Artificial Sequence
  ENSG00000188167_14 (sequence is synthesized)
cagatattaacctgatcctttctgggcacacacatgctgggcagatcttccccttgaacgtagcagcctatctcctgaatcccttctttgctggtctctaccaggtggcccaggctacat

SEQ ID NO: 690344 - DNA, 120 bp, Artificial Sequence
  ENSG00000188167_15 (sequence is synthesized)
tcgtgtatgtcagcccaggcacagcctactacgggatacccatgaggctgggtagcagggccgagatcacagagctcatcctgcagcggtctccctgaactggccctgccctgtgcacct

SEQ ID NO: 690345 - DNA, 120 bp, Artificial Sequence
  ENSG00000188167_16 (sequence is synthesized)
ctgccctgcccttgtcctcgaccctccatcctgcttcagagtggtttgcctgcttttcccctccagccttgcccactcatccttgcctacacacccttggtcacaagcctgactcaaaca

SEQ ID NO: 690346 - DNA, 120 bp, Artificial Sequence
  ENSG00000188167_17 (sequence is synthesized)
tcccctctattttccagatgatgtggaatggggaccttctcctgcagagctcccagggatgaacctcccctcggggttgctagaaaggcatacctctagaaggtggggcggggaggagca

SEQ ID NO: 690347 - DNA, 120 bp, Artificial Sequence
  ENSG00000188167_18 (sequence is synthesized)
ggagcatttttctcctggtgttttaaaattgtctttaggacttaagtggtttccagaatcattgatccagagcctttctggggaaggggtagtgttgccaggtaatttgggagaacaggc

SEQ ID NO: 690348 - DNA, 120 bp, Artificial Sequence
  ENSG00000188167_19 (sequence is synthesized)
aagatggaagggccctctggctgctagagaagaatattttcttttcctctgattctatcaggatcacctctattgagggcatcagcaaaatctactggaatgcaaagctcctcctgttcc

SEQ ID NO: 690349 - DNA, 120 bp, Artificial Sequence
  ENSG00000188167_20 (sequence is synthesized)
aggccttgagggatgctatttaactgtctgtgctcctgggcctttgggggcaaggtcaggggagaagaacggtgggcgccatggtcggtgatggtgagaacatggctgcttaggaattca

SEQ ID NO: 690350 - DNA, 120 bp, Artificial Sequence
  ENSG00000188167_21 (sequence is synthesized)
gagggctttgcctcccttgtctcattttatacaacccttcggggagctcactggggacaggctgcttttccctatttggagataaggaaaccaaggcaaagagagatagggcacaggcag

SEQ ID NO: 690351 - DNA, 120 bp, Artificial Sequence
  ENSG00000188167_22 (sequence is synthesized)
tatgacaagatatgtaggagatttggggctagaaaccaggtcttgtacctcccagtaaaagcggtgcttttgcccttttgccagaagcaatagatcctttgatcctgagatggagataag

SEQ ID NO: 690352 - DNA, 120 bp, Artificial Sequence
  ENSG00000188167_23 (sequence is synthesized)
cacccgtgttagaaaaggcctcactgagaagacagggctgggctggtttcctgctgggtgatttaggcttgtgatggaaagtcttcctccaatggggagtgaagacactcgctctgactg

SEQ ID NO: 690353 - DNA, 120 bp, Artificial Sequence
  ENSG00000188167_24 (sequence is synthesized)
gagaggctaaccctgctgctcactcatagggcagcgttgggtgggtgactttccctcactcagccttggtttccatcaaccctaaaatggggataattatcgtatctacctcaagattgt

SEQ ID NO: 690354 - DNA, 120 bp, Artificial Sequence
  ENSG00000188167_25 (sequence is synthesized)
tttgtcaggagggatccatcaagccttgtgcatgagttccacatggcacagcgtgcacagtaaacactcaatgttaatttttcaacgttccagtggagcttgctaaggaactctgttggg

SEQ ID NO: 690355 - DNA, 120 bp, Artificial Sequence
  ENSG00000188167_26 (sequence is synthesized)
cacaggtgcccagaggattcatggagcagccagtcctggggaatgtgagtgggtagcgagctgcctgctgctggggcaggtgatgtgtcaaagcagcaactgctaggggtttgccttcct

SEQ ID NO: 690356 - DNA, 120 bp, Artificial Sequence
  ENSG00000188167_27 (sequence is synthesized)
tccctcatgtgcattctggcaggcaaagggggtttcttcctttcctccttgtcctcctggtgtatagtggggttctgggggatctggagaccaccctttttgttcccaggcagccacggt

SEQ ID NO: 690357 - DNA, 120 bp, Artificial Sequence
  ENSG00000188167_28 (sequence is synthesized)
attgacagtgggccataccatgcagtttaaaatgtatctttgagttgaaattttggtggtttccttattcttttttctctcttcactgtccttccaaactcacttttcttgtgtcccgac

SEQ ID NO: 690358 - DNA, 120 bp, Artificial Sequence
  ENSG00000188167_29 (sequence is synthesized)
cgcattttgtgaatcatccttactccctttaagttctcgctttggatttcaccaggtgggctagatggtgccatttcacttccactgtttgatgcggctggtaatgtttgactcacctgt

SEQ ID NO: 690359 - DNA, 120 bp, Artificial Sequence
  ENSG00000188167_30 (sequence is synthesized)
tacgtgttatttcactggtttcttgattttacatctttctcatcagtgacctgggcttgatgaaattagctttcattaagtcctattttttttttaattttgcatccttacctcttttct

SEQ ID NO: 690360 - DNA, 120 bp, Artificial Sequence
  ENSG00000188167_31 (sequence is synthesized)
ttctcttgaatgccatcattgtgtggtcttatgtacccttcatccactctgaagtccttgcttgactgattgctttctattagcagaaagaaaacaggtccatcctatgtatctgagaaa

SEQ ID NO: 690361 - DNA, 120 bp, Artificial Sequence
  ENSG00000188167_32 (sequence is synthesized)
caacatcaacaccctctcgtatgtggtttgtattccctgacgcggcggacatttttgcagcagaaatttctccatcactgtccagattctggccctggtgggcaggtctccatgacacct

SEQ ID NO: 690362 - DNA, 120 bp, Artificial Sequence
  ENSG00000188167_33 (sequence is synthesized)
ttagtccctttgttcaacattcttaaaccatggacctttttgtttgtttgtggccgggggaggtggtgagaaacgttacttgaagcttgatcattctttcaatttcatttgtttctttat

SEQ ID NO: 690363 - DNA, 120 bp, Artificial Sequence
  ENSG00000188167_34 (sequence is synthesized)
ttttaatctgttagatgcaaattgaaatgcaatgctttttgaaaatcagcaatagtgtctgtagtatatgatgctgtcacaaaatctcaataaattgatcctgctgccattccttccaaa

SEQ ID NO: 690364 - DNA, 82 bp, Artificial Sequence
  ENSG00000188171_0 (sequence is synthesized)
cgtgtcctgcaggtattgggagatccacagctaagacaccgggacctcctggaagccaaaaatgggaccattgcaatttaga

SEQ ID NO: 690365 - DNA, 120 bp, Artificial Sequence
  ENSG00000188171_1 (sequence is synthesized)
cctggacactgcacagcggaatttatataggaatgtgatgttagagaactacagtaacctggtcttccttggtattactgtttctaagccagacctgatcacctgtctggagcaaggaag

SEQ ID NO: 690366 - DNA, 120 bp, Artificial Sequence
  ENSG00000188171_2 (sequence is synthesized)
aaaacctttgaccatgaagagaaatgagatgatagccaaaccctcagtaatgtgttctcattttgcccaagacctttggccagagcagagcatgaaagattctttccaaaaagtggtact

SEQ ID NO: 690367 - DNA, 120 bp, Artificial Sequence
  ENSG00000188171_3 (sequence is synthesized)
gagaagatatgaaaaatgtgaacatgacaatttacagttaaaaaaaggatgtataagtgtggatgagtgtaaggtgcacaaagaaggttataatgaacttaaccaatgtttgacaactac

SEQ ID NO: 690368 - DNA, 120 bp, Artificial Sequence
  ENSG00000188171_4 (sequence is synthesized)
cccaagaaaaatatgtcaatgtgataaatatgtgaaagtccttcatcaatttccaaattcaaacggacaaaagagaggacatactgggaaaaaacctttcaaatatatagaatgtggcaa

SEQ ID NO: 690369 - DNA, 120 bp, Artificial Sequence
  ENSG00000188171_5 (sequence is synthesized)
atactgggaaaaaacctttcaaatatatagaatgtggcaaagcttttaagcagttctcaactcttactacacataagaaaattcatactggagggaaaccctacaaatgtgaagaatgtg

SEQ ID NO: 690370 - DNA, 90 bp, Artificial Sequence
  ENSG00000188171_6 (sequence is synthesized)
gtgaagaatgtggcaaagcctttaagcactcctccactcttactacacataagagaaataaatgtggcaaagcctttatgtcatcctcaa

SEQ ID NO: 690371 - DNA, 120 bp, Artificial Sequence
  ENSG00000188171_7 (sequence is synthesized)
atactggagagaaaccctacaagtgtgataaatgtggcaaagcctttatgtcatcctcaacccttagtaaacatgagataattcatacggaaaagaaaccctacaaatgtgaagaatgtg

SEQ ID NO: 690372 - DNA, 89 bp, Artificial Sequence
  ENSG00000188171_8 (sequence is synthesized)
gacaaagcctttaagtactcctatacccttactacacataaaagaattcatactgaagacaaaccctacaaatgtgaagaatgtggcaa

SEQ ID NO: 690373 - DNA, 73 bp, Artificial Sequence
  ENSG00000188171_9 (sequence is synthesized)
aaatgtgaagaatgtggcaaagccttcaaccagtcctcaatccttactacacataggagaattcatgcggtcc

SEQ ID NO: 690374 - DNA, 86 bp, Artificial Sequence
  ENSG00000188171_10 (sequence is synthesized)
attcatacaaagcttttaagcatttctctaaccttactacacataagaaaattcatactggaaaaaaaccctacagatgtgaagaa

SEQ ID NO: 690375 - DNA, 120 bp, Artificial Sequence
  ENSG00000188171_11 (sequence is synthesized)
gaaaattcatactggaaaaaaaccctacagatgtgaagaatgtggcaaagcctttaagcactcctctaaacttactacacataagagatttcatactggagagaaaccctacagatgtga

SEQ ID NO: 690376 - DNA, 86 bp, Artificial Sequence
  ENSG00000188171_12 (sequence is synthesized)
gtgaatgtgatgaatggggaaaatcttttaaccagccctcaatttctaactaagaattgatatgaaatataaactctacaaatata

SEQ ID NO: 690377 - DNA, 120 bp, Artificial Sequence
  ENSG00000188171_13 (sequence is synthesized)
taactaagaattgatatgaaatataaactctacaaatataaagaatgtgacagattttttaaggaacttctcaacctttattacacataattcatactggaaagaaaccctacaagtgtg

SEQ ID NO: 690378 - DNA, 87 bp, Artificial Sequence
  ENSG00000188171_14 (sequence is synthesized)
aagaatgtggcaaagcatataacaagttctgactcttgtcacccagtctggtgtgcaatagcacagtctcggctcactgcaacctcc

SEQ ID NO: 690379 - DNA, 84 bp, Artificial Sequence
  ENSG00000188171_15 (sequence is synthesized)
cagtccattctcctgcctcaacctcccaagtaagggggattacaggtgcccacccccatgcccagctaacttttgtatttttag

SEQ ID NO: 690380 - DNA, 120 bp, Artificial Sequence
  ENSG00000188171_16 (sequence is synthesized)
atgcctggccacaagttcttactattaagagacatggtgataattcattctgaagaggaactctacaaacctgaaagatgtgacagtgcttttttcaacacttccatcctttctatacat

SEQ ID NO: 690381 - DNA, 120 bp, Artificial Sequence
  ENSG00000188171_17 (sequence is synthesized)
aaaaaatttatactagtgtgaaaccctagaaatatataaaatgtgaaacagcctttatatggttgccacatttgatagtaagataattcatactggcaaaattcctacaagcatgaagaa

SEQ ID NO: 690382 - DNA, 120 bp, Artificial Sequence
  ENSG00000188171_18 (sequence is synthesized)
tgtggcaaaacctttaatcaatgtgtacatcttattttgcaggaaagctattatccttgagaaaaattgtacaaatataaagaatatggaaaacccattaatgcctactcacatcttact

SEQ ID NO: 690383 - DNA, 120 bp, Artificial Sequence
  ENSG00000188171_19 (sequence is synthesized)
caacataagaaggttcatagttaatgaaagcattaaaagtgcaattactgtcaaaaaatctttcagaaaatataagcctttaaagtgaagaagagtatttattctgaagacaaccattac

SEQ ID NO: 690384 - DNA, 120 bp, Artificial Sequence
  ENSG00000188171_20 (sequence is synthesized)
aaatatacaggaggtttattacacacattttgtactagaggaaaatcctgaagcagttgctcaagctttgctcaacatcagagaacttatattggagaagggtcctgcaaatgtaatgaa

SEQ ID NO: 690385 - DNA, 120 bp, Artificial Sequence
  ENSG00000188171_21 (sequence is synthesized)
tttggaaacactttaaaaaaaaaaaactacagcttagaaaacagcagagtttatactaaaatatatttttgcagatgcagtaaacatgaaaaaatatttaattcaaaattaattgtatgt

SEQ ID NO: 690386 - DNA, 120 bp, Artificial Sequence
  ENSG00000188171_22 (sequence is synthesized)
aaatatcagaatttacagaataactaaggcactgacacttcagacattacattaaataagagtgttgagtatataaatgaattcacaactaaagttgttaaatttgtatataagtttgta

SEQ ID NO: 690387 - DNA, 120 bp, Artificial Sequence
  ENSG00000188171_23 (sequence is synthesized)
taaattagtatataactttaaaaggagattttttgaagctttgtatttacattgaaagtatatttgtttccttgaaaacaatttttttgaaaagtgaatgatgtaatacagctttcaaat

SEQ ID NO: 690388 - DNA, 120 bp, Artificial Sequence
  ENSG00000188171_24 (sequence is synthesized)
tatgctgttactttattatattcacgtgaaagtatgtgatcaattgttgctgcatcagagatattagagattctttatgagttgggcattctttatgaccttttctataaaacagtaagg

SEQ ID NO: 690389 - DNA, 120 bp, Artificial Sequence
  ENSG00000188171_25 (sequence is synthesized)
acattaaaatgtaagatgcatgacgaaaatataagtggagaggctcattgtagttaacctatattaagtaatgtttaaggtaggtgttcagagtaatacttttctacattatactgagag

SEQ ID NO: 690390 - DNA, 120 bp, Artificial Sequence
  ENSG00000188171_26 (sequence is synthesized)
tttactaattttactgttacgtaataaaatgcaatatatttaaaaattgttagatgatgtgtgaacttaacttatattttatttacttacttaacttttcttttgagatggagtcttgct

SEQ ID NO: 690391 - DNA, 71 bp, Artificial Sequence
  ENSG00000188171_27 (sequence is synthesized)
aacagtgcagtctcagcacaatgactgcaacctccacctcccaagttcaagaaattctcctgcctcagcct

SEQ ID NO: 690392 - DNA, 67 bp, Artificial Sequence
  ENSG00000188171_28 (sequence is synthesized)
cacgcctggctaatttttatatttttaatagacatggggtttcccaggctctcaaagtgttgggatt

SEQ ID NO: 690393 - DNA, 120 bp, Artificial Sequence
  ENSG00000188171_29 (sequence is synthesized)
gatccacccacctcaggctctcaaagtgttgggattataggtgtgagccaatatgtccagcctaattttattttattttttaccatcttaaaactattgtgcatttaatgaagcattatt

SEQ ID NO: 690394 - DNA, 120 bp, Artificial Sequence
  ENSG00000188171_30 (sequence is synthesized)
atgccactaactttaacctatccggccttactcaaatggtgtaagcaaaagatggaagaagtatactatttggtatgtagtggaatgtcatcactagtaatcactttgccagtaaactgc

SEQ ID NO: 690395 - DNA, 120 bp, Artificial Sequence
  ENSG00000188171_31 (sequence is synthesized)
tttgccagtaaactgcaaatgaagaatattgttcccgttagttaaatttttaatcttttttcttaatttattattactatctgtgagtatatagtatgtgtatatatgtcttatagagaa

SEQ ID NO: 690396 - DNA, 120 bp, Artificial Sequence
  ENSG00000188171_32 (sequence is synthesized)
tacaatatgtagtaattacattagggtaaataaggtatctgtcacctctagcatttatcctttctaatccaaacagtgtaattatacacttttagttacttttaaatgtccaattaaatt

SEQ ID NO: 690397 - DNA, 120 bp, Artificial Sequence
  ENSG00000188171_33 (sequence is synthesized)
tagttacttttaaatgtccaattaaattgtaattgactacagggtgatttttatggtcataataaaaattatacagaaatataaatagaatatgggctggacgcagtggctcatgcctgt

SEQ ID NO: 690398 - DNA, 120 bp, Artificial Sequence
  ENSG00000188171_34 (sequence is synthesized)
atagccaaaccctcagtgagcttccttcaagttcacagtgagagccaaagtcctcttcatgacatataagagactgcacagtgtggctgcttttccataatttttgggacgcacaaatgt

SEQ ID NO: 690399 - DNA, 120 bp, Artificial Sequence
  ENSG00000188171_35 (sequence is synthesized)
tgcatcagatctgaaatgtctgagagtaatagtttctgttgaatttttttttgttcatttttctgcacagtccattctgtttttattactatctaggcttgaaatatatagtttgaaatt

SEQ ID NO: 690400 - DNA, 120 bp, Artificial Sequence
  ENSG00000188171_36 (sequence is synthesized)
atgacatccttcctctttgttattttcctcatgattgctttggctattcaaagtttattttagtttcatgtaaatttttgaattgtattttccattattgtgaaaatagtaccactgcaa

SEQ ID NO: 690401 - DNA, 120 bp, Artificial Sequence
  ENSG00000188171_37 (sequence is synthesized)
cactgcaattttaataggaagtttattgaatctatagattactttggataatatggcacttcaataatattcatgttttcaattcatagacaaaatattttaaaatttatttgtatcttt

SEQ ID NO: 690402 - DNA, 120 bp, Artificial Sequence
  ENSG00000188171_38 (sequence is synthesized)
ttcctttttttattgtaaagatttacctccttggttaatattttcctcagaaatttattatttaaggtatagtcaataaaattttcttcctctattttgtcagatagtttaagtgtatga

SEQ ID NO: 690403 - DNA, 120 bp, Artificial Sequence
  ENSG00000188171_39 (sequence is synthesized)
cagatagtttaagtgtatgaaaccatagatatacttgtatgttaattttatattttgctaatttactgagtgtatttattagtttagagaggttttaatgtactgtttatggttttttaa

SEQ ID NO: 690404 - DNA, 73 bp, Artificial Sequence
  ENSG00000188171_40 (sequence is synthesized)
aggtggaggttggacactccatctcaaaaagaaagaaaaaagccaggacagtggcttacacctgtaatcccag

SEQ ID NO: 690405 - DNA, 120 bp, Artificial Sequence
  ENSG00000188171_41 (sequence is synthesized)
gcctgggcaacagagcaagactccgtcacaaaaaaaaaaagaaaaaatacggccatgtgcagtgcctcatgcctattatcccagcaatttcggaggctgaggcaggtgtgttgcttgagc

SEQ ID NO: 690406 - DNA, 71 bp, Artificial Sequence
  ENSG00000188171_42 (sequence is synthesized)
gagctcaggagttcaagaccagcctctcatggtggcgcacacctggaggctgaggtaggagaatcacttga

SEQ ID NO: 690407 - DNA, 87 bp, Artificial Sequence
  ENSG00000188171_43 (sequence is synthesized)
ttgtgagactcctcaaaggaaaaaaaattacatttctgagtcctgaaaaattattaataaatatttgttatatagtttctttgaaca

SEQ ID NO: 690408 - DNA, 120 bp, Artificial Sequence
  ENSG00000188171_44 (sequence is synthesized)
aaattattaataaatatttgttatatagtttctttgaacatgtggtcactctgcctgcaaacgtaaagacttttaattttcatagagtgaaatatacacatattcctctgaagataaacc

SEQ ID NO: 690409 - DNA, 120 bp, Artificial Sequence
  ENSG00000188171_45 (sequence is synthesized)
ttaggtgtaagaaaattatgaaatgagtgtttggtaaatatgcatttgtacatattttcagaagaaaacgcaattattggaacaaaataagtttttaggtgattaatggaaaactaaaca

SEQ ID NO: 690410 - DNA, 120 bp, Artificial Sequence
  ENSG00000188171_46 (sequence is synthesized)
ccttgaatatgctgaaagcaaatgtatactttctgctttgtatggaatttattaatataaaattttatggcttatggctcggattctccccagaatccgtgtattaaagcacaggcaact

SEQ ID NO: 690411 - DNA, 120 bp, Artificial Sequence
  ENSG00000188171_47 (sequence is synthesized)
ttgtctccagaaataacactcttgagtacaacaataaaagccctcttcaaacacactcaaaaaattatttttaacgcttattttaataaaaatttaaccaaaattgaataattggataca

SEQ ID NO: 690412 - DNA, 120 bp, Artificial Sequence
  ENSG00000188171_48 (sequence is synthesized)
tttttattgttctatgtgtgtgtgaatgtataaaatgacacataaaggaataataatttaagccagaaaaaaagatgttagttaatatttgtaatgaataaaactggaaagtagttatta

SEQ ID NO: 690413 - DNA, 120 bp, Artificial Sequence
  ENSG00000188171_49 (sequence is synthesized)
cttctcctaaaggcccaggctgtgtggccccgtgtcctgcaggtattgggagatccacagctaagacaccgggacctcctggaagccaaaaatgtaatgtgttctcattttgcccaagac

SEQ ID NO: 690414 - DNA, 120 bp, Artificial Sequence
  ENSG00000188175_0 (sequence is synthesized)
actgagaacagggcactgcatgcatgggacaggatgctttcatggagcccttcggtgacacacttggggtctttcagtgcaaaatatacctccttctcttcggtgcttgctcggggctga

SEQ ID NO: 690415 - DNA, 120 bp, Artificial Sequence
  ENSG00000188175_1 (sequence is synthesized)
aggtgacagtgccatcacacactgtccatggcgtcagaggtcaggccctctacctacccgtccactatggcttccacactccagcatcagacatccagatcatatggctatttgagagac

SEQ ID NO: 690416 - DNA, 120 bp, Artificial Sequence
  ENSG00000188175_2 (sequence is synthesized)
cccacacaatgcccaaatacttactgggctctgtgaataagtctgtggttcctgacttggaataccaacacaagttcaccatgatgccacccaatgcatctctgcttatcaacccactgc

SEQ ID NO: 690417 - DNA, 120 bp, Artificial Sequence
  ENSG00000188175_3 (sequence is synthesized)
agttccctgatgaaggcaattacatcgtgaaggtcaacattcagggaaatggaactctatctgccagtcagaagatacaagtcacggttgatgatcctgtcacaaagccagtggtgcaga

SEQ ID NO: 690418 - DNA, 120 bp, Artificial Sequence
  ENSG00000188175_4 (sequence is synthesized)
ttcatcctccctctggggctgtggagtatgtggggaacatgaccctgacatgccatgtggaagggggcactcggctagcttaccaatggctaaaaaatgggagacctgtccacaccagct

SEQ ID NO: 690419 - DNA, 120 bp, Artificial Sequence
  ENSG00000188175_5 (sequence is synthesized)
ccacctactccttttctccccaaaacaatacccttcatattgctccagtaaccaaggaagacattgggaattacagctgcctggtgaggaaccctgtcagtgaaatggaaagtgatatca

SEQ ID NO: 690420 - DNA, 120 bp, Artificial Sequence
  ENSG00000188175_6 (sequence is synthesized)
ttatgcccatcatatattatggaccttatggacttcaagtgaattctgataaagggctaaaagtaggggaagtgtttactgttgaccttggagaggccatcctatttgattgttctgctg

SEQ ID NO: 690421 - DNA, 120 bp, Artificial Sequence
  ENSG00000188175_7 (sequence is synthesized)
attctcatccccccaacacctactcctggattaggaggactgacaatactacatatatcattaagcatgggcctcgcttagaagttgcatctgagaaagtagcccagaagacaatggact

SEQ ID NO: 690422 - DNA, 120 bp, Artificial Sequence
  ENSG00000188175_8 (sequence is synthesized)
cattgtcacctttagcaagtataactggaatatcactatttttgattatatccatgtgtcttctcttcctatggaaaaaatatcaaccctacaaagttataaaacagaaactagaaggca

SEQ ID NO: 690423 - DNA, 120 bp, Artificial Sequence
  ENSG00000188175_9 (sequence is synthesized)
ggccagaaacagaatacaggaaagctcaaacattttcaggccatgaagatgctctggatgacttcggaatatatgaatttgttgcttttccagatgtttctggtgtttccaggatcccaa

SEQ ID NO: 690424 - DNA, 120 bp, Artificial Sequence
  ENSG00000188175_10 (sequence is synthesized)
gcaggtctgttccagcctctgattgtgtatcggggcaagatttgcacagtacagtgtatgaagttattcagcacatccctgcccagcagcaagaccatccagagtgaactttcatgggct

SEQ ID NO: 690425 - DNA, 120 bp, Artificial Sequence
  ENSG00000188175_11 (sequence is synthesized)
aaacagtacattcgagtgaaattctgaagaaacattttaaggaaaaacagtggaaaagtatattaatctggaatcagtgaagaaaccaagaccaacacctcttactcattattcctttac

SEQ ID NO: 690426 - DNA, 120 bp, Artificial Sequence
  ENSG00000188175_12 (sequence is synthesized)
atgcagaatagaggcatttatgcaaattgaactgcaggtttttcagcatatacacaatgtcttgtgcaacagaaaaacatgttggggaaatattcctcagtggagagtcgttctcatgct

SEQ ID NO: 690427 - DNA, 120 bp, Artificial Sequence
  ENSG00000188175_13 (sequence is synthesized)
gacggggagaacgaaagtgacaggggtttcctcataagttttgtatgaaatatctctacaaacctcaattagttctactctacactttcactatcatcaacactgagactatcctgtctc

SEQ ID NO: 690428 - DNA, 120 bp, Artificial Sequence
  ENSG00000188175_14 (sequence is synthesized)
acctacaaatgtggaaactttacattgttcgatttttcagcagactttgttttattaaatttttattagtgttaagaatgctaaatttatgtttcaattttatttccaaatttctatctt

SEQ ID NO: 690429 - DNA, 120 bp, Artificial Sequence
  ENSG00000188175_15 (sequence is synthesized)
gttatttgtacaacaaagtaataaggatggttgtcacaaaaacaaaactatgccttctcttttttttcaatcaccagtagtatttttgagaagacttgtgaacacttaaggaaatgacta

SEQ ID NO: 690430 - DNA, 120 bp, Artificial Sequence
  ENSG00000188175_16 (sequence is synthesized)
ttaaagtcttatttttatttttttcaaggaaagatggattcaaataaattattctgtttttgcttttatgtggtcttaattctttgtcttgtagagtaaaaatattacataaaaatcaga

SEQ ID NO: 690431 - DNA, 120 bp, Artificial Sequence
  ENSG00000188175_17 (sequence is synthesized)
actgagaacagggcactgcatgcatgggacaggatgctttcatggagcccttcggtgacacacttggggtctttcagtgcaaaatatacctccttctcttcgatattgttgcaaactgtt

SEQ ID NO: 690432 - DNA, 120 bp, Artificial Sequence
  ENSG00000188175_18 (sequence is synthesized)
gagcctactctccatccactctgaggagtaaactcttgagatctgtggagaatttgaaatcatttaaaaggttaaaatacctgcttttgagatgtttccagaaccaaattggtgtttggt

SEQ ID NO: 690433 - DNA, 120 bp, Artificial Sequence
  ENSG00000188175_19 (sequence is synthesized)
gaatagtcagtacctagaagccactcttctttgaaaaggattatcacctgatcaggttctctctgcatttgcccctttagattgtgaaatgtggctcaaggtcttcacaactttcctttc

SEQ ID NO: 690434 - DNA, 120 bp, Artificial Sequence
  ENSG00000188176_0 (sequence is synthesized)
gacagcgcgtagtcgcagagtcagggaggggacctcaccacctgtctcctccctgaggtcttagaacagatacaagaaattccaggcgaaggtcccacagagtttggatcacgatgaggc

SEQ ID NO: 690435 - DNA, 120 bp, Artificial Sequence
  ENSG00000188176_1 (sequence is synthesized)
cagtgagtcggagatgagaaagacctcaaactcctgcatcatggaaaatgggcaccagccgggggcaggtccaggcgatggaccccctgagattgcccaaaacttctcagcaccagatcc

SEQ ID NO: 690436 - DNA, 120 bp, Artificial Sequence
  ENSG00000188176_2 (sequence is synthesized)
ccccaggcctcgtcctgtgagcctctccttgcggctgccccaccagccagtcacggccatcacccgagtctctgacaggttctctggggagacctcagctgcggctctatcacccatgtc

SEQ ID NO: 690437 - DNA, 120 bp, Artificial Sequence
  ENSG00000188176_3 (sequence is synthesized)
tgctgccaccctggggggcctcaacccaagccccagcgaggtcatcacgccctggactcccagtcctagcgagaagaattcctctttcacgtggtctgtgccaagctctggctatggggc

SEQ ID NO: 690438 - DNA, 120 bp, Artificial Sequence
  ENSG00000188176_4 (sequence is synthesized)
agtgacagcaagcaaacacagcaatagcccaccgctggtgacaccaccccagtcgcccgtgtccccgcagccgccagccataactcaggtccatcggcagggggagcgtcgcagggagct

SEQ ID NO: 690439 - DNA, 120 bp, Artificial Sequence
  ENSG00000188176_5 (sequence is synthesized)
ggtgaggtcgcagacgctgccccgcacctcggaggcgcaggcccggaaagcattgtttgagaagtgggagcaggaaacggcggccggcaaggggaaaggcgaggcccgggccaggctgaa

SEQ ID NO: 690440 - DNA, 120 bp, Artificial Sequence
  ENSG00000188176_6 (sequence is synthesized)
gcggtcgcagagcttcggcgtggccagcgccagcagcatcaagcagatcctgctcgagtggtgccgcagcaagacgctgggctaccagcacgtggacctgcagaacttctcctccagctg

SEQ ID NO: 690441 - DNA, 120 bp, Artificial Sequence
  ENSG00000188176_7 (sequence is synthesized)
agaatctggccaactgtgagcgcctcatcgaagtggaggacatgatggtgatgggccgcaagccggaccccatgtgtgtcttcacctacgtccagtcgctgtacaaccacctgcgtcgct

SEQ ID NO: 690442 - DNA, 120 bp, Artificial Sequence
  ENSG00000188176_8 (sequence is synthesized)
tcgagtaaagcccctgagcctggattgccaaagagcagccccaggaagaggccgggggtccgcttgcgattccccagccaggatgcccccaggagccttgccgtttggtgtgagcgcgct

SEQ ID NO: 690443 - DNA, 120 bp, Artificial Sequence
  ENSG00000188176_9 (sequence is synthesized)
gtttgttctgtggcatgtgacggcactccccttcgagcccagctgtgttactgattaaaagtactgctgagctgtggtccgacagcactgatcacagccaagggcttggaggaaaaggaa

SEQ ID NO: 690444 - DNA, 120 bp, Artificial Sequence
  ENSG00000188176_10 (sequence is synthesized)
aaattatgagagagagagagacattggtgctaagtaatgatcttcctaaagaaatgcttgtgtttatagcttccagaatgctaatctacaattttccctctggtgaattcgatacatcgg

SEQ ID NO: 690445 - DNA, 120 bp, Artificial Sequence
  ENSG00000188176_11 (sequence is synthesized)
ctttacagggttacagtgattaccaagtgtttttttttatcaaaatacccagagttttttacttcctcacgcgattgtaggttcctctcctccctccctctgggccactgccaggaaaca

SEQ ID NO: 690446 - DNA, 120 bp, Artificial Sequence
  ENSG00000188176_12 (sequence is synthesized)
gagagaccgcttaatcagcagcttgacaaagaagacctcaagtcttgggaagaaacagtttaatcactcccaagtcctgggcaacagatgaccttcaagtcacctccgctctccggggag

SEQ ID NO: 690447 - DNA, 120 bp, Artificial Sequence
  ENSG00000188176_13 (sequence is synthesized)
atgggaaggctctcctctcggtcccaaagtcctcctgttcttcccaggaggccccacaagtgtttggctaagcacaggctctcgggaatttaacacttttggggaaggaataggcccttt

SEQ ID NO: 690448 - DNA, 120 bp, Artificial Sequence
  ENSG00000188176_14 (sequence is synthesized)
gtgctgagagagagtttttattcacatcttttttaggggatttgctgcagatatttataaaaagtaactccctctgtaccactgacccatttatacataaaaaagatgtgttgaattttg

SEQ ID NO: 690449 - DNA, 120 bp, Artificial Sequence
  ENSG00000188176_15 (sequence is synthesized)
agtcgcggcccggagctgcggagctcggatcttctcccccgtctggcccgctctcgacccgcgcgctctgctgggccatggagccggcccccgacgcccaggaggcgcgcactgtgcgcg

SEQ ID NO: 690450 - DNA, 120 bp, Artificial Sequence
  ENSG00000188176_16 (sequence is synthesized)
tgtgcgcgaggcgctgggccgctacgaggcggcgctggagggtgcggtgcgcgcgctgcacgaggacatgcgggggctgcagcgcggcgtggagcggcgagtggcagaggcgatgcgcct

SEQ ID NO: 690451 - DNA, 120 bp, Artificial Sequence
  ENSG00000188176_17 (sequence is synthesized)
ccctggcgcgcacggtggccgacctgcagcgggacaaccagcggctgcaggcgcagctcgagcgcctgacgcgccaggtggaggcgctgggcttggccagcgggatgtccccggtgcccg

SEQ ID NO: 690452 - DNA, 120 bp, Artificial Sequence
  ENSG00000188176_18 (sequence is synthesized)
cgcccagccccccgcccgcgcccggggttcccgaccgcgcgccccgcctgggcagcgcacgcttcgccagccacgccaccttctcgctgtccggccgcggccagagtttggatcacgatg

SEQ ID NO: 690453 - DNA, 120 bp, Artificial Sequence
  ENSG00000188176_19 (sequence is synthesized)
ctgtagagtttggatcacgatgaggccagtgagtcggagatgagaaagacctcaaactcctgcatcatggaaaatgggcaccagccgggggcagagaagaattcctctttcacgtggtct

SEQ ID NO: 690454 - DNA, 120 bp, Artificial Sequence
  ENSG00000188177_0 (sequence is synthesized)
ttttctcgagccgcctgtttcgggtgccgccatgttggtgaggagaaatcaccgttacggccactgtccaaatccccgcgtcgctgcacgccgcccgcccgctcccacgccacagccacc

SEQ ID NO: 690455 - DNA, 120 bp, Artificial Sequence
  ENSG00000188177_1 (sequence is synthesized)
ggcggcgaatagagactagagcggcagcgccggcagcgcggggccgttgcccagtgtttgcagttagagccccatctctctggcgtggttgttaatagactggaaagtctgtgtctgtgt

SEQ ID NO: 690456 - DNA, 120 bp, Artificial Sequence
  ENSG00000188177_2 (sequence is synthesized)
cgctcactagtaaccgtgagtttttaccacttcgtcacctgtcggcggcggccgggagcaggttcccgcaggcggcgcggggggtcttccccgcgccccgccgccgccggcctcgcagac

SEQ ID NO: 690457 - DNA, 120 bp, Artificial Sequence
  ENSG00000188177_3 (sequence is synthesized)
ctgccctccagccccgccccgttcttgaccaaacatgacagactctgaacatgcagggcacgacagagaagatggcgaattagaagatggtgaaatagacgatgcaggatttgaagaaat

SEQ ID NO: 690458 - DNA, 120 bp, Artificial Sequence
  ENSG00000188177_4 (sequence is synthesized)
acaagaaaaagaagcaaaagagaatgaaaagcagaaaagtgagaaagcctacagaaaatcaagaaaaaaacataagaaagagagagagaagaaaaaatccaaaaggagaaaacgtgagaa

SEQ ID NO: 690459 - DNA, 120 bp, Artificial Sequence
  ENSG00000188177_5 (sequence is synthesized)
acataagcataattccccatctagtgatgatagttcggactacagccttgattcagatgttgaacatacagaaagttcccataaaaaaagaactggtttctacagggattatgacattcc

SEQ ID NO: 690460 - DNA, 120 bp, Artificial Sequence
  ENSG00000188177_6 (sequence is synthesized)
atttactcagcgtggacatatatcaggaagctacataacatcaaagaagggtcaacataacaaaaaatttaaaagtaaagaatatgatgagtacagcacctacagtgatgacaacttcgg

SEQ ID NO: 690461 - DNA, 120 bp, Artificial Sequence
  ENSG00000188177_7 (sequence is synthesized)
taactacagtgatgacaactttggtaactacggtcaggaaacagaggaagattttgccaatcagctgaaacaatacaggcaagctaaagaaacctcaaatattgctttagggtcatcatt

SEQ ID NO: 690462 - DNA, 120 bp, Artificial Sequence
  ENSG00000188177_8 (sequence is synthesized)
ttctaaagaatcaggaaaaaaacagagaatgaaaggagttcagcaaggtattgaacagagagttaaaagttttaatgttggtcgtggacgtggcttgccgaagaaaatcaaacgaaaaga

SEQ ID NO: 690463 - DNA, 120 bp, Artificial Sequence
  ENSG00000188177_9 (sequence is synthesized)
acgtgggggaagaaccaataaagggcctaatgtgttttcagtatcggatgactttcaagagtataataaaccagggaaaaaatggaaggttatgactcaggaatttattaatcagcacac

SEQ ID NO: 690464 - DNA, 120 bp, Artificial Sequence
  ENSG00000188177_10 (sequence is synthesized)
agtggaacacaaaggaaaacaaatctgtaaatacttcctggaagggaggtgtattaagggagatcagtgtaaatttgatcatgatgcagagttggagaaaagaaaagagatctgcaaatt

SEQ ID NO: 690465 - DNA, 120 bp, Artificial Sequence
  ENSG00000188177_11 (sequence is synthesized)
ttatttacaaggatattgtaccaaaggagagaactgcatttatatgcataatgaatttccatgcaagttctatcatagtggagcaaaatgttaccagggagacaactgtaaattttccca

SEQ ID NO: 690466 - DNA, 120 bp, Artificial Sequence
  ENSG00000188177_12 (sequence is synthesized)
tgatgatctaactaaagaaacaaagaaacttttggacaaagtgttgaatactgatgaagaactcataaatgaagatgaaagagaattagaggaacttagaaagcgtggcataactcctct

SEQ ID NO: 690467 - DNA, 120 bp, Artificial Sequence
  ENSG00000188177_13 (sequence is synthesized)
tcccaaaccacctccaggggttgggcttctgccaacccctccagagcattttcccttttctgatcctgaagacgattttcagacagatttctctgatgattttaggaaaattccatctct

SEQ ID NO: 690468 - DNA, 120 bp, Artificial Sequence
  ENSG00000188177_14 (sequence is synthesized)
ttttgaaatagttgtaaaacctactgtggatttagcgcataaaattgggaggaagccaccagcattttataccagtgcctcaccaccaggaccacaatttcagggaagcagtccacaccc

SEQ ID NO: 690469 - DNA, 120 bp, Artificial Sequence
  ENSG00000188177_15 (sequence is synthesized)
tcaacatatctatagttctgggtcaagtccaggtcctggacctaacatgtctcagggacacagtagtcctgtgatgcacccaggctcccctggacatcacccatgtgcaggacctcctgg

SEQ ID NO: 690470 - DNA, 120 bp, Artificial Sequence
  ENSG00000188177_16 (sequence is synthesized)
tctaccagtgccacagagcccacctttaccacctggtccacctgaaattgtaggtcctcaaaatcaagctggagtgcttgttcaaccagacacatctttgacaccaccaagtatgggtgg

SEQ ID NO: 690471 - DNA, 120 bp, Artificial Sequence
  ENSG00000188177_17 (sequence is synthesized)
ggcttaccactccccaggctttccaggacatgtgatgaaagtacccagagagaatcactgttctccaggttcatcataccagcaaagtcctggtgaaatgcagctcaacaccaattatga

SEQ ID NO: 690472 - DNA, 120 bp, Artificial Sequence
  ENSG00000188177_18 (sequence is synthesized)
gtccctgcaaaacccagctgagttttacgataattactatgcacagcattctatacataattttcagccacccaataactctggtgatgggatgtggcatggtgaatttgcccagcagca

SEQ ID NO: 690473 - DNA, 120 bp, Artificial Sequence
  ENSG00000188177_19 (sequence is synthesized)
gcctcctgttgttcaagactcacctaaccatgggagtgggtctgatggcagcagcactaggacaggccatggccctctgcctgtaccaggcctcctccctgcagtgcaaagagctctttt

SEQ ID NO: 690474 - DNA, 120 bp, Artificial Sequence
  ENSG00000188177_20 (sequence is synthesized)
tgtaagacttactcagagataccaagaagatgaagaacaaaccagcacccaacctcatagggcaccaagcaaggaagaagatgatacagttaactggtattccagtagtgaagaggaaga

SEQ ID NO: 690475 - DNA, 120 bp, Artificial Sequence
  ENSG00000188177_21 (sequence is synthesized)
aggaagcagtgtcaaatcaatactgaaaacattacagaaacaaacagaaactttaaggaatcagcaacaaccttccacagaactcagcactcctactgatccaagacttgctaaagagaa

SEQ ID NO: 690476 - DNA, 120 bp, Artificial Sequence
  ENSG00000188177_22 (sequence is synthesized)
aagtaaaggaaaccaagtggttgaccctaggcttaggactatcccaaggcaagacattagaaagccttctgagtctgccccactggatcttagacttgcgtgggatcccaggaaattgag

SEQ ID NO: 690477 - DNA, 120 bp, Artificial Sequence
  ENSG00000188177_23 (sequence is synthesized)
agggaatggaagtggtcacataggctcttctgttggtggagcaaagtttgatttgcatcatgcaaatgctggcactaatgtcaaacacaaaagaggcgatgatgatgatgaagatacaga

SEQ ID NO: 690478 - DNA, 120 bp, Artificial Sequence
  ENSG00000188177_24 (sequence is synthesized)
aagagaactgagagaaaaagctttcttaatacctttggatgcctcacctggcataatgctccaggatccaaggtcacaattgagacagttcagtcacattaaaatggacattactctaac

SEQ ID NO: 690479 - DNA, 120 bp, Artificial Sequence
  ENSG00000188177_25 (sequence is synthesized)
caaacccaactttgcaaaacacatcgtgtgggctcccgaagacttacttccagtacctttacctaaacctgatccagtgtcttcaatcaatttacctctgcccccacttatagctgacca

SEQ ID NO: 690480 - DNA, 120 bp, Artificial Sequence
  ENSG00000188177_26 (sequence is synthesized)
gaggctaaatagattatggaatacaaaaagtgatcttcatcaaaatacagtgtccattgatccaaaattagcagccaaagccaaaattaacacaacaaacagagaaggctacctagaaca

SEQ ID NO: 690481 - DNA, 120 bp, Artificial Sequence
  ENSG00000188177_27 (sequence is synthesized)
atttggagactcacacggttcaggagctaaattaggagatcctagactacaaaaaaattttgatcctaggcttcacagactgcccaatacagagtctcatcaagtggttatgaaggattc

SEQ ID NO: 690482 - DNA, 120 bp, Artificial Sequence
  ENSG00000188177_28 (sequence is synthesized)
acatgcatcaaagggtgcccctcacttacccagatcaaaccctggttcatcacagccctcaggggcaggaactagcaattctggttccggggctctgcctccatatgcccctaaactctc

SEQ ID NO: 690483 - DNA, 120 bp, Artificial Sequence
  ENSG00000188177_29 (sequence is synthesized)
ttcctcagctggccttccactgggaacttccacttcagttcttagtggtattagtttgtatgaccctagggatcacggttcatcatccacatcagagctagcaacagcttcttcaggaga

SEQ ID NO: 690484 - DNA, 120 bp, Artificial Sequence
  ENSG00000188177_30 (sequence is synthesized)
aaactcaaagaaccagaaaaaaagtggtggcttaaaaagtagtgacaaaactgaaccttctcctggagaagccatccttccacaaaaacccagtccaaacgtgggagtcactcttgaggg

SEQ ID NO: 690485 - DNA, 120 bp, Artificial Sequence
  ENSG00000188177_31 (sequence is synthesized)
gccagctgacccacaggcggacgttcccaggagttctggtaaggttcaggtcccagcagtgcacagccttcctgttcaggcattaacaggcttaattaggccacagtacagtgatccaag

SEQ ID NO: 690486 - DNA, 120 bp, Artificial Sequence
  ENSG00000188177_32 (sequence is synthesized)
gcaggcaaggcagccaggacaggggagcccgaccccagataatgatcccggtagagaaacagatgacaaatctctgaaagaggtttttaaaacttttgatccaactgcttcaccattttg

SEQ ID NO: 690487 - DNA, 120 bp, Artificial Sequence
  ENSG00000188177_33 (sequence is synthesized)
ttagctattgtgtaactgagcaattcttttcactcttgtgactatctcagtcctctgctgttttgtaactggtttacctctatagtttatttatttttaaattataaacacttttcagct

SEQ ID NO: 690488 - DNA, 120 bp, Artificial Sequence
  ENSG00000188177_34 (sequence is synthesized)
gctagtatcagaaccacatgaagttatagcctctaaagcctgtggtattttatataatatttttataactttaagagactgtagtaattgacctaaaaacttatgttagcttcagtaaaa

SEQ ID NO: 690489 - DNA, 120 bp, Artificial Sequence
  ENSG00000188177_35 (sequence is synthesized)
gtacttttattgtaaataaacaatcatgaactcaacactctgcctgaatatatgccagttgtctttcataatcaatgtttagataaatgattgccactttttatatggttgtttagtttc

SEQ ID NO: 690490 - DNA, 120 bp, Artificial Sequence
  ENSG00000188177_36 (sequence is synthesized)
aagcaatatgatgtacattacttttgagaaacagtattttgactaggacctctcttatttgtcagcacagaactgattaatatgtaatgctacctgctaattaaaatgtaaaatcaagta

SEQ ID NO: 690491 - DNA, 120 bp, Artificial Sequence
  ENSG00000188177_37 (sequence is synthesized)
aagaaaacattttaaaattacaattagcagagcagttcatgtttaagggcatcacttttattagtattggcaatattatttgtgtaaatgaagcatttgaatgtcatatctttttaaagt

SEQ ID NO: 690492 - DNA, 120 bp, Artificial Sequence
  ENSG00000188177_38 (sequence is synthesized)
attttattgtatactgtatcatagaagttggaggtatataaatagaacattttgctaaagtgaaaaatttccaagttctctagcataactttttacatttaatttttcatatgaaatagc

SEQ ID NO: 690493 - DNA, 120 bp, Artificial Sequence
  ENSG00000188177_39 (sequence is synthesized)
aattagttactgctgtgttacattgtgatgtttatgtatgtcaatgtttttgtctttaacagcataatttatattgctttttcaaatgatgtagctgcattaattgtgttcatcatgact

SEQ ID NO: 690494 - DNA, 120 bp, Artificial Sequence
  ENSG00000188177_40 (sequence is synthesized)
ttggcgatttttaacaaaatttttaaagacccagtgagagtctgtagtgattattacacggataatgttttaaatgtctaggttctgtatttttttcttaaatagcaagaaaatacagat

SEQ ID NO: 690495 - DNA, 120 bp, Artificial Sequence
  ENSG00000188177_41 (sequence is synthesized)
tgctagtatagtcaacagtatttggctatcaataaagaatctctttaagatctcacccggctggcattctgtaacagaggggattacctggtgttttaagtatttaatgtcctcatagtg

SEQ ID NO: 690496 - DNA, 120 bp, Artificial Sequence
  ENSG00000188177_42 (sequence is synthesized)
agtgtggaaatcccctaaattgattagaaattgtattttatgaaaaataacttgtattcattcttgtgtatttattacaatatataaataatggcaactctttgttttatacatatataa

SEQ ID NO: 690497 - DNA, 120 bp, Artificial Sequence
  ENSG00000188177_43 (sequence is synthesized)
taactgaatctaagtattagactgctactcatattttgaactgcaggtgtaggacagtgtttgctggtaacaactccaatgtgtattaataacttgaaaaggagcatttcactataaaag

SEQ ID NO: 690498 - DNA, 120 bp, Artificial Sequence
  ENSG00000188177_44 (sequence is synthesized)
ataatgaagtaggtaatgaaatcagtccttgaatgaaagcagtgcccttgagaagggatttttttttaaatatacagtaaaatatttcgtgggaacctaacactcacatagcatatggtt

SEQ ID NO: 690499 - DNA, 120 bp, Artificial Sequence
  ENSG00000188177_45 (sequence is synthesized)
tattaataatgcatatcctttctaatcacttcttcaattctttttgctgcagttctgtgctaaaatggggttgtggttaagtgaacgagaactctgcctacctaagaagttcattgtgtt

SEQ ID NO: 690500 - DNA, 120 bp, Artificial Sequence
  ENSG00000188177_46 (sequence is synthesized)
ctaagtggaaggagagttactgaagggaatgtgaatttttaccgtttgtacttaagatacatttgttgtctaaaatggctctggataacatttttgggttaaaaaatgtaatttaaagcc

SEQ ID NO: 690501 - DNA, 120 bp, Artificial Sequence
  ENSG00000188177_47 (sequence is synthesized)
accatagaaagtattttctgatttactgtccaaatgaattttgttgttaattgagaagtcaataaaatggattaaactgacagaaaaaaaacatatatatatatcccaaggtgtaattta

SEQ ID NO: 690502 - DNA, 120 bp, Artificial Sequence
  ENSG00000188177_48 (sequence is synthesized)
tcagaaaaatggctgattttagtaaatgaaatttttagcaaatctttcattcatgtagtttataattattgtgtcaagcagtgctgtttacattttaagcatcatacaaaaaagataatt

SEQ ID NO: 690503 - DNA, 120 bp, Artificial Sequence
  ENSG00000188177_49 (sequence is synthesized)
tggcttgctaaacatcaaaatagaatccaaactcttaaccgaatatcttttttacaactaaaagagatattccaagatttattaaagagtcaggtttaaaagttattaatgcaaattatg

SEQ ID NO: 690504 - DNA, 120 bp, Artificial Sequence
  ENSG00000188177_50 (sequence is synthesized)
taatgttcatttattcagtattcttgagtccctgttacctcaattggtgttctagaggctattttacaagaaagtttgaacttagtttcaaatttgacaatatattttatatgaaaatgt

SEQ ID NO: 690505 - DNA, 120 bp, Artificial Sequence
  ENSG00000188177_51 (sequence is synthesized)
ttatgtttaaaataacttatttattatgcagcatttttattgtgataacgttagtttatgggatattctgtcatatcctgtaaacatagtttatttttcttcttttttcccattttctca

SEQ ID NO: 690506 - DNA, 120 bp, Artificial Sequence
  ENSG00000188177_52 (sequence is synthesized)
tacaaattgaataagtagccattttcccccaatgaatacctcttcttttaggtcaattggtgtttttagaatccatgtaatttgatttgcactgttagattgaaaagtaagttacgttcc

SEQ ID NO: 690507 - DNA, 120 bp, Artificial Sequence
  ENSG00000188177_53 (sequence is synthesized)
tgttcttagaagccacacatttagagataacagaaataacttgagtcttaagagtatggataggctcatccaatgagatgtaacttagctattcatactgtttgtgatggaaattctata

SEQ ID NO: 690508 - DNA, 120 bp, Artificial Sequence
  ENSG00000188177_54 (sequence is synthesized)
cctgtttactgtgatgatgaatacagtggatatagcagggggttgaaatggaacacacagaagatcatgacaattgagattcagcaactgctgtctcatatcttggttaagacctcattg

SEQ ID NO: 690509 - DNA, 120 bp, Artificial Sequence
  ENSG00000188177_55 (sequence is synthesized)
tgaaccttgaacacaaatcagatgttggagtgatttcaaactctatttcaacaattgggtctgtttctatatggaccctctatttcccagctgaatgtttcaaacccccaaattaggctg

SEQ ID NO: 690510 - DNA, 120 bp, Artificial Sequence
  ENSG00000188177_56 (sequence is synthesized)
caaccgaaagagcctaattgtgaaatgatgtgcgcttatgtttctgtttatcctttagccatggaactttaaagagtagtgttcctcctacttactttaagctggaagaagagttgagta

SEQ ID NO: 690511 - DNA, 120 bp, Artificial Sequence
  ENSG00000188177_57 (sequence is synthesized)
gtaaatcctgtgtgaacttttagctcagctactctgctgaattaattagaggtaggaaggacttacaagggctggaagtttaaagagaataaattcatattttttgttctgaattgattt

SEQ ID NO: 690512 - DNA, 120 bp, Artificial Sequence
  ENSG00000188177_58 (sequence is synthesized)
ctgtgtaatttatatcagtatctagttgcttatctgtgaaattgggttaatttttattgatcacatttgatgtaaagaatgaattatttttgtaaagtatttgtaaatataaaattgctt

SEQ ID NO: 690513 - DNA, 120 bp, Artificial Sequence
  ENSG00000188177_59 (sequence is synthesized)
tataacttgaatgaacataatcattatgctcccattagggtgcattaagttgtacaaattccaaaataacatggtatggtttgtatggtttagcaattttacgaagcttcagatgacatg

SEQ ID NO: 690514 - DNA, 120 bp, Artificial Sequence
  ENSG00000188177_60 (sequence is synthesized)
cactggtgacacaacagtagaatttcctgagaggttgagtgaatattaacccatcaagttagcaatttccttaactacatgagtatcaggaagacaggacttccctgccttagagctata

SEQ ID NO: 690515 - DNA, 120 bp, Artificial Sequence
  ENSG00000188177_61 (sequence is synthesized)
tagacttgggcctcttcaagatctgacttctctgcacattctatacaggttggatattgatggagggttaaaaatgctatgacagttcatggtgcatggtgtgtttgtttaaatcatagc

SEQ ID NO: 690516 - DNA, 120 bp, Artificial Sequence
  ENSG00000188177_62 (sequence is synthesized)
atgtttaggcaaagtggccagctcattcaatataagagccaccagctcttagaaacaacagatatattcacacccagtctgtaatatgtatttcttcaggcatgtcacactgcggtcttc

SEQ ID NO: 690517 - DNA, 120 bp, Artificial Sequence
  ENSG00000188177_63 (sequence is synthesized)
ctgaaagactacttacttcataaaggtattatgtttctttaattaatggccactagaagttaggaagctcctagggaccaggatatgagatcttaaagaggctgtcagaatctcttcatt

SEQ ID NO: 690518 - DNA, 120 bp, Artificial Sequence
  ENSG00000188177_64 (sequence is synthesized)
tgcatgacatagaatctgtggtggagatgttttccctgatgtttttggagggttggactgtgttgaaggctgtaccttggtgggggtggtctgcagtcatgcagtccactgatagggtcc

SEQ ID NO: 690519 - DNA, 120 bp, Artificial Sequence
  ENSG00000188177_65 (sequence is synthesized)
cccaccccgcaagcttcaataattgagctttctgttaatttcttgaattatcttttcaaaaatggtttggcagcacttgatgacattatgttcaaaattaagtccagtaaaatatataag

SEQ ID NO: 690520 - DNA, 120 bp, Artificial Sequence
  ENSG00000188177_66 (sequence is synthesized)
catttgtaaactataattatagtttaaataagacttagtttaggaaatccaagttttgacatatataaccaaacggcctaagagttcaaagctattttcttaggtgttacaccttagcat

SEQ ID NO: 690521 - DNA, 120 bp, Artificial Sequence
  ENSG00000188177_67 (sequence is synthesized)
ttacataatgccttctccccaagcagtttcatgtggtttgcagaaagttttggcagctaccagtcactatattgctggagttttgtgtttgagtatgtcatttatgtcatttatcagcag

SEQ ID NO: 690522 - DNA, 120 bp, Artificial Sequence
  ENSG00000188177_68 (sequence is synthesized)
tatctgccagttgtgacaaagccctccctattatcctgcctttcctggaaaggatacagacccaagaaaagttaacatctacatagtacttagaatttctaattttaaaataagaaacaa

SEQ ID NO: 690523 - DNA, 120 bp, Artificial Sequence
  ENSG00000188177_69 (sequence is synthesized)
aaagcacatttaaaataatattttatgcttttggagacaggacccacatgtatctccttatttttatacttgccatagaaacaagcctagttgtaggcctacagtgggtgctttgttaac

SEQ ID NO: 690524 - DNA, 120 bp, Artificial Sequence
  ENSG00000188177_70 (sequence is synthesized)
tgcttgttgatggcttcctgacatccatccaaatgtcacttttacagatgctgtcacccgttaaacaggtgtggcagaagtattccatgactgcattaggaagaatgcaccttatgggtt

SEQ ID NO: 690525 - DNA, 120 bp, Artificial Sequence
  ENSG00000188177_71 (sequence is synthesized)
atatctcttttggtagacagcccacctgctcttttttgtccccaccctcagcccaagcaatgtgaagacagattatggcaacttaggagctccatgtttccataataattcataacttta

SEQ ID NO: 690526 - DNA, 120 bp, Artificial Sequence
  ENSG00000188177_72 (sequence is synthesized)
agagtcctccagacttacaagattacttcatggtgaaagtttggattgatcaataatttattcctataaaggtctgcaggattttttctgtaaccagaaaagtaactgcatagccattct

SEQ ID NO: 690527 - DNA, 88 bp, Artificial Sequence
  ENSG00000188177_73 (sequence is synthesized)
attttttctgtaaccagaaaagtaactgcatagccattcgtttgagacagagtcttcattcttgttgcccaggctggagtgtaatggt

SEQ ID NO: 690528 - DNA, 120 bp, Artificial Sequence
  ENSG00000188177_74 (sequence is synthesized)
agtgttggggttacaggcgtgagccaccgtgctcagcctgttttttatttatttttttgagacagtctcactttgtcgctcaggctgaagtgcagtggcgctatcagctcacagcagcct

SEQ ID NO: 690529 - DNA, 80 bp, Artificial Sequence
  ENSG00000188177_75 (sequence is synthesized)
ttttttatttatttttttgagacagtctcactttgtcgctcaggctgaagtgcagtggcgctatcagctcacaagcttcc

SEQ ID NO: 690530 - DNA, 77 bp, Artificial Sequence
  ENSG00000188177_76 (sequence is synthesized)
accagctaattttttatatttttggtagagacacagtttcatcatgttggcccggctggtctcaaactccttacctc

SEQ ID NO: 690531 - DNA, 75 bp, Artificial Sequence
  ENSG00000188177_77 (sequence is synthesized)
acaaccagctaattttttatatttttggtagagacacagtttcatcatgttggcccggctggtctcaaactcctt

SEQ ID NO: 690532 - DNA, 120 bp, Artificial Sequence
  ENSG00000188177_78 (sequence is synthesized)
aaataaatacttagtcctaacctagtgaattatcaatagcatttaaaattccttctatcctgataccatgaacagtaattttcccttttaagttatgatttgactctaattttgggtctt

SEQ ID NO: 690533 - DNA, 120 bp, Artificial Sequence
  ENSG00000188177_79 (sequence is synthesized)
gtatctggtctttaaacacctttcgttaccctttggaatagaacaatcatgctactgttagcaaaattattgtaggcataaggaagagctgtgagttcaaagaagattgtgagttcttgg

SEQ ID NO: 690534 - DNA, 120 bp, Artificial Sequence
  ENSG00000188177_80 (sequence is synthesized)
aatagtattttacagcgttgtttattcttgaccttcttgttttttaagcttagagtttataagaaaaaagtgaatatatagctaattatagcattttagaaaaaattagctctgcagata

SEQ ID NO: 690535 - DNA, 120 bp, Artificial Sequence
  ENSG00000188177_81 (sequence is synthesized)
gtcaggccccatacttcttggctcattactgattttaataccttcatgagagtattaaggttgaaaggaatggtgaaatttgcattatcagaggtctgatatgtaatttattgtaaagaa

SEQ ID NO: 690536 - DNA, 120 bp, Artificial Sequence
  ENSG00000188177_82 (sequence is synthesized)
attaaatatatagaggctcaattaaaaaataaccatattctcaaacctccattaccactaatatcttggggttgtcaatgatagactatatatatatgtatgtatatgtgtgtatatata

SEQ ID NO: 690537 - DNA, 90 bp, Artificial Sequence
  ENSG00000188177_83 (sequence is synthesized)
tgagcctcccaaagtgctggccgactataccttttatacactttttaaatagagaaagtgaaaaatgataaactaaccattataaaatag

SEQ ID NO: 690538 - DNA, 120 bp, Artificial Sequence
  ENSG00000188177_84 (sequence is synthesized)
agagaaagtgaaaaatgataaactaaccattataaaatagaggtttgagtccacctgtattttacagaaatttgccctcaaatgtttgagagggaagtcacatatgatagaaaaatatct

SEQ ID NO: 690539 - DNA, 120 bp, Artificial Sequence
  ENSG00000188177_85 (sequence is synthesized)
tttcaagggtagaatgatatttccttataaaagtgacaatcaaaaaagactcatttgtatacttgccaaagtttaaaagttttttacattccttaccctaaacccactgccccatccacc

SEQ ID NO: 690540 - DNA, 120 bp, Artificial Sequence
  ENSG00000188177_86 (sequence is synthesized)
cagaattcagaaagggtttggcatagatccagggctccagggcccaggtcattttgttattagtctagggcttttgtcctccacagtctaggcagggcatctttgtatgtgtgttgctgg

SEQ ID NO: 690541 - DNA, 120 bp, Artificial Sequence
  ENSG00000188177_87 (sequence is synthesized)
ttggggccagggacgggggcaggcgggagttgtccaggtttaagattgtttgttttccatcagatccacaagcaatatctgtgggctgaaatccaggttatacctattcactatgacttt

SEQ ID NO: 690542 - DNA, 120 bp, Artificial Sequence
  ENSG00000188177_88 (sequence is synthesized)
ttttttttttaactttctactgtaattatttcagttccccgaagttgtatctcaaatgttggggaaatgctgccttgactattttactttggaaggttttactagatatcagtttagtag

SEQ ID NO: 690543 - DNA, 120 bp, Artificial Sequence
  ENSG00000188177_89 (sequence is synthesized)
attaatgacgttgttaatctgtctgctcaaaagacaccagcaagggggtatactttgctgaactgataaattattctattaaggactaacccagtacttggcaaaattaggaataacttt

SEQ ID NO: 690544 - DNA, 120 bp, Artificial Sequence
  ENSG00000188177_90 (sequence is synthesized)
tcccctccttctttactaataaattttccaagttgcatactgttgttgcaagtttctgtaatttttttctgtatacctttctattgtctgaatttaaataaaaatgtttctaataatatc

SEQ ID NO: 690545 - DNA, 120 bp, Artificial Sequence
  ENSG00000188177_91 (sequence is synthesized)
gtataaggaggggaggagctttttcatcttttaatttatttgatggcaaagaaagcattgtgattttaatgatacttctctagtaaatgaaaaattaccagctcagataaaatgagtatc

SEQ ID NO: 690546 - DNA, 120 bp, Artificial Sequence
  ENSG00000188177_92 (sequence is synthesized)
aataacctccaaaaaatagttgttaattagttgtgaaactaatttacagattttgctgactttgaaataaaattgttatgtttgaaagaacctcaaaataaaattgctaagtttaaaagc

SEQ ID NO: 690547 - DNA, 120 bp, Artificial Sequence
  ENSG00000188186_0 (sequence is synthesized)
gtgaccggggcctgaagccggaagctacctatctggtagggagctcccccagcaccgaagactgcgatgacttctgcgctgacccaggggctggagcgaatcccagaccagctcggctac

SEQ ID NO: 690548 - DNA, 120 bp, Artificial Sequence
  ENSG00000188186_1 (sequence is synthesized)
ctggtactgagtgaaggtgcagtgctggcgtcatctggggacctggagaatgatgagcaggcagccagtgccatctctgagctggtcagcacagcctgcggtttccggctgcaccgcggc

SEQ ID NO: 690549 - DNA, 120 bp, Artificial Sequence
  ENSG00000188186_2 (sequence is synthesized)
tgtgcccttcaagcgcctgtctgtggtctttggagaacacacactgctggtgacggtgtcaggacagagggtgtttgtggtgaagaggcagaaccgaggtcgggagcccattgatgtctg

SEQ ID NO: 690550 - DNA, 120 bp, Artificial Sequence
  ENSG00000188186_3 (sequence is synthesized)
agcctgccggagggcgagggtcggagaagcggattgggtcctgggcctctgtgatgaggcaggcacacctgtcggtcttggcttgctgctagaactagggccttctgctcgcccacctcc

SEQ ID NO: 690551 - DNA, 120 bp, Artificial Sequence
  ENSG00000188186_4 (sequence is synthesized)
cacccctacctggacgggcccaggcttggggactctgagctgtgttaaggagaacaagggcaaggagacctccctttgtgctccctcactccctaataaacatgagtctgatgttctcca

SEQ ID NO: 690552 - DNA, 120 bp, Artificial Sequence
  ENSG00000188186_5 (sequence is synthesized)
agcccctgcccctgcccttggtggtggtactgggagcggggggctacttccaggggcttctcggcttctcttcttccagcctcctaccatctcctggggtctctggtctggccactttcc

SEQ ID NO: 690553 - DNA, 120 bp, Artificial Sequence
  ENSG00000188186_6 (sequence is synthesized)
actccctggtatcagaattgtgaatgagaaggcaagagaaaggagatctagcagaggccactcatcttcaaatctctgagcctggaactatagaacttctttggctttgatcccagccaa

SEQ ID NO: 690554 - DNA, 120 bp, Artificial Sequence
  ENSG00000188186_7 (sequence is synthesized)
gagtgaggacgcatgcgcgagaggacccgccgggggttcagcgtctctgctccccagtctgtgtggtttccccctgacttctgcgctgacccaggggctggagcgaatcccagaccagct

SEQ ID NO: 690555 - DNA, 120 bp, Artificial Sequence
  ENSG00000188186_8 (sequence is synthesized)
cctatctggtagggagctcccccagcaccgaagactgcgatgacttctgcgctgacccaggggctggagcgaatcccagaccagctcggctacctggtactgagtgaagtcatctgggga

SEQ ID NO: 690556 - DNA, 120 bp, Artificial Sequence
  ENSG00000188186_9 (sequence is synthesized)
cggcatgaatgtgcccttcaagcgcctgtctgctttttatttcatccccaaaatctaagggtcctgcctccgtccaccccagcattctgcatcactcagcactcagcccagaccctcccc

SEQ ID NO: 690557 - DNA, 120 bp, Artificial Sequence
  ENSG00000188186_10 (sequence is synthesized)
acactgaaggtgagcgcgctgcccttccgggaaaagccaaggttgttgaggggcgtgtggcagacgacggagtccagggcagcctgcatggcccggcgctcctcctcacacagctgcttt

SEQ ID NO: 690558 - DNA, 120 bp, Artificial Sequence
  ENSG00000188186_11 (sequence is synthesized)
cctgggggcagaaacagggaccagcaaacactacagcgttcctcattcccacagggccttcgccagcacagtctcatctgattctcaaagccactctgtggagtaaactgagcaaacgtt

SEQ ID NO: 690559 - DNA, 120 bp, Artificial Sequence
  ENSG00000188186_12 (sequence is synthesized)
gagggggccgggaagggacctggctggggaatgagaaaacctggggccatcgtcaacccagagacttgggtttgcaggtgaagggtatcgggccgtccatccctctagcatgcttctcac

SEQ ID NO: 690560 - DNA, 120 bp, Artificial Sequence
  ENSG00000188186_13 (sequence is synthesized)
tctggtagggagctcccccagcaccgaagactgcgatgacttctgcgctgacccaggggctggagcgaatcccagaccagctcggctacctggtactgagtgaaggtgcagtgctggcgg

SEQ ID NO: 690561 - DNA, 120 bp, Artificial Sequence
  ENSG00000188186_14 (sequence is synthesized)
ttcttttctcggcttttatctggtttcctgcctggcatctattaggttggtacaaaagtatttgcagtttttgcaattactttcagtaatcagtctgtggaatcttagtctcctaacggc

SEQ ID NO: 690562 - DNA, 90 bp, Artificial Sequence
  ENSG00000188186_15 (sequence is synthesized)
tttcagtaatcagtctgtggaatcttagtctcctaacggctgcgatttatttatttatagtttttgagactgagtttcgttctcctcggc

SEQ ID NO: 690563 - DNA, 80 bp, Artificial Sequence
  ENSG00000188191_0 (sequence is synthesized)
ctgcagtgcggggacccgctcgctcgctcgccagccgtccccgcgccccgcgtccccgcgcagccgcctcctggcctcgg

SEQ ID NO: 690564 - DNA, 120 bp, Artificial Sequence
  ENSG00000188191_1 (sequence is synthesized)
cgcgcagccgcctcctggcctcgggcgccgcgcatccaggaaggaagcagccaccctcgccatggcctccccgcccgcctgcccctcggaggaggacgagagcctgaagggctgtgagct

SEQ ID NO: 690565 - DNA, 120 bp, Artificial Sequence
  ENSG00000188191_2 (sequence is synthesized)
gtacgtgcagctgcacgggatccagcaggtcctcaaagactgtatcgtccacctctgcatctccaagcccgaacgccccatgaagttcctccgggagcacttcgagaagctggagaagga

SEQ ID NO: 690566 - DNA, 120 bp, Artificial Sequence
  ENSG00000188191_3 (sequence is synthesized)
agaaaacaggcagattttggcgcggcaaaagtcaaactcacagtcggactcccatgatgaggaggtgtcgcccacccccccgaaccctgtggtgaaggcccgccgccggcgaggaggcgt

SEQ ID NO: 690567 - DNA, 120 bp, Artificial Sequence
  ENSG00000188191_4 (sequence is synthesized)
gagtgccgaggtgtacaccgaggaggacgccgtgtcctacgtcaggaaggtgattcccaaggactacaaaaccatgactgcgctggccaaggccatctccaagaacgtgctcttcgctca

SEQ ID NO: 690568 - DNA, 120 bp, Artificial Sequence
  ENSG00000188191_5 (sequence is synthesized)
cctggatgacaacgagaggagtgacatattcgatgccatgttccctgtcactcacatcgctggggagactgttatacagcaagggaatgaaggagacaacttctatgtcgttgatcaagg

SEQ ID NO: 690569 - DNA, 120 bp, Artificial Sequence
  ENSG00000188191_6 (sequence is synthesized)
ggaagtggatgtgtacgtgaacggagagtgggtgaccaacatcagcgagggaggcagcttcggggagctggcgctcatctacggcacccccagggctgcgaccgtgaaagccaagacgga

SEQ ID NO: 690570 - DNA, 120 bp, Artificial Sequence
  ENSG00000188191_7 (sequence is synthesized)
cctcaagctctgggggatcgaccgggacagctaccggcgcatccttatgggcagcacgctgaggaaacgcaagatgtacgaggagttcctcagcaaggtctccatcctagagtccctgga

SEQ ID NO: 690571 - DNA, 120 bp, Artificial Sequence
  ENSG00000188191_8 (sequence is synthesized)
ggacgacttttacatcatcacggagggcaccgcgtccgtgctgcagcgccggtcccccaatgaggagtacgtggaggtggggcgcctgggaccctctgactacttcggggagattgcact

SEQ ID NO: 690572 - DNA, 120 bp, Artificial Sequence
  ENSG00000188191_9 (sequence is synthesized)
gctgctgaaccggccccgggcggccactgtcgtggcccgggggcccctcaagtgtgtgaagctggaccggccccgcttcgagcgtgtgctggggccctgctctgagatcctcaagaggaa

SEQ ID NO: 690573 - DNA, 120 bp, Artificial Sequence
  ENSG00000188191_10 (sequence is synthesized)
cattcagcgttacaacagcttcatctccctcaccgtctgagcacagctcccgccctgcagccccagctccccagtgtggtggccgtgccctgctcgtctgtgtcgggggcccgggagccg

SEQ ID NO: 690574 - DNA, 120 bp, Artificial Sequence
  ENSG00000188191_11 (sequence is synthesized)
ctgtgtgaggtgtgggccgggtggggctgggtcccggcagcgtgaggactgccccttccccggactcactttttggaataaatgatcaccttgtgcatttccaaatcaaaggacaagcgg

SEQ ID NO: 690575 - DNA, 120 bp, Artificial Sequence
  ENSG00000188191_12 (sequence is synthesized)
acaaaatgcatcccaagatcaaggaagggacaggccagcttcctccccacacgcctccccggctgcctctgtgggcttctcctggggggcccaccccacccctgccagtctcctggagat

SEQ ID NO: 690576 - DNA, 120 bp, Artificial Sequence
  ENSG00000188191_13 (sequence is synthesized)
gcttgaggatcggtcctccccagaaccaggccaggacgttgcccctggggcctggtgaccctgtgaggtcaggtcccccagattgaggtctgagtgtgggcaagtgtgtcaaaaggggct

SEQ ID NO: 690577 - DNA, 120 bp, Artificial Sequence
  ENSG00000188191_14 (sequence is synthesized)
gccccccaggggagatgaggctgagagcagggagttgaggccgaagaagtcaaggcccctcccgcaaatgtgtacccctgcccgcgccactgcaccccgccgcacccccacctcccccgg

SEQ ID NO: 690578 - DNA, 120 bp, Artificial Sequence
  ENSG00000188191_15 (sequence is synthesized)
gggccctgctgcggatgccggagtgggagagtctctgagctgtgagattgatcttgcccctaattggagaggaagccgggcgccaagacacacggggctcctgccttgggagccagggcc

SEQ ID NO: 690579 - DNA, 120 bp, Artificial Sequence
  ENSG00000188191_16 (sequence is synthesized)
agtttctgccgccgccaccctggcaggatggggcaacggtgtgcggtaggaggatgaggttgattccctttcctgcagggctgggcttgtgggttaggaccgtcaccaagaggctcctcc

SEQ ID NO: 690580 - DNA, 120 bp, Artificial Sequence
  ENSG00000188191_17 (sequence is synthesized)
caggccgtcctcacctttcttagaaagtccacccagggcaagttgatgttgggggaaagcagaagtcaagccagccgcgggccccacacgccccgacccgctcaaccgacttgtccctta

SEQ ID NO: 690581 - DNA, 120 bp, Artificial Sequence
  ENSG00000188191_18 (sequence is synthesized)
aatgtgtcttggatcccgcagtgatgacgtgagccagccaggcccgaaagggtgaggccagtgcagagaagcttcccaggggattcctgggttcccccgaaagacaagcgaggtcattgc

SEQ ID NO: 690582 - DNA, 120 bp, Artificial Sequence
  ENSG00000188191_19 (sequence is synthesized)
agttcacctgatgttgctcctgtcccgtgcgtcccggggaggctgtccttggtccgaggctgctcgttgcagcccctcccctgctggcggttacgatgcgtggggtccccctccccaccc

SEQ ID NO: 690583 - DNA, 120 bp, Artificial Sequence
  ENSG00000188191_20 (sequence is synthesized)
agccccggccacgtcgccgtgtcccgcctgtgcctgtgacgtccctgtggacctgtgagccatccccccccttatctctgctctgaatactgcatgaagcattaaacgtgcaatgaagta

SEQ ID NO: 690584 - DNA, 120 bp, Artificial Sequence
  ENSG00000188191_21 (sequence is synthesized)
ctctggccgctaaggcagagtgagaccccagggaacgggcgtgcttgctgggtaccgggtgtcctgcagaggcagggatgtgatcccctaggtgaaggaagcagccaccctcgccatggc

SEQ ID NO: 690585 - DNA, 120 bp, Artificial Sequence
  ENSG00000188191_22 (sequence is synthesized)
ggatccccaagaaaggtgggaaagaatttaggagggttccgatttcccactgggcatcggggtgaagctggtgcgcctaagcgctgggagtcacctggggaagcggggctgggcccacct

SEQ ID NO: 690586 - DNA, 120 bp, Artificial Sequence
  ENSG00000188191_23 (sequence is synthesized)
gggtgctcaccgggcgtggcctgcgccagggcggcggcgcagctgcagctctcgcggcgcacggcggcgaaggggtcgagcagggagcagcgcagcgcgcgcagagcgtcgtccaggaag

SEQ ID NO: 690587 - DNA, 120 bp, Artificial Sequence
  ENSG00000188191_24 (sequence is synthesized)
ctcgtccaccccacagaggaaacgcccaccacccacgccccgggcttgtcctcatcttcagcgcgggtggccaccctcctgccccagcgccaggccccagccggcagcatgctgaggact

SEQ ID NO: 690588 - DNA, 120 bp, Artificial Sequence
  ENSG00000188191_25 (sequence is synthesized)
agcctgtcccggccccacgacctcgaccgtcctgcagctcagacaatgcatcagtatgaaaacaggagacaggaagtgggggctgcaaaatgagaggctttcccggaatcccaagagggg

SEQ ID NO: 690589 - DNA, 120 bp, Artificial Sequence
  ENSG00000188191_26 (sequence is synthesized)
aaggggaagagcagcctggcatgtgcacaggcagagcccgtgagaggtcacccccatgcagccctggggaggggccctgctcgctgtccccctttctcccaaggcctcctgaagcggcct

SEQ ID NO: 690590 - DNA, 120 bp, Artificial Sequence
  ENSG00000188191_27 (sequence is synthesized)
gtgtgtatggaaccacctgtatcctgcctagtctgattcttcacctgccaaagatgggaagtcccgtcgagcctggacaggcaaagctctttcagccaagagactgggaccccaacctcg

SEQ ID NO: 690591 - DNA, 120 bp, Artificial Sequence
  ENSG00000188191_28 (sequence is synthesized)
cgcaggaggtgattgccggtgtttgtagagccctgtggtccatcccctcagcaccctggattcccctccccggggttttgtccacgaggagctgcttttgaccgtgtgaggtcacagcac

SEQ ID NO: 690592 - DNA, 120 bp, Artificial Sequence
  ENSG00000188191_29 (sequence is synthesized)
tgggtttccaacagctccctggagacctgggcggaggccacatgccattcagcacacggcagggcgtccacctcactttgggctgtccgaaaggactgcgtgtaggcggaagggcgtgtg

SEQ ID NO: 690593 - DNA, 80 bp, Artificial Sequence
  ENSG00000188191_30 (sequence is synthesized)
ctcaggcagcgcagcaagcgcggcagcagtaggcgcgcccaggggccctggaaagcggtggggtcggcggcagggcctgg

SEQ ID NO: 690594 - DNA, 80 bp, Artificial Sequence
  ENSG00000188191_31 (sequence is synthesized)
cggcccggcttgctgtcggcctccagccccggcagcaggcggctcagggcgcggctcagctccaccgcctcagccgtctc

SEQ ID NO: 690595 - DNA, 120 bp, Artificial Sequence
  ENSG00000188191_32 (sequence is synthesized)
ccccagcgccgccatcttgcccgcgtcgccggtcactaaggggaacagcgctttcgcgactctcagcgcagattacggcagcacttccggtccgcgctgcgggcggggcgccgggctact

SEQ ID NO: 690596 - DNA, 120 bp, Artificial Sequence
  ENSG00000188191_33 (sequence is synthesized)
tcctccccgccgctcagggagcatacggacgttgcgcagtgaatgcagctggctggggaaggctcaggaaccgcacccaggaagcccacctacagatcccacctcaaaccacgacatgct

SEQ ID NO: 690597 - DNA, 120 bp, Artificial Sequence
  ENSG00000188191_34 (sequence is synthesized)
gcagcctccccagtggccagagcagcttaacaaagcatctttgtttcctttctgcaccccagaaaatagctgtgttggtctcttcgccatgcagagtgaataaagaataagacaaacacc

SEQ ID NO: 690598 - DNA, 120 bp, Artificial Sequence; identical to SEQ ID NO: 664654
  ENSG00000188199_0 (sequence is synthesized)

SEQ ID NO: 690599 - DNA, 120 bp, Artificial Sequence; identical to SEQ ID NO: 664655
  ENSG00000188199_1 (sequence is synthesized)

SEQ ID NO: 690600 - DNA, 120 bp, Artificial Sequence; identical to SEQ ID NO: 664656
  ENSG00000188199_2 (sequence is synthesized)

SEQ ID NO: 690601 - DNA, 120 bp, Artificial Sequence; identical to SEQ ID NO: 664657
  ENSG00000188199_3 (sequence is synthesized)

SEQ ID NO: 690602 - DNA, 120 bp, Artificial Sequence
  ENSG00000188199_4 (sequence is synthesized)
cttccagttggaagggaaactcaggttcttgcctaatggccgaagcccttcacagaacgtcccccacccctaacagctgcccactgcccctccccctctgcagaatgtctggggtcctat

SEQ ID NO: 690603 - DNA, 120 bp, Artificial Sequence
  ENSG00000188199_5 (sequence is synthesized)
gttccaggaacctgtttactttcaaattttccctgtttcagttggactcaggagcatctggtgagccaggtcactctctgggtcttacccttggcttttcttattgcggaaactgccaga

SEQ ID NO: 690604 - DNA, 120 bp, Artificial Sequence
  ENSG00000188199_6 (sequence is synthesized)
cggcggtggtcagtgcccagcctgaggggatggcttcgaatggagcatacccagtgctgggaccgggcgtgaccgcgaaccctggcacctccctgtctgtgttcacggctctgcccttca

SEQ ID NO: 690605 - DNA, 120 bp, Artificial Sequence
  ENSG00000188199_7 (sequence is synthesized)
ccacacccgctcccggcccagcacacgggccgctccttgtgactgcaggggctcctccaggcggccctctggtgctgtctaccttccccagcacacctctggtgacagaacaggatggct

SEQ ID NO: 690606 - DNA, 120 bp, Artificial Sequence; identical to SEQ ID NO: 664662
  ENSG00000188199_8 (sequence is synthesized)

SEQ ID NO: 690607 - DNA, 120 bp, Artificial Sequence; identical to SEQ ID NO: 664663
  ENSG00000188199_9 (sequence is synthesized)

SEQ ID NO: 690608 - DNA, 120 bp, Artificial Sequence
  ENSG00000188199_10 (sequence is synthesized)
ggtcccagggccttcctcttccaccaccaccaccaccggctgcccagctgccccccattgtgtcccaagggaatgctgggccatggccacaaggggctcatggagagagcagcctggctt

SEQ ID NO: 690609 - DNA, 120 bp, Artificial Sequence; identical to SEQ ID NO: 664665
  ENSG00000188199_11 (sequence is synthesized)

SEQ ID NO: 690610 - DNA, 120 bp, Artificial Sequence
  ENSG00000188199_12 (sequence is synthesized)
ccgaagcgctttcgtgcttcctcatcccagttctccgatcgctggcccggcggaagcccaccatgaccctggaggagggactgtggcgggccatgcgggaatggcagcacacgagcaact

SEQ ID NO: 690611 - DNA, 120 bp, Artificial Sequence
  ENSG00000188199_13 (sequence is synthesized)
tgaggaggagatgcagattcagaaatcgcaatggatgaaggggccccagtgcctgcctcctccagccacaccgaggcttgaacctcgaggacccccggcccctgaggtggtcaagcagcc

SEQ ID NO: 690612 - DNA, 120 bp, Artificial Sequence
  ENSG00000188199_14 (sequence is synthesized)
agtgtaccttcccagcaaggccggccccaaggccccgactgcctgcctgccaccacccaggccccagaggccagtgaccaaggcccgccggccaccaccccggccccaccggcgagcaga

SEQ ID NO: 690613 - DNA, 120 bp, Artificial Sequence
  ENSG00000188199_15 (sequence is synthesized)
gaccaaggcccgcctgccaccacccaggccccagagaccagcagagaccaaggtccctgaggagatccccccagaagtggtgcaggagtatgtggacatcatggaggagctgctggggcc

SEQ ID NO: 690614 - DNA, 120 bp, Artificial Sequence
  ENSG00000188199_16 (sequence is synthesized)
ttccctcggggccacgggggagcccgagaaacaacgggaagagggcaaagtgaagcagccacaggaagaggactggacgcccccagacccgggcctcctgagctacattgacaagctgtg

SEQ ID NO: 690615 - DNA, 120 bp, Artificial Sequence
  ENSG00000188199_17 (sequence is synthesized)
ttcccagaaagacttcgtcaccaaggtggaggccgtcattcatccccaattcctggaagaattgctttccccagatccacagatggatttcttggccctaagccaggacctggagcagga

SEQ ID NO: 690616 - DNA, 120 bp, Artificial Sequence
  ENSG00000188199_18 (sequence is synthesized)
ggaaggactcacccttgcccagctagtggagaagcgcctcccacccttgaaggagaaacagcatgcgagggcagcccctagtcgtggcacagcccggttggactcaagttcttctaagtt

SEQ ID NO: 690617 - DNA, 120 bp, Artificial Sequence
  ENSG00000188199_19 (sequence is synthesized)
tgcagctggccaaggagcagagagagacgtccctgacccccaacaaggggttggcatggaaacctgcccaccccagatgactgcccgggactctcagggacgaggcagagcacacactgg

SEQ ID NO: 690618 - DNA, 120 bp, Artificial Sequence
  ENSG00000188199_20 (sequence is synthesized)
catggccaggtccgaagactctgttgtgcttttgggatgtcaggattcccctgggctgagggctgcctggccaacctctcctccccaggaccacagacccacctgccctggcgtgggtac

SEQ ID NO: 690619 - DNA, 120 bp, Artificial Sequence
  ENSG00000188199_21 (sequence is synthesized)
caaggatgccttggatctccctggagggtctcctgtcagggagtcacatgggctggctcaggggtcaagtgaggaggaggaactccccagcctggccttcctcttgggttcccagcacaa

SEQ ID NO: 690620 - DNA, 120 bp, Artificial Sequence
  ENSG00000188199_22 (sequence is synthesized)
gcttctgccctggtggctaccccagagccctgtccctgcctcgggccttctcagcccagaaaagtggggaccccagggaactcatcagtccccatctgctgagagaagaggcctcaacct

SEQ ID NO: 690621 - DNA, 120 bp, Artificial Sequence
  ENSG00000188199_23 (sequence is synthesized)
agcaccttctcctgccaacaaggccaagaagcgacctctctttggaagcctgtcccctgctgaaaagacaccctacccagggcctgggctcagggtctctggggagcaatccctgacttg

SEQ ID NO: 690622 - DNA, 120 bp, Artificial Sequence
  ENSG00000188199_24 (sequence is synthesized)
ggggctgggtggcccctcacagtctcaaaagagaaagggtgaccccttggtctccaggaaggagaagaagcagcattgtagccagtaggggcttctgagcaggctctctggggccaatcc

SEQ ID NO: 690623 - DNA, 120 bp, Artificial Sequence
  ENSG00000188199_25 (sequence is synthesized)
ccaaggatggggctctggcatccgatgccccaaagcggtcaaaagcttcttctcccccagtgctgatcttgctgggccttagctttggagggtaggggagggaggggagggagagggtgg

SEQ ID NO: 690624 - DNA, 120 bp, Artificial Sequence
  ENSG00000188199_26 (sequence is synthesized)
ctgaatggggagggcaggaagggagggtctggggggaaggggctggggagtgggggtgggaagcagtgcgttgggggcctcgtgtgtaagtgtgaataaatgtagttgtcttggaaaatg

SEQ ID NO: 690625 - DNA, 120 bp, Artificial Sequence
  ENSG00000188199_27 (sequence is synthesized)
acccttgcccagggagccccttcagatgctccagggactgacagatgctgaggaagccctgatccctcccactaccgactcacaaggccctgcctgctttagggaggcttcttggggccc

SEQ ID NO: 690626 - DNA, 120 bp, Artificial Sequence
  ENSG00000188199_28 (sequence is synthesized)
cccatcgtcatcagcatccctggaaaatcctgggattggagagagctggctggctcttgttctgctcggtgggagctgaggagaaggcagccacctgcaacatggacatggggagaggag

SEQ ID NO: 690627 - DNA, 120 bp, Artificial Sequence
  ENSG00000188199_29 (sequence is synthesized)
gctgctcctgcttaaccctcatcaggaagagcgcgggcactgggctgaggggagacgttgaggtgaccatccacacaggtgtgtttgggatacgatgatgggtggggagcaggggaagtc

SEQ ID NO: 690628 - DNA, 120 bp, Artificial Sequence
  ENSG00000188199_30 (sequence is synthesized)
cttctgcctgtttctgggcaggagagagtcttgtccaactagctaaagcagatgctccttgctgtggccacagggactggcctcggggccctcaaggtcctgcatggagccccccacagc

SEQ ID NO: 690629 - DNA, 120 bp, Artificial Sequence
  ENSG00000188199_31 (sequence is synthesized)
tatgattcccttcccatatgatgactgaactcatgtggaattgatgtagacacagatttacattggtttctaaaacagttccctcccaacacaccatcaccaatgggaacaaacatgtcc

SEQ ID NO: 690630 - DNA, 120 bp, Artificial Sequence
  ENSG00000188199_32 (sequence is synthesized)
agtccatcaggcgcagggtgggtgtttctgctggttccagggcccggaggagctggggcccaggccaagaggggccgagggtcagccgcccttctgccaggcacagaccccaagggcaga

SEQ ID NO: 690631 - DNA, 120 bp, Artificial Sequence
  ENSG00000188199_33 (sequence is synthesized)
gcaggggctgcctgggatgtggcattggctgtctgggaagtgacctgggagttgggggctaggtgttcgccaaagggagacttccagagtctacgagtgagatgaggactgcatcaggag

SEQ ID NO: 690632 - DNA, 120 bp, Artificial Sequence
  ENSG00000188199_34 (sequence is synthesized)
agggaccgaggctggggaggatgctctgctctttcccaggttgtcctgtcctcccaatctctgctgaactgccctcaccccatgggccaacttctgccccccttacccctaacccacctc

SEQ ID NO: 690633 - DNA, 120 bp, Artificial Sequence
  ENSG00000188199_35 (sequence is synthesized)
ttagaatctcagatcccagcatggacaggacccggcacccaccctggttccctcctggccaacaccttcttctccacggtctgagttctgattcctcccccagggcgcttattggctcag

SEQ ID NO: 690634 - DNA, 120 bp, Artificial Sequence
  ENSG00000188199_36 (sequence is synthesized)
gacccctgtgactgccagggcactggtcccagcactgcctgcgtgcagagctgtggtcacggcgctgggggctggcccagcagcagaggctggtggggcaaagctgtctggtacacggtg

SEQ ID NO: 690635 - DNA, 120 bp, Artificial Sequence
  ENSG00000188199_37 (sequence is synthesized)
gcctggcccctcggccaagtgacaaagggagccatgtttgggtcctctctggccccatctgcccacagaacacagcagtcagcctgacagatgcccctctgccccgtcccttctgctcga

SEQ ID NO: 690636 - DNA, 120 bp, Artificial Sequence
  ENSG00000188199_38 (sequence is synthesized)
tgtgggcagtgtcggaggcctgctgtcttctgtggcctttgggaaggagagtttatcttggcagggcttccccagctcagtgcacatcaggccctcggggaaaatgtggggagcgaagag

SEQ ID NO: 690637 - DNA, 120 bp, Artificial Sequence
  ENSG00000188199_39 (sequence is synthesized)
tcactggtgggtgatgtgggcagctcccgtgactcctctacattcagggccatcctcaagagataaggtagcactgcccctttgcagggtttaggaatgttaagtgagccgtgtttgaag

SEQ ID NO: 690638 - DNA, 120 bp, Artificial Sequence
  ENSG00000188199_40 (sequence is synthesized)
ggaacatggtccatactctggcgtgtgtgggtgcccagccaacttcctcacctaagggtgaaagtgacaccttggggctcctgctggttaccccactggctgttgtctatcccactgtcc

SEQ ID NO: 690639 - DNA, 120 bp, Artificial Sequence
  ENSG00000188199_41 (sequence is synthesized)
ctgtccttgtcttggctgagccattcctaggaagcagaacttgtgcttcctccacctctgtgtcccacctgagccctacaatctgcccctaaatgggcacagtggggctgactggggggc

SEQ ID NO: 690640 - DNA, 120 bp, Artificial Sequence
  ENSG00000188211_0 (sequence is synthesized)
gcagttgccgaagggatctgaagaagtgggatgtgcaaaagcgccggctggaaatcccggctgtgtctccgtcaactctttacgcaacagaggtctccccctgcccttggtttctaccgg

SEQ ID NO: 690641 - DNA, 120 bp, Artificial Sequence
  ENSG00000188211_1 (sequence is synthesized)
gccgcctgctcccactcggcgaaaaaaattacacaacagcagccgcggcgatgacgtggagggctgccgcctccacgtgcgcggcgctcctgattctgctgtgggcgctgacgaccgaag

SEQ ID NO: 690642 - DNA, 120 bp, Artificial Sequence
  ENSG00000188211_2 (sequence is synthesized)
gtgatctgaaagtagagatgatggcaggggggactcagatcacacccctgaatgacaatgtcaccatattctgcaatatcttttattcccaacccctcaacatcacgtctatgggtatca

SEQ ID NO: 690643 - DNA, 120 bp, Artificial Sequence
  ENSG00000188211_3 (sequence is synthesized)
cctggttttggaagagtctgacgtttgacaaagaagtcaaagtctttgaattttttggagatcaccaagaggcattccgacctggagccattgtgtctccatggaggctgaagagtgggg

SEQ ID NO: 690644 - DNA, 120 bp, Artificial Sequence
  ENSG00000188211_4 (sequence is synthesized)
acgcctcactgcggctgcctggaatccagctggaggaagcaggagagtaccgatgtgaggtggtggtcacccctctgaaggcacagggaacagtccagcttgaagttgtggcttccccag

SEQ ID NO: 690645 - DNA, 120 bp, Artificial Sequence
  ENSG00000188211_5 (sequence is synthesized)
ccagcagattgttgctggatcaagtgggcatgaaagagaatgaagacaaatatatgtgtgagtcaagtgggttctacccagaggctattaatataacatgggagaagcagacccagaagt

SEQ ID NO: 690646 - DNA, 120 bp, Artificial Sequence
  ENSG00000188211_6 (sequence is synthesized)
ttccccatcccatagagatttctgaggatgtcatcactggtcccaccatcaagaatatggatggcacatttaatgtcactagctgcttgaagctgaactcctctcaggaagaccctggga

SEQ ID NO: 690647 - DNA, 120 bp, Artificial Sequence
  ENSG00000188211_7 (sequence is synthesized)
ctgtctaccagtgtgtggtacggcatgcgtccttgcatacccccttgaggagcaactttaccctgactgctgctcggcacagtctttctgaaactgagaagacagataatttttccattc

SEQ ID NO: 690648 - DNA, 120 bp, Artificial Sequence
  ENSG00000188211_8 (sequence is synthesized)
attggtggcctatttcattcattggtgttggactggttttattaattgttttgattccttggaaaaagatatgtaacaaatcatcttcagcctatactcctctcaagtgcattctgaaac

SEQ ID NO: 690649 - DNA, 120 bp, Artificial Sequence
  ENSG00000188211_9 (sequence is synthesized)
actggaactcctttgacactcagactctgaagaaagagcacctcatattcttttgcactcgggcatggccgtcttaccagctgcaggatggggaggcttggcctcctgagggaagtgtta

SEQ ID NO: 690650 - DNA, 120 bp, Artificial Sequence
  ENSG00000188211_10 (sequence is synthesized)
atattaatactattcaacaactagatgttttctgcagacaggagggcaaatggtccgaggttccttatgtgcaagccttctttgccttgcgagacaacccagatctttgtcagtgttgta

SEQ ID NO: 690651 - DNA, 120 bp, Artificial Sequence
  ENSG00000188211_11 (sequence is synthesized)
gaattgaccctgctctcctaacagttacatcaggcaagtccatagatgataattccacaaagtctgagaaacaaacccctagggaacactcggatgcagttccggatgccccaatccttc

SEQ ID NO: 690652 - DNA, 120 bp, Artificial Sequence
  ENSG00000188211_12 (sequence is synthesized)
ctgtctcccctatctgggaacctcctccagccacaacatcaacaactccagttctatcctcccaacccccaactttactgttacccctacagtaaatgcctgatggacctggtgccacta

SEQ ID NO: 690653 - DNA, 120 bp, Artificial Sequence
  ENSG00000188211_13 (sequence is synthesized)
gggtccaagttcccttttcattacaggaccttgggcaaataagaggggacctgggcaagttctctgatgacctgatagatatatagaggctttccaaaacctaactcaggtgtttgacct

SEQ ID NO: 690654 - DNA, 120 bp, Artificial Sequence
  ENSG00000188211_14 (sequence is synthesized)
tacttggggtgatgttatgttgctcttaaactcttaactactacagagaaacaggtagccctgcaggcagcagaaaaattcagagatgaacaacatgtcttctatagccactcaataagg

SEQ ID NO: 690655 - DNA, 120 bp, Artificial Sequence
  ENSG00000188211_15 (sequence is synthesized)
aaagaaggtgagaaacaaccagcattcacatacccaataggaagcgaggcagtgccccttgaacaacataattcggaccccagtggtaccttagatgagtggcaaagaaaacattttcaa

SEQ ID NO: 690656 - DNA, 120 bp, Artificial Sequence
  ENSG00000188211_16 (sequence is synthesized)
atgtgcttattagagggcctacagaggaccagagccaagcctcttaattaccccaaactctccatgatagatcaaaaactagatgaaaatccctcagcctttttggaaaggctgagagag

SEQ ID NO: 690657 - DNA, 120 bp, Artificial Sequence
  ENSG00000188211_17 (sequence is synthesized)
gctgtagtgaaacacacttccttgtctcctgttaggtatgtttatacctcacataaataattcaattgagggacagctaattttgaaagacaagtttattactcagacagcccctgatat

SEQ ID NO: 690658 - DNA, 120 bp, Artificial Sequence
  ENSG00000188211_18 (sequence is synthesized)
cagaaggaagctagagaaacaggccatgggattagatagcaccttacaaaacctcctgaaggtagccacctcggtcttttataatagggaccaggaggaggcccaggggaaggagaggaa

SEQ ID NO: 690659 - DNA, 120 bp, Artificial Sequence
  ENSG00000188211_19 (sequence is synthesized)
acacaagaaaaaggcagagactctggtggccactttgtataaaacccagtatccccaaggtacacctgctagttgctaccaatgtggcaaactagggcacttcaaaagggactgcccagg

SEQ ID NO: 690660 - DNA, 120 bp, Artificial Sequence
  ENSG00000188211_20 (sequence is synthesized)
cagcaagaagaagccacctcaaccctgtccagtatacaatggggaccactggaaggcagactgtcctgggaagcataggtcactgagtccagagccagtctcacaaatggtccagcagga

SEQ ID NO: 690661 - DNA, 120 bp, Artificial Sequence
  ENSG00000188211_21 (sequence is synthesized)
ctgatgggtcctggggctcaactccctggctccagtggctcagactgctgttactacccgggagcaccaggtgattctggagttcgaagggaggaaggtagacttctttctggacactgg

SEQ ID NO: 690662 - DNA, 120 bp, Artificial Sequence
  ENSG00000188211_22 (sequence is synthesized)
agccaggcttctgttttcctctccaattcaggccttcgttcctcccatagcacaaccatgatgggcatctcaggaaagactttaacttgatatttttctcaacctattagttgcagtcag

SEQ ID NO: 690663 - DNA, 120 bp, Artificial Sequence
  ENSG00000188211_23 (sequence is synthesized)
agggacctactgtttacacaggcctttttagtcatgcctgaaagtcccactcctttattagatagagatattccagcacgtatgggggccaccatccttatggctccaggacaaactccg

SEQ ID NO: 690664 - DNA, 120 bp, Artificial Sequence
  ENSG00000188211_24 (sequence is synthesized)
cctccccttagtggaaaccagtattaacccagaggtttgggcaactcagggaagaagtggccggactataaccactataccagtctggatccacctcaaggatcccactttttttcctaa

SEQ ID NO: 690665 - DNA, 120 bp, Artificial Sequence
  ENSG00000188211_25 (sequence is synthesized)
ccagagacaataccctctgaagccagaaagtagaaaagggctagacgccagcattgataacctaaaggcacaaggcctccttaggccttgcagtagcccttgaaacaccccaatattagg

SEQ ID NO: 690666 - DNA, 120 bp, Artificial Sequence
  ENSG00000188211_26 (sequence is synthesized)
caaaaatccaatggggaagggagactagttcaggacctctgccttattcatgaggctgtgattacgattcatccagtagatcccagtccctatactttgctaactcaaatatccaaggga

SEQ ID NO: 690667 - DNA, 120 bp, Artificial Sequence
  ENSG00000188211_27 (sequence is synthesized)
actaaatggttcacagttctgggcctaaaggatgcctttttctgtatacctttataccctgactcccaatacttgtttacctttgaagacccctccaatcaaaccacccagttaacctgg

SEQ ID NO: 690668 - DNA, 120 bp, Artificial Sequence
  ENSG00000188211_28 (sequence is synthesized)
actgtactgcctcagggatttagagatagcccccacctatttgggcaagtattgtcaagagatctcttcgaattcttccattctcaggttaaagttttacaatatgtagatgacattctc

SEQ ID NO: 690669 - DNA, 120 bp, Artificial Sequence
  ENSG00000188211_29 (sequence is synthesized)
ctctgtgccccaactgaggaagtttcttgagacggcactgaggctctccttaatttcctagctggaaagggatataaggcttcaaaatctaaggctcagctctatcagactttggtaaag

SEQ ID NO: 690670 - DNA, 120 bp, Artificial Sequence
  ENSG00000188211_30 (sequence is synthesized)
tacctaggtctggtcttgtcagaagggaacaagagcactaggcgaggagaggattaatcccatttcctcccttcctctccccagaaccctcaagcagctgagggatgcttgggcattaca

SEQ ID NO: 690671 - DNA, 120 bp, Artificial Sequence
  ENSG00000188211_31 (sequence is synthesized)
ggtttttgtaggttatagatacccaggtatgataaaataggttgccctttatatcaccttataaaagaaattcaagtggctaaaactcacttcctgacctgggaacctgaaggtcaaaag

SEQ ID NO: 690672 - DNA, 120 bp, Artificial Sequence
  ENSG00000188211_32 (sequence is synthesized)
gccattaatcagttaaaacaagccttgcttaaagcaccagcccccagtctttctgtagggaagtcctttaatctttatgtatcataaaggaaaggaatgaccctgggagttttaattcaa

SEQ ID NO: 690673 - DNA, 120 bp, Artificial Sequence
  ENSG00000188211_33 (sequence is synthesized)
gttcaaggcccagctcaacagccagtaggttacttaagtagagagcttgacttggaggctaaaggatggccagcttgcctctgagcagttacagtagtggccctgctagtcccagaggcc

SEQ ID NO: 690674 - DNA, 120 bp, Artificial Sequence
  ENSG00000188211_34 (sequence is synthesized)
accaagttaaccctggggaataacctgtttatgcctcacataaataatgtggcaggcttgctgtcctctaaagcgagtctctggctaacagacagctgcctcctcaagtatcagactttg

SEQ ID NO: 690675 - DNA, 120 bp, Artificial Sequence
  ENSG00000188211_35 (sequence is synthesized)
ctgctagaggaatctgcagtccagttaaaaacctgaccttgcctgatcccagacactttcctcccagaggaaactggagaaactgaacataattgtgaacagactgtagtacaacctatg

SEQ ID NO: 690676 - DNA, 120 bp, Artificial Sequence
  ENSG00000188211_36 (sequence is synthesized)
ccgctagggaggatctcaaagaaattcccctagaaaatccagactggacccactttatggatgggagctcttttgtaggacagggagtctgaaaagtgggatatgcagtagtcaccctaa

SEQ ID NO: 690677 - DNA, 120 bp, Artificial Sequence
  ENSG00000188211_37 (sequence is synthesized)
ataacattgaaaatgtgcctctctcaccaggcacacacactcaatcagttgagctgatccctctcacaagagcacttgaactaagcaaaggaaagacagctaacatttatactgactcca

SEQ ID NO: 690678 - DNA, 120 bp, Artificial Sequence
  ENSG00000188211_38 (sequence is synthesized)
agtgtacctttctagttctccttgcccatgctgccatctgaaaggaaaggcacttcctcaccgctaatgggtcttgcattaaataccatcaagacatcaacaggctattatcctcagtgt

SEQ ID NO: 690679 - DNA, 120 bp, Artificial Sequence
  ENSG00000188211_39 (sequence is synthesized)
tcctcccatgagaattagtggtcagacattgcagagggcatcagaagcgggtagatgaaatagcgaaaggaaacaggctagcagaccaaagagctaagtcagcagtaagaaggccccaag

SEQ ID NO: 690680 - DNA, 120 bp, Artificial Sequence
  ENSG00000188211_40 (sequence is synthesized)
gtcccaaaacacttgaggcccctctgatttgggagggctacataagggaaataaagcctcagtattcccctacagagatagaatgggccacctctcgaggtatacttttcaaccctcagg

SEQ ID NO: 690681 - DNA, 120 bp, Artificial Sequence
  ENSG00000188211_41 (sequence is synthesized)
atggttacaatcagaagattgcaaagtacgcttgccagcctccagccaatggaagattcttaaaatcctccactgagcctttcacttaggaaagcataagacatcagtgcatccaaagat

SEQ ID NO: 690682 - DNA, 120 bp, Artificial Sequence
  ENSG00000188211_42 (sequence is synthesized)
tgttctcaggagaaaatctactaaaaatggtcaaataggttgttaatactcgtgaaaccctcttaaaaataatccctttaacagatgacttcttccccaccacaatcaaaggatgggaag

SEQ ID NO: 690683 - DNA, 120 bp, Artificial Sequence
  ENSG00000188211_43 (sequence is synthesized)
ttactcaggggaggactggcagatagacttcacccatatgcccaaaataaatggcattcaatgtcttttggtgtgggtgcataccttcattaactgggtagaggcattcccatgcccaac

SEQ ID NO: 690684 - DNA, 120 bp, Artificial Sequence
  ENSG00000188211_44 (sequence is synthesized)
agaaaaggcctctgaggtggtgagaatactaattagttaaataattcctcactttgggctccctaagtacttccaaaacaacaatggtccctcatttaaagaagcctctacccagtaggg

SEQ ID NO: 690685 - DNA, 120 bp, Artificial Sequence
  ENSG00000188211_45 (sequence is synthesized)
ccgagtctgctaggactttttattgggtttggtaatacgtcacaccctttagcctctactgtgtcagccatgtcccatttatacaagacaaattgctgggtctgtcctgagcggtttgct

SEQ ID NO: 690686 - DNA, 120 bp, Artificial Sequence
  ENSG00000188211_46 (sequence is synthesized)
cagttcagtaacactaaggaacctcttgatgacttggtatttactgtcttagcattccctttgttagctttacctttagccattaaagacttgtcaggcataaatggaacatggtatggg

SEQ ID NO: 690687 - DNA, 120 bp, Artificial Sequence
  ENSG00000188211_47 (sequence is synthesized)
aacactttcaactgagtaactaactcctcccaggaaagcatttcctccctggtgccagaaaacactttccccaaagataagcctcacaccctcaggctaggaaaagttggccgggtaata

SEQ ID NO: 690688 - DNA, 120 bp, Artificial Sequence
  ENSG00000188211_48 (sequence is synthesized)
gcaaatgcctcctcctgttttaaaagcagaggaaaaggaccatacctgggagatctcaaatattataacaccatacttgtaattgctgaaagctcggaagtttggagaaaaagacataag

SEQ ID NO: 690689 - DNA, 120 bp, Artificial Sequence
  ENSG00000188211_49 (sequence is synthesized)
aaggatgatctaagaaaattggaagccatatggaggggaggctttcagaattcagcgtctcctcctggttgaaagtcctgctgggaatggcaggctctgggtaaccaccctgacacatgg

SEQ ID NO: 690690 - DNA, 120 bp, Artificial Sequence
  ENSG00000188211_50 (sequence is synthesized)
cactataatgtaaaaaacaacacataggccttcccagacatgcaccctcatgggattccagaccccctgtatgatgcttagtagtagtggcctacaaatctgtgggtgaacagaacagga

SEQ ID NO: 690691 - DNA, 120 bp, Artificial Sequence
  ENSG00000188211_51 (sequence is synthesized)
gacttctggactgacagcccctgtcacaagggggcattatctgagatattggccagggcatatcgtgtccctggtcttttgaaactccatttgtcggccaggtgtggtggcttacgactg

SEQ ID NO: 690692 - DNA, 80 bp, Artificial Sequence
  ENSG00000188211_52 (sequence is synthesized)
gatgaggtcaggagttcaagactagcctggacaatatggtgaaaccccgtctgtactaataatacaaaaaaaaaaaaaaa

SEQ ID NO: 690693 - DNA, 120 bp, Artificial Sequence
  ENSG00000188215_0 (sequence is synthesized)
agatgaagaggaggcggtggcagtggtggaagaagaggcggcggcggcgggggtagggagcctggaaacgcgagcggggatggtaggtggtttggacccgccgggccgccgtcgtttcca

SEQ ID NO: 690694 - DNA, 120 bp, Artificial Sequence
  ENSG00000188215_1 (sequence is synthesized)
gaaagggtttgactggaggaacctctggagcagctgttggctggctcctctggctgatggcatgttgaggtacatgggccagcggcagcgagggcatccaatccagaggggtccactcta

SEQ ID NO: 690695 - DNA, 120 bp, Artificial Sequence
  ENSG00000188215_2 (sequence is synthesized)
gaggccaggccaccagcaccatgggccagtgtgtcaccaagtgtaagaatccctcatcgaccctgggcagcaaaaatggagaccgtgagcccagcaacaagtcacatagcaggaggggtg

SEQ ID NO: 690696 - DNA, 120 bp, Artificial Sequence
  ENSG00000188215_3 (sequence is synthesized)
caggccaccgtgaggagcaggtaccaccctgtggcaagccaggtggagatatcctcgtcaacgggaccaagaaggccgaggctgccactgaggcctgccagctgccaacgtcctcgggag

SEQ ID NO: 690697 - DNA, 120 bp, Artificial Sequence
  ENSG00000188215_4 (sequence is synthesized)
atgctgggagggagtccaagtccaatgccgaggagtcttccttgcaaagattggaagaactgttcaggcgctacaaggatgagcgggaagatgcaattttggaggaaggcatggagcgct

SEQ ID NO: 690698 - DNA, 120 bp, Artificial Sequence
  ENSG00000188215_5 (sequence is synthesized)
tttgcaatgacctgtgtgttgaccccacagaatttcgagtgctgctcttggcttggaagttccaggctgcaaccatgtgcaaattcaccaggaaggagttttttgatggctgcaaagcaa

SEQ ID NO: 690699 - DNA, 120 bp, Artificial Sequence
  ENSG00000188215_6 (sequence is synthesized)
taagtgcagacagcattgacggaatctgtgcacggttccctagcctcttaacagaagccaaacaagaggataaattcaaggatctctaccggtttacatttcagtttggcctggactctg

SEQ ID NO: 690700 - DNA, 120 bp, Artificial Sequence
  ENSG00000188215_7 (sequence is synthesized)
aagaagggcagcggtcactgcatcgggaaatagccattgccctgtggaaactagtctttacccagaacaatcctccggtattggaccaatggctaaacttcctaacagagaacccctcgg

SEQ ID NO: 690701 - DNA, 120 bp, Artificial Sequence
  ENSG00000188215_8 (sequence is synthesized)
ggatcaagggcatctcccgggacacttggaacatgttccttaacttcactcaggtgattggccctgacctcagcaactacagtgaagatgaggcctggccaagtctctttgacacctttg

SEQ ID NO: 690702 - DNA, 120 bp, Artificial Sequence
  ENSG00000188215_9 (sequence is synthesized)
tggagtgggaaatggagcgaaggaaaagagaaggggaagggagaggtgcactcagctcagggcctgagggcttgtgtcccgaggagcagacttagtggctctgtcccaggagcagcagca

SEQ ID NO: 690703 - DNA, 120 bp, Artificial Sequence
  ENSG00000188215_10 (sequence is synthesized)
aggatctgccagctgccctgcagccaactgaggaattggaccattttggaaattactgaagatccggatattttctactttacacctttctctgccttgtatctgaaagggctctaaaat

SEQ ID NO: 690704 - DNA, 120 bp, Artificial Sequence
  ENSG00000188215_11 (sequence is synthesized)
gctgtatcatgttttaggcactttcttcatttttttggttattttggttatttcctttttggggggatctcccagaatatttgaacctggttacatgttgtgtatctttttttgaagcct

SEQ ID NO: 690705 - DNA, 75 bp, Artificial Sequence
  ENSG00000188215_12 (sequence is synthesized)
gggagggcatagagcagggcggggggatgggactgttaggttgaattaacattacaaaatgatacagtgccagat

SEQ ID NO: 690706 - DNA, 120 bp, Artificial Sequence
  ENSG00000188215_13 (sequence is synthesized)
ttaggttgaattaacattacaaaatgatacagtgccagatctcagtttcgcatattgtttttcagggcaggtctgtactgtgtgtagtgctgtttacatagatgaatttaggttgtaata

SEQ ID NO: 690707 - DNA, 120 bp, Artificial Sequence
  ENSG00000188215_14 (sequence is synthesized)
attatttttaaagatttacacagatttgaatagcagtgttaactgttaaccacattgcattaattcccaggcgatttagagctcttggagagccaaggccagccaagagcatttgtagtc

SEQ ID NO: 690708 - DNA, 120 bp, Artificial Sequence
  ENSG00000188215_15 (sequence is synthesized)
tggtgacaacccccttttaagctaatttatccagaaccctgatttccctcacttcttgctcattccttctttgacctattgcatttcatgttgagtttttccatcaacatgctgcacctg

SEQ ID NO: 690709 - DNA, 120 bp, Artificial Sequence
  ENSG00000188215_16 (sequence is synthesized)
tcagtcaagtgagcattttttaagaacacattgtactgagaaccacttaagcattgaatgcggagaaagcagtgctacctcagttttgctggaagtagacttctttgatagttttctttc

SEQ ID NO: 690710 - DNA, 120 bp, Artificial Sequence
  ENSG00000188215_17 (sequence is synthesized)
tttgatgaagtttctgtattttcatgttgtaagtggaaatacttttttttgtttgtttgtttcatttgccttggagccaaagtttctgttcctggtggtcgggaaactgcctgccggcca

SEQ ID NO: 690711 - DNA, 85 bp, Artificial Sequence
  ENSG00000188215_18 (sequence is synthesized)
gaatatcatcagcttacttgtctggcaagggcagaagcctggggttggcctgaactctgccaaacaaatatcaaagtgtatttaa

SEQ ID NO: 690712 - DNA, 120 bp, Artificial Sequence
  ENSG00000188215_19 (sequence is synthesized)
tggcctgaactctgccaaacaaatatcaaagtgtatttaatagttaaatttgtgccctttcccttcttgctgcacccatgttgtcacttaacccccaggagttatttattatctttttgt

SEQ ID NO: 690713 - DNA, 120 bp, Artificial Sequence
  ENSG00000188215_20 (sequence is synthesized)
taaagtcaggctcatttggggtaatgtgatgactgtttaggtttacatgaccctcctctcctttccctacccccaaatatgtatatatacatatataaaatatgtatatattttacctat

SEQ ID NO: 690714 - DNA, 120 bp, Artificial Sequence
  ENSG00000188215_21 (sequence is synthesized)
ataaaatatatatatatacacatatatgtatctatattcctttgtttctttgcctgcttatactggccataaaagagggagctgccttcaatgtataaagtataagaagagtgccaggga

SEQ ID NO: 690715 - DNA, 120 bp, Artificial Sequence
  ENSG00000188215_22 (sequence is synthesized)
atgccataatggaggcttttggatctgaatttggaccatttcactaaagagaacatgagtttgctcagccctttcctcacaagagggagggccccggttccccagacttctccacgcgct

SEQ ID NO: 690716 - DNA, 120 bp, Artificial Sequence
  ENSG00000188215_23 (sequence is synthesized)
ggctccataaaggccagctttggccaggctgccacaggggcctgaggagctcactctgggcctacctggtttcagttagagggtcctcctgttatttttccatttaaaaagtatgtcctc

SEQ ID NO: 690717 - DNA, 120 bp, Artificial Sequence
  ENSG00000188215_24 (sequence is synthesized)
agaaaactgtactggaaggatgggtggcaggaacttgtatagttcagcttccaacactttggaacagattaaaaagggaatcttttaaataaaaacgtataaaaatatttatactcttga

SEQ ID NO: 690718 - DNA, 120 bp, Artificial Sequence
  ENSG00000188215_25 (sequence is synthesized)
ctgttaaacatttggaggtttctcccttaacctaataccccgctgcgtcccaggtatgtttctcagcctgggcaggaattgcatgttttgagttccattgtgagcagccttacagctctg

SEQ ID NO: 690719 - DNA, 120 bp, Artificial Sequence
  ENSG00000188215_26 (sequence is synthesized)
ggctcccatcttaaggattattaaagagttttggcagttggtatttttctaaaactgatattgaccatagggaacatacttggaatttgtttttttttttaaatcctaaacctgacagtt

SEQ ID NO: 690720 - DNA, 120 bp, Artificial Sequence
  ENSG00000188215_27 (sequence is synthesized)
cctccttcagaggggcaaatgggaaactttaagatcacccacggtatagtactgctagaaagctgaagggggtcttgggccagatgcctggcttctgttctagctaaataagactcttga

SEQ ID NO: 690721 - DNA, 120 bp, Artificial Sequence
  ENSG00000188215_28 (sequence is synthesized)
ataagtctccaggggtcccagcaggttctgtgggatcagttgtagctgggtacccagactgaggttttaaaaagactgctttttcattaagccagtttgcaactcattttccccggttct

SEQ ID NO: 690722 - DNA, 120 bp, Artificial Sequence
  ENSG00000188215_29 (sequence is synthesized)
ggattgggtagtggttgactgagggaaaagccaggctgctcttggccagataaggccctttccatcccagatcagagtgtatcagagaaagctgcacaaaagaggcaggcagcccaggac

SEQ ID NO: 690723 - DNA, 120 bp, Artificial Sequence
  ENSG00000188215_30 (sequence is synthesized)
cctgagtactctggagaaactaggttccttccccaccctttaagaagacattccgtgcattagatgtactagagtggatgtattttgttgttttttaaattaactatttagcctcctcat

SEQ ID NO: 690724 - DNA, 120 bp, Artificial Sequence
  ENSG00000188215_31 (sequence is synthesized)
cccccaccaaaaaagccatttagttattttttggttatattgatccatttgcaaatgagaagccagaaaagggagcagtcagggagggacttacaagttcctttcaagtttgagtacttg

SEQ ID NO: 690725 - DNA, 120 bp, Artificial Sequence
  ENSG00000188215_32 (sequence is synthesized)
atgctcagcaaagatttcaagcttctgcagtagctctgggccaatgcttgactctttcatgaccacaagaaatgcagtttttctgcaaagggatccaaggtgaggtgtgtgtagggtttg

SEQ ID NO: 690726 - DNA, 120 bp, Artificial Sequence
  ENSG00000188215_33 (sequence is synthesized)
aagttatacttctgggaagtgaaaagtcttgttcctttcaacctagaaataggtttgccacttaatgagtgagcagtaagtctgtgtaagaggctgaatgcatgcccctcagataagcca

SEQ ID NO: 690727 - DNA, 120 bp, Artificial Sequence
  ENSG00000188215_34 (sequence is synthesized)
gtacactccttgcttagcaacagaacatcagggtgatgtggagaggggcaggatgtggacgccactttggaaatcggcaacatctgagggcaacaacaaacaagtgtgttgggaaataag

SEQ ID NO: 690728 - DNA, 120 bp, Artificial Sequence
  ENSG00000188215_35 (sequence is synthesized)
aaataactcagttttgacaactggctttgtcagcttttgtgatgtttctttagcagtttattggaaagatggtatgagatgacgtgctgcttcattgaattgctctttcccccatctttg

SEQ ID NO: 690729 - DNA, 120 bp, Artificial Sequence
  ENSG00000188215_36 (sequence is synthesized)
ccaaatctcaatgtatcgttcttaaccccacctcctgtaaggggctttgctatgcttcagctggttgtctcagcagctgaagtgctgcccacctgtgtgagttgggtccaggaaaccatg

SEQ ID NO: 690730 - DNA, 120 bp, Artificial Sequence
  ENSG00000188215_37 (sequence is synthesized)
tctgcccttctgataagggaagatgaatctagagctgggtgaagatctaaattttaaccaaacccctgggcccaggaaaataacaattgaaaatgtacaaggcagtgttttcaatattaa

SEQ ID NO: 690731 - DNA, 120 bp, Artificial Sequence
  ENSG00000188215_38 (sequence is synthesized)
acttccccaaggaaagcacaaactagtctttttggaaagggagaaaggattaagccacacagtattagtctttgaagcagtactggtctctaggggctggtgccaaaatggagtcccata

SEQ ID NO: 690732 - DNA, 120 bp, Artificial Sequence
  ENSG00000188215_39 (sequence is synthesized)
gtagttacactcgatggcctcatgtactatatactgtgccaaattgtattaaacagtggtggggagttactgggataagaacttgtctaaaagtttacaaaccaaaacagatctgttagg

SEQ ID NO: 690733 - DNA, 120 bp, Artificial Sequence
  ENSG00000188215_40 (sequence is synthesized)
ttggtgcaaaagtaagtttttgccatacttaatgtattgccattaagtatggcaaaaaccacaattacttttacaccaacctatgtatttaagaatgtttggtttgccagattccaaatg

SEQ ID NO: 690734 - DNA, 120 bp, Artificial Sequence
  ENSG00000188215_41 (sequence is synthesized)
aggtcttcagtgcagcaaagcccaaaaggtgtagactcagttatgcaattataaggttaaggcgtagaagaaagctgctgctaggtttttgttgcattttacttgactgctctgctgttt

SEQ ID NO: 690735 - DNA, 120 bp, Artificial Sequence
  ENSG00000188215_42 (sequence is synthesized)
ttcttgtctctcatgtttggttagctatgacttgagcatcttggtaactgacaaaggtcttccttgggggacttgaacatcttggtaaatgacaggtcttcttggaggactccagcagta

SEQ ID NO: 690736 - DNA, 120 bp, Artificial Sequence
  ENSG00000188215_43 (sequence is synthesized)
tcttgtttaaacgactgaaaggactattaaggttgttgaattgtgttaattgggactcattgaggaaatgcgacattgatcctcctcttattccacagtgtgttttctgatcatataaag

SEQ ID NO: 690737 - DNA, 120 bp, Artificial Sequence
  ENSG00000188215_44 (sequence is synthesized)
aaggttccgaaccatccatccccctcagagtttattcccctggtaagctgtaattgcatatccagtttaaactggactgggactgcatgttggtgaggatcggcaggggttttccccctt

SEQ ID NO: 690738 - DNA, 120 bp, Artificial Sequence
  ENSG00000188215_45 (sequence is synthesized)
ttcgaaagatgaaatagattcttgagcactggttgcagaagccaaaatagttcaaatagctttgcataaccattgggttctgcttctgattcaggtgctgggcatcatgtcctccctatt

SEQ ID NO: 690739 - DNA, 120 bp, Artificial Sequence
  ENSG00000188215_46 (sequence is synthesized)
cttctcttcttggaaacccagcctatctcataaatacctacttccgccacccatccaacctccctgctcctttcaacacaaatcttggatattgccaaaggaagccattcagcagctgct

SEQ ID NO: 690740 - DNA, 120 bp, Artificial Sequence
  ENSG00000188215_47 (sequence is synthesized)
ggggtttttcatccccctgacatgcatacatttgctctgggagaagtgtcttccctctgaccctggtccccagctccgtctgtgcttaattgctcttacctgttgcactaatgaatatga

SEQ ID NO: 690741 - DNA, 120 bp, Artificial Sequence
  ENSG00000188215_48 (sequence is synthesized)
ctaggttttaaagggggaatgtgaagcaataggcacatggggcttggatgaattggtcccacagatataccctgccttaagccgctgaggtgatgagtccactgctcatgtgaccctcca

SEQ ID NO: 690742 - DNA, 120 bp, Artificial Sequence
  ENSG00000188215_49 (sequence is synthesized)
cctttgtggatccctcttggtttgtgaccagtgtgtctgtttgttgaggttgtacaaacttgacaaaagttaatacttttgtttgtattttctgcactgttgcactctccaaatggcccc

SEQ ID NO: 690743 - DNA, 120 bp, Artificial Sequence
  ENSG00000188215_50 (sequence is synthesized)
ttgagtatttttattgacttgttacacacatttttgtctttgatgtctacattttttcctttaatgttttttatttggaaggttacctgctgttggatttaataaatttgtttacttgaa

SEQ ID NO: 690744 - DNA, 120 bp, Artificial Sequence
  ENSG00000188215_51 (sequence is synthesized)
agctgggctgagactgagggagagaagctggaggctgatcttggtccagcagaagctgagcagagctgctgtctttggtctttcaggttggctggctcctctggctgatggcatgttgag

SEQ ID NO: 690745 - DNA, 120 bp, Artificial Sequence
  ENSG00000188219_0 (sequence is synthesized)
tgctgggcttgaccttttctctgctgggtttggcattcccttgggtgggctgggtgttttcttgggggcgggggttggccctttctggggttggccctttctggggtgggcgtggggtcg

SEQ ID NO: 690746 - DNA, 120 bp, Artificial Sequence
  ENSG00000188219_1 (sequence is synthesized)
ttccctgggtggggtgggctgggctggaatcccctgctggggttggcaggttttggctgggattgacatttctcttcaaacagattggaaacccggagttacctgctagttggtgaaact

SEQ ID NO: 690747 - DNA, 120 bp, Artificial Sequence
  ENSG00000188219_2 (sequence is synthesized)
cagattggaaacccggagttacctgctagttggtgaaactggttggtagacgcgatctgttggctactactggcttctcctggctgttaaaagcagatggtggttgaggttgattccatg

SEQ ID NO: 690748 - DNA, 120 bp, Artificial Sequence
  ENSG00000188219_3 (sequence is synthesized)
aggagcaagatgggcaagtggtgctgccgttgcttcccctgctacagggagagcggcaagagcaacgtgggcacttctggagaccacgacgactctgctatgaagacactcaggagcaag

SEQ ID NO: 690749 - DNA, 120 bp, Artificial Sequence
  ENSG00000188219_4 (sequence is synthesized)
ctcaggagcaagatgggcaagtggtgccaccactgcttcccctgctgcagggggagtggcaagagcaacgtgggcgcttctggagaccacgacgactctgctatgaagacactcaggaac

SEQ ID NO: 690750 - DNA, 84 bp, Artificial Sequence
  ENSG00000188219_5 (sequence is synthesized)
tggcaagagcaacgtgggcgcttctggagaccacgacgactctgctatgaagacactcaggaacaagatggggaagtggtgctg

SEQ ID NO: 690751 - DNA, 64 bp, Artificial Sequence
  ENSG00000188219_6 (sequence is synthesized)
caaggtgggcgcttggggagactacgatgacagcgccttcatggagcccaggtaccacgtccgt

SEQ ID NO: 690752 - DNA, 120 bp, Artificial Sequence
  ENSG00000188219_7 (sequence is synthesized)
aaggacaagcaaaagaggactgctctacatctggcctctgccaatgggaattcagaagtagtaaaactcctgctggacagacgatgtcaacttaatgtccttgacaacaaaaagaggaca

SEQ ID NO: 690753 - DNA, 120 bp, Artificial Sequence
  ENSG00000188219_8 (sequence is synthesized)
gctctgataaaggccgtacaatgccaggaagatgaatgtgcgttaatgttgctggaacatggcactgatccaaatattccagatgagtatggaaataccactctgcactacgctatctat

SEQ ID NO: 690754 - DNA, 120 bp, Artificial Sequence
  ENSG00000188219_9 (sequence is synthesized)
ttaatggccaaagcactgctcttatatggtgctgatatcgaatcaaaaaacaagcatggcctcacaccactgttacttggtgtacatgagcaaaaacagcaagtcgtgaaatttttaatc

SEQ ID NO: 690755 - DNA, 120 bp, Artificial Sequence
  ENSG00000188219_10 (sequence is synthesized)
ttggtgtacatgagcaaaaacagcaagtcgtgaaatttttaatcaagaaaaaagcgaatttaaatgcactggatagatatggaaggactgctctcatacttgctgtatgttgtggatcag

SEQ ID NO: 690756 - DNA, 89 bp, Artificial Sequence
  ENSG00000188219_11 (sequence is synthesized)
ctgacatcagaggaagagtcacaaaggttcaaaggcagtgaaaatagccagccagagaaaatgtctcaagaactgaagaagaaatgaag

SEQ ID NO: 690757 - DNA, 120 bp, Artificial Sequence
  ENSG00000188219_12 (sequence is synthesized)
aaggatggtgatagagaggttgaagaagaaatgaagaagcatgaaagtaataatgtgggattactagaaaacctgactaatggtgtcactgctggcaatggtgataatggattaattcct

SEQ ID NO: 690758 - DNA, 120 bp, Artificial Sequence
  ENSG00000188219_13 (sequence is synthesized)
caaaggaagagcagaacacctgaaaatcagcaatttcctgacaacgaaagtgaagagtatcacagaatttgtgaattactttctgactacaaagaaaagcagatgccaaaatactcttct

SEQ ID NO: 690759 - DNA, 83 bp, Artificial Sequence
  ENSG00000188219_14 (sequence is synthesized)
tcagaggaagagtcacaaaggcttaaaggcagtgaaaatggccagccagagaaaagatcctagaaaattttatggctatcgaa

SEQ ID NO: 690760 - DNA, 120 bp, Artificial Sequence
  ENSG00000188219_15 (sequence is synthesized)
ggtgatagagagctagaaaattttatggctatcgaagaaatgaagaagcacggaagtactcatgtcggattcccagaaaacctgactaatggtgccactgctggcaatggtgatgatgga

SEQ ID NO: 690761 - DNA, 120 bp, Artificial Sequence
  ENSG00000188219_16 (sequence is synthesized)
aacaaaatgatactcagaagcaattttgtgaagaacagaacactggaatattacacgatgagattctgattcatgaagaaaagcagatagaagtggttgaaaaaatgaattctgagcttt

SEQ ID NO: 690762 - DNA, 120 bp, Artificial Sequence
  ENSG00000188219_17 (sequence is synthesized)
ctcttagttgtaagaaagaaaaagacgtcttgcatgaaaatagtacgttgcgggaagaaattgccatgctaagactggagctagacacaatgaaacatcagagccagctaagagaaaaga

SEQ ID NO: 690763 - DNA, 120 bp, Artificial Sequence
  ENSG00000188219_18 (sequence is synthesized)
aatatttggaggatattgaaagtgtgaaaaaaaagaatgataatcttttaaaggctctacaattgaatgagctcaccatggatgatgataccgccgtgctcgtcattgacaacggctctg

SEQ ID NO: 690764 - DNA, 120 bp, Artificial Sequence
  ENSG00000188219_19 (sequence is synthesized)
gcatgtgcaaggccggctttgcgggcgacgatgccccccgggctgtcttcccttccatcgtggggcgccccaggcagcagggcatgatggggggcatgcatcagaaagagtcctatgtgg

SEQ ID NO: 690765 - DNA, 80 bp, Artificial Sequence
  ENSG00000188219_20 (sequence is synthesized)
gtaccccatggaacacggcatcatcaccaacacgagctgcgtgtggctcccgaggagcaccccatcctgctgaccgaggc

SEQ ID NO: 690766 - DNA, 120 bp, Artificial Sequence
  ENSG00000188219_21 (sequence is synthesized)
tggcaccacaccttctacaacgagctgcgtgtggctcccgaggagcaccccatcctgctgaccgaggcccccctgaaccccaaggccaaccgcgagaagatgacccagatcatgtttgag

SEQ ID NO: 690767 - DNA, 120 bp, Artificial Sequence
  ENSG00000188219_22 (sequence is synthesized)
ccatccaggccgtgccgtccctgtacacctctggccgtactactggcatcgtgatggactctggtgacggggtcacccacactgtgcccatctatgaggggaatgccctcccccatgcca

SEQ ID NO: 690768 - DNA, 120 bp, Artificial Sequence
  ENSG00000188219_23 (sequence is synthesized)
ccctgcgcctagacctggctgggcgggaactgcctgactacctcatgaagatcctcaccgagcgtggctataggttcaccaccatggccgagcgggaaatcgtgcgtgacatcaaagaga

SEQ ID NO: 690769 - DNA, 120 bp, Artificial Sequence
  ENSG00000188219_24 (sequence is synthesized)
agctgtgctatgttgccctggacttcgagcaggagatggccacggcggcctccagctcctccctagagaagagctacgagctgcccgatggccaggtcatcaccatcggcaacgagcggt

SEQ ID NO: 690770 - DNA, 120 bp, Artificial Sequence
  ENSG00000188219_25 (sequence is synthesized)
tccgctgccccgaggcgctcttccagccttgcttcctgggcatggaatcctgtggcatccatgaaactaccttcaactccatcatgaagtctgatgtggacatccgcaaagacctgtaca

SEQ ID NO: 690771 - DNA, 120 bp, Artificial Sequence
  ENSG00000188219_26 (sequence is synthesized)
ccaacacagtgctgtctggcggcaccaccatgtaccctggcatggcccacagaatgcagaaggagatcgctgccctggcgcctagcatgatgaagatcaggatcattgctcctcccaagc

SEQ ID NO: 690772 - DNA, 74 bp, Artificial Sequence
  ENSG00000188219_27 (sequence is synthesized)
gagtcaggcccctccattgtccaccgcaaatgcttctaggtggactctgacttagttgcgttacaccctttctt

SEQ ID NO: 690773 - DNA, 120 bp, Artificial Sequence
  ENSG00000188219_28 (sequence is synthesized)
tctaggtggactctgacttagttgcgttacaccctttcttgacaaaaccaaacttctcagaaaacaacatgagattggcatggctttatttgttttcttgtttcattttttgttttgttt

SEQ ID NO: 690774 - DNA, 120 bp, Artificial Sequence
  ENSG00000188219_29 (sequence is synthesized)
tttattggcttgactcaggatttaaaaaccggaatggtgaaggtgacagcagtcggttggaggaagcttcctccaaagttctacaatgttgccaaggactttgattgtacattgttcttc

SEQ ID NO: 690775 - DNA, 120 bp, Artificial Sequence
  ENSG00000188219_30 (sequence is synthesized)
gactttgattgtacattgttcttcttttcaatagtcattccaaatattgtgagacgcattgtttcaggaagccccttgccctgctaaaagccatcccacttctctctaaggagaatggcc

SEQ ID NO: 690776 - DNA, 120 bp, Artificial Sequence
  ENSG00000188219_31 (sequence is synthesized)
gggaggtgatagcattgcttttgtgcaaattacataatgcaaaattttttgaatcttcgccttaatactttttaattttgttttattttgaatgatcagccttcgtggcccccctctttt

SEQ ID NO: 690777 - DNA, 120 bp, Artificial Sequence
  ENSG00000188219_32 (sequence is synthesized)
gtaccccaacttggggtgtatgaaggcttttggtctccctgagagtggctggaggcagccagggcttacctgtactctgacttgaggagagttggataaaagtgcacaccttaaaaaaaa

SEQ ID NO: 690778 - DNA, 120 bp, Artificial Sequence
  ENSG00000188227_0 (sequence is synthesized)
tacaggtgtcagatctttttcaagaacagcagaaaatgatcgaataccagatacctgtgtcattcaaagatgtggttgtgggcttcacccaagaggagtggcaccggctgagtcctgctc

SEQ ID NO: 690779 - DNA, 120 bp, Artificial Sequence
  ENSG00000188227_1 (sequence is synthesized)
agagggccctgtaccgggatgtgatgctggaaacctatagcaacctcgtctcagtgggttatgaaggcaccaaaccagatgtgatcctcagactggagcaggaagaagcaccatggattg

SEQ ID NO: 690780 - DNA, 120 bp, Artificial Sequence
  ENSG00000188227_2 (sequence is synthesized)
gtgaggcagcatgcccgggctgccactgttgggaagacatctggcgagttaatatccagaggaaaagacggcaagacatgcttttgaggccaggcgcagccataagcaagaaaacattgc

SEQ ID NO: 690781 - DNA, 120 bp, Artificial Sequence
  ENSG00000188227_3 (sequence is synthesized)
ccaaggagaaaagctgtgaatataataagtttgggaaaatatcacttctgagcactgatcttttttcttcaatccagagccctagtaactggaacccttgtggaaagaatttgaaccata

SEQ ID NO: 690782 - DNA, 120 bp, Artificial Sequence
  ENSG00000188227_4 (sequence is synthesized)
atttagacttgattggttttaagagaaactgtgcaaaaaagcaagatgagtgttatgcttatgggaaattgcttcagcgtataaatcatggtagacgacctaatggagaaaagccccggg

SEQ ID NO: 690783 - DNA, 120 bp, Artificial Sequence
  ENSG00000188227_5 (sequence is synthesized)
gttgcagtcactgtgagaaagctttcacccagaacccggcacttatgtataaaccagcagtaagtgattctctcttgtacaaacggaagagggttccacctacagaaaaaccccacgtct

SEQ ID NO: 690784 - DNA, 120 bp, Artificial Sequence
  ENSG00000188227_6 (sequence is synthesized)
gtagtgagtgtgggaaagccttctgctacaagtctgaattcattaggcatcagagaagtcacactggggagaagccttatggctgcactgactgtgggaaagccttttcacataagtcaa

SEQ ID NO: 690785 - DNA, 120 bp, Artificial Sequence
  ENSG00000188227_7 (sequence is synthesized)
ccctcatcaaacaccagagaattcacactggggtaagaccctttgaatgttttttttgtgggaaagcctttacccagaagtcacaccgcacagaacatcagagaacacacacaggagaga

SEQ ID NO: 690786 - DNA, 120 bp, Artificial Sequence
  ENSG00000188227_8 (sequence is synthesized)
gaccctttgtctgcagtgaatgcgggaaatcgtttggtgagaagtcatacctcaatgtacatcgaaaaatgcacacaggagaaagaccgtatcgttgcagagaatgtggaaaatccttca

SEQ ID NO: 690787 - DNA, 120 bp, Artificial Sequence
  ENSG00000188227_9 (sequence is synthesized)
gccagaagtcatgcctcaataaacattggagaactcacacaggagagaagccctatgggtgcaatgaatgtgggaaagctttctaccagaagccaaacctcagcagacatcagaaaattc

SEQ ID NO: 690788 - DNA, 120 bp, Artificial Sequence
  ENSG00000188227_10 (sequence is synthesized)
atgctcggaagaatgcctacaggaatgaaaacttaataattgtgggaaatacttgagcaaaatatctggtttcatggtatgtagggaattttttttttttttttttgagttggaatctca

SEQ ID NO: 690789 - DNA, 120 bp, Artificial Sequence
  ENSG00000188227_11 (sequence is synthesized)
ggcgtgagccaccgcgcctggccggtatgtagggaatttatccttaggagaaatcttatcattttaatgaatttgaacagtgtgtttttattttatttatttatttattttgagttgtat

SEQ ID NO: 690790 - DNA, 82 bp, Artificial Sequence
  ENSG00000188227_12 (sequence is synthesized)
ttgaacagtgtgtttttattttatttatttatttattttgagttgtattctctgttttaacctcagcctcccaggttcaagc

SEQ ID NO: 690791 - DNA, 120 bp, Artificial Sequence
  ENSG00000188227_13 (sequence is synthesized)
aagtgttgggattacaggcatgagccaacgcgcccaaccgacagtgttgtatcataatggaaatcatgatctaattgtgatacaaacttttctagaaaatactttctcaaacataagcat

SEQ ID NO: 690792 - DNA, 120 bp, Artificial Sequence
  ENSG00000188227_14 (sequence is synthesized)
aaatactttctcaaacataagcatggacaccctggcatgtaaacgtttaaaaatgtattaaatggaataacagcagaatacaaaatatctgtgaagagacttaaaggcatactctggtat

SEQ ID NO: 690793 - DNA, 120 bp, Artificial Sequence
  ENSG00000188227_15 (sequence is synthesized)
attccacagtgagccatacaatcagcattatttgtattttggagttgtaaatgtgaaattaacataaaatgtgaatatcagacacatgtcacacaacatatagaatgccattcagaaaac

SEQ ID NO: 690794 - DNA, 120 bp, Artificial Sequence
  ENSG00000188227_16 (sequence is synthesized)
ttttccactttaaatatcatcattgtcttttgatgtcttaacaatacaaaaaaataacaacaacatggcccactattgttaaaagaactttattataccagctacatttttccacctttt

SEQ ID NO: 690795 - DNA, 120 bp, Artificial Sequence
  ENSG00000188227_17 (sequence is synthesized)
tgtaatacatgtaaatggctatagaggttgttactgtcctctgcagaaataataaagcagtgtttttaaatgtatttggataatttggccaaaaattttactaaaatgtagttatttata

SEQ ID NO: 690796 - DNA, 120 bp, Artificial Sequence
  ENSG00000188227_18 (sequence is synthesized)
ttaaaaatgcaagctaaggaatagtttaagaacctgatactgggtaaatgaaacactgtaaactatttgacaaaatgtagtgtcaccctggtgtacagtacactgttcatattttcttag

SEQ ID NO: 690797 - DNA, 120 bp, Artificial Sequence
  ENSG00000188227_19 (sequence is synthesized)
tcttgcttaaaatatcttgtagcaaattagtagcattgctacactattctagatacactattctatatacaggttgtataactcagaaatgtttcatgcgtagaccactgaaggagaatt

SEQ ID NO: 690798 - DNA, 120 bp, Artificial Sequence
  ENSG00000188227_20 (sequence is synthesized)
tcttttctctctatccctctgcaaattaattcaagaatattcatttttttcatataaatttccttgcaagtgtcctagacactaaatcccaaggttttaattatttcaatgtttggaaag

SEQ ID NO: 690799 - DNA, 120 bp, Artificial Sequence
  ENSG00000188227_21 (sequence is synthesized)
aagtctgcttccctgagttgctatgtcatccatattagaaaataaatggccatgtggaatctacatttttcaagatttccctccatgtaagactgcctgatccagaatgagaaaggagac

SEQ ID NO: 690800 - DNA, 120 bp, Artificial Sequence
  ENSG00000188227_22 (sequence is synthesized)
ataaccacagatatcaatatgattttttaagtgataaaaagatacctcatacaactctaatcaacatattttttaaaaagaggaggtggatgcttttctaataaacttaagttatgaaaa

SEQ ID NO: 690801 - DNA, 120 bp, Artificial Sequence
  ENSG00000188227_23 (sequence is synthesized)
ctgcaataagaagtagaaaacttggtaggatagttaacattgaaaaactcaaaaaagctattaaagatctataatgggaaaatgctccaggctcagaagagttcatgcttagttctatct

SEQ ID NO: 690802 - DNA, 120 bp, Artificial Sequence
  ENSG00000188227_24 (sequence is synthesized)
ctgggtgacaagagcgaaactccgtcaaaaaaaaaaaaaaaaaaagaaaacttcagaccagtcttactcatgaatatagaaacaaaaattatagttaaaatactagcaaatagaattcag

SEQ ID NO: 690803 - DNA, 120 bp, Artificial Sequence
  ENSG00000188227_25 (sequence is synthesized)
aaaatactagcaaatagaattcagccatatacccaaagagtgacatagtaagagtcatcccaagaatgccaaaccagttcagttaataggaaatgcatcaatcaaattaacagtttaaag

SEQ ID NO: 690804 - DNA, 120 bp, Artificial Sequence
  ENSG00000188227_26 (sequence is synthesized)
gagaagaatcatatgaactctcaacagatactgagaaggcatttcatagaatgtgttaatttacattgtaatagatgggaaccacttaaagcggtttttcttaaaaaaaattttttttaa

SEQ ID NO: 690805 - DNA, 120 bp, Artificial Sequence
  ENSG00000188227_27 (sequence is synthesized)
cccaaaccccaaagcatatattatgccaaagccattttttaaaatcaggaattcaatattggcttagagattccagtgaaggcaataaaaagaaatgaattggtataaacagcagaaaag

SEQ ID NO: 690806 - DNA, 120 bp, Artificial Sequence
  ENSG00000188227_28 (sequence is synthesized)
gtaaaactatccatttttactgatgatatggttgtacaccaataaatgaaaagactattttttgagttaacttttctaagaagacagggtaccaaaatcaagagctgttctccatactga

SEQ ID NO: 690807 - DNA, 120 bp, Artificial Sequence
  ENSG00000188227_29 (sequence is synthesized)
caagaaaacataatttatatgtacttcttttggaattacactaaatctcaatgattttttgacaatcattgaaaaaaatatatgaaaaaaatcataccatgtataaaaacatcacatgta

SEQ ID NO: 690808 - DNA, 120 bp, Artificial Sequence
  ENSG00000188227_30 (sequence is synthesized)
cccaataaatatatacaacaattatatatctataataattaaaaatttttaaaatgccatgctagataccagaagataacatgaagccattctaatgaaattaatattgtattggcaaag

SEQ ID NO: 690809 - DNA, 120 bp, Artificial Sequence
  ENSG00000188227_31 (sequence is synthesized)
gaacaggtaaatacatcattagaacacagtagaaaattcagaaatagacttcgatatatatgaactttttcatatgtgaaaaaggtgaaatctgaaaccacaggggaaaagagtagttta

SEQ ID NO: 690810 - DNA, 120 bp, Artificial Sequence
  ENSG00000188227_32 (sequence is synthesized)
cttaaaaagaattctggaacagaaccttttaatcttaaaggaagaaaatttggattaacagcacaaaaataaattctgggtggctttaagacgtaaaattttaaagcaacagaattctta

SEQ ID NO: 690811 - DNA, 120 bp, Artificial Sequence
  ENSG00000188227_33 (sequence is synthesized)
aaagaaaatcaaaggagcctatgtgtacaatctaggagttgggagatattaactttaccaacacaggacactcagaagctatttagaaataagcagttgaaggctgggtgcagtggctca

SEQ ID NO: 690812 - DNA, 120 bp, Artificial Sequence
  ENSG00000188227_34 (sequence is synthesized)
gaaaaagaaaaaaaaaaggaaacaaacatttgactacgtagaatcttttggtacaatcttttgggtgacaaaagatgccatcagcaaactcaagagataatagattgtggggaaatattt

SEQ ID NO: 690813 - DNA, 120 bp, Artificial Sequence
  ENSG00000188227_35 (sequence is synthesized)
ctcaagagataatagattgtggggaaatatttgtaaagctgatcagagagaaggcattcatgaaatggacaggaaaaaaacccaatagcaaaatgtggcaaagaatatgagttgacagtt

SEQ ID NO: 690814 - DNA, 120 bp, Artificial Sequence
  ENSG00000188227_36 (sequence is synthesized)
gtgagaagagcaaatctaagtggccaatggacctgtccaaaaatgtttatcctcagtagtcactgggggatgcagatttaaagttaaaatcaaataacactgtgtaacagcatttttagc

SEQ ID NO: 690815 - DNA, 120 bp, Artificial Sequence
  ENSG00000188227_37 (sequence is synthesized)
tatcagaacaaaagatgttacacactgctggtggagaaataaattttgaaaaacaatgcaaattactgttttggaaagaaatctggtaatatttaggctgggcgtggtggctcacacctg

SEQ ID NO: 690816 - DNA, 120 bp, Artificial Sequence
  ENSG00000188227_38 (sequence is synthesized)
gagcaaaaagattccatctcaaaagaaaagaaaagaaatctgttaatattattaaaatatttatgtcactttggagaatcttcccttagaagtaaaagctccaatacataaaagacagat

SEQ ID NO: 690817 - DNA, 120 bp, Artificial Sequence
  ENSG00000188227_39 (sequence is synthesized)
gaacatgtgaacatggacatttattgtaaaaattgttcttaatggcaaaaaaacccccaaaaccaaagcaaacactagaatcaaagtaaatacccatcaactgggaaattgtagaaagga

SEQ ID NO: 690818 - DNA, 120 bp, Artificial Sequence
  ENSG00000188227_40 (sequence is synthesized)
aaaaactatagtgtatccattccatagaatgttaatatagccattaaggtggacaaattaaaactatgctagtggacttgagtggaattccacaatgttctcttgagtgaaaaatgcaag

SEQ ID NO: 690819 - DNA, 120 bp, Artificial Sequence
  ENSG00000188227_41 (sequence is synthesized)
gtagatattaagtatgttaaatatgactccatttttttaaatcattaacaaaatgtctctaggtgtttgtcagcaataaacggtatctatatatgtttatttgattttatgtgcatgaag

SEQ ID NO: 690820 - DNA, 120 bp, Artificial Sequence
  ENSG00000188227_42 (sequence is synthesized)
aaaagtatagaagagtatgcattgacttggagggaggtgggtaatgcaggtaggttatgggggagtcaggggtgtagggaaaaggaaaaccaaaaaagaaaaatacataaatgactgaat

SEQ ID NO: 690821 - DNA, 120 bp, Artificial Sequence
  ENSG00000188227_43 (sequence is synthesized)
cacgggtgataccacaaatgtgtgagttagtaaatttggctggggatgggggagctagaattttgctaatttgtggggatgttcatggtatatattgtaaaaagggaaaatttcataata

SEQ ID NO: 690822 - DNA, 120 bp, Artificial Sequence
  ENSG00000188227_44 (sequence is synthesized)
atgtatacgattctatttttaaaaaaagtaaaaactcctgtgtgtgtatatatgcatgtggatgtttatatgaacatagaaaagtgtagaagaatacacacgaaggtgttaacattcatt

SEQ ID NO: 690823 - DNA, 120 bp, Artificial Sequence
  ENSG00000188227_45 (sequence is synthesized)
ggttaccttggtggagaagggtaataagttttctgaatacctttgcattgtcttgttcacatatattgcttttgtaatttgaaaaacaaaataaagggggaaaacatttcaaactgaatg

SEQ ID NO: 690824 - DNA, 120 bp, Artificial Sequence
  ENSG00000188227_46 (sequence is synthesized)
aggacgaccaatttcagattcagggcgcggatgcagcataaatgggaaggcacggtttgagaaacggctctttctggcaaaggtaatgacatacgcatctgtgccagcatcccaagagtg

SEQ ID NO: 690825 - DNA, 120 bp, Artificial Sequence
  ENSG00000188227_47 (sequence is synthesized)
cggggatggatgtgaccttgcccgtggttagaaaacaaatttactgagttctctgggtgccctgcagacctttggatcctgccaccttgctggacgggagggctctctagctcctgccag

SEQ ID NO: 690826 - DNA, 120 bp, Artificial Sequence
  ENSG00000188227_48 (sequence is synthesized)
cccttagagccacaggaccttggtcacaacatctacagaaggccctgcagctaagtgatctaatccaggatcatatgctgcctttaggtgacacatccctttagtctcctttaatcagga

SEQ ID NO: 690827 - DNA, 120 bp, Artificial Sequence
  ENSG00000188227_49 (sequence is synthesized)
aactgaagggttaagagattcggcgtctgagcctcgcggggcctcagtggtggcggacagaggtttgcgggagctctttctggcaaaggtaatgacatacgcatctgtgccagcatccca

SEQ ID NO: 690828 - DNA, 120 bp, Artificial Sequence
  ENSG00000188227_50 (sequence is synthesized)
tgggggatcagcaaactgtggcctaccgattggccacctgctttgtgaataaagttttattagaacacaaccacattcttacgtttacatgttgtctatattttcatggtatggcgggag

SEQ ID NO: 690829 - DNA, 120 bp, Artificial Sequence
  ENSG00000188227_51 (sequence is synthesized)
agttgagtcattgtgacggagaccatatggcccacaaagcctttactttctgactccttaagaataagtttgccaacctctgctctgtaatatcctattttctttgaaattattggtctc

SEQ ID NO: 690830 - DNA, 120 bp, Artificial Sequence
  ENSG00000188227_52 (sequence is synthesized)
tatactctatgatatattgaattccatttgtgccagtgttcagaatcctctttactcatagaacactcttccctgcgtttgtgctttgggttatggttcatgttctctatttgtgtgctg

SEQ ID NO: 690831 - DNA, 120 bp, Artificial Sequence
  ENSG00000188227_53 (sequence is synthesized)
acaatccatgaactgtactcatttattttattaagtcagaataaattttaacaccaaaatcaaatacagatagttgaaaaaagaaaacttctgctgggtgcggtggctcacgcctgtaat

SEQ ID NO: 690832 - DNA, 120 bp, Artificial Sequence
  ENSG00000188227_54 (sequence is synthesized)
gttatgaaggcaccaaaccagatgtgatcctcagactggagcaggaagaagcaccatggattggtgaggcagcatgcccgggctgccactgttgggtggctgtacctttttatattacaa

SEQ ID NO: 690833 - DNA, 120 bp, Artificial Sequence
  ENSG00000188227_55 (sequence is synthesized)
ccagtaatgcacaagggttccagtttcttcacaacctcgccatccatcatttgttataatcatgtgccacataatgatgttttggtcaatgagggaccacatatacagtagtggtcccat

SEQ ID NO: 690834 - DNA, 120 bp, Artificial Sequence
  ENSG00000188227_56 (sequence is synthesized)
aagattatagcagagctgaaaattttctttttataaaattgtatttattattattattttttttccaacttttatggagctgaaaagtttatactgcctaatgacattttgatgatcctg

SEQ ID NO: 690835 - DNA, 120 bp, Artificial Sequence
  ENSG00000188227_57 (sequence is synthesized)
tgaaaagtttatactgcctaatgacattttgatgatcctggcactgtgtgtacctaggctaatgtgtttgtgtcttagtttttaacaaaaaagtctggaggctgaggcaagagaattgct

SEQ ID NO: 690836 - DNA, 90 bp, Artificial Sequence
  ENSG00000188227_58 (sequence is synthesized)
tgatctgccctattaattgcaattttcacagttaactagtactatttttatttaaataatattacctgggaagcggaggttgcagtgagt

SEQ ID NO: 690837 - DNA, 120 bp, Artificial Sequence
  ENSG00000188227_59 (sequence is synthesized)
gaataaggatataaagaaaatatttgtgtacagctatacaatgtgtttgaagctaatttattacaagagagtcaaaacatttttaaaaattaaaaggtttataaagaaattatagtaagc

SEQ ID NO: 690838 - DNA, 120 bp, Artificial Sequence
  ENSG00000188227_60 (sequence is synthesized)
aagctaaggttaatttattaccgacaaaaaaattcaaataaatttagtgtagcctaagcatacagtacatataaagtctacagtagtatacagtactgccctagccttcacattcactca

SEQ ID NO: 690839 - DNA, 120 bp, Artificial Sequence
  ENSG00000188227_61 (sequence is synthesized)
ccgctcagtcactgactcacccggagtaacttccagtcttgcaagctccatccacgacagcagtgctgagaagcaggagcccctgagcttggagacgcaggaagagccctgggaggccca

SEQ ID NO: 690840 - DNA, 120 bp, Artificial Sequence
  ENSG00000188227_62 (sequence is synthesized)
gatcaaagggaggcagtcagctcatggagccgaggaatgttctgctgacacccaccccgagggtatccgtccagaatcaaatcagaagagcaatcccgagtgcccacctcacggtctgaa

SEQ ID NO: 690841 - DNA, 120 bp, Artificial Sequence
  ENSG00000188227_63 (sequence is synthesized)
gcacctcctcctacacccggacccaaacacgaggtcggctcaaggaggcactgaggtcacgacagtcagggtcctgcgctgcttgtcgcatgcagtctccttccccgaaccgccgcctgc

SEQ ID NO: 690842 - DNA, 120 bp, Artificial Sequence
  ENSG00000188227_64 (sequence is synthesized)
aatgacaagggaactgaagggttaagagattcggcgtctgagcctcgcggggcctcagtggtggcggacagaggtttgcgggagtcagtggcacggtctctgaagaagatggattgggag

SEQ ID NO: 690843 - DNA, 120 bp, Artificial Sequence
  ENSG00000188227_65 (sequence is synthesized)
tgtgtgggaatcaataaatgcgagttctgtgaaatgtcttgattttcagggtgcatggggctctttctggcaaaggtaatgacatacgcatctgtgccagcatcccaagagtgaggctgg

SEQ ID NO: 690844 - DNA, 120 bp, Artificial Sequence
  ENSG00000188227_66 (sequence is synthesized)
tgcccgggctgccactgttggggtaagtgtgataaatctagcaaaaggggtactgaaggaggctggcacctttggaattttgttcagcattcttctcttaaaagccttgaaagtcctccg

SEQ ID NO: 690845 - DNA, 120 bp, Artificial Sequence
  ENSG00000188227_67 (sequence is synthesized)
agagcttcagccacgttaatgactcttcaacctccatgcaaccccaccgcccatatctgagtgtttttctcggctctacttgattgcacctctgcccttatgtgcttggtccatctctct

SEQ ID NO: 690846 - DNA, 120 bp, Artificial Sequence
  ENSG00000188227_68 (sequence is synthesized)
ttctccagaatctttcccatgcaggtattcttacaaataaaagcttctatgattctcctgttcctgcttcctattctctgttgtgacaaactttccagataaaatgcttcagagctacct

SEQ ID NO: 690847 - DNA, 120 bp, Artificial Sequence
  ENSG00000188227_69 (sequence is synthesized)
gctttccctaatttctgcactcaaatttaaatcactcccatagacagatgactgtgggatcagagaagaggaagcagtgaattccatgttggggtggggaggtgtgaaggaaatggctga

SEQ ID NO: 690848 - DNA, 120 bp, Artificial Sequence
  ENSG00000188227_70 (sequence is synthesized)
gctgggcccatcttaaccactgctgattaaccctcagactcactgcccctctcccttcagctctgtaagacattccagcaatatccattgtaccctgagggctgatggatggcccactct

SEQ ID NO: 690849 - DNA, 120 bp, Artificial Sequence
  ENSG00000188227_71 (sequence is synthesized)
tagggatgcctctgaacttctgcttctggcgctctctggagtgtgttcctccattaaactgtgctcttcagctgtcctgagactgtggtatcccggttatcagttgccctcctcttcttt

SEQ ID NO: 690850 - DNA, 120 bp, Artificial Sequence
  ENSG00000188227_72 (sequence is synthesized)
tcttctcctcttctgaaaatttcgtaactgcaaattccacaagaatgtatctagtcagcctcccgtttttccagctactctgttactatctatttccctggctcaaacccagcattttcc

SEQ ID NO: 690851 - DNA, 120 bp, Artificial Sequence
  ENSG00000188227_73 (sequence is synthesized)
ttccaaggaacaattgcattttctgttttccataacttggttctctttccagtggtgtaatcctctcaaagaactcacccattctgagagtacatgattctcacaaccagcccttttgcc

SEQ ID NO: 690852 - DNA, 120 bp, Artificial Sequence
  ENSG00000188227_74 (sequence is synthesized)
atgttgggcccttttttcccccttgcactgcccacccccgcatttaaccagtctgtggattacactacaggtgtgcacttaccctgttctttgtgtgtcaaaaactaaaatcatctttat

SEQ ID NO: 690853 - DNA, 90 bp, Artificial Sequence
  ENSG00000188227_75 (sequence is synthesized)
cacttcatcttgcttattattccagggctttgctaccgtgtggtcattttgaatcttctgcctttaccactcactctaactgttccattc

SEQ ID NO: 690854 - DNA, 120 bp, Artificial Sequence
  ENSG00000188227_76 (sequence is synthesized)
cactctaactgttccattcatatgtgtggttttgttgattttttttcttctgagaaatggctttaaatcttcctctctgctttttttttttctttttgagacagtgtctcactctgtcac

SEQ ID NO: 690855 - DNA, 120 bp, Artificial Sequence
  ENSG00000188227_77 (sequence is synthesized)
tcctgggctcaagcgatcctcccacctcttaacctcccgagtaactgggattatattcacgtgctaccacacctggctaattttcattttttttgtagagaaggggttttgcagtgccgc

SEQ ID NO: 690856 - DNA, 80 bp, Artificial Sequence
  ENSG00000188227_78 (sequence is synthesized)
gctttggcttcccaaagtgctggatttactggcatgagccaccatgcccagtccttctccacttttttttgttgttattg

SEQ ID NO: 690857 - DNA, 120 bp, Artificial Sequence
  ENSG00000188227_79 (sequence is synthesized)
tggcttcccaaagtgctggatttactggcatgagccaccatgcccagtccttctccacttttttttgttgttattgttcagatgaagtcttgttctgtcacccaggctggaatgcagtgg

SEQ ID NO: 690858 - DNA, 83 bp, Artificial Sequence
  ENSG00000188227_80 (sequence is synthesized)
agccccacttttaattttccactgatatctcctaaaatgagacccagattatctcatgactgaatgtctttaagtgaggggtt

SEQ ID NO: 690859 - DNA, 120 bp, Artificial Sequence
  ENSG00000188227_81 (sequence is synthesized)
ccagattatctcatgactgaatgtctttaagtgaggggttattaattatttttgtgccatggacttcttaggcattcttttgaaggctatagacctcacttctatgtataaaaatataat

SEQ ID NO: 690860 - DNA, 90 bp, Artificial Sequence
  ENSG00000188227_82 (sequence is synthesized)
aacgttcataagattataaaataaatgactaaagtacagtaattatcaaaataagctagaaaatagttatcaaaaaaaaagtcgcccagg

SEQ ID NO: 690861 - DNA, 64 bp, Artificial Sequence
  ENSG00000188227_83 (sequence is synthesized)
tacaggtgtgtgccaccacgcccagcttattttctagtcagatgatccacctgcctcggcctcc

SEQ ID NO: 690862 - DNA, 120 bp, Artificial Sequence
  ENSG00000188227_84 (sequence is synthesized)
accgcgcccagcttcaaaatattttcaaaatgtgcaatataatagtagatgtactttttcatttatacgttaatgaggcctagcatcaggtctaataactgtcatgatctcaaagaagag

SEQ ID NO: 690863 - DNA, 120 bp, Artificial Sequence
  ENSG00000188227_85 (sequence is synthesized)
atgattataaacataataatgtgacatgaaaataacaatattcacaaactagtatcaagtcacaggaaccactaataccactgtgttttgttgcttatattcatattcaaaggaaatgtt

SEQ ID NO: 690864 - DNA, 120 bp, Artificial Sequence
  ENSG00000188227_86 (sequence is synthesized)
caattgtagttggaactcagtgaaaacaaaaatgtaatttcttttctatcaaagttcacaagccccctgttttctgccaagttaagaactcttgcttaagtcctagttagctttgttgat

SEQ ID NO: 690865 - DNA, 120 bp, Artificial Sequence
  ENSG00000188227_87 (sequence is synthesized)
tttattttttaatctgtttcaccttagagtgctttaccgtttatattgtaactaactagcccaacatgatattcccttggatgactgctataccagtgcttgttaagctccaaggtgttt

SEQ ID NO: 690866 - DNA, 120 bp, Artificial Sequence
  ENSG00000188227_88 (sequence is synthesized)
ggaatcaccggggcatcttgttgaaatgcagagtctgattaagtaggtctggggcggtgccttagattctgcacatctaacaagctccaagtaaggccaaaattgccacttgaagaccca

SEQ ID NO: 690867 - DNA, 120 bp, Artificial Sequence
  ENSG00000188227_89 (sequence is synthesized)
catgctggatagcaaggtactgtataacatttaaccttctttcttctgtaacagggatcagcaaactgtggcctaccgattggccacctgctttgtgaataaagttttattagaacacaa

SEQ ID NO: 690868 - DNA, 120 bp, Artificial Sequence
  ENSG00000188229_0 (sequence is synthesized)
agcactctgcgcgcccgctcttctgctgctgtttgtctacttcctcctgcttccccgccgccgccgccgccatcatgagggaaatcgtgcacttgcaggccgggcagtgcggcaaccaaa

SEQ ID NO: 690869 - DNA, 120 bp, Artificial Sequence
  ENSG00000188229_1 (sequence is synthesized)
tcggcgccaagttttgggaggtgatcagcgatgagcacggcatcgaccccacgggcacctaccacggggacagcgacctgcagctggaacgcatcaacgtgtactacaatgaggccaccg

SEQ ID NO: 690870 - DNA, 120 bp, Artificial Sequence
  ENSG00000188229_2 (sequence is synthesized)
gcggcaagtacgtgccccgcgccgtgctcgtggatctggagcccggcaccatggactccgtgcgctcggggcccttcgggcagatcttccggccggacaacttcgttttcggtcagagtg

SEQ ID NO: 690871 - DNA, 120 bp, Artificial Sequence
  ENSG00000188229_3 (sequence is synthesized)
gtgctgggaacaactgggccaaggggcactacacagaaggcgcggagctggtggactcggtgctggatgttgtgagaaaggaggctgagagctgtgactgcctgcagggtttccagctga

SEQ ID NO: 690872 - DNA, 120 bp, Artificial Sequence
  ENSG00000188229_4 (sequence is synthesized)
cccactccctgggtggggggactgggtctgggatgggtaccctcctcatcagcaagatccgggaggagtacccagacaggatcatgaacacgtttagtgtggtgccttcgcccaaagtgt

SEQ ID NO: 690873 - DNA, 120 bp, Artificial Sequence
  ENSG00000188229_5 (sequence is synthesized)
cagacacagtggtggagccctacaacgccaccctctcagtccaccagctcgtagaaaacacagacgagacctactgcattgataacgaagctctctacgacatttgcttcagaaccctaa

SEQ ID NO: 690874 - DNA, 120 bp, Artificial Sequence
  ENSG00000188229_6 (sequence is synthesized)
tgaccacgcccacctatggtgacctgaaccacctggtgtctgctaccatgagtggggtcaccacctgcctgcgcttcccaggccagctcaatgctgacctgcggaagctggctgtgaaca

SEQ ID NO: 690875 - DNA, 120 bp, Artificial Sequence
  ENSG00000188229_7 (sequence is synthesized)
tggtcccgtttccccggctgcacttcttcatgcccggctttgccccactgaccagccggggcagccagcagtaccgggcgctgaccgtgcccgagctcacccagcagatgtttgatgcca

SEQ ID NO: 690876 - DNA, 120 bp, Artificial Sequence
  ENSG00000188229_8 (sequence is synthesized)
agaacatgatggctgcctgcgacccccgccatggccgctacctgacggttgccgccgtgttcaggggccgcatgtccatgaaggaggtggatgagcaaatgcttaatgtccaaaacaaaa

SEQ ID NO: 690877 - DNA, 120 bp, Artificial Sequence
  ENSG00000188229_9 (sequence is synthesized)
acagcagctattttgttgagtggatccccaacaatgtgaaaacggctgtctgtgacatcccacctcgggggctaaaaatgtccgccaccttcattggcaacagcacggccatccaggagc

SEQ ID NO: 690878 - DNA, 120 bp, Artificial Sequence
  ENSG00000188229_10 (sequence is synthesized)
tgttcaagcgcatctccgagcagttcacggccatgttccggcgcaaggccttcctgcactggtacacgggcgagggcatggacgagatggagttcaccgaggccgagagcaacatgaatg

SEQ ID NO: 690879 - DNA, 120 bp, Artificial Sequence
  ENSG00000188229_11 (sequence is synthesized)
acctggtgtccgagtaccagcagtaccaggatgccacagccgaggaggagggcgagttcgaggaggaggctgaggaggaggtggcctagagccttcagtcactggggaaagcagggaagc

SEQ ID NO: 690880 - DNA, 120 bp, Artificial Sequence
  ENSG00000188229_12 (sequence is synthesized)
agtgtgaactctttattcactcccagcctgtcctgtggcctgtcccactgtgtgcacttgctgttttccctgtccacatccatgctgtacagacaccaccattaaagcattttcatagtg

SEQ ID NO: 690881 - DNA, 120 bp, Artificial Sequence
  ENSG00000188229_13 (sequence is synthesized)
gctggggactgggcggcggctcaaaggtcaaggggctgctccaagggcaccgccgtgggaactgcgcagccggggcccctggacgccctcctcttctctgagccactcaatcccctctac

SEQ ID NO: 690882 - DNA, 120 bp, Artificial Sequence
  ENSG00000188229_14 (sequence is synthesized)
taaatcggctttgggagcaaggtccagctgtctgccgaggcgaggagccgccacacacgtaatctccctgcagggagctgagctggggcagtggctgttcctctgtccttgggaattggc

SEQ ID NO: 690883 - DNA, 120 bp, Artificial Sequence
  ENSG00000188229_15 (sequence is synthesized)
agtggcccccccggggaggggtttgttaagctgtcaggtttggcccctgacttaattcgtagcagggcaggctgccgtcttttggctttgaagggtccgtttgctctacctccagggtga

SEQ ID NO: 690884 - DNA, 120 bp, Artificial Sequence
  ENSG00000188234_0 (sequence is synthesized)
gtgggcaggcgaggagcgggaagaccatctctgcaagtgcagcatagcctcggcctaggacagcgggagtgcgtggccaaagctgtgagcagaggcacaggtggtggcagacagtagagg

SEQ ID NO: 690885 - DNA, 120 bp, Artificial Sequence
  ENSG00000188234_1 (sequence is synthesized)
cgccccatggggaacatactgacctgtcgtgtgcaccctagcgtcagcctcgagtttgaccagcagcaggggtcggtgtgtccctctgaatctgagatctatgaggcaggagctggggac

SEQ ID NO: 690886 - DNA, 120 bp, Artificial Sequence
  ENSG00000188234_2 (sequence is synthesized)
aggatggcaggagcgcccatggctgctgctgtacagcctgctgaggtgactgttgaagttggtgaggacctccacatgcaccacgttcgtgaccgggagatgcctgaagctttggagttt

SEQ ID NO: 690887 - DNA, 79 bp, Artificial Sequence
  ENSG00000188234_3 (sequence is synthesized)
ggaactctcaaacagactactgtgcgtttcagtcaacaatacagcttgtgttcgacaatattccttgatgacagcacag

SEQ ID NO: 690888 - DNA, 120 bp, Artificial Sequence
  ENSG00000188234_4 (sequence is synthesized)
tacagcttgtgttcgacaatattccttgatgacagcacagccatccagcattatcttacaatgacaataatatctgtgaccttggagatacctcatcatatcacacaaagagatgcagat

SEQ ID NO: 690889 - DNA, 120 bp, Artificial Sequence
  ENSG00000188234_5 (sequence is synthesized)
agatctttgagcatacctgatgaacagttacactcatttgcggtttccaccgtgcacattatgaagaaaagaaatggaggtgggagtttaaataactattcctcctccattccatcgact

SEQ ID NO: 690890 - DNA, 120 bp, Artificial Sequence
  ENSG00000188234_6 (sequence is synthesized)
cccagcaccagccaggaggaccctcagttcagtgttcctcccactgccaacacacccacccccgtttgcaagcggtccatgcgctggtccaacctgtttacatctgagaaagggagtgac

SEQ ID NO: 690891 - DNA, 120 bp, Artificial Sequence
  ENSG00000188234_7 (sequence is synthesized)
ccagacaaagagaggaaagccccggagaatcatgctgacaccatcgggagcggcagagccatccccattaaacagggcatgctcttaaagcgaagtgggaaatggctgaagacatggaaa

SEQ ID NO: 690892 - DNA, 120 bp, Artificial Sequence
  ENSG00000188234_8 (sequence is synthesized)
aagaaatacgtcaccctgtgttccaatggcgtgctcacctattattcaagcttaggtgattatatgaagaatattcataaaaaagagattgaccttcagacatctaccatcaaagtccca

SEQ ID NO: 690893 - DNA, 120 bp, Artificial Sequence
  ENSG00000188234_9 (sequence is synthesized)
ggaaagtggccatccctagccacatcggcctgcacacccatctccacctctaaaagcaatggcctatccaaggacatggacaccgggctgggtgactccatatgcttcagccccagtatc

SEQ ID NO: 690894 - DNA, 120 bp, Artificial Sequence
  ENSG00000188234_10 (sequence is synthesized)
cctcatgccaataaaaagaaacacctaaagaagaaaagcaccaacaactttatgattgtgtctgccactggccaaacgtggcactttgaagccacgacgtatgaggagcgggatgcctgg

SEQ ID NO: 690895 - DNA, 120 bp, Artificial Sequence
  ENSG00000188234_11 (sequence is synthesized)
gtccaagccatccagagccagatcctggccagcctgcagtcatgcgagagcagtaaaagcaagtcccagctgaccagccagagcaaggccatggccctgcagtcgatccaaaacatgcgt

SEQ ID NO: 690896 - DNA, 120 bp, Artificial Sequence
  ENSG00000188234_12 (sequence is synthesized)
gggaacgcccactgtgtggactgtgagacccagaatcctaagtgggccagtttgaacttgggagtcctcatgtgtattgaatgctcaggaatccaccgcagtcttggcacccgcctttcc

SEQ ID NO: 690897 - DNA, 120 bp, Artificial Sequence
  ENSG00000188234_13 (sequence is synthesized)
cgtgtgcgatctctggagctggatgactggccagttgagctcaggaaggttatgtcatctattggcaatgacctagccaacagcatctgggaagggagcagccaggggcagacaaaaccc

SEQ ID NO: 690898 - DNA, 120 bp, Artificial Sequence
  ENSG00000188234_14 (sequence is synthesized)
tcagaaaagtccacgagggaagagaaggaacggtggatccgttccaaatatgaggagaagctctttctggccccactaccctgcactgagctgtccctgggccagcagctgctgcgggcc

SEQ ID NO: 690899 - DNA, 120 bp, Artificial Sequence
  ENSG00000188234_15 (sequence is synthesized)
accgctgatgaggacctgcagacagccatcctgctgctggcacatggctcccgtgaggaggtgaacgagacctgtggggagggagacggctgcacggcgctccatctggcctgccgcaag

SEQ ID NO: 690900 - DNA, 120 bp, Artificial Sequence
  ENSG00000188234_16 (sequence is synthesized)
gggaatgtggtcctggcgcagctcctgatctggtacggggtggacgtcatggcccgagatgcccacgggaacacagcgctgacctacgcccggcaggcctccagccaggagtgcatcaac

SEQ ID NO: 690901 - DNA, 120 bp, Artificial Sequence
  ENSG00000188234_17 (sequence is synthesized)
gtgcttctgcagtacggctgccccgacaagtgtgtgtagtatctgttttatttgactgcagtctccttggtgcaaaaacaaaatgggaaaaataaggataactcagaatttcaaaaggaa

SEQ ID NO: 690902 - DNA, 120 bp, Artificial Sequence
  ENSG00000188234_18 (sequence is synthesized)
atcacaaattcagctaataatagcattttcagtacttttcgtaaactaagtaaatacacaaaatgttgatttttctgaccataagacgtattttatgtccttttgccaaggtggatttgt

SEQ ID NO: 690903 - DNA, 120 bp, Artificial Sequence
  ENSG00000188234_19 (sequence is synthesized)
tagtctcaggccctcctggccacattgcccaagtcacacaggcttctgtattatgtatttagataaaatgtgtgaaaatatatttgaaataaagttcataaatatgcattgatttttgta

SEQ ID NO: 690904 - DNA, 120 bp, Artificial Sequence
  ENSG00000188234_20 (sequence is synthesized)
gggcattgtgtgccacatgcctgggctcccacctggggccagtgggcttcagtctgtaggtgactacagaaggaggaggagctccgtctgttctctcttcaggcagttgttgtgtctctc

SEQ ID NO: 690905 - DNA, 120 bp, Artificial Sequence
  ENSG00000188234_21 (sequence is synthesized)
agcacttgttgggttcacaacctattaaataagccggctggtcttcaccctcccagacaagtcaactcaggggaggcagcagggtgcgggccttggcccgcagccctagccggggccggg

SEQ ID NO: 690906 - DNA, 120 bp, Artificial Sequence
  ENSG00000188234_22 (sequence is synthesized)
gataggaagtgaaaggtggctgaggtaatgagaatagacccatctgcagaggatcataaaaccagcaaagacaagatcttgtctaagatgccttcacaaactttgtccatgagaactgta

SEQ ID NO: 690907 - DNA, 120 bp, Artificial Sequence
  ENSG00000188234_23 (sequence is synthesized)
aggtcttctccagacctgttggctgctgctgtgatctctgcccaagaggagcttctgaccaacatccaaagggcttctggacccactggactcctctggagttgctccttcacatgttcc

SEQ ID NO: 690908 - DNA, 120 bp, Artificial Sequence
  ENSG00000188234_24 (sequence is synthesized)
cactctctgtgcggccaccatggaagtcggacctgcccttctgccatgattgactaaaatctcaggaagctggtgatgaatgaaaaccttagtcccaatggcactgcacgaggggccagg

SEQ ID NO: 690909 - DNA, 120 bp, Artificial Sequence
  ENSG00000188234_25 (sequence is synthesized)
atcaaagtagagatagtgaaatagcctaaatgcagcagtcgaataaacgagttgataaatttttatcaatgattacatctttttttcttttcttcctctatgcatatagctttggagttt

SEQ ID NO: 690910 - DNA, 120 bp, Artificial Sequence
  ENSG00000188234_26 (sequence is synthesized)
aacactcaaatagttaagaaattgatagtttgacataaaaggatgtctctcttgatttctttaaattacaatgtggacctggtggtggtagcatggacctctttttgtggattttctaaa

SEQ ID NO: 690911 - DNA, 120 bp, Artificial Sequence
  ENSG00000188243_0 (sequence is synthesized)
tgatcaccaaattcaaggcggcccttgattagattctagttgtggatgggcttcccctgctacgtccgccccatgcgccaggccgctaggggcaggacgtggaagcggaagcgctggtct

SEQ ID NO: 690912 - DNA, 120 bp, Artificial Sequence
  ENSG00000188243_1 (sequence is synthesized)
gggggcgttctctcgagtccgggccgcaagtcccagacgctgcccatggaggcgtccagcgagccgccgctggatgctaagtccgatgtcaccaaccagcttgtagattttcagtggaaa

SEQ ID NO: 690913 - DNA, 120 bp, Artificial Sequence
  ENSG00000188243_2 (sequence is synthesized)
ctgggtatggctgtgagctcagacacttgcagatctcttaagtatccttacgttgcagtgatgctaaaagtggcagatcattcaggccaagtaaagaccaagtgctttgaaatgacgatt

SEQ ID NO: 690914 - DNA, 120 bp, Artificial Sequence
  ENSG00000188243_3 (sequence is synthesized)
ccacagtttcagaatttctacagacagttcaaggaaattgctgcagttattgaaacggtgtgaagacggattctttggttgataaattgctatcattctaaagtcatggacttcactttc

SEQ ID NO: 690915 - DNA, 120 bp, Artificial Sequence
  ENSG00000188243_4 (sequence is synthesized)
ggcaacaaaactaaataaggatggaacatttattgaatgaaaaatgcacttttgtttttccatttttttaaataataaaaatcagacaaacaggaactgggtagtggtgatgaatgcaaa

SEQ ID NO: 690916 - DNA, 120 bp, Artificial Sequence
  ENSG00000188243_5 (sequence is synthesized)
actttgtgaatgtgctttataaaagtgataattagacactttagaggatatacttggtgataatgtgaatgatgtaatcagactaacagttgaatcattgctgttggaggcagcacaaat

SEQ ID NO: 690917 - DNA, 120 bp, Artificial Sequence
  ENSG00000188243_6 (sequence is synthesized)
ttatgtgttacaacagtagtttaaaaacttgtactggatggaacccattttataaacagtcttatttggagtcatgtatataaaaatatatataaattagaaaagtagtatttgattagg

SEQ ID NO: 690918 - DNA, 120 bp, Artificial Sequence
  ENSG00000188243_7 (sequence is synthesized)
acacagtattagtctagcattcaattatttctgttattaatggttgtagaaagttcaaatacatacgcagagttggaaagacgagttttagtctgagttctgtacgacggagttaacccg

SEQ ID NO: 690919 - DNA, 120 bp, Artificial Sequence
  ENSG00000188243_8 (sequence is synthesized)
ttagcacaagttattgcattagatgatctctgttgaatttaaatacataaacctgttgttaaacgcttttatactataaagccaccacattgtatggcatttgtttagaagtaagcaaat

SEQ ID NO: 690920 - DNA, 120 bp, Artificial Sequence
  ENSG00000188243_9 (sequence is synthesized)
agaccaccggaatagaatagatggcctagaaatagatcaagacattctggtccgccatattagaaatttaaaccctcttcacaccctgtctgcatttctgcaggtctgtgtgagtccact

SEQ ID NO: 690921 - DNA, 120 bp, Artificial Sequence
  ENSG00000188243_10 (sequence is synthesized)
ttcttttttgttccctgctaggtagcacacagctgtgaggagcccaggactgctgcctgccgcagcccacctgtgcgctcagattcctaccagcttgatgagttagctgatgggccattt

SEQ ID NO: 690922 - DNA, 120 bp, Artificial Sequence
  ENSG00000188243_11 (sequence is synthesized)
gtgcataccaactacccacagacatttctattacccaccctctggatgccagtgcattaatgattctagaattaggagaaaccaaagatcccttctctctccctcccacaaccagtgtcg

SEQ ID NO: 690923 - DNA, 120 bp, Artificial Sequence
  ENSG00000188243_12 (sequence is synthesized)
tcgtgttcctagaaataagagtagaaacccctctatctgggttaaaacagcaaacctgccttctgtaactgtgcatgaggttcctctgtctcccacttacttcggattaacaccttcctc

SEQ ID NO: 690924 - DNA, 120 bp, Artificial Sequence
  ENSG00000188243_13 (sequence is synthesized)
tttccccttccctgtttgcagggtagcatttctaggtttaaggcaatatgcaaaaagacccaaagttaggccctggctcaaacactgtgggtagcagatttgaaataaatttaaattgca

SEQ ID NO: 690925 - DNA, 120 bp, Artificial Sequence
  ENSG00000188243_14 (sequence is synthesized)
tttttgttttttccattttaaactatgatggtgttttttaactgtttatatcccttataacctctccattttttcatttgattattgttcctctagcagtattaaaatgaagatacttta

SEQ ID NO: 690926 - DNA, 120 bp, Artificial Sequence
  ENSG00000188243_15 (sequence is synthesized)
tgtaaatatgaccagcgttgaaactaaaagttgagtgtaactgcagtaaaattgaataaatatctgcattccaggtaatgttactactaatgtattattttgtcctgtcttattaaagct

SEQ ID NO: 690927 - DNA, 120 bp, Artificial Sequence
  ENSG00000188243_16 (sequence is synthesized)
cacggccgcgaggccgtgccaccctgagccttccccaggtctcccctagtcctgtgtccgcgagccggtgaccttcagccgtccctcttgcattgctccttctcttttgcacctgagccg

SEQ ID NO: 690928 - DNA, 120 bp, Artificial Sequence
  ENSG00000188243_17 (sequence is synthesized)
gtagccgttgccattgtaatgaaagctcctcttccccaccctgcactagcccgaagaatgcagatcaaggattgttgggctttgattaggcgacagttattcgaagccaggaacacgctt

SEQ ID NO: 690929 - DNA, 120 bp, Artificial Sequence
  ENSG00000188243_18 (sequence is synthesized)
attcttgcagtgtcaaccgactgcgctaggaggcgtgccgcggagtcctattctgagacagacgccaggtggctacccattgccaggcagcaaggccggaggacgccgtgcagcacggtc

SEQ ID NO: 690930 - DNA, 120 bp, Artificial Sequence
  ENSG00000188243_19 (sequence is synthesized)
cataaaaagatgtataaaatctttctacgggaaaactttaatggtttttatttgtagattgatatgctttacgtttactagtagtatatgcaagagacattaatttgtcttctttgggaa

SEQ ID NO: 690931 - DNA, 120 bp, Artificial Sequence
  ENSG00000188243_20 (sequence is synthesized)
tttgataaattattttcaatataatgtgctgaagttgtgtactgcgccatttgatcgcttgaacagtactcctctctgagtatatttaggaaagttttatcttcaatggcaggatattta

SEQ ID NO: 690932 - DNA, 120 bp, Artificial Sequence
  ENSG00000188243_21 (sequence is synthesized)
ctctcgagtccgggccgcaagtcccagacgctgcccatggaggcgtccagcgagccgccgctggatgctaagtccgatgtcaccaaccagcagtattaaaatgaagatactttatgtaaa

SEQ ID NO: 690933 - DNA, 120 bp, Artificial Sequence
  ENSG00000188243_22 (sequence is synthesized)
gtcaaccgactgcgctaggaggcgtgccgcggagtcctattctgagacagacgccaggtggctacccattgccaggcagcaaggccggaggacgccgtgcagcacgcttgtagattttca

SEQ ID NO: 690934 - DNA, 120 bp, Artificial Sequence
  ENSG00000188257_0 (sequence is synthesized)
gaaggaaaaagagcaacagatccagggagcattcacctgccctgtctccaaacagccttgtgcctcacctacccccaacctcccagagggagcagctatttaaggggagcaggagtgcag

SEQ ID NO: 690935 - DNA, 120 bp, Artificial Sequence
  ENSG00000188257_1 (sequence is synthesized)
aacaaacaagacggcctggggatacaactctggagtcctctgagagagccaccaaggaggagcaggggagcgacggccggggcagaagttgagaccacccagcagaggagctaggccagt

SEQ ID NO: 690936 - DNA, 120 bp, Artificial Sequence
  ENSG00000188257_2 (sequence is synthesized)
ccatctgcatttgtcacccaagaactcttaccatgaagaccctcctactgttggcagtgatcatgatctttggcctactgcaggcccatgggaatttggtgaatttccacagaatgatca

SEQ ID NO: 690937 - DNA, 120 bp, Artificial Sequence
  ENSG00000188257_3 (sequence is synthesized)
agttgacgacaggaaaggaagccgcactcagttatggcttctacggctgccactgtggcgtgggtggcagaggatcccccaaggatgcaacggatcgctgctgtgtcactcatgactgtt

SEQ ID NO: 690938 - DNA, 120 bp, Artificial Sequence
  ENSG00000188257_4 (sequence is synthesized)
tctggagaaacgtggatgtggcaccaaatttctgagctacaagtttagcaactcggggagcagaatcacctgtgcaaaacaggactcctgcagaagtcaactgtgtgagtgtgataaggc

SEQ ID NO: 690939 - DNA, 120 bp, Artificial Sequence
  ENSG00000188257_5 (sequence is synthesized)
tgctgccacctgttttgctagaaacaagacgacctacaataaaaagtaccagtactattccaataaacactgcagagggagcacccctcgttgctgagtcccctcttccctggaaacctt

SEQ ID NO: 690940 - DNA, 120 bp, Artificial Sequence
  ENSG00000188257_6 (sequence is synthesized)
ccacccagtgctgaatttccctctctcataccctccctccctaccctaaccaagttccttggccatgcagaaagcatccctcacccatcctagaggccaggcaggagcccttctataccc

SEQ ID NO: 690941 - DNA, 120 bp, Artificial Sequence
  ENSG00000188257_7 (sequence is synthesized)
acccagaatgagacatccagcagatttccagccttctactgctctcctccacctcaactccgtgcttaaccaaagaagctgtactccggggggtctcttctgaataaagcaattagcaaa

SEQ ID NO: 690942 - DNA, 120 bp, Artificial Sequence
  ENSG00000188257_8 (sequence is synthesized)
gtcccttagttttctctcccattgcagtgatcctctctcagggggaaaaaagaagccatttgggaggaaggagagtagcagagaggggcagagagggagggcgcagaaccccatgcccca

SEQ ID NO: 690943 - DNA, 120 bp, Artificial Sequence
  ENSG00000188257_9 (sequence is synthesized)
ctgcccagggtccaagggggtgagaccacaggcaccaggcctcctggagctgtgggacaagagccccaacagggtgtctcctcacagctgctgtgtcactcatgactgttgctacaaacg

SEQ ID NO: 690944 - DNA, 84 bp, Artificial Sequence
  ENSG00000188257_10 (sequence is synthesized)
cacaggtctgagggcctgatgtgtgtgaaaccattctgcagagctgggaacgggtcaggagggctggagggcactccttgtgtg

SEQ ID NO: 690945 - DNA, 120 bp, Artificial Sequence
  ENSG00000188257_11 (sequence is synthesized)
ccctccctaccctcctagactctggcccaggcagggctgggagctgcaaagacagtgccggttcctgatgggcgcagaggtctcaggatggcctggctggaaaagcagccggcatgttgg

SEQ ID NO: 690946 - DNA, 120 bp, Artificial Sequence
  ENSG00000188263_0 (sequence is synthesized)
ctcacccctctcactgttctgtccccagggctttgcctgcaggagccacaggaaccggaacatttttaacagcttctgccggccacgccccgtgtccatgtccaggtcagtcctggaggc

SEQ ID NO: 690947 - DNA, 120 bp, Artificial Sequence
  ENSG00000188263_1 (sequence is synthesized)
cctgacgtcctccactgccatgcagtgtgtcccctctgacggctgcgcgatgctcctgcgtgtacgcgcctccatcaccctgcatgagcgcctgcggggcctggaggcctgtgccatgag

SEQ ID NO: 690948 - DNA, 120 bp, Artificial Sequence
  ENSG00000188263_2 (sequence is synthesized)
cctggacacccaggagacgcagtgtcagagcgtgtgggtggccagggcctcccaccggcagcagggggggcagcagctccaagtgcactttggctgctttgcggtgagcgtggcccagca

SEQ ID NO: 690949 - DNA, 120 bp, Artificial Sequence
  ENSG00000188263_3 (sequence is synthesized)
cctctatgtcaccctgaggaccatccctcatttctgcggggtccagctggaccagaggcacctcgtggaagcggggaagctcagctactgggtggaccggaggcgcaaggcgattctggt

SEQ ID NO: 690950 - DNA, 120 bp, Artificial Sequence
  ENSG00000188263_4 (sequence is synthesized)
gcaagtgcccagggcctccgggagccccgactactacctgcggctctgcctcaagcggttcacctgcgaggacgccggcgcccctgtgcgagtgaccgccaacagcgtctcccaggccgt

SEQ ID NO: 690951 - DNA, 120 bp, Artificial Sequence
  ENSG00000188263_5 (sequence is synthesized)
cttcctgccctacagccaggagctgccgtgcctgtgcctggagggctggtctgcgacccctgacgcggtgcggatccagatctgcccctttgaaaacgacactgaggcactggaggtgct

SEQ ID NO: 690952 - DNA, 120 bp, Artificial Sequence
  ENSG00000188263_6 (sequence is synthesized)
gtgggacacggtctactaccacccggagagccagacactgagctgggagcccgcctgccctgtgagtggccatgtgagcctgtgctggcgcccggggccgggggccggctgccgtaagct

SEQ ID NO: 690953 - DNA, 120 bp, Artificial Sequence
  ENSG00000188263_7 (sequence is synthesized)
gcagcaatccagccagctggtgcatcgcagagtgcagtacccgctggtggacacccagccccagctctgcctgaagttctctaccagttgggggtcctgggtgcggtgccctttcgaaca

SEQ ID NO: 690954 - DNA, 120 bp, Artificial Sequence
  ENSG00000188263_8 (sequence is synthesized)
gcgtcgcttcccaaccccgcccacttccaggtgcacctgtgtcacaggaggaagtcacagctccctgcctgccaacgcacactccaggccagcccgctcccttcagcctcaggtgacctg

SEQ ID NO: 690955 - DNA, 120 bp, Artificial Sequence
  ENSG00000188263_9 (sequence is synthesized)
gcagccgcccctgcttttgccttcctagaccttcccagggaggaggcctgtgccccaggcatctgcatccagggctggaggaccgatgtacacttctccgtcccccagcagctctgcaac

SEQ ID NO: 690956 - DNA, 120 bp, Artificial Sequence
  ENSG00000188263_10 (sequence is synthesized)
ctccgctccagtgggtgcccatctctcaggggccgcaggaggccgaggactagacctaggcctcccacggcaggctgggcgtggcgtgcactgaacaggagactgggtgggggaaacggg

SEQ ID NO: 690957 - DNA, 120 bp, Artificial Sequence
  ENSG00000188263_11 (sequence is synthesized)
gagaccatccggccctgagtcaggtcaggcttctgcgccaaacccaggtctgtgcccagcactgccctccagccttgcatttccctccaccacacaccgctgggcctcccgcacgcccac

SEQ ID NO: 690958 - DNA, 120 bp, Artificial Sequence
  ENSG00000188263_12 (sequence is synthesized)
cctggtctcactgtcactggccttgcctcctcctccctgggggtccaccttccctgatcagagctctggttccaaccgccagtgacttgggatgtccctttgcccaccagccactgaggc

SEQ ID NO: 690959 - DNA, 120 bp, Artificial Sequence
  ENSG00000188263_13 (sequence is synthesized)
ccaggctcccaggacccagggtacatcaggacaggactctgcccagtggacagaactaagcacatgtggcctgggtgtggtcaggagcgtggctctgccttggagtccaggaagggtcag

SEQ ID NO: 690960 - DNA, 120 bp, Artificial Sequence
  ENSG00000188263_14 (sequence is synthesized)
cccctccctgtgagcaaaagagcttgcctagcttcgggtggggtgaaccgcaacagccacagaggtgggaggggtgggagggggtggataggacagcctggcacccagggcctctggaga

SEQ ID NO: 690961 - DNA, 120 bp, Artificial Sequence
  ENSG00000188263_15 (sequence is synthesized)
ccctttccagggagcaccagtgggccaggcaggggtctctggaatgtctcctcagctcagctgagccacagccatttcagggcagcctgctgcccacaggacatgcccagggccgtggca

SEQ ID NO: 690962 - DNA, 120 bp, Artificial Sequence
  ENSG00000188263_16 (sequence is synthesized)
gtacccgcagaccttcagctcccccttctcccagcaagactttttggccaagcctaggtccccctccctagcaaaggtcacctccagcagatcacagactaaaggggcaatggccacctg

SEQ ID NO: 690963 - DNA, 120 bp, Artificial Sequence
  ENSG00000188263_17 (sequence is synthesized)
ctggtcaggtgtccctggggctggcacctgccactgtggagtgcccatgctatgctgggcaagtccacggccccagggacaggcctggaggcagcaggaggaccgggcctggctcaggtg

SEQ ID NO: 690964 - DNA, 120 bp, Artificial Sequence
  ENSG00000188263_18 (sequence is synthesized)
gggggatctgggggtcatacacactcctcttggggccagggtgggctcctccttcacttgtctgctgagcctccctgcagatggaaggctgctgtccacagccactggcaccccaggact

SEQ ID NO: 690965 - DNA, 120 bp, Artificial Sequence
  ENSG00000188263_19 (sequence is synthesized)
gggcagccccctccccttccctcacatgtctcagcctcgcacagtgggggcagggctgggaggtggtgtcccagccagtaccacccctacgtctctctccagctgcacccacccacatgg

SEQ ID NO: 690966 - DNA, 120 bp, Artificial Sequence
  ENSG00000188263_20 (sequence is synthesized)
gacggcagcctgaggccaggaatctcctcacgaacaagtaggtgccagggacacattgctggggggcaggaggccaaggcacagcctcggacagctgagccaggcccccctccgagagtg

SEQ ID NO: 690967 - DNA, 120 bp, Artificial Sequence
  ENSG00000188263_21 (sequence is synthesized)
tggggtgttctcacctgactgtggggcctaggcacctgctggctgtcctggggctacagctccatggggccctcaggggctctgggtcacataaaagaccttcagccctgtcctgagtcc

SEQ ID NO: 690968 - DNA, 120 bp, Artificial Sequence
  ENSG00000188263_22 (sequence is synthesized)
cctgggaacagcaggagctgggtgggctaccccttccccggatggcccaggtgctggaccccagcctccctctcagacaattcatggtcatggccactgtccctggccctgaagacaagg

SEQ ID NO: 690969 - DNA, 120 bp, Artificial Sequence
  ENSG00000188263_23 (sequence is synthesized)
ccctggcagctgcctggagcttccccagtgctctggggtgcagggtgcaaccccacccttcctgtagctgatcaggcccgaggtggtcaaggatcaccccagtttctgcccagggcaccc

SEQ ID NO: 690970 - DNA, 120 bp, Artificial Sequence
  ENSG00000188263_24 (sequence is synthesized)
cacactggctggagtccacctctcctgtctgtgcatccttgggtgctgagcttcactggggcacccgccccactcggacccctccagagggtctcagcttccccagatcccagccccact

SEQ ID NO: 690971 - DNA, 120 bp, Artificial Sequence
  ENSG00000188263_25 (sequence is synthesized)
cacccagcaacggtcagtcacttcctgtggtctcagaggccacctgcctgggggccacctgctgggatgtgcggttctcagacattccaagtggcacatccaggtcccagccaggggtgc

SEQ ID NO: 690972 - DNA, 120 bp, Artificial Sequence
  ENSG00000188263_26 (sequence is synthesized)
ccagcagtggcctgtgcagtgggccatggggtcggcccttgaagacttctcgtgtgggtcacgtaggctctccggcttccccgctgagccaccctctggagcctggacatcgtctcacct

SEQ ID NO: 690973 - DNA, 120 bp, Artificial Sequence
  ENSG00000188263_27 (sequence is synthesized)
gagtgctgtgcaggaccacatgcccagcctgtcccagcggtggtcgcaccccatctgcagatgcactcccaccgcagtctgggcccaggctgccctcttccagctggccgtgggccgctg

SEQ ID NO: 690974 - DNA, 120 bp, Artificial Sequence
  ENSG00000188263_28 (sequence is synthesized)
ggccttcttttccctcctgcaacagaggctgctatgtcccatagactggagagggggctgcagagcgagtaagtccccgccactcagtaaacattggtccaggggtagctgttaaaatgg

SEQ ID NO: 690975 - DNA, 120 bp, Artificial Sequence
  ENSG00000188263_29 (sequence is synthesized)
actgcacagccagatgctggctgggcaagcactcgcgttcttgggcctgacctggggcactttccagagcctggccatcccccggattacagaatgtggcctctcctgttctcagttaca

SEQ ID NO: 690976 - DNA, 120 bp, Artificial Sequence
  ENSG00000188266_0 (sequence is synthesized)
cccctgctctacctcctagcgccggtgcgcggccgaggccgcactacctgtctgcgggaaagcgggatccaccccaggacgtcgggtcgctgccgacataatgtcaagtggaaactatca

SEQ ID NO: 690977 - DNA, 120 bp, Artificial Sequence
  ENSG00000188266_1 (sequence is synthesized)
gcagtcagaggctcttagcaaacccactttcagtgaggaacaagcctctgcgttagtggagtcagtgtttgggttgaaagtttccaaggtccggccacttcctagctatgatgaccaaaa

SEQ ID NO: 690978 - DNA, 120 bp, Artificial Sequence
  ENSG00000188266_2 (sequence is synthesized)
ctttcatgtctacgtttcaaaaaccaaagatggcccaactgaatatgtcctcaaaataagcaacaccaaggctagcaaaaatccagacctgattgaagtgcagaatcacatcatcatgtt

SEQ ID NO: 690979 - DNA, 120 bp, Artificial Sequence
  ENSG00000188266_3 (sequence is synthesized)
tctgaaagccgctggatttccaacagcctctgtgtgtcacactaaaggagacaacacagcttctctcgtgtctgtagatagtggctctgaaatcaaaagctacttggtgaggctgctgac

SEQ ID NO: 690980 - DNA, 120 bp, Artificial Sequence
  ENSG00000188266_4 (sequence is synthesized)
ttacctcccaggaagacccatcgctgagcttcccgtcagcccccagctattgtatgaaattggaaaactagctgccaaattggataagacactgcagagattccatcacccaaagttaag

SEQ ID NO: 690981 - DNA, 120 bp, Artificial Sequence
  ENSG00000188266_5 (sequence is synthesized)
tagtcttcatcgggagaacttcatctggaatctgaaaaatgttcctcttctggagaaatacctgtatgccctgggccagaatcgaaaccgagagattgttgagcatgtcattcatctgtt

SEQ ID NO: 690982 - DNA, 120 bp, Artificial Sequence
  ENSG00000188266_6 (sequence is synthesized)
caaggaggaagtaatgaccaaattaagtcattttcgagaatgtatcaatcacggagatcttaatgaccataatattttaatagagtccagcaagtcagcctctggaaatgctgaatatca

SEQ ID NO: 690983 - DNA, 120 bp, Artificial Sequence
  ENSG00000188266_7 (sequence is synthesized)
agtgtctgggattttagactttggtgacatgagctatggctactatgtgtttgaagtggcaattaccatcatgtacatgatgattgagagcaagagtcctatacaagtaggaggccatgt

SEQ ID NO: 690984 - DNA, 120 bp, Artificial Sequence
  ENSG00000188266_8 (sequence is synthesized)
ccttgcagggtttgaaagcatcaccccactgacagctgtagagaagggtgctttgtttttacttgtatgcagtcgtttttgtcagtcacttgtcatggctgcatactcttgccagctata

SEQ ID NO: 690985 - DNA, 120 bp, Artificial Sequence
  ENSG00000188266_9 (sequence is synthesized)
cccagagaacaaagactatctcatggttactgcaaaaaccgggtggaaacacttacagcaaatgtttgacatgggtcagaaagctgtagaagaaatctggtttgaaactgccaaatccta

SEQ ID NO: 690986 - DNA, 120 bp, Artificial Sequence
  ENSG00000188266_10 (sequence is synthesized)
tgaatctgggatctccatgtgactgagatctccatgtgactcaaagttcactttaacttgggtaattaaaataggacccagtcaaattttaggaaggattttcctgcatagttaaaaatc

SEQ ID NO: 690987 - DNA, 120 bp, Artificial Sequence
  ENSG00000188266_11 (sequence is synthesized)
aactgatggaatggatcaattctgaatatgacagagcacatgaaatccctaaggtcttcaagcaatctcgtgacaattttttaaaattcacaaaagtaccacaagcaagcatatttttct

SEQ ID NO: 690988 - DNA, 120 bp, Artificial Sequence
  ENSG00000188266_12 (sequence is synthesized)
gtgagtcttacttgccatatctataaaacacatataatgataccattttgaagcagataatctcacaagatctattcctgccctgagattaatgactattttaattttaaaaataatata

SEQ ID NO: 690989 - DNA, 120 bp, Artificial Sequence
  ENSG00000188266_13 (sequence is synthesized)
tacatatagatatattgacatattttaaatatctggacataacatactgacctagataacatactaccagttctatgaaacctcctctgatctctcctttctctagaatcccagtgcatt

SEQ ID NO: 690990 - DNA, 120 bp, Artificial Sequence
  ENSG00000188266_14 (sequence is synthesized)
gtgtctttttcatggcccatcactttgtataatggatcgtggttgtgcagtcatcttgcctgagagctactgagggcggagaccatgtaaaacttatttttgtctcctcagcccttcttt

SEQ ID NO: 690991 - DNA, 120 bp, Artificial Sequence
  ENSG00000188266_15 (sequence is synthesized)
tttaaaaatatttgaaaataaatgcgtgctagaagaagggatggagaaggcacacactaagatgctttaggagaaagcattgacagcattcttggagaaaaaattttaacttgtctgaga

SEQ ID NO: 690992 - DNA, 120 bp, Artificial Sequence
  ENSG00000188266_16 (sequence is synthesized)
gggtggttgaaactggaactccagagatagatgctggaagaccctgggaactgcaaggaagcaaataatgacatccaggcaaggccactaacccctgagctacttaaatataatggttcc

SEQ ID NO: 690993 - DNA, 120 bp, Artificial Sequence
  ENSG00000188266_17 (sequence is synthesized)
tttcagactgataccaggaacctccttaagcatataagcatatattttttaattctctataatctgtttctttttggatgactatgaagtagattgggtagactgaagctcactgtattc

SEQ ID NO: 690994 - DNA, 120 bp, Artificial Sequence
  ENSG00000188266_18 (sequence is synthesized)
ttggctgacggtatcccactgtgtttccttcactggtttctcgtcatgtctcctttagtatgatttagtaaatggctgtttactattcttatgatttcaactattcattgtctacagatg

SEQ ID NO: 690995 - DNA, 120 bp, Artificial Sequence
  ENSG00000188266_19 (sequence is synthesized)
actcaagtctagaaccctggccattcaaatactcaatagttatctttctatatatatgaacaggcattgatcctatctccatctttctgtctacctacctagtcttcccaaactagatat

SEQ ID NO: 690996 - DNA, 120 bp, Artificial Sequence
  ENSG00000188266_20 (sequence is synthesized)
ttctgtctacctacctagtcttcccaaactagatatttctctaaattgtcttatatggttcatttttcacttctttgtccctcaatttcatttcatttctttttcttttcttttcttttc

SEQ ID NO: 690997 - DNA, 88 bp, Artificial Sequence
  ENSG00000188266_21 (sequence is synthesized)
tcaggcatgtgccaccatgtctggctaattctttaattttttgtagagattggggtaatacctatctcatagaattaatagagttcat

SEQ ID NO: 690998 - DNA, 120 bp, Artificial Sequence
  ENSG00000188266_22 (sequence is synthesized)
attggggtaatacctatctcatagaattaatagagttcattgtgaagatttcataagagaacagtgccaagtgcttaacacagtgtgtggcacatagttaggactcagtaactatttact

SEQ ID NO: 690999 - DNA, 120 bp, Artificial Sequence
  ENSG00000188266_23 (sequence is synthesized)
caataaatgaaccatattccaggttacccaaactcaaaatattggagtaattttttgcttgcctctcttatattcagtgagccctactggtttttagaattgtagaattttaggaatctc

SEQ ID NO: 691000 - DNA, 120 bp, Artificial Sequence
  ENSG00000188266_24 (sequence is synthesized)
gaattttaggaatctctgtctttactggattttttgtttgttttgggcttttttgtttgtttgtttgagatagggtctcactccgtcaccgacgctggagtgcagtggtgtgatcacagc

SEQ ID NO: 691001 - DNA, 120 bp, Artificial Sequence
  ENSG00000188266_25 (sequence is synthesized)
caagcaatcctcctgccttggcctccctaaatgctaggattataggcgtgagctatcatacccagcctgtgttgttttttaacaatatataataaaagccaacatttattcagcactgaa

SEQ ID NO: 691002 - DNA, 120 bp, Artificial Sequence
  ENSG00000188266_26 (sequence is synthesized)
agccaacatttattcagcactgaagtattttatacacattagctcacttaatttttacaacaaacctgtgtgggaagtactgttataattaatcgtcattttcagataagaaaatagcag

SEQ ID NO: 691003 - DNA, 120 bp, Artificial Sequence
  ENSG00000188266_27 (sequence is synthesized)
ctgaaaaagtaaaaataatttcctcaaagacagccagggcttaaatcaggcctttctgatgtagaccatgctcttcactaccacagagttccatgctactttctctccctctccctcctc

SEQ ID NO: 691004 - DNA, 120 bp, Artificial Sequence
  ENSG00000188266_28 (sequence is synthesized)
cacacacacacacacacacacatgcacactcactcacacacactaggaggaacaaatgagatcattcacatgaaagcacttatgtttctgaaatttaagggactgtggtttttatctagg

SEQ ID NO: 691005 - DNA, 120 bp, Artificial Sequence
  ENSG00000188266_29 (sequence is synthesized)
aagggactgtggtttttatctaggttgacctctcaagctaaaaactgggaaccagaataatggactgaaacttgggtttcacttccagaccagtgttgatcctctgaattgatgaaactg

SEQ ID NO: 691006 - DNA, 120 bp, Artificial Sequence
  ENSG00000188266_30 (sequence is synthesized)
tatagatttccctcttgattgcccctgctaacatggatttcctttcactcaattcctaatgcaaatattgctgaccactgtttagatgtttacatgctgcattacattgatattttacta

SEQ ID NO: 691007 - DNA, 77 bp, Artificial Sequence
  ENSG00000188266_31 (sequence is synthesized)
cctcatcccttcttatcacacctgctattatagtgcctttcctacagagaggtctttaaaaatatttgaaaataaat

SEQ ID NO: 691008 - DNA, 120 bp, Artificial Sequence
  ENSG00000188266_32 (sequence is synthesized)
ttaagtcattttcgagaatgtgagtattctcccaattaagtatttttcttgatatttaaactgtccaatttcatatcatcagaaaagtatggaggtacaatttagctttatcaaatctta

SEQ ID NO: 691009 - DNA, 120 bp, Artificial Sequence
  ENSG00000188266_33 (sequence is synthesized)
aaattttgccatatttgctcctattgctttttaaataataatatttttactttcctcaaaattgctacatttgaagcctcctctaaactttacatgagtctacctctcttcttcccatta

SEQ ID NO: 691010 - DNA, 120 bp, Artificial Sequence
  ENSG00000188266_34 (sequence is synthesized)
aatttgcacattacatatgtatgatttataaattatttatagtagggtttgtgtttttcaaactttatatcaatggtatcacactgtgtattattattctgcaacctgccttttctattc

SEQ ID NO: 691011 - DNA, 120 bp, Artificial Sequence
  ENSG00000188266_35 (sequence is synthesized)
agcatgttttgcagattgatccatatgaatatttgtagttttaatttagtttattagttttaactgctaaatagtattccatagtatgaatataccataatttatttgcatgtactataa

SEQ ID NO: 691012 - DNA, 120 bp, Artificial Sequence
  ENSG00000188266_36 (sequence is synthesized)
ttttttggtccattctcttgttaatggaattttaggttgcttcccatttctttgctacataaattatgctgcaatgaaccctctagtacaggagtccccaaaccccaggaactgggccac

SEQ ID NO: 691013 - DNA, 73 bp, Artificial Sequence
  ENSG00000188266_37 (sequence is synthesized)
aagacactgcaggagggtaagccccgcgttacacccctattggccaaaaactgaagaccaggccgggcgcagt

SEQ ID NO: 691014 - DNA, 90 bp, Artificial Sequence
  ENSG00000188266_38 (sequence is synthesized)
cctactgtgaactgcgcatgcaagggatctaagaaacagttttatcccaaaaccatccttccgctgtctcctgtccatggaaaaattgtc

SEQ ID NO: 691015 - DNA, 120 bp, Artificial Sequence
  ENSG00000188266_39 (sequence is synthesized)
aaattgtcttccatgaaaccagtccctgatgccaaaaaggttgggaactactgctctagtatatatctatctccctgtgtacacagacaggtgtttctctaggctatatttctagatata

SEQ ID NO: 691016 - DNA, 120 bp, Artificial Sequence
  ENSG00000188266_40 (sequence is synthesized)
acacagacaggtgtttctctaggctatatttctagatataaccagccttttcatccagcattaagtactggtcaaaggcaaggaactggctgggtgtggtggctcccgcctgtaatccca

SEQ ID NO: 691017 - DNA, 83 bp, Artificial Sequence
  ENSG00000188266_41 (sequence is synthesized)
ataaaaatgcaaaaactagctgggcatggtgacgcgtgcctgtaatctcagctactcagaggctgaggcagaagaattgcttg

SEQ ID NO: 691018 - DNA, 89 bp, Artificial Sequence
  ENSG00000188266_42 (sequence is synthesized)
aaaatgcaaaaactagctgggcatggtgacgcgtgcctgtaatctcagctactctagaggtggaggttgcagtgggcctaggttgtgcc

SEQ ID NO: 691019 - DNA, 120 bp, Artificial Sequence; identical to SEQ ID NO: 271395
  ENSG00000188269_0 (sequence is synthesized)

SEQ ID NO: 691020 - DNA, 120 bp, Artificial Sequence
  ENSG00000188269_1 (sequence is synthesized)
ctgctgagcagagcttcagtctccaccatcaatcatccagtgaggaatttgcacttacacaaggaactcttcctcggagagatcccctcctgtcacttcaatcaaatggaaccaggaaat

SEQ ID NO: 691021 - DNA, 120 bp, Artificial Sequence
  ENSG00000188269_2 (sequence is synthesized)
gatacacaaatttcagaatttcttcttctgggattttcacaagaacctggactgcaacccttcctctttgggctgttcctgtccatgtacctggtcactgtgctcgggaacctgctcatc

SEQ ID NO: 691022 - DNA, 120 bp, Artificial Sequence
  ENSG00000188269_3 (sequence is synthesized)
tgtacttcttcctctccaacctgtcctttgctgacatttgtgttacttccaccaccattccaaaaatgctgatgaacatccagacacagaacaaagtcatcacctacatagcctgcctca

SEQ ID NO: 691023 - DNA, 120 bp, Artificial Sequence
  ENSG00000188269_4 (sequence is synthesized)
cagacacagaacaaagtcatcacctacatagcctgcctcatgcagatgtattttttcatactctttgctggatttgaaaacttcctcctgtccgtgatggcctatgaccggtttgtggcc

SEQ ID NO: 691024 - DNA, 120 bp, Artificial Sequence
  ENSG00000188269_5 (sequence is synthesized)
atctgtcaccccctgcactacatggtcattatgaaccctcacctctgtggactgctggttctagcatcctggaccatgagtgctctgtattccttgctacaaatcttaatggtagtacgg

SEQ ID NO: 691025 - DNA, 120 bp, Artificial Sequence
  ENSG00000188269_6 (sequence is synthesized)
ctgtccttctgcacagccttagaaatcccccactttttctgtgaacttaatcaggtcatccaacttgcttgttctgatagctttcttaatcacatggtgatatattttacagttgcgctg

SEQ ID NO: 691026 - DNA, 120 bp, Artificial Sequence
  ENSG00000188269_7 (sequence is synthesized)
ctgggtggaggtcccctgactgggatcctttactcttactctaagataatttcttccatacatgcaatctcatcagctcaggggaagtacaaggcattttccacctgtgcatctcacctc

SEQ ID NO: 691027 - DNA, 120 bp, Artificial Sequence
  ENSG00000188269_8 (sequence is synthesized)
tcagttgtctccttattttatggtgcaatcctaggggtgtaccttagttctgctgccacccgcaactcacactcaagtgcaacagcctcagtgatgtacactgtggtcacccccatgctg

SEQ ID NO: 691028 - DNA, 120 bp, Artificial Sequence
  ENSG00000188269_9 (sequence is synthesized)
aacccctttatctatagtctgaggaataaagacataaagagggctctgggaatacatttgttgtggggaacaatgaaagggcaatttttcaagaagtgcccatgattgcagggctctaag

SEQ ID NO: 691029 - DNA, 120 bp, Artificial Sequence
  ENSG00000188269_10 (sequence is synthesized)
cttcagaggtagtaactgtcattcttcaatcagatagtggaaatagaacttgctccttctattaatacttattatatttctgggagtttcaatttgttgtgatttcaactggtcttgtag

SEQ ID NO: 691030 - DNA, 120 bp, Artificial Sequence
  ENSG00000188269_11 (sequence is synthesized)
aatttaagcaactccttttattaagctttctgctctctgatatccaacagttttttctctttgttgttttcctactttctcaaggttatttccgactttggatcagaaacactttggaga

SEQ ID NO: 691031 - DNA, 120 bp, Artificial Sequence
  ENSG00000188269_12 (sequence is synthesized)
tttccatttgtctcatacagggaagagttgtatgtctcctgtggcatagactacacttggcaattggggtaattgatgtaaatttatagtggaatatgacctgagaccacaatttgttca

SEQ ID NO: 691032 - DNA, 120 bp, Artificial Sequence
  ENSG00000188269_13 (sequence is synthesized)
cttttgtattcttcagtcctatgtctgtctctaccttcaatgctcctcctgataatgtagacctgaacatacttgtgtattttgcagctggtcatgagattgtgttgtcctcattaggac

SEQ ID NO: 691033 - DNA, 120 bp, Artificial Sequence
  ENSG00000188269_14 (sequence is synthesized)
atcatgtctttgtcagtgccatgtccacagtatctgccatactccctggcatagtacggtaaggcaaaaattgtttatcaaaaatatgttccgagtgcaatgcccactgaaagacaaact

SEQ ID NO: 691034 - DNA, 120 bp, Artificial Sequence
  ENSG00000188269_15 (sequence is synthesized)
tgcatatgttgattaacttaatatggacttacagtcagagatgaccttaaatatgatggagtaaaattgtcaatcatacattgaattgctatggaagacttgtttttatgatgtgcatgg

SEQ ID NO: 691035 - DNA, 120 bp, Artificial Sequence
  ENSG00000188269_16 (sequence is synthesized)
actcattgaagtatggaagcttagtgcccatatataagtttatttattggagtgatggatttggtgccatggtctataatgtttcatgcatccatacttctgtttttgcttcaaaatttt

SEQ ID NO: 691036 - DNA, 120 bp, Artificial Sequence
  ENSG00000188269_17 (sequence is synthesized)
tacgaatccttctatcccactaaccaaaatacctccttcattataaaattttgtcgtaaacattaaagtgcaggtcagtgaacaatattcaatgtatcatcaatttattcatctctttta

SEQ ID NO: 691037 - DNA, 120 bp, Artificial Sequence
  ENSG00000188269_18 (sequence is synthesized)
tgctctaaattctcttaaatactcatgattaaagaatgactcacacaaaaccttgagcttctccccagtcatgcctctgggaatggggaattgtgattcaggtgaaaagggtgactcaca

SEQ ID NO: 691038 - DNA, 120 bp, Artificial Sequence
  ENSG00000188269_19 (sequence is synthesized)
ccaaacctttaacttatcccgttatgtctctgggaatggaaaattgtgattcaggtgcacaaattattcctgcaaaaaacatacatctcattctaacctctccagatcacctagatgggg

SEQ ID NO: 691039 - DNA, 120 bp, Artificial Sequence
  ENSG00000188269_20 (sequence is synthesized)
aatctcaacagtagtcttttttttaatacagttatctgaattatacatgagtatccagggaatcatgaatgcttccaagtattagaacaaatgccaaaataagaagcagcagactattct

SEQ ID NO: 691040 - DNA, 120 bp, Artificial Sequence
  ENSG00000188269_21 (sequence is synthesized)
gaatgtcctcagtcctatttgcaatgcttattgtatcagtaagctattgctgaataacaagtcatctcatagtaaatggtttaagatgatgcttttcttgtctcatagggagtctacgtt

SEQ ID NO: 691041 - DNA, 120 bp, Artificial Sequence
  ENSG00000188269_22 (sequence is synthesized)
gggggtgtcttctggtctctgctgtcctcctcatgaagctgtagtcagctgtgagtcaacagtagggctttgctgatcttgcccgagttctcttacatttggaggcttgttggctgtggg

SEQ ID NO: 691042 - DNA, 120 bp, Artificial Sequence
  ENSG00000188269_23 (sequence is synthesized)
ctgacctagggtggccacagttgggacagcttgccaactgtcttaacatggctttacatgtcctctcctcctaaagctggctggcctggacttgtttgcatggcagaggcagagttacag

SEQ ID NO: 691043 - DNA, 120 bp, Artificial Sequence
  ENSG00000188269_24 (sequence is synthesized)
gagagagcaacagaaacatgccaagttcccttgagggacactcaattccaccatattcttttggctaaagcaaatgaaaagatcctgagtccatcgcctcaaatagttaccttttttggt

SEQ ID NO: 691044 - DNA, 120 bp, Artificial Sequence
  ENSG00000188269_25 (sequence is synthesized)
ggaaagagcacctaaactctactcttagaaaattcacagtgtacagtataatatttttaactatagtcgtcatagtgtacattagatgtctaggcttattcatcctacataaccacaact

SEQ ID NO: 691045 - DNA, 120 bp, Artificial Sequence
  ENSG00000188269_26 (sequence is synthesized)
ctgtacgttttgacccacattttcccattccccactcctcccattctcacccctccataaccagaattgtactctctatttctatgtattttacattttaagcacaagatctcaatctgt

SEQ ID NO: 691046 - DNA, 120 bp, Artificial Sequence
  ENSG00000188269_27 (sequence is synthesized)
acattttaagcacaagatctcaatctgtcacccagactgaagtagagtggtgtgatggtagctcactgaagcctcgatctcccaggctgaagccatcctcttgcctcagcctcctgagta

SEQ ID NO: 691047 - DNA, 120 bp, Artificial Sequence
  ENSG00000188269_28 (sequence is synthesized)
cctggctcacttgttcatatttttagtagagatgacatcttgctctgttgcccaggatggtctcaaattcctgagttcaaatggtgatcccatcttgacctcccaaaatgctgggattac

SEQ ID NO: 691048 - DNA, 120 bp, Artificial Sequence
  ENSG00000188269_29 (sequence is synthesized)
aggcatgaaccaccaccacacctggtcagtatttgacattgtttagattccacatataagtgaaataatgtagcattttttattcctctctctggcttatttcatgagcataatatccac

SEQ ID NO: 691049 - DNA, 120 bp, Artificial Sequence
  ENSG00000188269_30 (sequence is synthesized)
ttatacactgttggtgggaatgtaaattagtccagccactgtgggaagcggtttggagatttctcaaaaaactgagttgaactaccatttgacccagaaatcccattattgagtatatag

SEQ ID NO: 691050 - DNA, 120 bp, Artificial Sequence
  ENSG00000188269_31 (sequence is synthesized)
ccaaaggaaaataaatcatcctgccaaaaggactcattcacccatatgttcactgtggtgctattcacaatagcaaagacatggaatcattgcaggtgctcatcaatggtgtattggata

SEQ ID NO: 691051 - DNA, 120 bp, Artificial Sequence
  ENSG00000188269_32 (sequence is synthesized)
aagaaaatgtagtatgtacacaccagggaatactatgcagccataaaaaagaaaaaaacatgtcctttgtagctacatggagagaactcaaggccattatcctaagtgaactaatgcaga

SEQ ID NO: 691052 - DNA, 120 bp, Artificial Sequence
  ENSG00000188269_33 (sequence is synthesized)
aacagaaaaccaaatacttcatgttctcgcttataagtgcgagctaaacattgggtacacacggacataaagttgggatcaacagacactggagactactatagtggggagaaagggagt

SEQ ID NO: 691053 - DNA, 120 bp, Artificial Sequence
  ENSG00000188269_34 (sequence is synthesized)
aggaaaagggctgaaaaactacctcttgggtactcactacctgggtgatgggttcagccataccccaaactttagtgtcacacaatatatctttgtaacaaacctacacatataccccat

SEQ ID NO: 691054 - DNA, 120 bp, Artificial Sequence
  ENSG00000188277_0 (sequence is synthesized)
agccaggccactcatcagagtccgggagccactggcagagagggcacggccccacactgccccagagacatataggagccaggcaaacaccagggcgagtgagctcgggccatctgctgc

SEQ ID NO: 691055 - DNA, 120 bp, Artificial Sequence
  ENSG00000188277_1 (sequence is synthesized)
ctgcctgtggaaggagcgctcgccagcctcacccagcccgagaaggtccacctctgcctccgccggagctgccctcattctggctccagtaagtgctgcttcttcctcctgggttttttt

SEQ ID NO: 691056 - DNA, 120 bp, Artificial Sequence
  ENSG00000188277_2 (sequence is synthesized)
ccactaccctattcagtaaccaggccactcctgtccctgtgggaaactcttgctgccaggaactcccagctgtctgctctcctgggcaaaaaagttccttcttcctgagccctcctctca

SEQ ID NO: 691057 - DNA, 120 bp, Artificial Sequence
  ENSG00000188277_3 (sequence is synthesized)
ccatccaagatgtggtcaaaggtctgtgctgagtggaaaccctgaggcctctgctcctaggggagcctccccagctgctggcactcactgccccagcagggaccacatgcaccctggctg

SEQ ID NO: 691058 - DNA, 120 bp, Artificial Sequence
  ENSG00000188277_4 (sequence is synthesized)
ctcctgaacacctgtctgctggctcccctgggccccatggagacctggcggaaaggctccttccgcaacgcctccttcttcaagcagctgagcctggggcggccacggcggctccggcga

SEQ ID NO: 691059 - DNA, 120 bp, Artificial Sequence
  ENSG00000188277_5 (sequence is synthesized)
cagagtagtgtgcttagccaggccagcacagcaggtggggaccacgaggagtacagcaaccgagaagtcatccgggagctacaagggaggccagatggccggcgcctgccactgtggggg

SEQ ID NO: 691060 - DNA, 120 bp, Artificial Sequence
  ENSG00000188277_6 (sequence is synthesized)
gacgagcagccccgggccaccctgctggccccacccaagcccccacgcctctaccgagagagctcaagctgccccaacatcctggagcccccacctgcctacacagcagcctactctgcc

SEQ ID NO: 691061 - DNA, 120 bp, Artificial Sequence
  ENSG00000188277_7 (sequence is synthesized)
accctgccatcggcgctctctctgtcgagtgccctccaccagcactcagagaagggccttgtggacactccctgcttccagaggacacctaccccagacctcagtgatcccttcctctcc

SEQ ID NO: 691062 - DNA, 120 bp, Artificial Sequence
  ENSG00000188277_8 (sequence is synthesized)
ttcaaagtggacctggggatttcacttcttgaggaagttctgcagatgctaagggagcagtttcctagcgagcccagcttctaaatggggtgagggtgggcaaagccggggtgactggaa

SEQ ID NO: 691063 - DNA, 120 bp, Artificial Sequence
  ENSG00000188277_9 (sequence is synthesized)
gatccagaggctggggattaaggaaaggacagggacaggactccaggcccatcgctggagggttcaggcaggcagagcttcttcatcctgggggaggattccaggataggaatccagggc

SEQ ID NO: 691064 - DNA, 120 bp, Artificial Sequence
  ENSG00000188277_10 (sequence is synthesized)
aatgttgggggggcggcccttcctggcaggaccctgaagaaagctggctatgccgggaaagggaggctgtgccgggaaagggaggctctgtgcggcactacaggaaccaggtagaggctg

SEQ ID NO: 691065 - DNA, 120 bp, Artificial Sequence
  ENSG00000188277_11 (sequence is synthesized)
gcagagccagaaggtggcacggggtcagatcagggagtgggaggacacagactgagcagaagagatgagtgccccatgccagcctctttggaagccactgtcaacagagagaggtcacag

SEQ ID NO: 691066 - DNA, 120 bp, Artificial Sequence
  ENSG00000188277_12 (sequence is synthesized)
gacaagcttgggtaaaggcagtccaacccaggcagaagaggaaagtgggaaggcccaggaagaaaggggagaaggcctgaccctgtctaatctggtggccactcactgcatgacactgaa

SEQ ID NO: 691067 - DNA, 120 bp, Artificial Sequence
  ENSG00000188277_13 (sequence is synthesized)
ttgaaataaataaaattaacagttcagttcctcagctgcaccgttattccagattccacattccaaatgcccggtggccacacatgattaatggctaccacactggtcagtgcagaatgg

SEQ ID NO: 691068 - DNA, 120 bp, Artificial Sequence
  ENSG00000188277_14 (sequence is synthesized)
acgtaaacatcgctgcacaaagttctaatggacagcgctgtctagaccatggcctggagccaccagcaaaggggaggcgcatacaggggctggccacataggaagagataggtagagata

SEQ ID NO: 691069 - DNA, 120 bp, Artificial Sequence
  ENSG00000188277_15 (sequence is synthesized)
gagtataactcaggaaaaagaccaggcaaatccttagcagaaatgaggacgtggctcagtctgccaacacagctacccggagcaatccctggtgaaggaaggcagctctagagaatgcca

SEQ ID NO: 691070 - DNA, 120 bp, Artificial Sequence
  ENSG00000188277_16 (sequence is synthesized)
gccacaggcacgcgcacggcttgcaaaggggtactttggggaattcccagaattactagtgatgggagccctggcaggtttccttcctcgaagagaggagaactggatccagggatgggc

SEQ ID NO: 691071 - DNA, 120 bp, Artificial Sequence
  ENSG00000188277_17 (sequence is synthesized)
attcaacagcgaagcggcacagctggtttccagaaccgtctcccgggattagacagttctgccgcctgaaccctccgacgatgggcctgccaaccaggccaagcccactgggtcaaagcc

SEQ ID NO: 691072 - DNA, 120 bp, Artificial Sequence
  ENSG00000188277_18 (sequence is synthesized)
acaggctgtgctacggccccaccccatggcctcaccagaacacagaaaccagagcccagcagcactggctgggccatgtgttggtggccccccgggactcgctaagagtagcaaagggga

SEQ ID NO: 691073 - DNA, 120 bp, Artificial Sequence
  ENSG00000188277_19 (sequence is synthesized)
gagggaagctctgacacacaccatttctacgacctaaatcagtggcctccctctttcctcctcttgtgtataggtaccgagctgtggatacaggagagaatgaataaaattctaacacaa

SEQ ID NO: 691074 - DNA, 120 bp, Artificial Sequence
  ENSG00000188282_0 (sequence is synthesized)
gtaggctctgcgtcctgctttgtgtaaggagagagctgggcagtgaggccgaaagtccttcctgagctcacagtccaagttgcaaggaatcacatcatttccaagtacccatggcagaag

SEQ ID NO: 691075 - DNA, 120 bp, Artificial Sequence
  ENSG00000188282_1 (sequence is synthesized)
agggagccatcctcaaggtcaccaaagacctaagagctgccgtctctgccatcctccagggctatggggatgggcaggggccagtgacggacaccagtgccgagctgcacagactctgtg

SEQ ID NO: 691076 - DNA, 120 bp, Artificial Sequence
  ENSG00000188282_2 (sequence is synthesized)
gctgcctggagctgctgctgcagtttgaccagaaagagcagaagagcttcctggggcctcggaaggattactgggactttctctgcactgccctacgacggcagcggggaaacatggagc

SEQ ID NO: 691077 - DNA, 120 bp, Artificial Sequence
  ENSG00000188282_3 (sequence is synthesized)
caatccactttgtccgttcccaggacaagttgaagacccctctggggaaaggccgtgccttcatccgcttctgcctggcccgtgggcagctggctgaggccctgcagctttgcctcctga

SEQ ID NO: 691078 - DNA, 120 bp, Artificial Sequence
  ENSG00000188282_4 (sequence is synthesized)
actcagagctcaccagggaatggtatggaccccggagccctctgctctgcccagaacgccaagaagacatcctggactctctctatgctctcaatggggtggccttcgagttggacctcc

SEQ ID NO: 691079 - DNA, 120 bp, Artificial Sequence
  ENSG00000188282_5 (sequence is synthesized)
agcagccagacctggatggagcctggcccatgttctcagagtcacgctgctccagttccacccaaacccagggaaggagacccagaaaaaacaaagatgccccaaagaagatcccagccg

SEQ ID NO: 691080 - DNA, 120 bp, Artificial Sequence
  ENSG00000188282_6 (sequence is synthesized)
catatggagggcctgaaaatgtccagattgaggactcacacaccagtcaagccatctgtctgcaagatgcacccagtggacagcagctggcagggcttcccaggtcccagcaacaaaggc

SEQ ID NO: 691081 - DNA, 120 bp, Artificial Sequence
  ENSG00000188282_7 (sequence is synthesized)
atcttcctttctttttggaaaagaagggggaaagttccaggaaacataggtacccccagagcatgtgggagccagaagggaaggagcttcagctagaccaggaggaaagagccccatgga

SEQ ID NO: 691082 - DNA, 120 bp, Artificial Sequence
  ENSG00000188282_8 (sequence is synthesized)
ttgagatcttcctggggaactcaacacccagcacccagggacaggggaagggggctatgggcactcagaaggaggtgatagggatggaggctgaggtcacaggggttctgctggttgcag

SEQ ID NO: 691083 - DNA, 120 bp, Artificial Sequence
  ENSG00000188282_9 (sequence is synthesized)
ccagccccagaggggctgtagagggagcagtatcagggagcaggcaggggtcggggggctctagcatcctgggggagccctgggtccttcagggacacgcaacaaaggaagactctaccg

SEQ ID NO: 691084 - DNA, 120 bp, Artificial Sequence
  ENSG00000188282_10 (sequence is synthesized)
tggagaatccacaagtgcaaacagaagtgacccttgtggccagaagggaggagcaagccgaggtgtccctgcaggacgagatcaagagcctcagacttgggctccggaaggctgaggagc

SEQ ID NO: 691085 - DNA, 120 bp, Artificial Sequence
  ENSG00000188282_11 (sequence is synthesized)
aggcccagcgccaggagcagctgctgagggagcaggagggggagctgcaggcacttcgggagcagctcagcaggtgtcaggaagagagagccgagctgcaggcacagctggagcagaagc

SEQ ID NO: 691086 - DNA, 120 bp, Artificial Sequence
  ENSG00000188282_12 (sequence is synthesized)
aacaggaggctgagaggagggatgccatgtaccaggaggagcttggagggcagcgggacttggtccaggccatgaagaggcgggtgttggaactgatccaagagaaggaccgcctgtggc

SEQ ID NO: 691087 - DNA, 120 bp, Artificial Sequence
  ENSG00000188282_13 (sequence is synthesized)
agaggctccagcatctctcttccatggctcccgagtgctgtgtggcctgtagcaagatctttggccgattttctcggcggtatccatgcaggctctgtggaggcctgctctgccatgctt

SEQ ID NO: 691088 - DNA, 120 bp, Artificial Sequence
  ENSG00000188282_14 (sequence is synthesized)
gctccatggattacaagaagagagaccgctgctgcccaccctgcgcccagggaagagaagcccaggtcacctgaccaagaccaagaccagcccatgactggcctcccacctgcctgccca

SEQ ID NO: 691089 - DNA, 120 bp, Artificial Sequence
  ENSG00000188282_15 (sequence is synthesized)
tcccactcaatccactccctgcccgtagctcttcccagccctcttgtttgtccagtcctcattctagacactgaagatctaaggcaccagcacttctgtgggcagagtagggtgtgggga

SEQ ID NO: 691090 - DNA, 120 bp, Artificial Sequence
  ENSG00000188282_16 (sequence is synthesized)
gtggttccagccctgcaactaccacaacgagccaggtgactttggcgaagctctcagtgctcagggcttcttctctaatgttaagagttgggccccatcctctctaaagtccctctgggc

SEQ ID NO: 691091 - DNA, 120 bp, Artificial Sequence
  ENSG00000188282_17 (sequence is synthesized)
tcagcaaatccatgactgtggataagaccccagcagccctgacatttctcctccacactccccactcacccagcagcggtgcccacctttcctgattcacgagaagtgaagcctgcacta

SEQ ID NO: 691092 - DNA, 120 bp, Artificial Sequence
  ENSG00000188282_18 (sequence is synthesized)
tcttggactctccagcagcttcctgtctggagtcagcttcagggatctgtgtttgtgttgctgtgtttctttttatgtttattgaagtactactgacatatgataaacatcacagagtgt

SEQ ID NO: 691093 - DNA, 120 bp, Artificial Sequence
  ENSG00000188282_19 (sequence is synthesized)
aacctccaggattatgtgaggattgaatgggacaaggacatcaagtgttagcacagtgtcgtcacccagggactgctcaatcggtggaggccacaccatcatcttcacacactggcctac

SEQ ID NO: 691094 - DNA, 120 bp, Artificial Sequence
  ENSG00000188282_20 (sequence is synthesized)
ctctaccacttcttccctgcgcagtcactagggacggactctggcagcagagccgcgctgtcgtgccccagccagccaggctctcctgggtcagtggggggccagaagggacctcatgtg

SEQ ID NO: 691095 - DNA, 120 bp, Artificial Sequence
  ENSG00000188282_21 (sequence is synthesized)
tgagatctggaagcgggaattggagcagcagtttcattctgcttcagctcaggaagcgccctggatcctgcctctaccacttcttccctgcagcgtctgcggttcccccaccgctgtgag

SEQ ID NO: 691096 - DNA, 120 bp, Artificial Sequence
  ENSG00000188282_22 (sequence is synthesized)
gaaaaggaaactagcagcagtcccagctaccacaatggatcagcccccatttggccaacaggtgactctaccccagcgtctgcggttcccccaccgctgtgagccaggttccccctccag

SEQ ID NO: 691097 - DNA, 120 bp, Artificial Sequence
  ENSG00000188282_23 (sequence is synthesized)
gctgctgggctgggactgagttacttcttcccaggctgtaaatcctgggactgctgtgcaaggcagagtcactagggacggactctggcagcagagctgcgctctcgtgccccagccagc

SEQ ID NO: 691098 - DNA, 120 bp, Artificial Sequence
  ENSG00000188282_24 (sequence is synthesized)
gaaaaggaaactagcagcagtcccagctaccacaatggatcagcccccatttggccaacaggtgactctaccccaggtgggcctgagaggacccatcccccatctcaccattctgcccca

SEQ ID NO: 691099 - DNA, 120 bp, Artificial Sequence
  ENSG00000188282_25 (sequence is synthesized)
gcgccctggatcctgcctctaccacttcttccctgcgcagtcactagggacggactctggcagcagagccgcgctgtcgtgccccagccagccaggctctcctgggtgagtagcagggag

SEQ ID NO: 691100 - DNA, 120 bp, Artificial Sequence
  ENSG00000188282_26 (sequence is synthesized)
tggagccgttcatggatttcacacaggatctgggctggaaggggctgccgagaccatcagtccaatctttggtctacaggtggggaaactgaggctcaaggaaggtcagtggggggccag

SEQ ID NO: 691101 - DNA, 120 bp, Artificial Sequence
  ENSG00000188282_27 (sequence is synthesized)
aagggacctcatgtgtgagatctggaagcgggaattggagcagcagtttcattctgcttcagctcaggaagcactcaggtggaccgctcagctgactgaggtggagaaggaaggaggagc

SEQ ID NO: 691102 - DNA, 120 bp, Artificial Sequence
  ENSG00000188282_28 (sequence is synthesized)
agcccctgcagcagcccagcctggagaaacgaggacccagcatggaaagaccccagcctcaaggaggcagagcacagccaggaagggaagccccagcccacctgggaaacccacctggcc

SEQ ID NO: 691103 - DNA, 120 bp, Artificial Sequence
  ENSG00000188282_29 (sequence is synthesized)
cattgctgggcacaggatctcactggtggtctcacatccatccttttgggaatgagatcaggactagggattcggcactggtgaccagcactcaggtggaccgctcagctgactgaggtg

SEQ ID NO: 691104 - DNA, 120 bp, Artificial Sequence
  ENSG00000188282_30 (sequence is synthesized)
gagaaggaaggaggagcgtggtgggaccctcgccctgccctccccactctggagcgctgcctctcagcccaaccaagtgacagagacgagacaaccacaggaatagcagctgcggagctc

SEQ ID NO: 691105 - DNA, 120 bp, Artificial Sequence
  ENSG00000188282_31 (sequence is synthesized)
gtggaggtggaggctctggaggggtcgggcatcaggacacccttcaggagaggggagacctcctgagacaaaccaagggcattccactgggagatgagaaacagatgtctcaggtggacc

SEQ ID NO: 691106 - DNA, 120 bp, Artificial Sequence
  ENSG00000188282_32 (sequence is synthesized)
tgaagatgctggaactccatgacctcagcgcccacttggggaagtgccagctgcagaggccgccccaggctttcctgcctctgccttccaggctctgtggaggcctgctctgccatgctt

SEQ ID NO: 691107 - DNA, 89 bp, Artificial Sequence
  ENSG00000188283_0 (sequence is synthesized)
attgctctaaaaggcctctgtgccctgactgatcctccctccctgtcaactcctaatctttttattgtaatcatacagtatgtagtctt

SEQ ID NO: 691108 - DNA, 120 bp, Artificial Sequence
  ENSG00000188283_1 (sequence is synthesized)
tttgaattggcttctttcacttagcaatgtgcatttaagtttcctaagctgttgatcatgagactgagtccctttttatacttcaacagacatgagaacggcctcaaggaagactaacca

SEQ ID NO: 691109 - DNA, 120 bp, Artificial Sequence
  ENSG00000188283_2 (sequence is synthesized)
tctgcaatactagaagccatggctgagggatcagtgatgttcagtgatgtgtccatagacttctctcaggaggagtgggactgcctggaccctgttcagagggacttatacagagatgtg

SEQ ID NO: 691110 - DNA, 120 bp, Artificial Sequence
  ENSG00000188283_3 (sequence is synthesized)
atgttggagaactacggcaatctggtttcaatgggactttacactcctaagcctcaagtgatctccttattggaacaagggaaagagccctggatggttggcagagagcttacaagaggc

SEQ ID NO: 691111 - DNA, 120 bp, Artificial Sequence
  ENSG00000188283_4 (sequence is synthesized)
ctgtgttcagatctggaatcgatgtgtgaaaccaagttattatctctaaagaaggaagtttatgaaatagaattatgccagagggagataatgggacttacaaagcatggccttgagtac

SEQ ID NO: 691112 - DNA, 120 bp, Artificial Sequence
  ENSG00000188283_5 (sequence is synthesized)
tccagttttggagatgttttggaatatagaagccaccttgcaaaacaactgggatatccaaatgggcattttagtcaagaaatattcactcctgaatacatgcccacatttattcaacag

SEQ ID NO: 691113 - DNA, 120 bp, Artificial Sequence
  ENSG00000188283_6 (sequence is synthesized)
acattccttactctccatcaaataattaataatgaagacagaccctatgaatgtaagaaatgtggaaaggcctttagtcagaactcacaatttattcaacatcagagaattcatattggt

SEQ ID NO: 691114 - DNA, 120 bp, Artificial Sequence
  ENSG00000188283_7 (sequence is synthesized)
gaaaaatcttatgaatgtaaagagtgtgggaaattctttagttgtggttcacatgttactcggcatctgaaaattcatactggcgaaaaaccctttgaatgtaaggaatgtggaaaggcc

SEQ ID NO: 691115 - DNA, 120 bp, Artificial Sequence
  ENSG00000188283_8 (sequence is synthesized)
ttcagttgtagctcatacctttctcaacatcagagaatccataccggtaagaaaccctatgaatgtaaggaatgtgggaaggcctttagttattgctcaaatcttattgaccatcagcga

SEQ ID NO: 691116 - DNA, 120 bp, Artificial Sequence
  ENSG00000188283_9 (sequence is synthesized)
attcacactggtgaaaaaccttatgaatgtaaagtatgtgggaaagcctttactaagagctcacaactttttcagcatgcacgaattcatacaggtgagaaaccctatgaatgtaaggaa

SEQ ID NO: 691117 - DNA, 120 bp, Artificial Sequence
  ENSG00000188283_10 (sequence is synthesized)
tgtggcaaagcctttacccagagctcaaagcttgttcaacatcagagaattcatactggtgagaaaccctatgagtgcaaggaatgtggcaaagcctttagtagtggctcagcacttact

SEQ ID NO: 691118 - DNA, 120 bp, Artificial Sequence
  ENSG00000188283_11 (sequence is synthesized)
aatcatcagagaattcacactggtgagaaaccctatgattgtaaggaatgtggaaaggcttttactcagagctcacagcttcgtcaacatcagagaattcacgctggtgagaaacccttt

SEQ ID NO: 691119 - DNA, 120 bp, Artificial Sequence
  ENSG00000188283_12 (sequence is synthesized)
gaatgtcttgaatgtgggaaggcctttactcagaactcacaacttttccagcatcagagaattcatacagatgaaaaaccatatgaatgtaatgaatgtggaaaggcctttaataaatgc

SEQ ID NO: 691120 - DNA, 120 bp, Artificial Sequence
  ENSG00000188283_13 (sequence is synthesized)
tcaaaccttactcgacatctgagaattcacactggtgaaaagccctataactgtaaggaatgtgggaaggcttttagtagtggctcggatctcattcgtcatcagggaattcatactaat

SEQ ID NO: 691121 - DNA, 120 bp, Artificial Sequence
  ENSG00000188283_14 (sequence is synthesized)
aaataataaaaattaaagcccctgtcaccttcctcatattttaaaccaaaaatcatgtctaatagttaccctcttccgtagttttttttaaaactttgtatttaaattttgtatccaaat

SEQ ID NO: 691122 - DNA, 120 bp, Artificial Sequence
  ENSG00000188283_15 (sequence is synthesized)
gtatttcattccaggttataaattcggagtctaaagtgacattccctctctcccccagtcatataccgatgccagctgttctataattctttcattcattgttttgttctactttcttgg

SEQ ID NO: 691123 - DNA, 120 bp, Artificial Sequence
  ENSG00000188283_16 (sequence is synthesized)
tgacacattatactcatgtttatatttgcttgtgtttttagagctatcttttctgatctgtgtatttgtgtttgcaccagtatcacactgtttgaattgtgtgacctttaatatttttaa

SEQ ID NO: 691124 - DNA, 120 bp, Artificial Sequence
  ENSG00000188283_17 (sequence is synthesized)
cctttaatatttttaaattccttgtggaggtttaactttgtttttgaagttagtgttagtctttttgttttattttattattattattatatgttttttgagacggagtttcactctgtt

SEQ ID NO: 691125 - DNA, 79 bp, Artificial Sequence
  ENSG00000188283_18 (sequence is synthesized)
gtcacaaccttcgcctcccaggttcaagtggttcttctgcctcagccttttgagtagttgggattacaggcatgtgcca

SEQ ID NO: 691126 - DNA, 120 bp, Artificial Sequence
  ENSG00000188283_19 (sequence is synthesized)
gggattacaggcgtgagccactgcggccggtctttttattttacaaatgtacatttttaattgttaagccaaaatcacaaagcaaaaaattacaaactaaaaagccaaaattaattgtaa

SEQ ID NO: 691127 - DNA, 120 bp, Artificial Sequence
  ENSG00000188283_20 (sequence is synthesized)
caaactaaaaagccaaaattaattgtaatcatacttatagatggctgctctcaatttggtagagaaaatcgtgctatactttgcttttttaagaaagtgtaattatgatatgcatgctgt

SEQ ID NO: 691128 - DNA, 120 bp, Artificial Sequence
  ENSG00000188283_21 (sequence is synthesized)
acccttaactgcttttatcatgccaaagatttcatgagtgccatttcagtaaatatagatttttattattttcatgacatatttaatgactttaaaatgactattcccattatggttgcc

SEQ ID NO: 691129 - DNA, 69 bp, Artificial Sequence
  ENSG00000188283_22 (sequence is synthesized)
atttaatgactttaaaatgactattcccattatggttgccactaaatttttgcagctataaaagctgac

SEQ ID NO: 691130 - DNA, 120 bp, Artificial Sequence
  ENSG00000188283_23 (sequence is synthesized)
cactccagcctgggggacagagtgagattccgtctcaaaaaaacacaaaaactgctgacctcattggatgcttatttttacttttaaaacatttattttaattgctaaaattatctacat

SEQ ID NO: 691131 - DNA, 120 bp, Artificial Sequence
  ENSG00000188283_24 (sequence is synthesized)
tgtgagctgttttgttcccttacatcaatcctaatcccaatgccatactagaaagtaacactgttatgaaagtgttatttatcaatccagatattaattttttgtttgtttgtttttttt

SEQ ID NO: 691132 - DNA, 70 bp, Artificial Sequence
  ENSG00000188283_25 (sequence is synthesized)
gtggcacaatctcagttcaccacatctgagactacaggcgcacgacaccatgcctggctaatttttgtat

SEQ ID NO: 691133 - DNA, 89 bp, Artificial Sequence
  ENSG00000188283_26 (sequence is synthesized)
cacccacctcggcctcccaaagttcgcaattattttttcttatagctattagtggtgtttttgttttttgagacacagtctcgctctgt

SEQ ID NO: 691134 - DNA, 63 bp, Artificial Sequence
  ENSG00000188283_27 (sequence is synthesized)
actcctgacctccctggctgttagtggtattttaaaaaattatgtctaggcatctataataag

SEQ ID NO: 691135 - DNA, 120 bp, Artificial Sequence
  ENSG00000188283_28 (sequence is synthesized)
gtggtattttaaaaaattatgtctaggcatctataataaggctgtatgtattggattgctgtgaagagtcaatgaattaataaatgcaaagtacctcaaactgttatcacataatacagg

SEQ ID NO: 691136 - DNA, 120 bp, Artificial Sequence
  ENSG00000188283_29 (sequence is synthesized)
tttagtaaaagttttccactattatcagtgatatactcattatcataagtatcttcattaggatttatggaaaggattttaaccatgttgtttacctttggcaaatttgtaattcatggt

SEQ ID NO: 691137 - DNA, 120 bp, Artificial Sequence
  ENSG00000188283_30 (sequence is synthesized)
ggaaaaagagaaacacttgtaatgagtataacgaagcctttccctatcattattattcagtgtggaattttaaaaggaagagaaaaagtatgtgtgcatagtctttgttcagactttatc

SEQ ID NO: 691138 - DNA, 68 bp, Artificial Sequence
  ENSG00000188283_31 (sequence is synthesized)
agaaaaagtatgtgtgcatagtctttgttcagactttatcttttatgctacataaagaataccagtct

SEQ ID NO: 691139 - DNA, 90 bp, Artificial Sequence
  ENSG00000188283_32 (sequence is synthesized)
agattgcaccactgcatgtcttacaaaataaaaaataaacggttaccaatctgaaaccctgaaaatatgatgagtagtagaaagcacagc

SEQ ID NO: 691140 - DNA, 120 bp, Artificial Sequence
  ENSG00000188283_33 (sequence is synthesized)
ctgaaaccctgaaaatatgatgagtagtagaaagcacagctgtcaaaaaagcaggaagagattataaaattttttctaatatttccccccaaaatgcagaaaacatactggcaacattat

SEQ ID NO: 691141 - DNA, 120 bp, Artificial Sequence
  ENSG00000188283_34 (sequence is synthesized)
ttgaccagaagaagcagtacaataggataaccatcaaatatctgattattaattcaatattccctcttaattaacatgggttaaggaataaatccctaatatatacattatttaaatgta

SEQ ID NO: 691142 - DNA, 120 bp, Artificial Sequence
  ENSG00000188283_35 (sequence is synthesized)
catgaaaatgaaaacaattgaaaaacctgtgagtggcagtaaaagttgtattggaagttttataacctaatatttgtgcatatattgtaatactaggaagaaaaaatatagaacccaagg

SEQ ID NO: 691143 - DNA, 120 bp, Artificial Sequence
  ENSG00000188283_36 (sequence is synthesized)
aactaaaacaagctgaaatgaattgtgggaggaaggaggtagtattattttaaaaggcagaaataattgaaagaaaaaaactggatctgaatccaaaattgatatttgatggaagagaaa

SEQ ID NO: 691144 - DNA, 120 bp, Artificial Sequence
  ENSG00000188283_37 (sequence is synthesized)
aaaaatgagacaaagtttagtgattccagaggtgaaataaggatgacaaataaacaatattgtatatgagaaattgaaatggctatatatgtaaacttaaaagaactgtgtcatttgggg

SEQ ID NO: 691145 - DNA, 120 bp, Artificial Sequence
  ENSG00000188283_38 (sequence is synthesized)
taatgaaaatgtggcatgggtaaaggttgtacaattttgtttatatactacaggtcactcaactatacactttaaaagggtgaatattatgctgtgtgaatttgatctcaatttaaaaac

SEQ ID NO: 691146 - DNA, 90 bp, Artificial Sequence
  ENSG00000188283_39 (sequence is synthesized)
ctggccaggagttcaagaccagtctaggtaacataatgagatccccctcccctcatctctacagaaaaaaaaaaaaattaaaacaacaaa

SEQ ID NO: 691147 - DNA, 120 bp, Artificial Sequence
  ENSG00000188283_40 (sequence is synthesized)
cctcatctctacagaaaaaaaaaaaaattaaaacaacaaacttaaaagttggtattatagacatttttataatatatctgaaaatctggaaaaagtctgtgatttttaataagttgacga

SEQ ID NO: 691148 - DNA, 120 bp, Artificial Sequence
  ENSG00000188283_41 (sequence is synthesized)
gatttttaataagttgacgacatcagaattaactggaggtgtaaaatcttaatagacctccctccagaataaacttatttaaaaaaataagactggccaggcatggtggctcacgcctgt

SEQ ID NO: 691149 - DNA, 72 bp, Artificial Sequence
  ENSG00000188283_42 (sequence is synthesized)
ccgggaggcagagattgcggtgagcgggaaaaataaataagtgaaataaaatttttcttaaaatatatttta

SEQ ID NO: 691150 - DNA, 120 bp, Artificial Sequence
  ENSG00000188283_43 (sequence is synthesized)
ataaataagtgaaataaaatttttcttaaaatatattttaaatgtcaaattgctacactaaaaaagacaccaaggtagagatttttataggtgaaatctatgaaatgtcttaggaaactc

SEQ ID NO: 691151 - DNA, 120 bp, Artificial Sequence
  ENSG00000188283_44 (sequence is synthesized)
ttctaggacatagactgagatagcaaattatctatttttaaaatttgtcataatcctgatgttacaacctactagaacccaaaacaatttgtccagaatcagttatgaaaatacagcatt

SEQ ID NO: 691152 - DNA, 120 bp, Artificial Sequence
  ENSG00000188283_45 (sequence is synthesized)
ataaattagcaaatcaaatctagtaacccattgaaaataaatatttgtcacattctgaatttaggaaaaaacaattctgataaatcaaactttctactttctgaaacttgaaaatcaaat

SEQ ID NO: 691153 - DNA, 120 bp, Artificial Sequence
  ENSG00000188283_46 (sequence is synthesized)
tgatttagataagattgtatttcttagtgtctgaactcaggaaccaaatagatgtggatagcatgggatttttggaatacaagataagataatttacatgggattgcaaaagttcaaata

SEQ ID NO: 691154 - DNA, 120 bp, Artificial Sequence
  ENSG00000188283_47 (sequence is synthesized)
actaaagttctgtcaatgaaaatatatgctctaacctcaacatcttctagatgaacccttttttctagcagtatttgacaggatgggatatattttataaataaacttggactattatcc

SEQ ID NO: 691155 - DNA, 61 bp, Artificial Sequence
  ENSG00000188283_48 (sequence is synthesized)
gctgggattacaggcgtgtgtcaccacgccctcctccccacctcagatagtagctgtagat

SEQ ID NO: 691156 - DNA, 120 bp, Artificial Sequence
  ENSG00000188283_49 (sequence is synthesized)
gctggtctcgacctccccacctcagatagtagctgtagatccaaaatgacctctgatctgctcagtctgggccacaagaaaggcctggcatctcatcattcctttcttcttcagctctgc

SEQ ID NO: 691157 - DNA, 120 bp, Artificial Sequence
  ENSG00000188283_50 (sequence is synthesized)
aggcctggcatctcatcattcctttcttcttcagctctgctctcgtcaagagagttacccagaggaagaatggctgttgaccaaaccaaatacaagacggagtctcactctgttgcccaa

SEQ ID NO: 691158 - DNA, 89 bp, Artificial Sequence
  ENSG00000188283_51 (sequence is synthesized)
cccttcatttgcctgctggaccctccgcctcaagggtaggggaagtgcgcggtgagcggcctgggtcttgcaggctcggctggggcccg

SEQ ID NO: 691159 - DNA, 61 bp, Artificial Sequence
  ENSG00000188283_52 (sequence is synthesized)
tcttgaactcttgacctcgtgaatcttaataattttttttttgagatgagttttgatcttg

SEQ ID NO: 691160 - DNA, 62 bp, Artificial Sequence
  ENSG00000188283_53 (sequence is synthesized)
attacaggcatgagccactacgcctggccatcttaataattttttttttgagatgagttttg

SEQ ID NO: 691161 - DNA, 120 bp, Artificial Sequence
  ENSG00000188283_54 (sequence is synthesized)
gtttctcagggaactccctggggttggccggtaccatggaggaagattgtcttcagcgtgcagggccagcgtcctacggcagtttcactctgagcctgtgtctggatcacggagacgcgg

SEQ ID NO: 691162 - DNA, 120 bp, Artificial Sequence
  ENSG00000188283_55 (sequence is synthesized)
ggtagcggttcggagtgcggagcagggatgtccccgagctgtgcagctgcaagaacccgaaaaaacaggcgccatcttctcggcgcggtcctactccggactgtatttcccagaggcccc

SEQ ID NO: 691163 - DNA, 120 bp, Artificial Sequence
  ENSG00000188283_56 (sequence is synthesized)
tttgtgtgtggagacgagagattgtagaaataaagacccaagacagagatagaagaaaagacagctgggcctgagggaccactatcaccaagacacagagaccggtattggccccgaatg

SEQ ID NO: 691164 - DNA, 120 bp, Artificial Sequence
  ENSG00000188283_57 (sequence is synthesized)
tcagctgcttttcaggttactagctgaatttctattctttattaccaaacaaatggtttgagctgaaatgaaaaggaagagtgggaaattggcaactccagtgggctgtggttgaagctt

SEQ ID NO: 691165 - DNA, 120 bp, Artificial Sequence
  ENSG00000188283_58 (sequence is synthesized)
catcttcatctttctttggctgttcctgtagtggcatctcttcctgtgatcatcaagggactggatctcctttacccccagcataaccatgttccatatcttttctcgtgagcaggactt

SEQ ID NO: 691166 - DNA, 80 bp, Artificial Sequence
  ENSG00000188290_0 (sequence is synthesized)
ggcctgaggcgcgcgcgggcctggagccgggatccgccctaggggctcggatcgccgcgcgctcgccgctcgcccgccag

SEQ ID NO: 691167 - DNA, 120 bp, Artificial Sequence
  ENSG00000188290_1 (sequence is synthesized)
ggggcgcaccatggccgcagacacgccggggaaaccgagcgcctcgccgatggcaggagcgccggccagcgccagccggaccccagacaagccccggagcgcggccgagcaccgcaagtc

SEQ ID NO: 691168 - DNA, 120 bp, Artificial Sequence
  ENSG00000188290_2 (sequence is synthesized)
cgcaagtcctccaagccggtcatggagaagcggcgccgagcgcgtattaacgagagcctcgctcagctcaaaaccctcatcctggacgccctcagaaaagagagctcccgccactcgaag

SEQ ID NO: 691169 - DNA, 120 bp, Artificial Sequence
  ENSG00000188290_3 (sequence is synthesized)
gcaggtgacggccgcgctcagcgccgaccccgccgttctgggcaagtaccgcgccggcttccacgagtgtctggcggaggtgaaccgcttcctggccggctgcgagggcgtcccggccga

SEQ ID NO: 691170 - DNA, 80 bp, Artificial Sequence
  ENSG00000188290_4 (sequence is synthesized)
cgtgcgctcccgcctgctgggccacctggcagcctgcctgcgccagctgggaccctcccgccgcccggcctcgctgtccc

SEQ ID NO: 691171 - DNA, 80 bp, Artificial Sequence
  ENSG00000188290_5 (sequence is synthesized)
gggccgcccgctgctgccatcgctcggcggccccttccctctgctcgcgccgccgctgctgccgggtctgacccgggcgc

SEQ ID NO: 691172 - DNA, 120 bp, Artificial Sequence
  ENSG00000188290_6 (sequence is synthesized)
gccctggaggccgtggctgcgctgaggctgtggccctgagactgcatcggaggcggcgccccgttctagggccgtggcctttgccgagactgtagcagagaaaacgtatttattattcca

SEQ ID NO: 691173 - DNA, 120 bp, Artificial Sequence
  ENSG00000188290_7 (sequence is synthesized)
ggcgcaccatggccgcagacacgccggggaaaccgagcgcctcgccgatggcaggagcgccggccagcgccagccggaccccagacaagccccggagcgcggccgagcaccgcaagagct

SEQ ID NO: 691174 - DNA, 120 bp, Artificial Sequence
  ENSG00000188293_0 (sequence is synthesized)
cccctcctcactccactgcaaccacccagagccatggctccccgaggctgcatcgtagctgtctttgccattttctgcatctccaggctcctctgctcacacggagccccagtggccccc

SEQ ID NO: 691175 - DNA, 120 bp, Artificial Sequence
  ENSG00000188293_1 (sequence is synthesized)
atgactccttacctgatgctgtgccagccacacaagagatgtggggacaagttctacgaccccctgcagcactgttgctatgatgatgccgtcgtgcccttggccaggacccagacgtgt

SEQ ID NO: 691176 - DNA, 120 bp, Artificial Sequence
  ENSG00000188293_2 (sequence is synthesized)
ggaaactgcaccttcagagtctgctttgagcagtgctgcccctggaccttcatggtgaagctgataaaccagaactgcgactcagcccggacctcggatgacaggctttgtcgcagtgtc

SEQ ID NO: 691177 - DNA, 120 bp, Artificial Sequence
  ENSG00000188293_3 (sequence is synthesized)
agaaagaggctggtgttacctgagatctgggatgctgagtggctgtttgggggccagagaaacacacactcaactgcccacttcattctgtgacctgtctgaggcccaccctgcagctgc

SEQ ID NO: 691178 - DNA, 120 bp, Artificial Sequence
  ENSG00000188293_4 (sequence is synthesized)
cctgaggaggcccacaggtccccttctagaattctggacagcatgagatgcgtgtgctgatgggggcccagggactctgaaccctcctgatgacccctatggccaacatcaacccggcac

SEQ ID NO: 691179 - DNA, 120 bp, Artificial Sequence
  ENSG00000188293_5 (sequence is synthesized)
caccccaaggctggctggggaacccttcacccttctgtgagattttccatcatctcaagttctcttctatccaggagcaaagcacaggatcataataaatttatgtactttataaatgaa

SEQ ID NO: 691180 - DNA, 120 bp, Artificial Sequence
  ENSG00000188295_0 (sequence is synthesized)
gcctggcggttgctttgtctctccttcgccggagccggctcttcctgttagtctccgctgctagttcttggctctgggaggcccaggtggctctgcagcagcctctgccaccctgtgacc

SEQ ID NO: 691181 - DNA, 120 bp, Artificial Sequence
  ENSG00000188295_1 (sequence is synthesized)
tgcgagtattgggacatccctagctgacgccaggacacccgggaagccgaggaatggtgagtggactgcgcctggcttcccgaagtggagaagagggctggttgaaacctgctgtggcgc

SEQ ID NO: 691182 - DNA, 120 bp, Artificial Sequence
  ENSG00000188295_2 (sequence is synthesized)
gactcgggcctccacgccatcggctccggaacctgcggaccgagtcgccgtggcgtagccggggctcagtcctcttctgttcagggccgggccgggcggggcgggcagcggaacccctgc

SEQ ID NO: 691183 - DNA, 120 bp, Artificial Sequence
  ENSG00000188295_3 (sequence is synthesized)
atcctgtctgtacctgcgggcgccacttccgccggccggagccctgtcgggaacccctcgcctcccctatccaggactcggtggcttttgaggatgtggctgtgaactttacccaggagg

SEQ ID NO: 691184 - DNA, 120 bp, Artificial Sequence
  ENSG00000188295_4 (sequence is synthesized)
aatgggctttgctagattcttctcagaagaatctctacagagaagtgatgcaggaaacctgcaggaacctggcttctgtaggaagccaatggaaagaccagaatattgaagatcacttcg

SEQ ID NO: 691185 - DNA, 120 bp, Artificial Sequence
  ENSG00000188295_5 (sequence is synthesized)
aaaaacctgggaaagatataagaaatcatatcgtacagagactgtgtgaaagtaaagaagatggtcagtatggagaagttgtcagccaaattccaaatcttgatctgaacgagaacattt

SEQ ID NO: 691186 - DNA, 120 bp, Artificial Sequence
  ENSG00000188295_6 (sequence is synthesized)
ctactggattaaaaccatgtgaatgcagtatttgtggaaaagtctttgtacgtcattccctccttaataggcatatcctagctcactcaggatacaaaccatatggagagaagcaatata

SEQ ID NO: 691187 - DNA, 120 bp, Artificial Sequence
  ENSG00000188295_7 (sequence is synthesized)
aatgtgaacagtgtgggaaattcttcgtttctgttccaggtgttagaagacacatgataatgcacagtggaaatccagcttataaatgtacgatatgtgggaaagctttttattttctca

SEQ ID NO: 691188 - DNA, 120 bp, Artificial Sequence
  ENSG00000188295_8 (sequence is synthesized)
aggagaaaaaccctataaatgtaaacaatgtggtaaagcattcactgtttccggttcttgtctaatacatgaacgaactcacactggagagaaaccctacgaatgtaaggaatgtgggaa

SEQ ID NO: 691189 - DNA, 120 bp, Artificial Sequence
  ENSG00000188295_9 (sequence is synthesized)
aacattcagattttcttgttcttttaagacgcatgaaaggactcacactggagaaagaccctataaatgtaccaaatgtgataaagccttcagctgttccacttcccttcgttaccatgg

SEQ ID NO: 691190 - DNA, 120 bp, Artificial Sequence
  ENSG00000188295_10 (sequence is synthesized)
aagcattcatactggagagagaccctatgagtgtaaacaatgtggcaaagcctttagtcgtttgagttccctttgtaaccatagaagtactcataccggagagaaaccctatgaatgtaa

SEQ ID NO: 691191 - DNA, 120 bp, Artificial Sequence
  ENSG00000188295_11 (sequence is synthesized)
acaatgtgatcaagccttcagtcgcctcagttcccttcacctccacgaaagaattcatactggagaaaaaccctatgaatgtaagaaatgcggtaaagcctacactcgttccagtcacct

SEQ ID NO: 691192 - DNA, 88 bp, Artificial Sequence
  ENSG00000188295_12 (sequence is synthesized)
gtaagaaatgcggtaaagcctacactcgttccagtcaccttactcgccatgaaagaagtcatgatatagaggctgggtgtagtgactc

SEQ ID NO: 691193 - DNA, 86 bp, Artificial Sequence
  ENSG00000188295_13 (sequence is synthesized)
gcgtgtggattgcttgagcccaggagttcataaccagcctggattaaaacaatgtgaaaaaaaaataaaataatgccgggcacggt

SEQ ID NO: 691194 - DNA, 120 bp, Artificial Sequence
  ENSG00000188305_0 (sequence is synthesized)
agacccctcctgcgaggccaggggctgtggccattgggagtttgtccccacggacccctcctcccccagagggcacgccagtcttgaagcaacatgagcagcccggagccccccacagag

SEQ ID NO: 691195 - DNA, 120 bp, Artificial Sequence
  ENSG00000188305_1 (sequence is synthesized)
ccccccgagcccgacaaccccacctggtcgactcagcccacgtatagcaaccttggtcagatccgtgcccacctgctgccctccaaggcctgccgcctccggacccctgggtccctctcc

SEQ ID NO: 691196 - DNA, 120 bp, Artificial Sequence
  ENSG00000188305_2 (sequence is synthesized)
accaacccagagcccctgcccccacccctgcccaagaagatcctaacccggacccagtcactgcccacccgcaggaccctccatcccagctccatccaagtacagccgcctcggagaccc

SEQ ID NO: 691197 - DNA, 120 bp, Artificial Sequence
  ENSG00000188305_3 (sequence is synthesized)
tttctggggtcccacagtgtggacaagagccaggctgcagtgggaccagcctgtctccctgcagagctgacctttggcccggctgacgccccactgggcctctccctccgcgatctgcac

SEQ ID NO: 691198 - DNA, 120 bp, Artificial Sequence
  ENSG00000188305_4 (sequence is synthesized)
agcccggaggctgtgcacactgcactggctgcgcggcagctgcagggcctccgtaccatctatgcccggctccgtgcccggctcatggggggccaccccgggccctgccaccccggccac

SEQ ID NO: 691199 - DNA, 120 bp, Artificial Sequence
  ENSG00000188305_5 (sequence is synthesized)
agcttccgcctcctagacagctcaccctgcgcagagagcggggacgccctgtattaccgcgtggtgcgcgcgcacgaggacgcctggcacatcctggtcgccaaggtgcccaagcccggg

SEQ ID NO: 691200 - DNA, 120 bp, Artificial Sequence
  ENSG00000188305_6 (sequence is synthesized)
gcggacgtgccccacccgtggggcctggagctgcaggcctccctgtctccacacttcaatctgcaggggctgtgtggcctggtgcctgaaggcacactgcccggggcgccctggagaggc

SEQ ID NO: 691201 - DNA, 120 bp, Artificial Sequence
  ENSG00000188305_7 (sequence is synthesized)
gcagtggcgctggcagccgaggttccagagcgcacggtggcgcagtggctggcggaggcctgcacgcagccgccggaggagttcgtgtgggctgtggccctgctgctgctgcagctgagc

SEQ ID NO: 691202 - DNA, 120 bp, Artificial Sequence
  ENSG00000188305_8 (sequence is synthesized)
gcggccctgaagttcctggaggcgtggggcgcggccctagtcgagttgcggccggagaacttgctgctggtggcacctcggggctgtgcgacgacggggcccccacgcctgctcctcact

SEQ ID NO: 691203 - DNA, 120 bp, Artificial Sequence
  ENSG00000188305_9 (sequence is synthesized)
gactttggccgcgtctgtctgcagccccctggacccccgggatccccgggcccccacgcgccgcagctgggcagcctcctccgagcgctgctcagccttgctgcgccctcgaccacgcct

SEQ ID NO: 691204 - DNA, 80 bp, Artificial Sequence
  ENSG00000188305_10 (sequence is synthesized)
ctgctctgggggcccgggcctgagctgcgcggccgcggagcaccgcttggtccctggctccgagcgctcgggccctggct

SEQ ID NO: 691205 - DNA, 120 bp, Artificial Sequence
  ENSG00000188305_11 (sequence is synthesized)
gcgggtgcgccgcgggctgctggtcctgcgcctagcagagcgggccgcaggtggggaagctcccagcctcgaggactggctgtgttgcgaatacctggccgaggccaccgagtcctcgat

SEQ ID NO: 691206 - DNA, 120 bp, Artificial Sequence
  ENSG00000188305_12 (sequence is synthesized)
gggccaggccctggcgctgctgtgggactgaccccaacccagggcgaacacacctggtccaggcctgcccaggaggcagggctggggctgaggtcagcgtctccatgatagccaagacac

SEQ ID NO: 691207 - DNA, 120 bp, Artificial Sequence
  ENSG00000188305_13 (sequence is synthesized)
cctcttcctgcagagtccaggagcgcagcagagagagcaatgccccactccagagcctcccctcccgtgctggggatgtgggtcaagggcttcccaggaatgcagctgcccctccagggc

SEQ ID NO: 691208 - DNA, 120 bp, Artificial Sequence
  ENSG00000188305_14 (sequence is synthesized)
tgggggctggccagcgcctcctgtgttgggcagcagctctctgaagccagggcccccacgccacttccaggtgtggacaaccccgctgatcaatgtctctctgtgttctgccttccccag

SEQ ID NO: 691209 - DNA, 120 bp, Artificial Sequence
  ENSG00000188305_15 (sequence is synthesized)
cagccagggcgctcttccgcgtgggttctgtcattgtctccatgagaggccaatgccgggaccagaggcattcctggctctggagcacccccttgtgctgaagatggccagtgattttgg

SEQ ID NO: 691210 - DNA, 120 bp, Artificial Sequence
  ENSG00000188305_16 (sequence is synthesized)
gcatgtgaatgcccctgtccctggtggagaattgcttggtggtgtcacgggaagggaaggctccctgggaccttagacacccagctcatctcagcggggtctggactcaccttccctaaa

SEQ ID NO: 691211 - DNA, 120 bp, Artificial Sequence
  ENSG00000188305_17 (sequence is synthesized)
acagtccccgcggttccctgccacctcccctcaatccctctgcgcccaccctgcctccctccctgttcctccgtgacacaccaacttctttcgcgcccccaagcatttgtgtaggctgtt

SEQ ID NO: 691212 - DNA, 78 bp, Artificial Sequence
  ENSG00000188305_18 (sequence is synthesized)
ccaacttctttcgcgcccccaagcatttgtgtaggctgttccctctgccatactgttccagttctctcggcttactgc

SEQ ID NO: 691213 - DNA, 120 bp, Artificial Sequence
  ENSG00000188306_0 (sequence is synthesized)
atgtcaaaagacataaaatcagtagaacattcacctaaaattcatcagagaaatgatccacagcacgtcaatgatagaacatttttcattgatgcctctaatcagagcttgactgccatt

SEQ ID NO: 691214 - DNA, 120 bp, Artificial Sequence
  ENSG00000188306_1 (sequence is synthesized)
cctttggagatcttcacattcacagaattagaagaagtgcatttggagaataaccagattgaagaaattccccaggagattcagcgtttaaagaacatcagggtcctctacctggataag

SEQ ID NO: 691215 - DNA, 120 bp, Artificial Sequence
  ENSG00000188306_2 (sequence is synthesized)
aacaacctgaggagcctgtgcccggcgctggggctgctgagcagcctggagagcctggacctgagctacaaccccatcttctcctcctcccttgtcgttgtcagcttcctccacgccctg

SEQ ID NO: 691216 - DNA, 120 bp, Artificial Sequence
  ENSG00000188306_3 (sequence is synthesized)
cgcgagctccggctctaccagaccgacctgaaggaaattcccgtcgtcatctttaaaaacctccaccatctcgagctgctcggactgaccggaaaccacctgaaatgtctgcccaaggaa

SEQ ID NO: 691217 - DNA, 120 bp, Artificial Sequence
  ENSG00000188306_4 (sequence is synthesized)
atagtgaaccagaccaagctgagggagatctacctgaagcgaaaccagtttgaagttttcccccaggagctctgtgttctctacaccctggaaatcattgacctggacgagaacaaaata

SEQ ID NO: 691218 - DNA, 120 bp, Artificial Sequence
  ENSG00000188306_5 (sequence is synthesized)
ggtgccatcccagaagagatcggacacctgacggggctgcagaagttctatatggcttctaacaaccttcccgttctgcccgcgtccttgtgccagtgtagccaactgtcggtgctcgat

SEQ ID NO: 691219 - DNA, 120 bp, Artificial Sequence
  ENSG00000188306_6 (sequence is synthesized)
ttatcccacaacctcctccactccatcccgaagagcttcgccgagctcaggaagatgacggaaatcgggctgagcgggaaccgcctggagaaggtgccacgcctcatttgcaggtggacc

SEQ ID NO: 691220 - DNA, 120 bp, Artificial Sequence
  ENSG00000188306_7 (sequence is synthesized)
accggcctgcacaggctgcggggctccttcaggtgcctggtcaacttgcgcttcctggacctaagccagaaccatctgcaccactgcccgctgcagatctgtgcactgaagaaccttgaa

SEQ ID NO: 691221 - DNA, 120 bp, Artificial Sequence
  ENSG00000188306_8 (sequence is synthesized)
gtcctgggactggatgacaataaaataggacagttaccttcagaattgggctcactttcaaaactgaagatacttggactaacaggaaatgagttcctttcctttccggaggaagtcctt

SEQ ID NO: 691222 - DNA, 120 bp, Artificial Sequence
  ENSG00000188306_9 (sequence is synthesized)
tctttagcgtctttagagaaattatacattgggcaagaccagggattcaaacttacctatgtgccagaacacattaggaaactgcagagtctcaaagagctatatatagagaacaatcat

SEQ ID NO: 691223 - DNA, 120 bp, Artificial Sequence
  ENSG00000188306_10 (sequence is synthesized)
ctggagtacctgcccgtatccttggggtcaatgcctaacctagaagttcttgattgccggcacaatttgcttaagcaacttccagatgccatttgccaagcacaagctttgaaagaatta

SEQ ID NO: 691224 - DNA, 120 bp, Artificial Sequence
  ENSG00000188306_11 (sequence is synthesized)
cggctggaggacaacttgctcacccatcttccagagaatttggattccctagtgaatcttaaggttctgacactgatggacaatcccatggaagaacccccaaaagaagtgtgtgctgaa

SEQ ID NO: 691225 - DNA, 120 bp, Artificial Sequence
  ENSG00000188306_12 (sequence is synthesized)
ggcaatgaggccatatggaaatacctcaaggaaaacagaaacaggaatataatggcaacaaagattcaggcatggtggcgtggaacaatggtacagagaggatttgggaaattcggtgaa

SEQ ID NO: 691226 - DNA, 120 bp, Artificial Sequence
  ENSG00000188306_13 (sequence is synthesized)
ctactaaaaccacaaaagaaaggaaagacctctccaaaagataagaaaggaaagaaggatgtaaaaggaaaaccaggaaagggaaaaaagaaataatcctgtaaattgataaattggggt

SEQ ID NO: 691227 - DNA, 120 bp, Artificial Sequence
  ENSG00000188306_14 (sequence is synthesized)
aatggaccttgatagattaagaagacaaaatatctaggaattagatgcctactacattaaaattattcataaaattacacttatgtgtaaaaataaatgattcttacttttactgaaata

SEQ ID NO: 691228 - DNA, 120 bp, Artificial Sequence
  ENSG00000188312_0 (sequence is synthesized)
ggagtgacagctgcgctgccggcccggctgcggtcagcaacgcgccatggacgcagagctggcagaggtgcgcgccttgcaagctgagatcgcggccctgcggcgagcgtgtgaggaccc

SEQ ID NO: 691229 - DNA, 120 bp, Artificial Sequence
  ENSG00000188312_1 (sequence is synthesized)
accggcgccctgggaagagaagtcccgagtccaaaaatcttttcaagccatacaccaattcaatttggaaggatggaagtcttcaaaagatctgaaaaatcagcttggacatttagaatc

SEQ ID NO: 691230 - DNA, 120 bp, Artificial Sequence
  ENSG00000188312_2 (sequence is synthesized)
agaactttcatttctaagtacgcttactggcatcaatataagaaatcactccaagcagacagaagacctaacaagcactgagatgacagaaaagagtattagaaaagttctacagagaca

SEQ ID NO: 691231 - DNA, 120 bp, Artificial Sequence
  ENSG00000188312_3 (sequence is synthesized)
cagattatcaggaaattgccacatggttacatttcaacttgaatttcagattctggaaattcagaataaggagagattatcttctgctgttactgacctcaacataataatggagcccac

SEQ ID NO: 691232 - DNA, 120 bp, Artificial Sequence
  ENSG00000188312_4 (sequence is synthesized)
agaatgctcagaattaagtgaatttgtgtctagagcagaagagagaaaagatctgttcatgtttttccgaagcctgcatttttttgtggagtggtttgaatatcgtaagcgcacgtttaa

SEQ ID NO: 691233 - DNA, 120 bp, Artificial Sequence
  ENSG00000188312_5 (sequence is synthesized)
acatctcaaggaaaagtacccagatgccgtgtacctctcggaggggccctcctcctgctccatggggatccgcagcgccagccggccagggtttgaattagtcattgtttggaggataca

SEQ ID NO: 691234 - DNA, 120 bp, Artificial Sequence
  ENSG00000188312_6 (sequence is synthesized)
aatagatgaagatgggaaggtttttccaaagctggatcttctcaccaaagtcccacagcgagccctggagctggacaagaacagagccatagaaactgctcctctcagcttccgaaccct

SEQ ID NO: 691235 - DNA, 120 bp, Artificial Sequence
  ENSG00000188312_7 (sequence is synthesized)
ggtaggactgcttggaatcgaagctgctctggaaagcctgataaaatcgctttgtgcagaggagaacaactagttccaaaacagtgaacgtggaggatgaagatgctgcgtggaggaaca

SEQ ID NO: 691236 - DNA, 120 bp, Artificial Sequence
  ENSG00000188312_8 (sequence is synthesized)
tgcaattttattcaatataaacatttgctattttctgcttagaaaccacaccctgaagacgtgctgtctatgcagttatggcacattatatggaaactctcatgacatgaaaaataaata

SEQ ID NO: 691237 - DNA, 120 bp, Artificial Sequence
  ENSG00000188312_9 (sequence is synthesized)
caactagttaagtataaaatgccaaataaaagtgacacgtacaatgtggtttataaaaataagcttaacatctgagaaaatgtaccaagtggttgtgtgtcctcagatgtgtggggagga

SEQ ID NO: 691238 - DNA, 120 bp, Artificial Sequence
  ENSG00000188312_10 (sequence is synthesized)
tccatcccccacccactgcagcctcacaccgagtccaccttggacatggtggccacattactcagctgggagaagccacccttatcctggttcctgcctcctgggggctctggagacgga

SEQ ID NO: 691239 - DNA, 120 bp, Artificial Sequence
  ENSG00000188312_11 (sequence is synthesized)
tgcctatggcgcctcatctttaaactgtccttagtagcccaggggagccacaccctcactccctgcctccccccggtccgcatggtggcaccgtgaggcagtctcagcaagtcctcatgc

SEQ ID NO: 691240 - DNA, 120 bp, Artificial Sequence
  ENSG00000188312_12 (sequence is synthesized)
tgttcttggtcttccacaagaaagtgaagctgtcagcttaataacaagaatggcctaagacagcaaagacagcactgttcctgggctgggacgcaaggaatgaggtcctttatgaaagaa

SEQ ID NO: 691241 - DNA, 120 bp, Artificial Sequence
  ENSG00000188312_13 (sequence is synthesized)
agacccccctgcatagcctaagtgctatatcgatcgtcccggatgtgccttaagaaccgtgacctcatcagtcgcccatttagcattgttaagatctgtgaacgcgtgttgtctcaaacc

SEQ ID NO: 691242 - DNA, 120 bp, Artificial Sequence
  ENSG00000188312_14 (sequence is synthesized)
agtcagggccgtcatgactacgcagcagcagcagtttccaagacgggccagaaacgcatccacagcagtggcacccgcggctcaggggctcctcacagcccgggctggtgggagccaaga

SEQ ID NO: 691243 - DNA, 120 bp, Artificial Sequence
  ENSG00000188312_15 (sequence is synthesized)
ccagacagagtgggggtctccatctgttttctcttctccctcaaatacaggctgttttcatcgtgtctagtccagccctgtctgggccctgtgctaggcaataactcttgcagccctgaa

SEQ ID NO: 691244 - DNA, 120 bp, Artificial Sequence
  ENSG00000188312_16 (sequence is synthesized)
ggacctagggagcccagcccaccttcccacggactggggttccctcacatgtgcacttgaacccaggacccagcatcctccacacaccgtgacaatgggcaaaatcatcccaaaccaggc

SEQ ID NO: 691245 - DNA, 120 bp, Artificial Sequence
  ENSG00000188312_17 (sequence is synthesized)
tgccccagccccagcccagcaacagtgaactcccttgggtcaagacagtactcaacggccactacctccacgcttcccagagcctgcggcttgtccgtgagctccgtgcacttcaccaaa

SEQ ID NO: 691246 - DNA, 120 bp, Artificial Sequence
  ENSG00000188312_18 (sequence is synthesized)
gcccccatcccagcacacaggacccgtgtgtatgagacggtgtcattggaagtgagaagaaaacagtaaaagtgtccagttagataagtatctttttgcacctctgagagtagaattaga

SEQ ID NO: 691247 - DNA, 120 bp, Artificial Sequence
  ENSG00000188312_19 (sequence is synthesized)
agtaaatatgacagaattgaacaataaattctagaagagttgccttgattcaaacaagtataattctcaagttatcacaaaatttcccacaaaaatttacaatcagcaaaatagtttcct

SEQ ID NO: 691248 - DNA, 120 bp, Artificial Sequence
  ENSG00000188312_20 (sequence is synthesized)
tatttctcatgtatcattttcatataattccatggtttcactaatattatatgttacaataagcctccattagtccctcaaaacgatgatataaataagtctgtacaacctagcatagaa

SEQ ID NO: 691249 - DNA, 120 bp, Artificial Sequence
  ENSG00000188312_21 (sequence is synthesized)
taaaaaactgaaaccaagattcccaacgtttttcatagcagccgggcacactttggtgaccccaacgagaaccctctcggcagcagccaggagctgttcaccttccagaagcagggcctg

SEQ ID NO: 691250 - DNA, 120 bp, Artificial Sequence
  ENSG00000188312_22 (sequence is synthesized)
tggcagcctaacagggagaggccacggggcccaaaaacgcaacacgtctcaaggcaaacccgagggaggaacttggtctgggaggaagagagaactcgctcctcaaccaccccagacact

SEQ ID NO: 691251 - DNA, 120 bp, Artificial Sequence
  ENSG00000188312_23 (sequence is synthesized)
ggagtgtcaggaaagcactgagctgttggggcacactgcccagcccggccacagcagctcagccagtcacagctccacctccaacttctacagcagcaatttttagtgggaaagaacagc

SEQ ID NO: 691252 - DNA, 120 bp, Artificial Sequence
  ENSG00000188312_24 (sequence is synthesized)
tcatctccccctcatgtgaaagattaaattgtaaagcaaaaaaaaaaaggtcaatgctcgcatgagtggtgtccatcctgacctgagccttgcgctccctgctgccctgtgtggaactgt

SEQ ID NO: 691253 - DNA, 120 bp, Artificial Sequence
  ENSG00000188312_25 (sequence is synthesized)
gggcttcagcacctccacagggaccctgagtctacactgctcagaatcggcatctgcgcgaccacgaggtcacgctgtgcagcagggaaccacctaaaaacctgtgttgatatgtggctt

SEQ ID NO: 691254 - DNA, 120 bp, Artificial Sequence
  ENSG00000188312_26 (sequence is synthesized)
gcactgaaaaagtgaccatgtaactcagctgggggaagttccagtagtatccatgttttcttaaaagtccaaactgtaaaatgtatgtgacaattcaagttttctatgttaggagtctgg

SEQ ID NO: 691255 - DNA, 120 bp, Artificial Sequence
  ENSG00000188312_27 (sequence is synthesized)
tggtagcagatccaaaccttgggtcttagaataaggcttttcgcattagagaatcagacatgagccctggttgggaaagaagaactatccagaacgtcttcccagggcttaacggacact

SEQ ID NO: 691256 - DNA, 120 bp, Artificial Sequence
  ENSG00000188312_28 (sequence is synthesized)
tccattttaagagtgtgagcagcttcctgggacacagcactcacttcctacattccttgtccaggaagttgtttctagtgctcttcaattccatgtctccaagaggcaatcccacctcaa

SEQ ID NO: 691257 - DNA, 120 bp, Artificial Sequence
  ENSG00000188312_29 (sequence is synthesized)
aaggggttaaaagcaaaaacattcacaaccaaaggtcacccaacacaacagaaaatatctctatcattcagccttcacattatgttcaagtttcaaagacactgcagggaaagagttaga

SEQ ID NO: 691258 - DNA, 120 bp, Artificial Sequence
  ENSG00000188312_30 (sequence is synthesized)
ccttgtggagaactaatgtgcaatcttcgctttccttgaaccgagtcgacatcacggcgttgtctttggcacgtacagtctttgaataatagttgacgatcttgccgtccagtttatact

SEQ ID NO: 691259 - DNA, 120 bp, Artificial Sequence
  ENSG00000188312_31 (sequence is synthesized)
gatggggaatgctctcgtagggcttgaggtcaaggtccagcacagacacggaaaaggcaaacctggacctcgatgaagggacgacaggcctttgatcagagctgcaagtaaaaagtacca

SEQ ID NO: 691260 - DNA, 120 bp, Artificial Sequence
  ENSG00000188312_32 (sequence is synthesized)
tttcaggatacacaagccccccattcatttccctccctcccgttctctctccctttcttctttcaactagtatgtttttatgttttttctttgacttctgcaaagttagataaatcaatc

SEQ ID NO: 691261 - DNA, 120 bp, Artificial Sequence
  ENSG00000188312_33 (sequence is synthesized)
tcttttaaaagagaagtgaatggcctcacaccccagctcacaaagagcactcgttctgtgcacctgtgatctgtgcgtgtgacagctgtctgtgccggctgtgtgcaccagcgtgcaaag

SEQ ID NO: 691262 - DNA, 120 bp, Artificial Sequence
  ENSG00000188312_34 (sequence is synthesized)
gtgcaccccaccataccaggcgagagagggttaaaggactgaaagatggaaaagtaattatgtggaacatgtgagcgatgttcccccagcccagtggtataaacgaacgctgaaaaatca

SEQ ID NO: 691263 - DNA, 120 bp, Artificial Sequence
  ENSG00000188312_35 (sequence is synthesized)
ctttatcatgagccaagtattacaaaacccaacaaaaagtaaaaagtagatctggccattccagcgccaaatggatggaatgtcgacaagccttcttctttgcctctcctgtctgctgag

SEQ ID NO: 691264 - DNA, 120 bp, Artificial Sequence
  ENSG00000188312_36 (sequence is synthesized)
aaacgcaagctcctttggttcacatttgaagagatctggtttctcattttattctcaaattttatcttcagtcctttgtattttgcttctcagggcttagttttgtggttttaacctcag

SEQ ID NO: 691265 - DNA, 120 bp, Artificial Sequence
  ENSG00000188312_37 (sequence is synthesized)
aagtcgtgtgcttataacaagatgtgattaattatttgccctgaaaaacacatttaggattactccgagtcctgagctctgactgctgtgtgtcccgcttttcgtctccgggcactcagc

SEQ ID NO: 691266 - DNA, 120 bp, Artificial Sequence
  ENSG00000188312_38 (sequence is synthesized)
gcacagcactcaagacactggctaaacaagtgacctaagctcagttcagtccaagagaagtatcctgggttctggtgtcccaatgtttactacgctttgagatttagaaatcaacaagcc

SEQ ID NO: 691267 - DNA, 120 bp, Artificial Sequence
  ENSG00000188312_39 (sequence is synthesized)
aaaccccaacttcaaaagctcctgccgaggagaggaaatactgatcagcacgtccctgctctgacgctgctcaccatggccttggcgctcactgctgccctgccccagaatcctgtttgt

SEQ ID NO: 691268 - DNA, 120 bp, Artificial Sequence
  ENSG00000188312_40 (sequence is synthesized)
agaaaaaacaaatccctgactaagctgctggggtaagtaactattctcatctgaagagtaaacagcaaataactcatttacaaattaaggtcatgagtctcgctccagaagctggagtgt

SEQ ID NO: 691269 - DNA, 120 bp, Artificial Sequence
  ENSG00000188312_41 (sequence is synthesized)
gcctgcagctcatcccaaggggccacattttattgggagaacctcagaagcccaaggtactgctcagttctgaggcctgagacccaagctgggtgcacctgggctggaacagtcacatcc

SEQ ID NO: 691270 - DNA, 120 bp, Artificial Sequence
  ENSG00000188312_42 (sequence is synthesized)
ccagcccatgactagggttacgtattttaaaggacaccccaatttctcagaagcagcacctgacaagaccatgggtgtaaagacaggaaggatgttccaggcagctcccggggagggtct

SEQ ID NO: 691271 - DNA, 120 bp, Artificial Sequence
  ENSG00000188312_43 (sequence is synthesized)
gactacctgggtcaaccacaagctagctccatgggaaccaatggcagtgaccagcgggcaccagctcctgacacagaaatgctcttcttccccctcagtaccccggaggccaagactggg

SEQ ID NO: 691272 - DNA, 120 bp, Artificial Sequence
  ENSG00000188312_44 (sequence is synthesized)
caagaggccccagggacacacctgtcccttgtgccacaagtgtgccctctagcagccttggagaatgaggctcaggtggccttctggctgcaggggggcagcccttgcctggaaggccgt

SEQ ID NO: 691273 - DNA, 120 bp, Artificial Sequence
  ENSG00000188312_45 (sequence is synthesized)
tctccaggacactgacccgctgggggttaccgggggaccagcagcctccaagggtgctggggatcggggtggagaagccaaggccgcacactgtgtttcaaatgggaggtcgagaggagc

SEQ ID NO: 691274 - DNA, 120 bp, Artificial Sequence
  ENSG00000188312_46 (sequence is synthesized)
atcagggtttaggccgggaagctgtggcagctctctccacagttccaaattcccaaagggacaaagctctgcagcgacaggaaggcagatccaacttgagacattttcctttatgacagg

SEQ ID NO: 691275 - DNA, 120 bp, Artificial Sequence
  ENSG00000188312_47 (sequence is synthesized)
gcagaaacagtagtgcagagctggagaagcctttattttagggggtgtaagaagtttaaatgtggtcaatctatctgtgagctgcaaattagtctagggatctaaatttagtctcaggtc

SEQ ID NO: 691276 - DNA, 120 bp, Artificial Sequence
  ENSG00000188312_48 (sequence is synthesized)
taccaggtatctcaagacgccaagatgactcatgataaatcccagccttagtttgtccctaggcctctagagcaccacagttactggaacttcacaggtgcggccactgcgcacaccttc

SEQ ID NO: 691277 - DNA, 120 bp, Artificial Sequence
  ENSG00000188312_49 (sequence is synthesized)
ctggaagcaggcccagccccacacgccatgttctcggaggagaagccttctctgagatcctctccttttgttgagaaaggcctggctagagtgctttgtgcaggatggttccagtgccta

SEQ ID NO: 691278 - DNA, 120 bp, Artificial Sequence
  ENSG00000188312_50 (sequence is synthesized)
caccctaggtctgagaagccacatggctcagtgccttcaggacatgccctcccctcccctcctagtgtcgtttctgctgagcagctggtcgtaaggacccgggccttcagctttccccgc

SEQ ID NO: 691279 - DNA, 120 bp, Artificial Sequence
  ENSG00000188312_51 (sequence is synthesized)
atgctggctttccaatttgacatcactgaccaggcactaagagattcccaggtgctagacgaggtgagtaacatgtctgtccttcagcggcctttcacagcccacctaagggcaccctgc

SEQ ID NO: 691280 - DNA, 120 bp, Artificial Sequence
  ENSG00000188312_52 (sequence is synthesized)
atccaagcacatttccattgcccagctgcatccttggtcggggggctgctgaacagtggtatcttcgtgggttttctctcatcgaacaccaccagcttaatccagttaaggaattcctca

SEQ ID NO: 691281 - DNA, 120 bp, Artificial Sequence
  ENSG00000188312_53 (sequence is synthesized)
taacttagccctgtaggtatttccttaggggataacaggagttttcaactaaatagaacaaccttttttctacttcagttagccctataatgttcctcagtatttcatattggaaagtaa

SEQ ID NO: 691282 - DNA, 120 bp, Artificial Sequence
  ENSG00000188312_54 (sequence is synthesized)
acaattctgtgcctgccagggaacaggaatcctgggaactgtttagttcaaaagcaccgggaaagtgagtggctggcagccagcaaccaaggtcatcttgacccaggaacacatgttaga

SEQ ID NO: 691283 - DNA, 120 bp, Artificial Sequence
  ENSG00000188312_55 (sequence is synthesized)
agaatgtggaacattccgcaaatactgggtgcagggtttagcacccctgaagatcggtgatggagatgctgtctaacgactatgagattatcagtttcatcccgaattcccagaaacaga

SEQ ID NO: 691284 - DNA, 120 bp, Artificial Sequence
  ENSG00000188312_56 (sequence is synthesized)
ggggactggacaaaactagtgacattagggagaggggcggcacataggctggttattcagaagaggaagcagaatgaatgcgcgcctcacaggctttcaaatgactgtggtggtaaaaag

SEQ ID NO: 691285 - DNA, 120 bp, Artificial Sequence
  ENSG00000188312_57 (sequence is synthesized)
gcaggtgcgccatgctgccactgtgggagaccgaggaacaagggccacaggtacccacacatctcaggggctggctttctttgagggaatgcaatgggcagctcactgtccacattgttt

SEQ ID NO: 691286 - DNA, 120 bp, Artificial Sequence
  ENSG00000188312_58 (sequence is synthesized)
ctgagctcttgggagtattttcttagaaaacagtaactttcaatgtactaacaatccttttaagttattctccataaatctgtcttttgactgaattacaagcttctagagggcgagagt

SEQ ID NO: 691287 - DNA, 120 bp, Artificial Sequence
  ENSG00000188312_59 (sequence is synthesized)
tagtaagccccatgatgtcacataggccaaggaagttatgtcactccgccatggagtctctaaatatggggaaaccaactatcctattaacaattcaccaactgtccataaaaccccgtt

SEQ ID NO: 691288 - DNA, 120 bp, Artificial Sequence
  ENSG00000188312_60 (sequence is synthesized)
agacccaggctgcatgccttgcagtgggggcctcacctggcatcctgcagacagggagacagtgcaatcatgatggagcagtccttggcagtcatggcgacgcggtactgctgcacctgc

SEQ ID NO: 691289 - DNA, 120 bp, Artificial Sequence
  ENSG00000188312_61 (sequence is synthesized)
aggggcgggaaagatcagctccaggtcacacaggaagcctctgcccccccacacaaccttccttcccagtagccaagtgtgggaactgcttcctgcctcagaacctgagggtgggattag

SEQ ID NO: 691290 - DNA, 120 bp, Artificial Sequence
  ENSG00000188312_62 (sequence is synthesized)
gagcgagggccacggtgagcacgggcgtcaggaggtcgccctgtgagagcacctgggccagccctcagtgccacggggctgctcagaggccagcaccgccccctgacctctcacggcaag

SEQ ID NO: 691291 - DNA, 120 bp, Artificial Sequence
  ENSG00000188312_63 (sequence is synthesized)
cagtgtgggaccccgactccagaccctgagacggatgatctgtcttcagcaaggtcaccacagtcggcctttggaaggaaaagcagtaagccacctgagccccgcatgttggccacactc

SEQ ID NO: 691292 - DNA, 120 bp, Artificial Sequence
  ENSG00000188312_64 (sequence is synthesized)
agagtatcaagtgagtatcactcgacacctgcaaggagagcgcagggggtgttcagcaaggcatcgcttagaacgacattccctccggaacatcatacagccaccagagacaacggcaga

SEQ ID NO: 691293 - DNA, 120 bp, Artificial Sequence
  ENSG00000188312_65 (sequence is synthesized)
cggccacccttctacaggctgtgcatgtgttaacttgctccaccctcacagcagcccaacagggcagcacggccggcgtcccactttacagacaagcaacagacacagacatcacttgtc

SEQ ID NO: 691294 - DNA, 120 bp, Artificial Sequence
  ENSG00000188312_66 (sequence is synthesized)
tgtcatgccctgcttgtcaatggcaaggcagggactcaaacccggtacgctggctctgacatttacactcttcaacacatgctccaagctatgtgggtctgtccatactgaccagggaca

SEQ ID NO: 691295 - DNA, 120 bp, Artificial Sequence
  ENSG00000188312_67 (sequence is synthesized)
gctcaacacacaccacactgtcagagtcgacatacgtaaagctgtacatgtgcacatgtgtgtgacgcgggcagggagaaaggtgaaggacaggcaccacaatgctcacaactgtctcct

SEQ ID NO: 691296 - DNA, 120 bp, Artificial Sequence
  ENSG00000188312_68 (sequence is synthesized)
ctacagagcagaatgtgaggcactctctcctcttccttctttggactttcatatatggtttgcattgttttagatggcatagctctcgctttcacaaaaataaacagttgtaaaagaaaa

SEQ ID NO: 691297 - DNA, 120 bp, Artificial Sequence
  ENSG00000188312_69 (sequence is synthesized)
gaattttcatagcgcatgggggaaaccagactctcccagaaccgcaagcctagaaatctgtgagattccacttgatttccctgcttttgggaggaggcttttgaccataaaatgccgtct

SEQ ID NO: 691298 - DNA, 120 bp, Artificial Sequence
  ENSG00000188312_70 (sequence is synthesized)
catcatgaagctgactttcaccaaggtaggccctttcccttactgcagtgggagccgcaccaccactgggcacagtgaggataccagggtgggctcctgcccatgcccaggacggtgtgt

SEQ ID NO: 691299 - DNA, 120 bp, Artificial Sequence
  ENSG00000188312_71 (sequence is synthesized)
gggctggacaccactggggtgagtcctgaggacggacaggcgaggggcgtccaggctcggccacagccctcacggagcctcagctcaaagggcttttcaggtcagatgctaaaaccgtga

SEQ ID NO: 691300 - DNA, 120 bp, Artificial Sequence
  ENSG00000188312_72 (sequence is synthesized)
gaaaacagctgctttccagcaaagagcctgacgcatccgcttggggaatcctctgaccagtcctctccagaccgtctgggttgtgacagacaagggcagaccaaggagccatcccagatg

SEQ ID NO: 691301 - DNA, 120 bp, Artificial Sequence
  ENSG00000188312_73 (sequence is synthesized)
gaaagggtgtggggaaacctgtgaaatgagaatacagctgtagggaggttatgtacaatgttcatgatggggaagcagcagtcatgggagcctggaggctgtggagagacctacagtggg

SEQ ID NO: 691302 - DNA, 120 bp, Artificial Sequence
  ENSG00000188312_74 (sequence is synthesized)
gcggacgtgtgtgacagcaagggcaagaggggcggttggcacccatggatgctgcgcaaacactcggaccctgattttcgccagacacctggaacggtgccccgtgcccctcccatggcc

SEQ ID NO: 691303 - DNA, 120 bp, Artificial Sequence
  ENSG00000188312_75 (sequence is synthesized)
tttgctgtctcctgccctggctctcttcctgtccatacaggcccattattcatgcttgcatttgctgtttgtttattaaaattccccagctcttcgttttaaaaatgccattgggatata

SEQ ID NO: 691304 - DNA, 120 bp, Artificial Sequence
  ENSG00000188312_76 (sequence is synthesized)
tttccagtagagtgggtctctttcaactctgggtttccctggttcttcccaagtctgtacaaacaagaaaagttgggtcaagggaggatggaggctcccagctggtctgttctgcaaagg

SEQ ID NO: 691305 - DNA, 120 bp, Artificial Sequence
  ENSG00000188313_0 (sequence is synthesized)
agacccttttccggctgacttctgagaaggttgcgcagcagctgtgcccggcagtctagaggcgcagaagaggaagccatcgcctggccccggctctctggaccttgtctcgctcgggag

SEQ ID NO: 691306 - DNA, 120 bp, Artificial Sequence
  ENSG00000188313_1 (sequence is synthesized)
cggaaacagcggcagccagagaactgttttaatcatggacaaacaaaactcacagatgaatgcttctcacccggaaacaaacttgccagttgggtatcctcctcagtatccaccgacagc

SEQ ID NO: 691307 - DNA, 120 bp, Artificial Sequence
  ENSG00000188313_2 (sequence is synthesized)
attccaaggacctccaggatatagtggctaccctgggccccaggtcagctacccacccccaccagccggccattcaggtcctggcccagctggctttcctgtcccaaatcagccagtgta

SEQ ID NO: 691308 - DNA, 120 bp, Artificial Sequence
  ENSG00000188313_3 (sequence is synthesized)
taatcagccagtatataatcagccagttggagctgcaggggtaccatggatgccagcgccacagcctccattaaactgtccacctggattagaatatttaagtcagatagatcagatact

SEQ ID NO: 691309 - DNA, 120 bp, Artificial Sequence
  ENSG00000188313_4 (sequence is synthesized)
gattcatcagcaaattgaacttctggaagttttaacaggttttgaaactaataacaaatatgaaattaagaacagctttggacagagggtttactttgcagcggaagatactgattgctg

SEQ ID NO: 691310 - DNA, 120 bp, Artificial Sequence
  ENSG00000188313_5 (sequence is synthesized)
tacccgaaattgctgtgggccatctagaccttttaccttgaggattattgataatatgggtcaagaagtcataactctggagagaccactaagatgtagcagctgttgttgtccctgctg

SEQ ID NO: 691311 - DNA, 120 bp, Artificial Sequence
  ENSG00000188313_6 (sequence is synthesized)
ccttcaggagatagaaatccaagctcctcctggtgtaccaataggttatgttattcagacttggcacccatgtctaccaaagtttacaattcaaaatgagaaaagagaggatgtactaaa

SEQ ID NO: 691312 - DNA, 120 bp, Artificial Sequence
  ENSG00000188313_7 (sequence is synthesized)
aataagtggtccatgtgttgtgtgcagctgttgtggagatgttgattttgagattaaatctcttgatgaacagtgtgtggttggcaaaatttccaagcactggactggaattttgagaga

SEQ ID NO: 691313 - DNA, 120 bp, Artificial Sequence
  ENSG00000188313_8 (sequence is synthesized)
aaatgaaagctgtaatgattggtgcctgtttcctcattgacttcatgttttttgaaagcactggcagccaggaacaaaaatcaggagtgtggtagtggattagtgaaagtctcctcagga

SEQ ID NO: 691314 - DNA, 120 bp, Artificial Sequence
  ENSG00000188313_9 (sequence is synthesized)
aatctgaagtctgtatattgattgagactatctaaactcatacctgtatgaattaagctgtaaggcctgtagctctggttgtatacttttgcttttcaaattatagtttatcttctgtat

SEQ ID NO: 691315 - DNA, 120 bp, Artificial Sequence
  ENSG00000188313_10 (sequence is synthesized)
aactgatttataaaggtttttgtacattttttaatactcattgtcaatttgagaaaaaggacatatgagtttttgcatttattaatgaaacttcctttgaaaaactgctttgaattatga

SEQ ID NO: 691316 - DNA, 120 bp, Artificial Sequence
  ENSG00000188313_11 (sequence is synthesized)
tctctgattcattgtccattttactaccaaatattaactaaggccttattaatttttatataaattatatcttgtcctattaaatctagttacaatttatttcatgcataagagctaatg

SEQ ID NO: 691317 - DNA, 120 bp, Artificial Sequence
  ENSG00000188313_12 (sequence is synthesized)
tgcataagagctaatgttattttgcaaatgccatatattcaaaaaagctcaaagataattttctttactattatgttcaaataatattcaatatgcatattatctttaaaaagttaaatg

SEQ ID NO: 691318 - DNA, 120 bp, Artificial Sequence
  ENSG00000188313_13 (sequence is synthesized)
gaaatcatgctacacttaacttctcctagaagctaatctataccataatattttcatattcacaagatattaaattaccaattttcaaattattgttagtaaagaacaaaatgattctct

SEQ ID NO: 691319 - DNA, 120 bp, Artificial Sequence
  ENSG00000188313_14 (sequence is synthesized)
cccaaagaaagacacattttaaatactccttcactctaaaactctggtattataacttttgaaagttaatatttctacatgaaatgtttagctcttacactctatccttcctagaaaatg

SEQ ID NO: 691320 - DNA, 120 bp, Artificial Sequence
  ENSG00000188313_15 (sequence is synthesized)
tagctcttacactctatccttcctagaaaatggtaattgagattactcagatattaattaaatacaatatcatatatatattcacagagtataaacctaaataatgatctattagattca

SEQ ID NO: 691321 - DNA, 120 bp, Artificial Sequence
  ENSG00000188313_16 (sequence is synthesized)
cttcaccctccagtagtctcgtgggtccccgagcgccagcgcgggaaccgggaaaaggaaaccgtgttgtgtacgtaagattcaggaaacgaaaccaggagccgcgggtgttggcgcaaa

SEQ ID NO: 691322 - DNA, 120 bp, Artificial Sequence
  ENSG00000188313_17 (sequence is synthesized)
aaattgttaaatatttcaggaaaactttctgaaatataatttctccgtacaatgaaacagtttttttcatatatctataaatagatacaggagcctccagttatctaatgagggttacat

SEQ ID NO: 691323 - DNA, 120 bp, Artificial Sequence
  ENSG00000188313_18 (sequence is synthesized)
atggtgcataattttaataccatatttgtttcatcttacttcaaatttgaaagtacttttgctataagtttcctaaaagtatttaatacttttttttttcaatttagattaaatctcttg

SEQ ID NO: 691324 - DNA, 120 bp, Artificial Sequence
  ENSG00000188313_19 (sequence is synthesized)
aatttagtgaaacaaggaaactttaccatgactcatagtaattaaattaaaccatctaatataggagtatgaagtacaataagagtgtacattcactcaagtgtgtagacctaactacca

SEQ ID NO: 691325 - DNA, 120 bp, Artificial Sequence
  ENSG00000188313_20 (sequence is synthesized)
aattacaggaaataattggatataccagtgattctgaaattgccttcacattagaaccacctagggactttaaaaactccaaggactagtccatacctcagttcaactaaatcagaaact

SEQ ID NO: 691326 - DNA, 120 bp, Artificial Sequence
  ENSG00000188313_21 (sequence is synthesized)
atgaataattcaccaaagtctgaaatagcaaaactgtattttctgctaacagattactctaattcttctaggtctggttcaattttaaagcaaaatacaaatgccttagaaaattgtatt

SEQ ID NO: 691327 - DNA, 120 bp, Artificial Sequence
  ENSG00000188313_22 (sequence is synthesized)
ttctgttatcttaaatacaatctatgataatggccaatagcaaacatttaattagcactgtttcctgcctttgttgtatgcctgatacatgtattaactcatttaatccttattgaaagt

SEQ ID NO: 691328 - DNA, 120 bp, Artificial Sequence
  ENSG00000188313_23 (sequence is synthesized)
ctgtgatgtataggtgctacatttttcaaaagaagaaactgaggtccagagaggttatatagctcactctggggtgagaacctaaagagtcaagactgtttttttaatcccgaaactttg

SEQ ID NO: 691329 - DNA, 120 bp, Artificial Sequence
  ENSG00000188313_24 (sequence is synthesized)
gtactgagcgaagtgctctttagtctcaatactgaataattgccttataatttggaagaaaatttaaataaagtttattgttgagtttcaataagtggccccaaacaaggggttaatatt

SEQ ID NO: 691330 - DNA, 120 bp, Artificial Sequence
  ENSG00000188313_25 (sequence is synthesized)
ttatgtataatatgactcacctttttattgtaactaataaaactgcatttttatgatgctgcttttgttctttggaagacctaattttataaatgccattaataaaggagtaaaaagtcc

SEQ ID NO: 691331 - DNA, 120 bp, Artificial Sequence
  ENSG00000188313_26 (sequence is synthesized)
gccccggctctctggaccttgtctcgctcgggagcggaaacagcggcagccagagcataaaatacacaagaggatttttatggaatggctccttgttacaaggaccacataaacccattt

SEQ ID NO: 691332 - DNA, 120 bp, Artificial Sequence
  ENSG00000188313_27 (sequence is synthesized)
ggcgcagaagaggaagccatcgcctggccccggctctctggaccttgtctcgctcgggagcggaaacagcggcagccagaggaccacataaacccattttgaattattcaaccattgctg

SEQ ID NO: 691333 - DNA, 120 bp, Artificial Sequence
  ENSG00000188313_28 (sequence is synthesized)
tgtgatcaattaccagggcactttgtaaaatagttcagcaagaatttctgccctgtcattgaacctttcatcgaacctaggcattatgattattacatttacatatattattttgccttt

SEQ ID NO: 691334 - DNA, 120 bp, Artificial Sequence
  ENSG00000188313_29 (sequence is synthesized)
gtgcctgtttcctcattgtaagtctgttcttattaatcttgattatagatgctttctctaggttcattctgaaatgattcagtaaagtgtatatttcaaaatgacattttaaaatttata

SEQ ID NO: 691335 - DNA, 120 bp, Artificial Sequence
  ENSG00000188313_30 (sequence is synthesized)
ctcttcccaaaaggctttagaatgtgttcaccatcatgagctgaccaacaatttctaaattcctactcagaaacacagcaaggggaatgcagtcaagcacaaagggcttaaatgaccaga

SEQ ID NO: 691336 - DNA, 120 bp, Artificial Sequence
  ENSG00000188313_31 (sequence is synthesized)
taaggctgggctggatgaataaagaggaatatcctatgaatgtgactgtgtagttttagagtatcccgattcaactgttatatttgacttgtggccttgtagacagtgtgttaatgtcag

SEQ ID NO: 691337 - DNA, 120 bp, Artificial Sequence
  ENSG00000188313_32 (sequence is synthesized)
gatagatcagatactgattcatcagcaaattgaacttctggaaggtatgtattcattgttttaatcctgtttctataaagagtagaagtttatgcagataaaggcacattgacctccaca

SEQ ID NO: 691338 - DNA, 120 bp, Artificial Sequence
  ENSG00000188313_33 (sequence is synthesized)
tcccgtatcttacaagtatgatgtgctgtatactcaaagcctcaccacctgcttgccccacccatttgcttaaatgtatcaattttttctaagcttaacttttaccaaaactggagttca

SEQ ID NO: 691339 - DNA, 120 bp, Artificial Sequence
  ENSG00000188313_34 (sequence is synthesized)
acagatgaatatttttccttcttagatgttaactaaacatttttaaaggtacaaaatttatgtacaaacataacccaaatgacatggaagttacttgatttgtgacttacctctgtaatg

SEQ ID NO: 691340 - DNA, 120 bp, Artificial Sequence
  ENSG00000188315_0 (sequence is synthesized)
acgcgcatgcgatgaccgttggatgggtcggcgtcactgcgctgcgggtgaggacaaggacgtggctgccgactcgccaaagggggggtgccggtagggccagcggcctgggagccgcgg

SEQ ID NO: 691341 - DNA, 120 bp, Artificial Sequence
  ENSG00000188315_1 (sequence is synthesized)
tggggcgggaggcagcggcggggcgggccaggaagctgtgggaagtggggcggggcgtctttggggcttctggcagatggcgggttcctccgcgagagccgagaaccgcctactccagga

SEQ ID NO: 691342 - DNA, 120 bp, Artificial Sequence
  ENSG00000188315_2 (sequence is synthesized)
ggaaagcccgagggttgtgggtcctgctatagccagggccaagctccaggaaatcgtggccattcaggggtagtttgcagcctcatttgtaacattattgtgttgtcctgtgcatttcca

SEQ ID NO: 691343 - DNA, 120 bp, Artificial Sequence
  ENSG00000188315_3 (sequence is synthesized)
atgcattacataaagacatggtcgcttttaggagaaatgtctgaaaaactaagaagatgcagaaaggaactgactgcagccattgaccgggcctttgaaggagttagttattcccaggag

SEQ ID NO: 691344 - DNA, 120 bp, Artificial Sequence
  ENSG00000188315_4 (sequence is synthesized)
tgcacaggccagcagaggctggaactgagcgccgcgccgctctccttctcgctgcccgtgcacaggctcctctgcagaagacatcctctggcagcctgctcttctgctgctccttttgct

SEQ ID NO: 691345 - DNA, 120 bp, Artificial Sequence
  ENSG00000188315_5 (sequence is synthesized)
gctgtcccatgtgctcctgagaatgagaaccctgcctttgcaacaaaccatgccccggtaaatgcaaaaccacatgctctgtgccccgagagaaaacctctaaccagcaaggaaaatgta

SEQ ID NO: 691346 - DNA, 120 bp, Artificial Sequence
  ENSG00000188315_6 (sequence is synthesized)
ttgatgcattcctccattttggcacctgaaagagagtcttggagaactgcaggagagggggaaaactggagaaaagaaaatttaaggaaagatatggagagagatttgaaggctgactca

SEQ ID NO: 691347 - DNA, 120 bp, Artificial Sequence
  ENSG00000188315_7 (sequence is synthesized)
aacatgccactcaacaattctagccaagaggtcacaaaggatctgcttgatatgattgaccatacaagcatccgaactattgaagaattggctggaaaaatagaatttgaaaacgaattg

SEQ ID NO: 691348 - DNA, 120 bp, Artificial Sequence
  ENSG00000188315_8 (sequence is synthesized)
aaccacatgtgtggtcattgccaagattcacccttcaaagaggaagcctgggccctgctcatggacaagagccctcagaaggccacagatgctgaccctggcagcctcaaacaggctttt

SEQ ID NO: 691349 - DNA, 120 bp, Artificial Sequence
  ENSG00000188315_9 (sequence is synthesized)
gatgatcataatattgttgagactgttctggacttggaagaggactacaatgtgatgacgtcttttaaataccaaattgagtaaggacagttatctaagctttgattccttacagcagga

SEQ ID NO: 691350 - DNA, 120 bp, Artificial Sequence
  ENSG00000188315_10 (sequence is synthesized)
ggctgcccttgagcctgagcagaagcagctacaatggccgtcaggggccacatttctcaaaaggttggcagaacctgaattaccagaccctttttaaatcccagttgtgtccctttttaa

SEQ ID NO: 691351 - DNA, 120 bp, Artificial Sequence
  ENSG00000188315_11 (sequence is synthesized)
gctgtgagaccagttttttgaattccattgctttgaaatgtttcctattactgatttttttttttaactttccttgacatcttgaatgtgtttttttgattgatgttcaatatacccagt

SEQ ID NO: 691352 - DNA, 120 bp, Artificial Sequence
  ENSG00000188315_12 (sequence is synthesized)
aatatacccagtacccatggtaggtgtgggtcatgggcctctgctgtgtctcttagtgttcttttccacgggcccctaaaaaagtacaggagtggccaggcacagtggctcacgtctgta

SEQ ID NO: 691353 - DNA, 82 bp, Artificial Sequence
  ENSG00000188315_13 (sequence is synthesized)
ttgcttgaacctggaggcggaggttgcaatgagccgagatggcaccgctcccctccattaatttagctggtcatggtggttc

SEQ ID NO: 691354 - DNA, 120 bp, Artificial Sequence
  ENSG00000188315_14 (sequence is synthesized)
tcaaaaaaataataatttagctggtcatggtggttcgtgcctgtagttccagctacttgggtagggactgaggcgaaaggatcacttgaggccaggaggcagagattgcagtgagctgag

SEQ ID NO: 691355 - DNA, 120 bp, Artificial Sequence
  ENSG00000188315_15 (sequence is synthesized)
aaaaaaagaaaaaaaaagggaagaaaggaaactgaatctcagggaagtgcccacctcctgagctaataagaggaaggaatatgggggtgaggcagagctggcaaaaggctgttttttgtt

SEQ ID NO: 691356 - DNA, 120 bp, Artificial Sequence
  ENSG00000188315_16 (sequence is synthesized)
gctggcaaaaggctgttttttgttttgattgtttttaaagaccaagtgaagtatagtataagaagtggggaaggagtggaacaaggagttagatctgtaactgtgagtagtcaattgaga

SEQ ID NO: 691357 - DNA, 120 bp, Artificial Sequence
  ENSG00000188315_17 (sequence is synthesized)
taactcaatacctttggacctgattgtttttaaagactgagggtagtataagaagaggggaaggagtagaacaaggagttagatctgaaactgtgagtagtcgattgagataactcacta

SEQ ID NO: 691358 - DNA, 120 bp, Artificial Sequence
  ENSG00000188315_18 (sequence is synthesized)
cctttggaccagccagggctgtttataagtgctaaagcccgaacaaaccaaagagttggggagaaaggcctaactaacagctgagtgattgtctaacagactgtcttttaggccagtgac

SEQ ID NO: 691359 - DNA, 120 bp, Artificial Sequence
  ENSG00000188315_19 (sequence is synthesized)
tctggcatagggcaggctgcatagccagcaacatcccttaccacaggtctagtgattcctctgggctcaaatgtggaggctacacacccactccttagcagaggttggcctggcacctgc

SEQ ID NO: 691360 - DNA, 120 bp, Artificial Sequence
  ENSG00000188315_20 (sequence is synthesized)
tggtgccccaagaactatggcatggttagaccctggccacttgattgcatgtgcctccccagtgggcgtgccctggttcccaaccagttgtggccactgccactgccctgcctggggcag

SEQ ID NO: 691361 - DNA, 120 bp, Artificial Sequence
  ENSG00000188315_21 (sequence is synthesized)
gagttgaggttaaggctaactacaggctccttccaggccacctaccactcagaccctgcaggaggtagcacaaagcattcacagcctgtggagtcagaggccaatttcttctccctgagc

SEQ ID NO: 691362 - DNA, 120 bp, Artificial Sequence
  ENSG00000188315_22 (sequence is synthesized)
aagaagaatggaagcaaatgaaaagtgctcacagtatgctcaactgcccctgctcaggtgaagaatagcctgtctggatggagagatgtcaggctacttgatactcagaaaaacaggtct

SEQ ID NO: 691363 - DNA, 120 bp, Artificial Sequence
  ENSG00000188315_23 (sequence is synthesized)
caaaacagtgccttccaaataatacatgtggatgtggacactcttctatagacgaggtggagcttaattcctgtccttacccccatattcccacctcattaccaccctttgaaggtgaac

SEQ ID NO: 691364 - DNA, 120 bp, Artificial Sequence
  ENSG00000188315_24 (sequence is synthesized)
tagacttaatgatacttcccacgactaaagtagggaaagggaaaagtcacaaacttatagtggggaagcctggcagacacctaaccaagtgatgtcatgtatatgtcatgagaggggtgc

SEQ ID NO: 691365 - DNA, 120 bp, Artificial Sequence
  ENSG00000188315_25 (sequence is synthesized)
atcacttccctggtattcctaccaaaaacccaaattcccagtgtatgatcttgagacaaatgttagacaaatccagacgtggggtacattctacaagatacctggccagaactcaagact

SEQ ID NO: 691366 - DNA, 120 bp, Artificial Sequence
  ENSG00000188315_26 (sequence is synthesized)
atcactgcactccagcctgggcaacaagcaagactccacctcaaaaagaaaaaaaaagactgttgaggtcatgaaaaataaggaaagactcaaaaactatcaacagaccactaaagacca

SEQ ID NO: 691367 - DNA, 120 bp, Artificial Sequence
  ENSG00000188315_27 (sequence is synthesized)
aaagaccaagaagacacaatggctaaatgcaacatggaatcctggagtgcatcctggaagagaaagagaacattattggaaaaactgataaaacttgaataaaaactagtgtttaatgta

SEQ ID NO: 691368 - DNA, 80 bp, Artificial Sequence
  ENSG00000188315_28 (sequence is synthesized)
aaataaaaaataaaaataaataaataagtaaacaaatgcaggctgggtgaggtggctcatgcccctgagcccaggagttc

SEQ ID NO: 691369 - DNA, 120 bp, Artificial Sequence
  ENSG00000188315_29 (sequence is synthesized)
gagaccagcctgggcaacatggctaaaccctgtctctaaaaaagaaaaaaatttaatacagtctgcgatgctcgtgagtcattatggtaaagctgttagtcaatttctccactgatgtag

SEQ ID NO: 691370 - DNA, 120 bp, Artificial Sequence
  ENSG00000188315_30 (sequence is synthesized)
cagtttccaattgtcctttaatcaaagcataaatgacaaggtcaccagtaagtttttgtctttgagattatctaaaactgagtttcccttcaatattttcttgaaagagaatctaattcc

SEQ ID NO: 691371 - DNA, 120 bp, Artificial Sequence
  ENSG00000188316_0 (sequence is synthesized)
gcctagcgacagcagggacgctcgtgggaccccaggctaaaccccgctgtagccttaaatctcctaccatggaggaagaaggcggcggccgcagctgtgggaccactagggagctgcaga

SEQ ID NO: 691372 - DNA, 120 bp, Artificial Sequence
  ENSG00000188316_1 (sequence is synthesized)
agctgaagcagcaggcgatggagtactaccgggagaacgacgttccgcgcaggctggaagagctgctcaactccaccttctacctccagcctgccgacgtctacgggcacctggcaaact

SEQ ID NO: 691373 - DNA, 120 bp, Artificial Sequence
  ENSG00000188316_2 (sequence is synthesized)
gcttttctaaacttgcaaagcctcccaccatatgcaaaatagtggggaaagacgtactagatggactggggcttccaaccctgcaagtggacatattctgcaccattcaaaactttccca

SEQ ID NO: 691374 - DNA, 120 bp, Artificial Sequence
  ENSG00000188316_3 (sequence is synthesized)
agaacgtatgttctgtggtgatctcgactcattttgaagtccatgagaatgctctgcccgagctggccaaggcggaggaggcagagagggccagcgcggtgagcaccgccgtgcagtggg

SEQ ID NO: 691375 - DNA, 120 bp, Artificial Sequence
  ENSG00000188316_4 (sequence is synthesized)
tcaacagcaccatcacgcacgagctccaggggatggcaccctctgaccaggcagaggtggatcacctactcaggatattcttcgcaagtaaagtacaagaagataaggggagaaaagaat

SEQ ID NO: 691376 - DNA, 120 bp, Artificial Sequence
  ENSG00000188316_5 (sequence is synthesized)
tggaaaagagcctggaatactcaacagtgcctacacctctacctccagtaccaccaccaccaccccctccacctcctaccaaaaaaaaggggcaaaagccagggaggaaggatactatta

SEQ ID NO: 691377 - DNA, 120 bp, Artificial Sequence
  ENSG00000188316_6 (sequence is synthesized)
cagagaaacctattgcgcctgcagagcctgttgagcctgtactcagtggcagtatggccataggggccgtgtcactagctgttgccaaagcctgtgccatgctgcttaataaacctctgt

SEQ ID NO: 691378 - DNA, 120 bp, Artificial Sequence
  ENSG00000188316_7 (sequence is synthesized)
acttaaatatcgctctactgaagcacaatcaggaacagccaacaacgctatctatgcctttgctgatggtatcgctggtcagctgtgggaagtcatcatctgggaagctaaatttaatga

SEQ ID NO: 691379 - DNA, 120 bp, Artificial Sequence
  ENSG00000188316_8 (sequence is synthesized)
aagaagtgatttgtataccccatcctgaattaacaaccaaacaaggtgtcgagatgcttatggaaatgcagaaacatatcaacaaaataattgaaatgccctctcctccaaaagcagaga

SEQ ID NO: 691380 - DNA, 120 bp, Artificial Sequence
  ENSG00000188316_9 (sequence is synthesized)
caaaaaaagggcacgatggaagcaaaagaggtcaacagcagatcactggcaagatgtctcatcttggctgtttaaccattaactgtgactccatagaacagccactgcttctaatacagg

SEQ ID NO: 691381 - DNA, 120 bp, Artificial Sequence
  ENSG00000188316_10 (sequence is synthesized)
aaatctgtgccaacctggggctagaactgggaacaaatctgcatctagctatcaactgtgctggacatgagctgatggactacaataaaggaaagtatgaagtgatcatgggcacataca

SEQ ID NO: 691382 - DNA, 120 bp, Artificial Sequence
  ENSG00000188316_11 (sequence is synthesized)
cgcacttggttccaggtgttacataattgcaggaactgcttccaaaagcatttctaaacttctagagcaaggaaacatcagcatccccaaatccaatgggctgatcataaaacacacaaa

SEQ ID NO: 691383 - DNA, 120 bp, Artificial Sequence
  ENSG00000188316_12 (sequence is synthesized)
ccaaactacaatgtctgacttggtggaaataaccaatctgattgacagtaagaagcacatcactgtctttggaagtacagaaggagaatcatctgatgacagccttgtcgatttggctgt

SEQ ID NO: 691384 - DNA, 120 bp, Artificial Sequence
  ENSG00000188316_13 (sequence is synthesized)
tgggcttggtgtccggttcatcaagttggggggtctttcccgtggtgaacgagtgactaaatacaaccgccttctcactatagaggaagaacttgtccagaatggaacactgggtttcaa

SEQ ID NO: 691385 - DNA, 120 bp, Artificial Sequence
  ENSG00000188316_14 (sequence is synthesized)
agaagaacacacttttttttactttaatgaggaagctgaaaaggctgcggaggcacttgaggctgctgcggctagggagccgctggtgcccaccttccccacacaaggtgtagaggaatc

SEQ ID NO: 691386 - DNA, 120 bp, Artificial Sequence
  ENSG00000188316_15 (sequence is synthesized)
agccgaaacaggagcatcctctggatagggctgtacacaccccaggttccagccacaccatcagtattagtagaccgggaggtctgaagtacggcgccgtgtctccacatggagtttcct

SEQ ID NO: 691387 - DNA, 120 bp, Artificial Sequence
  ENSG00000188316_16 (sequence is synthesized)
cttcaacttcaccaactcttgtggtttttattcttctaattccactgtttggtaaattacatatatgatgtttttgcctgaaattctgtgaacttcgttttgcagccaccacacttccat

SEQ ID NO: 691388 - DNA, 120 bp, Artificial Sequence
  ENSG00000188316_17 (sequence is synthesized)
gtggattttgtttgtctattagctctcctgtccatttttcagggacacgctccagtaaaagaggccaatatttttgttgccaactccacactcagtcaaacaccccatcctttaccaatc

SEQ ID NO: 691389 - DNA, 120 bp, Artificial Sequence
  ENSG00000188316_18 (sequence is synthesized)
agaatatctctgagaacaaaaacctaatgaccctagaagctctctgtgctgggaacagatgtccatcttctgtgtttattctacatgtctgtgctgaaaagcactgacacatttttgtaa

SEQ ID NO: 691390 - DNA, 120 bp, Artificial Sequence
  ENSG00000188316_19 (sequence is synthesized)
ccaacctcacgtagaagtgtgagagcatcaccattttttgtaagagccaatttcatctcactttcctacccttgattccttttttcctaattccctctcctttttaaattttagtttttc

SEQ ID NO: 691391 - DNA, 120 bp, Artificial Sequence
  ENSG00000188316_20 (sequence is synthesized)
ttgtattatttttatctttgcgagtcttcttagatcctttttggagtaagaatgagtataaatgaataagcacatcagtaaatgaattaatattctcaaggttattaaatgcccagttat

SEQ ID NO: 691392 - DNA, 120 bp, Artificial Sequence
  ENSG00000188316_21 (sequence is synthesized)
tcataccacagcatttaaaaagcaatccgcaagtgataaaaaaaaaaaaaaaaaatgatgtgacatatccattgcctgaattgctcttttgtaagccagtgttgggattatagcagagga

SEQ ID NO: 691393 - DNA, 120 bp, Artificial Sequence
  ENSG00000188316_22 (sequence is synthesized)
gtagcagaaataaatatattcagacacaaacatatagatataataatatccaaccactttatatgatttagggtctcgttaaaatggttaccatttgcttctcctaaaaattatataaat

SEQ ID NO: 691394 - DNA, 120 bp, Artificial Sequence
  ENSG00000188316_23 (sequence is synthesized)
acaatgactttggtgaaagtgtaaccactcttttagaacaaaaacagcacagtgttatttgaaaaattattaacatatgtgatggagcagtctgtaagcacgatcaaataaactggccaa

SEQ ID NO: 691395 - DNA, 120 bp, Artificial Sequence
  ENSG00000188316_24 (sequence is synthesized)
agatgaggctaattgtaaatgggaataaaacacaccacaaacaattcacaaaaaacagattttaaaatactctcctttcatttccccattagctaaacaataaactgaaatctattctta

SEQ ID NO: 691396 - DNA, 120 bp, Artificial Sequence
  ENSG00000188321_0 (sequence is synthesized)
gttcggtggtgtcccggtgcagccacgcgagagtagaagggtggaaaggggaggtgcccagtgaaatggagcctgtcccgtgcactttcgggcatttcgagcatcttgtgggctctccca

SEQ ID NO: 691397 - DNA, 120 bp, Artificial Sequence
  ENSG00000188321_1 (sequence is synthesized)
agtcgcggcccctcctctgagagccacagtcaggtctgtcctcaggggtcgaggcggctgcgctggggcctcggcccgggaggaggcggggggcacggcctttccattttccctgctccc

SEQ ID NO: 691398 - DNA, 120 bp, Artificial Sequence
  ENSG00000188321_2 (sequence is synthesized)
tttccattttccctgctcccctctgcagaagcctcatagggcccggcgcggcggctcacgcctgtcattcccagcgctttgggcggattgggtaggaggattacttgaggccaggagttc

SEQ ID NO: 691399 - DNA, 120 bp, Artificial Sequence
  ENSG00000188321_3 (sequence is synthesized)
agggagacccccccccccaaccatctctaatggaaaaaaaaaaaaaagtctccacatccagcgttgtgccttttctctataaggaacagcatctctgccttcctgttcacggtgaccttc

SEQ ID NO: 691400 - DNA, 120 bp, Artificial Sequence
  ENSG00000188321_4 (sequence is synthesized)
gcttggtgtcctcctggcctcagcaacctgacaattctgtcgtgtcccgagagatggctaatgaatggcgcttgatgacagatgagtaatgcctgttgctgaaagattgacgatcatctt

SEQ ID NO: 691401 - DNA, 120 bp, Artificial Sequence
  ENSG00000188321_5 (sequence is synthesized)
tctcaagatgttttctgtcttcatgagtcaaaatttgaagaggaaaggatggtggctgggtggttgacaaattactctcaggactcagtgacctttgaggatgtggctgtggacttcacc

SEQ ID NO: 691402 - DNA, 120 bp, Artificial Sequence
  ENSG00000188321_6 (sequence is synthesized)
caggaggagtggactttgctggatcaaactcagagaaacttatacagagatgtgatgctggagaactataagaatctagttgcagtagattgggagagtcatattaataccaaatggtca

SEQ ID NO: 691403 - DNA, 120 bp, Artificial Sequence
  ENSG00000188321_7 (sequence is synthesized)
gcacctcagcagaattttttgcaggggaaaacatccagtgtggtggaaatggagagaaaccattttggagaggaactgtttgactttaaccaatgtgaaaaagccttgagtgaacactca

SEQ ID NO: 691404 - DNA, 120 bp, Artificial Sequence
  ENSG00000188321_8 (sequence is synthesized)
tgccttaagactcacaggagaacttactttagaaagaaaacctgtgagtgtaatcaatgtgaaaaagccttcagaaaaccctctatctttactttacacaagaaaactgatatcggagag

SEQ ID NO: 691405 - DNA, 120 bp, Artificial Sequence
  ENSG00000188321_9 (sequence is synthesized)
gaacttcctaactgtaatcaatgtgaaacagccttcagccaacatctacatcttgtttgcaagaaaactagccaaaatctacatcttgtttgcaagaaaactcacactcaagagaaacca

SEQ ID NO: 691406 - DNA, 120 bp, Artificial Sequence
  ENSG00000188321_10 (sequence is synthesized)
tataaatgcagtgactgtgaaaaaggcttaccttcctcctcacacctcagagaatgtgtaagaatttatggtggagagagaccatatactcataaggagtatgtcgaaaccttttctcat

SEQ ID NO: 691407 - DNA, 120 bp, Artificial Sequence
  ENSG00000188321_11 (sequence is synthesized)
tctacagccctttttgtacacatgcaaactcaagatggagaaaaattctatgaatgtaaagcatgtgggaaacccttcactgagtcgtcatatcttactcaacatttaagaactcatagt

SEQ ID NO: 691408 - DNA, 120 bp, Artificial Sequence
  ENSG00000188321_12 (sequence is synthesized)
agagtgttacctatagaacataagaaatttggcaaagcctttgctttttccccagatcttgctaaacatataagacttagaactagaggaaaacactatgtttgtaatgaatgtggcaaa

SEQ ID NO: 691409 - DNA, 120 bp, Artificial Sequence
  ENSG00000188321_13 (sequence is synthesized)
gaatttacttgtttctcaaaactcaacattcacataagggttcacactggagaaaaaccgtatgagtgcaacaaatgtgggaaagccttcactgattcatcaggtcttataaaacacagg

SEQ ID NO: 691410 - DNA, 120 bp, Artificial Sequence
  ENSG00000188321_14 (sequence is synthesized)
cgaactcacactggagaaaagccttatgaatgtaaggaatgtgggaaagcttttgctaactcttcacatcttactgtacatatgagaactcacactggtgagaagccttatcaatgtaag

SEQ ID NO: 691411 - DNA, 120 bp, Artificial Sequence
  ENSG00000188321_15 (sequence is synthesized)
gaatgtggaaaagcctttattaattcctcttcctttaaaagtcacatgcagactcatcctggtgtaaaaccctatgactgtcaacagtgtgggaaagccttcattcgatcctcatttctt

SEQ ID NO: 691412 - DNA, 120 bp, Artificial Sequence
  ENSG00000188321_16 (sequence is synthesized)
attcgacatttgagaagtcacagtgcagaaaggccttttgaatgtgaggaatgtgggaaagcctttagatactcctcgcaccttagtcaacataaaagaatacatacaggggagaggcca

SEQ ID NO: 691413 - DNA, 120 bp, Artificial Sequence
  ENSG00000188321_17 (sequence is synthesized)
tataaatgtcaaaagtgtgggcaagccttcagtatctcatcaggccttacagtacacatgagaactcacactggtgaacggccctttgaatgtcaggaatgtgggaaagcctttactcgg

SEQ ID NO: 691414 - DNA, 120 bp, Artificial Sequence
  ENSG00000188321_18 (sequence is synthesized)
tccacatatcttattcgacatctaagaagtcatagtgtggagaaaccatataaggaatgtgggcaaacctttagtaattcctcatgccttactgaatgtgtgtgaattggggctgatact

SEQ ID NO: 691415 - DNA, 120 bp, Artificial Sequence
  ENSG00000188321_19 (sequence is synthesized)
tggaaagaatgtggtaaagccactacttcctcacacttactgaacatgtactcattcatagtggcaatgtacacagtcataaggaatgtgggaagccttccttggtgtctcagatcttaa

SEQ ID NO: 691416 - DNA, 120 bp, Artificial Sequence
  ENSG00000188321_20 (sequence is synthesized)
caattccaatagaagagaagacatatgaatgtaaggaatgtgggaaaatcttggctccttccataggccttactattcatgtgtctgtgcatcctaggaaacaaactgaacgtaggaaac

SEQ ID NO: 691417 - DNA, 120 bp, Artificial Sequence
  ENSG00000188321_21 (sequence is synthesized)
tatgaatgtgaggaaggtggaaaagctttcattattttcctcgggccttactgagcttgtgagcacattggatataaatgcacgtcctctggctgtaaggaatgtgttgaaacctttcac

SEQ ID NO: 691418 - DNA, 120 bp, Artificial Sequence
  ENSG00000188321_22 (sequence is synthesized)
tctgccttataccttaatattcagctgtgatctcacaagtgtgaaaaatcttatgaatgtaaaatgtgtggagattcttctttgtttttagcttccactttgggaacatgtcaaagcaca

SEQ ID NO: 691419 - DNA, 120 bp, Artificial Sequence
  ENSG00000188321_23 (sequence is synthesized)
cattgagaagtcccatgagtgaaagagatgttggaaagcccttgaacttggtcgttaggaaacatccacactgaagaggaacctgactgtatggaaggtcaaaaaggctgtattaattta

SEQ ID NO: 691420 - DNA, 120 bp, Artificial Sequence
  ENSG00000188321_24 (sequence is synthesized)
catgcaaaaagtcacactagaggaatgccatatcagaatgcttttggtaaatatacatgttttaaagaggttatatatcattaataaaaatatctagctggtctgaagatcctgagttat

SEQ ID NO: 691421 - DNA, 120 bp, Artificial Sequence
  ENSG00000188321_25 (sequence is synthesized)
ctcaattgttcacggttacagatggaactctttattattgaggagttccactctttcccccatttgtcactactacacttccctagtctttaaaacaattttaggctgggtgcagtggct

SEQ ID NO: 691422 - DNA, 120 bp, Artificial Sequence
  ENSG00000188321_26 (sequence is synthesized)
tgatatggtaagaccatctcaaaaaaagaaaaaaaaattaaaatatcctcagagggttttttaatgaaaaacttagttatagggaattgaggaacatttaggggtacaaattttcactta

SEQ ID NO: 691423 - DNA, 120 bp, Artificial Sequence
  ENSG00000188321_27 (sequence is synthesized)
aattgaggaacatttaggggtacaaattttcacttattgcacacaagaaaattggtactggccaggcatgctggctcacaccttaattccagcaatttgggaggccaaggcagaaggatc

SEQ ID NO: 691424 - DNA, 120 bp, Artificial Sequence
  ENSG00000188321_28 (sequence is synthesized)
atagtgaaacctcatcttgacaaagaataaataagattaactgggtgtactggtttgtgcctatagtcccagctatttaggaggctggggcaagaggattgcttgagcctggtcagggag

SEQ ID NO: 691425 - DNA, 120 bp, Artificial Sequence
  ENSG00000188321_29 (sequence is synthesized)
gcagaggttgcagtgagccctgatcgtgccactacactctagcctgggcaacaggatgagaccctgtctcaaaaaaaaaagaaaattgacgccagcaaagaaaaccaaataaattattta

SEQ ID NO: 691426 - DNA, 120 bp, Artificial Sequence
  ENSG00000188321_30 (sequence is synthesized)
agtttgcctttctatatgtctttaaagactaatgatattgaacatcactttcatatgcttatgagtctttggtgaagtgtacatttaatgatcttttttcactgttgctgagaatctttg

SEQ ID NO: 691427 - DNA, 120 bp, Artificial Sequence
  ENSG00000188321_31 (sequence is synthesized)
gtttgaattattgaggcaggttctttcagtaagtttgagatataattgccatgtaataaactgcacatgtttttagcatacactttaagtttggacacatacacatatgtgtacatacac

SEQ ID NO: 691428 - DNA, 120 bp, Artificial Sequence
  ENSG00000188321_32 (sequence is synthesized)
accatcaagataatgaacatacctatcaaaccagatggtttcctcatgcccttttataatttcttcttctcctcacccttccctgcctgtcactctcctgatccactgatttgctttctc

SEQ ID NO: 691429 - DNA, 120 bp, Artificial Sequence
  ENSG00000188321_33 (sequence is synthesized)
ttagaatagacgactttatattatgtacagtttttatataaatggaatcatatagtctggcatctttcaggataattttttcagatccatttatgttgtagggtccatttcactgctgaa

SEQ ID NO: 691430 - DNA, 120 bp, Artificial Sequence
  ENSG00000188321_34 (sequence is synthesized)
tagtattccattgcaaggcataccacaagctatttatccatgtgttatttctaccttttggctattgcaattaaaactgccttgaatacccatatgcagattattctttaaacatgtgct

SEQ ID NO: 691431 - DNA, 120 bp, Artificial Sequence
  ENSG00000188321_35 (sequence is synthesized)
tctgtttctttaaatagttaagagtggaatgatcagatcatatgttagtgtacgtttaagtttttaagagactgctaaacctttctcaagtagttatgccatttgacatttccatgagca

SEQ ID NO: 691432 - DNA, 120 bp, Artificial Sequence
  ENSG00000188321_36 (sequence is synthesized)
gtatataagagttgcaattcttctgcatccttgccaattattggtatggtcagtcttttttattttgaccattttaataggtgtgtagtagtatctcatggttttaatttgcatttccct

SEQ ID NO: 691433 - DNA, 120 bp, Artificial Sequence
  ENSG00000188321_37 (sequence is synthesized)
agtgactaatgatgtcttacatggtttcacgtgcttactggccttctttaagcctttggggaagagtctgttcaaatcttttgcctgtttatattggctttattttttatttatttttat

SEQ ID NO: 691434 - DNA, 120 bp, Artificial Sequence
  ENSG00000188321_38 (sequence is synthesized)
ttttttttatatagagacagggttttactctgtctcccaggctgaagtgcgtggcacgatcatgtggttttgcaatatttattgaattttgagagtttaaaatttgtaatatatttaata

SEQ ID NO: 691435 - DNA, 120 bp, Artificial Sequence
  ENSG00000188321_39 (sequence is synthesized)
catttacaggaggtgagcatgaagtggccaatgggaaaattctaggaggtattgggactcatgaaggttctgtttcggagcccttgagctgccgcttggccagttcccacactgtggagt

SEQ ID NO: 691436 - DNA, 82 bp, Artificial Sequence
  ENSG00000188321_40 (sequence is synthesized)
taattctttgttcaaaacgccagtaacctggacagcttgcagtcaagaccccctaccggtgacacttgcgctcttcggggag

SEQ ID NO: 691437 - DNA, 120 bp, Artificial Sequence
  ENSG00000188321_41 (sequence is synthesized)
tcaagaccccctaccggtgacacttgcgctcttcggggaggtaaacagcatttcctctcagctctgggttggaaaaagccgcagcagctgatgggcccgggaacccgaggccccgccccc

SEQ ID NO: 691438 - DNA, 120 bp, Artificial Sequence
  ENSG00000188321_42 (sequence is synthesized)
taggtggtcctagcctttgcgcgtgcgcggcgtgtctgcgtgggcgcatgcgcataacggccgccatcttaacagcgcgttcccgttggcgtctgaggaacagcatctctgccttcctgt

SEQ ID NO: 691439 - DNA, 120 bp, Artificial Sequence
  ENSG00000188321_43 (sequence is synthesized)
tccagtgtggtggaaatggtaagattcagaaggtataatttattgtcttccatgttagaggaagattggaaattccttaaaatggaaaagcagcacaataaccttgagacatttgagact

SEQ ID NO: 691440 - DNA, 120 bp, Artificial Sequence
  ENSG00000188321_44 (sequence is synthesized)
cagaatatatttgtttacatatttccttcaacattcccatatgtatctcagatgtttttgataaataattcactcttgggccgttatcagctaagctctatttagaagccctctgaaagt

SEQ ID NO: 691441 - DNA, 120 bp, Artificial Sequence
  ENSG00000188321_45 (sequence is synthesized)
aaagaatataacagaacttcctgcagtcactttgttccacttgaaaacactcaggtctgaaccatgccttgcaatgaaaatggcaggaacaaacagtttcaattatactaacttattttc

SEQ ID NO: 691442 - DNA, 120 bp, Artificial Sequence
  ENSG00000188321_46 (sequence is synthesized)
catgtgtaacagaattcagagtaaaagggagaatctcaatgaaataaatttggaaaacttctatgaaccatcattaattttcaccaacaggagagaaaccattttggagaggaactgttt

SEQ ID NO: 691443 - DNA, 120 bp, Artificial Sequence
  ENSG00000188321_47 (sequence is synthesized)
caagactcccactactacttaatcaagaggaattgagattgacttacccataagttcagacagtgtctcgaagagactttgggaacaagatattcaggcacatttcactgttagactcac

SEQ ID NO: 691444 - DNA, 120 bp, Artificial Sequence
  ENSG00000188321_48 (sequence is synthesized)
ttttttgcaggggaaaacatccagtgtggtggaaatgagtctcactgtatcacccagactggagtgcagtggtaccatctcagctcacggcagcttccacctcccaggttcaagcaattc

SEQ ID NO: 691445 - DNA, 90 bp, Artificial Sequence
  ENSG00000188321_49 (sequence is synthesized)
gcctcagcctcccgagtagctgggacttgtgcctggtgccaccacagctggctaacttgtgtttgtagtagagacagggtttcaccatgt

SEQ ID NO: 691446 - DNA, 63 bp, Artificial Sequence
  ENSG00000188321_50 (sequence is synthesized)
tctggcctgcggatactatacatttttgattatggtagctgtctagtaaatcttgaaagcaag

SEQ ID NO: 691447 - DNA, 120 bp, Artificial Sequence
  ENSG00000188321_51 (sequence is synthesized)
ttcacggtgaccttcgcttggtgtcctcctggcctcagcaacctgacaattctgtcgtgtcccggcaggagtacagtggtgagatcacggttcactgcagcattgacctccctaggctca

SEQ ID NO: 691448 - DNA, 120 bp, Artificial Sequence
  ENSG00000188321_52 (sequence is synthesized)
ggtgttgctcccacctcagtcttctgaatagcttggagtataggtaaacgggatttgttattatttatgtccacgtggcataatactctagtggcactcacatgaacaacttcatcttct

SEQ ID NO: 691449 - DNA, 120 bp, Artificial Sequence
  ENSG00000188322_0 (sequence is synthesized)
gggctgctcgtagcggcggcgaccgagccccccagcggctgaggggcttccagcgcccgccggtggccgggacccactaaagcccccgcagccgaggagtgcggggagcccccttccaca

SEQ ID NO: 691450 - DNA, 120 bp, Artificial Sequence
  ENSG00000188322_1 (sequence is synthesized)
tccaggatccggcgagcctcggggaagagggggggccctcccggatccgacaccgagcgactcccctgcggggaaagcggagacttcctcggtatttagaagacagcaagccccctacgg

SEQ ID NO: 691451 - DNA, 120 bp, Artificial Sequence
  ENSG00000188322_2 (sequence is synthesized)
caccgcaaggactccccctcctcagtctgggcccccgccccaagacctagaacgcagtgcccccaggccgggattgcgagaaccccctcccaagatccggtcattacaactccacacctc

SEQ ID NO: 691452 - DNA, 120 bp, Artificial Sequence
  ENSG00000188322_3 (sequence is synthesized)
aagacaagaagacccagctcagaacgcccctagatcaggggatcccaattccccccaactccggtacatagaaatcccaaatctaggcagccggggacagcaagagacactctcaccagc

SEQ ID NO: 691453 - DNA, 120 bp, Artificial Sequence
  ENSG00000188322_4 (sequence is synthesized)
aagaagcctcggggatcccccccctaaagctccaggacttgggcgactgagcccctggcggcaccgcttgcaccccggtccatggtcgtggcgccctgagcccccggggccgggcagacg

SEQ ID NO: 691454 - DNA, 120 bp, Artificial Sequence
  ENSG00000188322_5 (sequence is synthesized)
gacgaagaccgcgacggcgcccaggccccctgccgcggcgtccccgcggccccagcccagggagaagatgagcgtgggctgcccagagcctgagccgccccgctccctgacctgctgtgg

SEQ ID NO: 691455 - DNA, 120 bp, Artificial Sequence
  ENSG00000188322_6 (sequence is synthesized)
gggactgcccctgggcctggtgccggtgtgccccttctcactgaagacatgcaggccctgactctccgcacactggccgccagcgacgtcaccaagcactacgaactagtccgggagctg

SEQ ID NO: 691456 - DNA, 120 bp, Artificial Sequence
  ENSG00000188322_7 (sequence is synthesized)
ggcaaaggcacctatgggaaggttgacctggtggtctacaagggcacaggcacaaaaatggcactgaagtttgtgaacaagagcaaaaccaagctgaagaacttcctacgggaggtgagc

SEQ ID NO: 691457 - DNA, 120 bp, Artificial Sequence
  ENSG00000188322_8 (sequence is synthesized)
atcaccaacagcctctcctccagccccttcatcatcaaggtctttgacgtggtctttgagacagaggactgctacgtctttgcccaggagtacgcacctgctggggacctgtttgacatc

SEQ ID NO: 691458 - DNA, 120 bp, Artificial Sequence
  ENSG00000188322_9 (sequence is synthesized)
atccctccccaggtggggctccctgaggacacggtgaagcgctgtgtgcagcagctgggcctggcgctggacttcatgcacgggcggcagctggtgcaccgcgacatcaagcccgagaac

SEQ ID NO: 691459 - DNA, 120 bp, Artificial Sequence
  ENSG00000188322_10 (sequence is synthesized)
gtgctgctgttcgaccgcgagtgccgccgcgtaaagctggccgacttcggcatgacgcgccgcgtgggctgccgcgtcaagcgcgtgagcggcaccatcccttacacggcgcctgaggtg

SEQ ID NO: 691460 - DNA, 120 bp, Artificial Sequence
  ENSG00000188322_11 (sequence is synthesized)
tgccaggcgggccgcgccgacgggctggcggtggacacgggcgtggacgtgtgggccttcggcgtgctcatcttctgcgtgctcaccggcaacttcccgtgggaggcggcgtcgggcgcc

SEQ ID NO: 691461 - DNA, 120 bp, Artificial Sequence
  ENSG00000188322_12 (sequence is synthesized)
gacgccttcttcgaggagttcgtgcgctggcagcggggccgcctgccggggctgccttcgcagtggcgccgcttcaccgagcccgcgctgcgcatgttccagcgcttactggccctggag

SEQ ID NO: 691462 - DNA, 120 bp, Artificial Sequence
  ENSG00000188322_13 (sequence is synthesized)
ccctggagcccgagcgccgcggcccagccaaggaggtgttccgcttcctcaagcacgagctcacgtccgagctgcgccgccggccctcgcaccgcgcgcgcaagccccccggggaccgcc

SEQ ID NO: 691463 - DNA, 80 bp, Artificial Sequence
  ENSG00000188322_14 (sequence is synthesized)
gccgggccactgcgcctcgaggcgcctgggccgctcaagcggacggtgctgaccgagagcggcagcggctcccggcccgc

SEQ ID NO: 691464 - DNA, 120 bp, Artificial Sequence
  ENSG00000188322_15 (sequence is synthesized)
agtgcccgtgccggtgcctgtgcccgagcccggcctagctccccaggggccccccggccggaccgacggccgcgcggacaagagcaaagggcaggtggtgctggccacggccatcgagat

SEQ ID NO: 691465 - DNA, 120 bp, Artificial Sequence
  ENSG00000188322_16 (sequence is synthesized)
atcgagatctgcgtctgagtcgcctccgccgccctcggacccgggagcagcccgggcccgccccgagccggtgcccggtgcggcggtagggaatggagccacctcgccgcggggcagggg

SEQ ID NO: 691466 - DNA, 120 bp, Artificial Sequence
  ENSG00000188322_17 (sequence is synthesized)
gcgcagcggtagactaggcaggacgcggcccggcacctggtccgtccccggcgggctggtgagggggccaccaaagacccctagcgcggcctggtgagcgggggcttggcccagaggagc

SEQ ID NO: 691467 - DNA, 72 bp, Artificial Sequence
  ENSG00000188322_18 (sequence is synthesized)
ctagcgcggcctggtgagcgggggcttggcccagaggagccaagccgcacagacccgagaattcggaggcca

SEQ ID NO: 691468 - DNA, 120 bp, Artificial Sequence
  ENSG00000188322_19 (sequence is synthesized)
tggcagatcatcctgcggtcccaccccagatcccctcctcctcgccatcccattctgccccctccccaccctgggtacagaaagggactgaagtgttgggcagagagggggcttaaggcc

SEQ ID NO: 691469 - DNA, 120 bp, Artificial Sequence
  ENSG00000188322_20 (sequence is synthesized)
cctgggcacaggctgggatcagggcagtgagcgaagggcagctgtgtcctgccctcccttctggaggctggaggggagaggccaagcccttggaaaatgtagcaaatgtctggatgtcgc

SEQ ID NO: 691470 - DNA, 120 bp, Artificial Sequence
  ENSG00000188322_21 (sequence is synthesized)
ataagtgcgtgtatgtgcgggacaggccccgagaagctagtgactcctgcacacccccattgcacaaatgaaatcacagcccaggagggagggtagcttggcactggctgagaaatagag

SEQ ID NO: 691471 - DNA, 120 bp, Artificial Sequence
  ENSG00000188322_22 (sequence is synthesized)
ctctctccccgcccctccccctaaccacaagggattgtcctgacaacttgtggggatagaagggctcacagggcaggggtctcagctgcccccatccttagggcaggggagttagtgtgg

SEQ ID NO: 691472 - DNA, 120 bp, Artificial Sequence
  ENSG00000188322_23 (sequence is synthesized)
agccgagagcaggtcccagctccccctgccagccgcactgtcccaggcccagggacctctgccgggtcctcccagcccttgccacacagcctagacgtagtagcctgggcttccagcagg

SEQ ID NO: 691473 - DNA, 120 bp, Artificial Sequence
  ENSG00000188322_24 (sequence is synthesized)
tggcgagctggttcgtgctggaaatttctcctgggtttcttggggtcaaacatgccaacctccaagaccccatcctcacgtctcccacttttctggcgctggagtgtgcagggcgtagga

SEQ ID NO: 691474 - DNA, 120 bp, Artificial Sequence
  ENSG00000188322_25 (sequence is synthesized)
cctgcatgtgtgggtgtgagaatgggggcggtggacaccagggggcgagtgtgtgactaggtgtgtgtgcacatgtgtagggtgcagacgcatgggtgccatcctttgcgttcagtgact

SEQ ID NO: 691475 - DNA, 120 bp, Artificial Sequence
  ENSG00000188322_26 (sequence is synthesized)
gtgcgtccagacccctcaccagcggcccccccaccacaccctggtcctcccaggcagctgtcccagggcgcccaggcctgccttgcaccacagccctcaggaaatccggcaaggaggccc

SEQ ID NO: 691476 - DNA, 120 bp, Artificial Sequence
  ENSG00000188322_27 (sequence is synthesized)
ctgcaggttggttcaggcccccaggtagcaaaacagagacaacagcagccccgcctgaccccctgcccctctctgtggaggcccgggacccccgcaataagcaccacatgggtgaggctg

SEQ ID NO: 691477 - DNA, 120 bp, Artificial Sequence
  ENSG00000188322_28 (sequence is synthesized)
tccctgtcagggtcccctgccagggtccctcctggggttctgggccatttgaggggctctttgatgggccaggccggccagagtgaactccgagcactttctggctggtgccccaacctc

SEQ ID NO: 691478 - DNA, 120 bp, Artificial Sequence
  ENSG00000188322_29 (sequence is synthesized)
tccactccccactcattcccaccttgaaaaagggctataggtcccctgccctgcccgggtccagtttacaaacagtgtggggtggccccagggcctggccccactctccctgctgtgccc

SEQ ID NO: 691479 - DNA, 120 bp, Artificial Sequence
  ENSG00000188322_30 (sequence is synthesized)
actcctctccagactccacctccccagtgggtatgggccctccacatgccaggtaagtagcaaacccccactccctccaaggaccaggtctcagagaaggccctggtcactgcccccggc

SEQ ID NO: 691480 - DNA, 120 bp, Artificial Sequence
  ENSG00000188322_31 (sequence is synthesized)
ccacctggagcccatcggggctgcctctcccagccgcgacttctccttttgccttaggcctcgcgacatcctgatctctcctgcaataactaggaatcgagattccacagtagacgtccc

SEQ ID NO: 691481 - DNA, 69 bp, Artificial Sequence
  ENSG00000188322_32 (sequence is synthesized)
ctgcaataactaggaatcgagattccacagtagacgtcccttgccgtgctcgctctctctctcgcgcgc

SEQ ID NO: 691482 - DNA, 120 bp, Artificial Sequence
  ENSG00000188322_33 (sequence is synthesized)
aagatcctgttcgggagtttccccagccgttgtagtatctagtatgttagagttgggaggggaccatagttatgtagcccagccccctcattcccagaggcacccagagggccagcctcc

SEQ ID NO: 691483 - DNA, 120 bp, Artificial Sequence
  ENSG00000188322_34 (sequence is synthesized)
agcctgaccccagagcagaaccggaacaccaggttggggccctggtgctgccacctcctctgctggtcgggctgggaccctttgccccttaggagaggtgttggtcacagatgtttacct

SEQ ID NO: 691484 - DNA, 120 bp, Artificial Sequence
  ENSG00000188322_35 (sequence is synthesized)
cagtttatgtcactgtcgaagaaacaaaaaataatagcaaaaaataacactgtagacatgaagacttagaagacaaaaaaaaaaaaatcacacaaaaaatctcccttgttgcgattcttc

SEQ ID NO: 691485 - DNA, 120 bp, Artificial Sequence
  ENSG00000188322_36 (sequence is synthesized)
tgtgaaggtacagtgtgtatgtgtgtatgtgtgtatgtgtgtgcgtgtctctgtcccagaccctgtgtcccccacactgccccctgtccttcggtgcttcccagagacccctctgagctg

SEQ ID NO: 691486 - DNA, 120 bp, Artificial Sequence
  ENSG00000188322_37 (sequence is synthesized)
gcctgtggggcacgggaagccccctggatgggaggcggggccacaggtcggctagagggtctccaccaggcccactgaacagaaccccacggctgccagaatgttccctgagcccacact

SEQ ID NO: 691487 - DNA, 120 bp, Artificial Sequence
  ENSG00000188322_38 (sequence is synthesized)
gtggccagtgggacagtcctggtggctgacatcagcgtccatgcttggctcagggcctggggcggggtcctgggtagagtcctagccccagagccccagcccctcatgtcttgccgccct

SEQ ID NO: 691488 - DNA, 120 bp, Artificial Sequence
  ENSG00000188322_39 (sequence is synthesized)
tcctccatgtgtttgtaaatactctggcatcctttggccctgagaaggtttttaaatgtgttatttacttctctaaacatgacgattgctataaaaataaacaaaagtttagaaaaatga

SEQ ID NO: 691489 - DNA, 120 bp, Artificial Sequence
  ENSG00000188322_40 (sequence is synthesized)
aaggcacaggtggcgggcgggcaagtgcagagccctgaagccgacgggctgctgaccctggagcgccctggctcggggactcctgcccaggctggcgatgatgctgcggaggccacccct

SEQ ID NO: 691490 - DNA, 120 bp, Artificial Sequence
  ENSG00000188322_41 (sequence is synthesized)
ggccacccctgccctgtcctggagctgcctccggcctggcccatgggctgcggagtcgatgatgtgccggccttctgcttcgtctgcttccacagggaggaggaagaggagctgctggaa

SEQ ID NO: 691491 - DNA, 120 bp, Artificial Sequence
  ENSG00000188324_0 (sequence is synthesized)
gatagatgtccattaaaattattaatatctgagtatcaatctttatagtgaggatgaagttgaggaaatgtggaaattctctacagaaacacaatacgtacacattgcctctccccacaa

SEQ ID NO: 691492 - DNA, 120 bp, Artificial Sequence
  ENSG00000188324_1 (sequence is synthesized)
aaatcattggtaataaatgtgcctattggataataaaatgtggtcataaaatgagtagaattgtcactaattatgttagcatgcatctcttccgtgcacacagaaagaaatgaataatag

SEQ ID NO: 691493 - DNA, 120 bp, Artificial Sequence
  ENSG00000188324_2 (sequence is synthesized)
atccaaaaaagatttgataaggatcacaaaagagaaatgaagaacaaatcaatggaaatagagttcattctcctaggattgacagatgacccacagttgcaaattgtgattttcctgttt

SEQ ID NO: 691494 - DNA, 120 bp, Artificial Sequence
  ENSG00000188324_3 (sequence is synthesized)
ctatttctcaactacaccttgagcctgatggggaacttaatcatcatcatcctcaccctgctggatccccggctcaagacgccaatgtatttctttctccgtaatttctcctttttggaa

SEQ ID NO: 691495 - DNA, 120 bp, Artificial Sequence
  ENSG00000188324_4 (sequence is synthesized)
gtaatattcacaacagtgtgtattcctagattcttgataaccattgtgactagagacaaaaccatttcttataataattgtgcaactcaattattttttatccttttaccgggagttact

SEQ ID NO: 691496 - DNA, 120 bp, Artificial Sequence
  ENSG00000188324_5 (sequence is synthesized)
gagttttacctcctggctgccatgtcctatgaccgctacgttgccatctgcaaaccactgcattatccaatcattatgagcagcaaagtctgctaccaacttgtacttagctcttgggta

SEQ ID NO: 691497 - DNA, 120 bp, Artificial Sequence
  ENSG00000188324_6 (sequence is synthesized)
atgtgtgaaacttctcctattctgcagatctcctgcacagatacccatgtcctagaattgatgtcttttaccttagctgtggtgacacttgtggtcacactggtattagtgattctctct

SEQ ID NO: 691498 - DNA, 120 bp, Artificial Sequence
  ENSG00000188324_7 (sequence is synthesized)
tacacttgcattattaagaccattctgaaattctcttctgcacagcaaaggaacaaagcattttccacctgtacttcccacatgattgttgtctccatgacatacggtagctgtatcttt

SEQ ID NO: 691499 - DNA, 120 bp, Artificial Sequence
  ENSG00000188324_8 (sequence is synthesized)
atgtatattaaaccatctgcaaaagaaagagtgactgtatccaaaggtgtagctttgctctatacctcaattgcccctttactaaatcccttcatttatactctcagaaaccagcaggtg

SEQ ID NO: 691500 - DNA, 120 bp, Artificial Sequence
  ENSG00000188324_9 (sequence is synthesized)
aaagaagtcttctgggatgtattacaaaagaatttgtgtttttctaaaagaccattttaagaatctgctacaaattacaactttaccataaaaactggaaaacggcctggcatggtggct

SEQ ID NO: 691501 - DNA, 120 bp, Artificial Sequence
  ENSG00000188334_0 (sequence is synthesized)
aagcctccctgggcctctccaggggattcttgagccctggctgacaaagaccaggaagatctgagataccgggaagcctgtgactgcccatgggctccctgatgcttctcttcgtggaaa

SEQ ID NO: 691502 - DNA, 120 bp, Artificial Sequence
  ENSG00000188334_1 (sequence is synthesized)
cgacgcgaaattcctcagcttgcatcttccctgttattttaaatgaattatcatcaactgtggaaactataactcattttccagaagttacagatggggagtgtgtctttccattccact

SEQ ID NO: 691503 - DNA, 120 bp, Artificial Sequence
  ENSG00000188334_2 (sequence is synthesized)
gctcgttaaacaagacctacgaaggatactggaagttttgcagtgcagaagattttgcaaactgtgtatttcccttctggtacagacgcttgatctactgggagtgtactgatgatgggg

SEQ ID NO: 691504 - DNA, 120 bp, Artificial Sequence
  ENSG00000188334_3 (sequence is synthesized)
aagcatttgggaaaaaatggtgttcactgaccaagaattttaacaaggaccgaatttggaaatactgtgaatgatggtttgcttgcatctgctggctatcagatacagacaaaacatgat

SEQ ID NO: 691505 - DNA, 120 bp, Artificial Sequence
  ENSG00000188334_4 (sequence is synthesized)
cgatgcatccagcagtaataatcttcttcctgaaagccatggattcttcagcaggtcagaatggtctgatatacagtaacccccaattttcttaataaaataaaactctttttctccagc

SEQ ID NO: 691506 - DNA, 120 bp, Artificial Sequence
  ENSG00000188338_0 (sequence is synthesized)
gcagccgagttcagccgggagcagagcgaaccgcaccggcccgagcggagcgccgcacgttcccaaccgcgaggccagacatctgactgttggtgtgagaccagtgctcctggtggtgtg

SEQ ID NO: 691507 - DNA, 120 bp, Artificial Sequence
  ENSG00000188338_1 (sequence is synthesized)
ccctgagccatggaggcgcctttgcagacagagatggtggagctggtgcccaatggcaaacactcagaggggctgctcccggtcatcacccccatggcaggcaaccagagggtcgaggac

SEQ ID NO: 691508 - DNA, 120 bp, Artificial Sequence
  ENSG00000188338_2 (sequence is synthesized)
cctgcacggagctgtatggagggcaagagcttcctacagaaaagtcccagcaaggagccacacttcactgacttcgaggggaagacatcattcgggatgtcagtgttcaacctcagcaat

SEQ ID NO: 691509 - DNA, 120 bp, Artificial Sequence
  ENSG00000188338_3 (sequence is synthesized)
gccatcatgggcagcggcatcctgggactcgcctatgccatggccaatacgggcattatccttttcctgttcctgttgacagctgtcgccttgctctccagctactccatccacctgcta

SEQ ID NO: 691510 - DNA, 120 bp, Artificial Sequence
  ENSG00000188338_4 (sequence is synthesized)
ctcaagtcctcaggggtcgtgggcatccgtgcctatgagcagctgggctaccgtgcctttgggaccccaggaaagctggcagcagccctggccatcacgctccagaacatcggagccatg

SEQ ID NO: 691511 - DNA, 120 bp, Artificial Sequence
  ENSG00000188338_5 (sequence is synthesized)
tccagctacctgtacatcatcaagtctgagctgccacttgtcatacagaccttcctgaacctggaggagaaaacctcggactggtacatgaacgggaactacctggtaatccttgtctct

SEQ ID NO: 691512 - DNA, 120 bp, Artificial Sequence
  ENSG00000188338_6 (sequence is synthesized)
gtcaccatcattctgcccctggcactgatgcggcagcttggctacctgggctactccagcggcttctctcttagctgcatggtgttcttcctaattgcagtcatctacaaaaagttccac

SEQ ID NO: 691513 - DNA, 120 bp, Artificial Sequence
  ENSG00000188338_7 (sequence is synthesized)
gtgccctgcccactgccccccaacttcaacaacaccacaggcaacttcagccacgtggagatcgtgaaggagaaggtgcagctgcaggtcgagcctgaggcttcagccttctgcactccc

SEQ ID NO: 691514 - DNA, 120 bp, Artificial Sequence
  ENSG00000188338_8 (sequence is synthesized)
agctacttcacgctcaactcacagacagcatacaccatccccatcatggccttcgccttcgtctgccaccccgaggtgctgcccatctatactgagctcaaggacccctccaagaagaag

SEQ ID NO: 691515 - DNA, 120 bp, Artificial Sequence
  ENSG00000188338_9 (sequence is synthesized)
atgcagcacatctccaacctgtccatcgctgtcatgtacatcatgtacttcctggctgccctcttcggctacctcaccttctacaacggggtggagtcggagctgctgcacacctacagc

SEQ ID NO: 691516 - DNA, 120 bp, Artificial Sequence
  ENSG00000188338_10 (sequence is synthesized)
aaggtggacccgtttgacgtcctgatcctgtgtgtgcgcgtggccgtgctgacagcagtcacgctcacagtgcccatcgttctgttcccggtgcgccgcgccatccagcagatgctgttt

SEQ ID NO: 691517 - DNA, 120 bp, Artificial Sequence
  ENSG00000188338_11 (sequence is synthesized)
ccaaaccaggagttcagctggctgcggcatgtgcttattgccgttggcctgctcacttgtatcaacctgctggtcatctttgcccccaacatcctgggcatctttggggtcatcggtgcc

SEQ ID NO: 691518 - DNA, 120 bp, Artificial Sequence
  ENSG00000188338_12 (sequence is synthesized)
ctgcaagatccacccccaaaatcctggccctgtgttttgctatgcttggcttcttgctgatgaccatgagcttgagcttcatcatcattgactgggcctcagggaccagccggcatggag

SEQ ID NO: 691519 - DNA, 120 bp, Artificial Sequence
  ENSG00000188338_13 (sequence is synthesized)
gaaaccactagggtgaccctcatcctgttctgtctactcaccctagcagccctgcccagactcttcagcccctgctcccatccagtggccagtcgggggaggagaaagacgcgattaaca

SEQ ID NO: 691520 - DNA, 120 bp, Artificial Sequence
  ENSG00000188338_14 (sequence is synthesized)
ctgtggcattcagccaggccccatgtcctctctgtggaaggtttttgttcaagagccaggaccaaggcccttgggccactaccctgctaggctctggagctgtagaggcttcctgaactg

SEQ ID NO: 691521 - DNA, 120 bp, Artificial Sequence
  ENSG00000188338_15 (sequence is synthesized)
ggagcagggtagggctgtcgccttagatcccgcccaagcccctcattccctccttgcacagatgcatacactggggcccagcagctgcctcctgaggtgacacagcctgtaggaacatac

SEQ ID NO: 691522 - DNA, 120 bp, Artificial Sequence
  ENSG00000188338_16 (sequence is synthesized)
acagctgggatcagcctgcagccatcccccgaccctgctgctaggccacggtctgcgccctggggcctcatctcccccagcccacttgttttccccccttttattccctaggcccttttc

SEQ ID NO: 691523 - DNA, 120 bp, Artificial Sequence
  ENSG00000188338_17 (sequence is synthesized)
agactcctgggcccttggatactcttctcccatctcccttcacaggatgacaccctcccataccccatagctggggccagcaggttctgctgagggtggggctggtgtagggacccccaa

SEQ ID NO: 691524 - DNA, 120 bp, Artificial Sequence
  ENSG00000188338_18 (sequence is synthesized)
gagacccctgtcctgtcccttcaccagtcctggggaggctgggactccccctgccacaagcctgggccacagctcacattccactgctgggagaagaaacaggccgaggcccagagtggc

SEQ ID NO: 691525 - DNA, 120 bp, Artificial Sequence
  ENSG00000188338_19 (sequence is synthesized)
ctgcccccgggagccaaagaccccagtggccacactgggatagggtggggaggctggcagccctcttttataaatattatacataagaccagctgtgttttctattcttggtctccatgg

SEQ ID NO: 691526 - DNA, 120 bp, Artificial Sequence
  ENSG00000188338_20 (sequence is synthesized)
tccctggattcctggaaagtgaggtacgggccagaacatggatggtgatggagggcccccgtctccttgtctgggatgagggtggggacagggcaagtcccccacccaccccaccccctg

SEQ ID NO: 691527 - DNA, 120 bp, Artificial Sequence
  ENSG00000188338_21 (sequence is synthesized)
cctcccaaactaaccagtggcacactcagacccagctctgggcctgggccaggctcagcacagacctgctttctcacgggttgaggtggggaggaattaatgaggccccaggaagtggga

SEQ ID NO: 691528 - DNA, 120 bp, Artificial Sequence
  ENSG00000188338_22 (sequence is synthesized)
cagagagaggcctccggaaggaggcaacgtgaggtgcatccccagcagcttcagggagggtctgagctgggggcagctgagccctgagggagccccaggaagggccccctgccctcccct

SEQ ID NO: 691529 - DNA, 120 bp, Artificial Sequence
  ENSG00000188338_23 (sequence is synthesized)
agctcccaggctgccatgtcaactctctgtcaatgccctgagtctggggacaaaagtccaggaatcctgtgccctgttgggctgatctttttatcaacagtaaaatccactacgaataaa

SEQ ID NO: 691530 - DNA, 120 bp, Artificial Sequence
  ENSG00000188338_24 (sequence is synthesized)
ggcaacttcagccacgtggagatcgtgaaggagaaggtgcagctgcaggtcgagcctgaggcttcagccttctgcactcccagctacttcacgctcaactcacaggttctgacaggtcag

SEQ ID NO: 691531 - DNA, 120 bp, Artificial Sequence
  ENSG00000188338_25 (sequence is synthesized)
atcccgcgtcgctgttgtcgctgttgcagccgagttcagccgggagcagagcgaaccgcaccggcccgagcggagcgccgcacgttcccaaccgcgaggccaggtggggtctcactctgt

SEQ ID NO: 691532 - DNA, 120 bp, Artificial Sequence
  ENSG00000188338_26 (sequence is synthesized)
cagtggcacaatctcgcctcactgcaaccgccgcctcccaggcccaagcaattctcccacctcagccttctgagtagccaggaccgcaagtgtgcaacatcaagcctggacatctgactg

SEQ ID NO: 691533 - DNA, 120 bp, Artificial Sequence
  ENSG00000188338_27 (sequence is synthesized)
ctccataccgaggcgtgtggtgcctggctgtgccttgccgctgtggaggtgagtctgcatgccaatccccacagtgttggggtcccctaggcagctcagatcccacctccttcctggggc

SEQ ID NO: 691534 - DNA, 120 bp, Artificial Sequence
  ENSG00000188338_28 (sequence is synthesized)
cacctactgaccaccctccctgcctgccacagacggggtggagtcggagctgctgcacacctacagcaaggtggacccgtttgacgtcctgatcctgtgtgtgcgcgtggccgtgctgac

SEQ ID NO: 691535 - DNA, 120 bp, Artificial Sequence
  ENSG00000188338_29 (sequence is synthesized)
agataggggccctaagcaagccaccaatcatgacctcccaggacccgccagttccctgtcccagcatccaggctgcagtgggtgggcacttcttacactaacaaaccgcggctgaaaaaa

SEQ ID NO: 691536 - DNA, 120 bp, Artificial Sequence
  ENSG00000188338_30 (sequence is synthesized)
gtccagacacccaggtcacagaccctccacccccaggcctcccagagcccctcaccctctgccagccacggtagccccccagtggcctctttttcttccatcttcccatgtgtccccagg

SEQ ID NO: 691537 - DNA, 120 bp, Artificial Sequence
  ENSG00000188338_31 (sequence is synthesized)
tgaagggtaggcctttgactctgggtggtaggacagacataggagaacagggtggggctctagaggaccaggcggggcttctgggggccaaagggaaggaccagctgctgggcaggaggg

SEQ ID NO: 691538 - DNA, 120 bp, Artificial Sequence
  ENSG00000188338_32 (sequence is synthesized)
gctttccggccagtggcctggggtggcttggttttgaatttccgctctgcgggccacgtcctgtacacagcctctcagccagcacgtctgcacacgtgcatggctgctgggaatgggggt

SEQ ID NO: 691539 - DNA, 120 bp, Artificial Sequence
  ENSG00000188340_0 (sequence is synthesized)
atggatcaatacaaccattcaagcctggctgaatttgtgttccttggctttgccagtgtgggctatgtcaggggctggctttttgtcctgctgctattggcatacctgttcaccatctgt

SEQ ID NO: 691540 - DNA, 120 bp, Artificial Sequence
  ENSG00000188340_1 (sequence is synthesized)
ggtaacatgctcatcttctcagtcatccgactggatgcagctctgcacacacctatgtaccactttgtcagtgttctttccttcttggagttgtggtatacagctaccactatccctaag

SEQ ID NO: 691541 - DNA, 120 bp, Artificial Sequence
  ENSG00000188340_2 (sequence is synthesized)
atgttgtctaatattctcagtgagaagaaaaccatttcttttgcaggatgcctccttcagacctacttcttccactccttgggagcgtctgaatgctaccttcttacagccatggcctat

SEQ ID NO: 691542 - DNA, 120 bp, Artificial Sequence
  ENSG00000188340_3 (sequence is synthesized)
gaggtcatccttgcctcccagctcccattttgtgcttacaatgaaatccaacacattttctgtgactttccacctttgctgagcttggcctgcaaggacacatctgctaacattctggtg

SEQ ID NO: 691543 - DNA, 120 bp, Artificial Sequence
  ENSG00000188340_4 (sequence is synthesized)
gactttgccattaatgctttcataattcttatcactttcttctttatcatgatttcttatgcaaggatcattggggctgtgctgaagataaaaacagcatcaggaagaaagaaggccttt

SEQ ID NO: 691544 - DNA, 120 bp, Artificial Sequence
  ENSG00000188340_5 (sequence is synthesized)
tctacctgtgcctcacatcttgctgtggtcctcatcttctttgggagcatcatcttcatgtatgtgcggctaaagaagagctattccctgacccttgaccgaacacttgctatagtttac

SEQ ID NO: 691545 - DNA, 120 bp, Artificial Sequence
  ENSG00000188340_6 (sequence is synthesized)
tccgtactaacaccaatggtcaatccaattatctacagtcttcgtaacaaggaaatcattaaagctatcaagaggaccatcttccagaagggagataaagctagtcttgctcatctttga

SEQ ID NO: 691546 - DNA, 120 bp, Artificial Sequence
  ENSG00000188340_7 (sequence is synthesized)
tttcatttcctttcacctcttcaaagacttcatttctttatgattttctcattttctacatctttatttctattttttactcgatcacttatgtcagcatttaagaatattttagtatct

SEQ ID NO: 691547 - DNA, 120 bp, Artificial Sequence
  ENSG00000188340_8 (sequence is synthesized)
acatacttctttttttaaaaaaaagcatgtatatttcctaggtccacacatttccatccagctagagatcgatttctctgttcctttttccaatcaaacttctcaacacaccatatttcc

SEQ ID NO: 691548 - DNA, 120 bp, Artificial Sequence
  ENSG00000188340_9 (sequence is synthesized)
tcttctttacttcatatccacttctcaacccattccaatcttattttggctcagaccttccaactaatattttgtgaaggccattattgacctcaatgctgccaaatccatgagaaactt

SEQ ID NO: 691549 - DNA, 120 bp, Artificial Sequence
  ENSG00000188340_10 (sequence is synthesized)
cttttccttcctctctcctgaactcttgacacacatgaccagtttttatgcctcaattctcctaactttttactccttaactctccctaactctcatgacatcattacctcccaattttc

SEQ ID NO: 691550 - DNA, 120 bp, Artificial Sequence
  ENSG00000188340_11 (sequence is synthesized)
ttatctttcttgtgagtctttcccagtcttcgttgtcctgccgtgctatctccctagatactcggagttattcttatggatttaaatatgatctctatcacaaggcctcttaaattttta

SEQ ID NO: 691551 - DNA, 120 bp, Artificial Sequence
  ENSG00000188340_12 (sequence is synthesized)
cttaacatgtcaaaattgatttcttaaaatttctaaccatgaaagcttgatgcttttgtttccttgtgtttcttctagaaaattttaaatattctattttgcttccttttcttacaacca

SEQ ID NO: 691552 - DNA, 120 bp, Artificial Sequence
  ENSG00000188340_13 (sequence is synthesized)
taattccaatcaattattaatgtatgccaacaatcttttcacaaaatatattcttaaatcaatttatttcttatactctttagtgtttctaccctggtgtaaattaccaacatctctcaa

SEQ ID NO: 691553 - DNA, 120 bp, Artificial Sequence
  ENSG00000188340_14 (sequence is synthesized)
ttggattaatgtaataatattctacccatgctcctttctcctactctcattctattctaatatattttccacataaaatataaagtaatgtatttgaaatctgaattgtatataccattt

SEQ ID NO: 691554 - DNA, 120 bp, Artificial Sequence
  ENSG00000188340_15 (sequence is synthesized)
tataaaaacatgagaaattctcaattgcccttaagataaaattcaaagcctcaccatactttataaggctataaacggaattcttccctgccttcctcttcaacatagattcatacctct

SEQ ID NO: 691555 - DNA, 120 bp, Artificial Sequence
  ENSG00000188340_16 (sequence is synthesized)
actccctcagctccctctttcctagctacatgattactctttcaggtcttcaaatacattatggatttttctggcttcaggatcttcactccgttttttccccaacatttcatttggttc

SEQ ID NO: 691556 - DNA, 120 bp, Artificial Sequence
  ENSG00000188340_17 (sequence is synthesized)
actcctcctaattgtgtgattttctgttcaaatatcaatttccagtgatgctagctttgagaggacttctgaacactcagtctaatttatgtcactcatttttatctctgaagtatgttt

SEQ ID NO: 691557 - DNA, 120 bp, Artificial Sequence
  ENSG00000188340_18 (sequence is synthesized)
tgcttctcttcaaaatatgtatggcaatttatgtgtttgtggacatttatgtatatatacatagatatagtttgtcattctttcctacaagtatctataaactagatttggtctcaaatt

SEQ ID NO: 691558 - DNA, 120 bp, Artificial Sequence
  ENSG00000188340_19 (sequence is synthesized)
atttcagattttttatttgttgtgtgtccagaaactaacacagcacctaaataggatgagtattcaatgcaatcgtaatgaatgaaacatgtgatgaattttacccacacctggtcaata

SEQ ID NO: 691559 - DNA, 120 bp, Artificial Sequence
  ENSG00000188340_20 (sequence is synthesized)
atatatttggcctttaacaatgacataatgattctaatcattactgaaacccactgttctatagaatgcatcggtcttccctatttgtactcaccagttttctgcacatcccacctcaac

SEQ ID NO: 691560 - DNA, 120 bp, Artificial Sequence
  ENSG00000188340_21 (sequence is synthesized)
ttgtctcacatctgccttttgaatttccttggataatactggtaactagtccttgcttagctactgtgcatcatactaggttaattttctggatctgtatttttttttttcactcacaaa

SEQ ID NO: 691561 - DNA, 120 bp, Artificial Sequence
  ENSG00000188340_22 (sequence is synthesized)
ctttggtgggcatgtaagctatccctagataatattcatttttaacatgatatggttatgcgtaaacataaattttcatgtcatttgggaaaatgcataagtataggattgctaggtcac

SEQ ID NO: 691562 - DNA, 120 bp, Artificial Sequence
  ENSG00000188340_23 (sequence is synthesized)
acgataaatgtatgtttataattagctgtctaactgttttccaaagactagtgctttttgggtccctccgctgtggtacaatgtggggcatgtgtagtgagagttcattcagcctgggca

SEQ ID NO: 691563 - DNA, 120 bp, Artificial Sequence
  ENSG00000188340_24 (sequence is synthesized)
gctttcctgagctgtgggaatgggcttgtgatgaaccccaggcttctgtttctcattgctgcatgtctatgagtaacaaatctgcttttcttgatttgttgtgtgttttatctcagcagg

SEQ ID NO: 691564 - DNA, 120 bp, Artificial Sequence
  ENSG00000188340_25 (sequence is synthesized)
ttcatgaactaggtagagaacctttgcatatatatgtatgtccttttctccaaatcctccctgctgtcatccgcactattttatcatatatttttgtaaaataaacacacagtacattgc

SEQ ID NO: 691565 - DNA, 120 bp, Artificial Sequence
  ENSG00000188342_0 (sequence is synthesized)
ctcggttcccagtgttctggcaggtaaggaacgccggctcttcgcctctcagcgcggcttgtcctttgttccggacgcccgctcctcagccctgcggctcctggggtcgctgctgcatcc

SEQ ID NO: 691566 - DNA, 120 bp, Artificial Sequence
  ENSG00000188342_1 (sequence is synthesized)
cgcacgcctccaccggctgcagacccatggccgagcgcggggaactcgacttgaccggcgccaaacagaacacaggagtgtggctagtcaaggttcctaaatatttgtcacagcaatggg

SEQ ID NO: 691567 - DNA, 120 bp, Artificial Sequence
  ENSG00000188342_2 (sequence is synthesized)
ctaaagcctctggaagaggtgaagttgggaaactgcggattgccaagactcaaggaaggactgaggtgtcatttactttgaatgaggatcttgcaaatattcatgatattggtggaaaac

SEQ ID NO: 691568 - DNA, 120 bp, Artificial Sequence
  ENSG00000188342_3 (sequence is synthesized)
cagcttcagtcagtgctcctagagaacatccatttgtcttgcaaagtgttggaggacagacattaacagtatttactgagagctcatcagataagctgtcattggaaggaatagtggtac

SEQ ID NO: 691569 - DNA, 120 bp, Artificial Sequence
  ENSG00000188342_4 (sequence is synthesized)
aaagagctgaatgccgaccagctgccagtgaaaactacatgcgattaaaaagattgcaaatagaagagtcttccaaaccagtgaggctatcacaacagctggacaaagttgtaacaacca

SEQ ID NO: 691570 - DNA, 120 bp, Artificial Sequence
  ENSG00000188342_5 (sequence is synthesized)
attacaaacctgttgctaatcatcaatacaatatcgaatatgaaaggaaaaagaaagaagacggaaagcgagctcgagctgataaacaacatgttttagacatgctattttcagcctttg

SEQ ID NO: 691571 - DNA, 120 bp, Artificial Sequence
  ENSG00000188342_6 (sequence is synthesized)
agaaacatcaatactataatcttaaggacttggtggacatcacaaagcaacctgtggtgtacctgaaggaaatcttaaaagaaattggtgttcagaatgtaaaagggatccacaaaaaca

SEQ ID NO: 691572 - DNA, 120 bp, Artificial Sequence
  ENSG00000188342_7 (sequence is synthesized)
catgggagctgaagccagagtacagacactatcaaggagaagaaaagagtgactaagaagactcctagccagcatgctagtgaaacgactagcagcgatgctatgcaaaaggcgctgata

SEQ ID NO: 691573 - DNA, 120 bp, Artificial Sequence
  ENSG00000188342_8 (sequence is synthesized)
ctggaaggcttgaacaccgtatgttaataggggttaagtgacagtactttgatttctctcggtaaattttttaaacctgtaattcttgtaaagtttcttaactgtttttttgaggagaaa

SEQ ID NO: 691574 - DNA, 120 bp, Artificial Sequence
  ENSG00000188342_9 (sequence is synthesized)
gattaagagggtttttcttaaatattagcttttaatgtgtacaattaggaaatttttttaagtgaggactctctacccttgccgtatctaaggagctgaggtaatacagatccaaggaga

SEQ ID NO: 691575 - DNA, 120 bp, Artificial Sequence
  ENSG00000188342_10 (sequence is synthesized)
attgtatagcaagaaaaaaacagtcaactacagaaactcttaaaaggaataaaaacccaaagttccttattttgaaattgtcaaagaacaaagcggtgtttttcttttaaacaggtgatc

SEQ ID NO: 691576 - DNA, 120 bp, Artificial Sequence
  ENSG00000188342_11 (sequence is synthesized)
acgtttcgtgttcatactcaacgttaataaaaggagagagtttgtagtgaaatggcagtgttcatcattggcttattttaccgtagtgatgctgagatgagaaatgtgcaggatcatggt

SEQ ID NO: 691577 - DNA, 120 bp, Artificial Sequence
  ENSG00000188342_12 (sequence is synthesized)
cagttgatgtttcttttatttgcttttaagataattagaaattaaatatctttccaaaatttgaagatatgtctcccccagtcagattataagcttctcaaaactggcttgcccccagaa

SEQ ID NO: 691578 - DNA, 120 bp, Artificial Sequence
  ENSG00000188342_13 (sequence is synthesized)
ttttactgcttacccagcagacatgtattgaccatcacatggcaaatgatatcagcaaatcaaaagatgggcgtaggggtccagccgagacagaaaacgttagtttcaattcctggggca

SEQ ID NO: 691579 - DNA, 120 bp, Artificial Sequence
  ENSG00000188342_14 (sequence is synthesized)
ttaaaatgttgcttttctctttctctttaattaatttttaaatgaaaacaatacatgtatatgttagttttttctagcacaacacaatattatatattaagcgatccaaaatcatactgt

SEQ ID NO: 691580 - DNA, 120 bp, Artificial Sequence
  ENSG00000188342_15 (sequence is synthesized)
caagaccatcaaacaaaacaaagaagcttaagtgaactaagcacagggaaaagttgttttttcactcgttcattttgtcatctgcttctagatgctgcaatcaagaagtagcaaatgccc

SEQ ID NO: 691581 - DNA, 120 bp, Artificial Sequence
  ENSG00000188342_16 (sequence is synthesized)
aagttgccatagtgtttgcaggaaaaaaagagaaaaaataataaaaataaggaaggagcaatgccaaaaattgaagaaaatattatataattaaagcaagaagatatctatccattgaga

SEQ ID NO: 691582 - DNA, 120 bp, Artificial Sequence
  ENSG00000188342_17 (sequence is synthesized)
aaaacaatttttatattatttgcttttagcagcaaagcattagaattctgagattgttatagcactaagaagatttttattctgtgtacacactgaaaaataaaattctgagtaaagaaa

SEQ ID NO: 691583 - DNA, 120 bp, Artificial Sequence
  ENSG00000188342_18 (sequence is synthesized)
attcgtaggaaaagagaaaggagcagctggtactgtctctctcctccctcttattgaatgaccttcaaagtcccacaacttaaaccaacattgttagtaccatggttccgttacattata

SEQ ID NO: 691584 - DNA, 120 bp, Artificial Sequence
  ENSG00000188342_19 (sequence is synthesized)
aaataaatacaagattcatataagatgtaaaatggtctcattcttttagtttggaatttttatctaatttctgattttttaatttaaaagcgaactttgatagcatgattgaattgaatt

SEQ ID NO: 691585 - DNA, 120 bp, Artificial Sequence
  ENSG00000188342_20 (sequence is synthesized)
ccagtgaactgtatgcttcttgaaaacagtactgtgtcttaatcatcttgattccacaatgcctagatggggccttttgcatagcagacattttgctaatgttagtggaatgaagtaatt

SEQ ID NO: 691586 - DNA, 120 bp, Artificial Sequence
  ENSG00000188342_21 (sequence is synthesized)
ctctctgaaaagatgaatcataaatgcactactcatgagccagggaatttcctgagtcttttcttaaaacccaggtgaattcttgtggaaatatgactgtttctaaccacagtcatacat

SEQ ID NO: 691587 - DNA, 120 bp, Artificial Sequence
  ENSG00000188342_22 (sequence is synthesized)
ttccagggtataaagctggtaccattatgagacatttatatgtgtattatacaataaggtaaggtctgtcaagtgaccacaccacaatgcttggtggccagtaggcacacaatagatgct

SEQ ID NO: 691588 - DNA, 120 bp, Artificial Sequence
  ENSG00000188342_23 (sequence is synthesized)
agcctttgtttcctttttctgattctcctaggttttatgtcagagtcactataagaattactaaggataggggaaattgcctttctgtttggacaaatattcatagcagttaaagattct

SEQ ID NO: 691589 - DNA, 120 bp, Artificial Sequence
  ENSG00000188342_24 (sequence is synthesized)
gttttgacatgcccagatttagaattctgcaggaaaacagaagtcagagcagctggcaggctgaactggtacacaatataacccagacagtagacctgcccagtgtcacagtattttctg

SEQ ID NO: 691590 - DNA, 120 bp, Artificial Sequence
  ENSG00000188342_25 (sequence is synthesized)
cacacacacacacacacacacggtctttgatttagtggtttagactagctgtgttttcagaagttacttctttgtcaaagacgatagcctttatactctttaatttgattttatgccctt

SEQ ID NO: 691591 - DNA, 120 bp, Artificial Sequence
  ENSG00000188342_26 (sequence is synthesized)
tagcctttatactctttaatttgattttatgcccttttaagctaccttatttagaaggagcagagtgtataaaagctgttcctggcaaagggccacagcagcctaataaacaaatctgac

SEQ ID NO: 691592 - DNA, 120 bp, Artificial Sequence
  ENSG00000188342_27 (sequence is synthesized)
aggagcccagtttgttactaagccaagaataaggcttctctctgttctgaccagtgagattcctgaaacttaactattttttcttgatttttgatattaattatatttgattgtcatatt

SEQ ID NO: 691593 - DNA, 120 bp, Artificial Sequence
  ENSG00000188343_0 (sequence is synthesized)
aggctcccggcggctgcttgcgccccagcgcgcgcccaggcgccttggaatccccgtccttgggcccccgcaaggtccccggccgtgcgcgaggcagcatgatgaggcgcaccctggaaa

SEQ ID NO: 691594 - DNA, 120 bp, Artificial Sequence
  ENSG00000188343_1 (sequence is synthesized)
accggaacgctcaaacgaaacaactgcaaacagctgtctcaaatgtggagaagcattttggagaactgtgccaaatcttcgctgcctatgtgcggaaaactgccaggctgagagacaaag

SEQ ID NO: 691595 - DNA, 120 bp, Artificial Sequence
  ENSG00000188343_2 (sequence is synthesized)
cagacctcctggtgaatgaaattaacgcgtatgctgctacagagaccccgcatttaaagctgggcctgatgaactttgcagatgagtttgccaaacttcaggattatcgacaagcagagg

SEQ ID NO: 691596 - DNA, 120 bp, Artificial Sequence
  ENSG00000188343_3 (sequence is synthesized)
ttgaaagacttgaagccaaagtagttgaacccttgaaaacttatgggaccattgtgaaaatgaaacgggatgacctcaaagcaacactcacagcaaggaatcgagaagctaagcaattaa

SEQ ID NO: 691597 - DNA, 120 bp, Artificial Sequence
  ENSG00000188343_4 (sequence is synthesized)
ctcagttagaaagaacacgtcagcgaaacccatctgatcgacatgttatttcacaggcagaaacggaattacagagagctgcaatggatgctagccgaacaagtcgtcatctggaggaaa

SEQ ID NO: 691598 - DNA, 120 bp, Artificial Sequence
  ENSG00000188343_5 (sequence is synthesized)
ctattaacaactttgaaaggcagaaaatgaaggatataaagactatattttctgaatttatcacaatcgaaatgttatttcacggcaaagctttagaggtctacactgctgcctaccaga

SEQ ID NO: 691599 - DNA, 120 bp, Artificial Sequence
  ENSG00000188343_6 (sequence is synthesized)
atatacaaaacattgatgaagatgaagatttagaggttttccgaaattctctgtatgcaccagattattcatctcgtttagatattgtaagagcaaattcaaagtcacctcttcagagat

SEQ ID NO: 691600 - DNA, 120 bp, Artificial Sequence
  ENSG00000188343_7 (sequence is synthesized)
cactgtcagctaagtgtgtatctggaacaggacaggtatccacttgtcgactaagaaaggatcaacaagcagaagatgatgaggatgacgagttagatgttacagaagaagaaaattttc

SEQ ID NO: 691601 - DNA, 120 bp, Artificial Sequence
  ENSG00000188343_8 (sequence is synthesized)
ttaagtaaactacacatttccattttcatcataaatgacttgaaatccacaatgactaaattgtagaactttatactcactttgctatgttaagcctcaaagtgaagtccaactggaaac

SEQ ID NO: 691602 - DNA, 120 bp, Artificial Sequence
  ENSG00000188343_9 (sequence is synthesized)
agaaaaataattaaaggaaacttatgctgaccaaaaatgaaggctttaaaaaatattgcataccagtcatttcaacatcctacctagtgttacatgatttttgtgtaagtgccttttttt

SEQ ID NO: 691603 - DNA, 120 bp, Artificial Sequence
  ENSG00000188343_10 (sequence is synthesized)
ttaaagatggtgtatttcaaagtatttcatattaatgtactatatctacttgaagttccaatagtacattatgacagaaaccaaaagatctaacaattctgcttagctttttggttaaga

SEQ ID NO: 691604 - DNA, 120 bp, Artificial Sequence
  ENSG00000188343_11 (sequence is synthesized)
ctccatgctttcattaccagaaaagggtcttacgtagtcattatgattcatggaattctattccatgaagccttaagaaaaaaaactttttttaactttccctgaaactttatcatttga

SEQ ID NO: 691605 - DNA, 120 bp, Artificial Sequence
  ENSG00000188343_12 (sequence is synthesized)
taagtaaatttacttttcaagaagagtataaccaaagagtaaagataatgtgacactaagttatcaatgttttatgaatacacataaggcataaatttcagctgtaaaaaagctacattc

SEQ ID NO: 691606 - DNA, 120 bp, Artificial Sequence
  ENSG00000188343_13 (sequence is synthesized)
aatctgactctggttttaaaacaaaactgctgtcataattatacatgatactgcaacttttggaaggctaatttggtggaatgttgcctcatcatagaacaccatagatcattaaaaatt

SEQ ID NO: 691607 - DNA, 120 bp, Artificial Sequence
  ENSG00000188343_14 (sequence is synthesized)
ctataaaaattttaccaagctaccatatagttaataaaagggtatacagtcacttttatttctgaaaatataaaacattgagcctttcagtgtatctgatgcttctcttttggtaaggaa

SEQ ID NO: 691608 - DNA, 120 bp, Artificial Sequence
  ENSG00000188343_15 (sequence is synthesized)
tacttttatttcatggatcccaggcaggcatataaaagttacggaatttataaaatcatttgggataattagaaaatgcaattattcataacagaaaaataaagactttctagaaagctt

SEQ ID NO: 691609 - DNA, 120 bp, Artificial Sequence
  ENSG00000188343_16 (sequence is synthesized)
ctgactttgtcaatcatggctctgttcttaacaaagcactccttcctgagaatagtcctaagtgacaaagttgtttcagtacttttttgtaaaatatttaaaacattttaaaaccctaaa

SEQ ID NO: 691610 - DNA, 120 bp, Artificial Sequence
  ENSG00000188343_17 (sequence is synthesized)
tagcaacttctcttgagcattatttgccttgtttgtaaagttaaaactgcgtaaaacagtaattctggaataaaacatacattctgcctacctcaaagaaatattctaagaacaaaagga

SEQ ID NO: 691611 - DNA, 120 bp, Artificial Sequence
  ENSG00000188343_18 (sequence is synthesized)
atactatccatgaaaatactttcattaatgtaaaattttcattatttagaccagcctaggttggcaaacttcttaaagggccagatagcaaatactgttattcttcgtgggtttaggcaa

SEQ ID NO: 691612 - DNA, 120 bp, Artificial Sequence
  ENSG00000188343_19 (sequence is synthesized)
attcaagactattatacaggtaactatgtaaccatgtaagacttaagtacacttaaaaaatgtgaaaaaccattcctagcttccactacaacaacaacaaaaaacaggcaaccaatccaa

SEQ ID NO: 691613 - DNA, 120 bp, Artificial Sequence
  ENSG00000188343_20 (sequence is synthesized)
ccaacccagcctgtaagtctccatctcttatctccaaaataggaatacaaattgagtatcctttatctgaagtgcttgggaccagaagtatttaagactttggatttcttcagattttgg

SEQ ID NO: 691614 - DNA, 120 bp, Artificial Sequence
  ENSG00000188343_21 (sequence is synthesized)
agtatttgcattataccagttcaacattcctaacccaaaaatctgaaatcttaaatgctgcaatgagcattttctttgagcatcatgttggcactcaaaaagtttgtgattttcggagca

SEQ ID NO: 691615 - DNA, 120 bp, Artificial Sequence
  ENSG00000188343_22 (sequence is synthesized)
tgtgaaatttcagattaccagattaggaatactcaacctgtagtacatttactaggattatcagaattaaatgatagttaattcatacataattatacatcatatagtatctaatacagc

SEQ ID NO: 691616 - DNA, 120 bp, Artificial Sequence
  ENSG00000188343_23 (sequence is synthesized)
tcaataaacaacagctaatatttactgcaaaaacagaggcagcaaggtcactacttaacaggtgatatatggatcaagaatcactgctcttaacagtgatctcagtaaattaatagaaat

SEQ ID NO: 691617 - DNA, 120 bp, Artificial Sequence
  ENSG00000188343_24 (sequence is synthesized)
gcactcctaacatgatttttacctatctcttggttgtgggattgactttctagacatgatctacatttttttagataatttctagacaaaaatgtttggctttaagacaaatgccactgg

SEQ ID NO: 691618 - DNA, 120 bp, Artificial Sequence
  ENSG00000188343_25 (sequence is synthesized)
gtatcaggctagagaatacacctccagtgtacctggtataccttgaggataggagaggaaaaactggctatgagacgacaattactgaagctgagtgatgtgtacatgaaaatttactat

SEQ ID NO: 691619 - DNA, 120 bp, Artificial Sequence
  ENSG00000188343_26 (sequence is synthesized)
tctttttttatatttgaaattgatgaggtgctgggaagctggctttctgaggggacaacaggaggggaattccttgatttgctgcatttatcactttccatggtgtaaaatactcctgcc

SEQ ID NO: 691620 - DNA, 120 bp, Artificial Sequence
  ENSG00000188343_27 (sequence is synthesized)
atggccaatttgttattgacatatcactaaaggcagagttggagagagatgtgcaaagatggctcccaactagaagataccactttctgtaatcaactttttataatgaagtttaaaaat

SEQ ID NO: 691621 - DNA, 120 bp, Artificial Sequence
  ENSG00000188343_28 (sequence is synthesized)
ctttttataatgaagtttaaaaatattaagccctgatacattatagggtaaaaggaaatattcatataaattaatttaaaaatcaaaatacaaggctgggcacagtggctcacacctgta

SEQ ID NO: 691622 - DNA, 88 bp, Artificial Sequence
  ENSG00000188343_29 (sequence is synthesized)
ataataaaaaatttagccagacaaggtggcacacacctgtagtcccagctctcaggaggctgaggcaggaagacagcttgagcccagg

SEQ ID NO: 691623 - DNA, 120 bp, Artificial Sequence
  ENSG00000188343_30 (sequence is synthesized)
ctctcaggaggctgaggcaggaagacagcttgagcccaggagttagaagctgcagtgaaccattatcagaccactgcactccagcctggccagcagaacaagactctgactcttaaaata

SEQ ID NO: 691624 - DNA, 120 bp, Artificial Sequence
  ENSG00000188343_31 (sequence is synthesized)
ataaaactacaaagcttatgtttactctagctggcctcttatctaccaccaccatcccacctcagcccagtttgaaatgcaattccacagtaagtaatccctcacgttaagcttcatctt

SEQ ID NO: 691625 - DNA, 120 bp, Artificial Sequence
  ENSG00000188343_32 (sequence is synthesized)
agctttattcctttgtatctgagaagcattttttaactttccatatattattcaaaatgggtgaccaaatgaaccatctatacaatctttgctcaattaaaaatatcatttctactttct

SEQ ID NO: 691626 - DNA, 120 bp, Artificial Sequence
  ENSG00000188343_33 (sequence is synthesized)
tcattgtgcttggtttggatattccaaacaatcaatttaacattatcctagctacttacaagcttatactttaaagaatcatactgaggtgctttttcatatcaaatttacctgtttatt

SEQ ID NO: 691627 - DNA, 120 bp, Artificial Sequence
  ENSG00000188343_34 (sequence is synthesized)
ggagtgagatcacagtgtcattgttatgaatgagccatgaagtagtggatgaaggaaccgtggaaactttcacttgtaatctacctaactgcagaggtggatgcaaacttgataaaacgt

SEQ ID NO: 691628 - DNA, 120 bp, Artificial Sequence
  ENSG00000188343_35 (sequence is synthesized)
acattttcataagactgtgtgagtctattaaagagaagcgttctgtgttttattttacccttttcaagctaacctttagggcatcttgaggtcttgaatttccccactttatttgccaac

SEQ ID NO: 691629 - DNA, 120 bp, Artificial Sequence
  ENSG00000188343_36 (sequence is synthesized)
ttttggccaaggggtggctgtttactgggggtagtgggaatagtacccagggggaagaaaataagcataacttaatgtcttgtgtggcacataagtacgttttaaagaatgactggagat

SEQ ID NO: 691630 - DNA, 120 bp, Artificial Sequence
  ENSG00000188343_37 (sequence is synthesized)
ggaaatgttgggaatggtaatgtggatggataaattattaataaatgggtaagacatcattgctgcatccatggtttggaaaattgaccaatggtttactaacaacaacaaaatgctatg

SEQ ID NO: 691631 - DNA, 120 bp, Artificial Sequence
  ENSG00000188343_38 (sequence is synthesized)
aattgtatcatggaagcaaaccaatactgagacaccgtgtggactttttgctctgggtagcaggagaagtgtccttgtgattgttttctttctaaaagcccatatttttcctttaaatac

SEQ ID NO: 691632 - DNA, 120 bp, Artificial Sequence
  ENSG00000188343_39 (sequence is synthesized)
ttaataagcacttttacttgtatttattttcagtttcacggcataggttaacttatcagaagttgcccagttagaactgcgttgcttttttatacttttcagaacctaaaacgggaattt

SEQ ID NO: 691633 - DNA, 120 bp, Artificial Sequence
  ENSG00000188343_40 (sequence is synthesized)
caattttcaaaaaacagaatgagtataaaaaaaattgaactcatcattgctatccatacaaatttgaagagtaatcatatttggaggtacttttggaaaaatgtggagttcttgtcatga

SEQ ID NO: 691634 - DNA, 120 bp, Artificial Sequence
  ENSG00000188343_41 (sequence is synthesized)
aacttctgtaataaacaagtaactctcaattatatatgataactggggacttaatgtttcaaagataatttatattcacaggtaatcctaaaatcttattttagccaataatttcaatgc

SEQ ID NO: 691635 - DNA, 120 bp, Artificial Sequence
  ENSG00000188343_42 (sequence is synthesized)
ccctttgtagaaaacctttgtgctatttatcaaatagcaaagtgaattgatttgcatttgttctccttttatttcccttgcttaccaaatggtggaggtcctaatgaacaatgacaaaaa

SEQ ID NO: 691636 - DNA, 120 bp, Artificial Sequence
  ENSG00000188343_43 (sequence is synthesized)
cccctcagtcatatcacctcggtaacttatcctcccctggacctatttcttctcttctataaaatgacagaagattgcattaagtgcagctctattatttcttaattatcttttatactg

SEQ ID NO: 691637 - DNA, 120 bp, Artificial Sequence
  ENSG00000188343_44 (sequence is synthesized)
ccagaaaccacatgaggagtggctctttgagagcatttgaggttccagaacacctccattcctgaggggagtctcttgagcagcgatttggggctgcgccagttgcttggtccttcttcc

SEQ ID NO: 691638 - DNA, 120 bp, Artificial Sequence
  ENSG00000188343_45 (sequence is synthesized)
tatagaaattgtgcatttttacttttaaacgagtagagaatttgaatataaagattgaaaagaaatgcatttaggaattctcactatagaaattttaaagaggttacgccacctaattca

SEQ ID NO: 691639 - DNA, 120 bp, Artificial Sequence
  ENSG00000188343_46 (sequence is synthesized)
aatccccttatattgttttacacagtagactttgcaaacgaacaaacaaaaaattcagatgtttttataaacagtaaattcaaatttctgaattttattttcacatggtgatgactaaat

SEQ ID NO: 691640 - DNA, 120 bp, Artificial Sequence
  ENSG00000188343_47 (sequence is synthesized)
attaattctacaattaaagatctattgttaatcctaatatatcagtgtcctctatgccctgctttgagaaaaggaaagaaaattttcccatttaatttccttcatcttttagaaataaaa

SEQ ID NO: 691641 - DNA, 120 bp, Artificial Sequence
  ENSG00000188343_48 (sequence is synthesized)
caactatgtgacatcatgacttccagccagttaacctcaggagtcttaagagtataattaagatccaagttggacacaaacctagaaaggactgtctactataacaaggttcttctgtta

SEQ ID NO: 691642 - DNA, 120 bp, Artificial Sequence
  ENSG00000188343_49 (sequence is synthesized)
agggtagaaaagatggagctagaaaggcttaaaagtggtaaacatttggaaatagtgccttaaggaaagagaactgacaagtcatggcattccagatcctagtaaggttggaatccataa

SEQ ID NO: 691643 - DNA, 120 bp, Artificial Sequence
  ENSG00000188343_50 (sequence is synthesized)
aaccggtaacagcccgagcccagctgcccagggccgcccacactggagggctggggtgagggaagtggaagcctctgtccatggggcctctgcgccgaattccgaccctgagtgggaggc

SEQ ID NO: 691644 - DNA, 120 bp, Artificial Sequence
  ENSG00000188343_51 (sequence is synthesized)
tgcacggtccccgctgtgacctggggcctaattccttgggctgcagccaccgccggcggcgaagaggagcccggggcccggccggctgccacccacccacgccaccgggtctcgggtccc

SEQ ID NO: 691645 - DNA, 120 bp, Artificial Sequence
  ENSG00000188343_52 (sequence is synthesized)
cacactgccgcgggcagtgcggaagcctaggaggcagccgggcgcccaggccgcgctgcgcggagcagccggagcagccacctccccagttaaggccaggcccacccggcctgggccttt

SEQ ID NO: 691646 - DNA, 120 bp, Artificial Sequence
  ENSG00000188343_53 (sequence is synthesized)
gagacttgaaaggcacttgtgcagttgacttgtcctgctccactgttttggaactctgaaaccatggaaagaagcctggctgaggtgctagacaataagaaacacgtggcccctgctgac

SEQ ID NO: 691647 - DNA, 120 bp, Artificial Sequence
  ENSG00000188343_54 (sequence is synthesized)
ggctgggccgcaacttgccaaaccctgatctagagagctatgcccttttcatatctagccttcagaatataaaattcaacaaacttattttcaagatacaacttttaggtatccacttgt

SEQ ID NO: 691648 - DNA, 120 bp, Artificial Sequence
  ENSG00000188352_0 (sequence is synthesized)
gaagctgcacacatacatgtaagagaagcaaaaatgtcagatgatatcaggaaaaggtttgaatttccaaattctcttatccaatcacaggctgtgggtcatcttattgctgcagtccta

SEQ ID NO: 691649 - DNA, 120 bp, Artificial Sequence
  ENSG00000188352_1 (sequence is synthesized)
aaggaaaatggtttttcagaaaagattcaccaatctacaaatcagactcctgctttgaacttgctgtgggagaagtgttgcagtgacaatgtagtggttcgaacagcctgctgtgaaggt

SEQ ID NO: 691650 - DNA, 120 bp, Artificial Sequence
  ENSG00000188352_2 (sequence is synthesized)
ctggtggcactcgttgctcaggatcatgcagagttcagctatgttctcaatgggatactcaacttgattccatcaaccagaaatacacatggcttgataaaagccattatgcacttacta

SEQ ID NO: 691651 - DNA, 120 bp, Artificial Sequence
  ENSG00000188352_3 (sequence is synthesized)
caaatgcaagctcttaaggaaggacaaggtggggaaaagaatattcagagtatatataccattagaaatcatcctcatcctttgataactgtgcttgaacacagacctgattgctggcca

SEQ ID NO: 691652 - DNA, 120 bp, Artificial Sequence
  ENSG00000188352_4 (sequence is synthesized)
gtgtttttgcagcagctgacagcgtttttccagcagtgccctgaaaggttagaagtttcatgcattcaaataatggcaccatttctgtggtatctgtattgtgaaccatctcagttacaa

SEQ ID NO: 691653 - DNA, 120 bp, Artificial Sequence
  ENSG00000188352_5 (sequence is synthesized)
gaatatgctaaactccgactagccctgctgaaagtcttacttcaaccccaggttctttgtgacaaagatcaaccatcaatactggaacagcagatacttcaactgtgttgtgacatagtt

SEQ ID NO: 691654 - DNA, 120 bp, Artificial Sequence
  ENSG00000188352_6 (sequence is synthesized)
ccatgtttgcaggtaaaagatttgatacagacaacagaggcgatgatgtttattgaggaagtatgtttaagccttttgcgtcatcctgttttctggaaaattcagcttacccagatgagt

SEQ ID NO: 691655 - DNA, 120 bp, Artificial Sequence
  ENSG00000188352_7 (sequence is synthesized)
cttcagctgctgtgtgtcagtgaagtcagcttaaagataactggtgaatgttcatcttcaattcaccttttagagcacagtgttgaacttctgaaggaggattttcctgttgaactggtc

SEQ ID NO: 691656 - DNA, 120 bp, Artificial Sequence
  ENSG00000188352_8 (sequence is synthesized)
ataattggaatagctttactacttctacagactccagcaagtcagcagaagccaatcttaaatctagctttgaagctcctctctgttactgaggatcagaaaatcccaaagtcctctctg

SEQ ID NO: 691657 - DNA, 120 bp, Artificial Sequence
  ENSG00000188352_9 (sequence is synthesized)
ctgctagtgatgccaattctgcagatactatcttctactgccttggaagactgtatatctgtggatgaagaaggtccctctaggcagcagttggctctaaaccttttggaaatgatacag

SEQ ID NO: 691658 - DNA, 120 bp, Artificial Sequence
  ENSG00000188352_10 (sequence is synthesized)
caggaatgttacagagatgaccaccaaaagctctcctacaagcttgtgtgccctgtaaccagtatgtatggtacaatatttacagcctggaggattcttgaagtaatgacagactcgtct

SEQ ID NO: 691659 - DNA, 120 bp, Artificial Sequence
  ENSG00000188352_11 (sequence is synthesized)
gctgcaagtgactggttggcttcagtagagtcattgcttcctattactgctgtgatccctgcgcctgcctttcttctgctggctcacctccttgttgaagacaaaggacaaaatcttcac

SEQ ID NO: 691660 - DNA, 120 bp, Artificial Sequence
  ENSG00000188352_12 (sequence is synthesized)
caaatactcaaggtcactacagaattagcccaagcagattcctcccaggtgccaaatctgattccagttttgatgttcaaattgggaagaccactggaacctatattatataatgatata

SEQ ID NO: 691661 - DNA, 120 bp, Artificial Sequence
  ENSG00000188352_13 (sequence is synthesized)
ttgtatactttacctaagcttggtgttcacaaggtgtgtataggacaaattctacgaataatacaactacttggaaccacaccacgactaagagctgtcactttgcgcttgctgacatct

SEQ ID NO: 691662 - DNA, 120 bp, Artificial Sequence
  ENSG00000188352_14 (sequence is synthesized)
ttgtgggaaaagcaggaccgagtctatcctgaactgcagcgtttcatggctgtgtctgatgtaccttctctttcggtgggcaaggaagtccaatgggagaaactgattgcaaaagcagca

SEQ ID NO: 691663 - DNA, 120 bp, Artificial Sequence
  ENSG00000188352_15 (sequence is synthesized)
tcaatcagagatatatgtaagcagaggccatatcaacatggtgcagatatgttggcagctatttctcaagtgttgaatgaatgcaccaagcctgatcaagctactccagcagccttggta

SEQ ID NO: 691664 - DNA, 120 bp, Artificial Sequence
  ENSG00000188352_16 (sequence is synthesized)
ttacagggtcttcatgcactctgtcaagctgaggttgtttgcattcgctccacttggaatgctctctctccaaagctgagttgtgacacaagacctctcattctgaagacactgagtgaa

SEQ ID NO: 691665 - DNA, 120 bp, Artificial Sequence
  ENSG00000188352_17 (sequence is synthesized)
ctattttctctagttccttccttaacggtcaatacaactgaatatgagaattttaaagttcaagtcctcagcttcctctggactcatactcaaaacaaggacccaattgtagcaaatgct

SEQ ID NO: 691666 - DNA, 120 bp, Artificial Sequence
  ENSG00000188352_18 (sequence is synthesized)
gcatatagatccctggccaactttagtgcaggagaacacaccattcttcatctgcctgaaaagataagaccagaaattcccattcctgaagagttagatgacgatgaagatgttgaggat

SEQ ID NO: 691667 - DNA, 120 bp, Artificial Sequence
  ENSG00000188352_19 (sequence is synthesized)
gtggatctttcagttcctggctcttgctatctcaaactgttgtcactcactccccctttggttttaccagctttggaggaattttttacatcacttgtgaagcaagaaatggtgaatatg

SEQ ID NO: 691668 - DNA, 120 bp, Artificial Sequence
  ENSG00000188352_20 (sequence is synthesized)
cctcgtgggatatatcactctgcattaaaaggaggtgcccgctcagaccaaggaaagactgtagcaggaatccccaattttatattgaaaatgtatgaaacaaacaagcaaccaggactg

SEQ ID NO: 691669 - DNA, 120 bp, Artificial Sequence
  ENSG00000188352_21 (sequence is synthesized)
aaacctggccttgcaggtggtatgttattttgctatgatgtttccatgtatcagagtaaagatggaaaaccattgaacagactgatggccagcagagggcgaagtttcaagcagacttca

SEQ ID NO: 691670 - DNA, 120 bp, Artificial Sequence
  ENSG00000188352_22 (sequence is synthesized)
cttgctcttgtacatgaggttcatatccagctttcagagtggcaccgtgcaatttttcttccacaggcctggcttgcatacatgaatcgagcttatcatgccattttacagggaagacta

SEQ ID NO: 691671 - DNA, 120 bp, Artificial Sequence
  ENSG00000188352_23 (sequence is synthesized)
ggagagctggagttgcagttaaaacatggaaaagaagaacctgaggaggtgcagtacaaaaaaagcacagcctggctctgggttagagacatgctgactgatgagatcaccaaggcagct

SEQ ID NO: 691672 - DNA, 120 bp, Artificial Sequence
  ENSG00000188352_24 (sequence is synthesized)
ggagagtccggtagtgaaaggcaatgcgctgttagctctaagcagccttgctgtcgtcgtatctagacatgaagccagcctctcctcagactctgacgggctcctggaggttcaacctaa

SEQ ID NO: 691673 - DNA, 120 bp, Artificial Sequence
  ENSG00000188352_25 (sequence is synthesized)
tttcctttcaatgaaagagtgggtttccatggtacttgatacactcttggtcattgtggatagccattaccaacccagagggcaacttctctcctggttttattataagtcctattctgg

SEQ ID NO: 691674 - DNA, 120 bp, Artificial Sequence
  ENSG00000188352_26 (sequence is synthesized)
tgaaaacacagctagtgccattgcccgttctgctgccgccacggctttgtctctccttgtgccagttttcattatctcttgcaaagagaaggttgaggaaatcctgaacatgctgactgc

SEQ ID NO: 691675 - DNA, 120 bp, Artificial Sequence
  ENSG00000188352_27 (sequence is synthesized)
caggttacctgggaaaccaagtgctgatgagtctcaagccgtgcaaatccacatgggccttgctttagggatgtttctctctcgcttgtgtgaagagaaactcagtgatatatctggcca

SEQ ID NO: 691676 - DNA, 120 bp, Artificial Sequence
  ENSG00000188352_28 (sequence is synthesized)
agagatgaaccttcttctgatgaagtcgttggatgccctggaaaattgctgctttgacactagtcttgaatacaacacgggctgtatattgggagttggacttgttctgtccctcatgag

SEQ ID NO: 691677 - DNA, 120 bp, Artificial Sequence
  ENSG00000188352_29 (sequence is synthesized)
ccacagcagccaaatgcagtcccgcgttcacgtagcagcattgctccggaagctgtctgcgcacgtagatgacagcgggagccagagcagaacgtttcaggaggtccttgcctacacact

SEQ ID NO: 691678 - DNA, 120 bp, Artificial Sequence
  ENSG00000188352_30 (sequence is synthesized)
tagctgtgtatgtacatcagcgttcagtgctggaattattgaggctacagaggctgaggatgttatgaacaagcttcgactgttagtggagaatagccagcagacttcaggttttgccct

SEQ ID NO: 691679 - DNA, 120 bp, Artificial Sequence
  ENSG00000188352_31 (sequence is synthesized)
ggctttaggaaacatagttcatggattgtctgtgtgtggacatggaaaagctgaagacttgggcagcaaactactccctgcctggatcagaattgttctaacagagggcactcccacaat

SEQ ID NO: 691680 - DNA, 120 bp, Artificial Sequence
  ENSG00000188352_32 (sequence is synthesized)
gctttgtctggcagctcttcatggcatggtggccttggtaggctctgaaggggatgtaatgcagctgaaatcagaagccatccagacctctcattttcaaggcagacttaatgaagtcat

SEQ ID NO: 691681 - DNA, 120 bp, Artificial Sequence
  ENSG00000188352_33 (sequence is synthesized)
tagaaccttaactcaggtcattagtgtctctggggtgattggtctccagtcaaatgcagtctggcttcttggacatcttcatctatctactctatcctcaagtcaaagtagagcctctgt

SEQ ID NO: 691682 - DNA, 120 bp, Artificial Sequence
  ENSG00000188352_34 (sequence is synthesized)
tcctactgactatagctacttgcctgaaagcagttttattggagcagctattggcttcttcattacaggaggaaaaaaaggtcctgaatctgtgcctccttcccttcttaaagtagtgat

SEQ ID NO: 691683 - DNA, 120 bp, Artificial Sequence
  ENSG00000188352_35 (sequence is synthesized)
gaaacccatagcaactgttggagaaagctaccaatatcctcctgtgaactgggctgcacttctctctccacttatgaggctaaattttggtgaagagatccagcaactgtgccttgaaat

SEQ ID NO: 691684 - DNA, 120 bp, Artificial Sequence
  ENSG00000188352_36 (sequence is synthesized)
tatggtgacccaggcacagtcatcccagaatgcagctgcactattgggcttgtgggtgacaccaccactgatccacagtctgagtctgaataccaagagatatctcctgatatctgcacc

SEQ ID NO: 691685 - DNA, 120 bp, Artificial Sequence
  ENSG00000188352_37 (sequence is synthesized)
tctgtggataaaacacatctctgatgaacagatcctgggttttgttgaaaatttaatggtggcagtttttaaagcagcttccccacttggaagtcctgagctatgcccaagtgctttaca

SEQ ID NO: 691686 - DNA, 120 bp, Artificial Sequence
  ENSG00000188352_38 (sequence is synthesized)
cggtctgagccaggccatgaaactgcccagccctgcccaccacctctggagtctgctctctgaagctactgggaaaatttttgacctcctgccaaataagattcggagaaaggatctaga

SEQ ID NO: 691687 - DNA, 120 bp, Artificial Sequence
  ENSG00000188352_39 (sequence is synthesized)
gctgtatatcagcatagcaaaatgcctcttagaaatgacagatgatgatgccaatcggatcgcccaggttactaagagcaacatagaaaaagctgcctttgtcaaactgtacttagtctc

SEQ ID NO: 691688 - DNA, 120 bp, Artificial Sequence
  ENSG00000188352_40 (sequence is synthesized)
tcaaggacgattccccttggtgaacctgaccgatatgctgagcgttgctgtgcagcaccgtgagaaagaggtgttggcctggatgattctgcacagcttataccaggcacggattgtgag

SEQ ID NO: 691689 - DNA, 120 bp, Artificial Sequence
  ENSG00000188352_41 (sequence is synthesized)
ccatgccaatacgggcgttttgaagagaatggagtggctcttggaactgatgggttatattagaaatgttgcttaccagtcaacatcctttcacaatacggctcttgacaaggctttgga

SEQ ID NO: 691690 - DNA, 120 bp, Artificial Sequence
  ENSG00000188352_42 (sequence is synthesized)
cttcttcttgctgatatttgcaaccgcagtggttgcatgggctgaccacactgcccctctcctcctcggcctcagtgccagttggttgccatggcatcaggagaatggcccggctgggcc

SEQ ID NO: 691691 - DNA, 120 bp, Artificial Sequence
  ENSG00000188352_43 (sequence is synthesized)
agtaccaagcttccttggcaggagtccaatgcacagggtcactctgcaggaggttctcactctccttcccaatagcatggctctgctgctgcagaaagagccatggaaggaacagaccca

SEQ ID NO: 691692 - DNA, 120 bp, Artificial Sequence
  ENSG00000188352_44 (sequence is synthesized)
gaagttcattgactggctattcagcatcatggaaagccctaaagaagccctctcagcacagtccagggatcttttgaaagccaccctgctgtccttgagagttctcccagagtttaagaa

SEQ ID NO: 691693 - DNA, 120 bp, Artificial Sequence
  ENSG00000188352_45 (sequence is synthesized)
gaaagctgtatggaccagagcatatggttggtgaacagttttgcagtaaccagcagcattctcagctggatgaggaaaaccatataagtggaagaagtttttcagaattcatgcctggta

SEQ ID NO: 691694 - DNA, 120 bp, Artificial Sequence
  ENSG00000188352_46 (sequence is synthesized)
ttgctgagacatgatgcagagagttaagggtcatgaaaagatggccacatcactgacagcttgacacatgcctcctaagagaggagtgcattgctttagtacccgggccagttgagactg

SEQ ID NO: 691695 - DNA, 120 bp, Artificial Sequence
  ENSG00000188352_47 (sequence is synthesized)
aaacaggaacttggattttctttatttggcttgagttcaatgtggagattttctttgtgaaagcttgaagatattatcttctccctgctaaattccagtaaaataatgttgtcaattttg

SEQ ID NO: 691696 - DNA, 67 bp, Artificial Sequence
  ENSG00000188352_48 (sequence is synthesized)
gcctgggcaatggcgggcgcccctcccgcagcctcgctgccgccttgcagtctccaagccagtgaga

SEQ ID NO: 691697 - DNA, 120 bp, Artificial Sequence
  ENSG00000188352_49 (sequence is synthesized)
tggtgatgactggattctggcactttatggttatagaaaccacttttatatattttgatttcctcccctaatgcttaattatctccatgtggacattatgatagagtgtcattgaaggta

SEQ ID NO: 691698 - DNA, 120 bp, Artificial Sequence
  ENSG00000188352_50 (sequence is synthesized)
ttaaaaatgtaattaattgcttaacagttatatcttgtgaaaacaatgtggaaatctttttacatttttaatttttggttcaaacaaacctaactaatcaaagagcagccacaaaaatcc

SEQ ID NO: 691699 - DNA, 120 bp, Artificial Sequence
  ENSG00000188352_51 (sequence is synthesized)
tcaaaatgcaaattagacacaataatgtacagctaccaattacagattttagtgtttttgtattccacagcaacaaactgccaagtcttaaaaaaaaagaagtcaactaaagcattctgt

SEQ ID NO: 691700 - DNA, 120 bp, Artificial Sequence
  ENSG00000188352_52 (sequence is synthesized)
tgttccctgagctctactgtatattctactggaagattttaagctctgtcatggacatatgactagaatcacaaattttttaaaaagtgttcagacaaggcaaatatctaactatgagct

SEQ ID NO: 691701 - DNA, 120 bp, Artificial Sequence
  ENSG00000188352_53 (sequence is synthesized)
atagaagttaaatatattgagtatgtcagtgtttgcattttatttttggatggtatagaattttattagttttctataataatcattgcttatactggcttacagtgatttactgtatta

SEQ ID NO: 691702 - DNA, 120 bp, Artificial Sequence
  ENSG00000188352_54 (sequence is synthesized)
acataagctttttatacagatctgagattgtatctaataagatgactagagtcatgaccatttagttaatctaaaaaatgaatagatttttaaaaaattaatttcagtggtcttttatgt

SEQ ID NO: 691703 - DNA, 120 bp, Artificial Sequence
  ENSG00000188352_55 (sequence is synthesized)
tatagagtgatggagtctaacaaaattttaaaatcttgtcacaaaaaaggatacagaaaagattttgcataatgttttattattatcctctctatgatcttttcgcttatcatttcagat

SEQ ID NO: 691704 - DNA, 120 bp, Artificial Sequence
  ENSG00000188352_56 (sequence is synthesized)
tttgtctgattgtattcttttgtgataggtacatagtatagtttaaccttatgtgcttattttttaaccagaatgttaaatgcacccatctgttctattgaaacagcttgaggtagtatg

SEQ ID NO: 691705 - DNA, 120 bp, Artificial Sequence
  ENSG00000188352_57 (sequence is synthesized)
gtgtttaaatcatacgaaaaaacgttacatctgagtaggattgaacaagaaaactagtgtaaacaattgtgttcactgataattaaaattcatttaaaaggctaaatgtattccacaaga

SEQ ID NO: 691706 - DNA, 120 bp, Artificial Sequence
  ENSG00000188352_58 (sequence is synthesized)
tgaatttgcactggtactctaggtcattgatttaaacaatacttctttcttacataagccaagtgaaaagatcattagactattcagagatttactgagtagtttcattattatacattt

SEQ ID NO: 691707 - DNA, 120 bp, Artificial Sequence
  ENSG00000188352_59 (sequence is synthesized)
attctttctatagagttatgccaaagatgttactgatatttatttcagagctataaattaatgcttttaaaagatggatcaaattgtatggtcattcagctttgatgtaaagcttatagg

SEQ ID NO: 691708 - DNA, 75 bp, Artificial Sequence
  ENSG00000188352_60 (sequence is synthesized)
aaattgtatggtcattcagctttgatgtaaagcttatagggcctttatcttttaaaaagtaggctggggaggcag

SEQ ID NO: 691709 - DNA, 86 bp, Artificial Sequence
  ENSG00000188352_61 (sequence is synthesized)
aggcacaggagctgggatcatgccactgcattccagcctaggtgacagcctaggtgacagcctaggtgtctcaaaaaaaaaaaaaa

SEQ ID NO: 691710 - DNA, 120 bp, Artificial Sequence
  ENSG00000188352_62 (sequence is synthesized)
agcctaggtgacagcctaggtgtctcaaaaaaaaaaaaaagtattctaatgcttatatgtggtaattattctatatgtatattgtgtttagaagtactcacttgcccctattactatatg

SEQ ID NO: 691711 - DNA, 120 bp, Artificial Sequence
  ENSG00000188352_63 (sequence is synthesized)
ccctacccaagaaatggtagacgataccatttgaaaaatatgtttgattgtggactgtgattaggaacttacattattttattttgaatgttattttctgatcattaaaaagttatttac

SEQ ID NO: 691712 - DNA, 120 bp, Artificial Sequence
  ENSG00000188352_64 (sequence is synthesized)
tattcctaatctgttgttgttgttgttgttgttctgagaccatgttgatatgtttatggactcttaggagtaagatagctcctcatcaatcttatgtctaaaatgtatttacataaagga

SEQ ID NO: 691713 - DNA, 120 bp, Artificial Sequence
  ENSG00000188352_65 (sequence is synthesized)
taccaacttttaattatgagagtattgtcaagattttaaagtcaatattgtaaaactagtgtttccaaaataatagaattcataaagccaaccattaaaaatcattttgttaatgtttta

SEQ ID NO: 691714 - DNA, 120 bp, Artificial Sequence
  ENSG00000188352_66 (sequence is synthesized)
agttctaaaaaataagccacaaagacattaataaaggcaggacagactctccaaactttgtgaattactcagtgtttgtcattgtaatgagttgaaatacttggtggaagattctttttt

SEQ ID NO: 691715 - DNA, 120 bp, Artificial Sequence
  ENSG00000188352_67 (sequence is synthesized)
cacaatgaataaaatcaaatttatccttactgggctatacaatacctatcacagtacctggtgcataatctatatgtaaattttaaagttcaagtcctcagcttcctctggactcatact

SEQ ID NO: 691716 - DNA, 120 bp, Artificial Sequence
  ENSG00000188352_68 (sequence is synthesized)
attcagttttgatactgaggtgtcatgacagcctgtaatttcagctcaactgcttcccccatttcttgtcttaatgtgcttgaaatacacatggcttgataaaagccattatgcacttac

SEQ ID NO: 691717 - DNA, 120 bp, Artificial Sequence
  ENSG00000188352_69 (sequence is synthesized)
agaagttgtttgtttagaaataatttttttgatcataattaatgtaagttgcttttaaaggccaccaaaatagttgacccaactgaatactcaaatatttcaatgtatttctgaaagaaa

SEQ ID NO: 691718 - DNA, 120 bp, Artificial Sequence
  ENSG00000188352_70 (sequence is synthesized)
ctgccatgttttcccccactgcccagcgtatttattagggagtaatgtctaggaatttgctttacttcatcaatgcttaactgtcattattcagaataaatatcaatttattgtttaaag

SEQ ID NO: 691719 - DNA, 120 bp, Artificial Sequence
  ENSG00000188352_71 (sequence is synthesized)
aattttaataaaaatataacacagattctgaactgttgctaagatcatgaatttagcttaaaaccttaatgccgaaggtcttctctgtgtattttgtgtgcctctgtcctgcccttggga

SEQ ID NO: 691720 - DNA, 120 bp, Artificial Sequence
  ENSG00000188352_72 (sequence is synthesized)
attcaactagcataaatgtcactgcttcaccattccagctcagcaaccacatctggttatttgcacatgttggtcacttacaggtctctgccttagttcctactgactatagctacttgc

SEQ ID NO: 691721 - DNA, 120 bp, Artificial Sequence
  ENSG00000188352_73 (sequence is synthesized)
ttcctactgactatagctacttgcctgaaagcagttttattggagcagctattggcttcttcattacaggaggaaaaaaagtcttgctctgacgcccaggctagagtgcagtggcgtgat

SEQ ID NO: 691722 - DNA, 120 bp, Artificial Sequence
  ENSG00000188352_74 (sequence is synthesized)
attttccttgggctaactcctcactgcggtgctgctccacagccagcccccgcgcgcagccctccccgcaccagctcggctgcagagcgcgggtccgccgcccacgccgcctttcaaccg

SEQ ID NO: 691723 - DNA, 120 bp, Artificial Sequence
  ENSG00000188352_75 (sequence is synthesized)
cagtgcgcggcccgggccttagacgcgcgtgcgcgcgagccggggagggcgggccccagccggaggaggcggaacagggcctcgcgatatgcagcccattggctctctcctgcagtcccc

SEQ ID NO: 691724 - DNA, 81 bp, Artificial Sequence
  ENSG00000188352_76 (sequence is synthesized)
agcttcaaatatatatacatgtgggcttttaggaacactgaaattgtttcaagccttataaagtcctattctggtgaaaac

SEQ ID NO: 691725 - DNA, 120 bp, Artificial Sequence
  ENSG00000188352_77 (sequence is synthesized)
agtctccattactccattccctctccaagacctaagcaaccactaatctgctttctgcctctgtaaataagaccagaaattcccattcctgaagagttagatgacgatgaagatgttgag

SEQ ID NO: 691726 - DNA, 120 bp, Artificial Sequence
  ENSG00000188368_0 (sequence is synthesized)
agtttcccaatcaggtagtgagagtggcacgaaccagccgttctcctgagccaccccccgcgcccccggactcctcaatatcccaggtgggaacgctcaccagggacatccagcgcccgt

SEQ ID NO: 691727 - DNA, 120 bp, Artificial Sequence
  ENSG00000188368_1 (sequence is synthesized)
cgccctgtacgtcctgcaccggcgtgggcttgctggctgggttctcctctccactcatcttggcgccgcagctcctgcaggatgagcgagtcgggtcggcccgggagtgttccgaacgga

SEQ ID NO: 691728 - DNA, 120 bp, Artificial Sequence
  ENSG00000188368_2 (sequence is synthesized)
gctggctccgccacgcccactcctacccctcgcggcaacaaaggaccgtcccaacgctagcacacccgcggaggacgaaggccgatacagggcgccgcctcctctccagggacggaagcc

SEQ ID NO: 691729 - DNA, 120 bp, Artificial Sequence
  ENSG00000188368_3 (sequence is synthesized)
ttcacttaggaggacaccatggatacccagggaccagtctcccagccttttcagcagcctgagaaacctggtcgtgtccgtcgtcggaagactaggcgggaacgtaacaaggccctggtg

SEQ ID NO: 691730 - DNA, 120 bp, Artificial Sequence
  ENSG00000188368_4 (sequence is synthesized)
ggcagccgccggccattagcccaccacgatcctcctgtggccattcgggatccacctgtggtccctactgcctccaagctcgtggtcataacccagggccggctgagccgggagcaccgg

SEQ ID NO: 691731 - DNA, 120 bp, Artificial Sequence
  ENSG00000188368_5 (sequence is synthesized)
ggtctcttcaaccacgaggtgaaatccctagatgttgcaaggctgcttagcagtgggaccctggtgccaggcagccccacactccccgccaagccctccccaagcccaggcagggcccag

SEQ ID NO: 691732 - DNA, 120 bp, Artificial Sequence
  ENSG00000188368_6 (sequence is synthesized)
gggcagctgctggcagagctgcagtgtcagctgagtttgccacaggccttcccccggaggaacctgattcaggatgccagggatgccatcgtgcacaccttgcaggcctgtcatggttgt

SEQ ID NO: 691733 - DNA, 120 bp, Artificial Sequence
  ENSG00000188368_7 (sequence is synthesized)
gtgcctgaccttgccctggtgcttcggggctgccagccacccttgccaggggccaagcctggggtctctgagagaaagatgacacccttctggattaatagccctgatcaagtcccagag

SEQ ID NO: 691734 - DNA, 120 bp, Artificial Sequence
  ENSG00000188368_8 (sequence is synthesized)
caggagaggcaaaggaagcaacaagggacaaaggagttcaccttccccatgccctacacctccagcatgcccactgcgcacagggggagtctggcaccgccaagaggtccctggccacca

SEQ ID NO: 691735 - DNA, 120 bp, Artificial Sequence
  ENSG00000188368_9 (sequence is synthesized)
tactttccctcactgtcttcgccatctggaacagcctggggtcccccaacagcgtttgacttgttaaaaagcatctggctggtagccacgccaccccctcctcggccctggggggttggc

SEQ ID NO: 691736 - DNA, 120 bp, Artificial Sequence
  ENSG00000188368_10 (sequence is synthesized)
ctccctcagcccctgcctcagccttcatcacccctgttgccccgaacctctgtcctggactggagccccagccccccttccccactgcccagcctctcctgggtagtagcccagagcagt

SEQ ID NO: 691737 - DNA, 120 bp, Artificial Sequence
  ENSG00000188368_11 (sequence is synthesized)
ccggaagcctggtcttttccacccatgagactgtactgaggagaggctgaggctagggctggggacagatatcttgtactcccagtgacctcaataaagtacttttcatggtcctcttga

SEQ ID NO: 691738 - DNA, 120 bp, Artificial Sequence
  ENSG00000188368_12 (sequence is synthesized)
gcctcccaaagtgctaggattacagatttgagccaccatgcctggcctcatctggtcattctaaatagtattcccaccacaccccaaaacatctccctattcacttgttttgttttgttt

SEQ ID NO: 691739 - DNA, 69 bp, Artificial Sequence
  ENSG00000188368_13 (sequence is synthesized)
acatctccctattcaactgaagtgcagtggcacaatcgtgactcactgcaacttctgccttctgggttc

SEQ ID NO: 691740 - DNA, 75 bp, Artificial Sequence
  ENSG00000188368_14 (sequence is synthesized)
actaggattataggtatgggccactgcggctggccaatttttgtattttcagtaaagacagcattttgccatgtt

SEQ ID NO: 691741 - DNA, 120 bp, Artificial Sequence
  ENSG00000188368_15 (sequence is synthesized)
aatttttgtattttcagtaaagacagcattttgccatgttggctaggctggtctaaagtgacctggcctaagtgatcggcctgccttggcctaccccagtgttggtattacaggcataag

SEQ ID NO: 691742 - DNA, 120 bp, Artificial Sequence
  ENSG00000188368_16 (sequence is synthesized)
gagcccgaggcccggaacagcgccaggtgacttcgagagctggggtcaccgcggaaaagaagccattgcgccccacagctacgtgaagtgggaagggccggggttcgttggggcgagaga

SEQ ID NO: 691743 - DNA, 120 bp, Artificial Sequence
  ENSG00000188372_0 (sequence is synthesized)
ctgcgcagagcgcgcccgcgtcctcgtggtggccgcagttgtgcacaccccagcccaggctctggcaggctgccaggcggggctcgccgccttcgcagtgcacgttgtccagcaggatgt

SEQ ID NO: 691744 - DNA, 120 bp, Artificial Sequence
  ENSG00000188372_1 (sequence is synthesized)
gtccggtgccatagccgaagaaggcgttggtggtggcggccatggccgccccgcagcccagctgacgacagaccacagcggcatccggcagcccccagtcgtcgtcacacacggtgcccc

SEQ ID NO: 691745 - DNA, 120 bp, Artificial Sequence
  ENSG00000188372_2 (sequence is synthesized)
acaggccactgtgcaggatctccactcggccctgacacagggtggagccagccatcctgagacgtccgtacagcccgtactggtggagtgtcaggaggccactctgatggtcatggtcag

SEQ ID NO: 691746 - DNA, 120 bp, Artificial Sequence
  ENSG00000188372_3 (sequence is synthesized)
caaagacctttttggcaccgggaagctcatcagggctgctgacctcaccttgggcccagaggcctgtgagcctctggtctccatggacacagaagatgtggtcaggtttgaggttggact

SEQ ID NO: 691747 - DNA, 120 bp, Artificial Sequence
  ENSG00000188372_4 (sequence is synthesized)
ccacgagtgtggcaacagcatgcaggtaactgacgatgccctggtgtacagcaccttcctgctccatgacccccgccccgtgggaaacctgtccatcgtgaggactaaccgcgcagagat

SEQ ID NO: 691748 - DNA, 120 bp, Artificial Sequence
  ENSG00000188372_5 (sequence is synthesized)
tcccatcgagtgccgctaccccaggcagggcaatgtgagcagccaggccatcctgcccacctggttgcccttcaggaccacggtgttctcagaggagaagctgactttctctctgcgtct

SEQ ID NO: 691749 - DNA, 120 bp, Artificial Sequence
  ENSG00000188372_6 (sequence is synthesized)
cacctgggagatgcagcccacctccaggcagaaatccacactggcagccacgtgccactgcggttgtttgtggaccactgcgtggccacaccgacaccagaccagaatgcctccccttat

SEQ ID NO: 691750 - DNA, 120 bp, Artificial Sequence
  ENSG00000188372_7 (sequence is synthesized)
cacaccatcgtggacttccatggctgtcttgtcgacggtctcactgatgcctcttctgcattcaaagttcctcgacccgggccagatacactccagttcacagtggatgtcttccacttt

SEQ ID NO: 691751 - DNA, 120 bp, Artificial Sequence
  ENSG00000188372_8 (sequence is synthesized)
gctaatgactccagaaacatgatatacatcacctgccacctgaaggtcaccctagctgagcaggacccagatgaactcaacaaggcctgttccttcagcaagccttccaacagctggttc

SEQ ID NO: 691752 - DNA, 120 bp, Artificial Sequence
  ENSG00000188372_9 (sequence is synthesized)
ccagtggaaggctcggctgacatctgtcaatgctgtaacaaaggtgactgtggcactccaagccattccaggaggcagcctcatgtcatgagccagtggtccaggtctgcttcccgtaac

SEQ ID NO: 691753 - DNA, 120 bp, Artificial Sequence; identical to SEQ ID NO: 401986
  ENSG00000188372_10 (sequence is synthesized)

SEQ ID NO: 691754 - DNA, 120 bp, Artificial Sequence; identical to SEQ ID NO: 401987
  ENSG00000188372_11 (sequence is synthesized)

SEQ ID NO: 691755 - DNA, 120 bp, Artificial Sequence
  ENSG00000188372_12 (sequence is synthesized)
tgctctgcaggtaccatggagctgagctataggctcttcatctgcctcctgctctggggtagtactgagctgtgctacccccaacccctctggctcttgcagggtggagccagccatcct

SEQ ID NO: 691756 - DNA, 120 bp, Artificial Sequence
  ENSG00000188372_13 (sequence is synthesized)
gaaatgggcttgaataggttagaagctgatgtgggttgttgtgttttttgtttgtttttgtttttgagagttttgctcttgttgcccaggctagaatgcaatggcacgatctccgctcac

SEQ ID NO: 691757 - DNA, 67 bp, Artificial Sequence
  ENSG00000188372_14 (sequence is synthesized)
agcgcccagccagaagctgataagtgttaacagctgggcacttcctgactgcttcctggcggctatc

SEQ ID NO: 691758 - DNA, 120 bp, Artificial Sequence
  ENSG00000188372_15 (sequence is synthesized)
taacagctgggcacttcctgactgcttcctggcggctatcttggccctgggcctctcctgaaagaggaaactgtatgtactggggggcatggagggggagtgtcagaagggatgtgtcat

SEQ ID NO: 691759 - DNA, 120 bp, Artificial Sequence
  ENSG00000188372_16 (sequence is synthesized)
gtgccctgatgcctctattgcttgggtgttacatggtatctgccatgtggttgatccagtctgcctgtggtggtgtcaatatgtggtgtcaggtaaagattccgaggtacaaagacagta

SEQ ID NO: 691760 - DNA, 90 bp, Artificial Sequence
  ENSG00000188372_17 (sequence is synthesized)
atgtggtgtcaggtaaagattccgaggtacaaagacagtacctgtcctgcctctttcctgaccagtggcagagcctgtgttctcttttgt

SEQ ID NO: 691761 - DNA, 120 bp, Artificial Sequence
  ENSG00000188372_18 (sequence is synthesized)
aaagtgctggggttacaggcatgagtcactgcacctggccttgaccctgtggtctttctgtccccttgtgggctgccctccctgagcactcaggtatggcttgggagtacccgggcaggt

SEQ ID NO: 691762 - DNA, 120 bp, Artificial Sequence
  ENSG00000188373_0 (sequence is synthesized)
acttctgcagcacagctcccttcccaggacgtgaaaatctgccttctcaccatgaggcttctagtcctttccagcctgctctgtatcctgcttctctgcttctccatcttctccacagaa

SEQ ID NO: 691763 - DNA, 120 bp, Artificial Sequence
  ENSG00000188373_1 (sequence is synthesized)
gggaagaggcgtcctgccaaggcctggtcaggcaggagaaccaggctctgctgccaccgagtccctagccccaactcaacaaacctgaaaggacatcatgtgaggctctgtaaaccatgc

SEQ ID NO: 691764 - DNA, 120 bp, Artificial Sequence
  ENSG00000188373_2 (sequence is synthesized)
aagcttgagccagagccccgcctttgggtggtgcctggggcactcccacaggtgtagcactcccaaagcaagactccagacagcggagaacctcatgcctggcacctgaggtacccagca

SEQ ID NO: 691765 - DNA, 120 bp, Artificial Sequence
  ENSG00000188373_3 (sequence is synthesized)
gtctcaattgtgccatcaactttcagagctatcatgagccaacctcaccccacagggcctcagtcgccaccatgtgggcctctccagtgcaaaccaccgagcattccaccatgaccggtc

SEQ ID NO: 691766 - DNA, 120 bp, Artificial Sequence
  ENSG00000188373_4 (sequence is synthesized)
acagctacaaatccagagaccatcaatcctgctagagtgcagggtggcaagcacccaagggtggctgaccaagactgcagagtctcctccatcttcaggtccattcagcctcctggcatt

SEQ ID NO: 691767 - DNA, 120 bp, Artificial Sequence
  ENSG00000188373_5 (sequence is synthesized)
taactaccagcatccagtggtccccaaggaatcccttcctagcctcctgacatgagtctgctggaaagagcatccaaacaaacaagtaataaataaataaataaactcaatgcagacaca

SEQ ID NO: 691768 - DNA, 120 bp, Artificial Sequence
  ENSG00000188373_6 (sequence is synthesized)
accaggctctgctgccaccgagtccctagccccaactcaacaaacctgaaagccttcacagcagtgagctgcaatgttggagggcttcatctcgggctgcaaggaccctgggaaagttcc

SEQ ID NO: 691769 - DNA, 120 bp, Artificial Sequence
  ENSG00000188375_0 (sequence is synthesized)
ggcgcagagcggtttggtcgttcgttggaccagtgtcggttcttcgctcgcgactgcggctcttcctcgggcagcggaagcagcgcggaggtcggagaagtggcctaaaacttcggcgtt

SEQ ID NO: 691770 - DNA, 120 bp, Artificial Sequence
  ENSG00000188375_1 (sequence is synthesized)
gggtgaaagaaaatggcccgaaccaagcagactgctcgtaaatccaccggtgggaaagccccccgcaaacagctggccacgaaagctgccaggaaaagcaccccctctacctgcggggtg

SEQ ID NO: 691771 - DNA, 120 bp, Artificial Sequence
  ENSG00000188375_2 (sequence is synthesized)
aagcctcatcgctacaggcctgggaccgtggcgcttcgagagattcgtcgttatcagaagtcgaccgagctgctcatccggaagctgcccttccagaggttggtgagggagatcgcgcag

SEQ ID NO: 691772 - DNA, 120 bp, Artificial Sequence
  ENSG00000188375_3 (sequence is synthesized)
gatttcaacactgacctgaggtttcagagcgcagccgtcggtgcgctgcaggaggctagcgaagcgtacctggtgggtctgttggaagatactaacctgtgtgccatccacgctaagaga

SEQ ID NO: 691773 - DNA, 120 bp, Artificial Sequence
  ENSG00000188375_4 (sequence is synthesized)
gccggatacggggagagagagcttaagtgaaggcagtttttatggcattttgtagtaaattctgtaaaatactttggtttaattggtgactttttttgtaagaaattgtttatatgttgc

SEQ ID NO: 691774 - DNA, 120 bp, Artificial Sequence
  ENSG00000188375_5 (sequence is synthesized)
atttgtacttaagtcattccatctttcactcaggatgaatgcgaaaagtgactgtttacagacctcagtgatgtcagcactgttgctcaggagtgacaagttgttaatatgcaaaacgga

SEQ ID NO: 691775 - DNA, 120 bp, Artificial Sequence
  ENSG00000188375_6 (sequence is synthesized)
tgcgtgatatttcttgcttctcatgatgcatgtttctgtatgttaatgacttgttgggtagctattaaggtactagaattgataaatgtgtacaacagggtccttttgcaataaaactgg

SEQ ID NO: 691776 - DNA, 120 bp, Artificial Sequence
  ENSG00000188375_7 (sequence is synthesized)
ttatgacttgatccaagtgtttaacaattggggctgttaagtctgaccatacatcactgtgatagaatgtaggctttttcaagggtgaagatacaaaccttaaccacagtgtaacttata

SEQ ID NO: 691777 - DNA, 120 bp, Artificial Sequence
  ENSG00000188375_8 (sequence is synthesized)
gtttcctttaaaaaaaaaaaattaaacctggcagctatagaatacaatatgtgcatttataatagctattttatatattgtagtgtcaacattttcaaattaaatgttttacattcacaa

SEQ ID NO: 691778 - DNA, 120 bp, Artificial Sequence
  ENSG00000188379_0 (sequence is synthesized)
agagaacctggagcctaaggtttaggctcacccatttcaaccagtctagcagcatctgcaacatctacaatggccttgacctttgctttactggtggccctcctggtgctcagctgcaag

SEQ ID NO: 691779 - DNA, 120 bp, Artificial Sequence
  ENSG00000188379_1 (sequence is synthesized)
tcaagctgctctgtgggctgtgatctgcctcaaacccacagcctgggtagcaggaggaccttgatgctcctggcacagatgaggagaatctctcttttctcctgcttgaaggacagacat

SEQ ID NO: 691780 - DNA, 120 bp, Artificial Sequence
  ENSG00000188379_2 (sequence is synthesized)
gactttggatttccccaggaggagtttggcaaccagttccaaaaggctgaaaccatccctgtcctccatgagatgatccagcagatcttcaatctcttcagcacaaaggactcatctgct

SEQ ID NO: 691781 - DNA, 120 bp, Artificial Sequence
  ENSG00000188379_3 (sequence is synthesized)
gcttgggatgagaccctcctagacaaattctacactgaactctaccagcagctgaatgacctggaagcctgtgtgatacagggggtgggggtgacagagactcccctgatgaaggaggac

SEQ ID NO: 691782 - DNA, 120 bp, Artificial Sequence
  ENSG00000188379_4 (sequence is synthesized)
ggttgtcagagcagaaatcatgagatctttttctttgtcaacaaacttgcaagaaagtttaagaagtaaggaatgaaaactggttcaacatggaaatgattttcattgattcgtatgcca

SEQ ID NO: 691783 - DNA, 120 bp, Artificial Sequence
  ENSG00000188379_5 (sequence is synthesized)
attgattcgtatgccagctcacctttttatgatctgccatttcaaagactcatgtttctgctatgaccatgacacgatttaaatcttttcaaatgtttttaggagtattaatcaacattg

SEQ ID NO: 691784 - DNA, 120 bp, Artificial Sequence
  ENSG00000188379_6 (sequence is synthesized)
tattcagctcttaaggcactagtcccttacagaggaccatgctgactgatccattatctatttaaatatttttaaaatattatttatttaactatttataaaacaacttatttttgttca

SEQ ID NO: 691785 - DNA, 120 bp, Artificial Sequence
  ENSG00000188379_7 (sequence is synthesized)
tattatgtcatgtgcacctttgcacagtggttaatgtaataaaatatgttctttgtatttggtaaatttattttgtgttgttcattgaacttttgctatggaaacttttgtacttgttta

SEQ ID NO: 691786 - DNA, 120 bp, Artificial Sequence
  ENSG00000188379_8 (sequence is synthesized)
ttctttaaaatgaaattccaagcctaattgtgcaacctgattacagaataactggtacacttcatttatccatcaatattatattcaagatataagtaaaaataaactttctgtaaacca

SEQ ID NO: 691787 - DNA, 120 bp, Artificial Sequence
  ENSG00000188385_0 (sequence is synthesized)
atgtccaagaggggcatgagcagccgggccaagggggacaaggcagaggccctcgcggcgctgcaggcggccaacgaggatcttcgagccaagctcacagacatccagatcgagctgcag

SEQ ID NO: 691788 - DNA, 120 bp, Artificial Sequence
  ENSG00000188385_1 (sequence is synthesized)
caggagaagagcaaggtcagcaaagtggaacgcgagaagaaccaggagctgcggcaggtgcgcgagcatgagcagcataagaccgcggtcttgctcacggagctcaagacaaagctgcac

SEQ ID NO: 691789 - DNA, 120 bp, Artificial Sequence
  ENSG00000188385_2 (sequence is synthesized)
gaggagaagatgaaggagctacaggctgtgcgtgagacgctgctgcggcagcatgaggctgagctgctcagggtcatcaagatcaaggacaacgagaaccagcggctgcaggcactgctc

SEQ ID NO: 691790 - DNA, 120 bp, Artificial Sequence
  ENSG00000188385_3 (sequence is synthesized)
agtgccctgcgtgatggcggccccgaaaaggtcaagaccgtgctgctgtccgaggccaaggaggaggccaagaaggggttcgaggtggagaaggtcaagatgcagcaggagatctccgag

SEQ ID NO: 691791 - DNA, 120 bp, Artificial Sequence
  ENSG00000188385_4 (sequence is synthesized)
ctcaagggcgccaaaaggcaggtggaggaggcgctgacgctggtgatccaagcggacaagatcaaggccgcagagatccgcagcgtgtaccacctgcaccaggaggagatcacccgcatc

SEQ ID NO: 691792 - DNA, 120 bp, Artificial Sequence
  ENSG00000188385_5 (sequence is synthesized)
aagaaggagtgcgagcgggagatccgcaggctgatggaggagataaaatttaaagacagagcagtcttcgtgctggagagagagttaggggttcaagccgggcatgctcagagactgcag

SEQ ID NO: 691793 - DNA, 120 bp, Artificial Sequence
  ENSG00000188385_6 (sequence is synthesized)
ctccaaaaagaggctctagatgagcagctgtcccaggtccgagaggccgaccggcacccgggcagccccagacgggaacttcctcatgcagctggtgcaggagacgcttcagaccactcg

SEQ ID NO: 691794 - DNA, 120 bp, Artificial Sequence
  ENSG00000188385_7 (sequence is synthesized)
ggaagccctgaacagcagttggatgaaaaagatgcccggcgcttccagcttaaaatcgcggagttaagtgcgattatccgcaaactggaggaccgcaatgcattgctgtcggaagagagg

SEQ ID NO: 691795 - DNA, 120 bp, Artificial Sequence
  ENSG00000188385_8 (sequence is synthesized)
aatgagctgttgaagcgcgtaagagaagctgagagtcagtacaagcctctgctggataaaaacaagcgcctcagtcggaagaacgaggatttgtctcatgctttacgccgaatggaaaac

SEQ ID NO: 691796 - DNA, 120 bp, Artificial Sequence
  ENSG00000188385_9 (sequence is synthesized)
aagttaaaatttgtcacccaggagaacatagaaatgagacagagagctggaatcatacggagacccagttccttgaatgaccttgatcaaagtcaggatgagagagaagtcgatttcttg

SEQ ID NO: 691797 - DNA, 120 bp, Artificial Sequence
  ENSG00000188385_10 (sequence is synthesized)
aagcttcagattgtggagcagcaaaacctcatagatgaactgtctaagacccttgagaccgccggctacgtgaagagcgtgttagagcgggacaagctgttaagattccggaagcaaaga

SEQ ID NO: 691798 - DNA, 120 bp, Artificial Sequence
  ENSG00000188385_11 (sequence is synthesized)
aagaaaatggcaaaacttcccaagccggtggttgtggagaccttctttggatacgacgaagaggcttccctggaatccgacggctcctccgtctcttaccaaacagacaggacggaccag

SEQ ID NO: 691799 - DNA, 120 bp, Artificial Sequence
  ENSG00000188385_12 (sequence is synthesized)
accccgtgcaccccggacgatgacttggaggagggcatggccaaggaggagacggagctgaggttccggcagctgaccatggagtaccaggccctgcagcgtgcctacgctttgttgcag

SEQ ID NO: 691800 - DNA, 120 bp, Artificial Sequence
  ENSG00000188385_13 (sequence is synthesized)
gagcaggttggagggacgctggacgcagagcgagaagttaagacccgtgagcagctacaagccgaagtgcagagggcacaggcgcggatagaggacctggagaaggccctggcggagcag

SEQ ID NO: 691801 - DNA, 120 bp, Artificial Sequence
  ENSG00000188385_14 (sequence is synthesized)
gggcaggatatgaagtggattgaagagaagcaggcactgtaccggagaaatcaagagcttgtggaaaagatcaaacaaatggagacggaagaggctcggctcagacacgaggtgcaggac

SEQ ID NO: 691802 - DNA, 120 bp, Artificial Sequence
  ENSG00000188385_15 (sequence is synthesized)
gccagagaccaaaacgagctgctggagttcaggatcctggagcttgaggagagggagaggaagtcacccgccatcagcttccaccacacgcccttcgtggacgggaagagccccctccag

SEQ ID NO: 691803 - DNA, 120 bp, Artificial Sequence
  ENSG00000188385_16 (sequence is synthesized)
gtgtactgcgaggccgaaggtgtgacggacattgtggttgcggagctgatgaagaagctggacatcctgggcgataacgccaacctgaccaatgaggagcaggtggttgtcatacaagcc

SEQ ID NO: 691804 - DNA, 120 bp, Artificial Sequence
  ENSG00000188385_17 (sequence is synthesized)
aggacagtcctgaccttggccgaaaagtggctccagcagattgaggagacagaggcggcgctgcagcggaagatggtggatctggagagcgagaaggagctgttcagtaagcagaagggc

SEQ ID NO: 691805 - DNA, 120 bp, Artificial Sequence
  ENSG00000188385_18 (sequence is synthesized)
tacctggacgaggagctggactaccggaaacaggccttggaccaggccaacaagcacatcctggagctggaagccatgctgtatgatgccctgcagcaggaggccggggctaaggtggct

SEQ ID NO: 691806 - DNA, 120 bp, Artificial Sequence
  ENSG00000188385_19 (sequence is synthesized)
gagctgctgtcagaggaggagcgcgagaagctcaaggtggccgtggagcagtggaagcgccaggtcatgagtgagctgcgcgagcgggacgcccagatcctgcgggagcgcatggagctg

SEQ ID NO: 691807 - DNA, 120 bp, Artificial Sequence
  ENSG00000188385_20 (sequence is synthesized)
ctgcagctggctcagcagagaattaaagagttagaagaaagaatagaagctcagaagagacaaataaaggaactggaggaaaagtttctatttttgttcttatttttctccttagctttc

SEQ ID NO: 691808 - DNA, 120 bp, Artificial Sequence
  ENSG00000188385_21 (sequence is synthesized)
attctctggtcatagtccgtcttggcaccctgacgtgccccacattgaatcggacccttttcctccagtgggaccagaaagcagggacaaaatgggacgtcgcgtctccatcctgaagac

SEQ ID NO: 691809 - DNA, 120 bp, Artificial Sequence
  ENSG00000188385_22 (sequence is synthesized)
ccagggagatttggtctctgcacgcccgtcccgtggaggaagagtgagaaggggcagtgtgtggggcgtggagctgccgtccacgtgggatgtgccagaactagaactggctctgccgac

SEQ ID NO: 691810 - DNA, 120 bp, Artificial Sequence
  ENSG00000188385_23 (sequence is synthesized)
ttctcgggggcttctccgggacgggcctggccttggctgctggaccctgggtcccttctcccggacggcagcccccatcccatttccagggatgtgtagcattccctgccaagcaggggt

SEQ ID NO: 691811 - DNA, 120 bp, Artificial Sequence
  ENSG00000188385_24 (sequence is synthesized)
gagaactgcttctgtgcagaagcaccagccgcgggtcccctcctctctcttggttctcacagtagctgccactggtgtctggaggaagattttcagaaacaacagaggcttggcctgatg

SEQ ID NO: 691812 - DNA, 120 bp, Artificial Sequence
  ENSG00000188385_25 (sequence is synthesized)
acaagatgaaagctggacggtgaccttcattcaggggaacctggaggctccctgggatggtcctgggagggctccccgacgcctcaggggcccctccgatgctgcaatatgttgctgggg

SEQ ID NO: 691813 - DNA, 120 bp, Artificial Sequence
  ENSG00000188385_26 (sequence is synthesized)
tcctgagcacccgctggccaacagaccccacatccaccctcgttcatcatcatctctgtggggacagacaagagccgtggccgccgcgggccgcgtggtgccatcaaccctctgcctccc

SEQ ID NO: 691814 - DNA, 120 bp, Artificial Sequence
  ENSG00000188385_27 (sequence is synthesized)
acaggaaggccaagatcccgcccaagccgccagctgggagcaccgcgggactgagccaaggaaggcgtggggagcgtggtgacaggaggtgggacgagggggcggagctggctggaacac

SEQ ID NO: 691815 - DNA, 120 bp, Artificial Sequence
  ENSG00000188385_28 (sequence is synthesized)
ggatgccagaggctgcctccatagtgaatctccagaagtcacagaggccctgggcacccagagccacccagcctggaagcccctgcacgggccagccctgcaggccatggaccccggcgg

SEQ ID NO: 691816 - DNA, 120 bp, Artificial Sequence
  ENSG00000188385_29 (sequence is synthesized)
gcaccgaagcctcaccccaagcctttgcacacaaggagcagcccaggtggggatggcgggcgcaagaagggaaccgcggggacggcctttcccctcccgccctgtgtggggacgctgcac

SEQ ID NO: 691817 - DNA, 120 bp, Artificial Sequence
  ENSG00000188385_30 (sequence is synthesized)
gagccgtggaccaagaggctgacaggaggggtccgcagcgaggaggaggtgcgaagggggcggcggctccgtcttgcaggtcccctggggcgcgttcttcaggtgcgtggtggacgaggc

SEQ ID NO: 691818 - DNA, 120 bp, Artificial Sequence
  ENSG00000188385_31 (sequence is synthesized)
ggcgtcctcgcggggtcgggacctgggtacccagcagcatctggctcctgcatccaccaagggcgcccaggcacagcctcaggccagaaggttcgctgcagaggttcattctagaaggag

SEQ ID NO: 691819 - DNA, 120 bp, Artificial Sequence
  ENSG00000188385_32 (sequence is synthesized)
cgggagaccagcagtcccagccctgtccaaggacgcccgctgcttggcacacgagggcgccgcaggcccaccatccctcaggacatggctgccgagtccccagagacttctggtcccaca

SEQ ID NO: 691820 - DNA, 120 bp, Artificial Sequence
  ENSG00000188385_33 (sequence is synthesized)
gcaagagctggagctccaagcataacatctctaactgtgcggcaaggacagcgcagccagagagaggaagcagtgcattggtgaaggcaacgttaggtgtgatttccattcctgctggga

SEQ ID NO: 691821 - DNA, 120 bp, Artificial Sequence
  ENSG00000188385_34 (sequence is synthesized)
gacccgggacgcagcccgggagcttcgtccagcctgtggatggagcctgactggctgcagatggaacttctgtgtcctcccaccctaggtgggctaaggttctgctctcagagctgaatt

SEQ ID NO: 691822 - DNA, 120 bp, Artificial Sequence
  ENSG00000188385_35 (sequence is synthesized)
gacaggaggtgtgtgtgtgtgctcacttgtgtgcacaagcatgcgtttatgcatgttttcacgcaaccagaagagccattcgtgggatttagccatttcgaggcacctagaagttgaggc

SEQ ID NO: 691823 - DNA, 120 bp, Artificial Sequence
  ENSG00000188385_36 (sequence is synthesized)
agccagctgtgcagccaggtgtgactgttactggcagcattgtataaaagacacgactcagctgccgtagggaggactgggttgtctggaagtattaggctcattttatatttgtgtcag

SEQ ID NO: 691824 - DNA, 120 bp, Artificial Sequence
  ENSG00000188385_37 (sequence is synthesized)
aagaaatgtctgactttggggcagatgacacggtggctgcggaccaggcatggctccctaggttgaaatcagggaaaagctaatagtatcagacagatatgctttttctttggtggctgc

SEQ ID NO: 691825 - DNA, 120 bp, Artificial Sequence
  ENSG00000188385_38 (sequence is synthesized)
aggatttttgctggaaaatgcactattaatcagcacttgtccaagaaagacccatccatttctgttgtcattcaagccacagttcctgatttactcggcaagatactgggccagttcagt

SEQ ID NO: 691826 - DNA, 120 bp, Artificial Sequence
  ENSG00000188385_39 (sequence is synthesized)
gtctctagctgagcctgacctcggggtttgcgtctcgagtctgaaatcctgtttagtcctctgtgcatagttttgtctcattttaacgactgcatcttcttggcacatttattatactca

SEQ ID NO: 691827 - DNA, 120 bp, Artificial Sequence
  ENSG00000188385_40 (sequence is synthesized)
caactgaatggcacacaatagccttgtgttaataaaagctaccgtggcgctgtgggtgaaccgctgggttgaagtccgatggactctacgatgcaggcatccagaaatatgttgtaactc

SEQ ID NO: 691828 - DNA, 120 bp, Artificial Sequence
  ENSG00000188385_41 (sequence is synthesized)
tacctggctccctgccagcctggcctcctcctctgggagagctcctggcatggtcccaatgtgtacctgcatgggaacaacagctgcatgggccagctgtttcggatctaaagatgtgca

SEQ ID NO: 691829 - DNA, 120 bp, Artificial Sequence
  ENSG00000188385_42 (sequence is synthesized)
gtgaaactcacattcccagattcacatccctcatgtttatttgggtcatcatggtttagcatgttgtatatatgtctggagcacttcatacacctctatccaccacagacactcttaatc

SEQ ID NO: 691830 - DNA, 120 bp, Artificial Sequence
  ENSG00000188385_43 (sequence is synthesized)
acagttctgtaataataataaggcaaactatacggcaaagagaagcatgtaaatatgtaccaaatccttatgaagttgtaattgtttatatgtaaaaagtatgtatataggaacgggaga

SEQ ID NO: 691831 - DNA, 120 bp, Artificial Sequence
  ENSG00000188385_44 (sequence is synthesized)
aggtgcaaggaatgtgctgaataacatccaaactgcatcgcgtctctgccccattcctgaaagcacacatctagttggagcgtcagttcctctccttagatatcattgttttcactcgtc

SEQ ID NO: 691832 - DNA, 120 bp, Artificial Sequence
  ENSG00000188385_45 (sequence is synthesized)
tatcataggcaccttctttacatctgattacaatacccagcatttcagaactgggtttttgcccccaaaaaggtaaatatgagcatttatcactgactcctcctggtccagtgagcagca

SEQ ID NO: 691833 - DNA, 120 bp, Artificial Sequence
  ENSG00000188385_46 (sequence is synthesized)
gcagaattcaagtatttaaaaataaggtgcatttctaaattgcaggctataccttcttttccaaaccaatgggctagagtgaatttcctccaagtacttgggctgtcttactgctagctc

SEQ ID NO: 691834 - DNA, 120 bp, Artificial Sequence
  ENSG00000188385_47 (sequence is synthesized)
ttctaacaggggaagtctgtatgaatgcatcaccccctaataaggcaagaggaaggaccctgaaatgttgccagaaatgtactgttacatcaacatttacattatattaacatcatcaca

SEQ ID NO: 691835 - DNA, 120 bp, Artificial Sequence
  ENSG00000188385_48 (sequence is synthesized)
ctctgtgttcaacacacagaacaacatagatactttagtttgtctaaagtaaaaatccacataaatagcagattcctttgttgacaccagtgtgttgtttaccttgtgcccatggtccag

SEQ ID NO: 691836 - DNA, 120 bp, Artificial Sequence
  ENSG00000188385_49 (sequence is synthesized)
attttgagctggagaaggactatggctgttccttaaagtctctgcccttgcagaatctgtagccttcaggataccccgagtgccttacagggcttgtgaacaccgatactagaagtcaaa

SEQ ID NO: 691837 - DNA, 120 bp, Artificial Sequence
  ENSG00000188385_50 (sequence is synthesized)
aagaagagagtgcccaagtgtgggtttggaggcactgacgcattcgccaactcaccgtcatcccatccttgaaaccctgagagagagtgtgtgttttatcacagtaatggaattcagttt

SEQ ID NO: 691838 - DNA, 120 bp, Artificial Sequence
  ENSG00000188385_51 (sequence is synthesized)
agcctcaggaaactcatattgtgaatataggtatcaaatcatatatttgtttactgtatattttttaaaaagctttattgtaaatttatgcaaaaactaaccgggcctgttttcttacgg

SEQ ID NO: 691839 - DNA, 120 bp, Artificial Sequence
  ENSG00000188385_52 (sequence is synthesized)
cggcatgccaggtagtgtgtgtattctcccaggcactcccttcatagtcaccctctaaccacgtgacattccgttccatgctaagcagtattcacaggcctaaaataggtttgtatggtg

SEQ ID NO: 691840 - DNA, 120 bp, Artificial Sequence
  ENSG00000188385_53 (sequence is synthesized)
atctacaagattttacaaatatttttgtattgtgattcctatgatatataccagagaattttttactcgtttgtaaattattgtacagttttaataaaaaatgttttaaatcttagacga

SEQ ID NO: 691841 - DNA, 120 bp, Artificial Sequence
  ENSG00000188385_54 (sequence is synthesized)
gctccacagcctccagggtcccccgagggcggctggggacagggaacgccccacagcacaacaacacacacggcgtggacatacgcacctccccgccatacgaacctccccgcggaggct

SEQ ID NO: 691842 - DNA, 120 bp, Artificial Sequence
  ENSG00000188385_55 (sequence is synthesized)
agaggggacgccgggtcaggagatgggggcctggggagcaaggccccccacagctgccctcggtgacatctgggacttggacatccatggacggcatccctggatggagccatttcctgg

SEQ ID NO: 691843 - DNA, 120 bp, Artificial Sequence
  ENSG00000188385_56 (sequence is synthesized)
gtactggacctggaggtgactcggagcttctcctgctcccagcgtgtgtccatgggggcggtcagggtagacaggccacaccgtcatcagggaggggcagccggccgccaacgtgcagac

SEQ ID NO: 691844 - DNA, 120 bp, Artificial Sequence
  ENSG00000188385_57 (sequence is synthesized)
tgtgtctcaggcctgtcggcatggcggggacagaggtgggtgggcgccgctccgctcgggggctgacaagccacaggctcattgtggacaaggcgtctgtacagctccgcacagaagact

SEQ ID NO: 691845 - DNA, 120 bp, Artificial Sequence
  ENSG00000188385_58 (sequence is synthesized)
tctcagccagtcccgtcagcctcccgggatcagggagtgagcctcgaatgctagatcagaaaggaaaacgtagaggaagcagtgcattggtgaaggcaacgttaggtgtgatttccattc

SEQ ID NO: 691846 - DNA, 120 bp, Artificial Sequence
  ENSG00000188385_59 (sequence is synthesized)
cctggacgtttggccagacgtgtggccatggttttaatcaggacaattttttgcttgctctaacttatgagggtggccagatctagacagacagcagaagtaacccgaagtcctggcctg

SEQ ID NO: 691847 - DNA, 120 bp, Artificial Sequence
  ENSG00000188385_60 (sequence is synthesized)
ccctgtgccatcctctgacatgttatcatcggcgttcactctgtgggctcctctcggggtgatgcctgccggtctcagctttggggtgaagtgacatttggccttgactagaagaggcag

SEQ ID NO: 691848 - DNA, 120 bp, Artificial Sequence
  ENSG00000188385_61 (sequence is synthesized)
gttgtggggggcaggcagggtgcaggcgagggaactgaggcagagcgggctgggagcaggggggatgtagggtcctcccaggctgacccccagaacctgggcgtgcaggcctgctctggg

SEQ ID NO: 691849 - DNA, 120 bp, Artificial Sequence
  ENSG00000188385_62 (sequence is synthesized)
gtccaggctccgatgcagtctcagcgcaggccctggtggccggagacagggcagggcaggagcttcaggccacccgcaccggcagccctcaaggctgccttgatggaatcggacccagat

SEQ ID NO: 691850 - DNA, 120 bp, Artificial Sequence
  ENSG00000188385_63 (sequence is synthesized)
ggactctaagcggcctcctgcttggaaaccctgtcagaccctgcgttttctacagagcggctgtcacacggcttttccggacggtgattatggactgcgtgtgggattggcgggccaggt

SEQ ID NO: 691851 - DNA, 120 bp, Artificial Sequence
  ENSG00000188385_64 (sequence is synthesized)
gaatgagaagatgtagtgtgacagcagcccgggtgacacctgctgggagcttggcgtggacaccccagccacccccagcccagcccagccggagcaccctacccctgggcatccccctgg

SEQ ID NO: 691852 - DNA, 120 bp, Artificial Sequence
  ENSG00000188385_65 (sequence is synthesized)
tggtctcctgtgtctggttcccgtctgcattttcagtcctcagtgttgagtgtgtgcaaatcccttctatcacctgacatttaaaatagataccctcagagtggaagttcgttcctatta

SEQ ID NO: 691853 - DNA, 120 bp, Artificial Sequence
  ENSG00000188385_66 (sequence is synthesized)
ttgacccgctcactctgcaatcttgaagggggttctccaagcaggagggaaagccggccagaacgcggtcctggagcagccaggaagccgagggggcggtgagggcagggatggcccagc

SEQ ID NO: 691854 - DNA, 120 bp, Artificial Sequence
  ENSG00000188385_67 (sequence is synthesized)
cgtggcctctgccgctcgctggttttcacgtgagactgccgccgggccaacccggagcccaggccgcctctgcatctgaatagagccaagctgccttcaggatctcacctgcgtggctgt

SEQ ID NO: 691855 - DNA, 120 bp, Artificial Sequence
  ENSG00000188385_68 (sequence is synthesized)
gccttcggccgcccggccgtgcagagctgcgggccccttccccaccgagaagcgtctgttcgcgccctgcagggagctgggctgggggctcagaggatgcctctgtgcttggccttaagg

SEQ ID NO: 691856 - DNA, 120 bp, Artificial Sequence
  ENSG00000188385_69 (sequence is synthesized)
tgcacagggagagcttgggcgatcctggctcaagggctctgcttggaaacagctcggggaaatggttcctccccctggatgtagtcacagcgtggtaaattccatctgaaaaataaaagc

SEQ ID NO: 691857 - DNA, 120 bp, Artificial Sequence
  ENSG00000188385_70 (sequence is synthesized)
cgagctctttgctgagtcatagaagctcggagctgatttgcgcaaaagccggactgagtcttggacgagccgggaaagattctcacagtcgagcagagcgatgggagagaggagcagaca

SEQ ID NO: 691858 - DNA, 120 bp, Artificial Sequence
  ENSG00000188385_71 (sequence is synthesized)
gaaatcgaggaagcctcaggataaggaagggggcaggagaggacaggcgtctgaagacatggacgtgggcccatccctgccacggtcctgaggctgcagggggcccacagccctctgtgg

SEQ ID NO: 691859 - DNA, 120 bp, Artificial Sequence
  ENSG00000188385_72 (sequence is synthesized)
gctccgtttccctgtccggaaacagggttaggactaactggaattccctctctgctaagcattctccaacccaagggctcacatccacgattgtgaccccttaagggagggaagaggctg

SEQ ID NO: 691860 - DNA, 120 bp, Artificial Sequence
  ENSG00000188385_73 (sequence is synthesized)
gggtgatgggaggagcccaggacggcctgggggcagggagctgggaccaagcactcgggggcgggcaccacaggtcacgccttcgcccaccccccaccccggctgatggatcctctgacc

SEQ ID NO: 691861 - DNA, 120 bp, Artificial Sequence
  ENSG00000188385_74 (sequence is synthesized)
ctgcgtcctgtcccgaaacgcacctctcccttggaagctatccccagagagagcaggagccactgtggccccatggttcggagccaccacagcaaagtgaattaagggaggtggctcaga

SEQ ID NO: 691862 - DNA, 120 bp, Artificial Sequence
  ENSG00000188385_75 (sequence is synthesized)
cctcggctagaagcctcggtggcactcgggagggacttcacaaaccaggatgcggacgggggaagcgccagggcttttcctgtagatgtggggcgggctctgggagtcagttaaggaaca

SEQ ID NO: 691863 - DNA, 120 bp, Artificial Sequence
  ENSG00000188385_76 (sequence is synthesized)
cagaattcaggaaggcagtgagccctgggctgaggcagctcccgcacaggcagccacaccacccggggcttccagaggggcagctccagtacaggcagcggcaccacccggggcttccag

SEQ ID NO: 691864 - DNA, 120 bp, Artificial Sequence
  ENSG00000188385_77 (sequence is synthesized)
cgggtccatgtggagagtccctcgaacaaagccctctggccggcacctggcagggctgagcacacgctaggcctcagtcatcctcattggctgtgtcatcctgtaaacaaagatttctcc

SEQ ID NO: 691865 - DNA, 120 bp, Artificial Sequence
  ENSG00000188385_78 (sequence is synthesized)
ctcctaacaggctctcaaaatcaacctgcaggatttccccttagaatctaagtgagatctcttgcttcaaataagccttaaagttctccctccagggctgggcgcagtggctcactcctg

SEQ ID NO: 691866 - DNA, 120 bp, Artificial Sequence
  ENSG00000188385_79 (sequence is synthesized)
agggctgtcacccaaccctgcagctaacccaggggtggggaaacctgtgagcagaaacctgtccccgctggagcaccagaagcaatgccttcttgagcatgttcagtcaagtgaggagag

SEQ ID NO: 691867 - DNA, 120 bp, Artificial Sequence
  ENSG00000188385_80 (sequence is synthesized)
gagagcgatgcctttgcaggctcccttgggggaggttacggagcggggactttgggccgaggccgccagctcacagggctcctctgaagcgaggcggctgtcatcctctcgggatcctct

SEQ ID NO: 691868 - DNA, 120 bp, Artificial Sequence
  ENSG00000188385_81 (sequence is synthesized)
cccaccgcgtctgctccgagtgtgcagtctccagcgtgagtttgaagggtgtcaggaaagagctactacctaaacttgcagccagcaaggggcttttgtgccctagtccccactcccagc

SEQ ID NO: 691869 - DNA, 120 bp, Artificial Sequence
  ENSG00000188385_82 (sequence is synthesized)
cctggaccaccaaccccacacccatgggaagcagagggcccctcacccacagcccggcaggtgcactgtgcgccctgctctgtggtagaggaattgcgacaatgtccgtccgagtgtatt

SEQ ID NO: 691870 - DNA, 120 bp, Artificial Sequence
  ENSG00000188385_83 (sequence is synthesized)
tttgcccagtaaatgagacgcgagacgttactgtgctgtcccagtgagcatctcccttctctccaattagcttttttccccaactgtttattttgaaataattttagacttaaagttgca

SEQ ID NO: 691871 - DNA, 120 bp, Artificial Sequence
  ENSG00000188385_84 (sequence is synthesized)
gctggggggtgtctctccctgtgtgatgctggggggggcctcttcttgggtgaagctagggggtcttttcttgggtgatgctgggggggcctcttcctgtgtgatattgggggggccact

SEQ ID NO: 691872 - DNA, 120 bp, Artificial Sequence
  ENSG00000188385_85 (sequence is synthesized)
tcctgtttgatgtgtgggcctctctctccacttccaacaggaaggcccccttgtttgggatgctccgagttttctgagttcactgttgatttccttccctttccctgcacactcgcccgg

SEQ ID NO: 691873 - DNA, 120 bp, Artificial Sequence
  ENSG00000188385_86 (sequence is synthesized)
ttctctcctatgtcgttcatggtgtggctctcggtcgctcgggtgccctcaggtgacccacaggcctgtgagcaccgaggtttttttctgcacttcctgctctgcttctgggagacactg

SEQ ID NO: 691874 - DNA, 120 bp, Artificial Sequence
  ENSG00000188385_87 (sequence is synthesized)
gggcaaggaggggaatgactggttcctcctggggcagtggtggctctttatggcaggggctagtgccgactttgcctctctggacatgggtgtgggagaccgtggtctgtgtggctgccg

SEQ ID NO: 691875 - DNA, 120 bp, Artificial Sequence
  ENSG00000188385_88 (sequence is synthesized)
ccaccaccaggtgcacgtgaagccaccatgaggttaattccaagccagcacttgaccaggtttatttttagaagctggagctcatcttaaaggcaccaagctcttttgctctaagaagtg

SEQ ID NO: 691876 - DNA, 120 bp, Artificial Sequence
  ENSG00000188385_89 (sequence is synthesized)
gaggttgacatgtgagctggttgtgactgtaagaagtggaggttgatgtgcgagctggttgtgacagctggggacagtttattttgtggccgccaagaacaataaagtgtaactgaggcc

SEQ ID NO: 691877 - DNA, 120 bp, Artificial Sequence
  ENSG00000188385_90 (sequence is synthesized)
caaaagcatttgtttccatttcctaatatttctgctatctctgaagatgttacatttggttgggaagaaagagcctctgtagtgtgagaatttgttttttacaaagattgtatcaataaa

SEQ ID NO: 691878 - DNA, 120 bp, Artificial Sequence
  ENSG00000188385_91 (sequence is synthesized)
ctcagaagagacaaataaaggaactggaggaaaaggaggctggcattgggatgcccctgtggttggcatgtgctggtcccggcctgaggaggagcccacagatgctctgcaattgccagg

SEQ ID NO: 691879 - DNA, 120 bp, Artificial Sequence
  ENSG00000188385_92 (sequence is synthesized)
agagaccgggtccctctggacagcagtcgccttagacgggccgtgtgtcatcccacatccaccctagccctgccccgcccctcgtaggcggtgacacccatgcccttccactgggcactc

SEQ ID NO: 691880 - DNA, 120 bp, Artificial Sequence
  ENSG00000188385_93 (sequence is synthesized)
actgccgcctgtgagaatcatcatcctgaggaacgagttactcaaggcacagcctttgaggccccggtggactccaggccacgtggggaagcacccactagcacgcaggggcacccggcc

SEQ ID NO: 691881 - DNA, 120 bp, Artificial Sequence
  ENSG00000188385_94 (sequence is synthesized)
ttgccgggaggggacacagtgttctgggggctggagcctcagagggcaaagcctctccccaaaccaaatgtctgtttcattttgcatcttaacctaaggatatttgtttgtattaaatac

SEQ ID NO: 691882 - DNA, 120 bp, Artificial Sequence
  ENSG00000188385_95 (sequence is synthesized)
cagggattggggatcccggtgctgggagttggcccaggtgggagggactggcccagagcggtgccaggcacaggtgtgagtaagggtcctgggggaggcggggtggtagtggtggcaggg

SEQ ID NO: 691883 - DNA, 120 bp, Artificial Sequence
  ENSG00000188385_96 (sequence is synthesized)
gcccacagcgcccagggtgggcctccttccagaccacctcttccactcttggcagcatggcgatggcccgtggcagcatcgagctcggtgttgaaacttgtggaggtcattcatcctcaa

SEQ ID NO: 691884 - DNA, 120 bp, Artificial Sequence
  ENSG00000188385_97 (sequence is synthesized)
aggctgagctcacacaggctgtgcctgccccggccccggccccggcccctctcccccggcctccccactgggcagcaccccagcagccgtgtccctccgcccacttccctggctcacctt

SEQ ID NO: 691885 - DNA, 120 bp, Artificial Sequence
  ENSG00000188385_98 (sequence is synthesized)
agcgtcgtcccccaggaaaggcctcagtgtggctggcgggtgccctctgcgggccgtggagggcagtgcaggcaccaggcctcgtggggagagcgtgggccatgggtcgggggtcctctt

SEQ ID NO: 691886 - DNA, 120 bp, Artificial Sequence
  ENSG00000188385_99 (sequence is synthesized)
gccgccccaccctcccttactgaggctcggaggggaagccgctggaggacctgcacctggtacccctcacagcgagacgggctgctttccgggggagctgaggggttctccagagcaggc

SEQ ID NO: 691887 - DNA, 120 bp, Artificial Sequence
  ENSG00000188385_100 (sequence is synthesized)
agctgtggggtgtggggttcccgttggcctccccaccccaaaaccaccctgcagggccagagatgccagtgtctggcaattctgcaacttagggtggctgagctgggtgggggacggacc

SEQ ID NO: 691888 - DNA, 120 bp, Artificial Sequence
  ENSG00000188385_101 (sequence is synthesized)
tcttggggcgaggggagagtgtccacagagcatccccagcgtggtccacgctagtgccccagggagccgccagcctcatcctctgtccacccagaccgccctggtgacgtggctggtttc

SEQ ID NO: 691889 - DNA, 120 bp, Artificial Sequence
  ENSG00000188385_102 (sequence is synthesized)
cctcctgccttcctggcacctcattggggacgtctgttgtgaaaactaagagagagctccacccctctgtgccctcctcctgtcctgagtcggggtggggggggctggccttggaggggg

SEQ ID NO: 691890 - DNA, 120 bp, Artificial Sequence
  ENSG00000188385_103 (sequence is synthesized)
cgtcccctcctcaggctcggagagatttgtctccgtaactggggactttaaatatcgcctctttcactttgacttaatttttgcatgacccttggagaaaggaaaaagtcaaggcctcgg

SEQ ID NO: 691891 - DNA, 120 bp, Artificial Sequence
  ENSG00000188385_104 (sequence is synthesized)
ttcagagcatcataaagcacagcagccccgagacatcccagagcctcatgggcccagcctttctccctcacagcgggggcggggcaacagccgcatcctcctggccaagctcgccaggag

SEQ ID NO: 691892 - DNA, 120 bp, Artificial Sequence
  ENSG00000188385_105 (sequence is synthesized)
ttttcctgtcgggtgccagagaaacatttgctcgggggccacatggaagcaaagaactcagaagctttgcttagagagtaaaaatgtccaaactgcatgtaaaaaaaagtttaatgtcat

SEQ ID NO: 691893 - DNA, 120 bp, Artificial Sequence
  ENSG00000188385_106 (sequence is synthesized)
ttagaatcagaggaaaatctgatgccgagaagtgctgcatggttattttaaaaactagaagatacagaaaagattaatgaagaaaatagactagccggcatcccacagtctgattctgta

SEQ ID NO: 691894 - DNA, 120 bp, Artificial Sequence
  ENSG00000188385_107 (sequence is synthesized)
cctctgtcccagcgtgccctcgctcccgcccctcagcccacgtggcctcccacccgatgctgccatgccccagggactgatccggggcccgcccttgtgaaaagcagatccttcataact

SEQ ID NO: 691895 - DNA, 120 bp, Artificial Sequence
  ENSG00000188385_108 (sequence is synthesized)
tcttcaaaaacatgaaaaaatggaaaggtaataaaaactttgaacttagcagaggcccactttctaagcaatgagggaagttgggtagaaaccgggctgctggcccagacatggtgagaa

SEQ ID NO: 691896 - DNA, 120 bp, Artificial Sequence
  ENSG00000188385_109 (sequence is synthesized)
agatccaaggtcacttctgtaggggctttgtgaggagcatggactcatcttcctgagagtgtggccttcggtgggtgccaggtgcgtctcccgggctggaggctcaggacgtggcgctgt

SEQ ID NO: 691897 - DNA, 120 bp, Artificial Sequence
  ENSG00000188385_110 (sequence is synthesized)
agctggtgctggacccatgagggcagtgcctgccattggctcagtgaccatcctgtgcagagccagtgcctggtcaaggccccaactgccttgagtgctgacctgtggtgggtcacacac

SEQ ID NO: 691898 - DNA, 120 bp, Artificial Sequence
  ENSG00000188385_111 (sequence is synthesized)
tggaccccgagccgccggcatgggaaccctctttgcttcagggcaacacgggaggggtctggatctccgacccaccgttccgggtctgaatccagctccgggacctgacagggatgtgat

SEQ ID NO: 691899 - DNA, 120 bp, Artificial Sequence
  ENSG00000188385_112 (sequence is synthesized)
tgtggggcagccgcatggcctcttggcgctccagcctcctcccctgtgacatagaggcagcgatggttggtaaccagggacagcgggcggctccgtcacacgagtcaggacatgtgaccc

SEQ ID NO: 691900 - DNA, 120 bp, Artificial Sequence
  ENSG00000188385_113 (sequence is synthesized)
tctgtgacgccccgagggacacacgctccttgatggtcaacaggccaggcttgcgggctccccaggtgccggcaaggttccagggccggcgtctgagggctgcaacccagacccgctggg

SEQ ID NO: 691901 - DNA, 120 bp, Artificial Sequence
  ENSG00000188385_114 (sequence is synthesized)
caccctgcggggcatgtttagttgtacctggaggagaggatgtgctctcttggcacaacgtgcagaaggcaccggaggaaaggaatggagaagaagcctgtttgcctcagagctcctcat

SEQ ID NO: 691902 - DNA, 120 bp, Artificial Sequence
  ENSG00000188385_115 (sequence is synthesized)
ctgtgggccacgggcactgttgttcccgggagatgctccctgcgtagaaaatgggagggggaggaggaggtgcgaccaccaccctggactcaggagagggcggcagctccatcttcaccc

SEQ ID NO: 691903 - DNA, 120 bp, Artificial Sequence
  ENSG00000188386_0 (sequence is synthesized)
atgtccacaatgggaaacgaggccagttacccggcggagatgtgctcccactttgacaatgatgaaattaaaaggctgggcaggaggtttaagaagttggacttggacaaatcagggtct

SEQ ID NO: 691904 - DNA, 120 bp, Artificial Sequence
  ENSG00000188386_1 (sequence is synthesized)
ctgagcgtggaggagttcatgtccctgccggagctgcgccacaacccgttggtgcggcgagtgatcgacgtcttcgacaccgacggtgatggagaagtggacttcaaggaattcatcctg

SEQ ID NO: 691905 - DNA, 120 bp, Artificial Sequence
  ENSG00000188386_2 (sequence is synthesized)
ttgaggtttgcgttcagcatttacgacatggataaagatggctacatttccaacggggagctcttccaggtgctgaagatgatggtgggcaacaacctgacggactggcagctccagcag

SEQ ID NO: 691906 - DNA, 120 bp, Artificial Sequence
  ENSG00000188386_3 (sequence is synthesized)
ctggtcgacaaaaccatcatcatcctggacaaggatggcgatgggaagatatcctttgaggaattcagtgctgtggtcagagacctggagatccacaagaagctggtcctcatcgtatga

SEQ ID NO: 691907 - DNA, 120 bp, Artificial Sequence
  ENSG00000188386_4 (sequence is synthesized)
cttccctatctctttcaagatttgctcaagacgtccaactgtctctctgacttatctggaagtatttctttttgtgaagccatatgtcctaacaggagcttcatcaccaactcagtgcta

SEQ ID NO: 691908 - DNA, 120 bp, Artificial Sequence
  ENSG00000188386_5 (sequence is synthesized)
ttaattctccttctctgaatgactcagggtaccctatagggggaagagcaagtcaaatgagcatagtggggaaagaaaaggaaatggcttttataaacatcttttactttgttttgattc

SEQ ID NO: 691909 - DNA, 120 bp, Artificial Sequence
  ENSG00000188386_6 (sequence is synthesized)
aaagaccaaactagaactttaaaagttcaaaaataagaaagtatacatttttgctgttatttctcatcattttgtatatgggaggaaatttataatttgcatgggtgttaggtgaactgt

SEQ ID NO: 691910 - DNA, 120 bp, Artificial Sequence
  ENSG00000188386_7 (sequence is synthesized)
tttcatttgcttgtgttcagatatcttgccagattgttaacttcctattgtagcaacagggacaaatatatttgtctttgctgggcatctcgtaatcacttttcttaggggacagaatcc

SEQ ID NO: 691911 - DNA, 120 bp, Artificial Sequence
  ENSG00000188386_8 (sequence is synthesized)
catcttttccttcggcagattgcagccccattccccacaatgcatccagaaatcgctgtgcatgtttgaggggtaggagttcatttggcctcctcctgacttgttgctccagctcctgaa

SEQ ID NO: 691912 - DNA, 120 bp, Artificial Sequence
  ENSG00000188386_9 (sequence is synthesized)
cagaaactagcttcagggctcttataggaaatgctaagcctggactaagtgcccagctcagccatcatcctcattagcagtgggtttccagggttggcagcccacaccagcattaatttc

SEQ ID NO: 691913 - DNA, 120 bp, Artificial Sequence
  ENSG00000188386_10 (sequence is synthesized)
aatgaaggggacctccagctaaatagggcaagcaaagtgttctcccagaaagtgctctcacctccgacactggtccctacccccaggtggagacaatgagacatttagttagttgtccta

SEQ ID NO: 691914 - DNA, 120 bp, Artificial Sequence
  ENSG00000188386_11 (sequence is synthesized)
cggaggagaggcagtagagtcaggctgcagtggaatctccctaggatgccaaagtggcattatgtctgttgctcacagatgcagagactgacaattgtgtctccacagcagaggtggatg

SEQ ID NO: 691915 - DNA, 120 bp, Artificial Sequence
  ENSG00000188386_12 (sequence is synthesized)
ctagctacaccagctatgctgattttgaaaatcagatctgaggcctagaagagaaactgagagctctctcattccaggaagccttttccctagtggaacattcagtgcagaagtcctcac

SEQ ID NO: 691916 - DNA, 120 bp, Artificial Sequence
  ENSG00000188386_13 (sequence is synthesized)
acagatctccaccattgggtgagccggagcctgtggttccaggggagatccagaatgcatgtgtctcttcccacgcatttatgtcatgttggtagctttagatcagccatggtgagaaaa

SEQ ID NO: 691917 - DNA, 120 bp, Artificial Sequence
  ENSG00000188386_14 (sequence is synthesized)
gaacaaaagcttttagttgtttttgttttgttttggagaatttgtttaccagtaaatacatcactgcctgtaccccaaatgttaccagctccctgaggtgtcccacatactattgtgagt

SEQ ID NO: 691918 - DNA, 120 bp, Artificial Sequence
  ENSG00000188386_15 (sequence is synthesized)
tctcagagcatgaactgtcctcagaagagcagggctaggacttgtcccagcatctgtgcctccataccaatcctctttctcacagagaaccacttcccatataagatgcttaaggctctc

SEQ ID NO: 691919 - DNA, 120 bp, Artificial Sequence
  ENSG00000188386_16 (sequence is synthesized)
aaaacagcagaacaatgaaacatactctccctacacttgcttagccaagagataccactcaggtaacttttttcaggacatggaagatctgtttcaaggagatttactgctattttattt

SEQ ID NO: 691920 - DNA, 120 bp, Artificial Sequence
  ENSG00000188386_17 (sequence is synthesized)
ggaagaagctggcaactggtcttgaccaaaatagaaaaaaaaaaaaaaagtccacaaatttaatcacttgtagggaacccatctatcaaggtaccctaccatatacttttgtatttaata

SEQ ID NO: 691921 - DNA, 120 bp, Artificial Sequence
  ENSG00000188386_18 (sequence is synthesized)
gattacttagaaaccacaaaaataggaatccttaccccttcaattcctgttcaaccctaaaaactgtgataaacgctcccaaccctgtggtgatcagggttatgtaatgttcaaagattc

SEQ ID NO: 691922 - DNA, 120 bp, Artificial Sequence
  ENSG00000188386_19 (sequence is synthesized)
agacacacctgggtttggattcagttgcaactgggttgttatcacactcacttctttttagctgtgtgagcatgaataatttacttagcctctctgtgtctttccacctaattaaagagg

SEQ ID NO: 691923 - DNA, 120 bp, Artificial Sequence
  ENSG00000188386_20 (sequence is synthesized)
atccaccccagggttattttgaggattcaaaaaggcatgcaacacacctggagcacaattccactttcattcaactaattcccttcccttcccccttcttccccttctacaagatcaata

SEQ ID NO: 691924 - DNA, 120 bp, Artificial Sequence
  ENSG00000188386_21 (sequence is synthesized)
tgtaaaggagacatgaggcttactggttgcttttgaacacttacttagttcttagctacacccactctaaaattaactggacattagtgtacagcccatgtccaagcccagagagaaaac

SEQ ID NO: 691925 - DNA, 120 bp, Artificial Sequence
  ENSG00000188386_22 (sequence is synthesized)
aatgggaacaatttcaaggtcctcaccactccttcatttgcagaggggacaacagactttctgacctgagaactggagaatttttaaaacaaaatctctcattccagcccaacctattta

SEQ ID NO: 691926 - DNA, 120 bp, Artificial Sequence
  ENSG00000188386_23 (sequence is synthesized)
actttttgtggaggaattttacatggaggaagtgagcacatgtcatgctagccaagaggacattattgtcattaaagagaggcattatttatacaccctgcaatgtgcacattaaaatat

SEQ ID NO: 691927 - DNA, 120 bp, Artificial Sequence
  ENSG00000188386_24 (sequence is synthesized)
ggaaattttaaaattatgaccaagggcttgaaacatattggattacatgctcacatttaacaaagagaggaaatgtgtttcagtttctggagtggctggaatttacaagctaattgttca

SEQ ID NO: 691928 - DNA, 120 bp, Artificial Sequence
  ENSG00000188386_25 (sequence is synthesized)
ataaatctactcaagatagttacctaaggctttgtggcaatgaccttgaactgagagcctgtatctggatttagcacttgaaagatctaactggatatttgggttaaaagaatcacattt

SEQ ID NO: 691929 - DNA, 120 bp, Artificial Sequence
  ENSG00000188386_26 (sequence is synthesized)
attcccaaatcggaatgctttgtttttcctgtcagttaattgccagttgccaacaaatctagttctatacagtttcttgggatgatgataataaacatttattgagcaattgtcccataa

SEQ ID NO: 691930 - DNA, 120 bp, Artificial Sequence
  ENSG00000188389_0 (sequence is synthesized)
gctcacctccgcctgagcagtggagaaggcggcactctggtggggctgctccaggcatgcagatcccacaggcgccctggccagtcgtctgggcggtgctacaactgggctggcggccag

SEQ ID NO: 691931 - DNA, 120 bp, Artificial Sequence
  ENSG00000188389_1 (sequence is synthesized)
gatggttcttagactccccagacaggccctggaacccccccaccttctccccagccctgctcgtggtgaccgaaggggacaacgccaccttcacctgcagcttctccaacacatcggaga

SEQ ID NO: 691932 - DNA, 120 bp, Artificial Sequence
  ENSG00000188389_2 (sequence is synthesized)
gcttcgtgctaaactggtaccgcatgagccccagcaaccagacggacaagctggccgccttccccgaggaccgcagccagcccggccaggactgccgcttccgtgtcacacaactgccca

SEQ ID NO: 691933 - DNA, 120 bp, Artificial Sequence
  ENSG00000188389_3 (sequence is synthesized)
acgggcgtgacttccacatgagcgtggtcagggcccggcgcaatgacagcggcacctacctctgtggggccatctccctggcccccaaggcgcagatcaaagagagcctgcgggcagagc

SEQ ID NO: 691934 - DNA, 120 bp, Artificial Sequence
  ENSG00000188389_4 (sequence is synthesized)
tcagggtgacagagagaagggcagaagtgcccacagcccaccccagcccctcacccaggccagccggccagttccaaaccctggtggttggtgtcgtgggcggcctgctgggcagcctgg

SEQ ID NO: 691935 - DNA, 120 bp, Artificial Sequence
  ENSG00000188389_5 (sequence is synthesized)
tgctgctagtctgggtcctggccgtcatctgctcccgggccgcacgagggacaataggagccaggcgcaccggccagcccctgaaggaggacccctcagccgtgcctgtgttctctgtgg

SEQ ID NO: 691936 - DNA, 120 bp, Artificial Sequence
  ENSG00000188389_6 (sequence is synthesized)
actatggggagctggatttccagtggcgagagaagaccccggagccccccgtgccctgtgtccctgagcagacggagtatgccaccattgtctttcctagcggaatgggcacctcatccc

SEQ ID NO: 691937 - DNA, 120 bp, Artificial Sequence
  ENSG00000188389_7 (sequence is synthesized)
ccgcccgcaggggctcagctgacggccctcggagtgcccagccactgaggcctgaggatggacactgctcttggcccctctgaccggcttccttggccaccagtgttctgcagaccctcc

SEQ ID NO: 691938 - DNA, 120 bp, Artificial Sequence
  ENSG00000188389_8 (sequence is synthesized)
gcaggccgtccaggggctgagctgcctgggggcgaccggggctccagcctgcacctgcaccaggcacagccccaccacaggactcatgtctcaatgcccacagtgagcccaggcagcagg

SEQ ID NO: 691939 - DNA, 120 bp, Artificial Sequence
  ENSG00000188389_9 (sequence is synthesized)
caggtgtcaccgtcccctacagggagggccagatgcagtcactgcttcaggtcctgccagcacagagctgcctgcgtccagctccctgaatctctgctgctgctgctgctgctgctgctg

SEQ ID NO: 691940 - DNA, 120 bp, Artificial Sequence
  ENSG00000188389_10 (sequence is synthesized)
ctgcggcccggggctgaaggcgccgtggccctgcctgacgccccggagcctcctgcctgaacttgggggctggttggagatggccttggagcagccaaggtgcccctggcagtggcatcc

SEQ ID NO: 691941 - DNA, 120 bp, Artificial Sequence
  ENSG00000188389_11 (sequence is synthesized)
cgaaacgccctggacgcagggcccaagactgggcacaggagtgggaggtacatggggctggggactccccaggagttatctgctccctgcaggcctagagaagtttcagggaaggtcaga

SEQ ID NO: 691942 - DNA, 120 bp, Artificial Sequence
  ENSG00000188389_12 (sequence is synthesized)
agagctcctggctgtggtgggcagggcaggaaacccctccacctttacacatgcccaggcagcacctcaggccctttgtggggcagggaagctgaggcagtaagcgggcaggcagagctg

SEQ ID NO: 691943 - DNA, 120 bp, Artificial Sequence
  ENSG00000188389_13 (sequence is synthesized)
gaggcctttcaggcccagccagcactctggcctcctgccgccgcattccaccccagcccctcacaccactcgggagagggacatcctacggtcccaaggtcaggagggcagggctggggt

SEQ ID NO: 691944 - DNA, 120 bp, Artificial Sequence
  ENSG00000188389_14 (sequence is synthesized)
tgactcaggcccctcccagctgtggccacctgggtgttgggagggcagaagtgcaggcacctagggccccccatgtgcccaccctgggagctctccttggaacccattcctgaaattatt

SEQ ID NO: 691945 - DNA, 120 bp, Artificial Sequence
  ENSG00000188389_15 (sequence is synthesized)
taaaggggttggccgggctcccaccagggcctgggtgggaaggtacaggcgttcccccggggcctagtacccccgccgtggcctatccactcctcacatccacacactgcacccccactc

SEQ ID NO: 691946 - DNA, 120 bp, Artificial Sequence
  ENSG00000188389_16 (sequence is synthesized)
ctggggcagggccaccagcatccaggcggccagcaggcacctgagtggctgggacaagggatcccccttccctgtggttctattatattataattataattaaatatgagagcatgctaa

SEQ ID NO: 691947 - DNA, 120 bp, Artificial Sequence
  ENSG00000188393_0 (sequence is synthesized)
ctagtcctctcctactgatctccatcggttagcgccttgccatgattaatccagagctgcgggatggcagagctgatggcttcatacatcggatagttcccaagttgatacaaaactgga

SEQ ID NO: 691948 - DNA, 120 bp, Artificial Sequence
  ENSG00000188393_1 (sequence is synthesized)
agattggccttatgtgcttcctgagtattattattactacagtttgcattattatgatagccacatggtccaagcatgctaaacctgtggcatgttcaggggactggcttggagtgagag

SEQ ID NO: 691949 - DNA, 120 bp, Artificial Sequence
  ENSG00000188393_2 (sequence is synthesized)
ataagtgtttctatttttctgatgataccagaaattggacagccagtaaaatattttgtagtttgcagaaagcagaacttgctcagattgatacacaagaagacatggaatttttgaaga

SEQ ID NO: 691950 - DNA, 120 bp, Artificial Sequence
  ENSG00000188393_3 (sequence is synthesized)
acaaatggcaccacattcaatggttggtttgaaattatagggaacggatcctttgctttcttgagtgctgatggagtccatagttccagaggatttattgatatcaagtggatttgcagc

SEQ ID NO: 691951 - DNA, 120 bp, Artificial Sequence
  ENSG00000188393_4 (sequence is synthesized)
aaacctaaatattttttatagagcagaaaaaacttgaaaatgattatcacacttcaagattgaaagaagagctaattatgcaaaagtggctttctcacttattctgttacagaatacgga

SEQ ID NO: 691952 - DNA, 120 bp, Artificial Sequence
  ENSG00000188393_5 (sequence is synthesized)
acctctggtgagggcccattttctagtttatagatggaaacttcttgctgtgccctgccatggttaaagagacaaggccgttctctggagccttttataagggcacaatcacatttacta

SEQ ID NO: 691953 - DNA, 120 bp, Artificial Sequence
  ENSG00000188393_6 (sequence is synthesized)
tggctccatcctcatgaactaatcacctcctgatggatggctccatcccctaataccatcacactggtgattagctttcaatttatgagttttgggaggacccaaatactcagaacatag

SEQ ID NO: 691954 - DNA, 120 bp, Artificial Sequence
  ENSG00000188393_7 (sequence is synthesized)
agcaggaaacaaggagattcttggaaatggacaaatggcaccacattcaatggttggccatcaaactccaaatggtcttgcaactggagcctccgacaatggcttcttctgctgggaccc

SEQ ID NO: 691955 - DNA, 120 bp, Artificial Sequence
  ENSG00000188393_8 (sequence is synthesized)
cttagataggcctctgagggagctctgactgccgtttccccaaaacaatgtcccctgtcagcaggaagcagttaaatctgtcttcatccttatccttaatataacggcagttagatgtac

SEQ ID NO: 691956 - DNA, 120 bp, Artificial Sequence
  ENSG00000188393_9 (sequence is synthesized)
ttctttagagggagtaaatttatcaattcagagcaattcatcctcctctttccatctttgattcacagttaataggctataaattttgataatgtagaataaactacagaaaacttcttg

SEQ ID NO: 691957 - DNA, 120 bp, Artificial Sequence
  ENSG00000188394_0 (sequence is synthesized)
aagcggcagcatgaagtgacagatcactcctgagctcaagatgaactccaccttggatggtaatcagagcagccaccctttttgcctcttggcatttggctatttggaaactgtcaattt

SEQ ID NO: 691958 - DNA, 120 bp, Artificial Sequence
  ENSG00000188394_1 (sequence is synthesized)
ttgccttttggaagtattgattattgtctttctaactgtattgattatttctggcaacatcattgtgatttttgtatttcactgtgcacctttgttgaaccatcacactacaagttattt

SEQ ID NO: 691959 - DNA, 120 bp, Artificial Sequence
  ENSG00000188394_2 (sequence is synthesized)
tatccagactatggcatatgctgacctttttgttggggtgagctgcgtggtcccttctttatcactcctccatcacccccttccagtagaggagtccttgacttgccagatatttggttt

SEQ ID NO: 691960 - DNA, 120 bp, Artificial Sequence
  ENSG00000188394_3 (sequence is synthesized)
tgtagtatcagttctgaagagcgtctccatggcttctctggcctgtatcagcattgatagatacattgccattactaaacctttaacctataatactctggttacaccctggagactacg

SEQ ID NO: 691961 - DNA, 120 bp, Artificial Sequence
  ENSG00000188394_4 (sequence is synthesized)
gtttcagtggtgtgcggagtcctggcacaccgactcctacttcaccctgttcatcgtgatgatgttatatgccccagcagcccttattgtctgcttcacctatttcaacatcttccgcat

SEQ ID NO: 691962 - DNA, 120 bp, Artificial Sequence
  ENSG00000188394_5 (sequence is synthesized)
ctgccaacagcacacaaaggatatcagcgaaaggcaagcccgcttcagcagccagagtggggagactggggaagtgcaggcctgtcctgataagcgctatgccatggtcctgtttcgaat

SEQ ID NO: 691963 - DNA, 120 bp, Artificial Sequence
  ENSG00000188394_6 (sequence is synthesized)
cactagtgtattttacatcctctggttgccatatatcatctacttcttgttggaaagctccactggccacagcaaccgcttcgcatccttcttgaccacctggcttgctattagtaacag

SEQ ID NO: 691964 - DNA, 120 bp, Artificial Sequence
  ENSG00000188394_7 (sequence is synthesized)
tttctgcaactgtgtaatttatagtctctccaacagtgtattccaaagaggactaaagcgcctctcaggggctatgtgtacttcttgtgcaagtcagactacagccaacgacccttacac

SEQ ID NO: 691965 - DNA, 120 bp, Artificial Sequence
  ENSG00000188394_8 (sequence is synthesized)
ttgtgcaagtcagactacagccaacgacccttacacagttagaagcaaaggccctcttaatggatgtcatatctgaagtggctcagttacggggttcccgtgtgtgtgtgtgtgtgtgtg

SEQ ID NO: 691966 - DNA, 120 bp, Artificial Sequence
  ENSG00000188396_0 (sequence is synthesized)
caggtccatggccagcaggcctctgcccccgggacgccaggaggaggagaatgccaaagactccgggcggaaaccctcaccggtgcggccccgaggctgcctgcccagcattgatgaggc

SEQ ID NO: 691967 - DNA, 120 bp, Artificial Sequence
  ENSG00000188396_1 (sequence is synthesized)
gatgaggcccgaccggcaggtccaggtccagccccggcctcgcgccggggctccatgctgggcctggccgcgtccttctcccgccgcaactcgctggtcgggccaggcgcgggtcctggg

SEQ ID NO: 691968 - DNA, 120 bp, Artificial Sequence
  ENSG00000188396_2 (sequence is synthesized)
gccatccctgggcccggtgccccctctgggctcaagggtcagcttctcagggttgcccctggcgcccgcccgttgggtggcgccctcctaccgcacggagccagtgcccggggagcgctg

SEQ ID NO: 691969 - DNA, 120 bp, Artificial Sequence
  ENSG00000188396_3 (sequence is synthesized)
gcagggctgcacgacgcgtgctactccagcgacgaggccgcgcggctggtgcgggagctctgcgagcaggtgcacgttcgcctgcgcgagctcagcccgccacgctacaagctggtatgc

SEQ ID NO: 691970 - DNA, 120 bp, Artificial Sequence
  ENSG00000188396_4 (sequence is synthesized)
agtgtggtgctggggccgcgcgcgggccagggcgttcacgtggtcagccgtgcgctctgggacgtggcgcgcgatgggctggcctcggtctcctacaccaacacctcgctcttcgcggtg

SEQ ID NO: 691971 - DNA, 120 bp, Artificial Sequence
  ENSG00000188396_5 (sequence is synthesized)
gccacggtccacgggctctactgcgagtgagggggagtccaattctgcaaaattgtttattatcctaggaggaggcccccctggggctcacatcccaataaataagtgtctgacaataaa

SEQ ID NO: 691972 - DNA, 76 bp, Artificial Sequence
  ENSG00000188403_0 (sequence is synthesized)
atgggctggacttggaggatcctgtttttggtggtcatagctgcaggtgcccagtcccaggtacagctggatctcc

SEQ ID NO: 691973 - DNA, 120 bp, Artificial Sequence
  ENSG00000188403_1 (sequence is synthesized)
ctatgcacagaagttccagggcagagtcaccataaccagggacacatccatgggcacagcctacatggagctaagcagcctgagatctgaggacacggccatgtattactgtgtgagaga

SEQ ID NO: 691974 - DNA, 120 bp, Artificial Sequence
  ENSG00000188404_0 (sequence is synthesized)
gacattcagtgcagtctacctgcagcacagcacactccctttgggcaaggacctgagacccttgtgctaagtcaagaggctcaatgggctgcagaagaactagagaaggaccaagcaaag

SEQ ID NO: 691975 - DNA, 120 bp, Artificial Sequence
  ENSG00000188404_1 (sequence is synthesized)
ccatgatatttccatggaaatgtcagagcacccagagggacttatggaacatcttcaagttgtgggggtggacaatgctctgttgtgatttcctggcacatcatggaaccgactgctgga

SEQ ID NO: 691976 - DNA, 120 bp, Artificial Sequence
  ENSG00000188404_2 (sequence is synthesized)
cttaccattattctgaaaaacccatgaactggcaaagggctagaagattctgccgagacaattacacagatttagttgccatacaaaacaaggcggaaattgagtatctggagaagactc

SEQ ID NO: 691977 - DNA, 120 bp, Artificial Sequence
  ENSG00000188404_3 (sequence is synthesized)
tgcctttcagtcgttcttactactggataggaatccggaagataggaggaatatggacgtgggtgggaaccaacaaatctcttactgaagaagcagagaactggggagatggtgagccca

SEQ ID NO: 691978 - DNA, 120 bp, Artificial Sequence
  ENSG00000188404_4 (sequence is synthesized)
acaacaagaagaacaaggaggactgcgtggagatctatatcaagagaaacaaagatgcaggcaaatggaacgatgacgcctgccacaaactaaaggcagccctctgttacacagcttctt

SEQ ID NO: 691979 - DNA, 120 bp, Artificial Sequence
  ENSG00000188404_5 (sequence is synthesized)
gccagccctggtcatgcagtggccatggagaatgtgtagaaatcatcaataattacacctgcaactgtgatgtggggtactatgggccccagtgtcagtttgtgattcagtgtgagcctt

SEQ ID NO: 691980 - DNA, 120 bp, Artificial Sequence
  ENSG00000188404_6 (sequence is synthesized)
tggaggccccagagctgggtaccatggactgtactcaccctttgggaaacttcagcttcagctcacagtgtgccttcagctgctctgaaggaacaaacttaactgggattgaagaaacca

SEQ ID NO: 691981 - DNA, 120 bp, Artificial Sequence
  ENSG00000188404_7 (sequence is synthesized)
cctgtggaccatttggaaactggtcatctccagaaccaacctgtcaagtgattcagtgtgagcctctatcagcaccagatttggggatcatgaactgtagccatcccctggccagcttca

SEQ ID NO: 691982 - DNA, 120 bp, Artificial Sequence
  ENSG00000188404_8 (sequence is synthesized)
gctttacctctgcatgtaccttcatctgctcagaaggaactgagttaattgggaagaagaaaaccatttgtgaatcatctggaatctggtcaaatcctagtccaatatgtcaaaaattgg

SEQ ID NO: 691983 - DNA, 120 bp, Artificial Sequence
  ENSG00000188404_9 (sequence is synthesized)
ctgggttggcatttatcatttggctggcaaggagattaaaaaaaggcaagaaatccaagagaagtatgaatgacccatattaaatcgcccttggtgaaagaaaattcttggaatactaaa

SEQ ID NO: 691984 - DNA, 120 bp, Artificial Sequence
  ENSG00000188404_10 (sequence is synthesized)
aatcatgagatcctttaaatccttccatgaaacgttttgtgtggtggcacctcctacgtcaaacatgaagtgtgtttccttcagtgcatctgggaagatttctacctgaccaacagttcc

SEQ ID NO: 691985 - DNA, 120 bp, Artificial Sequence
  ENSG00000188404_11 (sequence is synthesized)
ttcagcttccatttcgcccctcatttatccctcaacccccagcccacaggtgtttatacagctcagctttttgtcttttctgaggagaaacaaataagaccataaagggaaaggattcat

SEQ ID NO: 691986 - DNA, 120 bp, Artificial Sequence
  ENSG00000188404_12 (sequence is synthesized)
gtggaatataaagatggctgactttgctctttcttgactcttgttttcagtttcaattcagtgctgtacttgatgacagacacttctaaatgaagtgcaaatttgatacatatgtgaata

SEQ ID NO: 691987 - DNA, 120 bp, Artificial Sequence
  ENSG00000188404_13 (sequence is synthesized)
tggactcagttttcttgcagatcaaatttcacgtcgtcttctgtatactgtggaggtacactcttatagaaagttcaaaaagtctacgctctcctttctttctaactccagtgaagtaat

SEQ ID NO: 691988 - DNA, 120 bp, Artificial Sequence
  ENSG00000188404_14 (sequence is synthesized)
ggggtcctgctcaagttgaaagagtcctatttgcactgtagcctcgccgtctgtgaattggaccatcctatttaactggcttcagcctccccaccttcttcagccacctctctttttcag

SEQ ID NO: 691989 - DNA, 120 bp, Artificial Sequence
  ENSG00000188404_15 (sequence is synthesized)
ttggctgacttccacacctagcatctcatgagtgccaagcaaaaggagagaagagagaaatagcctgcgctgttttttagtttgggggttttgctgtttccttttatgagacccattcct

SEQ ID NO: 691990 - DNA, 120 bp, Artificial Sequence
  ENSG00000188404_16 (sequence is synthesized)
atttcttatagtcaatgtttcttttatcacgatattattagtaagaaaacatcactgaaatgctagctgcaagtgacatctctttgatgtcatatggaagagttaaaacaggtggagaaa

SEQ ID NO: 691991 - DNA, 120 bp, Artificial Sequence
  ENSG00000188404_17 (sequence is synthesized)
ttccttgattcacaatgaaatgctctcctttcccctgcccccagaccttttatccacttacctagattctacatattctttaaatttcatctcaggcctccctcaaccccaccacttctt

SEQ ID NO: 691992 - DNA, 120 bp, Artificial Sequence
  ENSG00000188404_18 (sequence is synthesized)
ttataactagtcctttactaatccaacccatgatgagctcctcttcctggcttcttactgaaaggttaccctgtaacatgcaattttgcatttgaataaagcctgctttttaagtgttaa

SEQ ID NO: 691993 - DNA, 120 bp, Artificial Sequence
  ENSG00000188404_19 (sequence is synthesized)
cttaacgatggagctgatggatgagcagatatgaggaaagacatacataaacatttacatgttgttttgctaagaatatgtggcctagaaataaatttgtatgcttaactcactgtaaaa

SEQ ID NO: 691994 - DNA, 120 bp, Artificial Sequence
  ENSG00000188404_20 (sequence is synthesized)
actgcattctctgggttggcatttatcatttggctggcaaggagattaaaaaaaggtatgtgagtttaacttcacatgaaaagaacacaactttaaagtgaaaaagaaaaaaaaaagaaa

SEQ ID NO: 691995 - DNA, 120 bp, Artificial Sequence
  ENSG00000188408_0 (sequence is synthesized)
ttactctcagccttgggacaacgaggacagagtcaacatgtctcaggatcagaacagtaagctccacacttgtgagaaacactaccagatccaagatgactctctgcttcagagtggagc

SEQ ID NO: 691996 - DNA, 120 bp, Artificial Sequence
  ENSG00000188408_1 (sequence is synthesized)
tcaggccagtgaataagtggaagatgatcccctccccacttcctctcctattcttggggatattccccagagctcatctgctgctgagtcaagtggcacttcccaggagccttgcgaatc

SEQ ID NO: 691997 - DNA, 120 bp, Artificial Sequence
  ENSG00000188408_2 (sequence is synthesized)
cagcaccatgacttctgcaggtgtttttaatgcaggatctgacgaaagggctaacagtagagatgaggagtacccatgttcctcagaggtctcaccctccactgagagttcatgcagcaa

SEQ ID NO: 691998 - DNA, 120 bp, Artificial Sequence
  ENSG00000188408_3 (sequence is synthesized)
tttcataaatattaaggtgggtttgttggagcagttcctgctctacaagttcaaaatgaaacagcgtattttgaaggaagatatgctgaagattgtcaacccaagataccaaaaccagtt

SEQ ID NO: 691999 - DNA, 120 bp, Artificial Sequence
  ENSG00000188408_4 (sequence is synthesized)
tgctgagattcacagaagagcttctgagcacattgaggttgtctttgcagttgacttgaaggaagtcaacccaacttgtcacttatatgaccttgtcagcaagctgaaactccccaacaa

SEQ ID NO: 692000 - DNA, 120 bp, Artificial Sequence
  ENSG00000188408_5 (sequence is synthesized)
ggcaaagtgttacccaagactggtctcctcatgactttcctggttgtgatcttcctgaaaggcaactgtgccaacaaggaagatacctggaaatttctggatatgatgcaaatatatgat

SEQ ID NO: 692001 - DNA, 120 bp, Artificial Sequence
  ENSG00000188408_6 (sequence is synthesized)
gggaagaagtactacatctatggagagcccaggaagctcatcactcaggatttcgtgaggctaacgtacctggagtaccaccaggtgccctgcagttatcctgcacactatcaattcctt

SEQ ID NO: 692002 - DNA, 120 bp, Artificial Sequence
  ENSG00000188408_7 (sequence is synthesized)
tggggtccaagagcctatactgaaaccagcaagatgaaagtcctggaatatttggccaaggtcaatgatattgctccaggtgccttctcatcacaatatgaagaggctttgcaagatgag

SEQ ID NO: 692003 - DNA, 120 bp, Artificial Sequence
  ENSG00000188408_8 (sequence is synthesized)
gaagagagcccaagccagagatgcagccgaaactggcactactgcagtggccaagactgtctcagggcgaagttcagcagcttctctcaaccctattgaagtctgaagcttttttcatcc

SEQ ID NO: 692004 - DNA, 120 bp, Artificial Sequence
  ENSG00000188408_9 (sequence is synthesized)
agtcaagcaaatataacatcaccaaaagggattttttttggaaatacaaaagaacccccagtaaaataattgagataatgaaatagaaaaaaataataaaacatgatcttggttttcttc

SEQ ID NO: 692005 - DNA, 120 bp, Artificial Sequence
  ENSG00000188419_0 (sequence is synthesized)
agtcacatgacacgtttcccgtcaagatggcggatactctcccttcggagtttgatgtgatcgtaatagggacgggtttgcctgaatccatcattgcagctgcatgttcaagaagtggcc

SEQ ID NO: 692006 - DNA, 120 bp, Artificial Sequence
  ENSG00000188419_1 (sequence is synthesized)
ggagagttctgcatgttgattcaagaagctactatggaggaaactgggccagttttagcttttcaggactattgtcctggctaaaggaataccaggaaaacagtgacattgtaagtgaca

SEQ ID NO: 692007 - DNA, 120 bp, Artificial Sequence
  ENSG00000188419_2 (sequence is synthesized)
gtccagtgtggcaagaccagatccttgaaaatgaagaagccattgctcttagcaggaaggacaaaactattcaacatgtggaagtattttgttatgccagtcaggatttgcatgaagatg

SEQ ID NO: 692008 - DNA, 120 bp, Artificial Sequence
  ENSG00000188419_3 (sequence is synthesized)
tcgaagaagctggtgcactgcagaaaaatcatgctcttgtgacatctgcaaactccacagaagctgcagattctgccttcctgcctacggaggatgagtcattaagcactatgagctgtg

SEQ ID NO: 692009 - DNA, 120 bp, Artificial Sequence
  ENSG00000188419_4 (sequence is synthesized)
aaatgctcacagaacaaactccaagcagcgatccagagaatgcgctagaagtaaatggtgctgaagtgacaggggaaaaagaaaaccattgtgatgataaaacttgtgtgccatcaactt

SEQ ID NO: 692010 - DNA, 120 bp, Artificial Sequence
  ENSG00000188419_5 (sequence is synthesized)
cagcagaagacatgagtgaaaatgtgcctatagcagaagataccacagagcaaccaaagaaaaacagaattacttactcacaaattattaaagaaggcaggagatttaatattgatttag

SEQ ID NO: 692011 - DNA, 120 bp, Artificial Sequence
  ENSG00000188419_6 (sequence is synthesized)
tatcaaagctgctgtattctcgaggattactaattgatcttctaatcaaatctaatgttagtcgatatgcagagtttaaaaatattaccaggattcttgcatttcgagaaggacgagtgg

SEQ ID NO: 692012 - DNA, 120 bp, Artificial Sequence
  ENSG00000188419_7 (sequence is synthesized)
aacaggttccgtgttccagagcagatgtctttaatagcaaacaacttactatggtagaaaagcgaatgctaatgaaatttcttacattttgtatggaatatgagaaatatcctgatgaat

SEQ ID NO: 692013 - DNA, 120 bp, Artificial Sequence
  ENSG00000188419_8 (sequence is synthesized)
ataaaggatatgaagagatcacattttatgaatatttaaagactcaaaaattaacccccaacctccaatatattgtcatgcattcaattgcaatgacatcagagacagccagcagcacca

SEQ ID NO: 692014 - DNA, 120 bp, Artificial Sequence
  ENSG00000188419_9 (sequence is synthesized)
tagatggtctcaaagctaccaaaaactttcttcactgtcttgggcggtatggcaacactccatttttgtttcctttatatggccaaggagaactcccccagtgtttctgcaggatgtgtg

SEQ ID NO: 692015 - DNA, 120 bp, Artificial Sequence
  ENSG00000188419_10 (sequence is synthesized)
ctgtgtttggtggaatttattgtcttcgccattcagtacagtgccttgtagtggacaaagaatccagaaaatgtaaagcaattatagatcagtttggtcagagaataatctctgagcatt

SEQ ID NO: 692016 - DNA, 120 bp, Artificial Sequence
  ENSG00000188419_11 (sequence is synthesized)
tcctcgtggaggacagttactttcctgagaacatgtgctcacgtgtgcaatacaggcagatctccagggcagtgctgattacagatagatctgtcctaaaaacagattcagatcaacaga

SEQ ID NO: 692017 - DNA, 120 bp, Artificial Sequence
  ENSG00000188419_12 (sequence is synthesized)
tttccattttgacagtgccagcagaggaaccaggaacttttgctgttcgggtcattgagttatgttcttcaacgatgacatgcatgaaaggcacctatttggttcatttgacttgcacat

SEQ ID NO: 692018 - DNA, 120 bp, Artificial Sequence
  ENSG00000188419_13 (sequence is synthesized)
cttctaaaacagcaagagaagatttagaatcagttgtgcagaaattgtttgttccatatactgaaatggagatagaaaatgaacaagtagaaaagccaagaattctgtgggctctttact

SEQ ID NO: 692019 - DNA, 120 bp, Artificial Sequence
  ENSG00000188419_14 (sequence is synthesized)
tcaatatgagagattcgtcagacatcagcaggagctgttataatgatttaccatccaacgtttatgtctgctctggcccagattgtggtttaggaaatgataatgcagtcaaacaggctg

SEQ ID NO: 692020 - DNA, 120 bp, Artificial Sequence
  ENSG00000188419_15 (sequence is synthesized)
aaacacttttccaggaaatctgccccaatgaagatttctgtccccctccaccaaatcctgaagacattatccttgatggagacagtttacagccagaggcttcagaatccagtgccatac

SEQ ID NO: 692021 - DNA, 120 bp, Artificial Sequence
  ENSG00000188419_16 (sequence is synthesized)
cagaggctaactcggagactttcaaggaaagcacaaaccttggaaacctagaggagtcctctgaataatggatatacaccaaactggatacccaactttggaaattctgactggtctcag

SEQ ID NO: 692022 - DNA, 120 bp, Artificial Sequence
  ENSG00000188419_17 (sequence is synthesized)
agtctacttgatagaaggactgtttgagaaatgttagaaagcagcagcaattataaggcaaaataggtaatagaaatccaaaaggggattttccttatagaggacattccaagaacacac

SEQ ID NO: 692023 - DNA, 120 bp, Artificial Sequence
  ENSG00000188419_18 (sequence is synthesized)
aacacttataaagcacattgacttgctcattttaaataccaaacttgtgtgactagcagatgaaaattataaatcaattgattctcaggaatgtaactgtggatatgaaagtgatcctat

SEQ ID NO: 692024 - DNA, 120 bp, Artificial Sequence
  ENSG00000188419_19 (sequence is synthesized)
gcattgttaataattccatggtcttaggacaattttgcttaccactttggatctttgtttgaaagccacattttcagaaccagctcatgtattttctttggttatttgaattttattttc

SEQ ID NO: 692025 - DNA, 120 bp, Artificial Sequence
  ENSG00000188419_20 (sequence is synthesized)
tttatggacaagagcatcataacataatgataaaaacatatagaaaaactaaagtatcatgatctagatagaagcctgtatttggaatacaggtttgttttgctttctatgttgagaagc

SEQ ID NO: 692026 - DNA, 120 bp, Artificial Sequence
  ENSG00000188419_21 (sequence is synthesized)
attgaaaatgctaatataaaggtgtttagacatttttacgaataagtcagtagtgttttttagtatcagtagtgatatttgtttgtaaattatttacatattgggaaaggtcaataatga

SEQ ID NO: 692027 - DNA, 120 bp, Artificial Sequence
  ENSG00000188419_22 (sequence is synthesized)
attggtatttgaatattctgtctgtcaagtaactagagtattaggctaattgtctacagacctaatttaatcctggctgtcctactgatgatatttggtaaattgtttaacttctgagcc

SEQ ID NO: 692028 - DNA, 120 bp, Artificial Sequence
  ENSG00000188419_23 (sequence is synthesized)
tacgtttctccatatataaagtggaaatagtattactatgcctactatatgagaatggttatgaagacaatgcaatgccatgtttagaatcggtttgccagaagaaaattgttttagaat

SEQ ID NO: 692029 - DNA, 120 bp, Artificial Sequence
  ENSG00000188419_24 (sequence is synthesized)
tttcccattgacttgatgaatctcaaaagtctcacgcaggaaataattgcttgctgtcagtcaacttccaaacaaaatagatcacagtgtttttattgcattaagctttttaaatgaaaa

SEQ ID NO: 692030 - DNA, 120 bp, Artificial Sequence
  ENSG00000188419_25 (sequence is synthesized)
tttcttttttaaagtagtattttatagtcttacagaccagtaaaaatagtaacaagtagaattgtggttttgaaatattactaaggaaaacactctataaattgttttattccttttctg

SEQ ID NO: 692031 - DNA, 120 bp, Artificial Sequence
  ENSG00000188419_26 (sequence is synthesized)
cttttctggtaggtaaacctgcaaccaccaaggactccaaattgtgtatgacagttggtaagccctaatatacactacataaaaacgttagggctgcctgtaatcccagcactttgggaa

SEQ ID NO: 692032 - DNA, 78 bp, Artificial Sequence
  ENSG00000188419_27 (sequence is synthesized)
tagctgggtgttatggtgggcacctgtaatcccagctactttgaagatgaggtagcagactcacttgaaccagggagg

SEQ ID NO: 692033 - DNA, 61 bp, Artificial Sequence
  ENSG00000188419_28 (sequence is synthesized)
tttagctgggtgttatggtgggcacctgtaatcccagctactttgaagatgaggtagcaga

SEQ ID NO: 692034 - DNA, 120 bp, Artificial Sequence
  ENSG00000188419_29 (sequence is synthesized)
aaaagggggctgtacataggcagcaaactaagctgcagtgatgttgcctatatttaaattttctcaaatggccaagctctgatggtctactttatttgagcaatagttgagacttataat

SEQ ID NO: 692035 - DNA, 120 bp, Artificial Sequence
  ENSG00000188419_30 (sequence is synthesized)
tgcctataaataaacaaacaaatgaactatttgtttttttttctcacaacatctggcctatattgtctgtcaggaagccatggctccaatgtaaagtacatagttcttacatacttcaac

SEQ ID NO: 692036 - DNA, 120 bp, Artificial Sequence
  ENSG00000188419_31 (sequence is synthesized)
tgcagctggtccctgacctcaccaggtttcagagatgttcttaaaggaagccagctgtggcaggtcacagattcatgggaaatggaaagaaccaaggaatatagctcttgcctcaccttt

SEQ ID NO: 692037 - DNA, 120 bp, Artificial Sequence
  ENSG00000188419_32 (sequence is synthesized)
ctacccactgcagatatagttcaagccagagtaatggaagaacttaacttactagcctctcaggctgctcctatccctacctcccagtgtacagcccctccccatctctttagtcccctt

SEQ ID NO: 692038 - DNA, 120 bp, Artificial Sequence
  ENSG00000188419_33 (sequence is synthesized)
tccctcacttccccttttataatgtcacacaaatcagggacagtaggatcacattataacctactttgtcatagggattcgatttttcttatatcaaatcatgtttcctgaaacccagct

SEQ ID NO: 692039 - DNA, 120 bp, Artificial Sequence
  ENSG00000188419_34 (sequence is synthesized)
ggggcatatgcactcaatgtctaatacatacttattaatgtaccggatattggccttgcccctggatatcagcaatatattataaaaggttccagtagatgagacgattgagtctgaata

SEQ ID NO: 692040 - DNA, 120 bp, Artificial Sequence
  ENSG00000188419_35 (sequence is synthesized)
caattgcagtaaattgtgccaataaagatattgtactgttacggtcttagagttaaagccgcttgaatgcagcatgcacattcatgtaaacagacaatcagggtaggcctagaataacca

SEQ ID NO: 692041 - DNA, 120 bp, Artificial Sequence
  ENSG00000188419_36 (sequence is synthesized)
caaaaattctattggccttactgcagccacctatatgtagaacaatggaggagatagtttgtggtccattattgtaccctgtttcatccattagcatcagaatctctctttcaggtcatt

SEQ ID NO: 692042 - DNA, 120 bp, Artificial Sequence
  ENSG00000188419_37 (sequence is synthesized)
tattaaatatgattgaaatgtttaaaagttcctgaacatgattcatgatgattaaaatatcatacaactgataaaagactttaagaactttatatatttcctgttgcctcaaaatgtaac

SEQ ID NO: 692043 - DNA, 120 bp, Artificial Sequence
  ENSG00000188419_38 (sequence is synthesized)
agaaattattcttagagctttgattttagctatcctaattactgcaaataaatatttgttcttatagttttaaatcaaaaagaaaagtcttgttataaaaccttaagcttgaaatcatat

SEQ ID NO: 692044 - DNA, 120 bp, Artificial Sequence
  ENSG00000188419_39 (sequence is synthesized)
taataaaatatattgtacatagtggaaaattttcagtagctaatttaaaatttcagaaaatgctattaaagaattttgattcaagtatttaaactgtttagttatgcatgcttcttatta

SEQ ID NO: 692045 - DNA, 120 bp, Artificial Sequence
  ENSG00000188419_40 (sequence is synthesized)
accgaaaatgataataccatttagtttagtgatcagtatgagaagcaatacctaatcctatgttgctattgtattttttcctagttggtgtgcctgctcagaaaaacatatactgtatgt

SEQ ID NO: 692046 - DNA, 120 bp, Artificial Sequence
  ENSG00000188419_41 (sequence is synthesized)
gtatacatacctgtgtatatataaaaggtcaatttatatatttttctataggaaaatggagtaacaagttccctatctcccatatttatttgtccatagtaaaatggccacattgatgat

SEQ ID NO: 692047 - DNA, 120 bp, Artificial Sequence
  ENSG00000188419_42 (sequence is synthesized)
aatttctagaactagtttctgagattgtcagccctttgtctaaaataatggcagtattaatgattgacttctgtcactgccatagttacctggattgtcagccttggtagcctttgtcta

SEQ ID NO: 692048 - DNA, 120 bp, Artificial Sequence
  ENSG00000188419_43 (sequence is synthesized)
aagtcctaaagagttccaaaaaaaatgtgttgaaatttaattgctaaatagtggttggtgattctttacagtaggaattgtaataattttcttgcaaataagttatttactgctattgat

SEQ ID NO: 692049 - DNA, 120 bp, Artificial Sequence
  ENSG00000188419_44 (sequence is synthesized)
attgaataatttgtcttttattcagatatatttcaaaaagcatgaatatatgattattcataaattgtatactttaccagtaagttttcagaggaaataaagacttttaaatccttttca

SEQ ID NO: 692050 - DNA, 120 bp, Artificial Sequence
  ENSG00000188419_45 (sequence is synthesized)
tatagcatacaagttttactattttgtgaaatagtgatctttgagaataaaccaaatgcatcattttatttttctcatgagtgattttgtttaaaataacaagtaattctccaagaggct

SEQ ID NO: 692051 - DNA, 120 bp, Artificial Sequence
  ENSG00000188419_46 (sequence is synthesized)
tggaaacctcatgcctgccccttttcctacatatgtgtgtgggtatatacaacctatatatgctattgtattttaggcttcatatttgatggttgtaaaagtcagccaatagattttgag

SEQ ID NO: 692052 - DNA, 120 bp, Artificial Sequence
  ENSG00000188419_47 (sequence is synthesized)
cattattttcttaaacttcatcaaaatttaaacttaggaagtcttaactaggaaaaatatctacaattatgtttttccctttttttcttaaatgtgatgataagcaggaggttgatggaa

SEQ ID NO: 692053 - DNA, 120 bp, Artificial Sequence
  ENSG00000188419_48 (sequence is synthesized)
ttatgccaggtatgaaaagtatttactgcaggtaaactaaattaatgactttttcactcttctttagaagaagccaacaataaagatttatgtggcattggttgctacaagtcacgttaa

SEQ ID NO: 692054 - DNA, 120 bp, Artificial Sequence
  ENSG00000188419_49 (sequence is synthesized)
accaagaacccaccaattccggacacaccgatagcattctaatattttacatttgattgcaaggaggactaggcgagaattcaaatggattagtgcaaacccattaccactgcttggaaa

SEQ ID NO: 692055 - DNA, 120 bp, Artificial Sequence
  ENSG00000188419_50 (sequence is synthesized)
gtgcaaacccattaccactgcttggaaaatacgtcaaagtatttgggcaatataattctaatatatgtattctaatataaatatatagggtgtatttatatattatgtattctaatataa

SEQ ID NO: 692056 - DNA, 120 bp, Artificial Sequence
  ENSG00000188419_51 (sequence is synthesized)
ataggatagttattttttgattaccatgacttatttaaaaagtattctgaagtattattcaacttaaaggttttcatgatcatttcaacattaaatttaatacgttgggtattgcaaaac

SEQ ID NO: 692057 - DNA, 120 bp, Artificial Sequence
  ENSG00000188419_52 (sequence is synthesized)
aggctaaagactaaaatgtaaattgtagtaattattctatcataggctaggttcaaacatcatagactgtaaagaactatccagattgttttatcagagctttgttttcctgattcttcc

SEQ ID NO: 692058 - DNA, 120 bp, Artificial Sequence
  ENSG00000188419_53 (sequence is synthesized)
ttacaataagtgggctacttaatattttggacctaaaatatttttgctacacaaagattgtttttcattgaagtgattttttgtgattacacaatcgagttatggaagggaaatgaaaaa

SEQ ID NO: 692059 - DNA, 120 bp, Artificial Sequence
  ENSG00000188419_54 (sequence is synthesized)
ggactagtgtttattggatattatctttgtggcaactgctgtaacctgttgctttacatattaatttcatttattctgtgcagcagtcatgtgcatgagctataggtacatcttactgac

SEQ ID NO: 692060 - DNA, 120 bp, Artificial Sequence
  ENSG00000188419_55 (sequence is synthesized)
ctcaaaaacgtgtgctatttccagtgtatcatgttgtatttcagtcatcaggtaaacacatgtatgcacatcaagggaaccaaccgttccaccaagtgaattaagtatttcctttgtgaa

SEQ ID NO: 692061 - DNA, 120 bp, Artificial Sequence
  ENSG00000188419_56 (sequence is synthesized)
gactagcacctaagaaagtgcatttacttctttaatttactggaatactatatagtattgtaatgtagttatatctgtaatgagaaattaaagtgcctaactcccagtgttaggaagcta

SEQ ID NO: 692062 - DNA, 120 bp, Artificial Sequence
  ENSG00000188419_57 (sequence is synthesized)
tgggaagaatccaatattctttagttgttgagaccagtttatatgccatgggattttttaaattgatacataataattgtatatattcatgggatacaatatgttttggtacatataaac

SEQ ID NO: 692063 - DNA, 120 bp, Artificial Sequence
  ENSG00000188419_58 (sequence is synthesized)
attgtagaatgatcaaattaggctaattagcatatccatcaccttaaacctttattattttttgtgagaacattcagaatcatctcttttagctatttgaaatatgcaatgcattattgt

SEQ ID NO: 692064 - DNA, 120 bp, Artificial Sequence
  ENSG00000188419_59 (sequence is synthesized)
tagctatactcaccttactgtgtgatagagtaccagaatgtattcctcctacctaactgtaacattatacccattgaccaacctctcctcatcttcccctccctcctgttctccccagtc

SEQ ID NO: 692065 - DNA, 120 bp, Artificial Sequence
  ENSG00000188419_60 (sequence is synthesized)
tctggtaaccactatcaagttttttagatttcacatatgagtgagatcattcagtatttttctttctgttctcagcttatttcacttaatataatgttctccaggctcatccatgttgtc

SEQ ID NO: 692066 - DNA, 120 bp, Artificial Sequence
  ENSG00000188419_61 (sequence is synthesized)
acaaatgacaggatttaattttttttatggctgtgcagtattctattgtgtatatatgccacattttccttgttaattcatttgttgatgggcatttaagttgattccatattttcgcaa

SEQ ID NO: 692067 - DNA, 120 bp, Artificial Sequence
  ENSG00000188419_62 (sequence is synthesized)
ttgtgaatagtgctccaataaacatgggagtgcagatgtctcttcaacctactgatttcatttcctttggctatatacccagtagtgagggtgaagattgctggatcatatgatagattt

SEQ ID NO: 692068 - DNA, 120 bp, Artificial Sequence
  ENSG00000188419_63 (sequence is synthesized)
atttttaattttttgaggaacttctgtactgttttccataatggctgtactgatttgcattcctaccaacagtgtgtgagagttcttctttcttaccatgtaatagtttcatagtttatg

SEQ ID NO: 692069 - DNA, 120 bp, Artificial Sequence
  ENSG00000188419_64 (sequence is synthesized)
tggggaaataaaagtagctattgtttctagttttagatcttgaacagactataaaaaggtgcaatatattaattcacacttaaatcacacaaactcaagttattcttaggtaaaatatcg

SEQ ID NO: 692070 - DNA, 120 bp, Artificial Sequence
  ENSG00000188419_65 (sequence is synthesized)
ttgcttgttaattgcataaagtcatctagtttctttagtgagaagagattttatctttctaaaatattaacaatagctttatacattttctgtcctattttctgcattgtactgaacgtt

SEQ ID NO: 692071 - DNA, 120 bp, Artificial Sequence
  ENSG00000188419_66 (sequence is synthesized)
gtttccctttttctggtataatattaaagcaggatgaaaacttatttgttaccttcaaatgaaccaactctaatgtattcataccaaaaataaagatttttttgcaataggaatctaaaa

SEQ ID NO: 692072 - DNA, 120 bp, Artificial Sequence
  ENSG00000188419_67 (sequence is synthesized)
acccgcagtgcttatcgccatttgagtaggggttgatctggtcgatgctgattgctgaggtttgcctgaatccatcattgcagctgcatgttcaagaagtggccggagagttctgcatgt

SEQ ID NO: 692073 - DNA, 120 bp, Artificial Sequence
  ENSG00000188425_0 (sequence is synthesized)
gggaaacgcctgctgctcttgcccttgcccacgggcccccagccccagcccctctcctgtggcccaccacccctgctttggtgccatgcagctgccacccttcgacatgtggaaggacta

SEQ ID NO: 692074 - DNA, 120 bp, Artificial Sequence
  ENSG00000188425_1 (sequence is synthesized)
cttcaacctgagccaggtggtgtgggcgctgatcgcaagtcggggtcaaaggctggagacccaagagattgaggagccaagtcccgggcctccgctggggcaggatcaggggctgggggc

SEQ ID NO: 692075 - DNA, 120 bp, Artificial Sequence
  ENSG00000188425_2 (sequence is synthesized)
gccaggggccaacgggggcctggggaccctgtgcaacttctgcaagcacaacggggagtcccgccacgtctactcctcacaccagctgaagacaccggatggcgtggtggtgtgtcccat

SEQ ID NO: 692076 - DNA, 120 bp, Artificial Sequence
  ENSG00000188425_3 (sequence is synthesized)
cctgaggcactacgtgtgtcccgtgtgcggggccaccggtgaccaggcccatacgctcaagtactgcccgcttaacggtggccagcagtccctctaccgccgcagcgggcgcaactcggc

SEQ ID NO: 692077 - DNA, 120 bp, Artificial Sequence
  ENSG00000188425_4 (sequence is synthesized)
cggacgcagggtcaagcgctgagcatcgtgagatgctcaccacccgcacccctgaccctcctggtccatcccacccaagtccctaaactctctcttccagtcacccagccctttggaatt

SEQ ID NO: 692078 - DNA, 120 bp, Artificial Sequence
  ENSG00000188425_5 (sequence is synthesized)
tctggcccccagaactccaccctggctggatcctgaaacagtggaggctgctgggagccaggccagccccgcccccttggacctgtcagccctcggagctctggcctgtgggcgttggcc

SEQ ID NO: 692079 - DNA, 120 bp, Artificial Sequence
  ENSG00000188425_6 (sequence is synthesized)
gtccttggtgccgcgggaacccttcctgcacggccctgtagcgccctctgggccccggttcatggatcttttgtcctcgtggggcctgctggtgactggagccctgccccttcgacttct

SEQ ID NO: 692080 - DNA, 120 bp, Artificial Sequence
  ENSG00000188425_7 (sequence is synthesized)
ctgttccttgtggagttcttggatttttgaacctccaggattccacggtgctgtcccaagccagcccttaggagatactgaacaaggctggctgagaagtgcctactcaagaacttcaag

SEQ ID NO: 692081 - DNA, 120 bp, Artificial Sequence
  ENSG00000188425_8 (sequence is synthesized)
atgggatgtcgacttaagaccagccttctccatcttcagcctcctgcagaaccacggtgtcatcgtggaccacgcctgttcattccttccctgacctcagtacccatccgtcaggagcgg

SEQ ID NO: 692082 - DNA, 120 bp, Artificial Sequence
  ENSG00000188425_9 (sequence is synthesized)
agtaggactctggagagcaccgtatcactggagggcaccgtgtcttcgcaggctcacctgtggatggagagccgtggggtgagctgacacctttcaatgccccctggttgttcttcccct

SEQ ID NO: 692083 - DNA, 120 bp, Artificial Sequence
  ENSG00000188425_10 (sequence is synthesized)
tgttcagcccattgcacccggtacctgcccccatccccaaatcaccgatgggtcctttcccccagcgagaagcatatctctcgaccacctcccgtccgaccccccaaatcgtgatagttg

SEQ ID NO: 692084 - DNA, 120 bp, Artificial Sequence
  ENSG00000188425_11 (sequence is synthesized)
actaaaggacatttttttttcctcctgtgtttttcaacctccaacgttcaagtcaaggaaccgccgataagaagggggtttgagtacccggatgggaatggcaatggcctagcttttatt

SEQ ID NO: 692085 - DNA, 120 bp, Artificial Sequence
  ENSG00000188425_12 (sequence is synthesized)
ttaggggcaaagagaagaagggcccccgtcagattttaagttgttcagtttttggcacagggtcgggaccctgagtattgagctctggtgaataaaaaggttttctagtcgtctttgaaa

SEQ ID NO: 692086 - DNA, 120 bp, Artificial Sequence
  ENSG00000188428_0 (sequence is synthesized)
ggaactggtcgggatgagtggcggagggacagagacccctgtgggttgtgaggccgccccgggcggtggcagcaagaagagggactccctggggactgcgggctcagcgcacctcattat

SEQ ID NO: 692087 - DNA, 120 bp, Artificial Sequence
  ENSG00000188428_1 (sequence is synthesized)
caaggatcttggagaaattcattcaaggcttttggatcacagaccagttattcaaggtgaaactcgttattttgtaaaagaatttgaagaaaaacgtggtcttcgagaaatgcgagttct

SEQ ID NO: 692088 - DNA, 120 bp, Artificial Sequence
  ENSG00000188428_2 (sequence is synthesized)
tgaaaatttgaagaacatgatccatgaaacaaatgaacatactcttcccaaatgtagagacacaatgcgggacagcctcagccaggttctccagagattgcaagcagctaatgactcagt

SEQ ID NO: 692089 - DNA, 120 bp, Artificial Sequence
  ENSG00000188428_3 (sequence is synthesized)
ctgtagactccaacagagggaacaggaacgaaaaaagattcatagtgaccacttagtagctagtgagaaacagcatatgctccagtgggacaacttcatgaaggagcaacccaacaaaag

SEQ ID NO: 692090 - DNA, 120 bp, Artificial Sequence
  ENSG00000188428_4 (sequence is synthesized)
ggctgaagtggatgaagagcacagaaaagccatggaaaggcttaaagaacaatatgctgagatggagaaggacctagcgaaattttcaaccttttaagaacttgaaccacaacaatcaca

SEQ ID NO: 692091 - DNA, 120 bp, Artificial Sequence
  ENSG00000188428_5 (sequence is synthesized)
aactaatgagaagatgttcacctctctcctgaaaactattcccaccagaccgtttagcctctgcttcaagcttagcaatatattcagtggcactcttatatcagaagaaagaagtttcta

SEQ ID NO: 692092 - DNA, 120 bp, Artificial Sequence
  ENSG00000188428_6 (sequence is synthesized)
ctggcattctgattggatatttaaagaagggtgccacatttttccagctttaagtgcctatatatgattatttgaatgaagaggagtaggaaggaaaatggaatcaatatactctttgtt

SEQ ID NO: 692093 - DNA, 120 bp, Artificial Sequence
  ENSG00000188428_7 (sequence is synthesized)
agtcagaattgatcatcttttccattgattagctcagagaactgtaggtatagacttcttagaaagataatttcattcatttctatacagggttaacaatagtttattattgtggcttaa

SEQ ID NO: 692094 - DNA, 120 bp, Artificial Sequence
  ENSG00000188428_8 (sequence is synthesized)
tgggaaggtatagaagctacctgtcatagcctccttggctgttggaaggatgtataaagtgttactgcatgagtaatgtagacaaaaaaaaaagccagctgtccttggagcagagatcac

SEQ ID NO: 692095 - DNA, 120 bp, Artificial Sequence
  ENSG00000188428_9 (sequence is synthesized)
atttcagagaggtgagagtgaacacattgtctctgctgtggcaaagatggccacgctggtgtttgagctgcctcttgggaagcgttgcatattttacagtgcagcataatgccatgggct

SEQ ID NO: 692096 - DNA, 120 bp, Artificial Sequence
  ENSG00000188428_10 (sequence is synthesized)
tccgtggatgggaagacacatgttaagttttgtggccttccagcacttactattttcagctttttaaagcatgcttagaaggaaaagcttaccaaaaatatattttgacatttagttttt

SEQ ID NO: 692097 - DNA, 120 bp, Artificial Sequence
  ENSG00000188428_11 (sequence is synthesized)
ccatagtatttacctcatttttgtgtctgttttgctgtgggtaagctttataagataaataatgtctatacatgtttcgactgtttaatgagtaatcaacaaaatctgccagagagtccc

SEQ ID NO: 692098 - DNA, 120 bp, Artificial Sequence
  ENSG00000188428_12 (sequence is synthesized)
tctggaaccatataaagttcctggctttgaatgaaccagaagtgtttgcccacacagcaaatggtccatgttaaatgtaaatcctttttagtgttaatgtctgttctcataagcaggtat

SEQ ID NO: 692099 - DNA, 120 bp, Artificial Sequence
  ENSG00000188428_13 (sequence is synthesized)
atgtctgttctcataagcaggtatattatgatgaaacatgtaccagttctgtcatcactgtgatctttaaaaacctgcatttaacagtctaatttgaggctgggtgcagtggctcacacc

SEQ ID NO: 692100 - DNA, 120 bp, Artificial Sequence
  ENSG00000188428_14 (sequence is synthesized)
aaaaaaaatctaactgaagaactaagttgattttttatttgccataaaccaagcaaaagtaaatgcaataatttcgagatttatggtaaacaaatttgaggtatggataaatctttcaca

SEQ ID NO: 692101 - DNA, 120 bp, Artificial Sequence
  ENSG00000188428_15 (sequence is synthesized)
tattttttattgctctttagtaaagaaaggcacaagaaagaaaatatccagctctcttgtgttatctcagtgtggcgactgcagaaaattgacaatgcctgcctgtgtaaatgtatggct

SEQ ID NO: 692102 - DNA, 120 bp, Artificial Sequence
  ENSG00000188428_16 (sequence is synthesized)
tactgtcaaagcttcattcttggctgcatgttgaaaatgtgattaaagttaatagaggagatgaaataagtatttgagatttttttcaataacactgaacttctgccaactttctctatc

SEQ ID NO: 692103 - DNA, 120 bp, Artificial Sequence
  ENSG00000188428_17 (sequence is synthesized)
cgctactgtaggcttgacaggctcatcaatcatttgctggtacctggactaaaaagcgcacttgctgacaccaaggcatgttggaattttcttaattcagtggatggaaaaagaaatact

SEQ ID NO: 692104 - DNA, 120 bp, Artificial Sequence
  ENSG00000188428_18 (sequence is synthesized)
tccaaaaatatcccacacatgaaaagggaggggagccttaaatgaaaattccctttgtaccgtagacactttttggaatgcgattaattgccaacacatcattgaacgaatgctgtaacc

SEQ ID NO: 692105 - DNA, 120 bp, Artificial Sequence
  ENSG00000188428_19 (sequence is synthesized)
aagaaattaagattgtgtgtgtgaagggaatatattcttaactgtggctacccaacttgtatagcaaagatttctgatagtttgtgttcatctcatgtgaataataaatactttacccta

SEQ ID NO: 692106 - DNA, 120 bp, Artificial Sequence
  ENSG00000188428_20 (sequence is synthesized)
gagagataggaggaccaacaagaacagtgcctggcacaaagcacatgctcagtaaacatttgtcaaatgaataattgagcgagcaaacatgcccaagatcattcacacaactgagtgcca

SEQ ID NO: 692107 - DNA, 120 bp, Artificial Sequence
  ENSG00000188428_21 (sequence is synthesized)
aaagtttgactgacattttagaagaatgttcgaccaagaattttcaattggaaagaagttgacgtgagtctgaagttgaacagtcttggtgctggggagcttcagatcagcctagcaaaa

SEQ ID NO: 692108 - DNA, 120 bp, Artificial Sequence
  ENSG00000188428_22 (sequence is synthesized)
agactctcagaagaccgtttgtcttgtgaaagggatttttagctacctacgtaaaacttcctctggaaagatctgatttgcactctgtgatagaaaaggcgtaggtttgggtgtcagaaa

SEQ ID NO: 692109 - DNA, 120 bp, Artificial Sequence
  ENSG00000188452_0 (sequence is synthesized)
agcgctggacgcggctagagctggggctgccgcgccctccacctccttctccaaaggcctccccggacccctggctcgggcccagcctgcgactccgccatgccctggaggaggcgcagg

SEQ ID NO: 692110 - DNA, 120 bp, Artificial Sequence
  ENSG00000188452_1 (sequence is synthesized)
aaccgggtgagtgccctggagggcggccgggaggaagaggcgcccccggaggctgccgctgtgcctccggcgctgttaacgtccccgcagcagacggaggcggcggccgagcggattctg

SEQ ID NO: 692111 - DNA, 120 bp, Artificial Sequence
  ENSG00000188452_2 (sequence is synthesized)
ctccggggcatcttcgagatcgggagggacagttgtgacgtggtgctgagcgagcgagcactgcggtggcggcccattcagcccgagcgcccggcgggtgattctaagtatgacttgcta

SEQ ID NO: 692112 - DNA, 120 bp, Artificial Sequence
  ENSG00000188452_3 (sequence is synthesized)
tgtaaagaagaatttattgaactcaaagacatattctctgtgaaactgaaacggcgttgttctgttaaacagcagagaagtggtactttattaggtatcacactcttcatctgcttgaaa

SEQ ID NO: 692113 - DNA, 120 bp, Artificial Sequence
  ENSG00000188452_4 (sequence is synthesized)
aaggaacaaaataaactaaagaattctacacttgatcttattaatttaagtgaagaccactgtgacatatggtttagacagttcaagaaaatattggcaggctttccaaacagaccgaag

SEQ ID NO: 692114 - DNA, 120 bp, Artificial Sequence
  ENSG00000188452_5 (sequence is synthesized)
tcattaaaaatactccttaacccccaaagtcacaaaaaagaagctacccaggtttattatgagaaggttgaacctctgttgaagcttgcaggaataaaaactgatgtaacaataatggaa

SEQ ID NO: 692115 - DNA, 120 bp, Artificial Sequence
  ENSG00000188452_6 (sequence is synthesized)
tatgaagggcacgctctgtcactgcttaaggaatgtgaactccagggatttgatggtgttgtctgtgttggtggagatggatctgctagcgaagtagcccatgctttgcttctgagagct

SEQ ID NO: 692116 - DNA, 120 bp, Artificial Sequence
  ENSG00000188452_7 (sequence is synthesized)
cagaagaatgctgggatggaaacagaccgaatcctgactcctgtcagagcacagcttccacttggcttaataccagcaggatctaccaatgtattggcacattctcttcatggagttcct

SEQ ID NO: 692117 - DNA, 120 bp, Artificial Sequence
  ENSG00000188452_8 (sequence is synthesized)
catgtgataactgcaacattgcacattataatggggcatgtacagctggtcgacgtctgcaccttcagcaccgctggcaagcttcttcgctttgggttctcagccatgtttggctttggt

SEQ ID NO: 692118 - DNA, 120 bp, Artificial Sequence
  ENSG00000188452_9 (sequence is synthesized)
ggaagaactttggctctggcagaaaaatatcgatggatgtcccctaaccaacggagagattttgctgttgttaaggcactggcaaaacttaaggcagaagactgtgaaatatcattttta

SEQ ID NO: 692119 - DNA, 120 bp, Artificial Sequence
  ENSG00000188452_10 (sequence is synthesized)
ccatttaacagctctgatgatgtgcaagaaaggagggcacagggatctcccaaatctgactgtaatgatcaatggcaaatgatccagggtcagttcttgaatgtcagcattatggcaatt

SEQ ID NO: 692120 - DNA, 120 bp, Artificial Sequence
  ENSG00000188452_11 (sequence is synthesized)
ccttgcctgtgttcagtggcacctagaggcttggcacctaataccagattaaataatggaagtatggctcttataattgcccgaaacacttctcggccagaatttataaaacacctgaaa

SEQ ID NO: 692121 - DNA, 120 bp, Artificial Sequence
  ENSG00000188452_12 (sequence is synthesized)
agatatgccagtgtaaaaaatcagttcaattttccatttgttgagacttacactgttgaggaagtaaaagttcatccaaggaataatactggtggatataatccagaggaggaggaggat

SEQ ID NO: 692122 - DNA, 120 bp, Artificial Sequence
  ENSG00000188452_13 (sequence is synthesized)
cttatcagtctttatggaggaagcatggaagaaatgattccaaagtaacatgtaattgtttctaaaagaaatgtacaaactagaattttaatataaagaaatgtggccatgctttaaacc

SEQ ID NO: 692123 - DNA, 90 bp, Artificial Sequence
  ENSG00000188452_14 (sequence is synthesized)
tagaattttaatataaagaaatgtggccatgctttaaacctgtggtccccaccctttttgtggatgggggaatggtttcaggatgaactg

SEQ ID NO: 692124 - DNA, 120 bp, Artificial Sequence
  ENSG00000188452_15 (sequence is synthesized)
catggcactctagatccctcacataccagttcaccatatggttcgcacttctatgagaatctaatgctgctgctgatctgacagggggaggaactcagtaatgctccattgctctaacct

SEQ ID NO: 692125 - DNA, 120 bp, Artificial Sequence
  ENSG00000188452_16 (sequence is synthesized)
cctgctgtgtggccaaacggatatcctaatagaaattgatgttactaacaattagcctctagggctttaaaagtcaagatgaaatatcaattcaaattctgtttttagatatcaattcaa

SEQ ID NO: 692126 - DNA, 120 bp, Artificial Sequence
  ENSG00000188452_17 (sequence is synthesized)
attcttttttttacaatgtgtttattggacacacaaaaaaactttgcaaccatcataatacatcaatatttaacctagataattctgaaataatttggattctttcatttttcaggattt

SEQ ID NO: 692127 - DNA, 120 bp, Artificial Sequence
  ENSG00000188452_18 (sequence is synthesized)
gagctcatcaattatgttaaatttcctatattctgttacaaatataatacagatttcataagtctgccttgattcactgctccctaatccagagcagttaaatttcaaaatcacatagtt

SEQ ID NO: 692128 - DNA, 120 bp, Artificial Sequence
  ENSG00000188452_19 (sequence is synthesized)
atatagcctacctgccaaaaaagaataacccatccctgtcttcttaaagtggtagggttttaaaattcatgatacaagtaacaaagtaagttgataacaaatactattttgaactgggca

SEQ ID NO: 692129 - DNA, 120 bp, Artificial Sequence
  ENSG00000188452_20 (sequence is synthesized)
aaatctagcccaatatgtaattgtgttccccttgtatctgagaggcctgtgttggacaaccatagtactctgctttcactgtgctcagataacctgaaatatatagttgtttctgagtag

SEQ ID NO: 692130 - DNA, 120 bp, Artificial Sequence
  ENSG00000188452_21 (sequence is synthesized)
ttctgagtaggaaagaaccaaatgtaaatttccttagagaccatcctggagaagacagttctaaatcggggcttgatttttcatctatgatcctagatgttctcctgaaagaatgactag

SEQ ID NO: 692131 - DNA, 120 bp, Artificial Sequence
  ENSG00000188452_22 (sequence is synthesized)
cctttttataacgatacaaagttttttaaaaatacataaatgtcataaagtttattcctgtgtatacacactctgggttcaggaggttttgtgcttacatttcactactcaaatgccttc

SEQ ID NO: 692132 - DNA, 120 bp, Artificial Sequence
  ENSG00000188452_23 (sequence is synthesized)
gcaaatctcagaacattcctcaccatcactgcaggcctgtgaacagataactttcatcaattaggatggctggctagtggcagggacttcatataaagaaatctttcccagaattgtttt

SEQ ID NO: 692133 - DNA, 120 bp, Artificial Sequence
  ENSG00000188452_24 (sequence is synthesized)
tccacattgccttctaatttgatcactccctataacagatgttcaaaattcggccacagctctcttatgaaggcagagtcagataaaatgatattctgcaattatctagatcataagcat

SEQ ID NO: 692134 - DNA, 120 bp, Artificial Sequence
  ENSG00000188452_25 (sequence is synthesized)
gcacagcctggacgcgtgcgcaggcgtcaggcgcatagacctgctagcccctcagctagcggccccgcccgcgcttagcatcactaactgggctatataacctgagcgcccgcgcggcca

SEQ ID NO: 692135 - DNA, 120 bp, Artificial Sequence
  ENSG00000188452_26 (sequence is synthesized)
cgacacgaggaattcgcccacgcaggaggcgcggcgtccggaggccccagggttatgagactatcactgctcaggacctactaacaacaaagaaagtgtttaccaaatgctgctgcctca

SEQ ID NO: 692136 - DNA, 120 bp, Artificial Sequence
  ENSG00000188452_27 (sequence is synthesized)
attataacgctgtggtcagtaaagatacttgatattatcttaatcttttaaaatttgttaagacttgttttgtggcctaacatgtgatctctcctcaagaatgttccatgtgcatttgag

SEQ ID NO: 692137 - DNA, 120 bp, Artificial Sequence
  ENSG00000188452_28 (sequence is synthesized)
gacaaacaattgatcagacttaggatctttggttatttttctaacatagtagtaaagaatatagaatcacagactcttacaggtcctagtaagcaaacaactactcactcagcctttttc

SEQ ID NO: 692138 - DNA, 120 bp, Artificial Sequence
  ENSG00000188452_29 (sequence is synthesized)
tctttttccttccttctttcctcccttccttccccctgtctctccctccctccttccgttctctttttcccttcccttcccctttctttcctttcctttgtttttttccctttctttcct

SEQ ID NO: 692139 - DNA, 120 bp, Artificial Sequence
  ENSG00000188452_30 (sequence is synthesized)
tttccctttcccttttcttttgagtgcctactatatgccaggcactttgaatacaacaatgcaccaaaaaatgaacaaaacacacagttttgtccctcgtgataattttggtctagtgtg

SEQ ID NO: 692140 - DNA, 120 bp, Artificial Sequence
  ENSG00000188452_31 (sequence is synthesized)
taatacaaatattaaagccatattaaagaagggttatagtctttaaagaaatagtacattattattccttataatactagtttacctttaaatgaatcaacacattatgttggcagcaac

SEQ ID NO: 692141 - DNA, 120 bp, Artificial Sequence
  ENSG00000188452_32 (sequence is synthesized)
aaaattgtacgtttttacttactatctaattgaagaaagtatttaacatatataatgatgagttctctaattttctcatatttaatagatttgtgtgtgtctgtgtgtctgtgcgcgcgt

SEQ ID NO: 692142 - DNA, 120 bp, Artificial Sequence
  ENSG00000188452_33 (sequence is synthesized)
tatctgttttatgtctttgttttgttttctttcttttaggagggcacagggatctcccaaatctggtgagtcgaaaagtatctccttgagaactgtgccaggttctgttgacattttgtt

SEQ ID NO: 692143 - DNA, 120 bp, Artificial Sequence
  ENSG00000188452_34 (sequence is synthesized)
acgctctgtcactgcttaaggaatgtgaactccagggatttgatggtgggcatcggaaaccattgttcgcaatacattggagtgtacagagattgttcactggcatgcaaacgttagaac

SEQ ID NO: 692144 - DNA, 61 bp, Artificial Sequence
  ENSG00000188452_35 (sequence is synthesized)
tgtattgctttgtctcccaggcccaagtgcagaggcacgatcttggcttactgcaatctct

SEQ ID NO: 692145 - DNA, 120 bp, Artificial Sequence
  ENSG00000188467_0 (sequence is synthesized)
aatcctcctcttctcccttcctgaagctgcacgctgcagtaagagcacagcagaaatgcagacaaaagggggccaaacatgggcgagaagggctctgttgctcggcatcctgtgggccac

SEQ ID NO: 692146 - DNA, 120 bp, Artificial Sequence
  ENSG00000188467_1 (sequence is synthesized)
tgcacatctgcctctctcagggacctccctgccccaacgtctcccaagggccacaggaaatagcacccaatgtgttatttctccatcatcggagtttcccgaagggtttttcacgagaca

SEQ ID NO: 692147 - DNA, 120 bp, Artificial Sequence
  ENSG00000188467_2 (sequence is synthesized)
ggagcgcagagatggaggcatcataatctatttcctaattatcgtttacatgttcatggccatatctattgtctgtgatgaatacttcctaccctccctggaaatcatcagtgaatccct

SEQ ID NO: 692148 - DNA, 120 bp, Artificial Sequence
  ENSG00000188467_3 (sequence is synthesized)
tggattgtctcaggatgttgcaggcacaactttcatggcagcgggcagttcagctcctgaattagttactgctttcctaggtgtatttatcacaaagggagatattggcattagcaccat

SEQ ID NO: 692149 - DNA, 120 bp, Artificial Sequence
  ENSG00000188467_4 (sequence is synthesized)
ccttggatctgcaatttataatctccttggcatctgtgctgcctgtggtttgctatctaatacggtctcaacactatcatgttggcccctattcagagactgtgcagcgtacacaattag

SEQ ID NO: 692150 - DNA, 120 bp, Artificial Sequence
  ENSG00000188467_5 (sequence is synthesized)
tgcagcagcagttcttggtataatatatgacaaccaagtttactggtatgaaggggctttactgcttttgatatatggattgtatgttttggtgctgtgttttgacattaaaattaacca

SEQ ID NO: 692151 - DNA, 120 bp, Artificial Sequence
  ENSG00000188467_6 (sequence is synthesized)
atatattataaagaaatgcagtccttgctgcgcctgtcttgccaaagctatggagagaagtgaacaacagccactgatgggctgggaagatgaaggtcaaccattcattcgtcggcaatc

SEQ ID NO: 692152 - DNA, 120 bp, Artificial Sequence
  ENSG00000188467_7 (sequence is synthesized)
tctgaagatccaccaagtgttttcaacatgcctgaagcagacttaaaaagaattttttgggtattatcccttcctattattacattactttttctaaccacaccagattgtagaaaaaag

SEQ ID NO: 692153 - DNA, 120 bp, Artificial Sequence
  ENSG00000188467_8 (sequence is synthesized)
ttttggaaaaactactttgtgataacctttttcatgtctgcaatatggatatccgcatttacatatatcctggtttggatggtcacaataactggggaaacactagaaattcccgataca

SEQ ID NO: 692154 - DNA, 120 bp, Artificial Sequence
  ENSG00000188467_9 (sequence is synthesized)
gtaatgggccttactttattagcagcaggaacaagcataccagacacaattgcaagtgtgttggttgcaagaaaagggaaaggagatatggctatgtctaacatcgtgggatccaatgtg

SEQ ID NO: 692155 - DNA, 120 bp, Artificial Sequence
  ENSG00000188467_10 (sequence is synthesized)
tttgatatgttgtgccttggtattccatggtttattaaaactgcatttataaatggatcagctcctgcagaagtaaacagcagaggactaacttacataaccatctctctcaacatttca

SEQ ID NO: 692156 - DNA, 120 bp, Artificial Sequence
  ENSG00000188467_11 (sequence is synthesized)
attatttttctttttttagcagttcacttcaatggctggaaactagacagaaagttgggaatagtctgcctattatcatacttggggcttgctacattatcagttctatatgaacttgga

SEQ ID NO: 692157 - DNA, 120 bp, Artificial Sequence
  ENSG00000188467_12 (sequence is synthesized)
attattggaaataataaaataaggggctgtggaggttgatattattaatagtgttatgcagaaaatatgaatggcagggaggggcagagagaaaaatccatttcttcatttaaatcaaat

SEQ ID NO: 692158 - DNA, 120 bp, Artificial Sequence
  ENSG00000188467_13 (sequence is synthesized)
tttaaaaatcttgaaccttagaatctaaaacttacagtaatttaaaaccaaccaaaatcacatcctaatttttctgagccctttcttttcatgaaaaattacatattataaaacagaagt

SEQ ID NO: 692159 - DNA, 120 bp, Artificial Sequence
  ENSG00000188467_14 (sequence is synthesized)
ttggggggaaaaaatctatgttttaccatacaataagttgacaaaaactggagaaactagaacaaacaaatccaactatgtagtactgaaaacaacaagaaaatggcttatttcattaaa

SEQ ID NO: 692160 - DNA, 120 bp, Artificial Sequence
  ENSG00000188467_15 (sequence is synthesized)
gccctgtaaccttctgggagagtgtgccacacagatatgactgtctttgaaatagctcagcagctgtcctgtacttctcaactggttgcagagcaccagcttcttgttgtggggtcccgt

SEQ ID NO: 692161 - DNA, 120 bp, Artificial Sequence
  ENSG00000188467_16 (sequence is synthesized)
gtcttaaggaactggtcgagtgtggtttctcttggtagttaatgtgaatcagagtttcttcaagttagaacccggcagttattatttttctgcctatttccagaaatctctagtttgtct

SEQ ID NO: 692162 - DNA, 120 bp, Artificial Sequence
  ENSG00000188467_17 (sequence is synthesized)
actgcctggatgtttgttataagaactgttccaagatttcacttgtatgtactttgtgtgcgctcctaatacaatgaaactcctaatatttgccattttatgcttcaaaaaacttttttt

SEQ ID NO: 692163 - DNA, 120 bp, Artificial Sequence
  ENSG00000188467_18 (sequence is synthesized)
tatttttactctaagctcgctataactttgattataaaaagtgataaacaaatgcaattaaggaccaccctccccatcttcctttcccagcatcctaccattaaggaaattaattgatat

SEQ ID NO: 692164 - DNA, 120 bp, Artificial Sequence
  ENSG00000188467_19 (sequence is synthesized)
ttaagaaccaataaacagatagatgaataagtcctgtatcctaagtgaccttagacatcagatgactgtaaaatcagttattaaaaattaagagctccatttattggtttctgaaaataa

SEQ ID NO: 692165 - DNA, 120 bp, Artificial Sequence
  ENSG00000188467_20 (sequence is synthesized)
gatcagccggtccaagcctctgagctctgttccttcagcagtatatgttgcccagaattctgagcatagaccttcactggtgcactggtccctaaacaccaggatagcagttatgttctg

SEQ ID NO: 692166 - DNA, 120 bp, Artificial Sequence
  ENSG00000188467_21 (sequence is synthesized)
tgccatatgagcaaaagtgtgtttctagacttggtctcatgtttggttatttatttggctgagcatgcccacattacagcaaaaagcaatgtcaaaattaaggattgggtttcctattgc

SEQ ID NO: 692167 - DNA, 120 bp, Artificial Sequence
  ENSG00000188467_22 (sequence is synthesized)
atattcacaagactgcacagtaacagcagcgtcctcaacctccacccaccgcccccgacacacacacattgctgccatttctttataaagggaaagagcatgaatgtaaactctcccttt

SEQ ID NO: 692168 - DNA, 120 bp, Artificial Sequence
  ENSG00000188467_23 (sequence is synthesized)
tcccatcaccccacccccaacccctgctgaaatgcaaagcgaattatttcctcccttgttcactgcagtataccagaatctgtaggctctaaaacagtaactggtgatagcagaggcact

SEQ ID NO: 692169 - DNA, 120 bp, Artificial Sequence
  ENSG00000188467_24 (sequence is synthesized)
tgatattttctttaataaagattaaattatttaacagttttacttagattaatgaaatacaagaaaaatagaagagaaagataaaatcacctgtatttccatctacacagttaccatttg

SEQ ID NO: 692170 - DNA, 120 bp, Artificial Sequence
  ENSG00000188467_25 (sequence is synthesized)
ttccatctacacagttaccatttggtatatttcctttaaatcttttgaatcttgctttatatacagtttgggatctttcctttttttcacacaatattttatagtgcacattttccaata

SEQ ID NO: 692171 - DNA, 120 bp, Artificial Sequence
  ENSG00000188467_26 (sequence is synthesized)
ttattaaacattcttcaaaaacattatttttaatgatatcatgatagtccatgattctataaatgatttgagcgtctgacactggtttttacacatagtaggcacccagtagaaatttat

SEQ ID NO: 692172 - DNA, 120 bp, Artificial Sequence
  ENSG00000188467_27 (sequence is synthesized)
cataaaatttaaaactattactctcattggacatttggcctgttttaagttttttgtgttaatgtcatgcccataattgtataaaatctttgcacacctctctgatcatttcctgattaa

SEQ ID NO: 692173 - DNA, 120 bp, Artificial Sequence
  ENSG00000188467_28 (sequence is synthesized)
gaggcagagatgtggatattttaagtcttatgatatatatttgcaaaaggcatcccacaaaaggtgtgcctacttatacctccttaagcatccattccagaaaaccatgaaaaatatgtg

SEQ ID NO: 692174 - DNA, 120 bp, Artificial Sequence
  ENSG00000188467_29 (sequence is synthesized)
aaatatccttggttgctttaacctcccattattttataaaatttgtgtttatcttattatccatgagggtgaatattttatatgtttattttattttatggttttccttttgtgtttttt

SEQ ID NO: 692175 - DNA, 120 bp, Artificial Sequence
  ENSG00000188467_30 (sequence is synthesized)
tgcccatattatatcaggggtattctgtctctttcttattgattttcaagactttaaaaatatataaggatattaaccctttttctagtattacttcatatcatatgctttttcatggtt

SEQ ID NO: 692176 - DNA, 120 bp, Artificial Sequence
  ENSG00000188467_31 (sequence is synthesized)
tgtttgattttgcattttgtgtttatcacattgaagtttgaagtttaaatattttaagtaaatttgtaaatctttttctttatggttctccttttggttttataactagaaaggcatttt

SEQ ID NO: 692177 - DNA, 120 bp, Artificial Sequence
  ENSG00000188467_32 (sequence is synthesized)
tatccataggtcacaacaatcatcatattttattctacatgcaggattttttaaaatttatttattttttccactaagaatctgtcttgctataggatgtaatgttcttttttccaacag

SEQ ID NO: 692178 - DNA, 120 bp, Artificial Sequence
  ENSG00000188467_33 (sequence is synthesized)
ttgatcaattttcatatactaagttcttatatagatgtagatctgtctctatgctcccaactctgttctaataacctttttgtacattcttatgccaatactgcacttttaattagaaaa

SEQ ID NO: 692179 - DNA, 120 bp, Artificial Sequence
  ENSG00000188467_34 (sequence is synthesized)
atgtaaaaaactaaaaattgaaaaattaaaaatgttaatcatataaaacacagaaatttaaattgtaaggaataatttccatttctaatgacttaactgaacaatgacatgactgaaaaa

SEQ ID NO: 692180 - DNA, 120 bp, Artificial Sequence
  ENSG00000188467_35 (sequence is synthesized)
ataaatctatcaagaattttattataaaaattatcttaggagaagtgaaaaataaataaaaaacctttctagccctgtagaagacactactgcattaaaatttagattatgacttcaaaa

SEQ ID NO: 692181 - DNA, 120 bp, Artificial Sequence
  ENSG00000188467_36 (sequence is synthesized)
ggtaatcactaaatcttgcccattattaagtctattcgcaaaggaaaaactttaaaatttcatttcaattcagcaagtattgtgtgctttttatgtaaaaaagactgtgaagactcagaa

SEQ ID NO: 692182 - DNA, 120 bp, Artificial Sequence
  ENSG00000188467_37 (sequence is synthesized)
atgataaagaccaagtccctacctttaaggaacttccaatatcacaggaaatacaaaatagctaaagtatgaacgttaagtaccataaaaagagaaaaataaagtgtgactgtggttcac

SEQ ID NO: 692183 - DNA, 120 bp, Artificial Sequence
  ENSG00000188483_0 (sequence is synthesized)
actcattgctttggcgccgtctggggagcgcgagcccgcgggtggcgcgcggcgcatggtggcggctcctttcggagcgcagccgaacctctgacccggactccgttacccctgcccggc

SEQ ID NO: 692184 - DNA, 120 bp, Artificial Sequence
  ENSG00000188483_1 (sequence is synthesized)
gcgccccggcggccggctggaggcagaaacagcagaagcgttaacagcagcagcggcggcggctgctccgccgccgtctccgcgggagcatggagtgcgccctggacgcccagagcctga

SEQ ID NO: 692185 - DNA, 120 bp, Artificial Sequence
  ENSG00000188483_2 (sequence is synthesized)
tcagcatctccctgcgcaagatccacagctcccgaacccagcgcggcggcatcaagctgcacaagaacctcctggtgtcctacgtgctccgcaacgcgcgccagctctacctgagcgagc

SEQ ID NO: 692186 - DNA, 120 bp, Artificial Sequence
  ENSG00000188483_3 (sequence is synthesized)
gctacgccgagctctaccggcgccagcagcagcagcaacagcagcagccgccccaccaccagcaccagcacctagcgtacgcggcgccgggcatgccggccagcgcggccgacttcggcc

SEQ ID NO: 692187 - DNA, 120 bp, Artificial Sequence
  ENSG00000188483_4 (sequence is synthesized)
cgctccaacttggcggcggcggggacgcggaggcgcgcgagccggccgcccggcaccagctgcaccagctccaccagctccaccagctgcacctccagcagcagctgcaccagcaccagc

SEQ ID NO: 692188 - DNA, 80 bp, Artificial Sequence
  ENSG00000188483_5 (sequence is synthesized)
gctctcggagctgcccgggtgcgccgcgctccagccgccgcacggcgcgccccaccgcgggcagcccttggagcctctgc

SEQ ID NO: 692189 - DNA, 120 bp, Artificial Sequence
  ENSG00000188483_6 (sequence is synthesized)
aggggccgcccctccggccgccgccgcttctccgcccgcctccccggcccccgcctcctcccccggcttctaccggggcgcataccctaccccttcggacttcggcttgcactgcagcag

SEQ ID NO: 692190 - DNA, 120 bp, Artificial Sequence
  ENSG00000188483_7 (sequence is synthesized)
gcagccagaccaccgtgctggacctagacactcacgtggtgaccacggtggagaacggctacttgcaccaggactgctgcgcctccgcccactgcccctgctgtggccagggcgctccgg

SEQ ID NO: 692191 - DNA, 120 bp, Artificial Sequence
  ENSG00000188483_8 (sequence is synthesized)
gaccgggcctggcgtccgccgccggctgcaagcgcaagtattaccctggccaggaggaggaggaagacgacgaggaggatgcgggcgggctgggggccgagccccccgggggcgccccgt

SEQ ID NO: 692192 - DNA, 120 bp, Artificial Sequence
  ENSG00000188483_9 (sequence is synthesized)
tcgccccctgcaagcgcgcccgcttcgaggacttctgcccggactcgtccccggacgcgtccaacatctcaaacttgatctccatctttggctccggcttctcggggctggtgagccgac

SEQ ID NO: 692193 - DNA, 120 bp, Artificial Sequence
  ENSG00000188483_10 (sequence is synthesized)
cggcgcctggactcgagccattgtcgccttctagggacccccgagggcacagggacccggggccccgcggggctggggccagacaaagactcggcaaaggggcgagaggagggaacgagc

SEQ ID NO: 692194 - DNA, 120 bp, Artificial Sequence
  ENSG00000188483_11 (sequence is synthesized)
gggcgccgggccactcggggctgagctgggggcgagcgggggcaggcggctgatgttttataaattgtaaaataaaaaaaaaagaaatctaaaatcttggactttatttttgcagagaga

SEQ ID NO: 692195 - DNA, 120 bp, Artificial Sequence
  ENSG00000188483_12 (sequence is synthesized)
aaaagcgcctatttaagtatgctttgtgtttctcctactcctttttttctttttattgtagtgattgcagtggtgtttagcgaggagcctaccacgtgagggagggctgctgcccggagg

SEQ ID NO: 692196 - DNA, 120 bp, Artificial Sequence
  ENSG00000188483_13 (sequence is synthesized)
gaggaggtgccgggcagccgggggcgaggcagggcgccctggccgccggggcgcgccgggggcgcagctcaggagggcgccggacctgggaagccgattccaatcagttgtcagacccgg

SEQ ID NO: 692197 - DNA, 120 bp, Artificial Sequence
  ENSG00000188483_14 (sequence is synthesized)
cccgacgttccgctctcccgagtccctctgtggggtgaggaatgggtcttgtgaaattctgagcaaaaacaaaggcaaactctatctccgaaagggacgtttgggtcacatttcctctct

SEQ ID NO: 692198 - DNA, 120 bp, Artificial Sequence
  ENSG00000188483_15 (sequence is synthesized)
gggggcggactccaaagttctcaaaatgagaaggcagaaatgaaaacacttcaactttttttttcttttcttcccggggcgggtgtcttgaacccctcttctccccgcccctctggctcc

SEQ ID NO: 692199 - DNA, 120 bp, Artificial Sequence
  ENSG00000188483_16 (sequence is synthesized)
gttctcctcccctcctccacccgtctcccggactcgggggtggcgcctgacaccccgacactctcggacactgggtaaggggtggggggcgggcacggcggactacatttcccatcatgc

SEQ ID NO: 692200 - DNA, 120 bp, Artificial Sequence
  ENSG00000188483_17 (sequence is synthesized)
ctagcactgcggtcctcactaaacaaaaaaggaagtcaattccttcacctggatccccggcggccccgggggagggaggggccgggaccgccgactgcgttggagactttgcactaagtt

SEQ ID NO: 692201 - DNA, 120 bp, Artificial Sequence
  ENSG00000188483_18 (sequence is synthesized)
cctggtcagctgtggtgtttgtgtgtgtgcttctaagttgcactgccttggttcagccttcggttgcatttcatgaaaccagcattgttcgagcctgtgagaaccccgtcctgtgtcttc

SEQ ID NO: 692202 - DNA, 120 bp, Artificial Sequence
  ENSG00000188483_19 (sequence is synthesized)
agctcgatagatttgtttaatttaaaagccttttgttgtaaaaaggtggggttcgtctgcagcccctctggttctctgccatcagcaccgtgtggactccaaaacgagttgccaatcctt

SEQ ID NO: 692203 - DNA, 120 bp, Artificial Sequence
  ENSG00000188483_20 (sequence is synthesized)
cctttctcggcccttttccctcattaccctgtatttttgtgcatactgaattgtatatcaccgggtaaaactgttcagattgtttaaatttataatcttaataaaaagtcgattacagaa

SEQ ID NO: 692204 - DNA, 120 bp, Artificial Sequence
  ENSG00000188486_0 (sequence is synthesized)
acagcagttacactgcggcgggcgtctgttctagtgtttgagccgtcgtgcttcaccggtctacctcgctagcatgtcgggccgcggcaagactggcggcaaggcccgcgccaaggccaa

SEQ ID NO: 692205 - DNA, 120 bp, Artificial Sequence
  ENSG00000188486_1 (sequence is synthesized)
gtcgcgctcgtcgcgcgccggcctccagttcccagtgggccgtgtacaccggctgctgcggaagggccactacgccgagcgcgttggcgccggcgcgccagtgtacctggcggcagtgct

SEQ ID NO: 692206 - DNA, 120 bp, Artificial Sequence
  ENSG00000188486_2 (sequence is synthesized)
ggagtacctcaccgctgagatcctggagctggcgggcaatgcggcccgcgacaacaagaagacgcgaatcatcccccgccacctgcagctggccatccgcaacgacgaggagctcaacaa

SEQ ID NO: 692207 - DNA, 120 bp, Artificial Sequence
  ENSG00000188486_3 (sequence is synthesized)
gctgctgggcggcgtgacgatcgcccagggaggcgtcctgcccaacatccaggccgtgctgctgcccaagaagaccagcgccaccgtggggccgaaggcgccctcgggcggcaagaaggc

SEQ ID NO: 692208 - DNA, 120 bp, Artificial Sequence
  ENSG00000188486_4 (sequence is synthesized)
cacccaggcctcccaggagtactaagagggcccgcgccgcggccggccgccaggcctccccatgccaccacaaaggcccttttaagggccaccaccgccctcatggaaagagctgagccg

SEQ ID NO: 692209 - DNA, 120 bp, Artificial Sequence
  ENSG00000188486_5 (sequence is synthesized)
tcatggaaagagctgagccgcttcagactgcggggcaagcgggccgcggctcccttcccctcccctcccctcgcccgccttcgccgcccggcctcgagtccccgcccgcccccgctcccg

SEQ ID NO: 692210 - DNA, 120 bp, Artificial Sequence
  ENSG00000188486_6 (sequence is synthesized)
ccggatgcggcttgggcgctcttcggggacctccgtggcgcggaagacccgagcctgccggggggaggccggcggcgccgcacctgcccgcctcggcgttcgtgactcagccgccccatc

SEQ ID NO: 692211 - DNA, 120 bp, Artificial Sequence
  ENSG00000188486_7 (sequence is synthesized)
ccgagtcgctaaggggctgcggggaggccgcagcaccttctggaagacttggccttccgctctgacgcagggccgaggtgggcagtccaggccgagaggccggcggccctgaaggtgagt

SEQ ID NO: 692212 - DNA, 120 bp, Artificial Sequence
  ENSG00000188486_8 (sequence is synthesized)
gaggccctcggcagctgcagccggggtgtctggtacccccccggcgtggtgcttagcccaggactttcagacgcggccgctggccgggaggctttggtgggagagacgcgatcgccgatt

SEQ ID NO: 692213 - DNA, 120 bp, Artificial Sequence
  ENSG00000188486_9 (sequence is synthesized)
tcggtctggcgccccttctgcggccgggacccaggcctttcacatcagctctccctccatcttcattcataggtctgcgctggggccgggacgaagcacttggtaacaggcacatcttcc

SEQ ID NO: 692214 - DNA, 120 bp, Artificial Sequence
  ENSG00000188486_10 (sequence is synthesized)
tcccgagtgactgcctcctaggaggacatttaggggagggcagaggcctgcagtttggcttcacggctggctatgtggacagcaagagtcgttttcgcggaagccgactggcagccaggc

SEQ ID NO: 692215 - DNA, 120 bp, Artificial Sequence
  ENSG00000188486_11 (sequence is synthesized)
ctgtcgggccccccgacgccgccccatttcccttccagcaaactcaactcggcaatccaagcacctagataccagcacaagtcggttaatccctgtctggactgagcctccgttggcttc

SEQ ID NO: 692216 - DNA, 120 bp, Artificial Sequence
  ENSG00000188486_12 (sequence is synthesized)
tgaactggaattctgcagctaacccttccacgactagaaccttaggcattggggagttttagatggactaattttattaaaggattgttttttttttaaatggagcgtttgttttcattt

SEQ ID NO: 692217 - DNA, 120 bp, Artificial Sequence
  ENSG00000188487_0 (sequence is synthesized)
ggcctctgtaaggagacttggagtcgctgcagccaaggctggagccatgagacggccccctggcaatggagaggcggccagcgaaggtccaggtggctggggtctatggggagtccagga

SEQ ID NO: 692218 - DNA, 120 bp, Artificial Sequence
  ENSG00000188487_1 (sequence is synthesized)
gtccaggaggctgtgctgtgccggtcacgaccgctgcaagcaggctttgctgcagattgggatcaacatgatggcactgcctggaggtcgccacctggactccgtcaccctgccgggtca

SEQ ID NO: 692219 - DNA, 120 bp, Artificial Sequence
  ENSG00000188487_2 (sequence is synthesized)
gcggctacacctgatgcaggtggactcagtccagcgctggatggaagatctgaagctcatgaccgagtgcgagtgcatgtgtgtcctgcaggccaagcccatcagcctggaagaggatgc

SEQ ID NO: 692220 - DNA, 120 bp, Artificial Sequence
  ENSG00000188487_3 (sequence is synthesized)
acagggtgacctcatcctggcaggtggccctggccctggagaccccctgcagctgctgctcaaacggggttgggtcattagcacagagctgcgcaggatcgggcagaagctggcccagga

SEQ ID NO: 692221 - DNA, 120 bp, Artificial Sequence
  ENSG00000188487_4 (sequence is synthesized)
ccgctgggcacgggtgcacagcatgagcgtgcgtctgacctgccatgcccgctccatggtcagcgagtacagtgctgtcagcaggaactccttgaaggaaatgggcgagattgagaagct

SEQ ID NO: 692222 - DNA, 120 bp, Artificial Sequence
  ENSG00000188487_5 (sequence is synthesized)
gctaatggagaaatgctcggagctctcggcagtcacagagaggtgccttcaggttgagaatgagcatgtcctgaagtcaatgaaggcctgcgtgagtgagaccctgagcatgctgggcca

SEQ ID NO: 692223 - DNA, 120 bp, Artificial Sequence
  ENSG00000188487_6 (sequence is synthesized)
gcactttggtcagctgctggagctggccctgacacgggaggttcaggcactggtgagaaaaattgatgcctcagacaatatctacaccacagagtccaccacagggaacctgttcagcct

SEQ ID NO: 692224 - DNA, 120 bp, Artificial Sequence
  ENSG00000188487_7 (sequence is synthesized)
gacccaggagggggctcccttgtgccgcatcatagccaaggagggtggggtcgtagcactcttcaaggtttgccggcaggacagtttccggtgcttgtacccccaggcgctccgcacgct

SEQ ID NO: 692225 - DNA, 120 bp, Artificial Sequence
  ENSG00000188487_8 (sequence is synthesized)
ggcctccatctgctgcgtggaagagggtgtccaccagctggagaaggtggatggcgttctgtgcttggccgacatcctgaccgacaacagccactcagaggccacacgggctgaggctgc

SEQ ID NO: 692226 - DNA, 120 bp, Artificial Sequence
  ENSG00000188487_9 (sequence is synthesized)
ggctgtggtggcccaggtcacctccccacacctgcccgtcacccagcacctcagtagcttcctggagagcatggaggagatcgtgacagccctcgtcaaactgtgccaagaggcctcatc

SEQ ID NO: 692227 - DNA, 120 bp, Artificial Sequence
  ENSG00000188487_10 (sequence is synthesized)
aggggaagtcttcctactggcctctgcggcccttgccaacatcacgttctttgacacaatggcctgcgagatgctcctgcagttgaatgccatccgtgttctcctggaagcctgcagtga

SEQ ID NO: 692228 - DNA, 120 bp, Artificial Sequence
  ENSG00000188487_11 (sequence is synthesized)
caagcagagagtggacacgccttacactcgggaccagattgtgaccatcttggcaaacatgtctgtcctagaacagtgtgcctctgacatcattcaggaaaatggggtccagcttatcat

SEQ ID NO: 692229 - DNA, 120 bp, Artificial Sequence
  ENSG00000188487_12 (sequence is synthesized)
ctgcagtgaccctggctcgtctcagccgagacccagatgtggcacgggaggccgtgcggctcagctgcatgtcccgtctcatcgagctctgcagatccccatcagagaggaacagcagtg

SEQ ID NO: 692230 - DNA, 120 bp, Artificial Sequence
  ENSG00000188487_13 (sequence is synthesized)
acgccgtgcttgtggcctgcctggctgctctgcgtagattggctggggtctgccctgaaggcctccaggactctgactttcagcagttggtccagcctcggctggtggactccttcttac

SEQ ID NO: 692231 - DNA, 120 bp, Artificial Sequence
  ENSG00000188487_14 (sequence is synthesized)
tctgcagcaacatggaggagagttttgtgtagtgagtgtgggcgaagaaatacatttggctgttctcacaccccctctgactatgcaccagtgaacacatctgagtacataccagctctc

SEQ ID NO: 692232 - DNA, 120 bp, Artificial Sequence
  ENSG00000188487_15 (sequence is synthesized)
ctcatcttcttatttatacttaacttatttttgtgtgaaataaatggaggacaaaatcttagagcaacatcatcaaacagtctttggtccttgagaatcttctttgtgttttattttttg

SEQ ID NO: 692233 - DNA, 120 bp, Artificial Sequence
  ENSG00000188487_16 (sequence is synthesized)
atttctgtagcttttcagttgcagatgttgaaattcgtaatgacaaatatgacaaattgtcatgggtgattccacttcatcttattttttctactctcactatacaatcttgcctcattt

SEQ ID NO: 692234 - DNA, 120 bp, Artificial Sequence
  ENSG00000188487_17 (sequence is synthesized)
tttaaaactttggaaccagaggatttcaactgcctagcaagttttttttttaagttggatttgctcttcccaaaaatctaaaatgaatttaataattgggtagaatatattggaaagaag

SEQ ID NO: 692235 - DNA, 120 bp, Artificial Sequence
  ENSG00000188487_18 (sequence is synthesized)
tttctttttctttaataaatggaatcatataaaatgtatcccggattttcttattaaattgtattttaaactaggttcttgcttcccaggtttcattccccaaaaacttttccaaccatt

SEQ ID NO: 692236 - DNA, 120 bp, Artificial Sequence
  ENSG00000188487_19 (sequence is synthesized)
aaaagtacacacagaattgtcttgttttcataggtgtataaataggttaagttctgagtgacttagtgagaaaccaaagtgactttcaaaaatacacccaaaggcaccagaaaccctgct

SEQ ID NO: 692237 - DNA, 120 bp, Artificial Sequence
  ENSG00000188487_20 (sequence is synthesized)
tcctttggcttctttgcttttgtgtaacctcctgttcacctcctggtgaatagaatcctcagatgaggcttattgaatgattgattcctcctcaaaagtatacttgaaagcagtggtgtg

SEQ ID NO: 692238 - DNA, 120 bp, Artificial Sequence
  ENSG00000188487_21 (sequence is synthesized)
ctgaagccagctcatgcccactcacaagggacaactgtgagaatttcttcctaactctgcactcagtgaccttgcgttggtagccatgagctacttcatgagccctcatgttgaaattgg

SEQ ID NO: 692239 - DNA, 120 bp, Artificial Sequence
  ENSG00000188487_22 (sequence is synthesized)
ccatagtgggagtatttacaccacagaaattcacagatgctataaagcacagctttcgctttttttttttttagagagagctggtttaccaatttcactgcttgaaagtatcacaaaaat

SEQ ID NO: 692240 - DNA, 120 bp, Artificial Sequence
  ENSG00000188487_23 (sequence is synthesized)
actgcttgaaagtatcacaaaaatctggggatccttttgaaaatataaatgccatcatattgtgatataatttatacaatataatataattgtgtaaaatcatgattataataatgtttc

SEQ ID NO: 692241 - DNA, 120 bp, Artificial Sequence
  ENSG00000188487_24 (sequence is synthesized)
cactcacaagctcgggttaccaatacatagtgttagatgcgaagggaatgggaagccaggatggagacccactctcctatttggcaaaacttgctaatgaggctggacaacagccttgcc

SEQ ID NO: 692242 - DNA, 120 bp, Artificial Sequence
  ENSG00000188488_0 (sequence is synthesized)
ctctgccctttctgagcccgagggactgccacctccactgtgtgcacactcagctacgggacacatttcaggtatccaaggcagcagaggtgagtgggtcccccgagctctgtgacctta

SEQ ID NO: 692243 - DNA, 120 bp, Artificial Sequence
  ENSG00000188488_1 (sequence is synthesized)
tgctccacactaactctggcagagcctccgtttcctcatagaacaaagaacagccaccatgcagctcttcctcctcttgtgcctggtgcttctcagccctcagggggcctcccttcaccg

SEQ ID NO: 692244 - DNA, 120 bp, Artificial Sequence
  ENSG00000188488_2 (sequence is synthesized)
ccaccacccccgggagatgaagaagagagtcgaggacctccatgtaggtgccacggtggcccccagcagcagaagggactttacctttgacctctacagggccttggcttccgctgcccc

SEQ ID NO: 692245 - DNA, 120 bp, Artificial Sequence
  ENSG00000188488_3 (sequence is synthesized)
cagccagagcatcttcttctcccctgtgagcatctccatgagcctggccatgctctccctgggggctgggtccagcacaaagatgcagatcctggagggcctgggcctcaacctccagaa

SEQ ID NO: 692246 - DNA, 120 bp, Artificial Sequence
  ENSG00000188488_4 (sequence is synthesized)
aagctcagagaaggagctgcacagaggctttcagcagctccttcaggaactcaaccagcccagagatggcttccagctgagcctcggcaatgcccttttcaccgacctggtggtagacct

SEQ ID NO: 692247 - DNA, 120 bp, Artificial Sequence
  ENSG00000188488_5 (sequence is synthesized)
gcaggacaccttcgtaagtgccatgaagacgctgtacctggcagacactttccctaccaactttagggactctgcaggggccatgaagcagatcaatgattatgtggcaaagcaaacgaa

SEQ ID NO: 692248 - DNA, 120 bp, Artificial Sequence
  ENSG00000188488_6 (sequence is synthesized)
gggcaagattgtggacttgcttaagaacctcgatagcaatgcggtcgtgatcatggtgaattacatcttctttaaagctaagtgggagacaagcttcaaccacaaaggcacccaagagca

SEQ ID NO: 692249 - DNA, 120 bp, Artificial Sequence
  ENSG00000188488_7 (sequence is synthesized)
agacttctacgtgacctcggagactgtggtgcgggtacccatgatgagccgcgaggatcagtatcactacctcctggaccggaacctctcctgcagggtggtgggggtcccctaccaagg

SEQ ID NO: 692250 - DNA, 120 bp, Artificial Sequence
  ENSG00000188488_8 (sequence is synthesized)
caatgccacggctttgttcattctccccagtgagggaaagatgcagcaggtggagaatggactgagtgagaaaacgctgaggaagtggcttaagatgttcaaaaagaggcagctcgagct

SEQ ID NO: 692251 - DNA, 120 bp, Artificial Sequence
  ENSG00000188488_9 (sequence is synthesized)
aatatccaggtgtctgagatggtgcacaaagctgtggtggaggtggacgagtcgggaaccagagcagcggcagccacggggacaatattcactttcaggtcggcccgcctgaactctcag

SEQ ID NO: 692252 - DNA, 120 bp, Artificial Sequence
  ENSG00000188488_10 (sequence is synthesized)
aggctagtgttcaacaggccctttctgatgttcattgtggataacaacatcctcttccttggcaaagtgaaccgcccctgaggtggggcttctcctgaaatctacaggcctcagggtggg

SEQ ID NO: 692253 - DNA, 120 bp, Artificial Sequence
  ENSG00000188488_11 (sequence is synthesized)
agatgaagggggctaagctatggcccatctgtatgctggtagctagtgatttacacaggtttagttgactaatgaggcattacaaataatattactctatgatgattgcttccacccaca

SEQ ID NO: 692254 - DNA, 120 bp, Artificial Sequence
  ENSG00000188488_12 (sequence is synthesized)
cgactgcaacatacaggtgccttggggaaatgtggagaacattcaatcttgccgtcactattcatcaatgaagattaacactgagatccagagaggctggatgacttgctcaagttcacc

SEQ ID NO: 692255 - DNA, 120 bp, Artificial Sequence
  ENSG00000188488_13 (sequence is synthesized)
agcatggtagtggcaaagagaggtccagagtcctggcccttgatgcccagctcagtgccacaaagctcaataggagggatgttccagtggatgagggccaccaggaagcacaggtccaag

SEQ ID NO: 692256 - DNA, 120 bp, Artificial Sequence
  ENSG00000188488_14 (sequence is synthesized)
gctggtcccacacttatcagcagcaacaactgtcagttcatcctgcatgggaaaaatgttggaatgggagtctgaaatggggctactgtttcagtcctaatgtgctgtgtgacattggga

SEQ ID NO: 692257 - DNA, 120 bp, Artificial Sequence
  ENSG00000188488_15 (sequence is synthesized)
caacactttccctctctggacctcagtttccctctgtatacaaggatcagattcttgctgtgacccaagaactcctgaaatcatatagaaaggctggggtgggccctgtcattcgtggtt

SEQ ID NO: 692258 - DNA, 120 bp, Artificial Sequence
  ENSG00000188488_16 (sequence is synthesized)
gatttcaatacactcaagtgccattcatcctttaagaaaaacatctggatatcaaggtggaaatggcccatttaatgattgattatatcattttgtggatatagttataatctgatgggc

SEQ ID NO: 692259 - DNA, 120 bp, Artificial Sequence
  ENSG00000188488_17 (sequence is synthesized)
ctggctgggagtggaagaagggaagccttttgcaaatagtagagtatcagttgcaggtgccaatgactaactttttgaattctatgttggcattaacaataaagcattttgcaaacactg

SEQ ID NO: 692260 - DNA, 120 bp, Artificial Sequence
  ENSG00000188488_18 (sequence is synthesized)
aagacagagctgagacagccacccagggggtccactccaggacagactgtgcctgtgggctcacagggaagaggtcatgggcgaacagagtgaaggcaaccatctataagtgccagagag

SEQ ID NO: 692261 - DNA, 120 bp, Artificial Sequence
  ENSG00000188488_19 (sequence is synthesized)
ccctcaccagagaccaaccctgacggcaccttgaccttggatttccagcgtccagaactccacataattgggccccaaagccatgaagaaggaagaggaaatgtcttaaaggttgtcgat

SEQ ID NO: 692262 - DNA, 120 bp, Artificial Sequence
  ENSG00000188488_20 (sequence is synthesized)
agtgacaaatgctggctgcaatccagccagccctctgccctttctgagcccgagggactgccacctccactgtgtgcacactcagctacgggacacaaacaaagaacagccaccatgcag

SEQ ID NO: 692263 - DNA, 120 bp, Artificial Sequence
  ENSG00000188488_21 (sequence is synthesized)
acaatgcccaggacaagatcacaaagcatcatcctgttcaaaaggtcaacaggatcaaggttgagagaccctgaaataaggccatggggacaaaatgtcggctggataggaggtgctcaa

SEQ ID NO: 692264 - DNA, 120 bp, Artificial Sequence
  ENSG00000188488_22 (sequence is synthesized)
ggcaaggccagcagtgctgatggtcccaggcatgtagctggtctgagttcatagaaggaccacagcgccctgccatgtgccaaaccaggacaccagagtgaaggccagaagctcacatgg

SEQ ID NO: 692265 - DNA, 120 bp, Artificial Sequence
  ENSG00000188488_23 (sequence is synthesized)
cacccagccaaggagctgcctccaggcccagaggcatcctgtgacatccaagtcctgggggcctagcccagttggagggacaagagctggaaactgggttccttagggtggtgccagagt

SEQ ID NO: 692266 - DNA, 120 bp, Artificial Sequence
  ENSG00000188488_24 (sequence is synthesized)
gggcagagacctctgggcagcccacgtccaagtccagagcaaggggaggctcatcctagaaaagaggccagaggagccataaccaccattgttccttgggttaaggagtccttttttaaa

SEQ ID NO: 692267 - DNA, 120 bp, Artificial Sequence
  ENSG00000188488_25 (sequence is synthesized)
accatcaaaactaagaatccagtgcattatgaatccaaggggtgaggctcagtgtgccaatgccccagaacagtctaagaaagctccttttccctttccaggcagctcgagctttacctt

SEQ ID NO: 692268 - DNA, 120 bp, Artificial Sequence
  ENSG00000188488_26 (sequence is synthesized)
aaaatgtcggctggataggaggtgctcagtaagtggcagcttctgttgttttctgtgcctggagtcttgggcctttagaaatcaggaacaatgatccaatattatcggcttccgtgagat

SEQ ID NO: 692269 - DNA, 120 bp, Artificial Sequence
  ENSG00000188488_27 (sequence is synthesized)
taaagtaagcagaatttttagtttttctgaaggtagggcttttggccagatatgcagcaataaaagagcaaactgcttccttgggccagtgtccttgctcatagatcaggaaaccgaagc

SEQ ID NO: 692270 - DNA, 120 bp, Artificial Sequence
  ENSG00000188488_28 (sequence is synthesized)
atgaagaatacaggcggcagatgcctgaagaacaaagaacagccaccatgcagctcttcctcctcttgtgcctggtgcttctcagccctcagggggcctcccttcaccgccaccaccccc

SEQ ID NO: 692271 - DNA, 120 bp, Artificial Sequence
  ENSG00000188488_29 (sequence is synthesized)
ctctgccctttctgagcccgagggactgccacctccactgtgtgcacactcagctacgggacacagtaagtaccgatgccgcaaagggaggtccccagggcttgagggcatgtgaggcga

SEQ ID NO: 692272 - DNA, 120 bp, Artificial Sequence
  ENSG00000188488_30 (sequence is synthesized)
ggagaggatggactctagagttttggggtttggggtctgcaaagctctgaaggagtctcatctctgcagtttcaggtatccaaggcagcagaggtgagtgggtcccccgagctctgtgac

SEQ ID NO: 692273 - DNA, 120 bp, Artificial Sequence
  ENSG00000188488_31 (sequence is synthesized)
gacaaatgctggctgcaatccagccagccctctgccctttctgagcccgagggactgccacctccactgtgtgcacactcagctacgggacacatttcaggtatccaaggcagcagagaa

SEQ ID NO: 692274 - DNA, 120 bp, Artificial Sequence
  ENSG00000188493_0 (sequence is synthesized)
agtgggaggtgcactttacttcctgactcctttcctttttccagtggttatcgcggcgcccaccggcctctgatctctgagtcttctccaacccacagacgttttttgttgctctggttc

SEQ ID NO: 692275 - DNA, 120 bp, Artificial Sequence
  ENSG00000188493_1 (sequence is synthesized)
caggaccttctccacaactaggccattttccctgccaggtgtcctttttgacctcttgacctctgactcaaaggtcagctcaaaggttccgaactcgggcctgggatgtgagggggtact

SEQ ID NO: 692276 - DNA, 120 bp, Artificial Sequence
  ENSG00000188493_2 (sequence is synthesized)
gaacctaagttctccgaatctttagccctgggtccctaagtcgcatccttaaggcacctcactctagatctgagccttcatatcccaaactcactcatgagtttccacatccagccccaa

SEQ ID NO: 692277 - DNA, 120 bp, Artificial Sequence
  ENSG00000188493_3 (sequence is synthesized)
agaatgagttaactcctactaactctccacctaagactcccgaggtaacccaaccggtaccacagatccggttccggatttaaggaccccaccctgttaaccgtcaggtgccttatgact

SEQ ID NO: 692278 - DNA, 120 bp, Artificial Sequence
  ENSG00000188493_4 (sequence is synthesized)
tgagtcagcctcgcaattcctgctcccgtggtttcaaatattagccctggtcctttcacacccactgctcagtccccagattctggaactcagctcttaaacctttaaaatctccatccc

SEQ ID NO: 692279 - DNA, 120 bp, Artificial Sequence
  ENSG00000188493_5 (sequence is synthesized)
tgagaccgttctccgttggaggatccttccctccccgctttctgaacctctcaacacctcctgtagaccccaaaatgacttctccatgctctcctcccctaaaaccaccaatttctcctc

SEQ ID NO: 692280 - DNA, 120 bp, Artificial Sequence
  ENSG00000188493_6 (sequence is synthesized)
caaaaacccctgtaccccaagccagcagcattccatctcctcctctacccccaagtcccctggacttttcagctttaccatcccctccctggagtcagcagacccctgttcccccaccgc

SEQ ID NO: 692281 - DNA, 120 bp, Artificial Sequence
  ENSG00000188493_7 (sequence is synthesized)
tcccactgcctcctccacccgctgccacagggcctgctccccgtcatgtcttcggcctggagaagagccagctcctgaaggaggcctttgataaggccggcccggtccccaagggcagag

SEQ ID NO: 692282 - DNA, 120 bp, Artificial Sequence
  ENSG00000188493_8 (sequence is synthesized)
aagatgtgaagaggcttctgaaactacacaaggaccggttccgaggtgacctgcggtggatcctcttctgtgcagacctgccgtccctcatccaagaaggccctcaatgcgggctggtgg

SEQ ID NO: 692283 - DNA, 120 bp, Artificial Sequence
  ENSG00000188493_9 (sequence is synthesized)
ccttgtggatggcaggtactctcctgtcgccccccagtggcgtccccctggagagactcatacgggtggccacggaaagaggctacacggcccagggagagatgttctcagtggccgata

SEQ ID NO: 692284 - DNA, 120 bp, Artificial Sequence
  ENSG00000188493_10 (sequence is synthesized)
tgggcaggctggcccaggaggtgctgggctgccaggccaagctgctctctggtggcctgggcggtcccaacagagacctcgtcctgcagcacctggtcactggacatcccctgctcatcc

SEQ ID NO: 692285 - DNA, 120 bp, Artificial Sequence
  ENSG00000188493_11 (sequence is synthesized)
cctacgacgaggacttcaaccatgagccgtgtcagaggaagggccacaaggcacactgggcggtgagtgcaggggtcctgctgggtgttcgggctgtgcccagtctcggctacactgagg

SEQ ID NO: 692286 - DNA, 120 bp, Artificial Sequence
  ENSG00000188493_12 (sequence is synthesized)
accctgagctgccgggcctgttccacccagtgctgggcacgccctgccaaccaccatccctgccagaggagggctccccgggagctgtctacctgctgtccaagcagggcaagagttggc

SEQ ID NO: 692287 - DNA, 120 bp, Artificial Sequence
  ENSG00000188493_13 (sequence is synthesized)
ccctcacgggccactgacggccgggtgtacgtggtgcccgtgggtggggtacgggctggcctctgtggccaggccctgctcctcacaccacaggactgcagccattagctgcggctgcgg

SEQ ID NO: 692288 - DNA, 120 bp, Artificial Sequence
  ENSG00000188493_14 (sequence is synthesized)
tctcaggctgcagcctagctcggtaaccatttgaagtgtgcctacacttctcccactgtgtgatggcgacaagattgaagctaggtctcaggggtctccagtcctccttcatcagggcca

SEQ ID NO: 692289 - DNA, 120 bp, Artificial Sequence
  ENSG00000188493_15 (sequence is synthesized)
ccccctgcagtattgagcaccagctggtccctctagggagagattgacaacagcccggaccctgcggcctgcctattccatctgaatgtcgcatcgtctgtttctcactaggggccgcct

SEQ ID NO: 692290 - DNA, 120 bp, Artificial Sequence
  ENSG00000188493_16 (sequence is synthesized)
ctgtcatctcactagacatttgaggaacctcctgcctgggccctctgcttctcacaggacagggacactgaactgcgtcagcctcagctcacccctccttagcccaaggtcttcctcatg

SEQ ID NO: 692291 - DNA, 120 bp, Artificial Sequence
  ENSG00000188493_17 (sequence is synthesized)
cttgccacctactagtcatactggccttttagatccctgaagtgttgttcaaatccccggatcattgagtcccacccccagccctctgctgcggatcactccttaacttttccattgggg

SEQ ID NO: 692292 - DNA, 120 bp, Artificial Sequence
  ENSG00000188493_18 (sequence is synthesized)
ctcaggtatcactacctcagggaagagtcctgcagccccagtcaagacacccctcccccacctcatgtcttcacagttttaaagcccatctgggagcagttacctgtgccagcccctcta

SEQ ID NO: 692293 - DNA, 120 bp, Artificial Sequence
  ENSG00000188493_19 (sequence is synthesized)
cctgtgttagcagatctggcaaccctgtaaggggggtgctagatggacccgatttgacagatggcaagactgaggcctggagaagtggaatcactggcctgaggtcacatgactagcaca

SEQ ID NO: 692294 - DNA, 120 bp, Artificial Sequence
  ENSG00000188493_20 (sequence is synthesized)
tggcaaggtcaggattcaagctaggtagtcagtatctcagccaggctgtctcctggctccctgaacattatggtgctgaccacaaactttcctgtccacttatacaaacttctagtgagt

SEQ ID NO: 692295 - DNA, 120 bp, Artificial Sequence
  ENSG00000188493_21 (sequence is synthesized)
gtgtgtgattactagcttcatgaatacctgacccctccactctgaaggaggaacaggcctgtctggatcacttctctgtccctaactgagcccatctcatttagggaaactacagagcac

SEQ ID NO: 692296 - DNA, 84 bp, Artificial Sequence
  ENSG00000188493_22 (sequence is synthesized)
cctaactgagcccatctcatttagggaaactacagagcactgttgctttttttttttttagatggagtctcgttctgtcgtcca

SEQ ID NO: 692297 - DNA, 120 bp, Artificial Sequence
  ENSG00000188493_23 (sequence is synthesized)
caggtgtgagccactgagcccggccacagtgcagtatttctaaccagtgatcagggtaaagaggatgcgtgtccaccatcccagccctgatcagcctgtctgtgcatcccccatcccagc

SEQ ID NO: 692298 - DNA, 120 bp, Artificial Sequence
  ENSG00000188493_24 (sequence is synthesized)
ccctgatcagcctgtctgtgcatcccccatcccagccagggcttggagcagccttgctcaccactgtgtcccctgcattgtaacacatccaggcacaagaatagccgcccagtgactgcc

SEQ ID NO: 692299 - DNA, 120 bp, Artificial Sequence
  ENSG00000188493_25 (sequence is synthesized)
aagtgagtgaaccagcctgcttggagcctgcctctttcccaaactgctcattatcctgttaccccacccagcccacgtgtccaaatacactccagatgcaaaataaaaagctctacgaca

SEQ ID NO: 692300 - DNA, 120 bp, Artificial Sequence
  ENSG00000188493_26 (sequence is synthesized)
ctgcctgggccctctgcttctcacaggacagggacactgaactgcgtcagcctcagctcacccctccttagcccaagttttaaagcccatctgggagcagttacctgtgccagcccctct

SEQ ID NO: 692301 - DNA, 120 bp, Artificial Sequence
  ENSG00000188493_27 (sequence is synthesized)
aaggactgatctggagaagaggagtggattgtccctgctgggaggaggagggaaggaaagggggaactttccactcaggcttctgagtgcctgcatagtaaacatagttgggacatgcga

SEQ ID NO: 692302 - DNA, 120 bp, Artificial Sequence
  ENSG00000188493_28 (sequence is synthesized)
atcagctgtgggactacgaccaggtccgggagagcaacctgcagctgacggacttctcgccctcacgggccactgacggccgggtttttaaagcccatctgggagcagttacctgtgcca

SEQ ID NO: 692303 - DNA, 120 bp, Artificial Sequence
  ENSG00000188493_29 (sequence is synthesized)
cgggtgcaggggacggaagaggggccagcccgtgcgggacagtctggactccggactatcccgagaactcaccatccttcttgatcttctcattgaggttgttgatataaatagtgtggt

SEQ ID NO: 692304 - DNA, 120 bp, Artificial Sequence
  ENSG00000188501_0 (sequence is synthesized)
gatcaagcgccttcctttcccttcctctccccacttggcctttgccctaagccaagacctggccatcagcctggctgcaggggcctgcagagccagctgcactttttcaggtatggggga

SEQ ID NO: 692305 - DNA, 120 bp, Artificial Sequence
  ENSG00000188501_1 (sequence is synthesized)
gggccaggcaccatgaagccagtgtgggtcgccacccttctgtggatgctactgctggtgcccaggctgggggccgcccggaaggggtccccagaagaggcctccttctactatggaacc

SEQ ID NO: 692306 - DNA, 120 bp, Artificial Sequence
  ENSG00000188501_2 (sequence is synthesized)
ttccctcttggcttctcctggggcgtgggcagttctgcctaccagacggagggcgcctgggaccaggacgggaaagggcctagcatctgggacgtcttcacacacagtgggaaggggaaa

SEQ ID NO: 692307 - DNA, 120 bp, Artificial Sequence
  ENSG00000188501_3 (sequence is synthesized)
gtgcttgggaatgagacggcagatgtagcctgtgacggctactacaaggtccaggaggacatcattctgctgagggaactgcacgtcaaccactaccgattctccctgtcttggccccgg

SEQ ID NO: 692308 - DNA, 120 bp, Artificial Sequence
  ENSG00000188501_4 (sequence is synthesized)
ctcctgcccacaggcatccgagccgagcaggtgaacaagaagggaatcgaattctacagtgatcttatcgatgcccttctgagcagcaacatcactcccatcgtgaccttgcaccactgg

SEQ ID NO: 692309 - DNA, 120 bp, Artificial Sequence
  ENSG00000188501_5 (sequence is synthesized)
gatctgccacagctgctccaggtcaaatacggtgggtggcagaatgtgagcatggccaactacttcagagactacgccaacctgtgctttgaggcctttggggaccgtgtgaagcactgg

SEQ ID NO: 692310 - DNA, 120 bp, Artificial Sequence
  ENSG00000188501_6 (sequence is synthesized)
atcacgttcagtgatcctcgggcaatggcagaaaaaggctatgagacgggccaccatgcgccgggcctgaagctccgcggcaccggcctgtacaaggcagcacaccacatcattaaggcc

SEQ ID NO: 692311 - DNA, 120 bp, Artificial Sequence
  ENSG00000188501_7 (sequence is synthesized)
cacgccaaagcctggcattcttataacaccacgtggcgcagcaagcagcaaggtctggtgggaatttcattgaactgtgactggggggaacctgtggacattagtaaccccaaggaccta

SEQ ID NO: 692312 - DNA, 120 bp, Artificial Sequence
  ENSG00000188501_8 (sequence is synthesized)
gaggctgccgagagatacctacagttctgtctgggctggtttgccaaccccatttatgccggtgactacccccaagtcatgaaggactacattggaagaaagagtgcagagcaaggcctg

SEQ ID NO: 692313 - DNA, 120 bp, Artificial Sequence
  ENSG00000188501_9 (sequence is synthesized)
gagatgtcgaggttaccggtgttctcactccaggagaagagctacattaaaggcacatccgatttcttgggattaggtcattttactactcggtacatcacggaaaggaactacccctcc

SEQ ID NO: 692314 - DNA, 120 bp, Artificial Sequence
  ENSG00000188501_10 (sequence is synthesized)
cgccaggggcccagctaccagaacgatcgtgacttgatagagctggttgacccaaactggccagatctggggtctaaatggctatattctgtgccatggggatttaggaggctccttaac

SEQ ID NO: 692315 - DNA, 120 bp, Artificial Sequence
  ENSG00000188501_11 (sequence is synthesized)
tttgctcagactcaatacggtgatcctcccatatatgtgatggaaaatggagcatctcaaaaattccactgtactcaattatgtgatgagtggagaattcaataccttaaaggatacata

SEQ ID NO: 692316 - DNA, 120 bp, Artificial Sequence
  ENSG00000188501_12 (sequence is synthesized)
aatgaaatgctaaaagctataaaagatggtgctaatataaaggggtatacttcctggtctctgttggataagtttgaatgggagaaaggatactcagatagatatggattctactatgtt

SEQ ID NO: 692317 - DNA, 120 bp, Artificial Sequence
  ENSG00000188501_13 (sequence is synthesized)
tatccaaaggcttcagttcaatattacaagaagattatcattgccaatgggtttcccaatccaagagaggtggaaagttggtacctcaaagctttggaaacttgctctatcaacaatcag

SEQ ID NO: 692318 - DNA, 120 bp, Artificial Sequence
  ENSG00000188501_14 (sequence is synthesized)
atgcttgctgcagagcccttgctaagtcacatgcaaatggttacggagatcgtggtacccactgtctgctccctctgtgtcctcatcactgctgttctactaatgctcctcctgaggagg

SEQ ID NO: 692319 - DNA, 120 bp, Artificial Sequence
  ENSG00000188501_15 (sequence is synthesized)
cagagctgagacaggattatcaattttggagcttcataagagaatcttcaggatcttcctcccttttctgctttgagggtttccatacattgctgttttcaggttctacaataattacct

SEQ ID NO: 692320 - DNA, 120 bp, Artificial Sequence
  ENSG00000188501_16 (sequence is synthesized)
ttttttctctttctctttttggcttgtgctgggatttaagaattagaaaataaaaataagcagaaattaaaaaaaaaaacacttgtaatctcacccctcctaaagttaatgttaagattt

SEQ ID NO: 692321 - DNA, 120 bp, Artificial Sequence
  ENSG00000188501_17 (sequence is synthesized)
tgctgtatataatgaatgtatattatgaattatttacaaaaatggcatcatagtatacaaactgttgtgacttgattgtttatcactctaaaatctgtccagaaatattactttaatgtt

SEQ ID NO: 692322 - DNA, 88 bp, Artificial Sequence
  ENSG00000188501_18 (sequence is synthesized)
tatcactctaaaatctgtccagaaatattactttaatgttcaaatgattgccatctcagcactgtcccatacctgatagataaaatca

SEQ ID NO: 692323 - DNA, 80 bp, Artificial Sequence
  ENSG00000188501_19 (sequence is synthesized)
aaagactccgtttcaaaagagaaaagaaaagaaatctatagataacaatccttccaggttgtaaatattattagccaacc

SEQ ID NO: 692324 - DNA, 120 bp, Artificial Sequence
  ENSG00000188501_20 (sequence is synthesized)
gataacaatccttccaggttgtaaatattattagccaaccacagaaaagcatgaagtgggtaccaagtaaatgagcacgtacactcttctgacactttagtctgaatttagtctgacaac

SEQ ID NO: 692325 - DNA, 120 bp, Artificial Sequence
  ENSG00000188501_21 (sequence is synthesized)
caactctgactaaattcaacttactttagtcaatgaaatacctcaaagaaatattacatgtttattttttatttatcttctaggtaactcaatatcgtcttttttataataaagattcat

SEQ ID NO: 692326 - DNA, 120 bp, Artificial Sequence
  ENSG00000188501_22 (sequence is synthesized)
ctcttaactatgttaaaatgctaaaattaattaatttccatttatttggggataaaacatggcttaagaacaatctcatgcatttttctcattatctgattttacttaatactgtttctg

SEQ ID NO: 692327 - DNA, 120 bp, Artificial Sequence
  ENSG00000188501_23 (sequence is synthesized)
gctgtggctcctctctcaggggacagcgtaggccctgggggtcagttggagagggctctgactaccagcgactgctctgggggtgtctgcgatcaaggacgatcctgggaggacatcatt

SEQ ID NO: 692328 - DNA, 120 bp, Artificial Sequence
  ENSG00000188501_24 (sequence is synthesized)
actacaaggtccagcctcagggcctacagccacagtggcctgaacccctggtccctgcttgtcagttgcaccctgtggagggagtgggacccgctcatcctcagcacccactttcctctc

SEQ ID NO: 692329 - DNA, 120 bp, Artificial Sequence
  ENSG00000188501_25 (sequence is synthesized)
agagccttcggctgtgctgtggctcctctctcaggggacagcgtaggccctgggggtcagttggagagggctctgactaccagcgactgctctgggggtgtctgcgatcaaggacgatcc

SEQ ID NO: 692330 - DNA, 120 bp, Artificial Sequence
  ENSG00000188501_26 (sequence is synthesized)
gggagggagatcagcccatgaacgtagttgctgacggtagcagctctcacaggttctgcagccgagcaggtgaacaagaagggaatcgaattctacagtgatcttatcgatgcccttctg

SEQ ID NO: 692331 - DNA, 120 bp, Artificial Sequence
  ENSG00000188505_0 (sequence is synthesized)
agtcgcgcagcctcgagggatggaggaggtgcgtgagggacacgcgctcggtggcgggatggaagccgatgggcccgcgagcctccaggagctgcctccctcgccacggtcgccttcacc

SEQ ID NO: 692332 - DNA, 80 bp, Artificial Sequence
  ENSG00000188505_1 (sequence is synthesized)
ccatcgcccgcagccccggaggcccccgagctccccgagccggcgcagccgtccgaggctcacgcccggcagctgctgct

SEQ ID NO: 692333 - DNA, 120 bp, Artificial Sequence
  ENSG00000188505_2 (sequence is synthesized)
ggaggagtgggggccgctgagcgggggcctggagctgccccagcgcctcacctggaagctgctcctgttgcggcggccgctctaccgcaacctgctgcgctcgcccaaccccgaaggcat

SEQ ID NO: 692334 - DNA, 120 bp, Artificial Sequence
  ENSG00000188505_3 (sequence is synthesized)
caacatttatgagccagcaccccctactggtcccacccagcgacccctggaaactctgggcaatttccgtggctggtacattagaactgaaaagctccagcagaaccaaagctggacagt

SEQ ID NO: 692335 - DNA, 120 bp, Artificial Sequence
  ENSG00000188505_4 (sequence is synthesized)
gaagcagcagtgtgtggaccttctggccgagggcctgtgggaggagctgctggatgacgaacaaccagccattacggtcatggactggttcgaggacagccggctggatgcgtgcgtcta

SEQ ID NO: 692336 - DNA, 120 bp, Artificial Sequence
  ENSG00000188505_5 (sequence is synthesized)
tgagctgcatgtctggctgctggcggccgaccgccgcacggtcattgctcagcaccacgtggccccccgaacttctgggagaggaccccctggccgctgggtccaggtgtcccacgtatt

SEQ ID NO: 692337 - DNA, 120 bp, Artificial Sequence
  ENSG00000188505_6 (sequence is synthesized)
ccgccattatggtcccggtgtgcgctttatccacttcctgcacaaggccaagaaccgcatggagcctggtgggctgcggcggacacgggtgaccgactcctccgtgtctgtgcagctccg

SEQ ID NO: 692338 - DNA, 120 bp, Artificial Sequence
  ENSG00000188505_7 (sequence is synthesized)
ggagtgactggctggctcctctgtcctgaccccacagcacctccctgacctttaggagccccaactcttagtcacctcctaggcctcttatttctccctggcccttggcttctcacttga

SEQ ID NO: 692339 - DNA, 120 bp, Artificial Sequence
  ENSG00000188505_8 (sequence is synthesized)
tgagccccatgagggcggagccactccttgtaaattcagtgcccgacagatgctctggcacagatgctttgtagatctctgttgagagaatgcatagacacctgtgcccaaggatgctga

SEQ ID NO: 692340 - DNA, 120 bp, Artificial Sequence
  ENSG00000188505_9 (sequence is synthesized)
gggctggtctctgcttctttgaacttcactgaaactgaatgctcactgctgtgttgccagcaccacccagcccagggctgtgaacggagtgggtggcagcaaatgtgtgttgaaagggga

SEQ ID NO: 692341 - DNA, 120 bp, Artificial Sequence
  ENSG00000188505_10 (sequence is synthesized)
atgaagccattcacttcactcagttcctgtcccatttaaccgccccgatccttgatcttccattaccttcacatcccggggtccttctgaactgaccttgacctctgatctcttcacaca

SEQ ID NO: 692342 - DNA, 72 bp, Artificial Sequence
  ENSG00000188505_11 (sequence is synthesized)
gtccttctgaactgaccttgacctctgatctcttcacacatctccccttagcatctccacttacctactttt

SEQ ID NO: 692343 - DNA, 63 bp, Artificial Sequence
  ENSG00000188505_12 (sequence is synthesized)
actcactgcaatttccacctctagcacctcccccgactaatttttatatttttagtagagacg

SEQ ID NO: 692344 - DNA, 120 bp, Artificial Sequence
  ENSG00000188505_13 (sequence is synthesized)
caccttggcttcccaaagtgctgggattgcagacgtgagtcactgcgcccagccattccatgtctcttaagtctcagaatctcccctagctccctccaggtgtctgcagtggttgtcccc

SEQ ID NO: 692345 - DNA, 120 bp, Artificial Sequence
  ENSG00000188505_14 (sequence is synthesized)
gctccctccaggtgtctgcagtggttgtcccctcaaagctgtcccacaccctcctccgaggaccctttgtgtatctcctccagctaccgcagagcccacaaacccaggcatctatcaaag

SEQ ID NO: 692346 - DNA, 120 bp, Artificial Sequence
  ENSG00000188505_15 (sequence is synthesized)
tccctcattcatgagggtggtgaggacacagactgcgaccagaacagaaatatgaaaatgtgaatgacagcgtcccccgtgtgtggaatgtggggattaaaagcatttatcaacctctaa

SEQ ID NO: 692347 - DNA, 120 bp, Artificial Sequence
  ENSG00000188508_0 (sequence is synthesized)
agagcaccccaaacttgacgccatgaagatcccggtccttcctgccgtggtgctcctctccctcctggtgctccactctgcccagggagccaccctgggtggtcctgaggaagaaagcac

SEQ ID NO: 692348 - DNA, 120 bp, Artificial Sequence
  ENSG00000188508_1 (sequence is synthesized)
atctgcgtttaaggctgatgagttcctgaactggcacgccctctttgagtctatcaaaaggaaacttcctttcctcaactgggatgcctttcctaagctgaaaggactgaggagcgcaac

SEQ ID NO: 692349 - DNA, 120 bp, Artificial Sequence
  ENSG00000188508_2 (sequence is synthesized)
tcctgatgcccagtgaccatgacctccactggaagagggggctagcgtgagcgctgattctcaacctaccataactctttcctgcctcaggaactccaataaaacattttccatccaaca

SEQ ID NO: 692350 - DNA, 120 bp, Artificial Sequence
  ENSG00000188508_3 (sequence is synthesized)
ttgcagtacctcctagaggccacaggggggagagcgcggggccctcccagggaggacgctccgtcctcgctgcacagagagcttcccggagcgtgggtgggggtggaaacccgtggggag

SEQ ID NO: 692351 - DNA, 120 bp, Artificial Sequence
  ENSG00000188508_4 (sequence is synthesized)
ctgaagtctcctcagcccagtcactgaggcaccgggggagacgcggaggaagaaagcaccattgagaattatgcgtcacgacccgaggcctttaacaccccgttcctgaacatcgacaaa

SEQ ID NO: 692352 - DNA, 120 bp, Artificial Sequence
  ENSG00000188517_0 (sequence is synthesized)
tcgtgctcggagcgcgcgcgcactcacacactcacacacacactcacgcgagcatcgcgaagggtatttaaggatcgcgcacgcggggctgcggagatccttcgggcagccgcgacttcg

SEQ ID NO: 692353 - DNA, 120 bp, Artificial Sequence
  ENSG00000188517_1 (sequence is synthesized)
gcttcgcgagtagcattggttccttgggtttatttcgttttcctctctcttctccaccttagtcgcccctttcgcgctgcgctgtagcgtgctctcacagcctttttgccttgaactgaa

SEQ ID NO: 692354 - DNA, 120 bp, Artificial Sequence
  ENSG00000188517_2 (sequence is synthesized)
tgcaggtgggaaacaggtcggcgtgccgaaagacaccgagtaggtagaaataaggcaaactcacagaggcgcaacaggtccggtcctccgtggccagggcgagccgcggccccgcgtggc

SEQ ID NO: 692355 - DNA, 120 bp, Artificial Sequence
  ENSG00000188517_3 (sequence is synthesized)
gcctcggccgttgccctcggaccctgagcggccactgttggggccctcgaaagaggtgtcggtcctctgggagtcggaagagctgtctgggtgggtttcgtcttgctttttaccccaccg

SEQ ID NO: 692356 - DNA, 120 bp, Artificial Sequence
  ENSG00000188517_4 (sequence is synthesized)
ccacccagtccccggacggagggtgcttttcacttccagctgggaggagagaagaaagcggggatggtgcacgcctgcgggtctggacgctgagcaaggcaggggtccgtatccgctcgt

SEQ ID NO: 692357 - DNA, 120 bp, Artificial Sequence
  ENSG00000188517_5 (sequence is synthesized)
gggcttgactccaccaactagttgtgcagccacagggactgaactttggaggaatcgacctttttctttccttttaggattatttgaggtgtagagggtgggaagcgaagccgagacggc

SEQ ID NO: 692358 - DNA, 120 bp, Artificial Sequence
  ENSG00000188517_6 (sequence is synthesized)
cgaccccgccacgatgctgctgaagaagcacgcagggaaaggagggggccgggagcccagatccgaggacccgacccctgccgaacagcattgtgcccggaccatgcccccgtgtgccgt

SEQ ID NO: 692359 - DNA, 120 bp, Artificial Sequence
  ENSG00000188517_7 (sequence is synthesized)
cctggcggccctcctgtcagtggtggccgtggtgtcttgcctgtacctgggtgtgaaaaccaacgacctccaggcgaggatcgccgctctcgaatccgccaaaggggccccttccattca

SEQ ID NO: 692360 - DNA, 120 bp, Artificial Sequence
  ENSG00000188517_8 (sequence is synthesized)
tctgctgcctgataccctggatcacctcaagactatggtgcaagagaaagtggagcgacttctggctcagaaatcctatgaacatatggctaaaataagaatcgcaagagaagcaccttc

SEQ ID NO: 692361 - DNA, 120 bp, Artificial Sequence
  ENSG00000188517_9 (sequence is synthesized)
agaatgtaactgcccagcaggccctccagggaaacgaggtaagagaggccgaagaggagaatctggtcctcctggacagcctggtcctcagggccctcctggtccaaaaggcgataaggg

SEQ ID NO: 692362 - DNA, 120 bp, Artificial Sequence
  ENSG00000188517_10 (sequence is synthesized)
agaacaaggtgatcagggacctaggatggtgtttcctaaaatcaatcatgggtttctctctgctgatcagcagctcattaaacgccgcctgattaagggtgaccaaggacaggcagggcc

SEQ ID NO: 692363 - DNA, 120 bp, Artificial Sequence
  ENSG00000188517_11 (sequence is synthesized)
tccaggaccccctggccctccaggcccaagagggccacctggggacacagggaaagatggcccccgtggaatgccaggagtacccggtgaaccaggaaagccaggagaacaaggcttgat

SEQ ID NO: 692364 - DNA, 120 bp, Artificial Sequence
  ENSG00000188517_12 (sequence is synthesized)
gggtcctctagggcctccgggacaaaagggttctattggagcacctggaattccagggatgaatgggcaaaagggtgagcccgggttgcctggagcagtaggacagaatggaataccagg

SEQ ID NO: 692365 - DNA, 120 bp, Artificial Sequence
  ENSG00000188517_13 (sequence is synthesized)
acctaagggagaacctggagaacaaggtgaaaagggagacgctggagagaacggccccaagggtgacacaggcgaaaagggtgaccctggatcatctgctgcaggaattaagggagaacc

SEQ ID NO: 692366 - DNA, 120 bp, Artificial Sequence
  ENSG00000188517_14 (sequence is synthesized)
tggggaatctggtcgtccagggcaaaagggtgaaccagggcttcctgggcttcctggacttccggggataaagggagaaccaggtttcattggtcctcaaggagaaccaggcttaccagg

SEQ ID NO: 692367 - DNA, 120 bp, Artificial Sequence
  ENSG00000188517_15 (sequence is synthesized)
tttaccaggaacaaaaggtgaacggggggaagcagggcctcctggaagaggtgagcgaggggaacctggagcccccggaccaaaggggaaacaaggtgaatcaggaactagaggcccaaa

SEQ ID NO: 692368 - DNA, 120 bp, Artificial Sequence
  ENSG00000188517_16 (sequence is synthesized)
ggggtcaaagggggatcgtggagaaaaaggggactctggagctcagggaccaaggggtccacctggtcaaaaaggggatcaaggagccactgagatcatagactacaacggcaacctcca

SEQ ID NO: 692369 - DNA, 120 bp, Artificial Sequence
  ENSG00000188517_17 (sequence is synthesized)
cgaagccttacagaggattaccaccttaactgtcacgggtccccctggacctcctggacctcaaggactacaagggccaaagggagagcagggatctccaggaatcccaggaatggatgg

SEQ ID NO: 692370 - DNA, 120 bp, Artificial Sequence
  ENSG00000188517_18 (sequence is synthesized)
agagcagggactcaaaggctcaaagggagacatgggggacccaggtatgacaggtgaaaaaggaggaattggacttcctggattaccgggagccaatggaatgaaaggagaaaaaggaga

SEQ ID NO: 692371 - DNA, 120 bp, Artificial Sequence
  ENSG00000188517_19 (sequence is synthesized)
ttctggaatgccgggtccacagggtccttctatcataggcccaccaggcccaccaggtccccatggcccacctggccccatgggacctcatggacttcctggaccaaagggtgaaccagg

SEQ ID NO: 692372 - DNA, 120 bp, Artificial Sequence
  ENSG00000188517_20 (sequence is synthesized)
gttaaatggtgttaaaggattgaagggtgaaccaggtcaaaagggtgacagaggaccccttggtcttccaggagcatctggcttagacggaaagccaggatcccggggtacagatggtcc

SEQ ID NO: 692373 - DNA, 120 bp, Artificial Sequence
  ENSG00000188517_21 (sequence is synthesized)
tatgggaccccatggccctgcaggtcccaaaggagaaagaggtgaaaaaggagctatgggagagcctggaccaagagggccctatgggctgcctgggaaagatggagagcctggtcttga

SEQ ID NO: 692374 - DNA, 120 bp, Artificial Sequence
  ENSG00000188517_22 (sequence is synthesized)
tggcttccctggtccacggggtgagaagggtgatctaggagaaaagggagaaaagggggaaaagggaaagaaaggcaaaaaggggcctaaaggggagaaaggagaacagggtgctcctgg

SEQ ID NO: 692375 - DNA, 120 bp, Artificial Sequence
  ENSG00000188517_23 (sequence is synthesized)
attagatgcaccctgcccgttggggccagatggcttacccatgcctggctgttggcaaaagtgatgaatctaacctttcaagcatgaagttgtgtatataagggtccatttttaatattt

SEQ ID NO: 692376 - DNA, 120 bp, Artificial Sequence
  ENSG00000188517_24 (sequence is synthesized)
atagttgaaaactgaattgcagattttacaagtctgagatatgtttacatagggctgcttcttcctgctggcagtagtatacatgtccatttttactccacttacatctgaaattgggca

SEQ ID NO: 692377 - DNA, 120 bp, Artificial Sequence
  ENSG00000188517_25 (sequence is synthesized)
atttgtgaaaccagtgagaatcctgcaaaaaatatagatcagtatctccttatcttatgtgaagatacgtatttatatggacaaatcagtggtagagaatgattgattgtactagctatt

SEQ ID NO: 692378 - DNA, 120 bp, Artificial Sequence
  ENSG00000188517_26 (sequence is synthesized)
ttccttcttttggcttgctaattgcatggacaaaaagtgccatgaaatagtttacatgaaatggtgaccaaatatggactcaaagctatgaaaatgtactatactgactgattttagagc

SEQ ID NO: 692379 - DNA, 120 bp, Artificial Sequence
  ENSG00000188517_27 (sequence is synthesized)
tgattatcacattcccattcacctttcatgtcggcgttgactcatacctacaccacccattgaaactaactaaaaaagcatgactgtgtgccaaacctgcttgctgtgcaacttcagatg

SEQ ID NO: 692380 - DNA, 120 bp, Artificial Sequence
  ENSG00000188517_28 (sequence is synthesized)
ctagcatgttgatcaggagtcctttgattacatctgaacctttattccttttgtcatctcaagggggttacaccatggcttattgccaaaaagagataaggtggcggagagcacacacac

SEQ ID NO: 692381 - DNA, 120 bp, Artificial Sequence
  ENSG00000188517_29 (sequence is synthesized)
aatttgtcttgtattttgagggagttgcagtcctgactgcagatctacagcttccagtattgtgggctcatgtggccactttggttgaaatacgaaggggttgagcctgttgctgccacc

SEQ ID NO: 692382 - DNA, 120 bp, Artificial Sequence
  ENSG00000188517_30 (sequence is synthesized)
agttttccttgggctgcccttggcagtgaagacatgggaagaggaccgattcagcctccagcactgcctctcatgtgaccaagtaggaaagaggtttacaaatgcaaacatgcagaacca

SEQ ID NO: 692383 - DNA, 120 bp, Artificial Sequence
  ENSG00000188517_31 (sequence is synthesized)
cagactttaaaaatatgtataaataaactgaatttcagcaagtgttaatataggtgcttttaaaaatgacagaggcacagcacttcttttggaataggagattcttggaatgggagatcc

SEQ ID NO: 692384 - DNA, 120 bp, Artificial Sequence
  ENSG00000188517_32 (sequence is synthesized)
tgtccctgagggaaaagggatgtccatcccaccaaaacttgggttgctgaagaaataacatgttctgagaagggatcagccaaaatcgcctctcccgatgatataggagagcttactggg

SEQ ID NO: 692385 - DNA, 120 bp, Artificial Sequence
  ENSG00000188517_33 (sequence is synthesized)
atgcttttttctttttctttctttagtcccaagaatattgaaaaaatattagtttcagtttttgtcacatatgttttgaacaatttttttaagaagtcttcaaatcataataatttggct

SEQ ID NO: 692386 - DNA, 120 bp, Artificial Sequence
  ENSG00000188517_34 (sequence is synthesized)
ccagtagtcaaaatgaccttttactaacttctctcttgttttggataattggatagaatataaaagaagctccactttcagtctaatcattgtaaagcatgaaagttatgcatttttaag

SEQ ID NO: 692387 - DNA, 120 bp, Artificial Sequence
  ENSG00000188517_35 (sequence is synthesized)
tagttttgactttttttacatgatgaatgtaacgtacatggagattatcagttaatataaagccaagattttgtcacatttggtaatattaactaatttctatttttatggttttaagtt

SEQ ID NO: 692388 - DNA, 120 bp, Artificial Sequence
  ENSG00000188517_36 (sequence is synthesized)
ttgtctatatttagatttctttctctttttaacatttctaaatgtttgtctcatcctcatatccacagaccaaatctaagatctcagaaagctgtgaaatatagttgccataaagaaaat

SEQ ID NO: 692389 - DNA, 120 bp, Artificial Sequence
  ENSG00000188517_37 (sequence is synthesized)
atttttcatctacttgctcaaactttacctaaccatattagatggaacatttctttgcacagtaaagagttggtagcgtgttttgaaatggcttattctaagtggaagtgttacattgaa

SEQ ID NO: 692390 - DNA, 120 bp, Artificial Sequence
  ENSG00000188517_38 (sequence is synthesized)
agaaacattatcaatgaggagtaggcaccctttcagcccattagagaatttaatttctctcctgactcaatgccatcttctgggaagatttctagtttcatgcataggtgtcaccaccag

SEQ ID NO: 692391 - DNA, 120 bp, Artificial Sequence
  ENSG00000188517_39 (sequence is synthesized)
aagggaaattaactcatccttggcttatagttaagatataaccataagacaaggaacctaaaatcctcatgatctcatttatgttatgtaaccaaatgacagtcatacaaaatggcatct

SEQ ID NO: 692392 - DNA, 120 bp, Artificial Sequence
  ENSG00000188517_40 (sequence is synthesized)
tcttttttttctattaaatttttaaggttgaaagatgtttaaactattagatcagtctaattggtaacatttctggtaacattccacacccctaagccagtttagcattttgaaaataat

SEQ ID NO: 692393 - DNA, 120 bp, Artificial Sequence
  ENSG00000188517_41 (sequence is synthesized)
ggaggacattttctaacaatttcttgtatggcatggtgttaggataacgtattgctcaatgtctgacacaatttgtcttaaatggtttggaaaaatgaactgaagtgggtggaactacat

SEQ ID NO: 692394 - DNA, 120 bp, Artificial Sequence
  ENSG00000188517_42 (sequence is synthesized)
tctcttcaggaaaacaaactacagtgtccagtggctatatttttttcccttctatctttttttctgctcctctagtagaaagaggtggattgaaatggatcactatttaaaacttgcaca

SEQ ID NO: 692395 - DNA, 120 bp, Artificial Sequence
  ENSG00000188517_43 (sequence is synthesized)
gcttcaggagacgatacctcaacatcaaaagaaaaacactttatgtataaaaaaattttttgaaatacagcccttcaaagaatactattctgtcctgtgtgtatattgagtttttgctct

SEQ ID NO: 692396 - DNA, 120 bp, Artificial Sequence
  ENSG00000188517_44 (sequence is synthesized)
ataactgatttgacaacatcaacttatttcatgattaaatgaggttgtaaactttcattacatttatttccttgggaaaaacaaagggatggaaatactcctccttgttcagtggaattg

SEQ ID NO: 692397 - DNA, 120 bp, Artificial Sequence
  ENSG00000188517_45 (sequence is synthesized)
ctaggtcttaaccatgatggataatctttaacttttggttactacaatgttttcaagcatccattttgtcatatagagaattcttaaataatttctaagtgaatgaaagaattgtgtttg

SEQ ID NO: 692398 - DNA, 120 bp, Artificial Sequence
  ENSG00000188517_46 (sequence is synthesized)
ttgatatgtgttgatagataatatactttccttaaagatttctttaatgtgtgttattggatagagggttgagaaaatatacatgaaagacacattggaaataaggcaaggtcagtttct

SEQ ID NO: 692399 - DNA, 120 bp, Artificial Sequence
  ENSG00000188517_47 (sequence is synthesized)
atttctaataaaacattgaaggatagcaaattgatatgtgttttagatttaaaattgtttttcatttatgttggttggtgctaatgtatctcttttcctttttctctatggacaatacaa

SEQ ID NO: 692400 - DNA, 120 bp, Artificial Sequence
  ENSG00000188517_48 (sequence is synthesized)
ctactatggataattttatttccctgtttaatagcattcctaaatcattagtgtgttattttatttttaaagttcatgaatttgctataattatggtccaatgaccaggctttcttaatg

SEQ ID NO: 692401 - DNA, 120 bp, Artificial Sequence
  ENSG00000188517_49 (sequence is synthesized)
taaaacaaaacagtgtaccaatagatgatgtgtgtttactcggatcatggatcctcctatttcatattcatttcatacatcatatgcctttatctactttcatgtgtctcatctttttca

SEQ ID NO: 692402 - DNA, 120 bp, Artificial Sequence
  ENSG00000188517_50 (sequence is synthesized)
ttcactcgtcttttagtttatatgatttgatgaaacatgacaaaactagcatcagagaagtctgcacacaccgtatagagtacctagtgcacaaatatacctaattttttctttcagttt

SEQ ID NO: 692403 - DNA, 120 bp, Artificial Sequence
  ENSG00000188517_51 (sequence is synthesized)
ttgtttttcattagcaaaagcagtcttggaggatttttttttctcatgtgattttatagaggacattagaatatctttaattcctaccagaagaaaggtcttgtttttgaatttacattc

SEQ ID NO: 692404 - DNA, 120 bp, Artificial Sequence
  ENSG00000188517_52 (sequence is synthesized)
tgtgcatacgatgttctgatgggacagcaagaacttacacatcaactagtttatactacatgtcctttgtctaactatctatctatatagacatatgtgctagtttagaaaattgtcaaa

SEQ ID NO: 692405 - DNA, 120 bp, Artificial Sequence
  ENSG00000188517_53 (sequence is synthesized)
tcagcatgtcagtaccaatggaaaaattgtctttgatatgttatatttttctcacttaggaaatgtgcttaatttccaagggtttttttttttaatgttactattgaagcatgaaaagtt

SEQ ID NO: 692406 - DNA, 120 bp, Artificial Sequence
  ENSG00000188517_54 (sequence is synthesized)
aacatcatttgttatcctttctttccccactatatattgtcttacccagagtagggctatactttggtggtgttttaacatcttctaataagtgatcataagcaacatacagatgctaat

SEQ ID NO: 692407 - DNA, 120 bp, Artificial Sequence
  ENSG00000188517_55 (sequence is synthesized)
atttgaaatcttgttttttcttacttcctaataatcaaattatattaatatttcacactacaaaaaaataggattttctaatttgtaaaaacaagagctcctgctatctcttggaagtta

SEQ ID NO: 692408 - DNA, 120 bp, Artificial Sequence
  ENSG00000188517_56 (sequence is synthesized)
agtccttaggaaccctatcttatctttctaaaaataataagtaagaacaatcacatgtgattctggctattaaaatcatacatccctagtggaattaacaagcttgaccaattatgatta

SEQ ID NO: 692409 - DNA, 120 bp, Artificial Sequence
  ENSG00000188517_57 (sequence is synthesized)
tgctaaattgttttaggctaggaggactgtcagtccctacttcttcccatttttcttgggatatctttatattggctagatttgttgccaatataaaattgacacagcagagacactcct

SEQ ID NO: 692410 - DNA, 120 bp, Artificial Sequence
  ENSG00000188517_58 (sequence is synthesized)
ctaacttaaatttttagtggagtttggtttttgctaaccccgtactaataaacactttaatgacttttttcatttcaaaatatttaaatgtataaaattgcctatgctgcttattgaaag

SEQ ID NO: 692411 - DNA, 120 bp, Artificial Sequence
  ENSG00000188517_59 (sequence is synthesized)
aaccgtccttttgggcataagaagactttttcaacctaaaccgttatgtgtgatttattaacaacttaacaaagaaagtaccaacatctctcaaaatgtagttgatattcttacctatct

SEQ ID NO: 692412 - DNA, 120 bp, Artificial Sequence
  ENSG00000188517_60 (sequence is synthesized)
cagaaatattaacgaattggattcacaaaagaatgtcttacatactgttgacatttatgtgaatattctttatactgttgtaaatgtttcattcaacttaataacattttaaaagatgta

SEQ ID NO: 692413 - DNA, 120 bp, Artificial Sequence
  ENSG00000188517_61 (sequence is synthesized)
aagatgtatgtatctgatttttctttagaaaatattatatttttatttgtattttttacattttaaagttcatctctatgtgcagctatttttatattgccaaaaactcacataaataca

SEQ ID NO: 692414 - DNA, 120 bp, Artificial Sequence
  ENSG00000188517_62 (sequence is synthesized)
gaaatatgcaaaaaaaaatattttggcaagcattacactgcatatttttttaaatgtttgtgggccagtctcatacaattgattattctaagaatgtgttgtgtcttatcactgtaaata

SEQ ID NO: 692415 - DNA, 120 bp, Artificial Sequence
  ENSG00000188517_63 (sequence is synthesized)
tggcacaaacctgtttatctcagtagtgtaaataattgaaagattgaattctccctgttcaatttttattttaatttccttgtaatttctccagctgacattactgtatcaaaagatgca

SEQ ID NO: 692416 - DNA, 120 bp, Artificial Sequence
  ENSG00000188517_64 (sequence is synthesized)
taagatttttgatttgcggtttggagataattgcattgtgttcagtttccagtttgtttttatttgctttttaaatttgttttcagggttcctagtttgtgagaagttgatcttcagaat

SEQ ID NO: 692417 - DNA, 120 bp, Artificial Sequence
  ENSG00000188517_65 (sequence is synthesized)
tagtttgtgagaagttgatcttcagaattatttttacactatttatgacttattttcataatgtaaaaagtgtgtaattattacaatattaatccaaacaatgataatgaattgtattgt

SEQ ID NO: 692418 - DNA, 120 bp, Artificial Sequence
  ENSG00000188517_66 (sequence is synthesized)
gagaagggtgatctaggagaaaagggagaaaagggattccgtggcgttaagggggaaaaaggggagccaggccagcctggcctggatgggctggatgccccttgccaattggggccagat

SEQ ID NO: 692419 - DNA, 120 bp, Artificial Sequence
  ENSG00000188517_67 (sequence is synthesized)
ggaaaaagatataattaaatatgatatgcagcttttcgtgtgtgcctttcattgaaacatgcagttatatacttcatcctttttgcatgagtttcttgaaaaccgctggcctgaaataat

SEQ ID NO: 692420 - DNA, 120 bp, Artificial Sequence
  ENSG00000188517_68 (sequence is synthesized)
ggctgcctggcttccctggtccacggggtgagaagggtgatctaggagaaaagggagaaaaggtgacctctccatcccagcatgtaccttgtttgattcttctcctgctgtctgctttgc

SEQ ID NO: 692421 - DNA, 120 bp, Artificial Sequence
  ENSG00000188517_69 (sequence is synthesized)
tgttcagcttgtgtgattccatttgacacttaatctttctccatcctgtgctccaaaaacatactgatgcctgatttaaggaatcaggtcttcagagaggaatgaagaaggctgtactgc

SEQ ID NO: 692422 - DNA, 120 bp, Artificial Sequence
  ENSG00000188517_70 (sequence is synthesized)
cagatataagggcactgcctggcatagaagaaaaaattattatcaccagatattctagctacagtttttcaaccacctgacaccaatttatggaaaaataaaggatttttgaaaaaaaaa

SEQ ID NO: 692423 - DNA, 120 bp, Artificial Sequence
  ENSG00000188522_0 (sequence is synthesized)
cgcccctccccgcgcggcccgccctccccgattgctcatgggcagagaagcagaggccgcggagaggcccccgagcgcgcggtgccccagctgggccggagctaggagctggaccttgcc

SEQ ID NO: 692424 - DNA, 120 bp, Artificial Sequence
  ENSG00000188522_1 (sequence is synthesized)
accttgcccacccacccccggcagcagtgcccgggcaggcggcgccatggccttctctcaggtgcagtgtctggacgacaaccatgtgaactggcgctccagcgagtccaagcctgagtt

SEQ ID NO: 692425 - DNA, 120 bp, Artificial Sequence
  ENSG00000188522_2 (sequence is synthesized)
cttctacagcgaggagcagcggctggcgctggaggccctggtggcccgcggccgggacgccttctacgaggtgctcaagcgggagaacatccgagacttcctctcggagctggagctcaa

SEQ ID NO: 692426 - DNA, 120 bp, Artificial Sequence
  ENSG00000188522_3 (sequence is synthesized)
gcgcatcctggagaccatcgaggtgtacgacccgggctctgaggaccctcggggcacgggcccctctcaggggcccgaggacaatggggtcggcgacggcgaggaagccagcggggcgga

SEQ ID NO: 692427 - DNA, 120 bp, Artificial Sequence
  ENSG00000188522_4 (sequence is synthesized)
tggggtccccatcgaggccgagccgctgccctccctggagtactggccccagaagtcggaccgctccatcccgcagctggacctgggctggcccgacaccatcgcctaccgcggcgtgac

SEQ ID NO: 692428 - DNA, 120 bp, Artificial Sequence
  ENSG00000188522_5 (sequence is synthesized)
ccgggctagcgtctacatgcagccccccatagacgggcaggcccacatcaaagaggtggtgcggaagatgatcagccaggcacagaaggtgatagctgtggtcatggacatgttcaccga

SEQ ID NO: 692429 - DNA, 120 bp, Artificial Sequence
  ENSG00000188522_6 (sequence is synthesized)
cgtggacatcttcaaggacctgctggacgccggcttcaagaggaaagtggccgtgtacatcatcgtggatgagagtaacgtcaagtacttcctgcacatgtgtgagcgggcctgcatgca

SEQ ID NO: 692430 - DNA, 120 bp, Artificial Sequence
  ENSG00000188522_7 (sequence is synthesized)
cctggggcacctcaagaatctcagagtgcggagcagcgggggaactgagttcttcacgcggtcggcaaccaagttcaagggtgccctggcccagaagttcatgtttgtggatggagaccg

SEQ ID NO: 692431 - DNA, 120 bp, Artificial Sequence
  ENSG00000188522_8 (sequence is synthesized)
ggctgtgtgcggctcctacagcttcacgtggtcggccgcgcggacggaccggaatgtgatctctgtgctgtctggccaggtggtggagatgtttgaccggcagttccaggagctgtacct

SEQ ID NO: 692432 - DNA, 120 bp, Artificial Sequence
  ENSG00000188522_9 (sequence is synthesized)
catgtcacacagtgtgagcctcaagggcatccctatggagaaggaaccggagccggagcctattgtgctgccctctgtggtccccctggtgcccgcgggcactgtggccaagaagctcgt

SEQ ID NO: 692433 - DNA, 120 bp, Artificial Sequence
  ENSG00000188522_10 (sequence is synthesized)
caaccccaagtacgcacttgtcaaggccaagagcgtcgacgagattgccaagatctcctctgagaagcaggaggccaagaagcccctggggctgaaaggcccagcgctggctgagcatcc

SEQ ID NO: 692434 - DNA, 120 bp, Artificial Sequence
  ENSG00000188522_11 (sequence is synthesized)
aggggaactccccgagctgctgccacccatccacccaggactgcttcacctggagagggccaacatgtttgagtacctgcccacgtgggtggagccagacccggagcctggcagcgacat

SEQ ID NO: 692435 - DNA, 120 bp, Artificial Sequence
  ENSG00000188522_12 (sequence is synthesized)
agccagatgaaccgcatcaagatccgtgacacctcccaggccagcgcccagcaccagctgtggaagcagagccaggacagcaggccccgtccagagccttgccctcccccagagcccagt

SEQ ID NO: 692436 - DNA, 120 bp, Artificial Sequence
  ENSG00000188522_13 (sequence is synthesized)
gccccccaggacggtgtcccagctgagaacggcctcccccagggggaccctgagccattgccccccgtgcccaagccccggacagtccctgtggcagatgtactagcccgggacagcagt

SEQ ID NO: 692437 - DNA, 120 bp, Artificial Sequence
  ENSG00000188522_14 (sequence is synthesized)
gatattggctgggtcctggagctccccaaagaggaagctccccagaatgggacagaccataggctacccaggatggcaggcccaggccacgccccactccagcggcagctatctgtgacc

SEQ ID NO: 692438 - DNA, 120 bp, Artificial Sequence
  ENSG00000188522_15 (sequence is synthesized)
caggatgaccccgagagcctcggggtggggctccccaatgggctggatggggtggaagaagaagatgatgacgactacgtaaccctcagtgaccaggacagccactcaggcagctccggc

SEQ ID NO: 692439 - DNA, 120 bp, Artificial Sequence
  ENSG00000188522_16 (sequence is synthesized)
cgtggccctggcccccgacggccctcagtggcttcctctgtgtcagaggagtacttcgaggtgagagagcactcagtccctctccggaggcgccactcagagcaagtggccaacgggcca

SEQ ID NO: 692440 - DNA, 120 bp, Artificial Sequence
  ENSG00000188522_17 (sequence is synthesized)
accccaccaccgcgccggcagctgagtgccccccatataacccgagggacctttgttggaccccagggtggctccccatgggcccagagtcggggaagagaagaagcagatgcgttgaag

SEQ ID NO: 692441 - DNA, 120 bp, Artificial Sequence
  ENSG00000188522_18 (sequence is synthesized)
aggatgcaggcccagcgctccacagacaaggaggcacagggccagcagtttcatcatcacagggtccctgcctcagggactagggataaagacggcttcccaggaccccctaggtaccgc

SEQ ID NO: 692442 - DNA, 120 bp, Artificial Sequence
  ENSG00000188522_19 (sequence is synthesized)
tctgctgctgacagcgtccagagctctaccagaaacgctggcccagccatggctggcccccaccactggcaggccaagggaggtcaggtaccccgcctgcttccggatcccggcagccca

SEQ ID NO: 692443 - DNA, 120 bp, Artificial Sequence
  ENSG00000188522_20 (sequence is synthesized)
agactggcccaaaatgcccgccccatgaccgatggcagggccaccgaggagcatccgagtcccttcggaatcccatactccaaactgtctcagtcgaagcacctaaaggccaggacgggc

SEQ ID NO: 692444 - DNA, 120 bp, Artificial Sequence
  ENSG00000188522_21 (sequence is synthesized)
ggtagccagtgggcctcatcggattctaaacggagggctcaagccccccgggaccgcaaagacccctagcagcatgtcccagcctggagccacaccttctgaggccccagcccagactca

SEQ ID NO: 692445 - DNA, 120 bp, Artificial Sequence
  ENSG00000188522_22 (sequence is synthesized)
tgacgcggagggcagacaggccgcctgggcctaccagagcccactgggacggcaggaaggtgggatgggcgggagacgttggcactcacctggtcggtgcaccagtaccaggtggccatg

SEQ ID NO: 692446 - DNA, 120 bp, Artificial Sequence
  ENSG00000188522_23 (sequence is synthesized)
atggtcaggccaaaggtcatcccggtccacggcaggtcccctgtgtgggggtctcgaaacatgtgcatggcgtctgtacgtggcaggtggcaggtggtgttggcaatggtcctggaggga

SEQ ID NO: 692447 - DNA, 120 bp, Artificial Sequence
  ENSG00000188522_24 (sequence is synthesized)
cccctgccttcatctcacaagaaacttcctgatgcatcaaacttgagttttttccacctcatctttcccagtgtttggaaaggtgtgagggtagagggttgtttttttttttaaggtgta

SEQ ID NO: 692448 - DNA, 120 bp, Artificial Sequence
  ENSG00000188522_25 (sequence is synthesized)
tttgaatgactattttattcgtatttaaaataatactattaagtaagcattttgcacatgggcaccccagtgtcccgctggcccagcaggagtcactgttggcctctggacactcatcgg

SEQ ID NO: 692449 - DNA, 120 bp, Artificial Sequence
  ENSG00000188522_26 (sequence is synthesized)
ccttgggcaagtggttctcagccaggtttccgattgtcgattcaaggaagcaaaagtaatttttcttgacatttgaggaccttcctgaggcttctaaagtgttcatcctgatcacctgaa

SEQ ID NO: 692450 - DNA, 120 bp, Artificial Sequence
  ENSG00000188522_27 (sequence is synthesized)
gggtgtgattttagcagagctgagagtggctggtggtgatgtggccccaccccctgaggcacagagaagagggagacaggtccagagagggatggggcctccaccaagaccatatagacc

SEQ ID NO: 692451 - DNA, 120 bp, Artificial Sequence
  ENSG00000188522_28 (sequence is synthesized)
atctggcgggctcaagccggggctttttcctctccagtccaaaacacctcactgttcctgtctacctcggggtcagggcccggcatggccaagccctggcccatctgtgtctgtgtcact

SEQ ID NO: 692452 - DNA, 120 bp, Artificial Sequence
  ENSG00000188522_29 (sequence is synthesized)
cccctcccttccagactgggcctggctgctgggatccctctcatgcggtgggtcccagggacactagagcccctggtctgagagggagaagcctggatgtaggaaaacccgtttccaccc

SEQ ID NO: 692453 - DNA, 120 bp, Artificial Sequence
  ENSG00000188522_30 (sequence is synthesized)
caggccctactccctagccttttccaagtgggacatggaagaggcagcctgctgcctggatgctggtctccccagcatcactgttcccatggagctcaggtcaggctctgtattcagacc

SEQ ID NO: 692454 - DNA, 120 bp, Artificial Sequence
  ENSG00000188522_31 (sequence is synthesized)
gagggtttgtgtgaggctcagagcaaatgaacaagtgccattcaagggttagaaactgctcagccacagggtcccagtgtctgagtctggaagagtctttagagatttgttcactctctg

SEQ ID NO: 692455 - DNA, 120 bp, Artificial Sequence
  ENSG00000188522_32 (sequence is synthesized)
agggatcctcctggctctgcttacatacttccagggacggtgagctcacgctctctccgggcagccctgtgagtttcctatctgttccagactagtatcgccaatctctcccagctctct

SEQ ID NO: 692456 - DNA, 120 bp, Artificial Sequence
  ENSG00000188522_33 (sequence is synthesized)
tctttcctccctggcctttgtcctgcaggaggtagcatcacctcttggcattttgtacatgcttttaaacaattggaggagctgcccaggcagttttatggcctcctggttgtgtgcctt

SEQ ID NO: 692457 - DNA, 120 bp, Artificial Sequence
  ENSG00000188522_34 (sequence is synthesized)
cacacccgcctacagccccacctcaccatcaagcgctgagccaatgcgggtgtggctggccctgagttcctgagtcagctccttgccagggccagagctggtaacagcggggcagcaggg

SEQ ID NO: 692458 - DNA, 120 bp, Artificial Sequence
  ENSG00000188522_35 (sequence is synthesized)
tgggtagcctctaccagccagggcagtccctgaggggccagcaggggggctgactgcctagtggctcaacctcctgaacccacccactcccagcgatgctacccagaaccccaacggcat

SEQ ID NO: 692459 - DNA, 120 bp, Artificial Sequence
  ENSG00000188522_36 (sequence is synthesized)
gaatcctgcacagtgccgggcagtgccagactccaaagggctcgctgtggggacagccccgccatggccacagactctgtcctcacctttgattgtcaggatgacagcccccaccaccat

SEQ ID NO: 692460 - DNA, 120 bp, Artificial Sequence
  ENSG00000188522_37 (sequence is synthesized)
gatgagcgtctgcagggcgtccgtgtagattacagcagccaggccccctgccagtggaagcaaggttgctggagggggccctggccccagggaggagggacacggggaggaacttctggg

SEQ ID NO: 692461 - DNA, 120 bp, Artificial Sequence
  ENSG00000188522_38 (sequence is synthesized)
gctcctgctggggccacttcctgggctgctccctcgggcctgtagggggaggtggccttctgacccctttacacgtcccctgggtggacctccctgctgcaggcaccatacctgcgatgg

SEQ ID NO: 692462 - DNA, 120 bp, Artificial Sequence
  ENSG00000188522_39 (sequence is synthesized)
tgtacagggctgtgatgccgagcgtgaggatggtggagaggtagaagttccagcccaggcagatgtgcacaaacagagcccccgcgtacaggtccagctgcggagggagagagccttgtg

SEQ ID NO: 692463 - DNA, 120 bp, Artificial Sequence
  ENSG00000188522_40 (sequence is synthesized)
tgggactgttattcccagggctccagcaagccactccctgggtgacctcgggcaaggccctctctgggcctcggtggcctgtggataaggaggggagacccccactcgcctgcctgcctg

SEQ ID NO: 692464 - DNA, 120 bp, Artificial Sequence
  ENSG00000188522_41 (sequence is synthesized)
catcacggggccattgtgaggttgggggaagacctggccgtggagctacaagcttgtgcggatgtcaggggacattactgttgctaataaagtccaaagtggccaatgcctttcccaaaa

SEQ ID NO: 692465 - DNA, 120 bp, Artificial Sequence
  ENSG00000188522_42 (sequence is synthesized)
acaaggtcccagaaccctgggtgccctgcagcctgggttcagtgcccggagcccgtcctacctgggaacaatgcgcggctgatcatgcccggcatgatgatcaggcccatggggagcatc

SEQ ID NO: 692466 - DNA, 120 bp, Artificial Sequence
  ENSG00000188522_43 (sequence is synthesized)
tcccaactggcttctgcccttaatcctaaccctggttattccggttcattggtcccaaggctgctgaggtgtgcgcagggctggagcacatctgcccgcctgtctgtctctggaggcagg

SEQ ID NO: 692467 - DNA, 120 bp, Artificial Sequence
  ENSG00000188522_44 (sequence is synthesized)
cagagaagggctttgtctgaggacgctgttgttccagcttggagatgtcaccggcctggaggtggggtgtggccaggccgtgccttcgcaagcctatgggggtcactctgagagccgtcc

SEQ ID NO: 692468 - DNA, 120 bp, Artificial Sequence
  ENSG00000188522_45 (sequence is synthesized)
ttagggatggggccagctctgtgggcaccaccacatggggcatggggtgggcgctgcccatggttacatgggggttggtggcagcatagacgcatggcagcagcggccaccacatgcaga

SEQ ID NO: 692469 - DNA, 120 bp, Artificial Sequence
  ENSG00000188522_46 (sequence is synthesized)
accccccacagtgtccagggccttcctgagctgcttagtgaatcctgtaccagcctgagaggagcacagtgccctgtcatttgcagaggtgggaatgggcttggtgcaaccaacttgctt

SEQ ID NO: 692470 - DNA, 120 bp, Artificial Sequence
  ENSG00000188522_47 (sequence is synthesized)
gacatccgactcagtctgaccccacagtatgcacctgctctctgcccccattcacttcttgatcccagggccctgtggccacagtctgaggcccagcggctatgggtgcacgggggctgg

SEQ ID NO: 692471 - DNA, 120 bp, Artificial Sequence
  ENSG00000188522_48 (sequence is synthesized)
ttctgggctaccatgtccctgactctgatgacttcaattcccttgttacagatggggaaacttgatgaacaggcaggggtgggaaccggccagggccatatggaaggccatcattaatgc

SEQ ID NO: 692472 - DNA, 120 bp, Artificial Sequence
  ENSG00000188522_49 (sequence is synthesized)
tggggactcttggtcccagcatcctgaaaaggcaacctaagaaaatgcacgtttccccacctagaggtctccaaagcctgtggttagaggatcttgatggcacctgccagatgggtggca

SEQ ID NO: 692473 - DNA, 120 bp, Artificial Sequence
  ENSG00000188522_50 (sequence is synthesized)
cagtccctagtttgcagatgaggaaaaggcggggcacagggacgttcatttacagccttgaggtcacacagcagtaagtgatacctgtccagaccttgtgccaagccacatccatgttaa

SEQ ID NO: 692474 - DNA, 120 bp, Artificial Sequence
  ENSG00000188522_51 (sequence is synthesized)
gagcccgccttggcatggttcaggtcccgggctgacagtgatcgctgcacgatgacctgggggtggagtgcgagacggggtgagtccaagcctgagggacacttgtgtcaggattggtcc

SEQ ID NO: 692475 - DNA, 120 bp, Artificial Sequence
  ENSG00000188522_52 (sequence is synthesized)
ttggtgggcctcagggaatgggcatgaggcacgatgatgtcccattagcctctgacctgcccaaaacagccacactcaaagccccaatactgtcagggtcccaccaggagagctcacttc

SEQ ID NO: 692476 - DNA, 120 bp, Artificial Sequence
  ENSG00000188522_53 (sequence is synthesized)
agcaggccaagcagcgagagccgaggtacactcattcccagggactcagtcccctgacctgtcaataggggaggtgtggatcctgcccagcccaccacccctggcaattgtcagggctgg

SEQ ID NO: 692477 - DNA, 120 bp, Artificial Sequence
  ENSG00000188522_54 (sequence is synthesized)
aggagaccctgggtggggtggtatggggacatacacccctaccctcatctcctggaccctcatgacagcagctggcacatttatagtgccaggagcagacactggcgccaactgtgtttg

SEQ ID NO: 692478 - DNA, 120 bp, Artificial Sequence
  ENSG00000188522_55 (sequence is synthesized)
catggctggcagagttcaggtgctttaagacctggggttttgaaagcttgcagttcagtagcagagggaggctagaagctatctgaggacaccggcccttctgggagccttcagcaaatc

SEQ ID NO: 692479 - DNA, 120 bp, Artificial Sequence
  ENSG00000188522_56 (sequence is synthesized)
ctaaccaggcctttccagatttgcagaatgggaggagggagcggtaatttggacccataatgtctgagatctctcccagcactgatattacgattctacttcaaaagagttacttttttt

SEQ ID NO: 692480 - DNA, 120 bp, Artificial Sequence
  ENSG00000188522_57 (sequence is synthesized)
tacaagcgtgagccaccgtgcccagcccaaaagagttactttttaaacagctttattgagatattcacagaccatataattcacccaaagtgtacactgttcccatggtttttagtacgt

SEQ ID NO: 692481 - DNA, 120 bp, Artificial Sequence
  ENSG00000188522_58 (sequence is synthesized)
atggtttttagtacgttcacaaagttgtacgacctatgactctgaaacgtaactagttttcctttgcggttccacagtttaagtcaccagctgcaactcaggagcaggaagcctctatga

SEQ ID NO: 692482 - DNA, 120 bp, Artificial Sequence
  ENSG00000188523_0 (sequence is synthesized)
gcgcccaaaccagcccgcgggccggctccccggcgacctcaaggatgccagaggccaggagctccggcccggacctcacgcgatggaggaagcagcagcagcctgtgcgccgcacggtca

SEQ ID NO: 692483 - DNA, 120 bp, Artificial Sequence
  ENSG00000188523_1 (sequence is synthesized)
gccaggtctgcccgcccccgcggcggcccctgaccgtggcggacatccgttccggcatggagaacgagcggctgggggtcgtgcgggactccatgtttcagaaccctctcatcgtcaagg

SEQ ID NO: 692484 - DNA, 120 bp, Artificial Sequence
  ENSG00000188523_2 (sequence is synthesized)
ctgaactcggcaagccccgggaaagaagctacagtctgcccggcattaattttaattatggactctacatccgagggcttgacggaggagtccctgaagccatcggacgctggaacgtgt

SEQ ID NO: 692485 - DNA, 120 bp, Artificial Sequence
  ENSG00000188523_3 (sequence is synthesized)
tcaagcagcagcccacctgcccccacgagctgacccggaattatatcgcaatgaaccgcggggcggtgaaagccggcctggtgactgcccgggagaacttgctctaccgtcagctcaatg

SEQ ID NO: 692486 - DNA, 120 bp, Artificial Sequence
  ENSG00000188523_4 (sequence is synthesized)
acatccgcatcagtgaccaggatgaccggcgcatgaagaaagagccgccccctctccctccaaacatgacatttgggatccgggcacggccttccacacccttctttgatctgctgcagc

SEQ ID NO: 692487 - DNA, 120 bp, Artificial Sequence
  ENSG00000188523_5 (sequence is synthesized)
accggtacctgcagctgtgggtacaggaacaaaaggccacccagaaagccatcaaactggagaagaagcagaaggtggtccttgggaagctgtatgagacccggagcagtcagctgagga

SEQ ID NO: 692488 - DNA, 120 bp, Artificial Sequence
  ENSG00000188523_6 (sequence is synthesized)
tccccacggaggccgatcgccagagagcattaaaagcccaccgggaagagtgtgccgtgcgccaggggaccctgcggatgggcaactacacccacccctagcccctccctcccctgccac

SEQ ID NO: 692489 - DNA, 120 bp, Artificial Sequence
  ENSG00000188523_7 (sequence is synthesized)
aagaagccatcttgacatagtggaaaattcccagaaggactccctatcttgccccaaccctgacattcccccatttttatgcaggttctgcttcaaggagctcagattcaagtcttaggc

SEQ ID NO: 692490 - DNA, 120 bp, Artificial Sequence
  ENSG00000188523_8 (sequence is synthesized)
taattgtttttggtaaaagtccccccttttaggttagccaacattagtctccacttagccccagtgaccctctacctggagcctcctcctctcctcctccttctcctcctagggcaggct

SEQ ID NO: 692491 - DNA, 120 bp, Artificial Sequence
  ENSG00000188523_9 (sequence is synthesized)
caccctgcctcttctcaagccctcacctgccaagacaagcccaaattacaagacaattttttagactccaggctaagggtcgattccatggctctgcccattaagtgttaagaacgacct

SEQ ID NO: 692492 - DNA, 120 bp, Artificial Sequence
  ENSG00000188523_10 (sequence is synthesized)
gtgtatttgctgcagaaagcatgacagtgacgtgctttgaaagccctcattttctattccaaacatgagttttaattgctctttttgggatgcctgatgtctcatcacggcagtattatc

SEQ ID NO: 692493 - DNA, 120 bp, Artificial Sequence
  ENSG00000188523_11 (sequence is synthesized)
tctctgggacctctgacagcaggaagagccaatggttcattactcgagcctgcccccgcctcctcagtgctggggccccgtcaatcaagcaggccaagttggactcctcccccaggactg

SEQ ID NO: 692494 - DNA, 120 bp, Artificial Sequence
  ENSG00000188523_12 (sequence is synthesized)
actttggaaggtcaacccactctggaaaaagccttccaggccagcgggtagactgctgaacacaggctgctgagcttctcagccgaattcctggacacttcctcactcggtctttccgtg

SEQ ID NO: 692495 - DNA, 120 bp, Artificial Sequence
  ENSG00000188523_13 (sequence is synthesized)
tgaggatcccgcggggctcctgcattgctccggggctctttgcgatgaggggccggcgcgagcggggcgcgcctggctccggaggggtcctggcatctgagtttccccctcaggatcccg

SEQ ID NO: 692496 - DNA, 120 bp, Artificial Sequence
  ENSG00000188523_14 (sequence is synthesized)
agaagcaacataactaactcccgtgaacccactacctggatttagcacgctaaccatctggccgctttcgcttctgatcctttcctttaatattgaagaaataaaacgtgtcaaacacaa

SEQ ID NO: 692497 - DNA, 120 bp, Artificial Sequence
  ENSG00000188529_0 (sequence is synthesized)
gaggctcggccgcctgagccgcggacggtttgctgagcccgttagtgcgcccggccgagacacgccgccgccatgtcccgctacctgcgtccccccaacacgtctctgttcgtcaggaac

SEQ ID NO: 692498 - DNA, 120 bp, Artificial Sequence
  ENSG00000188529_1 (sequence is synthesized)
gtggccgacgacaccaggtctgaagacttgcggcgtgaatttggtcgttatggtcctatagttgatgtgtatgttccacttgatttctacactcgccgtccaagaggatttgcttatgtt

SEQ ID NO: 692499 - DNA, 120 bp, Artificial Sequence
  ENSG00000188529_2 (sequence is synthesized)
caatttgaggatgttcgtgatgctgaagacgctttacataatttggacagaaagtggatttgtggacggcagattgaaatacagtttgcccagggggatcgaaagacaccaaatcagatg

SEQ ID NO: 692500 - DNA, 120 bp, Artificial Sequence
  ENSG00000188529_3 (sequence is synthesized)
aaagccaaggaagggaggaatgtgtacagttcttcacgctatgatgattatgacagatacagacgttctagaagccgaagttatgaaaggaggagatcaagaagtcggtcttttgattac

SEQ ID NO: 692501 - DNA, 120 bp, Artificial Sequence
  ENSG00000188529_4 (sequence is synthesized)
aactatagaagatcgtatagtcctagaaacagtagaccgactggaagaccacggcgtagcagaagccattccgacaatgatagattcaaacaccgaaatcgatctttttcaagatctaaa

SEQ ID NO: 692502 - DNA, 120 bp, Artificial Sequence
  ENSG00000188529_5 (sequence is synthesized)
tccaattcaagatcacggtccaagtcccagcccaagaaagaaatgaaggctaaatcacgttctaggtctgcatctcacaccaaaactagaggcacctctaaaacagattccaaaacacat

SEQ ID NO: 692503 - DNA, 120 bp, Artificial Sequence
  ENSG00000188529_6 (sequence is synthesized)
tataagtctggctcaagatatgaaaaggaatcaaggaaaaaagaaccacctagatccaaatctcagtcaagatcacagtctaggtctaggtcaaaatctagatcaaggtcttggactagt

SEQ ID NO: 692504 - DNA, 120 bp, Artificial Sequence
  ENSG00000188529_7 (sequence is synthesized)
cctaagtccagtggccactgatagtataaaccatggtcatttttaggcatgtatcattcatttactcatagtttggtttacttaaattatcaggaatacaatgttgcaatgatgcttaaa

SEQ ID NO: 692505 - DNA, 120 bp, Artificial Sequence
  ENSG00000188529_8 (sequence is synthesized)
aaacacttgttagttttccctgtaccaggcaatggttataattaaaatgatatgctgttgagaagccactcttaagagtccagtttgtttaatgttatgggcagctaccaatttgtggtg

SEQ ID NO: 692506 - DNA, 120 bp, Artificial Sequence
  ENSG00000188529_9 (sequence is synthesized)
tctctgtatatttttgtaaagattctcattttttatgcttgaagtatttggtgaaaagatgttggttgaccataatttgcaacattgtctcattaaaaataaactttcatattcatattt

SEQ ID NO: 692507 - DNA, 120 bp, Artificial Sequence
  ENSG00000188529_10 (sequence is synthesized)
ggtagaactgttaacctagaaatgtagcttgctaataagatagaatgatacaaaagtgaagtagtagccacagtacaacactgactgctcagacacatttaggttcagggtggaccttta

SEQ ID NO: 692508 - DNA, 61 bp, Artificial Sequence
  ENSG00000188529_11 (sequence is synthesized)
ctgactgctcagacacatttaggttcagggtggacctttatgtcttgtcaagatgtctagg

SEQ ID NO: 692509 - DNA, 80 bp, Artificial Sequence
  ENSG00000188529_12 (sequence is synthesized)
cggatgtctaggccaatgataattatttttgatgcagtgtggattagttcttttgttaaccccactgtcttggggaatga

SEQ ID NO: 692510 - DNA, 120 bp, Artificial Sequence
  ENSG00000188529_13 (sequence is synthesized)
ggattagttcttttgttaaccccactgtcttggggaatgatgccagctgggaaattgagtttttgactgaaacatggagccttcactgctttttttctggttcctatgaagatttggaac

SEQ ID NO: 692511 - DNA, 120 bp, Artificial Sequence
  ENSG00000188529_14 (sequence is synthesized)
atagaaaacacaaaaactcaccttaaaatttgagcaggtcgttgatggcaaaaataattttaaggaaaaaggaatattcttatgtagttattctaaagtttaaggagcgttgttgaccat

SEQ ID NO: 692512 - DNA, 120 bp, Artificial Sequence
  ENSG00000188529_15 (sequence is synthesized)
aatattgcttagttttcttactgctgttaagtaagtaaattgtttcaaagtaggttttgtgtgtgtgtgcctagtgtaaaagaactgaaattttgatgcttacagcacttggctcgtgca

SEQ ID NO: 692513 - DNA, 120 bp, Artificial Sequence
  ENSG00000188529_16 (sequence is synthesized)
tttgtatcaaaatttgcctgcctctttatgagggaggcctgcttttcacacctcagtttatttaatacgaggcaagttgtaagacaacactcattctaggtgattctgtggtgccatgaa

SEQ ID NO: 692514 - DNA, 120 bp, Artificial Sequence
  ENSG00000188529_17 (sequence is synthesized)
atttaaggtaatttggggaaaaggattagtcagttttaagcaagagtcacatcttttgagctttcgattatcagtgtagtacctgactaaaaatgaagtaatacccttaaaccatttata

SEQ ID NO: 692515 - DNA, 120 bp, Artificial Sequence
  ENSG00000188529_18 (sequence is synthesized)
atttctagtatttctctgaaagatcgttttggggacaaaagtgacttgacatgtccaatttcatttcagaataaaaagctagcatctttaaaaatctcagattgcttgcttacagataca

SEQ ID NO: 692516 - DNA, 120 bp, Artificial Sequence
  ENSG00000188529_19 (sequence is synthesized)
agtacgaattatggacaaacgattccttttagaggattacttttttcaatttcggttttagtaatctaggctttgcctgtaaagaatacaacgatggattttaaatactgtttgtggaat

SEQ ID NO: 692517 - DNA, 120 bp, Artificial Sequence
  ENSG00000188529_20 (sequence is synthesized)
gtgtttaaaggattgattctagaacctttgtatatttgatagtatttctaactttcatttctttactgtttgcagttaatgttcatgttctgctatgcaatcgtttatatgcacgtttct

SEQ ID NO: 692518 - DNA, 120 bp, Artificial Sequence
  ENSG00000188529_21 (sequence is synthesized)
ttaatttttttagattttcctggatgtatagtttaaacaacaaaaagtctatttaaaactgtagcagtagtttacagttctagcaaagaggaaagttgtggggttaaactttgtattttc

SEQ ID NO: 692519 - DNA, 120 bp, Artificial Sequence
  ENSG00000188529_22 (sequence is synthesized)
tttcttatagaggcttctaaaaaggtatttttatatgttctttttaacaaatattgtgtacaacctttaaaacatcaatgtttggatcaaaacaagacccagcttattttctgcttgctg

SEQ ID NO: 692520 - DNA, 120 bp, Artificial Sequence
  ENSG00000188529_23 (sequence is synthesized)
taaattaagcaaacatgctataataaaaacaaaatgaaggaaataatgattaactggaattattacagtattgaatatgattctaaaataacaatggaaacagtcctttatagatttagg

SEQ ID NO: 692521 - DNA, 120 bp, Artificial Sequence
  ENSG00000188529_24 (sequence is synthesized)
aatattttaaatcattgttgcactaggcacaactaacttttactttggaaatgatagaacttgccagaaaggtacatcttttacacagtagttaaaaattcattgtgtaatatcaaagtt

SEQ ID NO: 692522 - DNA, 120 bp, Artificial Sequence
  ENSG00000188529_25 (sequence is synthesized)
gtttcatgattgctcattaagcctcttgggttaactaacttaagaggttatttggtagtgttaagatgaaatttggatcagctaattccaagtttatattttcattattggatggatcag

SEQ ID NO: 692523 - DNA, 120 bp, Artificial Sequence
  ENSG00000188529_26 (sequence is synthesized)
taattctgctctccctcttataaacaagacgcattagggcttaacgtttatgacatgattttaaatcattttaaattgaatgttgatgagcaactaatattaagtgataacctctttggg

SEQ ID NO: 692524 - DNA, 120 bp, Artificial Sequence
  ENSG00000188529_27 (sequence is synthesized)
gaagtaggttaggtattttgtggtttgaattctatctactttatgacaattatagctaatttattaagtattcatgatgtgccagacacttgaaaaggctatgtgttaactcactcttca

SEQ ID NO: 692525 - DNA, 120 bp, Artificial Sequence
  ENSG00000188529_28 (sequence is synthesized)
caaaaccttatgagaaagatacttttattttccccatatcacagataaggaaactgaggcacaaagaaaagactgtaaggcagagccaggatttaagcccaggcctggtcccttagtttt

SEQ ID NO: 692526 - DNA, 120 bp, Artificial Sequence
  ENSG00000188529_29 (sequence is synthesized)
gggggggttttgtttgttttacagactataatttgagagaagtagattgaggagatagctcattgaaattgttcattttctgtatagaactagaaggcctaatttcatttttatttttac

SEQ ID NO: 692527 - DNA, 120 bp, Artificial Sequence
  ENSG00000188529_30 (sequence is synthesized)
tgaacccatggtagtttggatcctactgatacttgatgaggatctttacgtagtgttttatgttagttttgggtgatgtagttgagtcccccacttactgagtttacctactgtgtatga

SEQ ID NO: 692528 - DNA, 120 bp, Artificial Sequence
  ENSG00000188529_31 (sequence is synthesized)
ctgggctcaatgataaatagaatggttatatcaacactcaaatgagggctgacacacttcacctctccttttacttaagatctctctgcattttttttttttttttgaagccaagtaagc

SEQ ID NO: 692529 - DNA, 120 bp, Artificial Sequence
  ENSG00000188529_32 (sequence is synthesized)
aagaagaaaaatgagagataatgcttcagtgagagaggaaaggtgctacatagagtatgagctgttaagttacatcccaggggaaagacctgggaactattgtattattctcttgaaaat

SEQ ID NO: 692530 - DNA, 120 bp, Artificial Sequence
  ENSG00000188529_33 (sequence is synthesized)
ttggcccagtaagctgctacatccagttcaactaacaaaatcctgtataccacagagaagaataaaggaaaccaaactgacaaacatccttcttttatttaagaccaaactgcagctgga

SEQ ID NO: 692531 - DNA, 120 bp, Artificial Sequence
  ENSG00000188529_34 (sequence is synthesized)
atacccagtacagttctgcttactacacttcaagaaagatctgaaagcggaaaaagaaccaaagaagggcagttcaagcgaccaaagggtgggtggaaggtgctgcagtatgaatactgt

SEQ ID NO: 692532 - DNA, 120 bp, Artificial Sequence
  ENSG00000188529_35 (sequence is synthesized)
acgaatattttgactctggtctgaaaagataaaagaatgttatcgaaaactacatggaataattgaagtcccttcaagtttgaaagtaagcattttaggacaaataaaaggaaattcaac

SEQ ID NO: 692533 - DNA, 120 bp, Artificial Sequence
  ENSG00000188529_36 (sequence is synthesized)
tttgtacttgtggaaactaatccctaaatatgaataggtttatattgattcatgggtaacaggtccataataaattattggaaactaggatgtctgaatatcaaggaagacagccatagt

SEQ ID NO: 692534 - DNA, 120 bp, Artificial Sequence
  ENSG00000188529_37 (sequence is synthesized)
ctcttacagtgcctctgttggtctgtctcaaactgaattgggtgggaaaaggtatggtccaatataaaagttccatttttgccattattggcaaatcttgcctttgtttattttggtgcc

SEQ ID NO: 692535 - DNA, 120 bp, Artificial Sequence
  ENSG00000188529_38 (sequence is synthesized)
agtgttttctgcttaatcatttgctttgttggcatctgtgtttatttacttgtacaccacatgcagtttacatctgtcttaactactccttcccaggtaaattccaattatatttgacat

SEQ ID NO: 692536 - DNA, 120 bp, Artificial Sequence
  ENSG00000188529_39 (sequence is synthesized)
ccagctaagagggcccatctcttctcacctctttcctagtcagtatattcagcaaatatttattgagcccttactgtgggcaaatcattgtactggataattgagaaaaatagataattc

SEQ ID NO: 692537 - DNA, 120 bp, Artificial Sequence
  ENSG00000188529_40 (sequence is synthesized)
ccttattcagtaaatgtctactgagcacaatctagtgaatcattacagtatggcctcattgttttgtttgaggtgtgttattcataacaatattttacaccattcgtatcaatgtaatta

SEQ ID NO: 692538 - DNA, 120 bp, Artificial Sequence
  ENSG00000188529_41 (sequence is synthesized)
tagaacacaatatacgatcaaggataagtaattgtgtggttatctgccatttaaaagtatccagtatttgatcacattattataaataatgaaaaaatgatttaatctgtaataaactgg

SEQ ID NO: 692539 - DNA, 120 bp, Artificial Sequence
  ENSG00000188529_42 (sequence is synthesized)
tttattgtgcagtgactgtaatatactagagttataataaattgtttactctgcctcaccaaacacatgctaggatataacccccaaaataagtatttaactttgcattaggtataaagg

SEQ ID NO: 692540 - DNA, 120 bp, Artificial Sequence
  ENSG00000188529_43 (sequence is synthesized)
agactgggtgctataattagattattttgaggcagacagagagctgttatcctaactgatttagtatgttctgtaattgagaaaatgttcaccaaattatactttttagtgatttacatg

SEQ ID NO: 692541 - DNA, 120 bp, Artificial Sequence
  ENSG00000188529_44 (sequence is synthesized)
tacattttataggggacatgttctgtgtatagcgaataaataacttttatagtatcacaaaatgttttggattccttagtttcttattaggatatgatgtttctttacctatacattgat

SEQ ID NO: 692542 - DNA, 120 bp, Artificial Sequence
  ENSG00000188529_45 (sequence is synthesized)
ttcatcacatttgatttttgtcatcttttttgccacatacttaaaattttccatataaaattaactaaaaatctggaagtggaatttaagcttttaatttgtagcaattttgaaaatata

SEQ ID NO: 692543 - DNA, 120 bp, Artificial Sequence
  ENSG00000188529_46 (sequence is synthesized)
gcagaggtatattttcaagggaggtgtgaaatggaggtattattgtttgtattttattttagaaattttgtttgaacttgcccaagatcacacagcaagtgtcagatcctaggttacagc

SEQ ID NO: 692544 - DNA, 120 bp, Artificial Sequence
  ENSG00000188529_47 (sequence is synthesized)
ccataatttttcacttgtttcatcttttgttaccatgtttgttgtttaatccaatggggaagtgtttttatagctttattttcatggagatagtaacattgatataatgggatctagaat

SEQ ID NO: 692545 - DNA, 120 bp, Artificial Sequence
  ENSG00000188529_48 (sequence is synthesized)
ttacttagagtcaaagtgactagatttaattacaaaaagtattttgttgtataccgttatacactcattaacataggggttcttatggacagaggttctatgtatttttaaaagaatatg

SEQ ID NO: 692546 - DNA, 120 bp, Artificial Sequence
  ENSG00000188529_49 (sequence is synthesized)
tagaggctatagacttttttgccctctacctcccttctccatttccttttgaagttaagacatttaagggggagaattaaggtgcatattgagttggggttttgtttaaaaaaaattagg

SEQ ID NO: 692547 - DNA, 120 bp, Artificial Sequence
  ENSG00000188529_50 (sequence is synthesized)
taaatacatatataactacaataacaacagttggtagttctctaaaatatttaattatggtaaatcagaaaaggccctttaatttttgcatctgttgaatgaattgctttaggatctctt

SEQ ID NO: 692548 - DNA, 120 bp, Artificial Sequence
  ENSG00000188529_51 (sequence is synthesized)
ctgtggttgtttctctctatactgaatgctgtcaatattattgagcacttactgtgccgaaccatgtgcttttcaaatatttctatttaatcctaaaaacactcctgggaaatgggtatt

SEQ ID NO: 692549 - DNA, 120 bp, Artificial Sequence
  ENSG00000188529_52 (sequence is synthesized)
attcccattttacagatgagaaaattgtcctttgtagaatacccatcatgtgatagcttcttgcatattatgctattcatttctcacaaccttacaaggtaaatggataatgttcctgga

SEQ ID NO: 692550 - DNA, 120 bp, Artificial Sequence
  ENSG00000188529_53 (sequence is synthesized)
tgagagattaaacgtactcgaagatcttatggttgtgtggctcagagactctaagcatggctttccaaatctcattctcttgtagagattttccattgtattgcattttgaccatgttcc

SEQ ID NO: 692551 - DNA, 120 bp, Artificial Sequence
  ENSG00000188529_54 (sequence is synthesized)
tgtttacaaaacctaagattatattctgaagtatctgtgacttgagtgatagctcaggaataatctgagggcattctattaggaaggaggactagcaaagcctatagttagcctatccta

SEQ ID NO: 692552 - DNA, 120 bp, Artificial Sequence
  ENSG00000188529_55 (sequence is synthesized)
ggcatgaactattctcattttagataggatgacttgataaataggatgaagtgagcaacctgtttgtcttcggttattgctatctacaagacattctgctagtcactgtggaaaagtttc

SEQ ID NO: 692553 - DNA, 120 bp, Artificial Sequence
  ENSG00000188529_56 (sequence is synthesized)
cttctcttgggttttttcctcttccccttcctcttaacagtgttggttatctttattatgtttctgtgtatttgtaacagctgtttcacccttgtattgcataatggggatttttcttgg

SEQ ID NO: 692554 - DNA, 120 bp, Artificial Sequence
  ENSG00000188529_57 (sequence is synthesized)
aataaaaagtgaggcatgtaaattcattgagaactaaccgtagtttgtaaagaagtaaaaggcctttgtatctagttttttgcagatcacatttctttgaatgctggaaagtgaaataaa

SEQ ID NO: 692555 - DNA, 120 bp, Artificial Sequence
  ENSG00000188529_58 (sequence is synthesized)
ctggtctaggagccaaaaataaatcttgggtttttttaagattttgctcttagatttgtaaccacctgggtacaactttttcctaatttgtgtaagaggttttagagatgcactctgtcc

SEQ ID NO: 692556 - DNA, 120 bp, Artificial Sequence
  ENSG00000188529_59 (sequence is synthesized)
ctcttgctttacaaattgcctacaagaatgcaaccaaaatactagaaactgaaacttacacaaaacctttcaggttttttcctgtgttgtagttctagggaagaggatagtttattagta

SEQ ID NO: 692557 - DNA, 120 bp, Artificial Sequence
  ENSG00000188529_60 (sequence is synthesized)
tttattttaagcttaaggataggttttggacctggattccatcatagtataactgccatcgaaaagaagacaaattgaaattacagcatttacctaaggttcacagtatggctgacttca

SEQ ID NO: 692558 - DNA, 120 bp, Artificial Sequence
  ENSG00000188529_61 (sequence is synthesized)
gcagccttacatggtaagttctctgtaccagctatttttggttctcgcaattgcatcgacttgggaaattcctatcaccattctctatataggctaaccaaaacttttatcagtaccttt

SEQ ID NO: 692559 - DNA, 120 bp, Artificial Sequence
  ENSG00000188529_62 (sequence is synthesized)
accacggcgtagcagaagccattccgacaatgataggtaaataactttgctttgaaaaagactcatgtattttttaatttcagagtgaacttttgctctaaaaataacaaatttgattaa

SEQ ID NO: 692560 - DNA, 120 bp, Artificial Sequence
  ENSG00000188529_63 (sequence is synthesized)
tatagaatctaatttttactctaattatatctctcctctgttttgaaagattcaaacaccgaaatcgatctttttcaagatctaaatccaattcaagatcacggtccaagtcccagccca

SEQ ID NO: 692561 - DNA, 120 bp, Artificial Sequence
  ENSG00000188529_64 (sequence is synthesized)
gtttatagaatgtaaagctgtacagttatggcgaccccaaagagaaagcatgaaagaacctttagagtagagttcaacacttaaggcaagtagacaagccaaagacctcttaaggatcag

SEQ ID NO: 692562 - DNA, 120 bp, Artificial Sequence
  ENSG00000188529_65 (sequence is synthesized)
gcttgaagagaagggagagtttgggaaaagaaaaaataaagaaaagctggaagaaggacaagcctaatgggagacaaagcctcgctttatctacaaaagggggaaaaggttgtttttcaa

SEQ ID NO: 692563 - DNA, 120 bp, Artificial Sequence
  ENSG00000188529_66 (sequence is synthesized)
agttaaagataaagccatctgtcatatttggccaagcatctcatgacaagtccttctgacaagcacttaaagagttaaaggtcaagatgaagttgaatgatggccaagattaaaggagtc

SEQ ID NO: 692564 - DNA, 120 bp, Artificial Sequence
  ENSG00000188529_67 (sequence is synthesized)
agcacagtgatctgtttaaaaaatgtatttgttagcatttaatttttttttactattttgtatacttttaattatatacattgaatgtttcattgagacaaaaaatactgtagcatttta

SEQ ID NO: 692565 - DNA, 120 bp, Artificial Sequence
  ENSG00000188529_68 (sequence is synthesized)
cagaaggccttctccctggtataggtacctaactgggacctatgggagactggtccctgacccagagtttcaggtgaccttacttccgttcctttcagtgagatcatctccctgcaacaa

SEQ ID NO: 692566 - DNA, 120 bp, Artificial Sequence
  ENSG00000188529_69 (sequence is synthesized)
gtgctctttggagtagcgtggggttctggggttaagccacagagccctgcttaaaggagagacaggtgcatgcactggggactacttagaaacagctctggtggtcttgtagggtcagaa

SEQ ID NO: 692567 - DNA, 120 bp, Artificial Sequence
  ENSG00000188529_70 (sequence is synthesized)
ccactagaaattttgtttatatatagattttaaagtggttgctggggacacatataaacccttaacttctttaacttagccctgtgaagactgctggccctgcgctgctttagcacaatg

SEQ ID NO: 692568 - DNA, 120 bp, Artificial Sequence
  ENSG00000188529_71 (sequence is synthesized)
ggaaaagccaaaaactactcctgcagggccagtgatcaaggacagttgtgagaattggttgcaaagctccattacagagaaaataatagctatatctggcttagtaaataaaggtagcag

SEQ ID NO: 692569 - DNA, 120 bp, Artificial Sequence
  ENSG00000188529_72 (sequence is synthesized)
tgcgttctggcttacaacatagacctcattttacctagtgttgggtggccgaggaatcaaggtcagtagtagtttgattcaagagtgtgtgatatttgaggcaaaaaaggctagtaattc

SEQ ID NO: 692570 - DNA, 120 bp, Artificial Sequence
  ENSG00000188529_73 (sequence is synthesized)
aaagcaatctaaaggagaatgataattttaaaatacatattcagtaagtctatggttttaaaatagttgaaaagaaataagtaacaggcttatgaatttcatttttgaaaagaccataaa

SEQ ID NO: 692571 - DNA, 120 bp, Artificial Sequence
  ENSG00000188529_74 (sequence is synthesized)
gtacaaatttctccatgactgacatcagagtgatactcggctgcctctgctgctgctgtctcttctgtctgactccattcgcaatagccttttcttcctatccctggcttaccgagtaaa

SEQ ID NO: 692572 - DNA, 120 bp, Artificial Sequence
  ENSG00000188529_75 (sequence is synthesized)
gtagaaacttgccatcagcccaggattctgttttcgagggtagccccagagaggatgctctgttctcattaataatttttacagctctcaatataaatcctttttatacttattatattc

SEQ ID NO: 692573 - DNA, 120 bp, Artificial Sequence
  ENSG00000188529_76 (sequence is synthesized)
tgtctcttggggtaacaaagtagtgtacccattaagtgaacgtattccttctaattagtttagagcccagctgcattaaccttgagggatgttcagttacagtattcaaggttctgaact

SEQ ID NO: 692574 - DNA, 120 bp, Artificial Sequence
  ENSG00000188529_77 (sequence is synthesized)
ccccatcagcctttcccttttcatgttgaaagcccagttatttagaatttgtccttccatttaatctgttcataatggcctcgggaagacagagctggaaacctgcagtccttaattcct

SEQ ID NO: 692575 - DNA, 120 bp, Artificial Sequence
  ENSG00000188529_78 (sequence is synthesized)
ttcagaacaaaaagtgggaagtctagtaaggcagaccttttagtctctataataaaaaaataccagtatcggtctcaaaaaaggagtgtgtcacttcagggatattttaaatcacctctc

SEQ ID NO: 692576 - DNA, 120 bp, Artificial Sequence
  ENSG00000188529_79 (sequence is synthesized)
taaatctgcagtcttgtgttgtctctcaaatttaggaaaaagaaatgtgcaaactagaatggggatttttgggatagaatgaaaacctatacctgtacctaacctagctctctttccaaa

SEQ ID NO: 692577 - DNA, 120 bp, Artificial Sequence
  ENSG00000188529_80 (sequence is synthesized)
ccatttatatcaaacactgtcttgaatgtgtacttggcctctgttaaaatgatggttttaggaaaggagctaggtttggacagaatagctatataaagccagcagttctcgtagtattat

SEQ ID NO: 692578 - DNA, 120 bp, Artificial Sequence
  ENSG00000188529_81 (sequence is synthesized)
tgctgacatgaccagggaggacaagcagcttagcttctcagatcaaaaacaagtaccagtagttcctgcttaaggctggtaaataatatcttgaaattctcaagttggaaaccagtctca

SEQ ID NO: 692579 - DNA, 120 bp, Artificial Sequence
  ENSG00000188529_82 (sequence is synthesized)
aacccatttctttgcaagaagttgtatatttagggtcatggttagggctttccagtctaggagtccttccagtggtctgtttcttgatagcatgcttttacagtctgcatggatgtaata

SEQ ID NO: 692580 - DNA, 120 bp, Artificial Sequence
  ENSG00000188529_83 (sequence is synthesized)
gtattagatatatatgaaaaagaaaacagcaaaataaatttgaagttaatgctttcctctcttgtaaggtaaggcatatactgcttgcttacacaagaactattggcattttcttttttt

SEQ ID NO: 692581 - DNA, 120 bp, Artificial Sequence
  ENSG00000188529_84 (sequence is synthesized)
cgtttgaaacaaatatgaaaaatagtattttggttttaagaaatttttattttagcatacaacatataactgacatttgttttttcttttttgtcttgtaaacttaattcttaaaactta

SEQ ID NO: 692582 - DNA, 120 bp, Artificial Sequence
  ENSG00000188529_85 (sequence is synthesized)
ggaaaatttttggataggacaacttggtgattcagctataacagatcttatttcaataataactttactgcaatatgtattcatacattttcaaatgtgtgccttaggaaatcacaagtg

SEQ ID NO: 692583 - DNA, 120 bp, Artificial Sequence
  ENSG00000188529_86 (sequence is synthesized)
cttttatagtgtgaagtgttaatgactgaatccaactgaatcaccaactagtaagtgggggtctggttgatgttctggaataatattgggagattgtgaattgttccagacataccaact

SEQ ID NO: 692584 - DNA, 120 bp, Artificial Sequence
  ENSG00000188529_87 (sequence is synthesized)
agatggctagggtgtgggtgaggggcaaaggcaggctgaaaacactggagagacaggcccagctctgcgcaagggcacacacctccttcctttacacactcaatacaagctgtaaatcct

SEQ ID NO: 692585 - DNA, 120 bp, Artificial Sequence
  ENSG00000188529_88 (sequence is synthesized)
tctttcgcaggtcagggcataacctggaccaaacgggaaatttaaggcaaaataaaagcaggacattaacttggaccaaccgggaaatttaaggcagcctctctgaactaaatagtttaa

SEQ ID NO: 692586 - DNA, 120 bp, Artificial Sequence
  ENSG00000188529_89 (sequence is synthesized)
aaatctgtccatttagtagtaaccgcaaagtttggcctagagactaaaacatctgcttcctgatttgggggtggagatgaagtggagtgtaaggtagaaaacggcgggaaatgaagacct

SEQ ID NO: 692587 - DNA, 120 bp, Artificial Sequence
  ENSG00000188529_90 (sequence is synthesized)
aaagaaagaaagaacaggcttgggggagggtaagaggcaccgcaagaagccaacgaatgacaccgacgctgaggcgcgtgcgccagccctccgcatgcgcaggcggacgcctggtgttct

SEQ ID NO: 692588 - DNA, 120 bp, Artificial Sequence
  ENSG00000188529_91 (sequence is synthesized)
cgcgggaaagaaccgttgcgcccgactttgcgcggaggtaggagggggaagtggaggcgggagtgaagtctcgcgagaagagtcggttgccgtagcagagccctctagctgtgtgtgtct

SEQ ID NO: 692589 - DNA, 120 bp, Artificial Sequence
  ENSG00000188529_92 (sequence is synthesized)
tgttaatgtaaactgcatttttatcttccaaattcttggatcctagctttccttcatcaaaaagatatattgcctatacatcttaaggacttggacataaaaatttgaggtctttttatg

SEQ ID NO: 692590 - DNA, 88 bp, Artificial Sequence
  ENSG00000188529_93 (sequence is synthesized)
tatcctacagaataacaagcagttaattttcaaaattattctggtttggtctagtgacaaaacctgtaacttgatttatgtgggcctt

SEQ ID NO: 692591 - DNA, 120 bp, Artificial Sequence
  ENSG00000188536_0 (sequence is synthesized)
actcttctggtccccacagactcagagagaacccaccatggtgctgtctcctgccgacaagaccaacgtcaaggccgcctggggtaaggtcggcgcgcacgctggcgagtatggtgcgga

SEQ ID NO: 692592 - DNA, 120 bp, Artificial Sequence
  ENSG00000188536_1 (sequence is synthesized)
ggccctggagaggatgttcctgtccttccccaccaccaagacctacttcccgcacttcgacctgagccacggctctgcccaggttaagggccacggcaagaaggtggccgacgcgctgac

SEQ ID NO: 692593 - DNA, 120 bp, Artificial Sequence
  ENSG00000188536_2 (sequence is synthesized)
gctcctaagccactgcctgctggtgaccctggccgcccacctccccgccgagttcacccctgcggtgcacgcctccctggacaagttcctggcttctgtgagcaccgtgctgacctccaa

SEQ ID NO: 692594 - DNA, 120 bp, Artificial Sequence
  ENSG00000188536_3 (sequence is synthesized)
ataccgttaagctggagcctcggtagccgttcctcctgcccgctgggcctcccaacgggccctcctcccctccttgcaccggcccttcctggtctttgaataaagtctgagtgggcagca

SEQ ID NO: 692595 - DNA, 120 bp, Artificial Sequence
  ENSG00000188536_4 (sequence is synthesized)
gggagcgatctgggtcgaggggcgagatggcgccttcctctcagggcagaggatcacgcgggttgcgggaggtgtagcgcaggcggcggctgcgggcctgggccgcactgaccctcttct

SEQ ID NO: 692596 - DNA, 120 bp, Artificial Sequence
  ENSG00000188536_5 (sequence is synthesized)
gactcagagagaacccaccatggtgctgtctcctgccgacaagaccaacgtcaaggccgcctggggtaaggtcggcgcgcacgctggcgagtatggtgcggaggccctggagaggtgagg

SEQ ID NO: 692597 - DNA, 120 bp, Artificial Sequence
  ENSG00000188542_0 (sequence is synthesized)
tggtctatgaagaagtgatgaaaatagaaattagttttattttatgagccatgtgttataatacatagaaaaaaatgcaccaattacaaagcgggccacaaaaaggaataaacgtaaagc

SEQ ID NO: 692598 - DNA, 120 bp, Artificial Sequence
  ENSG00000188542_1 (sequence is synthesized)
cgacaacgcagtcactagggaaagggtgaagacacgggaaccacgcagcccgccgtccacgtgcaccgggtagccacggggccctagccgaacgacgcggacgcgaagtgggcgggcccg

SEQ ID NO: 692599 - DNA, 120 bp, Artificial Sequence
  ENSG00000188542_2 (sequence is synthesized)
gccaagccacgcctccgcgccagacgccgcagtagagcgggcagggcgctgcgcccaagagccacagacgcaagcccagtgccacaggccgcgggggcggggaggacggcgcccggggac

SEQ ID NO: 692600 - DNA, 120 bp, Artificial Sequence
  ENSG00000188542_3 (sequence is synthesized)
agagaacatgggacgcagagcggtccaaggccccggcgccctggtgaggcccaaacctcccgccatgccccggccccaacgagacccaagccccctgtcccggcccagcgcccgcggggg

SEQ ID NO: 692601 - DNA, 120 bp, Artificial Sequence
  ENSG00000188542_4 (sequence is synthesized)
acccaagccccagcctggtccacctcggaggcctctaggacccgggggcgcccggcggcccgcccggctcccacaaatagactcctgggcgggcgcctgagcccccaaaatagatcctca

SEQ ID NO: 692602 - DNA, 120 bp, Artificial Sequence
  ENSG00000188542_5 (sequence is synthesized)
gggcccaaaagcagactcttcggcgggcgccatgggaccggcagaagctgggcgccgcggggccgcctcgcccgtacctccaccgttggtgcgcgtcgcgccctcactcttcctcgggag

SEQ ID NO: 692603 - DNA, 120 bp, Artificial Sequence
  ENSG00000188542_6 (sequence is synthesized)
cccgtgttcgacgacccggctgaggacctgctggcgcacctggagcccacgtgcgccgccatggaggccgcggtgcgcgccggcggcgcctgcctagtctactgcaagaacggccgcagc

SEQ ID NO: 692604 - DNA, 120 bp, Artificial Sequence
  ENSG00000188542_7 (sequence is synthesized)
cgctcggccgccgtctgcaccgcgtacctcatgcggcaccgcggcctcagcctggcgaaggccttccagatggtgaagagcgctcgcccggtagcagaaccgaacccgggcttctggtct

SEQ ID NO: 692605 - DNA, 120 bp, Artificial Sequence
  ENSG00000188542_8 (sequence is synthesized)
cagctccagaagtatgaggaggccctccaggcccagtcctgcctgcagggagagcccccagccttagggttgggccctgaggcttgaagcttgaaggcctgctgcctggaggaaggatgt

SEQ ID NO: 692606 - DNA, 120 bp, Artificial Sequence
  ENSG00000188542_9 (sequence is synthesized)
ccctgcactgatacagaagctgtttctggcaaagcctgccgtgtcttacatttgtctctctatccggattagatgttgctatatgaacacatcgggactgtgtctgcaggaaggagctcc

SEQ ID NO: 692607 - DNA, 120 bp, Artificial Sequence
  ENSG00000188542_10 (sequence is synthesized)
ccattcgaggccttcacagtgtcacccacattcacctctttccacttaaacgtgtcccatgaatcttgtcataacagttttgtgttccttaactattttgtctgccatgtcatttatgat

SEQ ID NO: 692608 - DNA, 120 bp, Artificial Sequence
  ENSG00000188542_11 (sequence is synthesized)
gtatataacctctttaatgcctgaaatcataagaataatcatcaaaggcaagagggttgtatattttcccgttggagacacatctggaatttgctgcaataaaataataataagaaagca

SEQ ID NO: 692609 - DNA, 120 bp, Artificial Sequence
  ENSG00000188542_12 (sequence is synthesized)
cagaaggctggtctttacccttcttcctcactgtcatatcgagttttcctttgtgtgtgtgtgtgtgaaacatagtgcttttaattttatatttccggctgaggtgatgcacaaattatc

SEQ ID NO: 692610 - DNA, 120 bp, Artificial Sequence
  ENSG00000188542_13 (sequence is synthesized)
ttacagacacaaaaagaaatacatttggtaaaacatcgaagacaaattaagaaaaagcaaatagggatcctccattatttacactccagaatcttgagtgtttgggggtgccggcgcatt

SEQ ID NO: 692611 - DNA, 120 bp, Artificial Sequence
  ENSG00000188542_14 (sequence is synthesized)
ctaccagtctcagggaaggacatgagtacagactacagtaatcagaatctgagtcataggtgaaatcaggaaaagcaactcttcttgtgtttatttttagtagtgtcataagaacggact

SEQ ID NO: 692612 - DNA, 120 bp, Artificial Sequence
  ENSG00000188542_15 (sequence is synthesized)
agttcttcctgcgtgaccacggatgcttctgtttgagaaaatgcatacccacgtgggacatttagatcaagaaagctgttgatgaagacattgttgaagggcaacttgggtgattgggga

SEQ ID NO: 692613 - DNA, 120 bp, Artificial Sequence
  ENSG00000188542_16 (sequence is synthesized)
attattctcttcatcagcccctctgcaatacagctggagctgtcccataggagttcggacaattacggacatcctttttctttctctctttctttttttttgtttgtttgtttgagacag

SEQ ID NO: 692614 - DNA, 120 bp, Artificial Sequence
  ENSG00000188542_17 (sequence is synthesized)
ggcgtgagccaccgtgcccagcctcctttttctattactagagaactccaggacattaagaatttcaaaagtgattttttcacccatggcttctacggtgacagagtatggtgttcctgt

SEQ ID NO: 692615 - DNA, 120 bp, Artificial Sequence
  ENSG00000188542_18 (sequence is synthesized)
ctacggtgacagagtatggtgttcctgtagggaaacaaagccaagtttttttgctcctttcactaaagctgcttcatccggggaggaagcctggtagattataatatttccagggataac

SEQ ID NO: 692616 - DNA, 120 bp, Artificial Sequence
  ENSG00000188542_19 (sequence is synthesized)
agtgtggcacacagataacagggtaagaaattggtctatatagttttctgtgggatggccattctcaatgttctccaataaactggggtaattaaaatatcagggctcggatggaaggtg

SEQ ID NO: 692617 - DNA, 120 bp, Artificial Sequence
  ENSG00000188542_20 (sequence is synthesized)
ttgcaccataaatgacacctgcagtggtacttgttaaatgtcttaacattgcaagtgagggttcccattttatcagaaaatagaaattttacctgcccaagttcttcactgagattgaat

SEQ ID NO: 692618 - DNA, 120 bp, Artificial Sequence
  ENSG00000188542_21 (sequence is synthesized)
gtgctggccatggtgtggacactatttactttataatgcacatcttgatcccagtttataaactgggcctgaatatatttcacaatttccatagtgaccagcagactaatggggatgagg

SEQ ID NO: 692619 - DNA, 120 bp, Artificial Sequence
  ENSG00000188542_22 (sequence is synthesized)
tactgttataagatgatgaacaccagtatgtcaaacacaatgctgtgagctggaatcctctttcaggtaccaaatgtcaccatactttttattccatagcacggctcccacgcagctcac

SEQ ID NO: 692620 - DNA, 120 bp, Artificial Sequence
  ENSG00000188542_23 (sequence is synthesized)
tacagacatgaccagagcagcaggaaccaaagggagacccgcccattgtcactttcttaatctctgatctcttgaggtgatttgacagaattctgcaggaatttggtttcaaagccagtg

SEQ ID NO: 692621 - DNA, 120 bp, Artificial Sequence
  ENSG00000188542_24 (sequence is synthesized)
agccagtgtaaacaactatgccagtgatccactgagcatttcttttttttttttcttgagacggagtctcactctggtgcccaggctggagtgggcgccatcttggctcactgcaagctc

SEQ ID NO: 692622 - DNA, 71 bp, Artificial Sequence
  ENSG00000188542_25 (sequence is synthesized)
tccactgagcatttctaagctgtgtatctcttaacaagacccagtcaggccctattggaacagggctttta

SEQ ID NO: 692623 - DNA, 120 bp, Artificial Sequence
  ENSG00000188542_26 (sequence is synthesized)
taacaagacccagtcaggccctattggaacagggcttttaccacctaggcggaagctcagccattgaaatgacgatcaggtgcttcacggtctatttttccagataggcctaacagctgg

SEQ ID NO: 692624 - DNA, 120 bp, Artificial Sequence
  ENSG00000188542_27 (sequence is synthesized)
aaacaaagccaagtttttttgctcctttcactaaagctgcttcatccggggaggaagcctggtagattataatatttccagggataacagtgtggcacacagataacaggctgtttctgg

SEQ ID NO: 692625 - DNA, 120 bp, Artificial Sequence
  ENSG00000188549_0 (sequence is synthesized)
cttttgtaatcacaacatgatctcgtgtgctgagcagcgaagccggcagggagaggccggcagaggcccggctccggtggctccagctttcctcccactctggctccccaggggctgctc

SEQ ID NO: 692626 - DNA, 120 bp, Artificial Sequence
  ENSG00000188549_1 (sequence is synthesized)
tggaattctctcggtgcccgccgttgccatgcactcggctggaactcccagagccgagtcccccatgagcaggcaggagaaggacgcagagctggatcggaggatagttgccctgcgcaa

SEQ ID NO: 692627 - DNA, 120 bp, Artificial Sequence
  ENSG00000188549_2 (sequence is synthesized)
gaagaaccaggccttgctccgcaggtaccaggagatccaggaggaccgtcggcaggcagagcagggggggatggctgtgaccacaccagcactcctccagcctgatggcctcaccgttac

SEQ ID NO: 692628 - DNA, 120 bp, Artificial Sequence
  ENSG00000188549_3 (sequence is synthesized)
catcagccaggttcccggtgaaaagcgggtggttagcaggaactgggcaaggggtacctgtggacccagagtgaccaacgagatgcttgaggatgaggatgctgaggaccacgggggtac

SEQ ID NO: 692629 - DNA, 120 bp, Artificial Sequence
  ENSG00000188549_4 (sequence is synthesized)
tttctgcttaggggagctggtggagctggctgtgaccatggagaacaaagcagagggcaaacggattgtaagtgaaaagcctaccagagcaaggaaccaaggcatagaggggtcacctgg

SEQ ID NO: 692630 - DNA, 120 bp, Artificial Sequence
  ENSG00000188549_5 (sequence is synthesized)
agggcgtgtgacccgaagcccccccacgcaggtggccatcagctcagattctgcacggaagggttcttgggagccctggagccggccggtgggggagcccccggaggcgggctgggacta

SEQ ID NO: 692631 - DNA, 120 bp, Artificial Sequence
  ENSG00000188549_6 (sequence is synthesized)
tgcccagtggaagcaggagcgggagcagatcgacctagcccgcctcgcccggcacagagacgcacagggtgactggcgccgcccgtgggacctggacaaggccaagtccacgctacagga

SEQ ID NO: 692632 - DNA, 120 bp, Artificial Sequence
  ENSG00000188549_7 (sequence is synthesized)
ctgcagccagctgaggggagaaggcccggccagggcaggcagcagaaggggtcccaggagccaccagaaactacagcccccaccattgctccctgatggaaaaggtcggggcgggcaagc

SEQ ID NO: 692633 - DNA, 120 bp, Artificial Sequence
  ENSG00000188549_8 (sequence is synthesized)
cagcagaccctcggtggcaccagccacaggcagcaaagcccggggcaaggagaggctgactggcagggcccgaaggtgggatatgaaggaagacaaggaggagctggaaggtcaggaggg

SEQ ID NO: 692634 - DNA, 120 bp, Artificial Sequence
  ENSG00000188549_9 (sequence is synthesized)
aagccaaagcaccagagagactcccagtgaggaggagcaagcccagaagcagagcgggatggagcagggccgactggggagcgcccctgcagccagcccagccctggcatccccagaggg

SEQ ID NO: 692635 - DNA, 120 bp, Artificial Sequence
  ENSG00000188549_10 (sequence is synthesized)
gccgaagggggagtcagtggcttccacagccagctcagtcccctgctctccacaggagcctgacttggctcctcttgacctctccctaggaggggctggcatccctgggcccagggagag

SEQ ID NO: 692636 - DNA, 120 bp, Artificial Sequence
  ENSG00000188549_11 (sequence is synthesized)
cgggtgtgtgctcggtctgaggcctggggcccaggagagccctgtgtcttggccagagggctctaagcagcagcccctggggtggagcaatcaccaggctgagctggaagtacagacttg

SEQ ID NO: 692637 - DNA, 120 bp, Artificial Sequence
  ENSG00000188549_12 (sequence is synthesized)
gggctcccagagcccggagaagacaggtctggcaagtctggggcccagcagggcctggccccgagaagccggcccacgagaggaggcagccaaaggtcgagaggcacagcaggtgtgagg

SEQ ID NO: 692638 - DNA, 120 bp, Artificial Sequence
  ENSG00000188549_13 (sequence is synthesized)
cgcaggacagggcgccctggcccggcaggaagatgctgaacacagctcctgggagctggggagtccccggggagaggaaaagggaatcactctgttaaaggccctccgcgtgatggccat

SEQ ID NO: 692639 - DNA, 120 bp, Artificial Sequence
  ENSG00000188549_14 (sequence is synthesized)
gtggttgccggtggcttgcgccattgtcactgagcagtgtggcaaactctccagcatggcgaccttgtgagggcaaggagtggcctccctgcacctcacacgctcatctctgtgcacatg

SEQ ID NO: 692640 - DNA, 120 bp, Artificial Sequence
  ENSG00000188549_15 (sequence is synthesized)
tgtgttttcacgcacgggcacagcccctggtgtattcctgtactagtatctggcatctgaggctggtgcaccctgacctgggcctactgctgcccaggccacaagccttctccactatga

SEQ ID NO: 692641 - DNA, 120 bp, Artificial Sequence
  ENSG00000188549_16 (sequence is synthesized)
tgagagaacaaggcttggtggcacccagcacctggctctcctggctccccgtcacccccccagggcctggcctccctctccagctgcaggctttcacctcttgcctgggctggattcccc

SEQ ID NO: 692642 - DNA, 120 bp, Artificial Sequence
  ENSG00000188549_17 (sequence is synthesized)
cagtcccagattcccaggatgcccaaccaggggaatcccagtaaccatgcgccagcctcctgcctctcctgagtggtggctgaggcctggaggaggagaggccacacagctggcagggtc

SEQ ID NO: 692643 - DNA, 120 bp, Artificial Sequence
  ENSG00000188549_18 (sequence is synthesized)
tggcctgggcaaagaagagtagagctcacgtcttcttggtgaaaaggaggatctctggaaagtcctcctctctgaaatgggttgggatggggagcgacaacctcctcttcccacagcagg

SEQ ID NO: 692644 - DNA, 120 bp, Artificial Sequence
  ENSG00000188549_19 (sequence is synthesized)
atgggagagcttactcccaggcccccacacccaggtcagacatcacgtgcaccctgaatgtaggcaagggcctggccctgcagcccagggtcatttcctgctctttccacttcctctttc

SEQ ID NO: 692645 - DNA, 120 bp, Artificial Sequence
  ENSG00000188549_20 (sequence is synthesized)
cccaccgtcctgcactagcaccagggccaggccaaggcaagaatcagacagctactccacagacagagaaacaacttccagctaagtatgacatcaggacttgtctttcctactaagcct

SEQ ID NO: 692646 - DNA, 120 bp, Artificial Sequence
  ENSG00000188549_21 (sequence is synthesized)
ccatccccgcccctcccctgaggcccacgtctgctgaattatccggactccgcacaagctgtggcttcctctcagttcaacaaacatttcctgagcacccactaccagtaatccagccgg

SEQ ID NO: 692647 - DNA, 120 bp, Artificial Sequence
  ENSG00000188549_22 (sequence is synthesized)
taggcgacggagactgccagcaggagggagggaagaaagccagtcatccggcagatctgggctgttctgggcgggagctgttctgggccacaggtgccctacagggctgggggcaggatg

SEQ ID NO: 692648 - DNA, 120 bp, Artificial Sequence
  ENSG00000188549_23 (sequence is synthesized)
gcggtaggagccccaggggaccctcccacctctgcctggcagaagcaagtgcccttctttcttgttatgtgtgccttctgctcctgagccctagtgtggacctcaccgcatggtcccctc

SEQ ID NO: 692649 - DNA, 120 bp, Artificial Sequence
  ENSG00000188549_24 (sequence is synthesized)
tgccccctccttctggtcctgccatggctgctgctctctgctgaaggctgtggggctctagggagagtccagatcaccctgggatttctccactgcccaatgtgaagcctaaactgtggg

SEQ ID NO: 692650 - DNA, 120 bp, Artificial Sequence
  ENSG00000188549_25 (sequence is synthesized)
ctctcaactccaccccacccctctattcaggaaggtgaggggcatctctttagcagaccagactgttttgagaagtgtctctcatactttaactgaagagtcatgcagattctaatggtc

SEQ ID NO: 692651 - DNA, 84 bp, Artificial Sequence
  ENSG00000188549_26 (sequence is synthesized)
ctcatactttaactgaagagtcatgcagattctaatggtctggggagggcctgagggtcctgctgttatcacctaggctggagt

SEQ ID NO: 692652 - DNA, 82 bp, Artificial Sequence
  ENSG00000188549_27 (sequence is synthesized)
acaatcatggctcactgcagcctcgaaccctccaggctcaggcgatcctctcacatcaacctcttgagtagccgggactaca

SEQ ID NO: 692653 - DNA, 71 bp, Artificial Sequence
  ENSG00000188549_28 (sequence is synthesized)
aattcgtatttctaagaggcttcaggtgaagcccatgctggttcctggaccatggttttgagtagttaagg

SEQ ID NO: 692654 - DNA, 120 bp, Artificial Sequence
  ENSG00000188549_29 (sequence is synthesized)
cccatgctggttcctggaccatggttttgagtagttaagggtttggactagaatatatgaagggctgggggtgaagacagactctagactctaaaggttggtggctggctatgtagggga

SEQ ID NO: 692655 - DNA, 120 bp, Artificial Sequence
  ENSG00000188549_30 (sequence is synthesized)
tgggggagtgctacccctgtcaggtggtgggggcttcctggctgcagagttgggtgggagacttggggaagatgctttggaaggcagtgagtgggtggtgtcaacttctagtagtgcagt

SEQ ID NO: 692656 - DNA, 120 bp, Artificial Sequence
  ENSG00000188549_31 (sequence is synthesized)
gggagagctggtcagggatgggatggagtgaagggggcagaggcatttggtgtggggttgatcagaggaattttggaaaggcttggaaacattcctatgtatgtgagacacacctatgcc

SEQ ID NO: 692657 - DNA, 120 bp, Artificial Sequence
  ENSG00000188549_32 (sequence is synthesized)
agggcaaagactccaagctcaagtttttctcttgccttctagtcacaagaacatggctttggagtgtgacactggcctaggaatccatgactcccaaaggacggggctaggggtagagga

SEQ ID NO: 692658 - DNA, 120 bp, Artificial Sequence
  ENSG00000188549_33 (sequence is synthesized)
ggttcaggcaaagcccttagattttggagacatcaggcagatgtctccaaaaatgattgtgatcaagaatctgaattataagattcacagtctgctccccaacccagtgctgccaactgt

SEQ ID NO: 692659 - DNA, 120 bp, Artificial Sequence
  ENSG00000188549_34 (sequence is synthesized)
acagctgcgcctccacgaaggggcatatgccaggctcgtctgaccctggaatgaggatgtaggaagcaggcagagctcgggttcagccctcacaatgggactgaagcaggagagaaggct

SEQ ID NO: 692660 - DNA, 120 bp, Artificial Sequence
  ENSG00000188549_35 (sequence is synthesized)
gggcagaagggctgtggggaagtagggcttgtctccatggatgacgtccagaaggatgtcaggaggaggaatatcacaggagttatagacattggagggaacagagactggcacaggacc

SEQ ID NO: 692661 - DNA, 120 bp, Artificial Sequence
  ENSG00000188549_36 (sequence is synthesized)
tcttcattgcaggaagatggtagtgtaggcaggtaacattgagctcttttcaaaaaaggagagctcttcttcaagataaggaagtggtagttatggtggtaacccccggctatcagtccg

SEQ ID NO: 692662 - DNA, 120 bp, Artificial Sequence
  ENSG00000188549_37 (sequence is synthesized)
gatggttgccacccctcctgctgtaggatggaagcagccatggagtgggagggaggcgcaataagacacccctccacagagcttggcatcatgggaagctggttctacctcttcctggct

SEQ ID NO: 692663 - DNA, 120 bp, Artificial Sequence
  ENSG00000188549_38 (sequence is synthesized)
cctttgtttaaaggcctggctgggagccttccttttgggtgtctttctcttctccaaccaacagaaaagactgctcttcaaaggtggagggtcttcatgaaacacagctgccaggagccc

SEQ ID NO: 692664 - DNA, 120 bp, Artificial Sequence
  ENSG00000188549_39 (sequence is synthesized)
aggcacagggctgggggcctggaaaaaggagggcacacaggaggagggaggagctggtagggagatgctggctttacctaaggtctcgaaacaaggagggcagaataggcagaggcctct

SEQ ID NO: 692665 - DNA, 120 bp, Artificial Sequence
  ENSG00000188549_40 (sequence is synthesized)
ccgtcccaggcccatttttgacagatggcgggacggaaatgcaatagaccagcctgcaagaaagacatgtgttttgatgacaggcagtgtggccgggtggaacaagcacaggccttggaa

SEQ ID NO: 692666 - DNA, 120 bp, Artificial Sequence
  ENSG00000188549_41 (sequence is synthesized)
tccaatggactgaatcagaaccctaggcctgccatctgtcagccgggtgacctgggtcaattttagcctctaaaagcctcagtctccttatctgcaaaatgaggcttgtgatacctgttt

SEQ ID NO: 692667 - DNA, 120 bp, Artificial Sequence
  ENSG00000188549_42 (sequence is synthesized)
tgaagggttgctgagaaaattaaagataagggtatccaaaatagtctacggccataccaccctgaacgtgcctaatctcgtaagctaagcagggtcaggcctggttagtacctggatggg

SEQ ID NO: 692668 - DNA, 120 bp, Artificial Sequence
  ENSG00000188549_43 (sequence is synthesized)
gagagtatggaaaacatacctgcccgcagttggagttggactctgtcttaacagtagcgtggcacacagaaggcactcagtaaatacttgttgaataaatgaagtagcgatttggtgtga

SEQ ID NO: 692669 - DNA, 120 bp, Artificial Sequence
  ENSG00000188549_44 (sequence is synthesized)
cttgatgcagagacatggcttgcccagggtgactcctgggctggggccgccaggggagctggctctctccgccccgactaccagcagctttcggcctggagaggctgggcccctgggagc

SEQ ID NO: 692670 - DNA, 120 bp, Artificial Sequence
  ENSG00000188549_45 (sequence is synthesized)
ggctctttcctccaggctgggcacaggcctaggtgcggggtccagggcctgagagcccaggacggagccagggcctctcctttttctctggttgtggatctgggagccaaacagctcccc

SEQ ID NO: 692671 - DNA, 120 bp, Artificial Sequence
  ENSG00000188549_46 (sequence is synthesized)
cctcgacctcccgaatcccctggcagcttcccagtcacggcaggttccgctgccagagccatttataactcccattccaggctctgctcggcagtgaagctccctggagagctgggggag

SEQ ID NO: 692672 - DNA, 120 bp, Artificial Sequence
  ENSG00000188549_47 (sequence is synthesized)
gggcaccccactgctgggagctgtggcttggggtatgaggccctgacctgagccccctgaggaggcagggacaggcagacgggcctagctggaatgggggcttggggccttatttgggcc

SEQ ID NO: 692673 - DNA, 120 bp, Artificial Sequence
  ENSG00000188549_48 (sequence is synthesized)
atctccctaagcaatccccttccttcctgggtgaccttagctgtgggtctgggatctcttccttgggtggtgaaaatgtgaaagctggggactggtgagagggggacccggaagtcagga

SEQ ID NO: 692674 - DNA, 120 bp, Artificial Sequence
  ENSG00000188549_49 (sequence is synthesized)
gtgtaagcctcaccctgggagacagggctcgtagcaaggaggtggaggcccagaccatgtcggggaaagacagctgcctctgttcccctctcctactaactattctggggtgcacctgcc

SEQ ID NO: 692675 - DNA, 120 bp, Artificial Sequence
  ENSG00000188549_50 (sequence is synthesized)
agctcccaacctcctgcagtcggaccactgctgtccccaccaaagagccacagctgaaagcccccctacccccagtagatgcatcttcatacccttttccagtccacagccctgcgccta

SEQ ID NO: 692676 - DNA, 120 bp, Artificial Sequence
  ENSG00000188549_51 (sequence is synthesized)
tgccacaaagcacaggccactcctaaacctcaagccccaggggctaaaaccctgcaggaagtgggggacagagaagttggggctgaatgccaggagcagtgtctgagggacagagaccca

SEQ ID NO: 692677 - DNA, 120 bp, Artificial Sequence
  ENSG00000188549_52 (sequence is synthesized)
ttgtttgagtgctctgggtttcccagctcagagatgacgggccactgtggcatcttgggccgctgggtggccctgggccctggataacctcatgccattggcatgtgaacaccctgtggg

SEQ ID NO: 692678 - DNA, 120 bp, Artificial Sequence
  ENSG00000188549_53 (sequence is synthesized)
cagcagaaggggtgagcccacacctacctcatccctcccctccttggctttgttcatctttcacccccttgtcctctcttttctctgtctcttagtctcttattttcagagctgaaagga

SEQ ID NO: 692679 - DNA, 120 bp, Artificial Sequence
  ENSG00000188549_54 (sequence is synthesized)
agcgttggagaacatcttccttcctctccctcactatcagaggagggcaccaagacctcccatcctcccctctgagcccacagctcttgtccaggttctgagcagaaggccccagaagga

SEQ ID NO: 692680 - DNA, 120 bp, Artificial Sequence
  ENSG00000188549_55 (sequence is synthesized)
ggctcagtggaagccggcccggggtctctttgaggtccctaaagggtgaaagtcctggtggtccttccccagacctactgtagaaacagctctgtggagttctggtccccttgttttata

SEQ ID NO: 692681 - DNA, 120 bp, Artificial Sequence
  ENSG00000188549_56 (sequence is synthesized)
tataaagaagctgtggcctgagagttggggccagacacctagccatggagtggcaaagctagcacaggaccctattctcctgacccccaggcgagggcgcttttggggaggcaaaaccca

SEQ ID NO: 692682 - DNA, 120 bp, Artificial Sequence
  ENSG00000188549_57 (sequence is synthesized)
cgactggccccgaggactgacagcttcctgaggctggaagaactggtgttcctgttttggatcctttgtcaccccacctttccccacttcttttgtcccccgcaggtcccaggagccacc

SEQ ID NO: 692683 - DNA, 120 bp, Artificial Sequence
  ENSG00000188549_58 (sequence is synthesized)
agaaactacagcccccaccattgctccctgatggaaaaggtgagttggggaggaggaggggccaggtctcgtcagctaaagatggagccggctgctatgggcctcttctctccttggccg

SEQ ID NO: 692684 - DNA, 120 bp, Artificial Sequence
  ENSG00000188549_59 (sequence is synthesized)
accatctcttgcaggtcggggcgggcaagccagcagaccctcggtggcaccagccacaggcagcaaagcccggggcaaggagaggctgactggcagggcccgaaggtaacaggtggcagg

SEQ ID NO: 692685 - DNA, 120 bp, Artificial Sequence
  ENSG00000188549_60 (sequence is synthesized)
aaaccatttccacgggagagctggaacaggcctaatttttagctggagatgtggaaaccttgagagaggaagcgcctggagtctccaaaccccaccccaagcctcttcctgcttctcccc

SEQ ID NO: 692686 - DNA, 120 bp, Artificial Sequence
  ENSG00000188549_61 (sequence is synthesized)
atggaaaaggtgggatatgaaggaagacaaggaggagctggaaggtcaggagggaagccaaagcaccagagagactcccagtgaggaggagcaagcccagaagcagagcgggatggagca

SEQ ID NO: 692687 - DNA, 120 bp, Artificial Sequence
  ENSG00000188549_62 (sequence is synthesized)
ttgctccgcaggtaccaggcctatcagcatctatgtctctgtgcacctggggggccatggcgtgtgctgacccccagccctcccacaggagatccaggaggaccgtcggcaggcagagca

SEQ ID NO: 692688 - DNA, 120 bp, Artificial Sequence
  ENSG00000188554_0 (sequence is synthesized)
agtaattgctgtaccaaggtcagaatcgccacctgaggcctgaatatcagcgtaagatagtgtccaaagcagtcttaagaagaggtcccattaccccactctttccgccctaatggaggt

SEQ ID NO: 692689 - DNA, 120 bp, Artificial Sequence
  ENSG00000188554_1 (sequence is synthesized)
ctccagtttagcctcacagcatggaaccacaggttactctaaatgtgacttttaaaaatgaaattcaaagctttctggtttctgatccagaaaatacaacttgggctgatatcgaagcta

SEQ ID NO: 692690 - DNA, 120 bp, Artificial Sequence
  ENSG00000188554_2 (sequence is synthesized)
tggtaaaagtttcatttgatctgaatactattcaaataaaatacctggatgaggaaaatgaagaggtatccatcaacagtcaaggagaatatgaagaagcgcttaagatggcagttaaac

SEQ ID NO: 692691 - DNA, 120 bp, Artificial Sequence
  ENSG00000188554_3 (sequence is synthesized)
agggaaaccaactgcagatgcaagtccacgaagggcaccatgtcgttgatgaagccccacccccagttgtaggagcaaaacgactagctgccagggcagggaagaagccacttgcacatt

SEQ ID NO: 692692 - DNA, 120 bp, Artificial Sequence
  ENSG00000188554_4 (sequence is synthesized)
actcttcactggtgagagtcttgggatcagacatgaagaccccagaggatcctgcagtgcagtcgtttccacttgttccatgtgacacagaccagcctcaagacaagcccccagactggt

SEQ ID NO: 692693 - DNA, 120 bp, Artificial Sequence
  ENSG00000188554_5 (sequence is synthesized)
tcacaagctacctggagacgttcagagaacaagtggttaacgaaacggttgagaagcttgaacagaaattacatgaaaagcttgtcctccagaacccatccttgggttcttgtccctcag

SEQ ID NO: 692694 - DNA, 120 bp, Artificial Sequence
  ENSG00000188554_6 (sequence is synthesized)
aagtctcaatgcctacttcagaagaaacattgtttttgccagaaaaccagttcagctggcatattgcttgcaacaactgccaaagaaggattgttggtgtccgctaccagtgtagcctat

SEQ ID NO: 692695 - DNA, 120 bp, Artificial Sequence
  ENSG00000188554_7 (sequence is synthesized)
gcccatcctacaatatctgtgaagattgtgaagcagggccatatggccatgacactaaccacgtcctgctgaagttgcggagacctgttgtgggctcctctgaaccgttctgtcactcaa

SEQ ID NO: 692696 - DNA, 120 bp, Artificial Sequence
  ENSG00000188554_8 (sequence is synthesized)
agtactctactcctcgtcttcctgctgctctggaacaagtcaggctccagaaacaggttgataagaactttcttaaagcagaaaagcaaaggttgcgagctgagaagaaacaacgtaaag

SEQ ID NO: 692697 - DNA, 120 bp, Artificial Sequence
  ENSG00000188554_9 (sequence is synthesized)
cagaggtcaaggaacttaaaaagcagcttaaactccataggaaaattcacctgtggaattcaatccatggactccagagccccaagtctcctttaggccgacctgagagcttgctccagt

SEQ ID NO: 692698 - DNA, 120 bp, Artificial Sequence
  ENSG00000188554_10 (sequence is synthesized)
ctaataccctgatgctccctttgcagccctgtacctccgttatgccaatgctcagtgcagcatttgtggatgagaatttgcctgatgggactcaccttcagccaggaaccaagtttatca

SEQ ID NO: 692699 - DNA, 120 bp, Artificial Sequence
  ENSG00000188554_11 (sequence is synthesized)
aacactggaggatgaaaaatacaggaaatgtaaagtggagtgcagacacaaagctcaagttcatgtggggaaacctgactttggcttccacagaaaagaaggatgttttggttccctgcc

SEQ ID NO: 692700 - DNA, 120 bp, Artificial Sequence
  ENSG00000188554_12 (sequence is synthesized)
tcaaggccggccatgtgggagttgtatctgtggagttcattgccccagccttggagggaacgtatacttcccattggcgtctttctcacaaaggccagcaatttgggcctcgggtctggt

SEQ ID NO: 692701 - DNA, 120 bp, Artificial Sequence
  ENSG00000188554_13 (sequence is synthesized)
gcagtatcatagtagatcctttcccctccgaagagagccctgataacattgaaaagggcatgatcagctcaagcaaaactgatgatctcacctgccagcaagaggaaacttttcttctgg

SEQ ID NO: 692702 - DNA, 120 bp, Artificial Sequence
  ENSG00000188554_14 (sequence is synthesized)
ctaaagaagaaagacagcttggtgaagtgactgagcagacagaagggacagcagcctgcatcccacagaaggcaaaaaatgttgccagtgagagggagctctacatcccatctgtggatc

SEQ ID NO: 692703 - DNA, 120 bp, Artificial Sequence
  ENSG00000188554_15 (sequence is synthesized)
ttctgactgcccaggacctgctgtcctttgagctgttggatataaacattgttcaagagttggagagagtgccccacaacacccctgtggatgtgactccctgcatgtctcctctgccac

SEQ ID NO: 692704 - DNA, 120 bp, Artificial Sequence
  ENSG00000188554_16 (sequence is synthesized)
atgacagtcctttaatagagaagccaggcttggggcagatagaggaagagaatgaaggggcaggatttaaagcacttcctgattctatggtgtcagtaaagaggaaggctgagaacattg

SEQ ID NO: 692705 - DNA, 120 bp, Artificial Sequence
  ENSG00000188554_17 (sequence is synthesized)
cttctgtggaggaagcagaagaagacctgagtgggacccagtttgtgtgtgagacagtaatccgatcccttaccttggatgctgccccagaccacaaccctccttgcagacagaagtcct

SEQ ID NO: 692706 - DNA, 120 bp, Artificial Sequence
  ENSG00000188554_18 (sequence is synthesized)
tgcagatgacatttgccttgcctgaaggaccacttggaaatgagaaggaggagattatccatatcgctgaggaagaagctgtcatggaggaggaggaggatgaggaggatgaggaggagg

SEQ ID NO: 692707 - DNA, 120 bp, Artificial Sequence
  ENSG00000188554_19 (sequence is synthesized)
tgggggattctatgtacagctctgcgctctcacagccaggcctggagcgaggtgctgaaggcaagcctggggttgaggctgggcaggaaccagctgaggctggggaaagactccctggag

SEQ ID NO: 692708 - DNA, 120 bp, Artificial Sequence
  ENSG00000188554_20 (sequence is synthesized)
gggagaaccagccacaggagcacagcataagtgacatcctcacgacctcacagactctggaaacagtgcccctaatcccagaggtagtggagcttccaccgtcactgcccaggagctctc

SEQ ID NO: 692709 - DNA, 120 bp, Artificial Sequence
  ENSG00000188554_21 (sequence is synthesized)
cttgtgtacatcatcatggttccccaggagtggatttaccagttaccataccagaagtttcttcagtccctgatcagatcagaggagagcccagaggctcatcaggacttgtaaacagca

SEQ ID NO: 692710 - DNA, 120 bp, Artificial Sequence
  ENSG00000188554_22 (sequence is synthesized)
gacagaagagctatgaccactcaaggcaccatcatgggagcagcattgctggaggactggtgaagggggctttgtctgttgctgcctctgcatacaaggccctgtttgctgggccaccag

SEQ ID NO: 692711 - DNA, 120 bp, Artificial Sequence
  ENSG00000188554_23 (sequence is synthesized)
tcactgcacagccaataatttctgaagatcagacagcagccctgatggcccatctctttgaaatgggattctgtgacaggcagctgaacctacggctgctgaagaaacacaattacaata

SEQ ID NO: 692712 - DNA, 120 bp, Artificial Sequence
  ENSG00000188554_24 (sequence is synthesized)
tcctgcaggttgtgacagaacttcttcagttaaacaacaacgactggtacagccaacgctattgaggagtgaccttgtattaaataactgcctgctgctcagagatgatctttattctgt

SEQ ID NO: 692713 - DNA, 120 bp, Artificial Sequence
  ENSG00000188554_25 (sequence is synthesized)
cattggggtatgggatagaagcccttgcttatttttaatctgatgaatctgtatagagcccatcgttgagttaccaagacaatacctgctacagtattttggggagcaaactaaagacca

SEQ ID NO: 692714 - DNA, 120 bp, Artificial Sequence
  ENSG00000188554_26 (sequence is synthesized)
gaacttaaattttcactttagacattggatgaatagtatgaagacagtttttcagttgatttggataaaactattttagtgcattgacaagtgtaacttcaacttcatatagaaccattt

SEQ ID NO: 692715 - DNA, 120 bp, Artificial Sequence
  ENSG00000188554_27 (sequence is synthesized)
ttctttctgcttttattgaaactgagtatttttctttggctaatgtggattttttatggggatatctgttaattttcaggttttgaaagacattaacctcggaagttgtttttaagaatt

SEQ ID NO: 692716 - DNA, 120 bp, Artificial Sequence
  ENSG00000188554_28 (sequence is synthesized)
attctcataattcttattctcataatttctgtaatccacctcaagcttcatagttatttggcattgaaataacacccagagcatgatagaaatgttgttactcttcctctctcaaggaga

SEQ ID NO: 692717 - DNA, 120 bp, Artificial Sequence
  ENSG00000188554_29 (sequence is synthesized)
aagtaattttcctgcaatacttaataattggcaccgttgctttctaaagactccatggtgcattcaagagtatccaacttcaagggaatctccgcatttcaatgaaaggaggaagagtgt

SEQ ID NO: 692718 - DNA, 120 bp, Artificial Sequence
  ENSG00000188554_30 (sequence is synthesized)
gctgataaacctaccagcacctattgagcaatgtctattatagtaattttgcatacatttttatttaagggaaaaaatataggtattgtgaaatattttgctaatcttatagaaaaggaa

SEQ ID NO: 692719 - DNA, 120 bp, Artificial Sequence
  ENSG00000188554_31 (sequence is synthesized)
aaaatcccgttatttaaagggaaaagtaaatttaacagttgccttttttcttaatgtcagggcagatcttattttacagtacagtgggggaaatagaaacatgtgaaaggcaaaaggcag

SEQ ID NO: 692720 - DNA, 120 bp, Artificial Sequence
  ENSG00000188554_32 (sequence is synthesized)
gctcctaaattaatgtcagtgaagttcagggtgggcaaatgagtgtgtgtgaggtataggaaatgctgatgacttctttaatgcttgaagtccgttcacaggtatctagccctagaatgc

SEQ ID NO: 692721 - DNA, 120 bp, Artificial Sequence
  ENSG00000188554_33 (sequence is synthesized)
ctagaacaggaagaggcagctggtgttctgcaaaacttggacaggggcaaagttgctgaaaaagttttggtttaacccgaagataagtggaaaagagcttgtccatgaacccaggttctc

SEQ ID NO: 692722 - DNA, 120 bp, Artificial Sequence
  ENSG00000188554_34 (sequence is synthesized)
actctgtttacagaagtgtgttgagtacagttggtgaaggaagaggtaacaaaaaatgctaaatattttatccatgaaaatgacttccagaaaaggaagaatatgaaccccagaccgaag

SEQ ID NO: 692723 - DNA, 120 bp, Artificial Sequence
  ENSG00000188554_35 (sequence is synthesized)
gggaaaagatagttaatagtattatctaacctggttggtatttgtaatgaatggtgattttaattagtcattagccataatgatgtttatttacagtataactcctgaatgctacttaaa

SEQ ID NO: 692724 - DNA, 120 bp, Artificial Sequence
  ENSG00000188554_36 (sequence is synthesized)
taaaccaggattcaaactgcaagccagccaggccgttcattatttaaaacgttttaatcggggcttccgggtagaaggtggagcggcagggtgtaattgggttgatgggtgggacctgtc

SEQ ID NO: 692725 - DNA, 120 bp, Artificial Sequence
  ENSG00000188554_37 (sequence is synthesized)
ttgaccatcggagttttataatcgagggccaggagggcccgggttgctctcctggttatgtatgtacttgtacataaccacctaaagaatggtgaaataaatgttcttggaaattcctac

SEQ ID NO: 692726 - DNA, 120 bp, Artificial Sequence
  ENSG00000188554_38 (sequence is synthesized)
cgagtgaagcattctcctggttctaagtacagttcattagctccccggtttcccttttctcctccttcaagtacacagataactaatctaaaatagggccttcccagtccgaaccgttgg

SEQ ID NO: 692727 - DNA, 120 bp, Artificial Sequence
  ENSG00000188554_39 (sequence is synthesized)
tatcaagtacacaggagtgccatagccttgaatctaattacctagtactttgaataaatctggaaagactagtatgcttgcaagatgatacaaatgtataaaataaacatttaaattata

SEQ ID NO: 692728 - DNA, 120 bp, Artificial Sequence
  ENSG00000188554_40 (sequence is synthesized)
atgttgtagctgtgagttggaagcacaagctactcttcacccacatgctttgtatgttgtaactattcagattgttgtgttcaaatgtgcatttggattagcaaagccaggcaaaattat

SEQ ID NO: 692729 - DNA, 120 bp, Artificial Sequence
  ENSG00000188554_41 (sequence is synthesized)
aggcaaaattatgttcccctgaacggacaaaattagatcactaagggtagttcctcggttgttccaaatgcctttttttttttttttttggtgacagggtctctgtcacccaggctggag

SEQ ID NO: 692730 - DNA, 120 bp, Artificial Sequence
  ENSG00000188554_42 (sequence is synthesized)
tcatggttcactgcagcctcaccctcccaggctcagacaatcctcccacttcagcctgccaagtagctgggatcacagactgccttttaattatttttttggagatggggtctccctata

SEQ ID NO: 692731 - DNA, 86 bp, Artificial Sequence
  ENSG00000188554_43 (sequence is synthesized)
tgccttttaattatttttttggagatggggtctccctatattgcccaggctagtctcaaactactggactcaaatgatcctcttct

SEQ ID NO: 692732 - DNA, 120 bp, Artificial Sequence
  ENSG00000188554_44 (sequence is synthesized)
ttcctcccatagattttcatttaaaatggatatgggttaagtgttattatcctcattttattaatgaggaaaattgaggcatggcatagtcagatggcatgctcaggttacctgctagtt

SEQ ID NO: 692733 - DNA, 120 bp, Artificial Sequence
  ENSG00000188554_45 (sequence is synthesized)
gtagagccataggcagtaatcaggaaatcagagatatgcccactttgatctagtcaggtatatttaatgggaaggagatcacccatggaagcaagtttgtaaactagatgtttcctcttt

SEQ ID NO: 692734 - DNA, 120 bp, Artificial Sequence
  ENSG00000188554_46 (sequence is synthesized)
gaattgggaactcaatcctgtacttccccacaaactccctttagttgcctcttcaccttggcctagctaattctccttcatacctgctgcattttctctttcctgctattgggttatttc

SEQ ID NO: 692735 - DNA, 120 bp, Artificial Sequence
  ENSG00000188554_47 (sequence is synthesized)
aacatctaattcccatttaactcttcttgttttcacttgtctggggacaggcatgaatttgaacagagttgaatacgaaatgatgtggaaatggtctacaggtcccatcaagacatggct

SEQ ID NO: 692736 - DNA, 120 bp, Artificial Sequence
  ENSG00000188554_48 (sequence is synthesized)
ccagcatgcactccaaacagcctaacattgtctttttttataggacctgctgtcctttgagctgttggatataaacattgttcaagagttggagagagtgccccacaacacccctgtggg

SEQ ID NO: 692737 - DNA, 120 bp, Artificial Sequence
  ENSG00000188554_49 (sequence is synthesized)
taagaatgtcactcatttcatcttgttcgtcttactaataggcacaaaagtaccacagcctagacactggtagtgttttattctgaggaaatggcaaggatttctcccacagtaggatag

SEQ ID NO: 692738 - DNA, 120 bp, Artificial Sequence
  ENSG00000188554_50 (sequence is synthesized)
taggatagtaaagcagcaatcatggatccgtttttcttctttcctgtcctttgtcaaaagtaacaacatgctgggcatggtggctcgtgtctataatcccagctctttgggaggccaagg

SEQ ID NO: 692739 - DNA, 69 bp, Artificial Sequence
  ENSG00000188554_51 (sequence is synthesized)
caggaggatcacttgaggccattacttttaaaaattagctgggtgtggccaggcacggtggctcacgcc

SEQ ID NO: 692740 - DNA, 120 bp, Artificial Sequence
  ENSG00000188554_52 (sequence is synthesized)
ctcaaaaaaaaaaaaaaaaaaaattagcttggcatggtggcctgcacctgtggtcccagctaccagggagactgaagtgggagaatctcctgatcccaggaggcagaggctgcagtgagc

SEQ ID NO: 692741 - DNA, 120 bp, Artificial Sequence
  ENSG00000188554_53 (sequence is synthesized)
aggcagaggctgcagtgagccaggattgtgccattgctctccagcctggatgacagagtgaaacccaatctcaaaaaacaaacaaaaaaaagaggctgggcacggtagctcacgcctgta

SEQ ID NO: 692742 - DNA, 120 bp, Artificial Sequence
  ENSG00000188554_54 (sequence is synthesized)
cttcagtccctgatcagatcagaggagccaataatttctgaagatcagacagcagccctgatggcccatctctttgaaatgggattctgtgacaggcagctgaacctacggctgctgaag

SEQ ID NO: 692743 - DNA, 120 bp, Artificial Sequence
  ENSG00000188554_55 (sequence is synthesized)
ccaaggtcagaatcgccacctgaggcctgaatatcagcgtaagatagtgtccaaagcagtcttaagaagaggtcccattaccccactctttccgccctaatggaggtctccagtttaggt

SEQ ID NO: 692744 - DNA, 120 bp, Artificial Sequence
  ENSG00000188554_56 (sequence is synthesized)
aaataaaaggattgttgggaggtggagggaaagaactactatttccaacatgcattgcggaacgaaaggccttggccacactgttccttggaaactgtagtcttatggagaggaacatcc

SEQ ID NO: 692745 - DNA, 120 bp, Artificial Sequence
  ENSG00000188554_57 (sequence is synthesized)
ccaaaggtagctatttttagcagtgttgtttcatagctgtgaagtctgtcatagttaccatttctgggccttttggaaaattgcttttgatagggtttcagtattcatatatgagatgtg

SEQ ID NO: 692746 - DNA, 120 bp, Artificial Sequence
  ENSG00000188554_58 (sequence is synthesized)
ccccaataaagggaaccaacacataaatttccttttgaacattttagaaagggaaggtaaaattgtttttagtgagataggatttagaaaacctattaattttagaaccagtatgaggag

SEQ ID NO: 692747 - DNA, 120 bp, Artificial Sequence
  ENSG00000188554_59 (sequence is synthesized)
ttggtgtggactccacccaaccagatcccaaggaaatgttctcttgtgtgaggatatgacttgtgttttgcacaaggatataacttgtgttttgcaagagcctatcaattgtttttattg

SEQ ID NO: 692748 - DNA, 120 bp, Artificial Sequence
  ENSG00000188554_60 (sequence is synthesized)
ctaggtcagaggttgagtatctcagagttgagcaggaaaaactttcatacctgcttagacagcagttcacctgttccgtttttttgctaaggcttttcctcctcttggtttgccctttgt

SEQ ID NO: 692749 - DNA, 120 bp, Artificial Sequence
  ENSG00000188554_61 (sequence is synthesized)
actcttctgtttttgttcagtttgcagtggtgaatgttttacttcctgtgttgactgtgtttctctctgaaaccctttggtaaaaatctacgtttacctggttatatctgatgataacta

SEQ ID NO: 692750 - DNA, 120 bp, Artificial Sequence
  ENSG00000188554_62 (sequence is synthesized)
aaaagggaaagaaatggtagatcttaaaagatgatctgaggtagttgtctgccttccagcaaatacctgttcatactgtcctatcagtgacagtgagacccgtctcaaaaaaaaaaaaaa

SEQ ID NO: 692751 - DNA, 120 bp, Artificial Sequence
  ENSG00000188558_0 (sequence is synthesized)
tgaagctgaagagtcctgaagctgcaggaaaaatggaggaaaccaacaacagctctgaaaagggatttcttctcctgggattttcagatcagcctcagctagagaggtttctttttgcca

SEQ ID NO: 692752 - DNA, 120 bp, Artificial Sequence
  ENSG00000188558_1 (sequence is synthesized)
tcattttgtacttctacgtcttgagccttctggggaacactgccctcatactagtatgttgtctggactccagactccacactccaatgtacttcttcctcagcaacctctcgtgtgtgg

SEQ ID NO: 692753 - DNA, 120 bp, Artificial Sequence
  ENSG00000188558_2 (sequence is synthesized)
acatctgctttaccaccagtgttgccccacagttgctggttaccatgaataagaaagacaaaaccatgagctacggtggctgtgtggcccagctctatgtggccatggggttgggctcgt

SEQ ID NO: 692754 - DNA, 120 bp, Artificial Sequence
  ENSG00000188558_3 (sequence is synthesized)
ctgagtgtattctcttggccgtcatggcttatgaccgctatgctgctgtctgccggccactgcgctacatagccattatgcaccccaggttctgtgcgtctctggccggtggagcatggc

SEQ ID NO: 692755 - DNA, 120 bp, Artificial Sequence
  ENSG00000188558_4 (sequence is synthesized)
gaggtgccagtgctcatcaaactggcctgtgtggatacgactttcaacgaggcagaactctttgtggccagtgtagtctttctaattgtcccggtgttactcatcttagtctcctatggc

SEQ ID NO: 692756 - DNA, 120 bp, Artificial Sequence
  ENSG00000188558_5 (sequence is synthesized)
tttatcactcaagctgtgttaaggataaaatcagctgcgggccgccaaaaggcctttgggacctgttcgtctcacctggttgtggtcatcattttctatgggaccatcatattcatgtac

SEQ ID NO: 692757 - DNA, 120 bp, Artificial Sequence
  ENSG00000188558_6 (sequence is synthesized)
cttcaaccggccaataggagatccaaaaaccagggaaagtttgtttctcttttctataccatagtcaccccacttttaaaccccattatctacactctgagaaacaaagatgtgaaaggg

SEQ ID NO: 692758 - DNA, 120 bp, Artificial Sequence
  ENSG00000188558_7 (sequence is synthesized)
gccttgaggaccctgatactgggtagtgctgctggacaaagccacaaggactaggaaacacctggaattctaaacaagggaaacacctcaaggcagagtgagggttcatcctccccagac

SEQ ID NO: 692759 - DNA, 120 bp, Artificial Sequence
  ENSG00000188558_8 (sequence is synthesized)
ggaagcattggaattctaaagaagggaaacacctcaaggcagcgtgaggattcatcctccccagacattcctcttgtcaatcccaaagccacagggactaggaagcattggaattctaaa

SEQ ID NO: 692760 - DNA, 120 bp, Artificial Sequence
  ENSG00000188558_9 (sequence is synthesized)
gaagagaaacacaccaaagcagcatgagggttcatcctcccagacattcctcttgtcaatccaagaccctgtgttctatctggaaaaaaatgtttgtccttcatccacctgccatcaagg

SEQ ID NO: 692761 - DNA, 120 bp, Artificial Sequence
  ENSG00000188558_10 (sequence is synthesized)
ttcatgtatccattatttccttctaatgtgccagcccatctgatagacttctactaatgcttcaaaactcagctgaaatgtcacctgcactcactagctgtcctgaaacaccatccttct

SEQ ID NO: 692762 - DNA, 120 bp, Artificial Sequence
  ENSG00000188558_11 (sequence is synthesized)
catccttgtgcagaattaactgtttcataatatgtttccatagcacttgatccacactaccatttctacatttcacatttgagatatatgtatacatatatctctaactaggcaaagcaa

SEQ ID NO: 692763 - DNA, 120 bp, Artificial Sequence
  ENSG00000188558_12 (sequence is synthesized)
tgtatataacagactgaaaaaatacatgaccattttcccagaatatgtcacttttaactggagaatggaaccatcccactctattggcttatttacaacacgagaaacacaaatattaag

SEQ ID NO: 692764 - DNA, 120 bp, Artificial Sequence
  ENSG00000188558_13 (sequence is synthesized)
agttgtgatgctttggttccacagaattgtgggatgcaaataatgactaatattttattaaaggaatcaaataagcaaacttgaattaaggagattgattaaaagttgagtaaaattgcc

SEQ ID NO: 692765 - DNA, 120 bp, Artificial Sequence
  ENSG00000188558_14 (sequence is synthesized)
tgccatatactaaaatgtgttttaacatttatacaaaattcataaaataagttattgtttttggccttaaactctggaaaacagttacttatgtaattttatacttcaaaaatttgaaat

SEQ ID NO: 692766 - DNA, 120 bp, Artificial Sequence
  ENSG00000188558_15 (sequence is synthesized)
atcccacacactgtctcacgttaacgatcatagttatatgtttggtttccaaaacagcaaaaaaaatgaaatatttagaagcattttaataaatgtattcttatatttgaccaaactttt

SEQ ID NO: 692767 - DNA, 120 bp, Artificial Sequence
  ENSG00000188558_16 (sequence is synthesized)
actttctgatttaattctgtctctatctctctgtgtatctttgtgtgtctcagcctctttcttgctttcttttcccaaaacgattgaacttcatcaattcgtcaacctcaagtattttaa

SEQ ID NO: 692768 - DNA, 120 bp, Artificial Sequence
  ENSG00000188558_17 (sequence is synthesized)
gagaactgtgcaattatagaaaaaagtgatttaatctgtggttgtaattttacttcatattctcattatgatacacatgaaaaaagcatgaaaacatcaatgcaaatgaagagtaaaatg

SEQ ID NO: 692769 - DNA, 120 bp, Artificial Sequence
  ENSG00000188558_18 (sequence is synthesized)
agcatgaaaacatcaatgcaaatgaagagtaaaatgcaggcagaatctggggtggaagtggaattttcaagtgatttagacttttcttttttggacagggtcttgctctgttgcccaggc

SEQ ID NO: 692770 - DNA, 120 bp, Artificial Sequence
  ENSG00000188558_19 (sequence is synthesized)
ttgacctcctgggtttaagtgatccctctgcctcagccttccaacattcagatttataataattcatcctggtgtgagaatattgtagcctgtctacgaatgttaaggataacgtttgga

SEQ ID NO: 692771 - DNA, 120 bp, Artificial Sequence
  ENSG00000188558_20 (sequence is synthesized)
cctgcctctcctaccaaagcctggactgaaggcaaaatggctgcgcacacaagaacaaaaaggcatcaggagaattcactaatgactcaggctgcctcttcacaaataccctgtccagct

SEQ ID NO: 692772 - DNA, 120 bp, Artificial Sequence
  ENSG00000188558_21 (sequence is synthesized)
ggcacctcttcaatatacttttagcaaacaaaatgatgaatatccaatttaacaaaaacgagggaaaagaagcctggttaaatttgtcttctaggatattcttatgtgattttcctcctc

SEQ ID NO: 692773 - DNA, 120 bp, Artificial Sequence
  ENSG00000188558_22 (sequence is synthesized)
agtagttctacaggaagcgtcacatgtacaaatgcattattcctgataacccgagcaacacagcataggaaagaatgtacctgtgtcagagtctcaatcaatttacatggaatatggccc

SEQ ID NO: 692774 - DNA, 120 bp, Artificial Sequence
  ENSG00000188558_23 (sequence is synthesized)
cagggcaaaagatgtggcatttaaaggaaagaaatagctccaggtgaaaagacaaccatgtgtaaagcaatgatatgaacacaatatgtagaaaaacctacatatgaattgtgaagcaac

SEQ ID NO: 692775 - DNA, 120 bp, Artificial Sequence
  ENSG00000188558_24 (sequence is synthesized)
cattttcaaagacaaactcacatccatttaaggtaatatggaatacaaatcccactgaaaataaaatcaaattattactgtatacaataaattcaaacataattcagaaaaaaatagaat

SEQ ID NO: 692776 - DNA, 120 bp, Artificial Sequence
  ENSG00000188558_25 (sequence is synthesized)
atctgcttattgctgaaattagcatctttagctgtaagttatttgcacccaaaaggaaaccagaaaataatagatataacataggcaaagcaacctaaaaaaactacttaactgcagatg

SEQ ID NO: 692777 - DNA, 120 bp, Artificial Sequence
  ENSG00000188558_26 (sequence is synthesized)
aaaatgggaacacatttgaaaataaaatcctgttactactttcttgaatttagagctttcctatgatatggatatgtttatactgcttttataatcatcatacatgtataatttcatact

SEQ ID NO: 692778 - DNA, 120 bp, Artificial Sequence
  ENSG00000188558_27 (sequence is synthesized)
atttttatttataatgtgagcatttttctgattaatctaaaaaatatccaccatttattaaaaatcttccctataattgaataacatgagtagtttctcttttttaaatacctacattga

SEQ ID NO: 692779 - DNA, 120 bp, Artificial Sequence
  ENSG00000188558_28 (sequence is synthesized)
gcatacttttgtttgtgaatgcttataattatgtacttataatgtattttataaatacaattagtaaatctaaaacaggtacacatcagtcaatttgcacacattactagcttgatctgc

SEQ ID NO: 692780 - DNA, 120 bp, Artificial Sequence
  ENSG00000188558_29 (sequence is synthesized)
agaacacgttttcaaaggatgcgccaagaaaaaaactatcacttagttaaatgaccattcagtattgcaattatttaaaaactatacaatgagaatgctgtaataagtatatggttccac

SEQ ID NO: 692781 - DNA, 120 bp, Artificial Sequence
  ENSG00000188558_30 (sequence is synthesized)
cactccaaacaccatgaattttttttaaaagatatttttaagaaaaaataaaatgattttacataacaaatattaatgaattcatgaaaaacaaaaaccatataggaccacagctcagag

SEQ ID NO: 692782 - DNA, 120 bp, Artificial Sequence
  ENSG00000188558_31 (sequence is synthesized)
aagaaaaatgggaggcacttactatttaaaccctaacccaaatggtcagtaaaaagacaagtaccagctactacaaaaaaacaccaaaatataaagaccaatgatactgtgaagaaactg

SEQ ID NO: 692783 - DNA, 120 bp, Artificial Sequence
  ENSG00000188558_32 (sequence is synthesized)
cattacctaatgtgcaaaataaccagctagcatcacgatgacaagatcaaattcacacataaaaatattaatcttaggcagggcacagtggctcacacttgtaatcatagcactttggga

SEQ ID NO: 692784 - DNA, 120 bp, Artificial Sequence
  ENSG00000188558_33 (sequence is synthesized)
gtaatcatagcactttgggaggctgagtcaggtggatcatgaggtcaggagttcaagctcagcctggccagcatggtgaaaccccatgtctcctaaaaaaaatacaaaaaattagccagg

SEQ ID NO: 692785 - DNA, 120 bp, Artificial Sequence
  ENSG00000188558_34 (sequence is synthesized)
aaaaaaaaaagaaaaaaatgtatatgttatcactttggtctcatttgagtatgaatgatcagacagggaaaataaaagtaccaagaaaaataaacaagggtcttataataaaagcaacac

SEQ ID NO: 692786 - DNA, 120 bp, Artificial Sequence
  ENSG00000188558_35 (sequence is synthesized)
agaatggccaaagctatcctgagcaaaaagaggaaaaaagctggagccatcacattactagacttcaaaatatactaccaagttatagttaccaaaacagcctggtattggcataaaaac

SEQ ID NO: 692787 - DNA, 120 bp, Artificial Sequence
  ENSG00000188558_36 (sequence is synthesized)
agacacatgggccaatagaacagaatggagaacctagaaatagattcatgtatttacagccaactgatttttgacaaaggtgccaagaacatacactggggaaaggagagtttcttcaat

SEQ ID NO: 692788 - DNA, 120 bp, Artificial Sequence
  ENSG00000188558_37 (sequence is synthesized)
aaatgtcctggaacagtaatcagcagctggggctggtaccatagggatacttaaagttgaatttatcaattgctggaagctcatgtgaactaacttgacaaataaaaaaaatgttgagcc

SEQ ID NO: 692789 - DNA, 120 bp, Artificial Sequence
  ENSG00000188558_38 (sequence is synthesized)
ccagtcttaggaaatcctccctatactcatgatttttaccttcaggagtctcaacagcttctcactgtgcaaagtagagagaaattcccttttgctttggcagagagaggagaaaataaa

SEQ ID NO: 692790 - DNA, 120 bp, Artificial Sequence
  ENSG00000188558_39 (sequence is synthesized)
ttcccttttgctttggcagagagaggagaaaataaacatttgaaatatgcccagagctctctgttcaccataacctgatctcagtagtaactatttaatgattgccattctaactggtgt

SEQ ID NO: 692791 - DNA, 120 bp, Artificial Sequence
  ENSG00000188558_40 (sequence is synthesized)
gccataccttaagtctggaccatttatccctgtagggagtccctcttctcctctgttctctttcagaactacttattactttaggttcagtgtatgtagcatatggtgactctatgggtt

SEQ ID NO: 692792 - DNA, 120 bp, Artificial Sequence
  ENSG00000188558_41 (sequence is synthesized)
tcagttttctgaaccccaaatatgcaaaaatatagaaaaagcagaccaggcatcccaccttctgtgtgccactaagggagcatctcttcctctttctcccctaataagttgtatattatt

SEQ ID NO: 692793 - DNA, 120 bp, Artificial Sequence
  ENSG00000188558_42 (sequence is synthesized)
ttctcagtattttaattttttgctatttatattatctgagatttatcattggaatcatacaaatattaaaccaggaaagatcacccaggaagaaattgagatcacccacaatatcagtat

SEQ ID NO: 692794 - DNA, 80 bp, Artificial Sequence
  ENSG00000188559_0 (sequence is synthesized)
cagcagcggggctgggggcggcgagtggcccgcgcgacacgcgccggcctcgaccctatgctttgattcgcgtggcgcag

SEQ ID NO: 692795 - DNA, 120 bp, Artificial Sequence
  ENSG00000188559_1 (sequence is synthesized)
gcgcctactgccccgccggcggggcccgggcttcctgccgcgggatgttctcccgaaggagccacggggatgtgaagaagtccacccagaaggtgctggacccgaagaaggacgtgctga

SEQ ID NO: 692796 - DNA, 120 bp, Artificial Sequence
  ENSG00000188559_2 (sequence is synthesized)
cccgcctgaagcacctgcgggcgctgctggataatgtggatgcaaatgatcttaagcagttttttgagaccaactattctcagatatatttcatcttctatgaaaattttatagcactgg

SEQ ID NO: 692797 - DNA, 120 bp, Artificial Sequence
  ENSG00000188559_3 (sequence is synthesized)
aaaatagtttgaaattaaaagggaataataagtcacaaagggaggagctggactccatcctcttcctttttgaaaaaatactgcagtttctacctgaacgaattttctttcgatggcatt

SEQ ID NO: 692798 - DNA, 120 bp, Artificial Sequence
  ENSG00000188559_4 (sequence is synthesized)
accagagtataggctcaactttaaagaagcttctacacactggaaattctattaagataagatgtgaaggaatcaggctgtttcttctgtggcttcaagcacttcagacaaactgtgcag

SEQ ID NO: 692799 - DNA, 120 bp, Artificial Sequence
  ENSG00000188559_5 (sequence is synthesized)
aagagcaggttctgatttttgcttgcctggtgcctggtttcccagcagtcatgtcatccaggggcccttgcacactggagacactcatcaatcccagccctagtgtagctgatgtaaaga

SEQ ID NO: 692800 - DNA, 120 bp, Artificial Sequence
  ENSG00000188559_6 (sequence is synthesized)
tatatccagaagaaatcactccactcctaccagccatatcaggggagaagattgctgaggaccaaacctgcttttttcttcaaatactgttgaagtatatggttattcaggctgcgagct

SEQ ID NO: 692801 - DNA, 120 bp, Artificial Sequence
  ENSG00000188559_7 (sequence is synthesized)
tggagtggaagaataaggagaatcaagatactggttttaaatttctttttacattgtttcgaaagtattatcttcctcatttatttccatcatttactaagttaacaaacatctacaaac

SEQ ID NO: 692802 - DNA, 120 bp, Artificial Sequence
  ENSG00000188559_8 (sequence is synthesized)
ctgtacttgacatcccccatttgagaccaaagcctgtgtacattactaccactcgagacaatgagaacatttacagtacaaagattccatatatggcagctcgtgttgtttttattaagt

SEQ ID NO: 692803 - DNA, 120 bp, Artificial Sequence
  ENSG00000188559_9 (sequence is synthesized)
ggattgtaaccttctttttggaaaaaaagtatctaactgcaacacaaaacactaaaaatggagttgatgtattgcctaaaatcatccagactgttggtggtggtgctgtgcaggagagag

SEQ ID NO: 692804 - DNA, 120 bp, Artificial Sequence
  ENSG00000188559_10 (sequence is synthesized)
cgcctgagctggatggtggtgggcccacggagcaggacaaaagccattctaacagcagcaccttgtcggaccgaagactcagcaactccagcctctgtagcattgaagaagagcaccgaa

SEQ ID NO: 692805 - DNA, 120 bp, Artificial Sequence
  ENSG00000188559_11 (sequence is synthesized)
tggtgtatgaaatggtacagcggattctcttgtcaacacgaggttatgtcaacttcgtgaatgaagtatttcaccaggcatttttgttgccttcctgtgagatagctgtaacaagaaaag

SEQ ID NO: 692806 - DNA, 120 bp, Artificial Sequence
  ENSG00000188559_12 (sequence is synthesized)
tagttcaagtgtacagaaagtggattctccaggacaaacctgtgttcatggaggagccagatagaaaagatgttgcccaagaagatgctgaaaaattaggattttccgagactgatagca

SEQ ID NO: 692807 - DNA, 120 bp, Artificial Sequence
  ENSG00000188559_13 (sequence is synthesized)
aggaggcctcatctgaaagttctggtcataaacgatcttccagttggggacgcacatactccttcacaagtgcaatgagcagagggtgtgtgacagaggaggaaaatacaaatgtgaaag

SEQ ID NO: 692808 - DNA, 120 bp, Artificial Sequence
  ENSG00000188559_14 (sequence is synthesized)
ccggcgtccaggctttgttgcaggtatttttgacgaactctgcaaacatctttttgttggaaccatgtgctgaagttcctgtgctcttgaaagaacaagttgatgcttgtaaagctgttt

SEQ ID NO: 692809 - DNA, 120 bp, Artificial Sequence
  ENSG00000188559_15 (sequence is synthesized)
tgattatttttaggcgcatgataatggagcttacaatgaataaaaagacatgggaacagatgttgcaaatactactcaggataacagaagctgtcatgcagaagccaaaggataaacaaa

SEQ ID NO: 692810 - DNA, 120 bp, Artificial Sequence
  ENSG00000188559_16 (sequence is synthesized)
taaaggacttgtttgcccagagcttggcagggttactatttaggacgctcatggtagcttggatccgagcaaacctctgtgtgtacatttctcgagagctctgggatgactttcttggtg

SEQ ID NO: 692811 - DNA, 120 bp, Artificial Sequence
  ENSG00000188559_17 (sequence is synthesized)
tgctgtcctccctcacggaatgggaggaacttataaacgagtgggccaacattatggactccttgacagcagtgcttgcaagaaccgtttatggagttgagatgacaaacctacctctgg

SEQ ID NO: 692812 - DNA, 120 bp, Artificial Sequence
  ENSG00000188559_18 (sequence is synthesized)
ataaattaagtgaacaaaaggaaaagaagcaacgaggcaaaggctgtgttctagatcctcagaaaggaaccaccgtggggaggtccttttctctcagctggcggagccacccagatgtga

SEQ ID NO: 692813 - DNA, 120 bp, Artificial Sequence
  ENSG00000188559_19 (sequence is synthesized)
ccgaaccgatgcgatttaggagtgccaccacgtctggagcaccgggagtggaaaaggcaagaaatattgttcgccaaaaagcaactgaagtggaggagtgtcaacagtcagaaaatgcac

SEQ ID NO: 692814 - DNA, 120 bp, Artificial Sequence
  ENSG00000188559_20 (sequence is synthesized)
ctgcagccggatctggccatctcacagtgggacagcagcagcaggtccttcggagcagcagcacctccgacatccccgagccgctgtgctcagattcttctcagggtcaaaaggcagaaa

SEQ ID NO: 692815 - DNA, 120 bp, Artificial Sequence
  ENSG00000188559_21 (sequence is synthesized)
acacacagaattcgagttcttcagagcctcagcctattcaagagaataaaggacatgtgaagagagaacatgaaggaataacaatcttagttcgaagaagcagcagccctgctgaattgg

SEQ ID NO: 692816 - DNA, 120 bp, Artificial Sequence
  ENSG00000188559_22 (sequence is synthesized)
atttgaaagatgatttgcagcagacacaaggaaaatgtagggaaagacagaagagtgaaagtaccaacagtgacacaactctgggctgtaccaatgaggcagagctgtccatgggcccat

SEQ ID NO: 692817 - DNA, 120 bp, Artificial Sequence
  ENSG00000188559_23 (sequence is synthesized)
ggcagacctgtgaggaagacccagaactgaatactcccacagatgttgtggctgatgctgatgcccgtcattggttacaactgagtcccaccgatgcttcaaatttaacagatagcagcg

SEQ ID NO: 692818 - DNA, 120 bp, Artificial Sequence
  ENSG00000188559_24 (sequence is synthesized)
agtgcctcacagatgactgtagtataatcgccggggggagcctcactggttggcacccagactctgctgctgtgttatggcgaagggtcttggggatcctcggagatgtgaataacatcc

SEQ ID NO: 692819 - DNA, 120 bp, Artificial Sequence
  ENSG00000188559_25 (sequence is synthesized)
agtcacccaagatccatgccagagttttctgctatctctatgaactctggtacaaactagcaaagatacgggataatctagcaataagcctggataaccagtcttctccatctcctccag

SEQ ID NO: 692820 - DNA, 120 bp, Artificial Sequence
  ENSG00000188559_26 (sequence is synthesized)
ttttgatcccaccactcagaatgtttgcatcatggctgtttaaggcggcgacactgccaaatgaatataaggaaggcaaactacaagcctacaggctgatctgtgccatgatgaccagac

SEQ ID NO: 692821 - DNA, 120 bp, Artificial Sequence
  ENSG00000188559_27 (sequence is synthesized)
gccaggacgttctgccaaactcagatttcctggtgcatttttaccttgtgatgcacctgggattaaccagcgaggatcaggatatcttaaatacgatcataaggcactgtccaccccgct

SEQ ID NO: 692822 - DNA, 120 bp, Artificial Sequence
  ENSG00000188559_28 (sequence is synthesized)
ttttctccctgggttttcctggcttctcaatgctggtgggggacttcatcacggccgctgccagggtccttagcacagacattttgacggcgcctcgttcagaggctgtcactgtcctcg

SEQ ID NO: 692823 - DNA, 120 bp, Artificial Sequence
  ENSG00000188559_29 (sequence is synthesized)
gctctctggtctgctttccaaatacctaccaggagattcctttactgcagtcagtgccagaagtaaatgaggccattacaggaactgaagatgtcaagcattacctcataaatattttac

SEQ ID NO: 692824 - DNA, 120 bp, Artificial Sequence
  ENSG00000188559_30 (sequence is synthesized)
tgaagaatgccacagaagaaccaaatgaatatgcaagatgcattgctgtttgctcccttggggtctggatatgtgaagagcttgcacagtgtacaagccaccctcaggtgaaagaggcca

SEQ ID NO: 692825 - DNA, 120 bp, Artificial Sequence
  ENSG00000188559_31 (sequence is synthesized)
tcaatgtgataggagtaactctgaagtttcccaacaaaatcgtggcccaggtagcttgcgatgtccttcagttgctggtttcctactgggagaagcttcagatgtttgaaacctctctgc

SEQ ID NO: 692826 - DNA, 120 bp, Artificial Sequence
  ENSG00000188559_32 (sequence is synthesized)
ctcggaaaatggcagaaatcctcgtggccacagttgcttttcttttaccaagtgcagagtactcctcagtggaaacagacaagaagtttattgtgtccttgctactctgcctcttggact

SEQ ID NO: 692827 - DNA, 120 bp, Artificial Sequence
  ENSG00000188559_33 (sequence is synthesized)
ggtgcatggcattgcccgtgagtgtccttctccaccccgtgtccacagcagtcctagaggagcagcattcggccagagcccccttgctggattatatctacagggttttgcactgctgtg

SEQ ID NO: 692828 - DNA, 120 bp, Artificial Sequence
  ENSG00000188559_34 (sequence is synthesized)
tgtgtggctcaagcacgtacacccaacagagtcactacatactgaccctggctgacttgtcatccacggattatgaccccttcctgccactggcaaatgtgaagagctctgagccagtcc

SEQ ID NO: 692829 - DNA, 120 bp, Artificial Sequence
  ENSG00000188559_35 (sequence is synthesized)
agtatcattcatcagcagaattgggtaacctgctgactgttgaagaggagaagaagagaagaagtttggagttgatccctttgactgctcgaatggtgatggcccacctggtgaaccacc

SEQ ID NO: 692830 - DNA, 120 bp, Artificial Sequence
  ENSG00000188559_36 (sequence is synthesized)
tggggcactaccccctcagtgggggccctgccatactgcacagccttgtcagcgagaaccatgacaatgcccatgtggaaggctccgagctgtcctttgaggtgttcagaagtccaaacc

SEQ ID NO: 692831 - DNA, 120 bp, Artificial Sequence
  ENSG00000188559_37 (sequence is synthesized)
tgcagctgtttgtatttaatgatagcaccctcatctcctaccttcagacacccacagaaggaccggtagggggatcaccagtgggctctctctctgatgtgagagtaattgtgagggata

SEQ ID NO: 692832 - DNA, 120 bp, Artificial Sequence
  ENSG00000188559_38 (sequence is synthesized)
tctcagggaagtactcttgggatggtaaggttttatatggacctttggaaggctgcttagcacccaatggaagaaatccttcatttctgatttcgagctggcatcgtgacacatttggac

SEQ ID NO: 692833 - DNA, 120 bp, Artificial Sequence
  ENSG00000188559_39 (sequence is synthesized)
ggccatacaagtcctgaatgccttttaccgtcacagctaaatctaaatgaaccttccctaaccccatgtggcatgaactatgaccaagagaaggaaatcattgaggtcattttgcgccaa

SEQ ID NO: 692834 - DNA, 120 bp, Artificial Sequence
  ENSG00000188559_40 (sequence is synthesized)
aatgctcaagaggatgagtatatccagagtcataacttcgattctgcaatgaaagtcaccagccaagggcagccctccccagtggagccccgaggacccttttatttctgcaggttattg

SEQ ID NO: 692835 - DNA, 120 bp, Artificial Sequence
  ENSG00000188559_41 (sequence is synthesized)
cttgatgacttgggaatgaattcttgggacagaaggaagaattttcatctattgaagaaaaattcaaaattattgagagagctgaaaaatttggactcccgccagtgccgtgagacacac

SEQ ID NO: 692836 - DNA, 120 bp, Artificial Sequence
  ENSG00000188559_42 (sequence is synthesized)
aaaatcgcagtgttttacattgctgaaggtcaagaagacaagtgttcaatcctctctaatgaaagaggaagccaagcatatgaagactttgttgctggacttggatgggaggtggatctc

SEQ ID NO: 692837 - DNA, 120 bp, Artificial Sequence
  ENSG00000188559_43 (sequence is synthesized)
tccacccactgtgggttcatgggtggccttcagcgcaatggcagcaccgggcagacggccccttactatgctacctcaactgtggaagtgattttccatgtttccactcgaatgccgtca

SEQ ID NO: 692838 - DNA, 120 bp, Artificial Sequence
  ENSG00000188559_44 (sequence is synthesized)
gactcagatgattccctcaccaaaaagcttcgtcacttggggaatgacgaggtccatatcgtctggtctgaacactccagagactaccgcaggggtattatcccaactgcctttggagat

SEQ ID NO: 692839 - DNA, 120 bp, Artificial Sequence
  ENSG00000188559_45 (sequence is synthesized)
gtttcaatcattatttacccaatgaagaatcacatgttcttcatcgcgataacgaagaaacctgaggttccattttttgggcctctgtttgatggagccatagtgagtgggaagctgctg

SEQ ID NO: 692840 - DNA, 120 bp, Artificial Sequence
  ENSG00000188559_46 (sequence is synthesized)
ccaagccttgtatgtgccacgtgcatcaacgccagcagggctgtgaagtgcctcatcccactctaccagagcttctatgaagagcgagctctgtatctcgaagcaataattcagaaccac

SEQ ID NO: 692841 - DNA, 120 bp, Artificial Sequence
  ENSG00000188559_47 (sequence is synthesized)
cgcgaagtaatgacattcgaggatttcgcagcccaagtcttttctccctctcccagctactccctcagcggaacggattaaaacacgtaaaggtctcatttcaatatttgagcaaggggc

SEQ ID NO: 692842 - DNA, 120 bp, Artificial Sequence
  ENSG00000188559_48 (sequence is synthesized)
cctggcctccagtctgagtgctgacctcgaagagcccctgagtgaggaggagacagaacaccctctcctgcctctgccccgagccactaaacccagaatctccaggaaatttcgttgctg

SEQ ID NO: 692843 - DNA, 120 bp, Artificial Sequence
  ENSG00000188559_49 (sequence is synthesized)
tactagtgccctcagcaggtcttcccattagtggacttctgaagcccatggtgaatcccactaccgtgtctcagatgggactcaaactaggctgtatcatcttgtcctgaaacctcacaa

SEQ ID NO: 692844 - DNA, 120 bp, Artificial Sequence
  ENSG00000188559_50 (sequence is synthesized)
accttggacttccaaagaagaaaagaaaaagtcaccaaaaaccagagatgaacccactgacacgtgggcactggtgtggctgctctgggcagatgacagcaggaaaagattctgcgcttt

SEQ ID NO: 692845 - DNA, 120 bp, Artificial Sequence
  ENSG00000188559_51 (sequence is synthesized)
cagggagggggcagagggcagcttgcttctgcaccccaagttgtttcttctcatttatgaacccaagcatgattcacaaaggggctggcaaaacaattgtctaattgaggaatctgatct

SEQ ID NO: 692846 - DNA, 120 bp, Artificial Sequence
  ENSG00000188559_52 (sequence is synthesized)
gcattgattttgctagttccttttatgttaggatttatggtttactcaaaaatttcatcatcatggaaattggctttccccggggtcttttgcccaggagaagttttacctcagttgtcc

SEQ ID NO: 692847 - DNA, 120 bp, Artificial Sequence
  ENSG00000188559_53 (sequence is synthesized)
agtgttttcccacatggtacctgacgcccgctaactaagcagaggctctcctcaccacgcagaggcgcttcaggtcatgacagtgatgcccctatcttagaacactcagaagattccaga

SEQ ID NO: 692848 - DNA, 120 bp, Artificial Sequence
  ENSG00000188559_54 (sequence is synthesized)
aatacagggtcctgtccttgcataagttcctgcaggacaggaagtgtcccaaggctcaaaacaacacagaccacatccacacaaaaggcgcatgccggcttcaggcgctaggctgagacg

SEQ ID NO: 692849 - DNA, 120 bp, Artificial Sequence
  ENSG00000188559_55 (sequence is synthesized)
ggtaccccccgaatggccttgtgcctccaaaagcctcacgctgcaactttgctgctcctgtctgttgcccagagaggcctcacacaggcctcagaaatgtttcttgtcacacaaagcttt

SEQ ID NO: 692850 - DNA, 120 bp, Artificial Sequence
  ENSG00000188559_56 (sequence is synthesized)
tggtagccgattccaagcgagggatttaatccttacatttttgcccatttggctccaaggaaggcttattagacctgtttttttgttgttgttgtttttttttcttaaaaacaaaatgaa

SEQ ID NO: 692851 - DNA, 120 bp, Artificial Sequence
  ENSG00000188559_57 (sequence is synthesized)
tgaatgaatgaaaagagaagcaatggtgagccctctcctgctggggcgccctgggtgggccttgcccgtcctgcagcagagaaatcagtcagcagcgaagagctgctggcgcaggcccca

SEQ ID NO: 692852 - DNA, 120 bp, Artificial Sequence
  ENSG00000188559_58 (sequence is synthesized)
ggctgtgtcctggacccttgacctgcctcagagctagaggtttgctccaccccgcacttcacttgggaagtaaatccaagaagcttaccagagtccatcgccactgcgcaggctttgttc

SEQ ID NO: 692853 - DNA, 120 bp, Artificial Sequence
  ENSG00000188559_59 (sequence is synthesized)
tcacagcggccaggtacagagcaacgccctgcagtgggaagggacagcagcacgagagacgcagcccctaactcagggcttatgatgggtgggctggtcctgggaaaggcgggccctgtg

SEQ ID NO: 692854 - DNA, 120 bp, Artificial Sequence
  ENSG00000188559_60 (sequence is synthesized)
cgggaggcctccccaccttcctgtgccctctgccctctgcccttgcacacacttgttaccttcaggctgcttggccacccaggcctgaagaagccttctgaggctctcaccccatcagaa

SEQ ID NO: 692855 - DNA, 120 bp, Artificial Sequence
  ENSG00000188559_61 (sequence is synthesized)
cggccattttcactgaggagccagttttttccatttgccatggagctggtttggctggaacctggcctttgtagggaaaacggggagactcaggagccagactcactcttgggacaaatg

SEQ ID NO: 692856 - DNA, 120 bp, Artificial Sequence
  ENSG00000188559_62 (sequence is synthesized)
agaaagagctgagccagtcgttcctgtcggaagggcgggcctgctcatcctggcgagaatttgcttttctgctttataggggattgcaggccaggcccactgacaggagcaccttgagaa

SEQ ID NO: 692857 - DNA, 120 bp, Artificial Sequence
  ENSG00000188559_63 (sequence is synthesized)
ccacctgaacagaagagaatgagggtgccccaaagtggaaggaagcttctggcccctgggccgttttgggaagggcccaggatactcacgggggctgaagggcaatgtgaagagtgactg

SEQ ID NO: 692858 - DNA, 120 bp, Artificial Sequence
  ENSG00000188559_64 (sequence is synthesized)
caagtcctggcattttctgtggtgtcagcaaatgcccctttattttaaatgattccagacatctgggcagcatagcttggccaccatcactcaggcttgatcctgctgttgagctgctcc

SEQ ID NO: 692859 - DNA, 120 bp, Artificial Sequence
  ENSG00000188559_65 (sequence is synthesized)
tgtctcctgtttacctcactcctgttgggaaggccatcgcatgctcctaggctccagagtcccctgtaggtctctaccagcaggtcgcctctgggagaacgtttcatcttcaggctctag

SEQ ID NO: 692860 - DNA, 120 bp, Artificial Sequence
  ENSG00000188559_66 (sequence is synthesized)
aaactcctgttgcggaattgctggctttagtagaaaagatatgtcaggatttagaaatcgtattgaactctcctggacttctgctccatgatttcattttgctttcacgaaccagcgatc

SEQ ID NO: 692861 - DNA, 120 bp, Artificial Sequence
  ENSG00000188559_67 (sequence is synthesized)
cctaccttggggtgggaaattcaattgtaggcagcaaataactcaaccctcctgtaacccctgaggattataacgaccccatgacccccgatgacagccagcagtttggtgactagagtt

SEQ ID NO: 692862 - DNA, 120 bp, Artificial Sequence
  ENSG00000188559_68 (sequence is synthesized)
ttttgagcctgccattctcagtagcagctttggtctggagatggaacgtggagcagggaatctgacagccacgtttctcgtgatcacgtggactggagttgtttttgttatctggggtgg

SEQ ID NO: 692863 - DNA, 120 bp, Artificial Sequence
  ENSG00000188559_69 (sequence is synthesized)
aaaattgcaatgatcaagtttcttttttattttttttttacttagaaaagcaaatattgtgtttttgtaataaatccctttcagcaaaattgcggaggatcattcatccactagggcccc

SEQ ID NO: 692864 - DNA, 120 bp, Artificial Sequence
  ENSG00000188559_70 (sequence is synthesized)
acctgaggcacagcgctgactcatcacggtggtaccagtaggtcagccatctggaaacagaagtggccctaattgggccaaaatgtggtaagactcgctggcctcaggcagggccaggcc

SEQ ID NO: 692865 - DNA, 120 bp, Artificial Sequence
  ENSG00000188559_71 (sequence is synthesized)
agttccctcacttctctgcacacctattcccagattccatccagagcaaagctgatgtttatcgtctcattgtacttaggctttcgtactttaaaaaattatgactttttaaaaataagc

SEQ ID NO: 692866 - DNA, 120 bp, Artificial Sequence
  ENSG00000188559_72 (sequence is synthesized)
cttcagcagacagaagtgaagaaatttagcctgggttgcctcagcaacaaagtctgcggttcctaagagccacatgttggggaagtggggtgacccaaacttggtgacataggttgattg

SEQ ID NO: 692867 - DNA, 120 bp, Artificial Sequence
  ENSG00000188559_73 (sequence is synthesized)
atcagaccctcagccttacaagcaagagctcatgcagatccacagagccatgcacatcctgtcttcctgaccttcctcaggtggcaccacctgcgccccatggacctgctgtatcggtgt

SEQ ID NO: 692868 - DNA, 120 bp, Artificial Sequence
  ENSG00000188559_74 (sequence is synthesized)
catgtggaggtctgatgaatcctttaaaacctaactgtgatgtcgtaaatgtaactgtgctacctttatatctactgaagggcagcgtctgcatccgagggaaattcaacatgaaacaac

SEQ ID NO: 692869 - DNA, 120 bp, Artificial Sequence
  ENSG00000188559_75 (sequence is synthesized)
catcgttttagttgcactcagtctgtccatatgacatacacatgaagtgaatgtttccttatgttttcaggtctacaatgtttagtacatgtaaataaggaaaaaatttgataaatatgg

SEQ ID NO: 692870 - DNA, 120 bp, Artificial Sequence
  ENSG00000188559_76 (sequence is synthesized)
taaattaagttatagcgtgtcatttgattcttattttgctgtctcttgttatttaattttcctaatgctccacatctaggttccttcctaggtggtgggaacaccttgcagacgtgtgtg

SEQ ID NO: 692871 - DNA, 120 bp, Artificial Sequence
  ENSG00000188559_77 (sequence is synthesized)
caccaggacacaccgcggcccaggcagccacaccgagaaagcacacatctccactgatggcagccacccgactctccagttaacctcttttactctttaattctgatttactgtgatgat

SEQ ID NO: 692872 - DNA, 120 bp, Artificial Sequence
  ENSG00000188559_78 (sequence is synthesized)
ttaataaagtggaaacacagcacttcagtgctatatgtttctctcattctcattatagtttataagaaaataaagttcaccctggcatctaataaaaaggtggctttcatttttattgga

SEQ ID NO: 692873 - DNA, 120 bp, Artificial Sequence
  ENSG00000188559_79 (sequence is synthesized)
ctgaggctttgcctgccactaaaagcgtcccgctcctccttcacaccgtgagcgctctcttacctggtctctcttactcttcttgctctcacaggctgtcagaagtggaggagtgtcaac

SEQ ID NO: 692874 - DNA, 120 bp, Artificial Sequence
  ENSG00000188559_80 (sequence is synthesized)
agagcttgtatctttttgctttaaatgtgtaacttactaaccatcccagaatcaagattcctggcagtttttcataagaggtaagtattcaaaactgaattgaagagggaagagaatttt

SEQ ID NO: 692875 - DNA, 120 bp, Artificial Sequence
  ENSG00000188559_81 (sequence is synthesized)
tttcaacctctgttaaaaataacatagtggtttttcatagcatttgttaatttatattaaatataataattttatgctgcattaaacttagagtttactttcataatttactcacatacg

SEQ ID NO: 692876 - DNA, 120 bp, Artificial Sequence
  ENSG00000188559_82 (sequence is synthesized)
tttgtgtctgagaagctgtgaccattatgagatgctcatatcttcttaggtattttgccccacgttcagtctcatcctgtatccctcttatttgtggcagtccattgtatataaggtggg

SEQ ID NO: 692877 - DNA, 120 bp, Artificial Sequence
  ENSG00000188559_83 (sequence is synthesized)
atgctgagcaaaacgtatcgctcattcagagtgcctaccagaaaccaaagcaaatgaaatgaccctaataaatcaaagaatgtggcaggtaccacctgagaagtgcaagtaggtttctgg

SEQ ID NO: 692878 - DNA, 120 bp, Artificial Sequence
  ENSG00000188559_84 (sequence is synthesized)
ttgtaattttcccaaatcattgatattttctctagttcctgattttgtttccaaaaacagaataaatttcactcctaaaattttttcctcaaacattaattggcctgctgtagtccttaa

SEQ ID NO: 692879 - DNA, 120 bp, Artificial Sequence
  ENSG00000188559_85 (sequence is synthesized)
attcaagcatgatctcaagttataagaaaaagagattaagatgggtgaccttataaaattgatgcaaaaaaagtgacctcctaataaaacttagaatctctttgtttctaattggtattg

SEQ ID NO: 692880 - DNA, 120 bp, Artificial Sequence
  ENSG00000188559_86 (sequence is synthesized)
ataataatttgaaacatattgtgtttgacctctatatatacttctcccaacctgatagtaagtgatgtgttgctatagcaagtgagagttgggggtagatgaaaactatcccatgtgaat

SEQ ID NO: 692881 - DNA, 120 bp, Artificial Sequence
  ENSG00000188559_87 (sequence is synthesized)
agatacggttcatgaaaaaatacctttcattaaaatcctggtcacttcattgactgatattctgcctttagattaaaaaaaaatacatatgccatgtggcaacttaaaattatcatagaa

SEQ ID NO: 692882 - DNA, 120 bp, Artificial Sequence
  ENSG00000188559_88 (sequence is synthesized)
atgagtagtagaaaagagctattaggtcccatctggtccctcccctgggggccagggcaggattattcccttcagtgtactctctcgtgctttgtccaggctggtggtgagtgttttgga

SEQ ID NO: 692883 - DNA, 120 bp, Artificial Sequence
  ENSG00000188559_89 (sequence is synthesized)
gatggcattctttgcagtgatttccacaacactgtagacgtaatcttgtggctggtgtcaatttggccttcagcatggagtttttatttcacatactattaaaaagagcctcttggcaga

SEQ ID NO: 692884 - DNA, 120 bp, Artificial Sequence
  ENSG00000188559_90 (sequence is synthesized)
cagaaatgagaaagaactattcagcgattagtttgtcagtttgcatgtcaactaggacgagctgggcacgcatcagtcaagtatgttggaccaaggcagcaaaaaaaaaaaaaaaaaaaa

SEQ ID NO: 692885 - DNA, 120 bp, Artificial Sequence
  ENSG00000188559_91 (sequence is synthesized)
ttattttacaaatgagaaaattccattttatattaattccattgtgacttttgtcatgtcaccttctctacttactgaacttctcattataaaatacttgctttgttattttgtttaaca

SEQ ID NO: 692886 - DNA, 120 bp, Artificial Sequence
  ENSG00000188559_92 (sequence is synthesized)
ctgctttctcaaataagaattaatgtgatacaattggaatgatcaggtttagggaaaatggtatttttaaaagttcaaaggatactattcagaatcactttgaaaacttttcaagcagtg

SEQ ID NO: 692887 - DNA, 120 bp, Artificial Sequence
  ENSG00000188559_93 (sequence is synthesized)
acacatcaggactaatgtggataccagctagggctactgatgctattgtgtgttagtaaatgtactctaactcacaaaatagctaacttgacatctcaaacaacaatgtagtacagaaat

SEQ ID NO: 692888 - DNA, 120 bp, Artificial Sequence
  ENSG00000188559_94 (sequence is synthesized)
caaacaacaatgtagtacagaaattaggaaaaatattttaaaaactattatgttgatcattatcaatattttaaacttttttttgtcttgtacctggagaaaatttaattggtattattc

SEQ ID NO: 692889 - DNA, 120 bp, Artificial Sequence
  ENSG00000188566_0 (sequence is synthesized)
atgccgagcccgcagcttctggtgctcttcggcagccagacaggcacggctcaggatgtgtcggagagactgggtcgcgaggcccggcgccggcggcttggctgccgggtgcaggccctg

SEQ ID NO: 692890 - DNA, 120 bp, Artificial Sequence
  ENSG00000188566_1 (sequence is synthesized)
gactcctacccggtggtgaatctgattaacgagcccctggtgatatttgtttgtgcaactacaggccaaggagacccccctgacaacatgaagaacttctggaggtttatattccggaag

SEQ ID NO: 692891 - DNA, 120 bp, Artificial Sequence
  ENSG00000188566_2 (sequence is synthesized)
aacctgccctccactgccctctgtcagatggactttgccgtcctgggcctcggggactcctcatacgccaagttcaacttcgtggccaagaagctgcaccgacggctactgcagcttggg

SEQ ID NO: 692892 - DNA, 120 bp, Artificial Sequence
  ENSG00000188566_3 (sequence is synthesized)
ggcagcgccctcctgcccgtgtgcctgggcgatgaccagcatgagctggggcccgacgctgctgtggacccctggctgcgagacttgtgggacagggttctggggctgtacccgccgcct

SEQ ID NO: 692893 - DNA, 120 bp, Artificial Sequence
  ENSG00000188566_4 (sequence is synthesized)
ccgggcctcactgagatccctcccggagtccccctgccctccaagttcaccctgctgttcctccaagaggcacccagcacgggctctgaggggcagcgggtagctcaccccggctctcag

SEQ ID NO: 692894 - DNA, 120 bp, Artificial Sequence
  ENSG00000188566_5 (sequence is synthesized)
gagcccccgtcagagtcgaagcccttcctagcacccatgatctccaaccagagagtcaccggcccctcccacttccaggacgttcggctgattgagtttgacatcttgggctctggcatc

SEQ ID NO: 692895 - DNA, 120 bp, Artificial Sequence
  ENSG00000188566_6 (sequence is synthesized)
agctttgctgctggtgatgtggtgctgattcagccctccaactcggctgcccatgtccagcggttctgccaggtgctgggcctggaccctgaccagctcttcatgctgcagccgcgggag

SEQ ID NO: 692896 - DNA, 120 bp, Artificial Sequence
  ENSG00000188566_7 (sequence is synthesized)
tgtctatccctccatgagctggagcgggagaagctgctggagttcagttctgcccaaggccaggaggagctctttgaatactgcaaccggccccgcaggaccatcctggaggtgctctgt

SEQ ID NO: 692897 - DNA, 120 bp, Artificial Sequence
  ENSG00000188566_8 (sequence is synthesized)
gacttcccgcacacagctgccgccatccctcccgactacctgttggacctcatccccgttatccggccgagggccttctccatcgcctcctcgctgctgactcacccctcacggctgcag

SEQ ID NO: 692898 - DNA, 120 bp, Artificial Sequence
  ENSG00000188566_9 (sequence is synthesized)
atcctcgtggctgtagtgcagttccagactcgcctcaaggagccccgccggggcctctgctcctcctggctggcatccctggaccctgggcaaggacctgtccgggtgcccctctgggtg

SEQ ID NO: 692899 - DNA, 120 bp, Artificial Sequence
  ENSG00000188566_10 (sequence is synthesized)
cggcctgggagtctggccttcccagagacaccagacacacctgtgatcatggtggggcctggcactggggtagcccccttccgagcagccatccaggagcgtgtggcccagggccagact

SEQ ID NO: 692900 - DNA, 120 bp, Artificial Sequence
  ENSG00000188566_11 (sequence is synthesized)
ggaaacttcttgttttttggctgccgctggcgggaccaagacttctactgggaggctgagtggcaggagctggagaagcgggactgtctgaccctcatccctgccttctcccgggaacag

SEQ ID NO: 692901 - DNA, 120 bp, Artificial Sequence
  ENSG00000188566_12 (sequence is synthesized)
gagcagaaagtatatgtgcagcaccggctccgggagctggggtcgcttgtgtgggaactgctggaccgccagggtgcatacttctacctggcaggcaacgccaagtccatgccagcggac

SEQ ID NO: 692902 - DNA, 120 bp, Artificial Sequence
  ENSG00000188566_13 (sequence is synthesized)
gtctcggaagccctgatgtccatcttccaggaggagggtggactctgcagcccggacgcagccgcgtatctagccaggctccagcagacacggcgcttccagacagagacgtgggcctga

SEQ ID NO: 692903 - DNA, 120 bp, Artificial Sequence
  ENSG00000188566_14 (sequence is synthesized)
cctctgggaacagccagctcccgagcacagccgcactcctgttgaccctggatcccaccctttgagcctgaccccactgcagcctctgcccagccagccctgcgctcccccaccctgaca

SEQ ID NO: 692904 - DNA, 120 bp, Artificial Sequence
  ENSG00000188566_15 (sequence is synthesized)
gtgagctgtgtcctcgtccccccacccccttcccagtcaaggtggtggcctgggccgctccacctcaccggtgcagtgacccaggacggcatcagcagcccagtgagcaccaggggtggc

SEQ ID NO: 692905 - DNA, 120 bp, Artificial Sequence
  ENSG00000188566_16 (sequence is synthesized)
atagggcacccatgaggctgcgctgcactcctctgccctggggccacctcggctgctgcagcctgcccagcagcacattccagtcactgcccccgcactcccacagggctcaggctgggc

SEQ ID NO: 692906 - DNA, 120 bp, Artificial Sequence
  ENSG00000188566_17 (sequence is synthesized)
tcagaggccactgagatgccagctccttgagagcagtgggggtgtcccaggccagagcagcctcttcctctcctggtcccagaaaaacccttgcagtaaatggtggcctctgggtggtta

SEQ ID NO: 692907 - DNA, 120 bp, Artificial Sequence
  ENSG00000188566_18 (sequence is synthesized)
ggagggcggcaggcccagcccctgagctacagccacgctgcagccaccctgagactctctttgcctaggtgctctgtgacttcccgcacacagctgccgccatccctcccgactacctgt

SEQ ID NO: 692908 - DNA, 120 bp, Artificial Sequence
  ENSG00000188566_19 (sequence is synthesized)
ggactcctcatacgccaagtgagtaggggatgggacagtgggcggacggaacagttctgggggtcgagcaacaggtgtgctggcagaggaccgagaccagcttccagggtcggcccctgc

SEQ ID NO: 692909 - DNA, 120 bp, Artificial Sequence
  ENSG00000188566_20 (sequence is synthesized)
gcgcctcagggccctcgcagtggtactggcttctccacaacgctccctggtgggcaccccaggcttcacgctgcggggagggcacagaggggagcaggcagggtggcaaagggctgggct

SEQ ID NO: 692910 - DNA, 120 bp, Artificial Sequence
  ENSG00000188573_0 (sequence is synthesized)
gcactgcggtagagcccgtcctgcccccgccgcccgccgcccgccgcccgcctccgctgctaaacccgcggacaaccgccgggacgaccacccagagccaccagagccccctgacacccg

SEQ ID NO: 692911 - DNA, 120 bp, Artificial Sequence
  ENSG00000188573_1 (sequence is synthesized)
cgaccacccagagccaccagagccccctgacacccgccccgaggcaccggtaacccacggcacccgccccggtgcgtgccatgaagtcggccgcgagctcgcgcgggggcggtgggggcg

SEQ ID NO: 692912 - DNA, 120 bp, Artificial Sequence
  ENSG00000188573_2 (sequence is synthesized)
gcggcggcggcgacggcaaggatcgcggcggcggtggacagcggcggggcggcgtggccaagagcaagagccgccgcaggaagggcgccatggtggtgtcggtggagccgcaccggcacg

SEQ ID NO: 692913 - DNA, 120 bp, Artificial Sequence
  ENSG00000188573_3 (sequence is synthesized)
gcgccatggtggtgtcggtggagccgcaccggcacgagggcgtcttcatctaccgcggggcggaggacgcgctggtcacgctgaacatggtgccgggccagtctgtgtacggcgagaggc

SEQ ID NO: 692914 - DNA, 120 bp, Artificial Sequence
  ENSG00000188573_4 (sequence is synthesized)
gaccgagggcggcgtgaagcaggagtaccgcacgtggaacccgttccgctctaagctggccgcggccatcctgggcggggtggaccagatccacatcaagcccaagtccaaggtgctgta

SEQ ID NO: 692915 - DNA, 120 bp, Artificial Sequence
  ENSG00000188573_5 (sequence is synthesized)
cctgggcgccgcgtcgggcaccaccgtctcccatgtctccgacatcattggcccagacggcctggtctacgccgtcgagttctcccaccgcgccggccgcgatctggtcaacgtggccaa

SEQ ID NO: 692916 - DNA, 120 bp, Artificial Sequence
  ENSG00000188573_6 (sequence is synthesized)
gaagcgcaccaacatcattccggtcctggaggacgcgcggcacccgctcaagtaccgcatgctcatcgggatggtggacgtgatcttcgccgacgtggcccagccggaccagtcccgcat

SEQ ID NO: 692917 - DNA, 120 bp, Artificial Sequence
  ENSG00000188573_7 (sequence is synthesized)
cgtggccctgaacgcccacaccttcctgcgcaatgggggccactttctcatctccatcaaggccaactgcatcgactccaccgcatccgccgaggctgtgtttgcttctgaggtgaggaa

SEQ ID NO: 692918 - DNA, 120 bp, Artificial Sequence
  ENSG00000188573_8 (sequence is synthesized)
gttgcagcaggagaacttgaagcctcaagagcagctgaccctggagccctatgagcgggaccacgctgtggtggtcggggtctaccgacctcttcccaagagcagcagcaaatagcaccc

SEQ ID NO: 692919 - DNA, 120 bp, Artificial Sequence
  ENSG00000188573_9 (sequence is synthesized)
agctcaggctcgcctgccatctccccaaggctgcgttgtgtttgctattattttctgtgtgttttctttgtgagtgttttgttttgttgtttttctattaaactgcataaagaaacggca

SEQ ID NO: 692920 - DNA, 80 bp, Artificial Sequence
  ENSG00000188580_0 (sequence is synthesized)
ctgcccctgcgggccccgagcgcgcctccgcaggcggcactgcccgcggcgcggcgtgtgcaccgagcgagtgaaggtat

SEQ ID NO: 692921 - DNA, 120 bp, Artificial Sequence
  ENSG00000188580_1 (sequence is synthesized)
gtgtggcgggcgcggctggagctgccgccgccgccgccgccgcgccagcaggtcctaatgcctgtcacttcccaggacgctggcagcagcagcagcccggagcccccgagccctcggcag

SEQ ID NO: 692922 - DNA, 120 bp, Artificial Sequence
  ENSG00000188580_2 (sequence is synthesized)
gtttgcgtgtccttccccgcgatctgattggataaagtgggggctcgacggtggccgacgtgggacagtctggctgtggcaggggtctcggaaaccatgggttattgcagtggcaggtgc

SEQ ID NO: 692923 - DNA, 120 bp, Artificial Sequence
  ENSG00000188580_3 (sequence is synthesized)
acgcttatctttatctgtggcatgcaactggtttgtgtgctggagaggcaaatatttgacttccttggatatcagtgggcacctatcctggcaaattttgtacatattattatcgtcatt

SEQ ID NO: 692924 - DNA, 120 bp, Artificial Sequence
  ENSG00000188580_4 (sequence is synthesized)
cttggtttgtttggaactattcaatatagacctcgttacataacaggatatgctgtctggctagtcctctgggttacgtggaatgtgtttgttatctgcttctatttggaggctggggac

SEQ ID NO: 692925 - DNA, 120 bp, Artificial Sequence
  ENSG00000188580_5 (sequence is synthesized)
ctctcaaaggaaacagaccttatcctgacttttaatatatcaatgcaccgatcttggtggatggagaatggaccaggatgtacggtgacgtcagtgacacctgccccagactgggcccca

SEQ ID NO: 692926 - DNA, 120 bp, Artificial Sequence
  ENSG00000188580_6 (sequence is synthesized)
gaagaccatcgctacatcacggtctcagggtgtttgctggagtaccagtacatagaagtggctcatagttccctccagattgtcctcgcactggcaggtttcatctacgcctgttatgtt

SEQ ID NO: 692927 - DNA, 120 bp, Artificial Sequence
  ENSG00000188580_7 (sequence is synthesized)
gtgaaatgtataactgaagaagaggacagctttgatttcataggtggctttgactcttatggctatcaagggcctcagaagacatctcatttacaactacagcctatgtacatgtcaaaa

SEQ ID NO: 692928 - DNA, 120 bp, Artificial Sequence
  ENSG00000188580_8 (sequence is synthesized)
taatacagatgacttcagtatgtcagcccatggacctttcaaagaacttttttcgcagtggcctcctgcatttcatgaagagcaagaagcaactgagtttaaatacatacacgtattaac

SEQ ID NO: 692929 - DNA, 120 bp, Artificial Sequence
  ENSG00000188580_9 (sequence is synthesized)
aaaacaaatgcaaagcctctacatacaacactgacacacacacacacacacacgtgagcacgcacacaccaattccacttgacctcctctttctaactgaaacagacaaatatgcaggac

SEQ ID NO: 692930 - DNA, 120 bp, Artificial Sequence
  ENSG00000188580_10 (sequence is synthesized)
acgcccatcttggatttcctgaaagcaggcccctttctcccaggccttcggaaagttcagaaggagatgtgttgatgcccaacggttgccggccattgctaactcctctgcagcccagcg

SEQ ID NO: 692931 - DNA, 120 bp, Artificial Sequence
  ENSG00000188580_11 (sequence is synthesized)
ggttggcctctgtgagctgggaagtcatccaaggcacattagtttgagagctctgtcttctgcactccatacatcttgacagcaccacggctacttaggcaatgtaattgcaaaaacaaa

SEQ ID NO: 692932 - DNA, 120 bp, Artificial Sequence
  ENSG00000188580_12 (sequence is synthesized)
cgaaacatgccatgatgaccttgtacccgaagtccgaaatggcagattgtttgccctaaaggctgtaccgtacatacttgccttaacccacctacattgtgtgcccaagaatcccagtgc

SEQ ID NO: 692933 - DNA, 120 bp, Artificial Sequence
  ENSG00000188580_13 (sequence is synthesized)
agacagccccaagccacttcctttaggctaacacactgctattaattctaaatgagttcaagcctgtgtgtttcatgtcaaggaacaagactgaatagctcagcagctccagtgtgtctg

SEQ ID NO: 692934 - DNA, 120 bp, Artificial Sequence
  ENSG00000188580_14 (sequence is synthesized)
cagctgtcagcaaagtgctttaccatagagcctccatggtggcccaaaagagacaagtaacaataacaatatctgtcatctttataattctaaaatatggtcttctgatggggttggggg

SEQ ID NO: 692935 - DNA, 120 bp, Artificial Sequence
  ENSG00000188580_15 (sequence is synthesized)
tgggacagagtaaaacattaatctactaaactcactaatctactggaagcagaaagcagaaatggcttaactcgctgattttatttattgcactctaggtgcttttataagtatctacaa

SEQ ID NO: 692936 - DNA, 120 bp, Artificial Sequence
  ENSG00000188580_16 (sequence is synthesized)
ttgtcttttactaacacagaaacagctgtggatttctatcaacagaggccaactgaatatgtattagctatgtttactcttttatatctaattcaaattgaagactctacgtaggtgaac

SEQ ID NO: 692937 - DNA, 120 bp, Artificial Sequence
  ENSG00000188580_17 (sequence is synthesized)
ttttttttctaacttcagtgtacaagattatttttgggtgggtggggggagcaatagttaccttggtgaaatatttgagatctttttgtggtatttgggggatctgttgtgtgttagagt

SEQ ID NO: 692938 - DNA, 120 bp, Artificial Sequence
  ENSG00000188580_18 (sequence is synthesized)
gtatttcaaccctcctgtattattgtggcagaaaaactgtgctgttaacgtagttggcaacaagatgcctttggaaacttaatagtaggtcaatgtgtttatggaatattctgaactcct

SEQ ID NO: 692939 - DNA, 120 bp, Artificial Sequence
  ENSG00000188580_19 (sequence is synthesized)
aggaaattttgttctatattttaaagcattatttggttttcattagtggaaaacataattagctcaggcttatcaggaactcagatgagtcatattttttcttggatacacctgagacat

SEQ ID NO: 692940 - DNA, 120 bp, Artificial Sequence
  ENSG00000188580_20 (sequence is synthesized)
taaactcaattttttaaaactaacacaccattctttagtgcagtgaaattcaaaagttataaattggcatggagcaagttttttctttgatttctatgaagtttcagttattggattaaa

SEQ ID NO: 692941 - DNA, 120 bp, Artificial Sequence
  ENSG00000188580_21 (sequence is synthesized)
ctactttagaccttagcccattcggatctacatacaccagttccattactgtgtttgcatggatgtctgtaatatacacacacatatacatttgaaaatgatagaggaacaaagagttat

SEQ ID NO: 692942 - DNA, 120 bp, Artificial Sequence
  ENSG00000188580_22 (sequence is synthesized)
cattggaacataaactataaaaaaagattccagcactcatgcttgaatttcctcagtgggttgtatgtttgtccatacatacatgtataaaataaacaattgcaaacatgtcagtgaaac

SEQ ID NO: 692943 - DNA, 120 bp, Artificial Sequence
  ENSG00000188580_23 (sequence is synthesized)
ctcatatgacgcttttatagtgacatgcatgtttaatgtatgagaaaaatatttaccaatgtattgtcctttgagtcctaaaatataaatactatacatgccagaaactattctaatgtg

SEQ ID NO: 692944 - DNA, 120 bp, Artificial Sequence
  ENSG00000188580_24 (sequence is synthesized)
acttttaatgtgactattaaaaatgaggtttcactgtacattcatgctgtgatgcgatttcaccttatagtacatgtatatgggtacagaaaataaaccctcatattcctgctttaagtt

SEQ ID NO: 692945 - DNA, 120 bp, Artificial Sequence
  ENSG00000188580_25 (sequence is synthesized)
acagccaagttttcaccaaatcacaactatcatcaccaccaaaattttaaaaaacagtagttgactactaaaaagtaatcagtggacaggtcatttatgggatcagtaagcacagtagtg

SEQ ID NO: 692946 - DNA, 120 bp, Artificial Sequence
  ENSG00000188580_26 (sequence is synthesized)
tgattatatctgggaaaacatctacagttgtacagctgtatcctcctcaaaatccggtgaagaatgctatttttctaggctgagcttttgttataaacttaatattcagaaggcaagggt

SEQ ID NO: 692947 - DNA, 120 bp, Artificial Sequence
  ENSG00000188580_27 (sequence is synthesized)
tatgatcctgatgtgtcctttttttttgcatttgttaattctgaatgtatttttaacagaatgatttttttgacttactagtgtaatttgcattttaaaaataaatggaaaaatacttaa

SEQ ID NO: 692948 - DNA, 120 bp, Artificial Sequence
  ENSG00000188580_28 (sequence is synthesized)
cttatttgtccctctggtatatttacaggtactgaagatggatggggatcattaggtttctcttattatattgtcccacaaatatcttaaccgtttgtgtgctggagaggcaaatatttg

SEQ ID NO: 692949 - DNA, 120 bp, Artificial Sequence
  ENSG00000188580_29 (sequence is synthesized)
gtggctttgactcttatggctatcaagggcctcagaagacatctcatttacaactacagcctatgtacatgcaaattcccttggataacaactgataacaaattctatatatcagcatca

SEQ ID NO: 692950 - DNA, 120 bp, Artificial Sequence
  ENSG00000188580_30 (sequence is synthesized)
gtgggggctcgacggtggccgacgtgggacagtctggctgtggcaggggtctcggaaaccatgggttattgcagtggcaggtgcacgcttatctttatctgtggcatgcaactggtactg

SEQ ID NO: 692951 - DNA, 120 bp, Artificial Sequence
  ENSG00000188580_31 (sequence is synthesized)
atccagaatttcagtctacagagtaaggaagggacaaggctggccctgcatctattcctgtagaccctgcaatgccaggggatatagcacaaggccattgtaagttccatgaggaactag

SEQ ID NO: 692952 - DNA, 120 bp, Artificial Sequence
  ENSG00000188580_32 (sequence is synthesized)
gaaagagaaaaaaaaaagagaagcatctaaaaatatgttaaaagttcacatttctggtgctgttttggacattttttatgggaaagttctttgtaagtaatacaatatctttgaaagaaa

SEQ ID NO: 692953 - DNA, 120 bp, Artificial Sequence
  ENSG00000188580_33 (sequence is synthesized)
tcatagttccctccagattgtcctcgcagtaagtgttggcagccaaccgctccttctagtgcctctggggttgttttatttctgtgcgaactcagtgcacacaaatggaatctgtgggta

SEQ ID NO: 692954 - DNA, 120 bp, Artificial Sequence
  ENSG00000188580_34 (sequence is synthesized)
aagtgtggcctttttgctttttcctcattaatgcgacttttaacaggaaatcctcaggttaaactaaaccatcctctggacttagtgtgctgattttcttcgacaattagtaaataccct

SEQ ID NO: 692955 - DNA, 120 bp, Artificial Sequence
  ENSG00000188580_35 (sequence is synthesized)
ttgttatcatcagcattttacataggaaatccaatcagtcaagatgtgattacgtgacttttggtagacttttccaaggattctgaagggatgatcagagatttttttcataacgttcta

SEQ ID NO: 692956 - DNA, 120 bp, Artificial Sequence
  ENSG00000188580_36 (sequence is synthesized)
cagtactcaaaattataagatttccataagtgttttctcttttagtgcttcttttggctgtgctgctagccctgggatttctctttttcatttgccctatctccttcttccttcctagat

SEQ ID NO: 692957 - DNA, 120 bp, Artificial Sequence
  ENSG00000188580_37 (sequence is synthesized)
ttctcccaggcaccatccatcacctttaatctcccactttttttccagaaaaaatcacattttctatagattctaattctaagacattcatgcccccatttttcatagtactgtaacaat

SEQ ID NO: 692958 - DNA, 120 bp, Artificial Sequence
  ENSG00000188581_0 (sequence is synthesized)
ataattcagaaactcctccaagcaacccaaccttcagatcaactcctgacaccatggcctgctgtcagaccagcttctgtggatttcccagctgctccaccagtgggacctgcggctcca

SEQ ID NO: 692959 - DNA, 120 bp, Artificial Sequence
  ENSG00000188581_1 (sequence is synthesized)
gctgctgccagccaagctgctgtgagaccagctcctgccagccacgctgctgtgagaccagctgctgccagccaagctgctgccagaccagcttctgtggatttcctagcttctcaaccg

SEQ ID NO: 692960 - DNA, 120 bp, Artificial Sequence
  ENSG00000188581_2 (sequence is synthesized)
gtgggacttgtgactctagctgctgccagccaagctgctgtgaaactagctgctgccagccaagctgctaccagaccagctcctgcggaactggctgtggcattggtggtggcattggct

SEQ ID NO: 692961 - DNA, 120 bp, Artificial Sequence
  ENSG00000188581_3 (sequence is synthesized)
gggtacctgcctgcccccctgctgcgtggtgagctgcacacccccatcctgctgccagctgcaccacgccgaggcctcctgctgccgcccatcctactgtggacagtcctgttgccgccc

SEQ ID NO: 692962 - DNA, 120 bp, Artificial Sequence
  ENSG00000188581_4 (sequence is synthesized)
agtctgctgctgctactgctctgagcccacttgttgaaaacctccttctgctggggatcctgataagatggcaccttaaaactagccaaattagaatcctaacaatcttctgaactccag

SEQ ID NO: 692963 - DNA, 120 bp, Artificial Sequence
  ENSG00000188581_5 (sequence is synthesized)
tacctataactgggcttgcaacctctcatcacacagccacataaattccctaggaagtaaattcatttacaatggaagaccaaaaatttttcctagacctggttgtcagccaaagtccta

SEQ ID NO: 692964 - DNA, 120 bp, Artificial Sequence
  ENSG00000188581_6 (sequence is synthesized)
caatgtgaaaagagttagatactattttactataaatatcacctgaaatatttcaacagttattgggacttaaatttaataaaagttttcatctcttcaatgatgaagttgttgtttgaa

SEQ ID NO: 692965 - DNA, 120 bp, Artificial Sequence
  ENSG00000188582_0 (sequence is synthesized)
gccgccgccgctgccgcagcgcgggcggccgcgcgccggtagcaggggcttggcgaggaagccgctgagcctcgcgcgctccgcgctcctggcggtcgcagcgctgcctattaattgatt

SEQ ID NO: 692966 - DNA, 120 bp, Artificial Sequence
  ENSG00000188582_1 (sequence is synthesized)
gctcctggcggtcgcagcgctgcctattaattgattctcttattgatttatttaatttttaggagcggctgctcggaggcacgggtcttctcctaaacctgcagcgacgcccccggcgtg

SEQ ID NO: 692967 - DNA, 120 bp, Artificial Sequence
  ENSG00000188582_2 (sequence is synthesized)
gtcttctcctaaacctgcagcgacgcccccggcgtgggcacaaaggctccgacggcggccggcgggggctgcccagcgcccgggagccggcgccagaggtcgcctgcgcgcgccctagcc

SEQ ID NO: 692968 - DNA, 120 bp, Artificial Sequence
  ENSG00000188582_3 (sequence is synthesized)
ggcacaaaaggccctccggccccggccccggcagcttcgggggccgcccggaactcccactctgccgcctcccgggaccccccagcgtctgccaagccgctgctgcgctgggacgaggtg

SEQ ID NO: 692969 - DNA, 120 bp, Artificial Sequence
  ENSG00000188582_4 (sequence is synthesized)
acgaggtgcccgacgacttcgtggagtgcttcatcctgtcgggctaccggcgtctgccgtgcacggcccaggagtgcctagcctcggtgctgaagcctaccaacgagacgctcaacttct

SEQ ID NO: 692970 - DNA, 120 bp, Artificial Sequence
  ENSG00000188582_5 (sequence is synthesized)
ggacgcacttcatcccgctgctgctgttcctgagcaagttctgccgtctgttcttcctgagcggcggcgacgtgcccttccaccacccgtggctgctaccgttgtggtgctacgcgtcgg

SEQ ID NO: 692971 - DNA, 120 bp, Artificial Sequence
  ENSG00000188582_6 (sequence is synthesized)
gagtgctgctgaccttcgccatgagctgcacggcgcacgtgttcagctgcctgtcgctgcgtctgcgcgccgccttcttctacctggactacgcgtccatcagctactacggcttcggca

SEQ ID NO: 692972 - DNA, 120 bp, Artificial Sequence
  ENSG00000188582_7 (sequence is synthesized)
gcacggtggcctactactactacctgttgccaggcctcagcttgctggatgccagagtcatgactccatacttgcagcagcgcctgggctggcacgtggactgcacgcgccttatcgccg

SEQ ID NO: 692973 - DNA, 120 bp, Artificial Sequence
  ENSG00000188582_8 (sequence is synthesized)
cctaccgcgccctggtgctgcctgtggccttcgtgctggcggtggcttgcactgtggcctgctgcaagagccgtaccgactggtgtacctacccgttcgcgctgcgcaccttcgtcttcg

SEQ ID NO: 692974 - DNA, 120 bp, Artificial Sequence
  ENSG00000188582_9 (sequence is synthesized)
tcatgccgctcagcatggcctgccccattatgctcgagagctggctcttcgacctgcgtggggagaaccccacactcttcgtgcacttctaccgccgctacttctggctggtggtggccg

SEQ ID NO: 692975 - DNA, 120 bp, Artificial Sequence
  ENSG00000188582_10 (sequence is synthesized)
gccgggtcttttcgacattatcggccacagccaccagctcttccacatcttcaccttcctcagcatctacgaccaggtgtactacgtagaagagggcctgcgccagttcctccaggcgcc

SEQ ID NO: 692976 - DNA, 120 bp, Artificial Sequence
  ENSG00000188582_11 (sequence is synthesized)
gcctgccgcacccactttctcgggtactgtgggctacatgctgctgctggtggtctgcctggggctggtaatcaggaagttcctaaacagctccgaattctgcagtaaaaagtgagcctc

SEQ ID NO: 692977 - DNA, 120 bp, Artificial Sequence
  ENSG00000188582_12 (sequence is synthesized)
cgccttggaggagactactggttcgcccatctgtttggagtttctgttgttgctattgttggtttgttttcaaatttcattgtgttttcttctttgctcaaggaaggtgctgcaaaacca

SEQ ID NO: 692978 - DNA, 120 bp, Artificial Sequence
  ENSG00000188582_13 (sequence is synthesized)
tagggaaaaagttcactgctacaaagggatcccaacccactggaggctttgaagtagggaggttggcaggggtggtcaagcgggagggagatagtcacttgttcttgcccctggaaaaaa

SEQ ID NO: 692979 - DNA, 120 bp, Artificial Sequence
  ENSG00000188582_14 (sequence is synthesized)
ttcaggtgatgtctttgacatccagggatttctcaaaggcagtgagtaaaatcccaaataaagccccaaagagtttgcttttccaatcatctgtgccattggtaataaggagtagcccct

SEQ ID NO: 692980 - DNA, 120 bp, Artificial Sequence
  ENSG00000188582_15 (sequence is synthesized)
gtgaggtcaggtacacagtaaagagggtaaatagaatccttgggaacttctgtttcagtctgaggaatgcttggatttgtcaaaagaatggagctttgtaggaaacaggcacaaagacgc

SEQ ID NO: 692981 - DNA, 120 bp, Artificial Sequence
  ENSG00000188582_16 (sequence is synthesized)
aaacccagggcttaacctgctagaaaatgcatggaatgtgaacacaagttaattatttcaaaatgtttttcagatgttatttaaatagtaatatatacattgatttttcataatttatca

SEQ ID NO: 692982 - DNA, 120 bp, Artificial Sequence
  ENSG00000188582_17 (sequence is synthesized)
aagcctgtggtacgcactgaattttctttgtcacatagttttgaatttcacagccttctgcattgcatacacttgaactggacatcaggggaagctgcttgagagttctcaattactttc

SEQ ID NO: 692983 - DNA, 120 bp, Artificial Sequence
  ENSG00000188582_18 (sequence is synthesized)
ttaaacagtgttttctgaaggcgtgtgtcatgatacaactgtgaattctaccttagggactctggttaaactattggtgaggagctcgagtggtttgtatagaccccagatttttgttta

SEQ ID NO: 692984 - DNA, 120 bp, Artificial Sequence
  ENSG00000188582_19 (sequence is synthesized)
ctttaatgtattccacaaaacccatcctggtttttgttagtttgttttgtttttaatctttttttttccttctctacttatttaaattgccactggaataaatgtgccttttgaagcaaa

SEQ ID NO: 692985 - DNA, 120 bp, Artificial Sequence
  ENSG00000188582_20 (sequence is synthesized)
aggggacaaatcacggaagattggattggaacaaaaagcagcagaaggcagctcatcagaaggttcccatttcctgtaatgaaagaatattgactgaggacttaagagtttccagtatgg

SEQ ID NO: 692986 - DNA, 120 bp, Artificial Sequence
  ENSG00000188582_21 (sequence is synthesized)
gatgtaaggagcttagaagttgtcactccatcttaacaagtaaaaagctgaactgaaaaatcaacaactcttcttgggtccatcagagacatgaagtcacagagcaaactgctgcccccc

SEQ ID NO: 692987 - DNA, 120 bp, Artificial Sequence
  ENSG00000188582_22 (sequence is synthesized)
aaaattggagagacataacaggtagacacagagaatcacaatttaacagagcaggaacccacaagaagaaatttctgcaagaaccagtaccaagttcttttgttccctgtacatcatgac

SEQ ID NO: 692988 - DNA, 120 bp, Artificial Sequence
  ENSG00000188582_23 (sequence is synthesized)
tagtttccaacaaaaaattacaaggcttaccaaaagacaaaaaacacagtttgaagaaacagagcaagcatgagaacaggctcagatatgacagggatgttggaattatcaggttgggaa

SEQ ID NO: 692989 - DNA, 120 bp, Artificial Sequence
  ENSG00000188582_24 (sequence is synthesized)
ctaatggaaaaataaacaatatgcaagaaccaacagataacgtacaaagagatgaaagttctgagaaaaaaatcaagcataaatgctagaaatcaagaacattgtgacatgaagaatgct

SEQ ID NO: 692990 - DNA, 120 bp, Artificial Sequence
  ENSG00000188582_25 (sequence is synthesized)
ttgatgggctcattactaggctagaccctgctgagtaaagaatcagcttgaggctatgtcactagaaacttctaaaactgaaaaacaaagaaaaaaagactagaaaaaaatcagaagaga

SEQ ID NO: 692991 - DNA, 120 bp, Artificial Sequence
  ENSG00000188582_26 (sequence is synthesized)
atattcaagaaccgtggggcaattacaaaaggtgtaacctacacttaatgggaatacaaaaagaagaaagggagaggggaacagaaggatcaaataaacacccactcaaactctgcagct

SEQ ID NO: 692992 - DNA, 120 bp, Artificial Sequence
  ENSG00000188582_27 (sequence is synthesized)
tgaaaggaaatgatattccacatagagacaagacttttgaattactttctctcttccctttctcagaagtccactatcagtttctgacctccaaaaacttttttcttaagagctgaaaaa

SEQ ID NO: 692993 - DNA, 120 bp, Artificial Sequence
  ENSG00000188582_28 (sequence is synthesized)
attcctaaaagaaatggaagatggaagatttaaggaaactgattaactttgcaatttataaataaattttaagccataggattaataagaggtttcacatcctgcctgctcccataatgt

SEQ ID NO: 692994 - DNA, 120 bp, Artificial Sequence
  ENSG00000188582_29 (sequence is synthesized)
ccattctctctatcttgatactttgcagttgtaaaaatatatgtggaaaactgaaaggtgggcagaagtgaacatttattagtacaaaatgtaattctctaagagctactttactacttc

SEQ ID NO: 692995 - DNA, 120 bp, Artificial Sequence
  ENSG00000188582_30 (sequence is synthesized)
aggatgacctgagtgaagctaatggcctagtttttactccagctcttattaattcagtgattgactgcattagttcatccctacctcactgtctatctgttttgagggtaggatctataa

SEQ ID NO: 692996 - DNA, 120 bp, Artificial Sequence
  ENSG00000188582_31 (sequence is synthesized)
atatcagtttagagttctctcagattcttactttagttacacagaaatgtcataaagtacaaaaggaaacaggtttaaggaaataaataattctacagatacaggtaataagccaactat

SEQ ID NO: 692997 - DNA, 120 bp, Artificial Sequence
  ENSG00000188582_32 (sequence is synthesized)
gtaatcaggaagttcctaaacagctccgaattctgcagtaaaaagttctgccaaggggacaaatcacggaagattggattggaacaaaaagcagcagaaggcagtctcctctgctgactt

SEQ ID NO: 692998 - DNA, 120 bp, Artificial Sequence
  ENSG00000188582_33 (sequence is synthesized)
tcctgctcaatttagagacattctaattcttgttcagaaaaccttgagtccactcctgtaattcttctagtgagtttgtaagccaaccaatgcctactaataaatcccctttagcaccaa

SEQ ID NO: 692999 - DNA, 120 bp, Artificial Sequence
  ENSG00000188585_0 (sequence is synthesized)
atgctgccccgggcgctgctgctctccttctgcgcagcagccctgcagctggtgagcagtaagagggacttggttctggtgaaggaggcgctgagctggtacgacgcccagcagcactgc

SEQ ID NO: 693000 - DNA, 120 bp, Artificial Sequence
  ENSG00000188585_1 (sequence is synthesized)
cggctgcactacacagacctcgctgacctgcagccaagtggcctgtggaagctctactccctcatgaccagcaccccggcttggattggcctcttcttcgacgcaagcacttctggcctg

SEQ ID NO: 693001 - DNA, 120 bp, Artificial Sequence
  ENSG00000188585_2 (sequence is synthesized)
agatggtccagcggctccaccttcacagccctggagtggggccagaagctacctgaatttggggtgggcttctgtgccacgctgtacacttggctgaaattacccagcataggggctgcc

SEQ ID NO: 693002 - DNA, 120 bp, Artificial Sequence
  ENSG00000188585_3 (sequence is synthesized)
tcctgcacagcccagaagcccttcctctgctactgtgaccctgacgtcgggcacctcatctccacgaagccctctctcagcctgaccacctctccaaagccagctgtggtccagatcagt

SEQ ID NO: 693003 - DNA, 120 bp, Artificial Sequence
  ENSG00000188585_4 (sequence is synthesized)
ggtcagaccttcatgcgatttgaccaagtgatgacatggtcctcggccctgctgtactgccgcagccaccacacggatctggccgacctgcagatggtgacggatgagacaggcaaggag

SEQ ID NO: 693004 - DNA, 120 bp, Artificial Sequence
  ENSG00000188585_5 (sequence is synthesized)
gccttgagatccatcatgagtgagactgaagcctggattggcctctacctcaatgcaaactccggatctctgagctggtccagtgacctgggggccagcatcccctcctggctgcaggtg

SEQ ID NO: 693005 - DNA, 120 bp, Artificial Sequence
  ENSG00000188585_6 (sequence is synthesized)
tccccaaaagtgtactcagtgaactgctcttccctgctgcccttcttctgcttctatgactcctccactggacaccgggcatcagcagagttgcctccactcttccacacttcccccaca

SEQ ID NO: 693006 - DNA, 120 bp, Artificial Sequence
  ENSG00000188585_7 (sequence is synthesized)
gaaatgacagaggaaacaactcccaggccaggcagagctgtggccagtgtagggagtggcactgatagaagagatacagctgctgccacggaggcccaacatctgagttcagaatctaaa

SEQ ID NO: 693007 - DNA, 120 bp, Artificial Sequence
  ENSG00000188585_8 (sequence is synthesized)
gaaaaaacatcagcacaaaaatcagggcacccttttggaatcttgaaagcagactttaccatctcaactctgatggacccagaagagatgaaagaccaatttctgagacagatccaggaa

SEQ ID NO: 693008 - DNA, 120 bp, Artificial Sequence
  ENSG00000188585_9 (sequence is synthesized)
gtcttaaagcttacattaggtcacgaacaatttagactgaaatgggtcagcttcgaagtgaacaaaaaatagcacaattcttggatatgcagtttctgtttcatgcaatcttctctggat

SEQ ID NO: 693009 - DNA, 120 bp, Artificial Sequence
  ENSG00000188585_10 (sequence is synthesized)
tttgagtaaattttaattttttaatccctagtagaacaagattaggaagaactcgacatgtgccaaaaagcacagacctacaactaacacaaaacaagactacacatgaaacctgcatcc

SEQ ID NO: 693010 - DNA, 120 bp, Artificial Sequence
  ENSG00000188585_11 (sequence is synthesized)
ctggattttacagaatgaaacagggatgcaggagaagatgggtgtatttgggaacaatcatgttgggaatgacaaatgaacttctattaagaaattaaaataaaaaacctgaaccaaaca

SEQ ID NO: 693011 - DNA, 120 bp, Artificial Sequence
  ENSG00000188585_12 (sequence is synthesized)
atctgcaagctgaggaaaaaggaggccagtccaaatcccaaagctgaagaactcggagtccgatgttcaagggcaggaagcatcgagcacgggagaacgatggatctcttccgcatcctc

SEQ ID NO: 693012 - DNA, 120 bp, Artificial Sequence
  ENSG00000188585_13 (sequence is synthesized)
tctgggagatcccctgcttcccgctaagtgggcagtgggagccaactcttcgggcatctttgcgggaaatccaccatcggtacgccatgcgcaaggctccagctgttggagaacagcagc

SEQ ID NO: 693013 - DNA, 120 bp, Artificial Sequence
  ENSG00000188585_14 (sequence is synthesized)
cccctccttgtgctccaccgggcccctctctgtcctggctgccggtgcctccgactcctgtctcgttgctgttgggaagatcatacgtgggctggttgtggcgtgcacagcacttgcccg

SEQ ID NO: 693014 - DNA, 120 bp, Artificial Sequence
  ENSG00000188585_15 (sequence is synthesized)
agcggccctccagccccaaggggcggtaacacccggcccttcggccaacctcgcggccccggggggcaccttggttcccgcggaaggacccaggatgccgccggtcactgcccagagtgc

SEQ ID NO: 693015 - DNA, 120 bp, Artificial Sequence
  ENSG00000188585_16 (sequence is synthesized)
gtcttcccaccctgcgccctcggcgtcccagccctccagccctgctgcggcctctcgggggagcctctctgtcccccaggaagtaactgcgactcttctggcctccgcttcgagccccac

SEQ ID NO: 693016 - DNA, 120 bp, Artificial Sequence
  ENSG00000188585_17 (sequence is synthesized)
actcgatgccacccgcgatgccccagctactcccaggatagcagcaccccctgggtctgccacatccagccggggcctcggctcccaggctcaagggagctctctggggaccaaagaaag

SEQ ID NO: 693017 - DNA, 120 bp, Artificial Sequence
  ENSG00000188585_18 (sequence is synthesized)
catctcggactcatttggcttagggagcccagccgtgacccagaggacaactgcaccccctgactctgcagccctgagccaagacacccgcccagaggcagctgggagctggccagggcc

SEQ ID NO: 693018 - DNA, 120 bp, Artificial Sequence
  ENSG00000188585_19 (sequence is synthesized)
caggccgcatctccagcacctcacaccctgctggcagcgacagacactggtccccgccagctccggggtcttgtcccgtgcccagccagcacccagccatcgcccagccagtgcccagcc

SEQ ID NO: 693019 - DNA, 120 bp, Artificial Sequence
  ENSG00000188585_20 (sequence is synthesized)
atgctgccccgggcgctgctgctctccttctgcgcagcagaacagggttgggaagggagcttcgccctcatcgcccctaaccagacagtactcagccagcgtccagaaggcagcagtcag

SEQ ID NO: 693020 - DNA, 120 bp, Artificial Sequence
  ENSG00000188585_21 (sequence is synthesized)
aaacagtgcggctccagcagctttctttctagcggggctaagacattcctcaaagagacggccgcgcaggtcacttcagaagcatgtgcaatgcagggaaggacatcaccggggtgtgga

SEQ ID NO: 693021 - DNA, 120 bp, Artificial Sequence
  ENSG00000188585_22 (sequence is synthesized)
agggagccgtgggtgagcctgagggggagaaggagccaccaagaaagccaggaaaagccctggcttggagggtggcggctgctgatgcaggtgggaggggagggcgcagggccccatggc

SEQ ID NO: 693022 - DNA, 120 bp, Artificial Sequence
  ENSG00000188585_23 (sequence is synthesized)
tgcgacccacatggcggtgggtggtcaggttttaggccctctggctgcagagtcggggcgtgtggggactgccgagggtagaggggtcttgggcccaggtgtcggcaggcaggcagagaa

SEQ ID NO: 693023 - DNA, 120 bp, Artificial Sequence
  ENSG00000188585_24 (sequence is synthesized)
gggctaagttcaaggccatggaactgactagaggctcccgggtagggctggagaggccggcgggaggggcgccctgcatggggctggggtgccaggggtggacaccgtcctaaaatcaat

SEQ ID NO: 693024 - DNA, 120 bp, Artificial Sequence
  ENSG00000188585_25 (sequence is synthesized)
tatgcgggccacagccagtcattaaaaaaataagcagaatgcttttctcagtgacaggaagcatcctcccctacggtgggtgtgaggagcttgttctccttggcaagtgcctcctcagcc

SEQ ID NO: 693025 - DNA, 120 bp, Artificial Sequence
  ENSG00000188585_26 (sequence is synthesized)
ctggcccctggcttccatgccacggcctgtgcccagctctccagtctcattctcctctcctggggcatttagcttgaagggttccttgtggcccagacccccaaggtcccagcaccaagc

SEQ ID NO: 693026 - DNA, 120 bp, Artificial Sequence
  ENSG00000188596_0 (sequence is synthesized)
acacatactccaggcgggccggggcgcgtcaatatggcggcgcagggctccccctcgagctctccgtcagacgactctaccacctcggggtctctgccagaactgccgccgacctccacc

SEQ ID NO: 693027 - DNA, 120 bp, Artificial Sequence
  ENSG00000188596_1 (sequence is synthesized)
gcgacttcgaggtcgcccccagagtcgaaggggagctcccggagctcgctgcttcagtggacctgccccgaggactcattgcccctagccgtgttttatgggccgctggacgcgaaaaac

SEQ ID NO: 693028 - DNA, 120 bp, Artificial Sequence
  ENSG00000188596_2 (sequence is synthesized)
ccgctcctggcctcttgtgagaaggagatccaggagttgttaggctttatgaggaaaaagaaggctttagccaccacggaggaagagaagcacgaattccgccggcgttgtgccacttct

SEQ ID NO: 693029 - DNA, 120 bp, Artificial Sequence
  ENSG00000188596_3 (sequence is synthesized)
ttgtttaatatctggactaaatacgcccccaggctgccagcagactattacaacgaaaagcttctgaaggttggagatagcctttgtcaaatgaaagaatacaaactggcccttttacaa

SEQ ID NO: 693030 - DNA, 120 bp, Artificial Sequence
  ENSG00000188596_4 (sequence is synthesized)
tgctatggaagatatcttcagcagttcaataccaattttgatgagaataaagtggatgtaactcaattcaaagctacctttttcccaaaaggctttaaagataaaactgctggacttaca

SEQ ID NO: 693031 - DNA, 120 bp, Artificial Sequence
  ENSG00000188596_5 (sequence is synthesized)
tttcatgctttgagtggcaaaaatatgtgcaactaccagctggtctgcgacagtgatgaaaacctgaagaataaagaatctgtggtccagtgtctgcatatcttgtcctccttaaggctc

SEQ ID NO: 693032 - DNA, 120 bp, Artificial Sequence
  ENSG00000188596_6 (sequence is synthesized)
atcatgcaagtggctctgccacaagagcatctttgctggattatcttcaatggtaccatttatatttacaccatttgcagaaaactgatggtcataggtcagtcttccaaggccttagag

SEQ ID NO: 693033 - DNA, 120 bp, Artificial Sequence
  ENSG00000188596_7 (sequence is synthesized)
tatctcctgtgggccagcatgtgtatggagtccttggtcccgctcctgtcactcaggtacttgacatggcgcgctactctctacacagctgtttgccagtgctgctatgactgccatgcc

SEQ ID NO: 693034 - DNA, 120 bp, Artificial Sequence
  ENSG00000188596_8 (sequence is synthesized)
gggattcacggagaggcatttgctcggcgtgctttggctaaaattgatgagttaaggcaactggaattaatgagttcctcaaaatcccaggaagaatcgcgaagatattttcgagaggcc

SEQ ID NO: 693035 - DNA, 120 bp, Artificial Sequence
  ENSG00000188596_9 (sequence is synthesized)
acaatgaagatggcagtgatgatcttcaaaagaggagtctttgaatctagaagaaaaaacaaagctgtctttagacctaagataagaattaacctaagggaagtacaaactttatcatgg

SEQ ID NO: 693036 - DNA, 120 bp, Artificial Sequence
  ENSG00000188596_10 (sequence is synthesized)
ccacgaactgtcacagagcggctactggatgagatgtttgatagcactgcatcccagtttctggctgtcttggaagctctttctgattcaaataggcgaatactgcaaactggacccatt

SEQ ID NO: 693037 - DNA, 120 bp, Artificial Sequence
  ENSG00000188596_11 (sequence is synthesized)
gttacagatgaagtggagattcatgatgttgtctcagaattgtttatggcaggaaaagaacttttgataatgtcaaatattggtgcagatggaatgcttgattttccaaaaacatctctt

SEQ ID NO: 693038 - DNA, 120 bp, Artificial Sequence
  ENSG00000188596_12 (sequence is synthesized)
ctggaacttatgataggaagaaaagatgttatttctgtggatgctgctgtgaaatttataaaattagcttttacctatgaggagtggagtttatttgaatcttctgctgtacatcttatt

SEQ ID NO: 693039 - DNA, 120 bp, Artificial Sequence
  ENSG00000188596_13 (sequence is synthesized)
tattttctccagaggcaggatgatccagagtcaaagaaagcagagaaggatttaactcttctgattgcaatggaaccactaatcaacgtgaagagaaacaaaggtttgatctttcctttg

SEQ ID NO: 693040 - DNA, 120 bp, Artificial Sequence
  ENSG00000188596_14 (sequence is synthesized)
gaaaactataaagaaggacagtcaactcaaatttatttaaaaaaaattgctgttcatgatacttgtttgaagacttgtggatattcagaggatattttccatttggcagcaaccttgtat

SEQ ID NO: 693041 - DNA, 120 bp, Artificial Sequence
  ENSG00000188596_15 (sequence is synthesized)
gtctgtgtctgcactgctccccaggatgttcaacctgataaagaaattgttgtggacacgataatgttcctatggcagaaatgcaaattaggaattcagcggctcaatatatccagaaat

SEQ ID NO: 693042 - DNA, 120 bp, Artificial Sequence
  ENSG00000188596_16 (sequence is synthesized)
gactatgcaaaattcacccagaaaatcagtactaacaaatggatttatcttctgtggcagataaatgaagtaattcactgctataaaatggaagacattgacattgtggtagtggcagaa

SEQ ID NO: 693043 - DNA, 120 bp, Artificial Sequence
  ENSG00000188596_17 (sequence is synthesized)
gtcacattacggttaagtgaaatattggaatctttaggaagcccaggaagaaaatttaaacaatctctagatgtacctttaagagaagggactaacaaattccctggagctccaaaaggg

SEQ ID NO: 693044 - DNA, 120 bp, Artificial Sequence
  ENSG00000188596_18 (sequence is synthesized)
atcacagaaattcttccaatattacagaaaaatcctgtggaacagttactttttgcttataaacttcttgacagagcaatcggtggaataaatttgaattgcatgttaacctctttgcca

SEQ ID NO: 693045 - DNA, 120 bp, Artificial Sequence
  ENSG00000188596_19 (sequence is synthesized)
aatggatcatcagtaattgaccactgctatgccaagcgtacccaccatatagatggagatacttacaaaccacttgcctcaaatagtttcatgatggatttgcatcttgaactaattcaa

SEQ ID NO: 693046 - DNA, 120 bp, Artificial Sequence
  ENSG00000188596_20 (sequence is synthesized)
gctcagcatcgaatagctgttgtgcttctggacaaattgcaagttttgcagactccaactgttagcaaagatatttctaccaagggtccggaaaagttaaaacaatctggaagcactgat

SEQ ID NO: 693047 - DNA, 120 bp, Artificial Sequence
  ENSG00000188596_21 (sequence is synthesized)
tgttttacagaattaaatataatgaataaaataaagaagaatacattatccaaagcaatttacttaatgcagaaagctcttttaatattcgagaaagatgcaacttctacatcttcatgg

SEQ ID NO: 693048 - DNA, 120 bp, Artificial Sequence
  ENSG00000188596_22 (sequence is synthesized)
gaacttttgatggaagcatattccttaattcagaggattgaagctgaacaaaatgccctatattcctatcagaaatatttggaaagttcaaaaagaaagaaaagcagagtcccccctcca

SEQ ID NO: 693049 - DNA, 120 bp, Artificial Sequence
  ENSG00000188596_23 (sequence is synthesized)
cctatcctgctgtctcgaactcattgttctgtgacactcaaacctgctccatttacttcagaggttaaggtctcctggtactgcattttgggttgcaaagcagaaggaagttatggaaaa

SEQ ID NO: 693050 - DNA, 120 bp, Artificial Sequence
  ENSG00000188596_24 (sequence is synthesized)
gtacggctaaacaataatcatctcccaaattcaggagaagcgataccagctgacggtaaaagtgtttttgaagtgaaaggtttagaaaccaatgaaaagtatgtatttgcagttgctgcc

SEQ ID NO: 693051 - DNA, 120 bp, Artificial Sequence
  ENSG00000188596_25 (sequence is synthesized)
tattctaacaacggaaagcttgtcggtggtgctattggggagacaactaaaccaattctggtttatccccctctttctactattactgctcggatgttcctgacacaggttgcctatcaa

SEQ ID NO: 693052 - DNA, 120 bp, Artificial Sequence
  ENSG00000188596_26 (sequence is synthesized)
gttggtaactatgaattggctaagaaagttttctcaccagtttgggattattttgttgcttcgccacttcaggatgaacaatctgttatttgtttaagcaatataattactattacacaa

SEQ ID NO: 693053 - DNA, 120 bp, Artificial Sequence
  ENSG00000188596_27 (sequence is synthesized)
agaagattacattcagatattttggcagagacttcttcaatcctcttgtacctttttcttagaaatatttttgtaacaagtgacatcaaaattaaagaagaaaatcttttctgtgataat

SEQ ID NO: 693054 - DNA, 120 bp, Artificial Sequence
  ENSG00000188596_28 (sequence is synthesized)
attaaaggcaatgagattttcccatctcaacaaattgccagactgattgaatgtgagagagtattagtggcattggaacttagcaacttcctaaatgattccagctatgcccttcaagct

SEQ ID NO: 693055 - DNA, 120 bp, Artificial Sequence
  ENSG00000188596_29 (sequence is synthesized)
gtgactcaatgttatggacttcttgctcccataatttatcacaatattgttttggtacctgttgtacagatcctgataaagtgtatagtggttttgcaaggactaccaagtattgtctgc

SEQ ID NO: 693056 - DNA, 120 bp, Artificial Sequence
  ENSG00000188596_30 (sequence is synthesized)
tcgaagaaacatactgcgagctttgaaagtatacaacacatgatagcttgttgtattttctacataacaaagattcttcgttcatggagggaatatgacctggcagtaatgattataaat

SEQ ID NO: 693057 - DNA, 120 bp, Artificial Sequence
  ENSG00000188596_31 (sequence is synthesized)
tatgggaaaaaaatgttggacatcacaccaggatgcaagtctctgtttgatggtagtaatgaacaagaagaaatgccagaggaggattcttctaagaagtctttaaagactaagaagcca

SEQ ID NO: 693058 - DNA, 120 bp, Artificial Sequence
  ENSG00000188596_32 (sequence is synthesized)
cagcagatactactgcctgaaaagataaatgaacagctggccttgttggagacacacctactcaaactgacaaagcaatatgttacatctgaactctcaggaggagaggaccctatattt

SEQ ID NO: 693059 - DNA, 120 bp, Artificial Sequence
  ENSG00000188596_33 (sequence is synthesized)
ctttatcctgtagttttgaattggtcggtcaaaggtgccgtgaaagaagttatgaaatttaagcaaaaaccaagatttctggaattctttacacaagttatgctaaaatgcatgaatgag

SEQ ID NO: 693060 - DNA, 120 bp, Artificial Sequence
  ENSG00000188596_34 (sequence is synthesized)
gaaaaatttcatcttatggtagaggtaacaactcctgtccatgacttcttgaaaaggagaaatgagtctctacttggactaataaaagtgaaatataaggatagtgctttgaataaaaaa

SEQ ID NO: 693061 - DNA, 120 bp, Artificial Sequence
  ENSG00000188596_35 (sequence is synthesized)
gcaaacaaatctttaaagttcaaagctgcagtaatggaaattggaagaagtgcagaaatgcaacaaagaataagaagtaaaaaaaaggaaactctaagagatttcatttttaaaaatccg

SEQ ID NO: 693062 - DNA, 120 bp, Artificial Sequence
  ENSG00000188596_36 (sequence is synthesized)
gctatttctgaaatggtggcacatgaaagaaataggagaaccagtgttaggaaagcagcacaacgatacctgatggattacttgaatcctctaatattaagttatgttaaaagaaagagg

SEQ ID NO: 693063 - DNA, 120 bp, Artificial Sequence
  ENSG00000188596_37 (sequence is synthesized)
ttccatcgtctatcacttgaagagatgccctggagagctcagatgaacctgtatctagcaggtgcacactttaacctggttttacaaaagctatgggagtgtacgaagatgaaatttggc

SEQ ID NO: 693064 - DNA, 120 bp, Artificial Sequence
  ENSG00000188596_38 (sequence is synthesized)
acatcacatatgatggtcagtttccgatcatgtgatcctaacatgttttcactgtataattcaggaacagtattaccaacaagaaaattgactgtagaaaattataaagcaatgcttgat

SEQ ID NO: 693065 - DNA, 120 bp, Artificial Sequence
  ENSG00000188596_39 (sequence is synthesized)
ttccttcttacagccaaaaaaagaaaggccaacttaccatcagatgctgaagaattttctacatttattaattccataatgagtgatgaaaatatgtccaagacacaaacagtttatgac

SEQ ID NO: 693066 - DNA, 120 bp, Artificial Sequence
  ENSG00000188596_40 (sequence is synthesized)
tgtaatggatcattttatgaaaatctttttatactgcaggagagcaatggttcttgctcatcgtggtggctattggactctgcttcagaactgctgtcgggccttatggaactttactca

SEQ ID NO: 693067 - DNA, 120 bp, Artificial Sequence
  ENSG00000188596_41 (sequence is synthesized)
ggaactacaaatacttcttaaacaggcagtggatcttgataaaacatttcctattagccaagatggtttcctctgcacctctgttttaccattctatttgggagcagaattacttattga

SEQ ID NO: 693068 - DNA, 120 bp, Artificial Sequence
  ENSG00000188596_42 (sequence is synthesized)
catgttaatacaactacaaaataccagttctattaagcctattgaagacaaaggagaattcagtgttccaagctgttatgggaatattaaaaatgacaacggtggttctagtcttacctt

SEQ ID NO: 693069 - DNA, 120 bp, Artificial Sequence
  ENSG00000188596_43 (sequence is synthesized)
tgagcatcctttggatgatgtaaatgtggttgatttgaaatggatccacgactttgtattaaaatctctggaagttttatatcaagtggaaaaatgggaaacactagtatctcttgccat

SEQ ID NO: 693070 - DNA, 120 bp, Artificial Sequence
  ENSG00000188596_44 (sequence is synthesized)
tcagttcaatacagtttcacatgagaggtatacagaacaagtgacaccacttctggtgtatgcacagcgccagcttctgctgagaatacagaagttcaagggcccagatattacccaaca

SEQ ID NO: 693071 - DNA, 120 bp, Artificial Sequence
  ENSG00000188596_45 (sequence is synthesized)
accttgtgcaaggtatgaggctgaatatggagagaagataacttgccgaaatttcattgggaagcagcttaagattaattcttcaaccattgaagcaacaagcaactgcacagatttgct

SEQ ID NO: 693072 - DNA, 120 bp, Artificial Sequence
  ENSG00000188596_46 (sequence is synthesized)
aaaaatgcttatctcttcagaatacagccgagccaaagcgcttgtctgcgtgcccgtggacgtgacagacaccttgaggtgttttagagagacactggaaaaatccaaataccataacag

SEQ ID NO: 693073 - DNA, 120 bp, Artificial Sequence
  ENSG00000188596_47 (sequence is synthesized)
atcaatccgacacagcagaaagttgctttcattatttcttgcacagacacaagatgttctccaagccagcaatcaaagaagtcttaaagttcaggcgttgcattcacttggaagtcttct

SEQ ID NO: 693074 - DNA, 120 bp, Artificial Sequence
  ENSG00000188596_48 (sequence is synthesized)
catcttcgcagaaaagaaaagggctgcttttaagtgttggtgtcaagctcttgatgacatattcagaaaaccagacgtgctacacacgtggaaagaatttggcccctcactcaccaatgt

SEQ ID NO: 693075 - DNA, 120 bp, Artificial Sequence
  ENSG00000188596_49 (sequence is synthesized)
caccaacagtcattcacctccgggtttcaaagactacagtgaggagtttctgtcaagagttggcatctgggggtgtttgcaaggagcagtcatatcagcaaagatagcacaatttattaa

SEQ ID NO: 693076 - DNA, 120 bp, Artificial Sequence
  ENSG00000188596_50 (sequence is synthesized)
gtcattgaatgttgaaaagaaaactgactgttgcattttgtctgcgttactctttcagggtttgcttagaacaacacttccacatcccaaagctgaacgttgctatgctcaatatgaaat

SEQ ID NO: 693077 - DNA, 120 bp, Artificial Sequence
  ENSG00000188596_51 (sequence is synthesized)
cactcagcttctcccaggcattgaactcttctcagatagatacagggctgacatttgctctgtaattgcaagtctgtattacattatacgtgaactgcactttgttaggcaaaacctaat

SEQ ID NO: 693078 - DNA, 120 bp, Artificial Sequence
  ENSG00000188596_52 (sequence is synthesized)
agttctgcctctccttgcattgtatcaatattttgtttctggaatttgtcaagacataacaagaaatctagaagcaagaatcctcaagatagaagtccttatagatttgagattcttttc

SEQ ID NO: 693079 - DNA, 120 bp, Artificial Sequence
  ENSG00000188596_53 (sequence is synthesized)
tgaagccttttatgagatatcccaaattttctatggaaaaaacatgccttgtccaatacctgcaggctataaagccactggaaaaatgaagatctttcaatcatttgactcaggaaaact

SEQ ID NO: 693080 - DNA, 120 bp, Artificial Sequence
  ENSG00000188596_54 (sequence is synthesized)
tcttaccagtaaagaaaatatacaggcaattgatgaattaagaaataaaggcttgcctgcagttctggttacaattggccaaccacatctcttaaataagtttaattttgttaaagcata

SEQ ID NO: 693081 - DNA, 120 bp, Artificial Sequence
  ENSG00000188596_55 (sequence is synthesized)
ctttttcctaagtgtggctgcgacaataaattgtgtcccagaaaataaatttaagacagtaattaccaacaagagcaaaccaaacctaccaaacttggaagagatatattcaaaggatga

SEQ ID NO: 693082 - DNA, 120 bp, Artificial Sequence
  ENSG00000188596_56 (sequence is synthesized)
tggaagttcattttataatcttacaaaacttaaagatgagatcactcttagcatgctaaagtcgatgttactgatggaagctgaggacaggctaaacttccttctgtccgaggtggaaca

SEQ ID NO: 693083 - DNA, 120 bp, Artificial Sequence
  ENSG00000188596_57 (sequence is synthesized)
gaagaccctgtctcagtgctccgctggcgagctggagattgtggtggaggcccggcttcagctggctgcagttgctctgcagaggcaccgggcggcatacagtgctgcaatagtattttc

SEQ ID NO: 693084 - DNA, 120 bp, Artificial Sequence
  ENSG00000188596_58 (sequence is synthesized)
tacacttacacttctccaggattcaaaactttttgaaaagaaggtagtacaggatgacacagagaatcctgtctctccaggaacttctgtcactgaaaataaagatgacagtgagttttt

SEQ ID NO: 693085 - DNA, 120 bp, Artificial Sequence
  ENSG00000188596_59 (sequence is synthesized)
agatcctatttccctaaatgcccgagaatatttcaacattcatctgtggttgaggtgccgcttagcattggtgactgcatttgttgcacagattcatggcattggaattgtgaaagagga

SEQ ID NO: 693086 - DNA, 120 bp, Artificial Sequence
  ENSG00000188596_60 (sequence is synthesized)
tgatatgacagattgcctgagcctcatcaatgaagtgtgtatggaggcaaaaagcgcaggggacacggaactgcaggctgaattcttgacgcaagctgtaattcttggcctacaagaaaa

SEQ ID NO: 693087 - DNA, 120 bp, Artificial Sequence
  ENSG00000188596_61 (sequence is synthesized)
gcatttaaaggcagacatcatgacaaaccttcaggatataatacatttgctggaaggaaatgaatttatttctcctcaatcacggctaaccctggcaagaagcctagttttgctggatga

SEQ ID NO: 693088 - DNA, 120 bp, Artificial Sequence
  ENSG00000188596_62 (sequence is synthesized)
cttaaccaaagctgagaaattcaaggaatctccctcttcaaaaacaggaaaattaaatttgttaactcgggctcatagcattctaactgaacagatgctagcttttggagaaacaattga

SEQ ID NO: 693089 - DNA, 120 bp, Artificial Sequence
  ENSG00000188596_63 (sequence is synthesized)
atttcgttcatcaaacactaaatatgcaaatccattacagcctttgaaaaatatctatcttccccatgtcatgttattggccaaaataaaaatgagaattggacatacagtggccaagca

SEQ ID NO: 693090 - DNA, 120 bp, Artificial Sequence
  ENSG00000188596_64 (sequence is synthesized)
agtatattacaagaataaaaggaaggacccctcgaagtggttacctgctcttcatctgtttgatgtggcactgaagctctgtagaacaacagcagtggaggaacatgaggtggaagctga

SEQ ID NO: 693091 - DNA, 120 bp, Artificial Sequence
  ENSG00000188596_65 (sequence is synthesized)
aatcctttttcagaaaggcaaaatagaacgtcaaatactaatggaagagaaatctccaagttttcaacttgagagtttatatgaagctatacaactaagcctgaaaaatgatcaaaactc

SEQ ID NO: 693092 - DNA, 120 bp, Artificial Sequence
  ENSG00000188596_66 (sequence is synthesized)
aggattgataagagactcctacctagaaatggctctattgtattttcatctgaagaagccaaagataaaaatttcaggatcaccattaacacttaagcctcctctcagaagaagtagttc

SEQ ID NO: 693093 - DNA, 120 bp, Artificial Sequence
  ENSG00000188596_67 (sequence is synthesized)
tgttaaagaaacatcagcaaataaatttgaaatgtacagttcattagcctggattgcaataagagctgctgcacaggtcagtgaagctgtgctggcaattaacttacttattggaaagaa

SEQ ID NO: 693094 - DNA, 120 bp, Artificial Sequence
  ENSG00000188596_68 (sequence is synthesized)
gaatactagaatgcataaagttaaccaagtggcattaccaaatatcccagaatttgctgctctggatcttttgtcttcgtatacagattatttgcttgacaactaccaagtcctcttcca

SEQ ID NO: 693095 - DNA, 120 bp, Artificial Sequence
  ENSG00000188596_69 (sequence is synthesized)
gacttcctgtacatttttgtaccaaaatgatgatgtgtgtgacagcgcagatggtagaaaaaagactcagaccaaagtggatattacatggatccttctactgcgctactatattcacct

SEQ ID NO: 693096 - DNA, 120 bp, Artificial Sequence
  ENSG00000188596_70 (sequence is synthesized)
tcagaggattaataatctgagcaaactgctagcatctgcaacaccagtatctggaatttctttgccagatgatacacttctcacatccctttacaactctgagttgattttgcgccagaa

SEQ ID NO: 693097 - DNA, 120 bp, Artificial Sequence
  ENSG00000188596_71 (sequence is synthesized)
agaagtgcattttttccttaaaaaattcttacagctgtattcttcttcttgtattgatgaatttccaaaagaacttctttgtcaactggaaaatccccctctttcagaaaaagacttacg

SEQ ID NO: 693098 - DNA, 120 bp, Artificial Sequence
  ENSG00000188596_72 (sequence is synthesized)
tgaatcatctgccaagttgtatcgcgatagttctgtacaatccattttatcttttaagcctgtttcaggctcatcttgtgtggacataacgccaatagaaatggtaacgcaagcttcaaa

SEQ ID NO: 693099 - DNA, 120 bp, Artificial Sequence
  ENSG00000188596_73 (sequence is synthesized)
caaagaactttgctttcaatggtacattcctcccctggatagacctcccaaggagacagaacctatggttttattgttgtatgcatataatttgaagcctctgaagatttcagatgttag

SEQ ID NO: 693100 - DNA, 120 bp, Artificial Sequence
  ENSG00000188596_74 (sequence is synthesized)
acattccacttataacagtacatgtgttggctctttatggattccactgaatagggttattgcaattcatgagaaattatctaatcttgctcaaatagctgaactatcattgccagcagc

SEQ ID NO: 693101 - DNA, 120 bp, Artificial Sequence
  ENSG00000188596_75 (sequence is synthesized)
tcctgaaattacctcaaatgaaaacatatatgaagtagaagtggaagaggaatcagttgataatgaaatggaagacatgattattcaatgttgctctgaaatagcatctctgtttttgaa

SEQ ID NO: 693102 - DNA, 120 bp, Artificial Sequence
  ENSG00000188596_76 (sequence is synthesized)
tgataaagagccaacaccactatctgaggtcccatttgatatctcactgccgtctatattcaatcttgagagactttttgatctggctaatggttgcattttatcaggaggaagcctttt

SEQ ID NO: 693103 - DNA, 120 bp, Artificial Sequence
  ENSG00000188596_77 (sequence is synthesized)
caactggatagtgtcaattattccctgaatatcctatacacgggatgataaaactgagaaataaatcaagagtatgacaacagactgaggaatttttcagcaatatctgtcagcctttgg

SEQ ID NO: 693104 - DNA, 120 bp, Artificial Sequence
  ENSG00000188596_78 (sequence is synthesized)
aaatttggtgagaagaagtagtcatgattcaatgtcttgcttgcacagaagcctctagttcaaacttggatcttgccccatctgatttcttatgatatatacaaatactctagatattgc

SEQ ID NO: 693105 - DNA, 120 bp, Artificial Sequence
  ENSG00000188596_79 (sequence is synthesized)
tttgagatttcgctgttgatcaactggcctgctgcagcttcataggtgtttcagctcccagtagggcagtttaactcctatcttctctgtgagttccaggtctgtatatctcctcagctc

SEQ ID NO: 693106 - DNA, 120 bp, Artificial Sequence
  ENSG00000188596_80 (sequence is synthesized)
gctctcatttgtccagcttatctatttctttatcaagttgctttggcttccccactctctcctgcgttttgaaaagaattaattctcaagtagattaaaactacattctggtaaaaatga

SEQ ID NO: 693107 - DNA, 120 bp, Artificial Sequence
  ENSG00000188596_81 (sequence is synthesized)
ttttttgctattgcttattcaagttgccacacacatttcaaatctaaatttttcctatttttcacctggttaatgactttcatttgcatatatacatatataaagaagatattctttcta

SEQ ID NO: 693108 - DNA, 120 bp, Artificial Sequence
  ENSG00000188596_82 (sequence is synthesized)
agactccagtacagaatcaatttaatttgaaaactgtgttcttgttgacttaagttttcagataaatttcatttttttctacttccctaattaatatcaataaaaacataattaaatctt

SEQ ID NO: 693109 - DNA, 82 bp, Artificial Sequence
  ENSG00000188596_83 (sequence is synthesized)
actgcaatcctcagagtagctgggattacagtggatttatcttctgtggcagataaatgaagtaattcactgctataaaatg

SEQ ID NO: 693110 - DNA, 120 bp, Artificial Sequence
  ENSG00000188596_84 (sequence is synthesized)
agttgctttcattatttcttgcacagacacaaggagagaaaggagaaataaatgattcaaaatgtacttctggaaaggtggaattttgcctggggacagaggagatgcatatgtcaatac

SEQ ID NO: 693111 - DNA, 120 bp, Artificial Sequence
  ENSG00000188596_85 (sequence is synthesized)
cccctgacctttctcaggagcacttcagagtttttagttccgtggagaaaagcaaacttccatattcacaacttggacttgtaatttcttcttatcaccaaactattgatgttctccaag

SEQ ID NO: 693112 - DNA, 120 bp, Artificial Sequence
  ENSG00000188596_86 (sequence is synthesized)
gccaaaaagaagttcatttggctaattattattacagtatttagtctgatacccttcctattttacatgttttgatttttctcttagaaaaaaataaatgagtacataaaaattttaata

SEQ ID NO: 693113 - DNA, 120 bp, Artificial Sequence
  ENSG00000188596_87 (sequence is synthesized)
aggcacagtaaccaaaaaagtgttgctttttaattttgtagttgagatttcccagaggtgagacattcctgaacagccaggcagctggctgtggatgggcaggagggtggccgggttaac

SEQ ID NO: 693114 - DNA, 120 bp, Artificial Sequence
  ENSG00000188596_88 (sequence is synthesized)
gctaagtgctgtgagagataaaaatagaagatacatacataatatggaatactgtgtagctattaaaaagatacaaaatcaatgagcaaaaagcacaagcattcttatacaccaataaca

SEQ ID NO: 693115 - DNA, 120 bp, Artificial Sequence
  ENSG00000188596_89 (sequence is synthesized)
tacatgagaagacaaataaaatcagaaggactcaaaatgagggaaattatagaattggagtgacactttaccagcttaatgtattctttacaatggaattaaaattcttaaagtccattg

SEQ ID NO: 693116 - DNA, 120 bp, Artificial Sequence
  ENSG00000188596_90 (sequence is synthesized)
gctgaggaagcatattccttaattcagaggattgaagctgaacaaaatgccctatattcctatcagaaatatttggaaagttcaaaaagaaagaaaagcagagtcccccctccacctatc

SEQ ID NO: 693117 - DNA, 120 bp, Artificial Sequence
  ENSG00000188603_0 (sequence is synthesized)
acgtgatccgacaaacggcctctgcatagtgcagaacattctgctgctcttaaaggtacaggcctcagggtccctgctgtagacggggcgggggagagtacgatgggtggggcgtggtgg

SEQ ID NO: 693118 - DNA, 120 bp, Artificial Sequence
  ENSG00000188603_1 (sequence is synthesized)
gtcgtagggcgctcgagatggagcccccagcttccttgatggatcgcggggcgcgagtgccctagacaagccggagctgggaccggcaatcgggcgttgatccttgtcacctgtcgcaga

SEQ ID NO: 693119 - DNA, 120 bp, Artificial Sequence
  ENSG00000188603_2 (sequence is synthesized)
ccctcatccctcccgtgggagccccctttggacactctatgaccctggaccctcgggggacctgaacttgatgcgatgggaggctgtgcaggctcgcggcggcgcttttcggattccgag

SEQ ID NO: 693120 - DNA, 120 bp, Artificial Sequence
  ENSG00000188603_3 (sequence is synthesized)
ggggaggagaccgtcccggagccccggctccctctgttggaccatcagggcgcgcattggaagaacgcggtgggcttctggctgctgggcctttgcaacaacttctcttatgtggtgatg

SEQ ID NO: 693121 - DNA, 120 bp, Artificial Sequence
  ENSG00000188603_4 (sequence is synthesized)
ctgagtgccgcccacgacatccttagccacaagaggacatcgggaaaccagagccatgtggacccaggcccaacgccgatcccccacaacagctcatcacgatttgactgcaactctgtc

SEQ ID NO: 693122 - DNA, 120 bp, Artificial Sequence
  ENSG00000188603_5 (sequence is synthesized)
tctacggctgctgtgctcctggcggacatcctccccacactcgtcatcaaattgttggctcctcttggccttcacctgctgccctacagcccccgggttctcgtcagtgggatttgtgct

SEQ ID NO: 693123 - DNA, 120 bp, Artificial Sequence
  ENSG00000188603_6 (sequence is synthesized)
gctggaagcttcgtcctggttgccttttctcattctgtggggaccagcctgtgtggtgtggtcttcgctagcatctcatcaggccttggggaggtcaccttcctctccctcactgccttc

SEQ ID NO: 693124 - DNA, 120 bp, Artificial Sequence
  ENSG00000188603_7 (sequence is synthesized)
gcctcacccaggccggcctctcccctcagcagaccctgctgtccatgctgggtatccctgccctgctgctggccagctatttcttgttgctcacatctcctgaggcccaggaccctggag

SEQ ID NO: 693125 - DNA, 120 bp, Artificial Sequence
  ENSG00000188603_8 (sequence is synthesized)
gggaagaagaagcagagagcgcagcccggcagcccctcataagaaccgaggccccggagtcgaagccaggctccagctccagcctctcccttcgggaaaggtggacagtgttcaagggtc

SEQ ID NO: 693126 - DNA, 120 bp, Artificial Sequence
  ENSG00000188603_9 (sequence is synthesized)
tgctgtggtacattgttcccttggtcgtagtttactttgccgagtatttcattaaccagggactttttgaactcctctttttctggaacacttccctgagtcacgctcagcaataccgct

SEQ ID NO: 693127 - DNA, 120 bp, Artificial Sequence
  ENSG00000188603_10 (sequence is synthesized)
ggtaccagatgctgtaccaggctggcgtctttgcctcccgctcttctctccgctgctgtcgcatccgtttcacctgggccctggccctgctgcagtgcctcaacctggtgttcctgctgg

SEQ ID NO: 693128 - DNA, 120 bp, Artificial Sequence
  ENSG00000188603_11 (sequence is synthesized)
cagacgtgtggttcggctttctgccaagcatctacctcgtcttcctgatcattctgtatgaggggctcctgggaggcgcagcctacgtgaacaccttccacaacatcgccctggagacca

SEQ ID NO: 693129 - DNA, 120 bp, Artificial Sequence
  ENSG00000188603_12 (sequence is synthesized)
gtgatgagcaccgggagtttgcaatggcggccacctgcatctctgacacactggggatctccctgtcggggctcctggctttgcctctgcatgacttcctctgccagctctcctgatact

SEQ ID NO: 693130 - DNA, 120 bp, Artificial Sequence
  ENSG00000188603_13 (sequence is synthesized)
cgggatcctcaggacgcaggtcacattcacctgtgggcagagggacaggtcagacacccaggcccaccccagagaccctccatgaactgtgctcccagccttcccggcaggtctgggagt

SEQ ID NO: 693131 - DNA, 120 bp, Artificial Sequence
  ENSG00000188603_14 (sequence is synthesized)
agggaagggctgaagccttgtttcccttgcaggggggccagccattgtctcccacttggggagtttcttcctggcatcatgccttctgaataaatgccgattttatccatggacttctta

SEQ ID NO: 693132 - DNA, 120 bp, Artificial Sequence
  ENSG00000188603_15 (sequence is synthesized)
tctctgttcacttcctgctcatgggactcctgcctctcctgggcttggccgctcctgtcttggcaagccccagaccctgccttggatttctttctggcctccaagtgggcgcttggctcc

SEQ ID NO: 693133 - DNA, 120 bp, Artificial Sequence
  ENSG00000188603_16 (sequence is synthesized)
tggcacctggcagccttggctgtctccccagccccactgtcctgcctctctgcttgggacccatgggagctgccatctccccagccccaggtctgttctacagctgagctccccacttca

SEQ ID NO: 693134 - DNA, 120 bp, Artificial Sequence
  ENSG00000188603_17 (sequence is synthesized)
tgtcttctgtcatctccaggccctctcagccttccagccccctcgttttggctgcctctaaggccctccaggtcctcctgggcttcctcctctacaatcttccctgtctttcccaccgcc

SEQ ID NO: 693135 - DNA, 120 bp, Artificial Sequence
  ENSG00000188603_18 (sequence is synthesized)
accacccccagttcctcagccgcctgcgcctcccgctctacagtggggactgcatctcccaggaggtaggagacaaaggtgccgagggaatcctaggaaaaaagagagagagaggggaga

SEQ ID NO: 693136 - DNA, 120 bp, Artificial Sequence
  ENSG00000188603_19 (sequence is synthesized)
gtcattgaggagagtcccagccctttccctgggggccctggctggaggagcccaggttaaggaagagggtactgggatctgaaaggagaagaagaggatttgcagaaggagccagaaggg

SEQ ID NO: 693137 - DNA, 120 bp, Artificial Sequence
  ENSG00000188603_20 (sequence is synthesized)
gcatcgattaggggtacgaggacgcatggttggaggtggggactgaaattcagaaaatattaggccaggagtctgcctgaacctgagaaagcaatctccagtttgaggagatcagaagga

SEQ ID NO: 693138 - DNA, 120 bp, Artificial Sequence
  ENSG00000188603_21 (sequence is synthesized)
ggaggggaaaggtgaggccccaggggaggtgcccggaagtgaggccccagggaatggggtgcaagtatctggcagctgtctgcccttctcaccagtgcccccctcaaggcctggtgcagc

SEQ ID NO: 693139 - DNA, 120 bp, Artificial Sequence
  ENSG00000188603_22 (sequence is synthesized)
ccagggaggtatagccggaggaagtccatcctgtctgtctctgtctgtgtgtccagaaagctgataatgaccgtccccacccaccaagacaagccaaccttccccaggaccaaaggcact

SEQ ID NO: 693140 - DNA, 120 bp, Artificial Sequence
  ENSG00000188603_23 (sequence is synthesized)
tcctcttcccctgtctccctgatgcgtccccaccccaggccctgcccacggcccctgatgcccacagtagcccccactgcagcccgggaaatgggtgtacatcacacaggggactcaggt

SEQ ID NO: 693141 - DNA, 120 bp, Artificial Sequence
  ENSG00000188603_24 (sequence is synthesized)
gcacatttggaaataaaggacaagcaagaggccagaaaggacaaagtgggagcaggagaccttagaactggggagggggagagggaggggacatgtggcaacagcagctcaagtgactca

SEQ ID NO: 693142 - DNA, 120 bp, Artificial Sequence
  ENSG00000188603_25 (sequence is synthesized)
ggtctcgtatccgcacctcagccatttctgcctcccctacaagccacagccactctgcaagaggaagctggggtttgtggttcctgttttgcctgggaagaaagagtagcagtgaagagg

SEQ ID NO: 693143 - DNA, 120 bp, Artificial Sequence
  ENSG00000188603_26 (sequence is synthesized)
gggctggtgggagctctgacacatttcggcgtcattaatgcttcccccaggggcggaaggggccggattggtggctctggggtgcatcccctcacctatgattaggcttgcaaaaaagaa

SEQ ID NO: 693144 - DNA, 120 bp, Artificial Sequence
  ENSG00000188603_27 (sequence is synthesized)
cttggctaaactttatattgtggatatctgtgtctgcctcccaccttcctgtgacttccttgatggcagatgccatgtatgaaacgctgctgaatttctagagccctgcacgttagtagg

SEQ ID NO: 693145 - DNA, 120 bp, Artificial Sequence
  ENSG00000188603_28 (sequence is synthesized)
gaaacgctgctgaatttctagagccctgcacgttagtaggattccattttccatcagctgagtgacctgggaggcacactagagagggcacatttcttttcttttcttttcttttttttt

SEQ ID NO: 693146 - DNA, 120 bp, Artificial Sequence
  ENSG00000188603_29 (sequence is synthesized)
ctgaaggcctggtggtgagaaagagcatatagaggtggcacagcccatagcagagatgaggccaaggacaagaagagaatgcaggatgccgctttccacctagaagaagtttaaaacctg

SEQ ID NO: 693147 - DNA, 120 bp, Artificial Sequence
  ENSG00000188603_30 (sequence is synthesized)
cggttccagggttctccagcccctccctttttcacgctccgaagccgagaaggcccaaagcgaagacagagaggacccggaagtagggaaaacctctgagcacgtgatgggggaacacgc

SEQ ID NO: 693148 - DNA, 120 bp, Artificial Sequence
  ENSG00000188603_31 (sequence is synthesized)
atcgtttttgtctctaaaaagaaacttttattatgaaagtaatacatgcccactttcctatatatagacagcataaagaaggtatgtcagcagatttctcccttttttgtttgtttgttt

SEQ ID NO: 693149 - DNA, 120 bp, Artificial Sequence
  ENSG00000188603_32 (sequence is synthesized)
ttacaggtgtgagccactgtacctggcctctgccatctttgaggccttacgtattcattcattcatgcattcattgtttgggacaatctgtaaacaatcatgttggacattctttccagc

SEQ ID NO: 693150 - DNA, 120 bp, Artificial Sequence
  ENSG00000188603_33 (sequence is synthesized)
aacaatcatgttggacattctttccagcatgaaagttttcagagaagtggaaagaattgtgcagtgaatcatcctgagtatgcgccaccctgttctatgttaacattttgttacagttgt

SEQ ID NO: 693151 - DNA, 120 bp, Artificial Sequence
  ENSG00000188603_34 (sequence is synthesized)
tttatcatgtagtccagcccccatcaaatctatgtattcactgttccatcagtgagtagatagagctaatgaatggcagggttggcacctgaggcattttattttattatttttttttat

SEQ ID NO: 693152 - DNA, 120 bp, Artificial Sequence
  ENSG00000188603_35 (sequence is synthesized)
ttttagagacagggttgcactctgtcacccaggctgaagtacagtggcacagtcatggctcactgtagccttgacctcctagactcaaacaatcctcacaccttggcctcccaagcagct

SEQ ID NO: 693153 - DNA, 90 bp, Artificial Sequence
  ENSG00000188603_36 (sequence is synthesized)
ccaagagacgcgatcttcctatgttacccaggctggtcttgaactcttgagctcaagcagtcctgccttggcctcccaaagtactgagat

SEQ ID NO: 693154 - DNA, 120 bp, Artificial Sequence
  ENSG00000188603_37 (sequence is synthesized)
gcctcccaaagtactgagattacaagcatgagccactgctcctggcatcctgttatttaggtacagtttttatacacagtaaaatgtataaattgttacatatttttacagtaaactgag

SEQ ID NO: 693155 - DNA, 120 bp, Artificial Sequence
  ENSG00000188603_38 (sequence is synthesized)
ctgtctcaaaaaaaaaaacaaaaaaactgagtctgacttagtgtttctcatacttcattgttaccctttctactatatttgccatatctgaacctaacagtacttttatttacttaatat

SEQ ID NO: 693156 - DNA, 120 bp, Artificial Sequence
  ENSG00000188603_39 (sequence is synthesized)
gccatatctgaacctaacagtacttttatttacttaatatttttcattaaagcaactaacctttaatatacattcagttattttaaagggaaacattattaaaatcatgagtttgaggtg

SEQ ID NO: 693157 - DNA, 120 bp, Artificial Sequence
  ENSG00000188603_40 (sequence is synthesized)
atatatatgtattttctactttactttaaatagttatgtaactattggagtttaaaatgaacatgcaagttccccctgagactactccattacgaccagtgatgtttgtggacccagatc

SEQ ID NO: 693158 - DNA, 120 bp, Artificial Sequence
  ENSG00000188603_41 (sequence is synthesized)
taggaaatgctgacccactggttaatagcatgggctttgggggcagaaggaactgactttcaggtgccaaccctgccattcactagctctattaccttgggcaagtcacttcacctctct

SEQ ID NO: 693159 - DNA, 120 bp, Artificial Sequence
  ENSG00000188603_42 (sequence is synthesized)
gcacctcagtttcctgatctgtccaatgggataatagtagcaccagcatttcataagttgcttttggaaactacatgagatcatgtcaacactcaataaacatcagctctgatcatgcta

SEQ ID NO: 693160 - DNA, 120 bp, Artificial Sequence
  ENSG00000188603_43 (sequence is synthesized)
ttatatcttctgccttttccagggtctgctgtggtacattgttcccttggtcgtagtttactttgccgagtatttcattaaccagggacttgtaagtgaggggtgctaggaggggtgtgg

SEQ ID NO: 693161 - DNA, 120 bp, Artificial Sequence
  ENSG00000188603_44 (sequence is synthesized)
aggtggcgattggggctgggacccacacagccccgtccatctcccctgtctggtatttgttgcagtttgaactcctctttttctggaacacttccctgagtcacgctcagcaataccgct

SEQ ID NO: 693162 - DNA, 120 bp, Artificial Sequence
  ENSG00000188603_45 (sequence is synthesized)
cccgcccaccctcatggaacgaccacctctggctcgcagcccacctgaggggaatgagagctgactcggccccgggaggacacgcaaggagcggtcgtgcacctgagagtaggtgggggt

SEQ ID NO: 693163 - DNA, 120 bp, Artificial Sequence
  ENSG00000188603_46 (sequence is synthesized)
gaaaaagtgagtccatttaaagaaaaatattaagtaaaaatatatatatacaggaggaatatggatatggcaaataacatgaagccagaacctaagtgactaaaatcgaggaagttctgg

SEQ ID NO: 693164 - DNA, 120 bp, Artificial Sequence
  ENSG00000188603_47 (sequence is synthesized)
cctagcacagagtgaacgtataattaatgggagctagagcgaccattagaataataatggccagaaaacagaactgactcgctaggtatgagccagcagtccgaacaagggcctgctgag

SEQ ID NO: 693165 - DNA, 120 bp, Artificial Sequence
  ENSG00000188603_48 (sequence is synthesized)
cagtccgaacaagggcctgctgagcacagtggctcacagctgtaatcccagtgctttaggaggctgaggctggaggaccactagaggctagaaatttgagaccagcctgggcaacatagc

SEQ ID NO: 693166 - DNA, 71 bp, Artificial Sequence
  ENSG00000188603_49 (sequence is synthesized)
gcctgggcaacatagcgagactccatttatacaaaaaatggaaaatatgaggcgggcttggtggcacgtgc

SEQ ID NO: 693167 - DNA, 120 bp, Artificial Sequence
  ENSG00000188603_50 (sequence is synthesized)
cattccagcctggatgctggagaaagaccctgtctctgaaaaaaatcaaaacaaaatgaaggcccatgaataggaataaggagataaattcaggtccaaagaaagaagcctttgtccaca

SEQ ID NO: 693168 - DNA, 120 bp, Artificial Sequence
  ENSG00000188603_51 (sequence is synthesized)
attggagctctcccgcacagcgtaggagccttagaggcagtgagctacccatctttgaaagtgttcaaaggtagaggtgttccctgggaaaagtggcctagatggtccctggggaccttc

SEQ ID NO: 693169 - DNA, 80 bp, Artificial Sequence
  ENSG00000188603_52 (sequence is synthesized)
agcctaagctgctgggcctttgcaacaacttctcttatgtggtgatgctgagtgccgcccacgacatccttagccacaag

SEQ ID NO: 693170 - DNA, 120 bp, Artificial Sequence
  ENSG00000188603_53 (sequence is synthesized)
agaggagcgagggcagtgggctgggagggcgccgtggtgatgcagctgccctgcccagtaggcaccggggggagcgggatggtccctggaggagcctcctctcctccccccaaccctaac

SEQ ID NO: 693171 - DNA, 120 bp, Artificial Sequence
  ENSG00000188603_54 (sequence is synthesized)
gagtctccccagcctcccagaggaaagggattcattctgtcacccttagaagcctgctagggctatcagcagtaggcgatgggagactgggacaatttggaggggtaggcagtggaggag

SEQ ID NO: 693172 - DNA, 120 bp, Artificial Sequence
  ENSG00000188603_55 (sequence is synthesized)
caatttggaggggtaggcagtggaggagatgggagaaaatggatgaattagatggagattgaggtgaacaaagtcaagactctgtgatggaccaggcacagtgactcatgcctataatcc

SEQ ID NO: 693173 - DNA, 120 bp, Artificial Sequence
  ENSG00000188603_56 (sequence is synthesized)
gatgaaggggcagagacatcaagggtgcatgtctgcccctggtctgataactgggtggatggaggtgccactctccatgaagggacacgcaggggagtggggctctgcttcagacctgga

SEQ ID NO: 693174 - DNA, 120 bp, Artificial Sequence
  ENSG00000188603_57 (sequence is synthesized)
acctggcctatgcatgggatctattggagcctctatgagctgatactgaggaggccatggccagacacattagaggcctgggcagtgtggcaaggtgtggtgtgaccatcccagtgcttg

SEQ ID NO: 693175 - DNA, 120 bp, Artificial Sequence
  ENSG00000188603_58 (sequence is synthesized)
tcctccccccaggtgtggtcttcgctagcatctcatcaggccttggggaggtcaccttcctctccctcactgccttctaccccaggtcctcctgaatgttcctgtgttctccttcccagg

SEQ ID NO: 693176 - DNA, 66 bp, Artificial Sequence
  ENSG00000188603_59 (sequence is synthesized)
cgccaccacccccagttcctcagccgcctgcgcctcccgctctacagtggggactgcatctcccag

SEQ ID NO: 693177 - DNA, 84 bp, Artificial Sequence
  ENSG00000188603_60 (sequence is synthesized)
ttctctccgctgctgtcgcatccgtttcacctgggccctggccctgctgtagcggtgcaatcttggctcactgcaacccctgcc

SEQ ID NO: 693178 - DNA, 120 bp, Artificial Sequence
  ENSG00000188603_61 (sequence is synthesized)
cctcccgtgggagccccctttggacactctatgaccctggaccctcgggggacctgaacttgatgcgatgggaggctgtgcaggctcgcggcggcgcttttcggattccgagggtggacc

SEQ ID NO: 693179 - DNA, 81 bp, Artificial Sequence
  ENSG00000188603_62 (sequence is synthesized)
tctatagaccccactcccagcccttcactacccagctgggactgtcatgattaaaacagttgagacctgggctgggcgcac

SEQ ID NO: 693180 - DNA, 120 bp, Artificial Sequence
  ENSG00000188603_63 (sequence is synthesized)
gggcagtatagtgagacccccatcttaaagaaaaaaattaaaaaatatatatatataaaataattgagaccttaatataatttctgaggctgaggcggatggatcacttgagaccaggag

SEQ ID NO: 693181 - DNA, 120 bp, Artificial Sequence
  ENSG00000188603_64 (sequence is synthesized)
gaggtggaggttgtagtgagccaagatcgagccactacactccagcctgggtggcagaatgagactcactctcaaaatatatatatatatagtttctgagtcctttctgtctgcaccata

SEQ ID NO: 693182 - DNA, 120 bp, Artificial Sequence
  ENSG00000188603_65 (sequence is synthesized)
gtctgcaccatatattagctcatttaagccacacagcagtcctgtgagctaggtgctatgatattcccattttccagatgaggaaactgaagctcagagagtataaactcttgacacaca

SEQ ID NO: 693183 - DNA, 120 bp, Artificial Sequence
  ENSG00000188603_66 (sequence is synthesized)
actaaggagtgggagagctgagacttgaacccaggcgtgcctgactccagagcctgtgtttgtagcaggcctgtttggccagctcctgcctctccttggccacgtggttgggagggttgt

SEQ ID NO: 693184 - DNA, 120 bp, Artificial Sequence
  ENSG00000188603_67 (sequence is synthesized)
cccctggaagctctgcggtctcactctattctcctgtcccaggctgtgctcctggcggacatcctccccacactcgtcatcaaattgttggctcctcttggccttcacctgctgccctac

SEQ ID NO: 693185 - DNA, 120 bp, Artificial Sequence
  ENSG00000188603_68 (sequence is synthesized)
aggtctgggtgagggtagtgggaggcagggtgggcaggagctgagaaaggggaggctgggatggctgagatgctgagagtagagaccgaccttccccctcccttcccttctcaccccctc

SEQ ID NO: 693186 - DNA, 120 bp, Artificial Sequence
  ENSG00000188603_69 (sequence is synthesized)
tggaagcttcgtcctggttgccttttctcattctgtggggaccagcctgtgtgggccgtgatctcctggtggtcctcagggactgggggagctgggctgctgggggccctgtcctacctg

SEQ ID NO: 693187 - DNA, 87 bp, Artificial Sequence
  ENSG00000188603_70 (sequence is synthesized)
ccgcctcccaggttcaggcgattctttgcctcaacctggtgttcctgctggcagacgtgtggttcggctttctgccaagcatctacc

SEQ ID NO: 693188 - DNA, 75 bp, Artificial Sequence
  ENSG00000188603_71 (sequence is synthesized)
tgctgcagatggagtcctgctctgtcaccaggctggagtgcagtgacgcagtctctgctcactgcagcctccgct

SEQ ID NO: 693189 - DNA, 120 bp, Artificial Sequence
  ENSG00000188603_72 (sequence is synthesized)
caggacgcaggtcacattcacctgtgggcagagggacaggggggccagccattgtctcccacttggggagtttcttcctggcatcatgccttctgaataaatgccgattttatccatgga

SEQ ID NO: 693190 - DNA, 120 bp, Artificial Sequence
  ENSG00000188610_0 (sequence is synthesized)
gaggcaggaaaagcggaagagggagcgaaaaccaacgtgttcggtgacagaccccagcgccgactgagcctctaaagcgacttcagctctgccccaccaacaccaccgcgcgcccgggaa

SEQ ID NO: 693191 - DNA, 120 bp, Artificial Sequence
  ENSG00000188610_1 (sequence is synthesized)
cagccgctccgggaagaaacctgaggggactgcggggggcacgagggacagctgagggaagggaggacgcgagagaaacagcgcaagcacgctgagggccgggggttgccaggagagggg

SEQ ID NO: 693192 - DNA, 120 bp, Artificial Sequence
  ENSG00000188610_2 (sequence is synthesized)
cccgcggacccgcagagcggaggaaggtccgggagaaaaggggcgggacggaggagaatccgggatcgcctggcagaaaaagagaagggagtttctgaatcctgggaagaggaggcgtgg

SEQ ID NO: 693193 - DNA, 120 bp, Artificial Sequence
  ENSG00000188610_3 (sequence is synthesized)
gtagggatgcttagcccgagatccgacagcagggaaccggagcgctccgggggaggggcttaatgctggggaagggatgtcttaaaagaggagaagctttaaattagacgatcggagaag

SEQ ID NO: 693194 - DNA, 120 bp, Artificial Sequence
  ENSG00000188610_4 (sequence is synthesized)
gctgagggaattgctatgaaggggcgggagctgaagtgtagaggactcctttagacagcagaaagggaaagccgttgagaagttcccttcaaactccacctgcctcctctccaattcaaa

SEQ ID NO: 693195 - DNA, 120 bp, Artificial Sequence
  ENSG00000188610_5 (sequence is synthesized)
ctccactcccttctccaaaagttaaaaggaaagccaagtttgccacgctcccctgttcctactcaataaatacttcttctactccgccaccgggaaaacagaaaaaaaaaactaatttcc

SEQ ID NO: 693196 - DNA, 120 bp, Artificial Sequence
  ENSG00000188610_6 (sequence is synthesized)
ttcccaatattaggacttagaaaagctctaggtcccgcaacttgaattttagcctaggggaatcaaaatagtaggagcattactcttgtttcctttttcaaaatcccacacctcatcctt

SEQ ID NO: 693197 - DNA, 120 bp, Artificial Sequence
  ENSG00000188610_7 (sequence is synthesized)
cctgcgacgccatgtctaccaacatttgtagtttcaaggacaggtgcgtgtccatcctgtgttgcaaattctgtaaacaagtgctcagctctaggggaatgaaggctgttttgctggctg

SEQ ID NO: 693198 - DNA, 120 bp, Artificial Sequence
  ENSG00000188610_8 (sequence is synthesized)
atactgaaatagaccttttctctacagacatccctcctaccaacgcagtggacttcactggaagatgctatttcaccaaaatctgcaaatgtaaactgaaggacatcgcatgtttaaaat

SEQ ID NO: 693199 - DNA, 120 bp, Artificial Sequence
  ENSG00000188610_9 (sequence is synthesized)
gactccacaggtgtaaacatcctactttggggcaacttgccagagatagaagagagtacagatgaagatgtgttaaatatctcagcagaggagtgtattagataaatggaattatgatat

SEQ ID NO: 693200 - DNA, 120 bp, Artificial Sequence
  ENSG00000188610_10 (sequence is synthesized)
atatgatatacaaacttttttctatttaaaaatatattaatggatcaactttaaaattgttagttgccagtgatcttttttggaaaacaaaaatggggcatttgttgatttatttatttt

SEQ ID NO: 693201 - DNA, 120 bp, Artificial Sequence
  ENSG00000188610_11 (sequence is synthesized)
ccgtctctaattagttacctcagtttgattgaagccagtggagttgtgcttttcctctacttctacttcctctcccccacctttttctgcccagtgtaggtgtattcttaaattcagacg

SEQ ID NO: 693202 - DNA, 120 bp, Artificial Sequence
  ENSG00000188610_12 (sequence is synthesized)
ggaagattctttcacatatcactcagttacctcccaatctgggggagtttttcttacaacttgataccagataccattaattttacattcctgaataaaggcctagtacccacgcatatt

SEQ ID NO: 693203 - DNA, 120 bp, Artificial Sequence
  ENSG00000188610_13 (sequence is synthesized)
tcaaccatgcatatatcaagttcaactgagttttaataggggattaaaaaaacaagctgttaggtttccatgggcactggttctcataggttctattggtgataactgctttaacatgga

SEQ ID NO: 693204 - DNA, 120 bp, Artificial Sequence
  ENSG00000188610_14 (sequence is synthesized)
gcaagagtttgtgaatcaggaaatagaataaattaaaatttaaaatatatagaggaatcctcttgattgctcagcatgatgttagataaatgagtttgtcagaaaatatcagtatacgct

SEQ ID NO: 693205 - DNA, 120 bp, Artificial Sequence
  ENSG00000188610_15 (sequence is synthesized)
gtttaccaatgttatttatttacattcttctaaagccattatggatattgtattatgagagctaaacctaaataagttatcctgttccctaggaccttctctgtaaatagtgaattttag

SEQ ID NO: 693206 - DNA, 120 bp, Artificial Sequence
  ENSG00000188610_16 (sequence is synthesized)
acgagtagtctgtcctaaatcttaaatagaaaaaaaactaaagcgatttgcttaagccattgtacattataaagagctgttttgttttgctttgctttgctttgttttgtttttttaaag

SEQ ID NO: 693207 - DNA, 120 bp, Artificial Sequence
  ENSG00000188610_17 (sequence is synthesized)
ctgcattcagagccacaaaggaataggaaagtagggtagtgttggattctggttttatgtaactctaaaataaatgtatctctttaatatctcagttgtagggattttgtcaataccaaa

SEQ ID NO: 693208 - DNA, 120 bp, Artificial Sequence
  ENSG00000188610_18 (sequence is synthesized)
gcagactgagttgtggttttgtaaataaagttttttctaaaaatgaccattcttcctttaattttttgttatgcccacatattgtatgtaaaaatataaataaatagtacttaaagtata

SEQ ID NO: 693209 - DNA, 120 bp, Artificial Sequence
  ENSG00000188610_19 (sequence is synthesized)
ctaggctgggacccgggctgtccgccagggctgggagacactggaggaggccggccgatgattacgcgcgatgccaacgacgactgccctacggtggaccgcggctgcccgtgtgcggag

SEQ ID NO: 693210 - DNA, 120 bp, Artificial Sequence
  ENSG00000188610_20 (sequence is synthesized)
gaaagggagaggcggctgggtgctggctgcgctgcggtccgtgagccaggacggagtcccaggctgtacagtgatgggcggagagactcgcagtcctgagaacgcagtggacttcactgg

SEQ ID NO: 693211 - DNA, 120 bp, Artificial Sequence
  ENSG00000188610_21 (sequence is synthesized)
aggctgttttgctggctgatactgaaatagaccttttctctacagacatccctcctaccaagtaagtcatgctagtggcgggcaacggtagcttttaactaaatgggaacacttatggct

SEQ ID NO: 693212 - DNA, 120 bp, Artificial Sequence
  ENSG00000188610_22 (sequence is synthesized)
gtttagccaaggtggtcagtcctgatgtaatgcttctagttcaattgcagtcatgcgaccacacatctcttaagtttgatccctggttcagtgccctgcccaaccatcctatttcactga

SEQ ID NO: 693213 - DNA, 120 bp, Artificial Sequence
  ENSG00000188610_23 (sequence is synthesized)
atcaagtccgtggcgtagactttaggtaaattcaggcaaaattttctgtactgttggagaggagaggtcatttaagtttttcatttttatccatgaaattttgcaccaaaaaaaaaaaaa

SEQ ID NO: 693214 - DNA, 120 bp, Artificial Sequence
  ENSG00000188611_0 (sequence is synthesized)
agagtgtccagcctcccagagttaacctgcagcactgctcagaagagcaggggcagaggataccaaagcgtcccagcactctggcttgcaggggaatgacatgcggttttgaacaagcag

SEQ ID NO: 693215 - DNA, 120 bp, Artificial Sequence
  ENSG00000188611_1 (sequence is synthesized)
ctgctgcagcaggtctgggtttcagaaagtgctgagaggtgtaagcccagcaacgtgcaaggggaaaggggacaggattctggatggccatttgcttcactgggatgcaaaacctctttt

SEQ ID NO: 693216 - DNA, 120 bp, Artificial Sequence
  ENSG00000188611_2 (sequence is synthesized)
gagtactagaatcagtatttcttcttccatctctgctgtacctgagaagaaatggccaaacgcaccttctctaacttggagacattcctgattttcctccttgtaatgatgagtgccatc

SEQ ID NO: 693217 - DNA, 120 bp, Artificial Sequence
  ENSG00000188611_3 (sequence is synthesized)
acagtggcccttctcagcctcttgtttatcaccagtgggaccattgaaaaccacaaagatttaggaggccattttttttcaaccacccaaagccctccagccacccagggctccacagct

SEQ ID NO: 693218 - DNA, 120 bp, Artificial Sequence
  ENSG00000188611_4 (sequence is synthesized)
gcccaacgctccacagccacccagcattccacagccacccagagctccacagccactcaaacttctccagtgcctttaaccccagagtctcctctatttcagaacttcagtggctaccat

SEQ ID NO: 693219 - DNA, 120 bp, Artificial Sequence
  ENSG00000188611_5 (sequence is synthesized)
attggtgttggacgagctgactgcacaggacaagtagcagatatcaatttgatgggctatggcaaatccggccagaatgcacagggcatcctcaccaggctatacagtcgtgccttcatc

SEQ ID NO: 693220 - DNA, 120 bp, Artificial Sequence
  ENSG00000188611_6 (sequence is synthesized)
atggcagaacctgatgggtccaatcgaacagtgtttgtcagcatcgacataggcatggtatcacaaaggctcaggctggaggtcctgaacagactgcagagtaaatatggctccctgtac

SEQ ID NO: 693221 - DNA, 120 bp, Artificial Sequence
  ENSG00000188611_7 (sequence is synthesized)
agaagagataatgtcatcctgagtggcactcacactcattcaggtcctgcaggatatttccagtataccgtgtttgtaattgccagtgaaggatttagcaatcaaacttttcagcacatg

SEQ ID NO: 693222 - DNA, 120 bp, Artificial Sequence
  ENSG00000188611_8 (sequence is synthesized)
gtcactggtatcttgaagagcattgacatagcacacacaaatatgaaaccaggcaaaatcttcatcaataaaggaaatgtggatggtgtgcagatcaacagaagtccgtattcttacctt

SEQ ID NO: 693223 - DNA, 120 bp, Artificial Sequence
  ENSG00000188611_9 (sequence is synthesized)
caaaatccgcagtcagagagagcaaggtattcttcaaatacagacaaggaaatgatagttttgaaaatggtagatttgaatggagatgacttgggccttatcagctggtttgccatccac

SEQ ID NO: 693224 - DNA, 120 bp, Artificial Sequence
  ENSG00000188611_10 (sequence is synthesized)
ccggtcagcatgaacaacagtaaccatcttgtaaacagtgacaatgtgggctatgcatcttacctgcttgagcaagagaagaacaaaggatatctacctggacaggggccatttgtagca

SEQ ID NO: 693225 - DNA, 120 bp, Artificial Sequence
  ENSG00000188611_11 (sequence is synthesized)
gcctttgcttcatcaaacctaggagatgtgtcccccaacattcttggaccacgttgcatcaacacaggagagtcctgtgataacgccaatagcacttgtcccattggtgggcctagcatg

SEQ ID NO: 693226 - DNA, 120 bp, Artificial Sequence
  ENSG00000188611_12 (sequence is synthesized)
tgcattgctaagggacctggacaggatatgtttgacagcacacaaattataggacgggccatgtatcagagagcaaaggaactctatgcctctgcctcccaggaggtaacaggaccactg

SEQ ID NO: 693227 - DNA, 120 bp, Artificial Sequence
  ENSG00000188611_13 (sequence is synthesized)
gcttcagcacaccagtgggtggatatgacagatgtgactgtctggctcaattccacacatgcatcaaaaacatgtaaaccagcattgggctacagttttgcagctggcactattgatgga

SEQ ID NO: 693228 - DNA, 120 bp, Artificial Sequence
  ENSG00000188611_14 (sequence is synthesized)
gttggaggcctcaattttacacaggggaaaacagaaggggatccattttgggacaccattcgggaccagatcctgggaaagccatctgaagaaattaaagaatgtcataaaccaaagccc

SEQ ID NO: 693229 - DNA, 120 bp, Artificial Sequence
  ENSG00000188611_15 (sequence is synthesized)
atccttcttcacaccggagaactatcaaaacctcacccctggcatccagacattgttgatgttcagattattacccttgggtccttggccataactgccatccccggggagtttacgacc

SEQ ID NO: 693230 - DNA, 120 bp, Artificial Sequence
  ENSG00000188611_16 (sequence is synthesized)
atgtctggacgaagacttcgagaggcagttcaagcagaatttgcatctcatgggatgcagaacatgactgttgttatttcaggtctatgcaacgtctatacacattacattaccacttat

SEQ ID NO: 693231 - DNA, 120 bp, Artificial Sequence
  ENSG00000188611_17 (sequence is synthesized)
gaagaataccaggctcagcgatatgaggcagcatcgacaatttatggaccgcacacattatctgcttacattcagctcttcagaaaccttgctaaggctattgctacggacacggtagcc

SEQ ID NO: 693232 - DNA, 120 bp, Artificial Sequence
  ENSG00000188611_18 (sequence is synthesized)
aacctgagcagaggtccagaacctccctttttcaaacaattaatagttccattaattcctagtattgtggatagagcaccaaaaggcagaactttcggggatgtcctgcagccagcaaaa

SEQ ID NO: 693233 - DNA, 120 bp, Artificial Sequence
  ENSG00000188611_19 (sequence is synthesized)
cctgaatacagagtgggggaagttgctgaagttatatttgtaggtgctaacccgaagaattcagtacaaaaccagacccatcagaccttcctcactgtggagaaatatgaggctacttca

SEQ ID NO: 693234 - DNA, 120 bp, Artificial Sequence
  ENSG00000188611_20 (sequence is synthesized)
acatcgtggcagatagtgtgtaatgatgcctcctgggagactcgtttttattggcacaagggactcctgggtctgagtaatgcaacagtggaatggcatattccagacactgcccagcct

SEQ ID NO: 693235 - DNA, 120 bp, Artificial Sequence
  ENSG00000188611_21 (sequence is synthesized)
ggaatctacagaataagatattttggacacaatcggaagcaggacattctgaagcctgctgtcatactttcatttgaaggcacttccccggcttttgaagttgtaactatttagtgaaaa

SEQ ID NO: 693236 - DNA, 120 bp, Artificial Sequence
  ENSG00000188611_22 (sequence is synthesized)
gttgatagatcatttaaagaacagctttactctctacacattatataagtgatttcaaatgaatgtgaactagtgaactaccatgttgacttctataatcgtccctgtttggggacagat

SEQ ID NO: 693237 - DNA, 120 bp, Artificial Sequence
  ENSG00000188611_23 (sequence is synthesized)
ttgctccagcagccatatatcttgtggtctacagcctaaagcatgatttcccttgaagtcttggggttgtttaaaggagagtcccttcaatataaaacctctgaaatattagtgagaatg

SEQ ID NO: 693238 - DNA, 120 bp, Artificial Sequence
  ENSG00000188611_24 (sequence is synthesized)
aatggctcactaatgtgaacaatgtttaaattatttatttatatatagaattactgaatattagtactgggaaaatttatagaaatcatctagtcttacccttcatcttacatataagaa

SEQ ID NO: 693239 - DNA, 120 bp, Artificial Sequence
  ENSG00000188611_25 (sequence is synthesized)
ggtcttttcttctaatcacatttacaaaatatgatataaaccttgaccatgaatgtatgagcctaattagagaaacagaaaatcagcatgtcagttttccttcattcaaaataacatagt

SEQ ID NO: 693240 - DNA, 120 bp, Artificial Sequence
  ENSG00000188611_26 (sequence is synthesized)
ctttctaagcagtcattctggagttaacatgcctagttcagagccgctgtggatgctcaaatcatttctggaattgccttcaggacacaattatgagaaagtcagacttccaatattttg

SEQ ID NO: 693241 - DNA, 120 bp, Artificial Sequence
  ENSG00000188611_27 (sequence is synthesized)
atcatgccttgtgttttcctaagtgtccttatcccactggattgtgtctcttactcccaagacttattccaaatgattttttgactcttttcattaatcaaattcaccccaaaccagaaa

SEQ ID NO: 693242 - DNA, 120 bp, Artificial Sequence
  ENSG00000188611_28 (sequence is synthesized)
ccatttgctcactcactcactcatggacccattcaatcatagaatatttaagatttatatgcccagaattataatagtgcctaggccttgataattagtgaatttgtacttggggtgaat

SEQ ID NO: 693243 - DNA, 120 bp, Artificial Sequence
  ENSG00000188611_29 (sequence is synthesized)
gtgtaagtgtcaaaaggtaactattatgaaggagaaaataatcgatttaatatgtaaattctggggaagcatttaaaaaatcagtaatcttcaagttatatcttgtgtatcatctgtgtt

SEQ ID NO: 693244 - DNA, 120 bp, Artificial Sequence
  ENSG00000188611_30 (sequence is synthesized)
ggatactctaatttggggggaaagaggctccagacagtttgctaaatactattttgaaagttatttttgggcattgtaaaataccttgcttcataccccaaagaataagatatgacagtc

SEQ ID NO: 693245 - DNA, 120 bp, Artificial Sequence
  ENSG00000188611_31 (sequence is synthesized)
tgacatcgattgtctgaaagtactaattgcatttaaaattctttaagttaactacaacctcccagactgcaaagcaaatttccaaaccccaggtcatacttttgtatgtatgtaaaagct

SEQ ID NO: 693246 - DNA, 120 bp, Artificial Sequence
  ENSG00000188611_32 (sequence is synthesized)
agctttagcattttagggaaaaaaatcaatctgtattttaaaaataaactttgaggtttgaaaataataacaatattcataatggtagtattaacatctattatgtataacttaatctca

SEQ ID NO: 693247 - DNA, 120 bp, Artificial Sequence
  ENSG00000188611_33 (sequence is synthesized)
aatttattgaattagaatgaacctggaacactttttgatgaattggtatcctagaggctgtttccttgggcattaactgctggaggattaggtaatcagggattccaagtgttgtgatct

SEQ ID NO: 693248 - DNA, 120 bp, Artificial Sequence
  ENSG00000188611_34 (sequence is synthesized)
tttttctgatgatgccacagtcttcagtgtaaaagttcagaagcctaaaagaacaagtgatcctgaaagtagctgattccagacaagaaaattatattagaacttatgatatggtttttt

SEQ ID NO: 693249 - DNA, 120 bp, Artificial Sequence
  ENSG00000188611_35 (sequence is synthesized)
aaagtatttgttattactcagaagggttcatgaatcagtttccactacctctattccttctattgaagctttcctcaaatctacttgtgattcctgatagctcactggcaactgtaccaa

SEQ ID NO: 693250 - DNA, 120 bp, Artificial Sequence
  ENSG00000188611_36 (sequence is synthesized)
ggtggccactgtatcatctactgatcctactgcacctagcactcttggctccagataacgcacagaaacctattttctcaccagctgtcatttcttctagggcatgcagttctatgttcg

SEQ ID NO: 693251 - DNA, 120 bp, Artificial Sequence
  ENSG00000188611_37 (sequence is synthesized)
cagttcatgtgtaaaaataaaaccaaattcctggattatcaatatcagttctttacctgtgcataaaagaatatcatgaagtaattgaacttatctgttgatataaaaacacagatccaa

SEQ ID NO: 693252 - DNA, 120 bp, Artificial Sequence
  ENSG00000188611_38 (sequence is synthesized)
ttcatgtctgtggatgctgcagggactggctcactggagccaaaccatgtggcagaaactcctgaaattggtggaaaaagtggaatatggcagattgggtaggtaggagaacaattttgg

SEQ ID NO: 693253 - DNA, 120 bp, Artificial Sequence
  ENSG00000188611_39 (sequence is synthesized)
agattttgtttctcatgttaaaatgtctgcattttatttgctgtaccctgcctactctggttttaaggattttttgacttctttgaaaagcactgaataatctcttttccaggtctagat

SEQ ID NO: 693254 - DNA, 120 bp, Artificial Sequence
  ENSG00000188611_40 (sequence is synthesized)
tttttgatgagtactgtgtaaaattgtcaatattcaatggattatttaataataaattaagaattacactcataaaagtattgtctaatgaaaggtaatgtagacaaacgaacacttttt

SEQ ID NO: 693255 - DNA, 120 bp, Artificial Sequence
  ENSG00000188611_41 (sequence is synthesized)
taaaaaaagaggtggaacaaaaggtggtagattacatgtaagttaggttggaaagtgatacaaatgacttgtaaataaccactgaagcacaagggaaccacttctttatcagttcctttc

SEQ ID NO: 693256 - DNA, 120 bp, Artificial Sequence
  ENSG00000188611_42 (sequence is synthesized)
taacttctgaagatgtactgctggtaaaacacatgtatggttgacaattcttttattttctttctcttttttactagttgggcaaaaaaatttcctaggcaggtagctaactatgaaatt

SEQ ID NO: 693257 - DNA, 120 bp, Artificial Sequence
  ENSG00000188611_43 (sequence is synthesized)
gtttcatgcgctaattctgaacaaaaagaccaagaatgaatttacttatgaatgtccttttctaatgtgccctcttatgcttctcctccaatgtaagcaagcttactgtctttttctaag

SEQ ID NO: 693258 - DNA, 120 bp, Artificial Sequence
  ENSG00000188611_44 (sequence is synthesized)
attagcgcatggattctatctttagccaaaaggtttcatcactagatgaacttctcatgtgtttagttcttccaaatgatgctcttgcttcctgggtatccaacctgacttgctggttta

SEQ ID NO: 693259 - DNA, 120 bp, Artificial Sequence
  ENSG00000188611_45 (sequence is synthesized)
tattggcttccaaaattttagagtgatagggtatcggagagggaaatttgcacattccttatgcaatttgttagtatgcattcagctgtaactcagaaaatattcctgatcaacatccat

SEQ ID NO: 693260 - DNA, 120 bp, Artificial Sequence
  ENSG00000188611_46 (sequence is synthesized)
ccaaacactaaagacatttataacctcacatagcagtaagtcttgaagtgataaattcaggtttggtgcagccactcagtggctcttcttaatatattgacttaattcttaggcttatcc

SEQ ID NO: 693261 - DNA, 120 bp, Artificial Sequence
  ENSG00000188611_47 (sequence is synthesized)
tcttagctaaaagatcgctacctcaagtctacatataattgaatgcagcagcaaaatgggaggagagagttctctttataatccccttttagaaggtggaaaatagtaagaacacaagtt

SEQ ID NO: 693262 - DNA, 120 bp, Artificial Sequence
  ENSG00000188611_48 (sequence is synthesized)
gaattttccttctatttctttgttcagaactgtgccacacagctactcttacctgcaagggaagctggaaaaaagaatatttagtattttgtgcttctagagagtgaggcaagttctgat

SEQ ID NO: 693263 - DNA, 120 bp, Artificial Sequence
  ENSG00000188611_49 (sequence is synthesized)
agtaagaaagaagagatagccgaagtagctgtcataaaattatgttagtcaagacagattagttatgctacaacattagagatttatttcttgatctcatgacctgtccattggggttag

SEQ ID NO: 693264 - DNA, 120 bp, Artificial Sequence
  ENSG00000188611_50 (sequence is synthesized)
ctgaaggatctgttccacatctcatttgagttcacaggctgacagagacttccattctaaacattcttccattgtgagggaacaggaacaggtgcttccatgattagggggaagggacag

SEQ ID NO: 693265 - DNA, 120 bp, Artificial Sequence
  ENSG00000188611_51 (sequence is synthesized)
ggagaatcatgcaatagttcgtgaagcttccacattactgtgcatttttcactgggcaggtgacagaaccaggatatttgcaagcagccctaaaggttaccacagtgggcaagcaataat

SEQ ID NO: 693266 - DNA, 120 bp, Artificial Sequence
  ENSG00000188611_52 (sequence is synthesized)
atctgcatatccaaattaactgctctttgaaataattagaactcgttttactctagaaaatatattttggaaaagaacacacattggaataatgacgaaaaaaattgctttctgtattgc

SEQ ID NO: 693267 - DNA, 120 bp, Artificial Sequence
  ENSG00000188611_53 (sequence is synthesized)
aaaatgtatacgttactttaacagatttatatcaagcacctatatactttatggcagaaattatgctaaatcctaagaatgaaacaataatgaaggcaaagctattccctgccaaaagga

SEQ ID NO: 693268 - DNA, 120 bp, Artificial Sequence
  ENSG00000188611_54 (sequence is synthesized)
acttagcgtttaacgaacaaagcaaacagatgaacaggtaattactgtacagagtgacccatattgttattgttcagggaattagagagggcacctaatatggtcttggggatgtttcag

SEQ ID NO: 693269 - DNA, 120 bp, Artificial Sequence
  ENSG00000188611_55 (sequence is synthesized)
taagtttcctggaagaaataacatataagctaagacttaaaagacatgtagaaattagctagaagaaaggcaatggtgtgtgcatgtatgtgtgtattagtgtgtgtttgtgtttgtgta

SEQ ID NO: 693270 - DNA, 120 bp, Artificial Sequence
  ENSG00000188611_56 (sequence is synthesized)
ctgggcaaatagactattccatgtagagggaatattgagtactttatcaagactatagttagagtataaggaaagagttgacagtgaggcagcaccaaactttaccttcataaatagcaa

SEQ ID NO: 693271 - DNA, 120 bp, Artificial Sequence
  ENSG00000188611_57 (sequence is synthesized)
tttggttttatacttgtattagcatttttcccccttgagactcttcccctataacatcaatgtccttgaatgtatttgccatttgctctaataataaaatacactttctataaccaaaaa

SEQ ID NO: 693272 - DNA, 120 bp, Artificial Sequence
  ENSG00000188611_58 (sequence is synthesized)
gctcagcgatatgaggcagcatcgacaatttatggaccgcacacattatctgcttacattcagctcttcagaaaccttgctaaggctattgctacggaacttcacttgtggaaatcttcc

SEQ ID NO: 693273 - DNA, 120 bp, Artificial Sequence
  ENSG00000188612_0 (sequence is synthesized)
ctctcccctcgtccaccgctgccgcctccttcttctgccgctcctggtgctgcttgtgtgctcgtttggtgcggacctggtacctcttttgtgaagcggcagctgaggagactccggcgc

SEQ ID NO: 693274 - DNA, 120 bp, Artificial Sequence
  ENSG00000188612_1 (sequence is synthesized)
tcgccatggccgacgaaaagcccaaggaaggagtcaagactgagaacaacgatcatattaatttgaaggtggcggggcaggatggttctgtggtgcagtttaagattaagaggcatacac

SEQ ID NO: 693275 - DNA, 120 bp, Artificial Sequence
  ENSG00000188612_2 (sequence is synthesized)
cacttagtaaactaatgaaagcctattgtgaacgacagggattgtcaatgaggcagatcagattccgatttgacgggcaaccaatcaatgaaacagacacacctgcacagttggaaatgg

SEQ ID NO: 693276 - DNA, 120 bp, Artificial Sequence
  ENSG00000188612_3 (sequence is synthesized)
aggatgaagatacaattgatgtgttccaacagcagacgggaggtgtctactgaaaagggaacctgcttctttactccagaactctgttctttaaagaccaagattacattctcaattaga

SEQ ID NO: 693277 - DNA, 120 bp, Artificial Sequence
  ENSG00000188612_4 (sequence is synthesized)
aaactgcaatttggttccaccacatcctgactactaccgtatagttttctctattctttcatttcccccttccccattcctttattgtacataaagtaactggtatatgtgcacaagcat

SEQ ID NO: 693278 - DNA, 120 bp, Artificial Sequence
  ENSG00000188612_5 (sequence is synthesized)
attgcattttttttttttttaactaaacagccaatggtatgttttgattgacatcaagtggagacgggatggggaaaaatactgattctgtgaaaataccccctttctccattagtggca

SEQ ID NO: 693279 - DNA, 120 bp, Artificial Sequence
  ENSG00000188612_6 (sequence is synthesized)
tgctcattcagctcttatctttatattccagtaagttattttgctctcactgttttaacaaaaaaaaaaaacaacaacataaaaatccttgcataccttgttcaattggagaattttaat

SEQ ID NO: 693280 - DNA, 120 bp, Artificial Sequence
  ENSG00000188612_7 (sequence is synthesized)
gtttttcatttatcattgtaaaaccaaggacaattttataacttttttgtacgtagctgttacatgtagggcaatctgtctttaagtagggataaattactctaaaacaaaaaagaatcc

SEQ ID NO: 693281 - DNA, 120 bp, Artificial Sequence
  ENSG00000188612_8 (sequence is synthesized)
tagatagttttcccttcaagtcaagcgtcttgttgtttaaataaacttcttgtttaaaatgagctgttttctttattctgagaaatattaaatagaaaattgaggcttagaaaaaacata

SEQ ID NO: 693282 - DNA, 120 bp, Artificial Sequence
  ENSG00000188612_9 (sequence is synthesized)
aataggcctgcttagaagtaacatttcaagaaggaaataaagctacttggtgtttctgacagactgatactgatgccaaacaaagaataacagttttataaatatcaccttgttccaaaa

SEQ ID NO: 693283 - DNA, 120 bp, Artificial Sequence
  ENSG00000188612_10 (sequence is synthesized)
gtttctctaggtcccatgttaatatgcaagtatactagcagaaaaattgggccatagtatcgtggatttccaggtattttctgtatattaagtgaggcacggagcatagggtatagggta

SEQ ID NO: 693284 - DNA, 120 bp, Artificial Sequence
  ENSG00000188612_11 (sequence is synthesized)
gcacatgtggcaaggaaaaagttctgattttgcctttgttgctgataaaacactgaaccattctagcctgcacttatcataagtaaatactccctaacctaaaataaagttttcgttcct

SEQ ID NO: 693285 - DNA, 89 bp, Artificial Sequence
  ENSG00000188612_12 (sequence is synthesized)
aagtaaatactccctaacctaaaataaagttttcgttccttattcaaggattttttttttgagacggagttttcctctttcagctcact

SEQ ID NO: 693286 - DNA, 74 bp, Artificial Sequence
  ENSG00000188612_13 (sequence is synthesized)
ggcatgagccaccacgcctggcctattcaagaatattgagggacagaaaatatctatatatatccatcctcaga

SEQ ID NO: 693287 - DNA, 120 bp, Artificial Sequence
  ENSG00000188612_14 (sequence is synthesized)
attgagggacagaaaatatctatatatatccatcctcagaaccttaaatatacaggtcactacagtctttattattttaatttttgtttcttagggtttcttttggtggtggttttttga

SEQ ID NO: 693288 - DNA, 80 bp, Artificial Sequence
  ENSG00000188612_15 (sequence is synthesized)
tcttaagagatcctccctgctcagcctcgtgagtagctagaaccgcaggtgcatgccaccacagctaattcttgtatttt

SEQ ID NO: 693289 - DNA, 120 bp, Artificial Sequence
  ENSG00000188612_16 (sequence is synthesized)
aaccgcaggtgcatgccaccacagctaattcttgtattttttatagagagtgtttcgccatattgtccaggccgggctcaaacccctgatcttaagtgatctatctgccttagcctccca

SEQ ID NO: 693290 - DNA, 120 bp, Artificial Sequence
  ENSG00000188612_17 (sequence is synthesized)
atcttaagtgatctatctgccttagcctcccaatgtgctgggtttacaggcgtgagccactatgcccagcccctttttaattttttaaaaatgtttatttttgagatggagtttcgctct

SEQ ID NO: 693291 - DNA, 120 bp, Artificial Sequence
  ENSG00000188612_18 (sequence is synthesized)
tccgcctcccgggttcaactgattctcctccctcagcctccggaaaagctgggattacaagcatctaccatcatacctggctaattctgtatttttagtagagaaggggtttctctatgt

SEQ ID NO: 693292 - DNA, 120 bp, Artificial Sequence
  ENSG00000188612_19 (sequence is synthesized)
attatttttaaattagaggtggggtctcaccatgttgaccagtttggtctcgaacttctggcctcagtcccttgtcttggcctcccaaagtgttggggtttcaggtgttagaccccatgc

SEQ ID NO: 693293 - DNA, 70 bp, Artificial Sequence
  ENSG00000188612_20 (sequence is synthesized)
cctcccaaagtgttggggtttcaggtgttagaccccatgcccaaccactacagtttttgtttttgttttt

SEQ ID NO: 693294 - DNA, 82 bp, Artificial Sequence
  ENSG00000188612_21 (sequence is synthesized)
ttggcctcactgccattttatagatgagaaagccaagttccagaaaagttgtgaaatagacggtgactataaaactgggact

SEQ ID NO: 693295 - DNA, 120 bp, Artificial Sequence
  ENSG00000188612_22 (sequence is synthesized)
gaaaagttgtgaaatagacggtgactataaaactgggactagagatagtatcctaatgcttgttgattgtttttgtccatactgattgtcaacctaccaatataatctaccatcaagtca

SEQ ID NO: 693296 - DNA, 120 bp, Artificial Sequence
  ENSG00000188612_23 (sequence is synthesized)
gggcagaaagcggacgcccgcggacccaccagccccgaacggggattcttggcccagccggccggcgcgcgtgaggaggggcgttagggcgcgcggggtctccaccttctgtcgaccccg

SEQ ID NO: 693297 - DNA, 120 bp, Artificial Sequence
  ENSG00000188613_0 (sequence is synthesized)
gccgcgcccccccgcccatggcgctcgtgcccagcgcccgctacgtgagcgccccgggcccggcgcacccgcagcccttcagctcctggaacgactacctggggctcgccacgctcatca

SEQ ID NO: 693298 - DNA, 120 bp, Artificial Sequence
  ENSG00000188613_1 (sequence is synthesized)
gctcatcaccaaagcggtggacggcgagccgcgcttcggctgcgcccgcggtgggaacggcggcggcggctccccgccctcctcctcctcgtcgtcctgctgctccccccacacgggggc

SEQ ID NO: 693299 - DNA, 120 bp, Artificial Sequence
  ENSG00000188613_2 (sequence is synthesized)
cgggcctggggcgctggggccggcgctggggccgcccgactacgacgaggacgacgacgacgacagcgacgagccggggtcccggggccgctacctggggagcgcgctggaattgcgcgc

SEQ ID NO: 693300 - DNA, 120 bp, Artificial Sequence
  ENSG00000188613_3 (sequence is synthesized)
cgctggaattgcgcgcgctggagctgtgcgcgggccccgccgaggccgggctgctggaggagcgcttcgccgagctgagcccgttcgcgggtcgtgccgccgccgtgctgctgggctgcg

SEQ ID NO: 693301 - DNA, 80 bp, Artificial Sequence
  ENSG00000188613_4 (sequence is synthesized)
cggccgagccccggctgcacgcggcctccggggcggcggccgcccggctgctgaagcccgagctgcaggtgtgcgtgttc

SEQ ID NO: 693302 - DNA, 120 bp, Artificial Sequence
  ENSG00000188613_5 (sequence is synthesized)
gcaggtgtgcgtgttctgccggaacaacaaggaggcgatggcgctctacaccacccatatcctcaagggccccgacgggcgagtgctgtgtcccgtgctgcgccgctacacgtgtcccct

SEQ ID NO: 693303 - DNA, 120 bp, Artificial Sequence
  ENSG00000188613_6 (sequence is synthesized)
gtgcggcgccagcggcgacaacgcgcacaccatcaagtactgcccgctctccaaagtgccgccgccgcccgcccgcccgccgccccgcagcgccagggacggcccgcctggcaagaagct

SEQ ID NO: 693304 - DNA, 120 bp, Artificial Sequence
  ENSG00000188613_7 (sequence is synthesized)
gcgctgaaggcccgggctcccggccgcccagggtcgccgccgcccctcgcaccgctaggtctgcgcaccatctcgcccccgccgtggggaggcgtgcggctcagcggtcggctcgacatg

SEQ ID NO: 693305 - DNA, 120 bp, Artificial Sequence
  ENSG00000188613_8 (sequence is synthesized)
ggacgtcgtcctggtggtttttgaaaagcagccgaccgtgtggagtacttccgtgctgaacgattgggactagacgctgaaatccccatttgtcttcagtttctagtttgcacatccaga

SEQ ID NO: 693306 - DNA, 120 bp, Artificial Sequence
  ENSG00000188613_9 (sequence is synthesized)
acggcgaaggctgggtgtgtattccactaactgaaatatggcaacttagaggcgctgtttatttactgtatacgtcgacctattttagatgcgcatcagtatgaaattgtctcaatcttg

SEQ ID NO: 693307 - DNA, 120 bp, Artificial Sequence
  ENSG00000188613_10 (sequence is synthesized)
gatgtttcattttatgaatggaggcactttactaggtctagaatatttttttaaaagcctctgaactgagcttaaaactggcgattttatgaaatgtcggcaaaatgactattttattgt

SEQ ID NO: 693308 - DNA, 120 bp, Artificial Sequence
  ENSG00000188613_11 (sequence is synthesized)
ttgaagcgagttaatattctcagttgtctttaaaaatcagttactctaattccaggtgaagcaagccgctggtagcatcacccttatgagaagtgaaggttttgtaaactttccagtatt

SEQ ID NO: 693309 - DNA, 120 bp, Artificial Sequence
  ENSG00000188613_12 (sequence is synthesized)
aatttgggcgggtattccccgcttgtggcttgtttctgtcctagctggaggtgtaaaatgcacaatgtgtagcaggtagaatacagctccttatcgttctatgtaccaggtattttatta

SEQ ID NO: 693310 - DNA, 120 bp, Artificial Sequence
  ENSG00000188613_13 (sequence is synthesized)
ctgaactagcaactagccttttccacctttaaaagttgtgccaagtcataatcatattgtgtataacttggaaatggtgctgtttaaaaaaattgtgtatttatacagtaacagtatgaa

SEQ ID NO: 693311 - DNA, 120 bp, Artificial Sequence
  ENSG00000188613_14 (sequence is synthesized)
ttcattaatctcacctgtaactttcctacttggcattttctctacacactcaccctcttccagttctttaaaaacgtttatgatattaagatcaaagggaggaagggaagacagcagtat

SEQ ID NO: 693312 - DNA, 120 bp, Artificial Sequence
  ENSG00000188613_15 (sequence is synthesized)
ctgttgcctgtcaaacaaatagaagatggatctctagctctgagctattcgtgtattaactcgtattcaagaaggttccaccgtgggctgcgtctgactttaatacaggcagtgctcaaa

SEQ ID NO: 693313 - DNA, 120 bp, Artificial Sequence
  ENSG00000188613_16 (sequence is synthesized)
ctagaataagcactaattaaaggaattgttgggggtccttcatgtgttcccactcctactggaagacccatgtcggtttccggaaccccaccagtttacccataagcaagactaaacctg

SEQ ID NO: 693314 - DNA, 120 bp, Artificial Sequence
  ENSG00000188613_17 (sequence is synthesized)
atccttgggcaaaagttcctaacccctactttaccctcccaccctcacttttaaatccaccatactgaatgccacactatggaatgcagctacctgccaagcaaggcaatagaaggcaaa

SEQ ID NO: 693315 - DNA, 120 bp, Artificial Sequence
  ENSG00000188613_18 (sequence is synthesized)
aaatggaagtgaattaagatgaactcatctgaaatacacaaatgcattactatctgaagataccagcaagagtttagtctacgtgtataaggctcccagtaggatttagctaggctacta

SEQ ID NO: 693316 - DNA, 120 bp, Artificial Sequence
  ENSG00000188613_19 (sequence is synthesized)
gaagttagactgctttcgcattaaacagctaacttcatccacagcaaattgactcaatcaggaaccttcatttgaaggtgtgttagaggatggggtaaatacccgatagctgtctttttg

SEQ ID NO: 693317 - DNA, 120 bp, Artificial Sequence
  ENSG00000188613_20 (sequence is synthesized)
gtgaaagaaaaggtgcatttcaagaacttggggggcaggaggaaagcacaatgtttcttagccaggaaagacaaataatccaacgctgctagtcttaaccccagaccagagagaactgca

SEQ ID NO: 693318 - DNA, 120 bp, Artificial Sequence
  ENSG00000188613_21 (sequence is synthesized)
gatctgactgggcctaaattaagtagcttaatgaaaccatgtaattacttgttctcctttcttttgctatagaaaatctaccagtttaaatgagcttcaccttctgggtgaagtttctaa

SEQ ID NO: 693319 - DNA, 120 bp, Artificial Sequence
  ENSG00000188613_22 (sequence is synthesized)
ggtcaacatgaatcctcttacctctctcactgctcgtgttctgccttttcaaaaggaccactatgaacagatcagcgcattctctaggccaaaagggctagccaggtggcaagatcaatt

SEQ ID NO: 693320 - DNA, 120 bp, Artificial Sequence
  ENSG00000188613_23 (sequence is synthesized)
tagctactttgtattttcagagtcaaattacagacggtttccaaaggtcttgagcatggggctttggcatagcctcaatatatgggagtcactgtgatgagatgtgcctaatgttaattt

SEQ ID NO: 693321 - DNA, 120 bp, Artificial Sequence
  ENSG00000188613_24 (sequence is synthesized)
gatattctgacattgctattttaccagaactaagaacatattgagctggagcttcttgagggcaggagagtattggaaaaggaatccagaagaccctctccactactcaggcagccacta

SEQ ID NO: 693322 - DNA, 66 bp, Artificial Sequence
  ENSG00000188613_25 (sequence is synthesized)
ggaatccagaagaccctctccactactcaggcagccactattcatctatttttaaagtaccccatt

SEQ ID NO: 693323 - DNA, 120 bp, Artificial Sequence
  ENSG00000188613_26 (sequence is synthesized)
gcactccagcctgagcaacagagcgactctgtctccaaaaaagaaaaaaagtaccccatgttcagcccctgtgccaaatttgcctaggttttccagctgacaatgaatactgggagttaa

SEQ ID NO: 693324 - DNA, 120 bp, Artificial Sequence
  ENSG00000188613_27 (sequence is synthesized)
ccagctgacaatgaatactgggagttaaaacgcagagtattactatagttaattttctagggttctcttatgaaaagtatatgtaaacacattcatttaaaaatccttggaactcaatgt

SEQ ID NO: 693325 - DNA, 120 bp, Artificial Sequence
  ENSG00000188613_28 (sequence is synthesized)
ggaactttaaacattttgcaaaattacatttagagaaacccaatttttcaaagtttaagaaatatacaaagtatgacaaaattatcttcataagaacatgctgcatacttgcctagtagc

SEQ ID NO: 693326 - DNA, 120 bp, Artificial Sequence
  ENSG00000188613_29 (sequence is synthesized)
aaaacaatacagggaagagtcaaaagggcttctccaactgtagaggtacagattgtcttaacctgttcttttctgtacagacttaaaatttctagtggcttttatttttctttgtatttt

SEQ ID NO: 693327 - DNA, 120 bp, Artificial Sequence
  ENSG00000188613_30 (sequence is synthesized)
aattttcctacaaagtcctttttggaagttgcagaattattagctttgatgagaacaacttttgtcatagatttgatttattaaaccaaaattatacatattaaaattatatcacaaata

SEQ ID NO: 693328 - DNA, 80 bp, Artificial Sequence
  ENSG00000188620_0 (sequence is synthesized)
gatttccggcctctcgcctgctcgccccgccgcccgcctgtcccgctccctccctcccggggacccggaggagaggggac

SEQ ID NO: 693329 - DNA, 120 bp, Artificial Sequence
  ENSG00000188620_1 (sequence is synthesized)
gcacagccccaaccgccgccgccccccccacccgctcccaaggagtccccgttctccatcaagaacctgctcaacggagaccaccaccggccgccccctaagcctcagccgcccccacgg

SEQ ID NO: 693330 - DNA, 120 bp, Artificial Sequence
  ENSG00000188620_2 (sequence is synthesized)
cgccgccgctgccgctgccgcggcggccaagggggccctggagggcgccgcgggcttcgcgctctcgcaggtgggcgacctggctttccctcgctttgagatcccggcgcagaggtttgc

SEQ ID NO: 693331 - DNA, 120 bp, Artificial Sequence
  ENSG00000188620_3 (sequence is synthesized)
cctcgctttgagatcccggcgcagaggtttgccctgcccgcgcactacctggagcgctccccagcctggtggtacccctacaccctgacccccgccggcggccacctcccgcgacctgaa

SEQ ID NO: 693332 - DNA, 120 bp, Artificial Sequence
  ENSG00000188620_4 (sequence is synthesized)
gcctcggagaaggccttgctgagagactcctcccccgcctccggcacagaccgcgactctccggagccactgctcaaggccgaccccgatcacaaggagctggactccaagagcccggac

SEQ ID NO: 693333 - DNA, 120 bp, Artificial Sequence
  ENSG00000188620_5 (sequence is synthesized)
gagatcattctggaggagagcgactccgaggaaagcaaaaaggaaggcgaagcggcgccaggcgcggccggggcgagcgtaggggcggcggcggccactccgggcgcagaagactggaag

SEQ ID NO: 693334 - DNA, 120 bp, Artificial Sequence
  ENSG00000188620_6 (sequence is synthesized)
aagggcgctgaaagtccagagaagaagccggcgtgccgcaagaagaagacgcgcacagtcttctcgcgcagccaggtcttccagctcgagtccaccttcgacatgaagcgctatctgagc

SEQ ID NO: 693335 - DNA, 120 bp, Artificial Sequence
  ENSG00000188620_7 (sequence is synthesized)
agctcggagcgagccggcctggccgcgtccctgcacctcaccgagacgcaggtcaagatctggttccagaaccgccgcaacaagtggaagcggcagctggcggcggagctggaggcggcc

SEQ ID NO: 693336 - DNA, 120 bp, Artificial Sequence
  ENSG00000188620_8 (sequence is synthesized)
aacctgagccatgccgcggcgcagcgcatcgtgcgggtgcccatcctctaccacgagaactcggcggccgagggcgcggcggctgcagccgcgggggccccggtgccagtcagccagccg

SEQ ID NO: 693337 - DNA, 120 bp, Artificial Sequence
  ENSG00000188620_9 (sequence is synthesized)
ctgctcaccttcccgcaccccgtctactactcgcacccggtggtctcttccgtgccgctgctacggccggtctgaggccccagaggggtgggggagggagcgcccggcctccttgtccgg

SEQ ID NO: 693338 - DNA, 120 bp, Artificial Sequence
  ENSG00000188620_10 (sequence is synthesized)
accccggaggagactgggccgggccgagggcgccgagaagtccagcggccttcaggaactggggcttgggcgcgcagcctctgcttcccctcccccagtcggtagcattttgtaagtatt

SEQ ID NO: 693339 - DNA, 120 bp, Artificial Sequence
  ENSG00000188620_11 (sequence is synthesized)
caggaacaagacaaaattttcgggtcagagatttcggccgatagtttttgtaaaatgtgcagccctcccttccaaatttccattgcgcggtggctttttggttttatttttatagaagga

SEQ ID NO: 693340 - DNA, 120 bp, Artificial Sequence
  ENSG00000188620_12 (sequence is synthesized)
tatttttatagaaggaaaataagcgcaaaacctaaatccctctagtttattcttttctgcttttttttttttttccgagacggaatcttgctctatctattgcccaggctggagtgcagt

SEQ ID NO: 693341 - DNA, 120 bp, Artificial Sequence
  ENSG00000188620_13 (sequence is synthesized)
tatagaactgttttcagaatccagagagggagagaattcatatgatagtacttttatttctggatttctgggtatgtttcttcctcccaacccccaaatcagttatccaccttaattttc

SEQ ID NO: 693342 - DNA, 120 bp, Artificial Sequence
  ENSG00000188620_14 (sequence is synthesized)
aaaatatgagcagcctctcataagaatcccgactcaggccgcttttctcttctggagaggtctgttgcaattagcctcttcatcggtcttactttgtgatggaagaattctctaagtgtc

SEQ ID NO: 693343 - DNA, 120 bp, Artificial Sequence
  ENSG00000188620_15 (sequence is synthesized)
taaagagaaaagacagccaaaaatcagaactctgactatttgaaacagctccatatctggcctggtctaagtggtcttatttattagtagcatttattttgagaatttcatttgtaaatt

SEQ ID NO: 693344 - DNA, 120 bp, Artificial Sequence
  ENSG00000188620_16 (sequence is synthesized)
attattaatattactattattactttgttccctgttttgagagagtaatttcagtatttttaatatgatatcttttatcctctcctcttacttttcatgttctgcagtaattattgtacg

SEQ ID NO: 693345 - DNA, 120 bp, Artificial Sequence
  ENSG00000188620_17 (sequence is synthesized)
ttgacctgtgcaatattgtacaaaatctcctgagaaagctgtttcctcctccaccgtgggaaacagaccttttcactgtataatcatggtcattcatttagaaagaaaaaagtaggcagg

SEQ ID NO: 693346 - DNA, 120 bp, Artificial Sequence
  ENSG00000188620_18 (sequence is synthesized)
ggaaaggggggaagaaagaaacaagcttaggtagtgatgctcaaaggagtaagttaggcatactggagcgctttaagtgaaggacaatcaatttagcagaattttaacttatttgataaa

SEQ ID NO: 693347 - DNA, 120 bp, Artificial Sequence
  ENSG00000188620_19 (sequence is synthesized)
tgtacagatttcttgtaaagttcaccctctactccgcagggctcctggctctgtcacccaatctgttttctttctgtcggtacacctgttgttctgtgatagtttgtttcccctcatctc

SEQ ID NO: 693348 - DNA, 120 bp, Artificial Sequence
  ENSG00000188620_20 (sequence is synthesized)
cctcacctctgcctgggttgagtccctttttaagaaaaagagaaaaaaaaaacccacaaaatattgttacactaatgttgtcgtgacattgaattaattaaaaagaaaagaaaagcttta

SEQ ID NO: 693349 - DNA, 120 bp, Artificial Sequence
  ENSG00000188624_0 (sequence is synthesized)
accactcttcttcaattctcctagagcatctttggaagcatgaggccacgatgctgcatcttggctcttgtctgctggataacagtcttcctcctccagtgttcaaaaggaactacagac

SEQ ID NO: 693350 - DNA, 120 bp, Artificial Sequence
  ENSG00000188624_1 (sequence is synthesized)
gctcctgttggctcaggactgtggctgtgccagccgacacccaggtgtgggaacaagatctacaacccttcagagcagtgctgttatgatgatgccatcttatccttaaaggagacccgc

SEQ ID NO: 693351 - DNA, 120 bp, Artificial Sequence
  ENSG00000188624_2 (sequence is synthesized)
tgtgaagttgagggttctgggtatgaagtctcagtgtcacttatctcccatctcccggagctgtaccaggaacaggaggcacgtcctgtacccataaaaaccccaggctccactggcaga

SEQ ID NO: 693352 - DNA, 120 bp, Artificial Sequence
  ENSG00000188624_3 (sequence is synthesized)
cggcagacaaggggagaagagacgaagcagctggacatcggagactacagttgaacttcggagagaagcaacttgacttcagagggatggctcaatgacatagctttggagaggagccca

SEQ ID NO: 693353 - DNA, 120 bp, Artificial Sequence
  ENSG00000188624_4 (sequence is synthesized)
gctggggatggccagacttcaggggaagaatgccttcctgcttcatcccctttccagctccccttcccgctgagagccactttcatcggcaataaaatcccccacatttaccatcttcaa

SEQ ID NO: 693354 - DNA, 80 bp, Artificial Sequence
  ENSG00000188626_0 (sequence is synthesized)
agaaacagcaggagcgaacaggaacaggaaaacaaatggcagtatccctcagacagccacttctggtggttgccagccac

SEQ ID NO: 693355 - DNA, 120 bp, Artificial Sequence
  ENSG00000188626_1 (sequence is synthesized)
agtatccctcagacagccacttctggtggttgccagccacctggggattcagcaacaggttttcacagggaaggccctacatcatctgctaccctgaaagatctggagagcccgtgccaa

SEQ ID NO: 693356 - DNA, 120 bp, Artificial Sequence
  ENSG00000188626_2 (sequence is synthesized)
aaagatctggagagcccgtgccaagaacgagcagtagtcctggattcaaggtccgtagaaatcagtcaactgaagaacaccatcaaatctttgaaacaacagaagaaacaagtggaacat

SEQ ID NO: 693357 - DNA, 120 bp, Artificial Sequence
  ENSG00000188626_3 (sequence is synthesized)
aacaacaagaaacagaaagccaaaagggtgctagaggttcaactccagacattgaacatacagaaagaggaactaaatacggacctgtaccacatgaaacgttctctcagatactttgaa

SEQ ID NO: 693358 - DNA, 120 bp, Artificial Sequence
  ENSG00000188626_4 (sequence is synthesized)
gaaaagtccaaggatctggctgtccgcctgcaacattcattgcagcgtaaaggagagttagagagtgttctctctgatgtcatggccacacagaagaagaaggcaaaccagttgtccagc

SEQ ID NO: 693359 - DNA, 120 bp, Artificial Sequence
  ENSG00000188626_5 (sequence is synthesized)
cccagtaaagcaggtacggagtggaagttagagcagtccatgcgggaggaggcactactgaaagtgcagctgacacagttgaaggagtcatttcaacaagtccaattagaaagagatgag

SEQ ID NO: 693360 - DNA, 78 bp, Artificial Sequence; identical to SEQ ID NO: 632451
  ENSG00000188626_6 (sequence is synthesized)

SEQ ID NO: 693361 - DNA, 120 bp, Artificial Sequence; identical to SEQ ID NO: 632452
  ENSG00000188626_7 (sequence is synthesized)

SEQ ID NO: 693362 - DNA, 120 bp, Artificial Sequence
  ENSG00000188626_8 (sequence is synthesized)
gaggcttcggaagcaggaggagaggattcaggagcagcacaagagccttcagcagctggccaagccacagagcgtcttcgaggagccgaacaatgagaacaagagcacactgcagttgga

SEQ ID NO: 693363 - DNA, 120 bp, Artificial Sequence; identical to SEQ ID NO: 632454
  ENSG00000188626_9 (sequence is synthesized)

SEQ ID NO: 693364 - DNA, 120 bp, Artificial Sequence
  ENSG00000188626_10 (sequence is synthesized)
agtgagggggaggaggcacctcagcccatgccgagtgtcccagaggacccggagagcagggaggccatgagcagctttatggaccacctggaggagaaggcagacctgagtgagcttgtg

SEQ ID NO: 693365 - DNA, 120 bp, Artificial Sequence
  ENSG00000188626_11 (sequence is synthesized)
aagaaacaagaacttcgcttcattcaatactggcaagagagatgccatcagaaaatccatcaccttttatcagaaccagggggccgtgccaaagatgcggcactgggaggaggacaccat

SEQ ID NO: 693366 - DNA, 120 bp, Artificial Sequence
  ENSG00000188626_12 (sequence is synthesized)
gcccacaactctgctgatgagcccggtccaggagccccagctccccaggagcttggggctgcagacaagcatggtgatctttgtgaggtgagcctcacctcctctgcccaaggagaggcc

SEQ ID NO: 693367 - DNA, 120 bp, Artificial Sequence
  ENSG00000188626_13 (sequence is synthesized)
ctgcaggccctgccgaagctccccctggtttcccgcagcgatcccgcgcagggctgaagcagtgcctactcaatagaaccagtcatcgtgcaaagaaatgccacctgactcaaaggcaaa

SEQ ID NO: 693368 - DNA, 120 bp, Artificial Sequence
  ENSG00000188626_14 (sequence is synthesized)
gccagagtgcagcttggagcaaagaagtttgtgttgaaggagaaactaacaatgaaaatggacttgttgacggaagaaaagtaggaatgcagcctctggtgctgtttgagtgatccctct

SEQ ID NO: 693369 - DNA, 120 bp, Artificial Sequence
  ENSG00000188629_0 (sequence is synthesized)
cgccatctcccatagctgtcgcctgcagctgagaaagggttgctgtcccagcaggccaggtccagggctgggtataagtaagcaagaagagggcctgggagaagagtctgacgagcaagg

SEQ ID NO: 693370 - DNA, 120 bp, Artificial Sequence
  ENSG00000188629_1 (sequence is synthesized)
gccaaggatggagtgaaatacagggtgacctgtgtttttcccctggctgctttggaaattatgggaaaaaatcaaataccaaggaagaaaaatctataatgaaattagatgtggatttct

SEQ ID NO: 693371 - DNA, 120 bp, Artificial Sequence
  ENSG00000188629_2 (sequence is synthesized)
aaaatctataatgaaattagatgtggatttctttttatgtattcagcttgggggcttatgatacttctagtacccaaagagatgcggtcttgctgtgttgcctaggctggtctcaaactc

SEQ ID NO: 693372 - DNA, 120 bp, Artificial Sequence
  ENSG00000188629_3 (sequence is synthesized)
tcagcctcctgagtacatttatatttaaagtaattattgatggctctgcctgcttaggactctgcccagccaggaaggaaacctacaggaggaagaatggctgcagggtggctgacaacc

SEQ ID NO: 693373 - DNA, 120 bp, Artificial Sequence
  ENSG00000188629_4 (sequence is synthesized)
tggtcacagaactcagtaaccttccaggaagtggcagtggacttttcccaggaggagtgggcattgctggaccctgctcaaaaaaatctatacaaagatgtgatgctggagaactttagg

SEQ ID NO: 693374 - DNA, 120 bp, Artificial Sequence
  ENSG00000188629_5 (sequence is synthesized)
aacctggcctcagtagggtatcagctctgcagacacagtctgatctccaaggtggatcaagaacagctgaagacagatgaaagaggaattttacaaggtgactgtgcagactgggaaact

SEQ ID NO: 693375 - DNA, 120 bp, Artificial Sequence
  ENSG00000188629_6 (sequence is synthesized)
caacttaaaccaaaagatacaattgctatgcagaacattcctgggggaaaaacatccaatggcataaacacgaactgtgtcagaactcactctggagagatgccctatgaatgcagtgac

SEQ ID NO: 693376 - DNA, 120 bp, Artificial Sequence
  ENSG00000188629_7 (sequence is synthesized)
gaaacacatgagatctcatactggagagaagccttatgagtgtgatcactgtggaaaatcctttagccagagctctcatctgaatgtgcacaaaagaactcacactggagagaaacccta

SEQ ID NO: 693377 - DNA, 120 bp, Artificial Sequence
  ENSG00000188629_8 (sequence is synthesized)
tgactgtaaggaatgtgggaaggctttcactgttccttcatcccttcagaaacatgtgagaacccacactggagagaaaccctatgaatgcagtgactgtggaaaagccttcatcgatca

SEQ ID NO: 693378 - DNA, 120 bp, Artificial Sequence
  ENSG00000188629_9 (sequence is synthesized)
gtcatcccttaagaaacacacacgctctcacactggagagaagccttatgagtgtaaccagtgtggaaagtccttcagcacaggctcttaccttattgtgcacaagagaactcacactgg

SEQ ID NO: 693379 - DNA, 120 bp, Artificial Sequence
  ENSG00000188629_10 (sequence is synthesized)
tgagaaaacctatgagtgtaaagaatgtgggaaggcctttaggaattcctcttgcctgagggtacacgtgagaactcacactggagagaagccttataaatgtattcagtgtgaaaaagc

SEQ ID NO: 693380 - DNA, 120 bp, Artificial Sequence
  ENSG00000188629_11 (sequence is synthesized)
ctttagcacaagcactaaccttataatgcacaagcgaatccacaatggccagaaactccatgaatgaaatgactcagggaagtgtttgttgcccctcatgcctcctttctcactttagaa

SEQ ID NO: 693381 - DNA, 120 bp, Artificial Sequence
  ENSG00000188629_12 (sequence is synthesized)
catatattggagagaagccctgttatggtcacctggaaacagccttctggcccaactctggatgcctgttatactgggacaaaccttataaatgttatagctatgattgtttttatcagt

SEQ ID NO: 693382 - DNA, 120 bp, Artificial Sequence
  ENSG00000188629_13 (sequence is synthesized)
gagtatttcattcttatatgtgtcacaactgtagatcctatgaatattttagttatcttttcagtttaattgcattgtgaacagaacacatggtcttcaatatgtagattctgtgtgaca

SEQ ID NO: 693383 - DNA, 120 bp, Artificial Sequence
  ENSG00000188629_14 (sequence is synthesized)
tagatttgaacataattgctggacactgactgatgtactgtggcagacagaactagttgctgtctcaatatccattcctcccttctttcttaaagtaataaaatttaccatttagttcaa

SEQ ID NO: 693384 - DNA, 120 bp, Artificial Sequence
  ENSG00000188629_15 (sequence is synthesized)
ctgggggaaaaacatccaatggcataaacacggcagaaaatcaacctggtgagcactccctggagtgtaaccattgtgggaaattcagaaagaacactcgctttatttgtacaagatatt

SEQ ID NO: 693385 - DNA, 120 bp, Artificial Sequence
  ENSG00000188629_16 (sequence is synthesized)
gcaagggagagaaatgctataaatatataaagtatagcaaagtcttcaaccatccctcaactcttaggagtcatgtgagcattcacattggagagaaaactcttgaatttactgattgta

SEQ ID NO: 693386 - DNA, 120 bp, Artificial Sequence
  ENSG00000188629_17 (sequence is synthesized)
gaaaagctttcaatcaagagtcatccctcaggaaacacttaagaactcccacaggacagaagtttcaggagtatgagcaatgtgatatgtccttcagcctacactcttcctgctcagtac

SEQ ID NO: 693387 - DNA, 120 bp, Artificial Sequence
  ENSG00000188629_18 (sequence is synthesized)
gtgagcaaatacctactggagagaaaggtgatgaatgcagtgactatggcaaaatatctccccttagtgtccacacaaaaactggtagtgtggaggagggtttggaatgtaatgaacatg

SEQ ID NO: 693388 - DNA, 120 bp, Artificial Sequence
  ENSG00000188629_19 (sequence is synthesized)
tccctagcccatgcaaagtaggcagaagtcactggatacagctgctaaggaagctcatggaaatgggaatatctcatctggtgtttttttcttaactatttgccctttgtcttgtccctt

SEQ ID NO: 693389 - DNA, 120 bp, Artificial Sequence
  ENSG00000188629_20 (sequence is synthesized)
atttcctagaaaatatatacaccaagaggaggacagagaaaggatactaaatgaaacaacaggggagatacaatattatctggttgcactaatcctgtgctgcttatctctggatttcat

SEQ ID NO: 693390 - DNA, 120 bp, Artificial Sequence
  ENSG00000188629_21 (sequence is synthesized)
gttacatgagaaaaattaactgccatgtggtttaaaccactcttgtgggaagttcctctttcagctgatttcagtcccaactgttacatctaataaatggtcaagttttaggaatcgttc

SEQ ID NO: 693391 - DNA, 120 bp, Artificial Sequence
  ENSG00000188629_22 (sequence is synthesized)
atagctgtcgcctgcagctgagaaagggttgctgtcccagcaggccaggtccaggtgcgccccactagtgaggccggcggaatcgggagggaaggggtcaagggcacagtgcgcagcccc

SEQ ID NO: 693392 - DNA, 120 bp, Artificial Sequence
  ENSG00000188629_23 (sequence is synthesized)
ggctgctccagaccttgcctgcagcttcccgccccagcctccggctatcgcggcgtttcttctcagaggccgccggctttggttcctcccggcactgctgggcttggggctgccattccg

SEQ ID NO: 693393 - DNA, 120 bp, Artificial Sequence
  ENSG00000188636_0 (sequence is synthesized)
ctggcccggtccctgcacctgccggaggccgcccgccgccatcgccagcgccgtcgcttggctgcgctgaccgggaagcagttctcggcggtccgcgcggtgattcatcggcctggccgc

SEQ ID NO: 693394 - DNA, 120 bp, Artificial Sequence
  ENSG00000188636_1 (sequence is synthesized)
gtcccccgcgcgggccatcttggtcacggccggcggcggacagagccgcggaggaaccgcgagaccccagggcccagagcaggtccagccacccgtctggctccgtagtccgcgaagtct

SEQ ID NO: 693395 - DNA, 120 bp, Artificial Sequence
  ENSG00000188636_2 (sequence is synthesized)
gcagtaaaggagccgcgtgggaccggggccgaagtccctagggcctggcaccgcgtgcccctctctcgggccctcggcttgggggtctcgcagcgccctgccgtcgtgcaccccacactg

SEQ ID NO: 693396 - DNA, 120 bp, Artificial Sequence
  ENSG00000188636_3 (sequence is synthesized)
cccccatttctacaggggcccacctggtcaccacaccctcttggtccacccgcggatctcagcgtgtggctgacctctggccagcatggtgcagccgcagacgtccaaagctgaaagccc

SEQ ID NO: 693397 - DNA, 120 bp, Artificial Sequence
  ENSG00000188636_4 (sequence is synthesized)
agccttggcagcgtctccgaatgcccagatggatgacgttattgacaccctgacctccctgcgcctcaccaactcggcgctgaggcgggaggcttccaccctgcgggcggagaaggccaa

SEQ ID NO: 693398 - DNA, 120 bp, Artificial Sequence
  ENSG00000188636_5 (sequence is synthesized)
tctcaccaacatgctggagagcgtgatggcagagctgaccttgttacgcaccagggcgcggatcccgggggctctgcagatcaccccgcccatctcctcaattacttcaaacgggactcg

SEQ ID NO: 693399 - DNA, 120 bp, Artificial Sequence
  ENSG00000188636_6 (sequence is synthesized)
acccatgaccacacctccaacctctctgcccgagcccttttccggggacccaggccggttggcggggttcctgatgcagatggacagattcatgatcttccaggcctcccgcttcccggg

SEQ ID NO: 693400 - DNA, 120 bp, Artificial Sequence
  ENSG00000188636_7 (sequence is synthesized)
tgaggccgagcgtgtggccttccttgtgtctcgactgactggggaggcggagaagtgggctatcccccacatgcaacctgacagccccttgcgcaacaactatcaggggttcctggcaga

SEQ ID NO: 693401 - DNA, 120 bp, Artificial Sequence
  ENSG00000188636_8 (sequence is synthesized)
gttgcggagaacctacaagtctccgctccggcatgcgcggcgcgcccaaatcaggaagacttctgcctctaatagggctgtgcgagagaggcagatgctctgccgccagctggcctctgc

SEQ ID NO: 693402 - DNA, 120 bp, Artificial Sequence
  ENSG00000188636_9 (sequence is synthesized)
gggcacggggccttgcccagtgcatccagcttccaacgggactagtccagcgccagccctgcctgcccgagcacggaatctttaagaatccgccagcacttggtagcgtctgcagccacc

SEQ ID NO: 693403 - DNA, 120 bp, Artificial Sequence
  ENSG00000188636_10 (sequence is synthesized)
caggtagcatacgctctttgctgtgtagaagaaatgcccatacgacagctttgcccctgtttgaagacctcccttcttgcctctccagacgtgttccccgaggagatcttccttccgtcc

SEQ ID NO: 693404 - DNA, 120 bp, Artificial Sequence
  ENSG00000188636_11 (sequence is synthesized)
ttcctggcgccctggttgcccaccttgccgtgcttcctcttacgtgctagctttgtacctatcgctcactgcatgctcgcctccctcttgctggcatcccggcctgtttcaatgactacc

SEQ ID NO: 693405 - DNA, 120 bp, Artificial Sequence
  ENSG00000188636_12 (sequence is synthesized)
gctctgctacttaggcacagggactccgccgcacgctgacggaccacgagggctgaccccttccagcctgacttggttcatggaggctcctactctgccctctccaagctcccctggcgg

SEQ ID NO: 693406 - DNA, 120 bp, Artificial Sequence
  ENSG00000188636_13 (sequence is synthesized)
ctccccacctggttgcccagttcctattgatgagctctggacagaaagatgcccgtttggccaggctggtggcttgatgggtgtacctggagagggggtctggcttcctgcccaagatgc

SEQ ID NO: 693407 - DNA, 120 bp, Artificial Sequence
  ENSG00000188636_14 (sequence is synthesized)
ctcccagccctgccagggcccggtgcagcgggcagggcctcatctgtgctgtagtggtcgagtggttgctgcaaggagcgtagttctgccatgtctgggggccaggttccactctgcaca

SEQ ID NO: 693408 - DNA, 120 bp, Artificial Sequence
  ENSG00000188636_15 (sequence is synthesized)
tgaatatgcagtctgggaggccccactgctctcactgggaaggaccaatgttgcacctctgttaatgcctgacttcagctgctggtgttctgatggagccagaggcttggggaatctgga

SEQ ID NO: 693409 - DNA, 120 bp, Artificial Sequence
  ENSG00000188636_16 (sequence is synthesized)
acttgcctgctaaataaggtcgtggtggactctcagccattgggcaggtctatcaggctgcaggttcctacacacccacgcctgagggtcatagcaggctaagggtggataccagcgact

SEQ ID NO: 693410 - DNA, 120 bp, Artificial Sequence
  ENSG00000188636_17 (sequence is synthesized)
ccctttgctgcccaggatctccatgggcagtgccacagcggctgatgctcagtcactcctgcttctaccccctgtcactgatggcgagccttgcccagcttgagacctgttcccatctct

SEQ ID NO: 693411 - DNA, 120 bp, Artificial Sequence
  ENSG00000188636_18 (sequence is synthesized)
attcaggtgccatgtggccttcactgcagccctgcagccacccacgcaccatctgtgggtctccaaaggcaccttgtagcatgtactccccgtgcctgggcaatcagatgggctgccttt

SEQ ID NO: 693412 - DNA, 120 bp, Artificial Sequence
  ENSG00000188636_19 (sequence is synthesized)
gtccaagggaaaacagactcccttcgggaaacatccttaagcacttaaggccggggggggtgtctgcctctggcaacccagccagggtcttggtggcatttgtaaaagcaaagagctgtg

SEQ ID NO: 693413 - DNA, 120 bp, Artificial Sequence
  ENSG00000188636_20 (sequence is synthesized)
gactgccgtggtcctagtgtggtgacaatgcagcactggcatgcatgtcctccttctgaaggacctcatccttcctcacagggggatgaccaagaaatcattttgtggctgagtttggcc

SEQ ID NO: 693414 - DNA, 120 bp, Artificial Sequence
  ENSG00000188636_21 (sequence is synthesized)
acgccctttggactgtgctgttccgccatatttcaatgccaaatgaaccacattgacatgacctggaccatagggcttcctatcctgggctcagctgcccctgtctgaagggtcttggct

SEQ ID NO: 693415 - DNA, 120 bp, Artificial Sequence
  ENSG00000188636_22 (sequence is synthesized)
tccgcacccacctaaagacatgtatatgtcttgggatcccagagattgggtccttgggcctggcttcttaagagttttgatgatgctgggaaaagtgactgcgattctgaagaaccgctg

SEQ ID NO: 693416 - DNA, 120 bp, Artificial Sequence
  ENSG00000188636_23 (sequence is synthesized)
ccttgcaaggtcaaggacattcagtggttgctggggtccgcagactactgccacccactcaccatcaactctgttagcccaattgccctgctgaacaactgcctgaatacaggctttagg

SEQ ID NO: 693417 - DNA, 120 bp, Artificial Sequence
  ENSG00000188636_24 (sequence is synthesized)
ttcccctggactccagccaaggctgttcaggtgggaccatggtgctctttaagcgtgatcggagggaagacacacagcagggccaccattccatgaatgggaggtgtacagatcactttc

SEQ ID NO: 693418 - DNA, 120 bp, Artificial Sequence
  ENSG00000188636_25 (sequence is synthesized)
tctttgtgctcagttctgttctgtctccagcagctatattggtaagactagtacctgccagggagaggtgcccccaagtgaaggggtacagtggcacctgggaaaaggcacctggaaggt

SEQ ID NO: 693419 - DNA, 120 bp, Artificial Sequence
  ENSG00000188636_26 (sequence is synthesized)
ttccatgtggcccagcccagcatggaagcagggtgggaactctgctgtgtcgccagcgctcactctactcgagtggctttttgaaagccctaccatgtctgtgtcaggcctgtgctgctt

SEQ ID NO: 693420 - DNA, 120 bp, Artificial Sequence
  ENSG00000188636_27 (sequence is synthesized)
cacatcctacagctgcctaggaaaggccggccacgctccctgtccacacactccctgtccacacactccctgtccacacactccctgtccacaactgcagccgggccctctgcctatggg

SEQ ID NO: 693421 - DNA, 120 bp, Artificial Sequence
  ENSG00000188636_28 (sequence is synthesized)
cacccaatccaagcagctgctccacctttgtttggcatggtgatttgtgttttttctcttggtgcttatgtgtgtgggcttgggacgagtgctggtatgcacttaggaccttcttgatag

SEQ ID NO: 693422 - DNA, 120 bp, Artificial Sequence
  ENSG00000188636_29 (sequence is synthesized)
ctccctgcactttggaacacggagcagatgagagagggtcggggcttgccctccaccttggacttggaagaagcccacattggagaggtgaggaccccatggtggctctagtggaagata

SEQ ID NO: 693423 - DNA, 120 bp, Artificial Sequence
  ENSG00000188636_30 (sequence is synthesized)
cgttagtctccagctaaggaggatgaggcgcagccccagagggagacctcagtgataggggatcaggctaagaaagtgggggaagggagatgctttgtacatattttggggttataattt

SEQ ID NO: 693424 - DNA, 120 bp, Artificial Sequence
  ENSG00000188636_31 (sequence is synthesized)
ctctaaattttaggagaacgggtattgattgataaaagggacaggcagtagtgttcaacagtgcatgtgaaggaaagttctgttttccatggttttgacattctttggactgtattgtga

SEQ ID NO: 693425 - DNA, 120 bp, Artificial Sequence
  ENSG00000188636_32 (sequence is synthesized)
ctgctgtctggtccacatggtacccctttggtaagtaggcttcagtgcataccagggtatcactggagatgggagttagtgaaggggtgactccctggcctagtatagtgtgaccctggg

SEQ ID NO: 693426 - DNA, 120 bp, Artificial Sequence
  ENSG00000188636_33 (sequence is synthesized)
actaacttaatgtcctaaagcattttggtgacttctagggaatagcaaagacctatttcattgtccccaggtaagtatgtgatgagcaatgaggaggagtggaaaacaaaacccagaaag

SEQ ID NO: 693427 - DNA, 120 bp, Artificial Sequence
  ENSG00000188636_34 (sequence is synthesized)
tgcggcaggaccagcctgacgcacacgctcctgttgtcatggcagacagccgccttgggtgggcaccaccctggcagttccagcctgtaggggagtgaagggacatggctgagctgggca

SEQ ID NO: 693428 - DNA, 120 bp, Artificial Sequence
  ENSG00000188636_35 (sequence is synthesized)
tgtgctgaggttgacttagggaacaagccctgggattggacaaaagggcccatgctgcagccactgactgggggcagagctctgggtggaagagggaagagatcctaatggaggcgcctc

SEQ ID NO: 693429 - DNA, 120 bp, Artificial Sequence
  ENSG00000188636_36 (sequence is synthesized)
catctgcaaccacagttgtaaggctcatggcacctctgcttggaaagcactggtttagggacttagagaggtaggcacaaggtgggtctcctgggtaagggaagcaagagcagactgttg

SEQ ID NO: 693430 - DNA, 120 bp, Artificial Sequence
  ENSG00000188636_37 (sequence is synthesized)
ggccaacaggagaagctccccagagtaggggagaaggttggggtgtagggccttccacgtggaacagacagcccctgtgtctctgtctcttggggacctgagtttgggtggggtggcagt

SEQ ID NO: 693431 - DNA, 120 bp, Artificial Sequence
  ENSG00000188636_38 (sequence is synthesized)
tggcacagcgcagatgcggtagagatgggaggaaacccagctcctcacttccgtgtgcctcatgcctttgcatacacaagcaccaaacctactaggtcttctcattacccatgtaaacca

SEQ ID NO: 693432 - DNA, 120 bp, Artificial Sequence
  ENSG00000188636_39 (sequence is synthesized)
catgttagataaatttttgcaagtagaggaaagaaggaaataaaacatcacattttggtgtctctcaggctttcccccccaactatggtttctttgctttttgttttaacatagttttgt

SEQ ID NO: 693433 - DNA, 120 bp, Artificial Sequence
  ENSG00000188636_40 (sequence is synthesized)
tgctgtcttctgtaatgatacagttttgtgcagctgttttcacttagcatatcgtgggcatctccccttatgattactaaatattttattttggagtggctgtgtactctcccattgact

SEQ ID NO: 693434 - DNA, 120 bp, Artificial Sequence
  ENSG00000188636_41 (sequence is synthesized)
agatggaccattgtgccagttgccaatcactaatgctgttactaacttttcagttataaattgatgaatatctttgtgcacaggctgtttcccaatgtcaagttattagggtagactcca

SEQ ID NO: 693435 - DNA, 120 bp, Artificial Sequence
  ENSG00000188636_42 (sequence is synthesized)
ggaggtgggattcttcaactaaagaatatgaaaacctttgaggcttttactacatattgacaaaatggtttccggaaatatttgtatccccttacactgccaccagcaaggataaacatg

SEQ ID NO: 693436 - DNA, 120 bp, Artificial Sequence
  ENSG00000188636_43 (sequence is synthesized)
tccatcttgcccgtattgggaattatcatctggctaaatatttgctaatttgataatgaaaaaatagcatcgtgtttcagttggcatttcactgacttctagcacggttgaacatctttc

SEQ ID NO: 693437 - DNA, 120 bp, Artificial Sequence
  ENSG00000188636_44 (sequence is synthesized)
atgtggagcgattgtatttcctcctttgtggattgtcagtgtcctttgctctatcttctggggtcagataaatttgtatgagctcggtatatattaaagatattaacctggtgtgtgtca

SEQ ID NO: 693438 - DNA, 120 bp, Artificial Sequence
  ENSG00000188641_0 (sequence is synthesized)
tttcgactcgcgctccggctgctgtcacttggctctctggctggagcttgaggacgcaaggagggtttgtcactggcagactcgagactgtaggcactgccatggcccctgtgctcagta

SEQ ID NO: 693439 - DNA, 120 bp, Artificial Sequence
  ENSG00000188641_1 (sequence is synthesized)
aggactcggcggacatcgagagtatcctggctttaaatcctcgaacacaaactcatgcaactctgtgttccacttcggccaagaaattagacaagaaacattggaaaagaaatcctgata

SEQ ID NO: 693440 - DNA, 120 bp, Artificial Sequence
  ENSG00000188641_2 (sequence is synthesized)
agaactgctttaattgtgagaagctggagaataattttgatgacatcaagcacacgactcttggtgagcgaggagctctccgagaagcaatgagatgcctgaaatgtgcagatgccccgt

SEQ ID NO: 693441 - DNA, 120 bp, Artificial Sequence
  ENSG00000188641_3 (sequence is synthesized)
gtcagaagagctgtccaactaatcttgatattaaatcattcatcacaagtattgcaaacaagaactattatggagctgctaagatgatattttctgacaacccacttggtctgacttgtg

SEQ ID NO: 693442 - DNA, 120 bp, Artificial Sequence
  ENSG00000188641_4 (sequence is synthesized)
gaatggtatgtccaacctctgatctttgtgtaggtggatgcaatttatatgccactgaagagggacccattaatattggtggattgcagcaatttgctactgaggtattcaaagcaatga

SEQ ID NO: 693443 - DNA, 120 bp, Artificial Sequence
  ENSG00000188641_5 (sequence is synthesized)
gtatcccacagatcagaaatccttcgctgcctcccccagaaaaaatgtctgaagcctattctgcaaagattgctctttttggtgctgggcctgcaagtataagttgtgcttcctttttgg

SEQ ID NO: 693444 - DNA, 120 bp, Artificial Sequence
  ENSG00000188641_6 (sequence is synthesized)
ctcgattggggtactctgacatcactatatttgaaaaacaagaatatgttggtggtttaagtacttctgaaattcctcagttccggctgccgtatgatgtagtgaattttgagattgagc

SEQ ID NO: 693445 - DNA, 120 bp, Artificial Sequence
  ENSG00000188641_7 (sequence is synthesized)
taatgaaggaccttggtgtaaagataatttgcggtaaaagcctttcagtgaatgaaatgactcttagcactttgaaagaaaaaggctacaaagctgctttcattggaataggtttgccag

SEQ ID NO: 693446 - DNA, 120 bp, Artificial Sequence
  ENSG00000188641_8 (sequence is synthesized)
aacccaataaagatgccatcttccaaggcctgacgcaggaccaggggttttatacatccaaagactttttgccacttgtagccaaaggcagtaaagcaggaatgtgcgcctgtcactctc

SEQ ID NO: 693447 - DNA, 120 bp, Artificial Sequence
  ENSG00000188641_9 (sequence is synthesized)
cattgccatcgatacggggagtcgtgattgtacttggagctggagacactgcctttgactgtgcaacatctgctctacgttgtggagctcgccgtgtgttcatcgtcttcagaaaaggct

SEQ ID NO: 693448 - DNA, 120 bp, Artificial Sequence
  ENSG00000188641_10 (sequence is synthesized)
ttgttaatataagagctgtccctgaggagatggaacttgctaaggaagaaaagtgtgaatttctgccattcctgtccccacggaaggttatagtaaaaggtgggagaattgttgctatgc

SEQ ID NO: 693449 - DNA, 120 bp, Artificial Sequence
  ENSG00000188641_11 (sequence is synthesized)
agtttgttcggacagagcaagatgaaactggaaaatggaatgaagatgaagatcagatggtccatctgaaagccgatgtggtcatcagtgcctttggttcagttctgagtgatcctaaag

SEQ ID NO: 693450 - DNA, 120 bp, Artificial Sequence
  ENSG00000188641_12 (sequence is synthesized)
taaaagaagccttgagccctataaaatttaacagatggggtctcccagaagtagatccagaaactatgcaaactagtgaagcatgggtatttgcaggtggtgatgtcgttggtttggcta

SEQ ID NO: 693451 - DNA, 120 bp, Artificial Sequence
  ENSG00000188641_13 (sequence is synthesized)
acactacagtggaatcggtgaatgatggaaagcaagcttcttggtacattcacaaatacgtacagtcacaatatggagcttccgtttctgccaagcctgaactacccctcttttacactc

SEQ ID NO: 693452 - DNA, 120 bp, Artificial Sequence
  ENSG00000188641_14 (sequence is synthesized)
ctattgatctggtggacattagtgtagaaatggccggattgaagtttataaatccttttggtcttgctagcgcaactccagccaccagcacatcaatgattcgaagagcttttgaagctg

SEQ ID NO: 693453 - DNA, 120 bp, Artificial Sequence
  ENSG00000188641_15 (sequence is synthesized)
gatggggttttgccctcaccaaaactttctctcttgataaggacattgtgacaaatgtttcccccagaatcatccggggaaccacctctggccccatgtatggccctggacaaagctcct

SEQ ID NO: 693454 - DNA, 120 bp, Artificial Sequence
  ENSG00000188641_16 (sequence is synthesized)
ttctgaatattgagctcatcagtgagaaaacggctgcatattggtgtcaaagtgtcactgaactaaaggctgactttccagacaacattgtgattgctagcattatgtgcagttacaata

SEQ ID NO: 693455 - DNA, 120 bp, Artificial Sequence
  ENSG00000188641_17 (sequence is synthesized)
aaaatgactggacggaacttgccaagaagtctgaggattctggagcagatgccctggagttaaatttatcatgtccacatggcatgggagaaagaggaatgggcctggcctgtgggcagg

SEQ ID NO: 693456 - DNA, 120 bp, Artificial Sequence
  ENSG00000188641_18 (sequence is synthesized)
gtgagcatcgcaagagctgcaaaggaaggtggtgccaatggcgttacagccaccaacactgtctcaggtctgatgggattaaaatctgatggcacaccttggccagcagtggggattgca

SEQ ID NO: 693457 - DNA, 120 bp, Artificial Sequence
  ENSG00000188641_19 (sequence is synthesized)
aagcgaactacatatggaggagtgtctgggacagcaatcagacctattgctttgagagctgtgacctccattgctcgtgctctgcctggatttcccattttggctactggtggaattgac

SEQ ID NO: 693458 - DNA, 120 bp, Artificial Sequence
  ENSG00000188641_20 (sequence is synthesized)
tctgctgaaagtggtcttcagtttctccatagtggtgcttccgtcctccaggtatgcagtgccattcagaatcaggatttcactgtgatcgaagactactgcactggcctcaaagccctg

SEQ ID NO: 693459 - DNA, 120 bp, Artificial Sequence
  ENSG00000188641_21 (sequence is synthesized)
ctttatctgaaaagcattgaagaactacaagactgggatggacagagtccagctactgtgagtcaccagaaagggaaaccagttccacgtatagctgaactcatggacaagaaactgcca

SEQ ID NO: 693460 - DNA, 120 bp, Artificial Sequence
  ENSG00000188641_22 (sequence is synthesized)
agttttggaccttatctggaacagcgcaagaaaatcatagcagaaaacaagattagactgaaagaacaaaatgtagctttttcaccacttaagagaaactgttttatccccaaaaggcct

SEQ ID NO: 693461 - DNA, 120 bp, Artificial Sequence
  ENSG00000188641_23 (sequence is synthesized)
attcctaccatcaaggatgtaataggaaaagcactgcagtaccttggaacatttggtgaattgagcaacgtagagcaagttgtggctatgattgatgaagaaatgtgtatcaactgtggt

SEQ ID NO: 693462 - DNA, 120 bp, Artificial Sequence
  ENSG00000188641_24 (sequence is synthesized)
aaatgctacatgacctgtaatgattctggctaccaggctatacagtttgatccagaaacccacctgcccaccataaccgacacttgtacaggctgtactctgtgtctcagtgtttgccct

SEQ ID NO: 693463 - DNA, 120 bp, Artificial Sequence
  ENSG00000188641_25 (sequence is synthesized)
attgtcgactgcatcaaaatggtttccaggacaacaccttatgaaccaaagagaggcgtacccttatctgtgaatccggtgtgttaaggtgatttgtgaaacagttgctgtgaactttca

SEQ ID NO: 693464 - DNA, 120 bp, Artificial Sequence
  ENSG00000188641_26 (sequence is synthesized)
tgtcacctacatatgctgatcttttaaaatcatgatccttgtgttcagctctttccaaattaaaacaaatatacattttctaaataaaaatatgtaatttcaaaatacatttgtaagtgt

SEQ ID NO: 693465 - DNA, 120 bp, Artificial Sequence
  ENSG00000188641_27 (sequence is synthesized)
aaaaaatgtctcatgtcaatgaccattcaattagtggtcataaaatagaataattcttttctgaggatagtagttaaataactgtgtggcagttaattggatgttcactgccagttgtct

SEQ ID NO: 693466 - DNA, 120 bp, Artificial Sequence
  ENSG00000188641_28 (sequence is synthesized)
tatgtgaaaaattaacttttttgtggcaattagtgtgacagtttccaaattgccctatgctgtgctccatatttgatttctaattgtaagtgaaattaagcattttgaaacaaagtactc

SEQ ID NO: 693467 - DNA, 120 bp, Artificial Sequence
  ENSG00000188641_29 (sequence is synthesized)
tttaacatacaagaaaatgtatccaaggaaacattttatcattaaaaattacctttaattttaatgctgtttctaagaaaatgtagttagctccataaagtacaaatgaagaaagtcaaa

SEQ ID NO: 693468 - DNA, 120 bp, Artificial Sequence
  ENSG00000188641_30 (sequence is synthesized)
aaattatttgctatggcaggataagaaagcctaaaattgagtttgtagaactttattaagtaaaatccccttcgctgaaattgcttatttttggtgttggatagaggatagggagaatat

SEQ ID NO: 693469 - DNA, 120 bp, Artificial Sequence
  ENSG00000188641_31 (sequence is synthesized)
ttactaactaaataccattcactactcatgcgtgagatgggtgtacaaactcatcctcttttaatggcatttctctttaaactatgttcctaacaaaatgagatgataggatagatcctg

SEQ ID NO: 693470 - DNA, 120 bp, Artificial Sequence
  ENSG00000188641_32 (sequence is synthesized)
gttaccactcttttgctgtgcacatacgggctctgactggttttaatagtcaccttcatgattatagcaactaatgtttgaacaaagctcaaagtatgcaatgcttcattattcaagaat

SEQ ID NO: 693471 - DNA, 120 bp, Artificial Sequence
  ENSG00000188641_33 (sequence is synthesized)
atgcttcattattcaagaatgaaaaatataatgttgataatatatattaagtgtgccaaatcagtttgactactctctgttttagtgtttatgtttaaaagaaatatattttttgttatt

SEQ ID NO: 693472 - DNA, 120 bp, Artificial Sequence
  ENSG00000188641_34 (sequence is synthesized)
ttctctattttcataatcagtaaatagtgtcatataaactcatttatctcctcttcatggcatcttcaatatgaatctataagtagtaaatcagaaagtaacaatctatggcttatttct

SEQ ID NO: 693473 - DNA, 120 bp, Artificial Sequence
  ENSG00000188641_35 (sequence is synthesized)
atgacaaattcaagagctagaaaaataaaatgtttcattatgcacttttagaaatgcatatttgccacaaaacctgtattactgaataatatcaaataaaatatcataaagcattttaaa

SEQ ID NO: 693474 - DNA, 120 bp, Artificial Sequence
  ENSG00000188641_36 (sequence is synthesized)
tgctactgagactttgatcctggctttctctttaatgaatcatttgtaaagactttgattcttcagacactcttgggctctctgacgtctcctatttggagtcaacaagcaggttaattc

SEQ ID NO: 693475 - DNA, 120 bp, Artificial Sequence
  ENSG00000188641_37 (sequence is synthesized)
ccatgtatcatttaaatgatcagcttatatgaagggtatagtaagattttataatctttggagactagttggctagaaggtcaaattaagtgcccgtcaacctagatttttagttaatga

SEQ ID NO: 693476 - DNA, 120 bp, Artificial Sequence
  ENSG00000188641_38 (sequence is synthesized)
taataaatcagggttattcccttcctgctttctgacaggttaattctaaagaagagctcctgggaataagaaaataaaaacaattcgaggttgtggattgttgcaataaattctgggatt

SEQ ID NO: 693477 - DNA, 120 bp, Artificial Sequence
  ENSG00000188641_39 (sequence is synthesized)
taatttcttttcttaccaaattcaaaattgcattaggcttacctgaccactacgaagtatgatctttactacctgtgaaaatccttagttgatggagaagattcacttgaattcctcctc

SEQ ID NO: 693478 - DNA, 120 bp, Artificial Sequence
  ENSG00000188641_40 (sequence is synthesized)
acttttctttggggacccattgcctcttcattaaaccagggcaagctttcacagatgcagtaagtgaaaggtcacatagtatgtatatcaactaacacagcattttaaaacaaaatgaat

SEQ ID NO: 693479 - DNA, 120 bp, Artificial Sequence
  ENSG00000188641_41 (sequence is synthesized)
ctctggaaactctcacatggttttaattcttttctctgggaacactgtccctctgggaactcttacttggttctaccactcattcccagagcagagtctatttaagacagagacatgtgc

SEQ ID NO: 693480 - DNA, 120 bp, Artificial Sequence
  ENSG00000188641_42 (sequence is synthesized)
cttcagaacagaatttattagaaacttactaaaatttgagagtggtcacacttaggtcttgccataagtatcacctaatgaagagttatgcatagattaggactgcagtagatgcatttt

SEQ ID NO: 693481 - DNA, 120 bp, Artificial Sequence
  ENSG00000188641_43 (sequence is synthesized)
aagtgaatcaaggaatttagaataggaatgtatctgcttatttcattccaattatagtttgtataattgtaatttcaatatcaaattataaattaaaaatgtcctcgtgggaactactga

SEQ ID NO: 693482 - DNA, 120 bp, Artificial Sequence
  ENSG00000188641_44 (sequence is synthesized)
gcatccaaagcctctgggatgtgttctgactgtaaaaactctgatgttgtgaaaaaagcttacgctttgcctccactcaaaccagattgatgggtttttccctgaaaacaaaataaaaca

SEQ ID NO: 693483 - DNA, 120 bp, Artificial Sequence
  ENSG00000188641_45 (sequence is synthesized)
aaaagaaaaacaacttttgaataacatggcatctggtaaagtcaaggaagtaaatttgcttttttcttccacttcgagagagttggcatagtttgaaagaatattttcaagaaacaagga

SEQ ID NO: 693484 - DNA, 120 bp, Artificial Sequence
  ENSG00000188641_46 (sequence is synthesized)
aataagtatgaactttcatatttaatgagaaattgaaaggatatgctacataatgtacataataaaagtagtaatttcaacagaaaatcaagatgccactcgattttgccatggatttat

SEQ ID NO: 693485 - DNA, 120 bp, Artificial Sequence
  ENSG00000188641_47 (sequence is synthesized)
aaattatgaaaattccgatgagtttttaaagtttgtgcttgctctggtgtagtgtagccatgcattgatctgtcatcacagccaaaagtggaaacaattcaaatgtccaacaactgacga

SEQ ID NO: 693486 - DNA, 120 bp, Artificial Sequence
  ENSG00000188641_48 (sequence is synthesized)
aaagatgaagtgtggtatatccatataatggaataatatgcagacataaagtggaatgattgacacatgtttacaacatggatgaaccttgacaacgctgtgttaagttaaagaagccag

SEQ ID NO: 693487 - DNA, 120 bp, Artificial Sequence
  ENSG00000188641_49 (sequence is synthesized)
acacaaaagagtatcctggctttaaatcctcgaacacaaactcatgcaactctgtgttccacttcggccaagaaattagacaagaaacattggaaaagaaatcctgataagaactgcttt

SEQ ID NO: 693488 - DNA, 120 bp, Artificial Sequence
  ENSG00000188641_50 (sequence is synthesized)
gctcaaaaagaaaggagtaagctctacactaaagattaacagcaaatgtcatgcattttaggaaagaacaattaaaagctacatcaggcagaagcagaaagatgcttccccttgcttagg

SEQ ID NO: 693489 - DNA, 120 bp, Artificial Sequence
  ENSG00000188641_51 (sequence is synthesized)
gcatttgtctgtctactgtctgaatgccactagcctggaaaagggcaatcaatagttctcatctggcatgcctgcatgtgattaattgtctgtaagaaacaaattcctaaattgctttag

SEQ ID NO: 693490 - DNA, 120 bp, Artificial Sequence
  ENSG00000188641_52 (sequence is synthesized)
gggttcagtgcagctaatagaaggatttggtttctttaatcatgttttttcatgcaagttgtgtgcactctgaaacattagtatttcacaatttggaacataatttcttatggagattta

SEQ ID NO: 693491 - DNA, 120 bp, Artificial Sequence
  ENSG00000188641_53 (sequence is synthesized)
ttttatttgttatattcatcatgtcagtagtgtgaatgtgataatcctttctcaacacaagcagtaaatcagtgggatagaaagcaacagcttcgtattttttattattttgttaaataa

SEQ ID NO: 693492 - DNA, 120 bp, Artificial Sequence
  ENSG00000188641_54 (sequence is synthesized)
agagcaccatggccaacaacacgttctctgtgactcccgaggccactgctgagctatctcaggtcgccagaagcctgcctaccactatgaactttcgagaacacacgtatacaattcttc

SEQ ID NO: 693493 - DNA, 120 bp, Artificial Sequence
  ENSG00000188641_55 (sequence is synthesized)
tctgaaccgaacaagtgcctggcaatgaggacagacctcagtggaggttgggaaggggaagcaaacagtagaacacagctttcccacctccttcacatcctgacactcagagactataat

SEQ ID NO: 693494 - DNA, 120 bp, Artificial Sequence
  ENSG00000188643_0 (sequence is synthesized)
ctctgttccccttttcctgccaccttcttctccagggaccagaaacaaggccccgccagcaggcgaagcagggagatgtcagactgctacacggagctggagaaggcagtcattgtcctg

SEQ ID NO: 693495 - DNA, 120 bp, Artificial Sequence
  ENSG00000188643_1 (sequence is synthesized)
gtggaaaacttctacaaatatgtgtctaagtacagcctggtcaagaacaagatcagcaagagcagcttccgcgagatgctccagaaagagctgaaccacatgctgtcggacacagggaac

SEQ ID NO: 693496 - DNA, 120 bp, Artificial Sequence
  ENSG00000188643_2 (sequence is synthesized)
cggaaggctgcggataagctcatccagaacctggatgccaatcatgatgggcgcatcagcttcgatgagtactggaccttgataggcggcatcaccggccccatcgccaaactcatccat

SEQ ID NO: 693497 - DNA, 120 bp, Artificial Sequence
  ENSG00000188643_3 (sequence is synthesized)
ctgcccacccagggccctttactctcttctccctccagaccttcctctgacccttgctgaactggggtccctttgtgagtgtctcagtctagaggtacctccctccctggggggtctcag

SEQ ID NO: 693498 - DNA, 120 bp, Artificial Sequence
  ENSG00000188643_4 (sequence is synthesized)
ctcctggagtcgcaggcccttggggcccctctgtgagatctcaatgctgtctggggaccctaagagttttctcacctgttcagtctcatctaaccttccaatgtctgatgttcctgccaa

SEQ ID NO: 693499 - DNA, 120 bp, Artificial Sequence
  ENSG00000188643_5 (sequence is synthesized)
cctgccaaattcctgcctgattctgggtccgtcctgacctccaaaggtcagcttggtgcttgaggtctccctgctcttggtggcagtggtagcagcaacagcagcagcagcagcagcagc

SEQ ID NO: 693500 - DNA, 120 bp, Artificial Sequence
  ENSG00000188643_6 (sequence is synthesized)
agacctctccactttcccttagcccctctgctgggtagagaggcactttcagggacttccctccagctgcctcttcatctgggaatgagctaagcaaggctgagcctcctcctgttgctt

SEQ ID NO: 693501 - DNA, 120 bp, Artificial Sequence
  ENSG00000188643_7 (sequence is synthesized)
aatggccacaagtggccaacggaaagcaggtggcaggacaggaggctgtggtggggcctgaccgagcagcctttccttccaaatctgactgtggcttgctcaggcccctatggtggctgt

SEQ ID NO: 693502 - DNA, 120 bp, Artificial Sequence
  ENSG00000188643_8 (sequence is synthesized)
ggggttttgggcatgggccgtgactcacagagtagatccagatccgcctgctcccctcatatcctgttattcagaaggctgtatccgcttagaaagtgtcttttgtcctggggtgagagg

SEQ ID NO: 693503 - DNA, 120 bp, Artificial Sequence
  ENSG00000188643_9 (sequence is synthesized)
aagaaggagctcagccactatctccccaccgagccagctcagcgggcagggctgggagggagtgggacagattctgggagtgcagcggggaggagtcccggctgggctgagcgcagggag

SEQ ID NO: 693504 - DNA, 120 bp, Artificial Sequence
  ENSG00000188647_0 (sequence is synthesized)
gttctccgcggaactcccgccggcggcccggctcacgcggaggcgcgcccgaactgtcgcggccgccgccaacatggccgagaccagcgaggaggtggcggtgctggtgcagcgggttgt

SEQ ID NO: 693505 - DNA, 120 bp, Artificial Sequence
  ENSG00000188647_1 (sequence is synthesized)
gaaggacatcactaacgccttcaggaggaacccacacatagatgaaattggcctgatcccatgtcctgaagctaggtataaccggagtcccatagtcctggttgaaaacaaactgggtgt

SEQ ID NO: 693506 - DNA, 120 bp, Artificial Sequence
  ENSG00000188647_2 (sequence is synthesized)
ggagagctggtgtgtcaagttccttttaccatatgtccacaacaagctccttttgtacagaacaagaaagcaatggctgaacagagatgaattgatagatgtcacatgtaccctgctgct

SEQ ID NO: 693507 - DNA, 120 bp, Artificial Sequence
  ENSG00000188647_3 (sequence is synthesized)
tctaaacccagactttaccactgcatggaacgtgaggaaagagctgatcctctctggcactttaaatccaattaaggatttacatctgggaaaactcgccttaaccaagtttccaaagag

SEQ ID NO: 693508 - DNA, 120 bp, Artificial Sequence
  ENSG00000188647_4 (sequence is synthesized)
tccagaaacatggattcacaggcgatgggtgctacaacagctaattcaggaaacctccttgccttcctttgtgaccaaaggaaacttgggaacaattcccacagaaagggcacagcgact

SEQ ID NO: 693509 - DNA, 120 bp, Artificial Sequence
  ENSG00000188647_5 (sequence is synthesized)
catacaagaagagatggaggtctgtggtgaagcagcagggagatacccaagcaactataatgcttggtcccatcgcatctgggttttacagcacttggccaagctagatgtcaagattct

SEQ ID NO: 693510 - DNA, 120 bp, Artificial Sequence
  ENSG00000188647_6 (sequence is synthesized)
tcttgatgaactatcttctactaaacattgggcatctatgcacgtttcagaccacagtggatttcactaccgccagtttttgcttaagtctttgattagccaaactgtgatagacagttc

SEQ ID NO: 693511 - DNA, 120 bp, Artificial Sequence
  ENSG00000188647_7 (sequence is synthesized)
tgtgatggagcaaaatcctttgagaagtgagccagccctagttcctccaaaagatgaagaagcagcagtttcaacagaagaaccaaggattaatcttccccatcttctagaagaagaagt

SEQ ID NO: 693512 - DNA, 120 bp, Artificial Sequence
  ENSG00000188647_8 (sequence is synthesized)
tgaattcagcactgatcttattgattcctacccaggacatgaaaccctttggtgtcataggcggcatattttctaccttcagcatcacttaaatgcaggctcccagctgtctcaagcaat

SEQ ID NO: 693513 - DNA, 120 bp, Artificial Sequence
  ENSG00000188647_9 (sequence is synthesized)
ggaagtagatggactgaatgactctagcaagcaaggctattcccaggaaaccaaacgcctgaagcggacgccagttccagactccctaggcctagaaatggagcacaggttcattgatca

SEQ ID NO: 693514 - DNA, 120 bp, Artificial Sequence
  ENSG00000188647_10 (sequence is synthesized)
agtattgtccacctgtcggaacgtggagcaagccaggtttgccagtgcatacaggaaatggctggttactttgagtcaatgaaagaggtgaattagtcctacaaggttccccttttagtg

SEQ ID NO: 693515 - DNA, 120 bp, Artificial Sequence
  ENSG00000188647_11 (sequence is synthesized)
caatattgctttcttttattatttacatagttgcatgaactgtttactattattggctaaccatatgttcttcgtctttaggttgaaagtccatagtaaatctttcattttatttatttt

SEQ ID NO: 693516 - DNA, 120 bp, Artificial Sequence
  ENSG00000188647_12 (sequence is synthesized)
gttaataactggcattcctgtggggataaaataatcgtatagttccttcctgctgaacagcgagtcttaaattttctgtttaacttctcaccctttgtatttctatatgtggggcttctc

SEQ ID NO: 693517 - DNA, 120 bp, Artificial Sequence
  ENSG00000188647_13 (sequence is synthesized)
atttggttttcctgattggttcacacacacacacctctacccccctcagtccaattgctgcataggcaaattcttttaaaaattaaaaatttaaggcctaggcaggaggattgcctgagc

SEQ ID NO: 693518 - DNA, 120 bp, Artificial Sequence
  ENSG00000188647_14 (sequence is synthesized)
ccaggactttgagaccaacctgggccacatagcaagacccgatttctacaaaaagtaaaacaaaatagctaggcatggtgctatgcaactgtgttcctagctatgcaggaagctgaggca

SEQ ID NO: 693519 - DNA, 120 bp, Artificial Sequence
  ENSG00000188647_15 (sequence is synthesized)
gaaggattgcttgagccccaggtgtttgtggctgtagtgagccatgattgcaccactgtactcagcctgggcaatagagttgagaccctgtctctaaaacaaattgaaaataaacattta

SEQ ID NO: 693520 - DNA, 120 bp, Artificial Sequence
  ENSG00000188647_16 (sequence is synthesized)
tgttgcagttcaactgaagaatgttggtatgaatgccgaataacttgatgtaattgttttgagaatcaaatggctagatgggcgaatgtttaaaaatgtaaactagttctctttctctag

SEQ ID NO: 693521 - DNA, 120 bp, Artificial Sequence
  ENSG00000188647_17 (sequence is synthesized)
catgttctacccaattaccaaagtcagaagtattggaatttatatgaaaaaaatgcttccaatgtaatccattttttaaatggttatttaagaaaaaactaacttaagagtttatgtaat

SEQ ID NO: 693522 - DNA, 120 bp, Artificial Sequence
  ENSG00000188647_18 (sequence is synthesized)
tgcagtaaaggaaaattatttttattgctagttttgatagattatttttacctcaaatttggtatatgccaaaacacatcagtccttataaaattgatttttttttcctgaaaacctgga

SEQ ID NO: 693523 - DNA, 120 bp, Artificial Sequence
  ENSG00000188647_19 (sequence is synthesized)
atgccatttttagctattactactttttaatttcaaattcacttatgacaaatgggagaaatatataaagaaatagatccataaaaatattcctttttaaaaatctaaattattgaggat

SEQ ID NO: 693524 - DNA, 120 bp, Artificial Sequence
  ENSG00000188647_20 (sequence is synthesized)
acactatggaaactataaaattatcatgaagtgactgttaaagtttactggcaaatgccaagggaaggaatagtatgtgcaaaacaaaacactttgatactgaacttaatcagggatgag

SEQ ID NO: 693525 - DNA, 120 bp, Artificial Sequence
  ENSG00000188647_21 (sequence is synthesized)
gtaccaaagtatccacattatagccgtatcttatgtttccaataacaagggctgagtttttcaggtaggtgggatgagggtggggaatgggccatgtaatgtctgctttcttatatttgc

SEQ ID NO: 693526 - DNA, 120 bp, Artificial Sequence
  ENSG00000188647_22 (sequence is synthesized)
ccttttgtaagtggtctgtttcttcttttcatatactttgttttgccaatccattacgtattttttgtcacttttgtgtgtcatttttgtatacctttcctttcttacttcaggggtgtg

SEQ ID NO: 693527 - DNA, 120 bp, Artificial Sequence
  ENSG00000188647_23 (sequence is synthesized)
tcttcaagatttctaccccctatttgcaatgaatttcatacctcatctaaaatacattcatataccagaaatatgaagagtggcccttctaaaagtttccctaatgatggaagctgtcag

SEQ ID NO: 693528 - DNA, 120 bp, Artificial Sequence
  ENSG00000188647_24 (sequence is synthesized)
ttgtcctatctgtgcagaatgtgagtaatagtggcagaaataagtgtgacaacaatgctttgcctgttgttctttttacttgctaggtaatttgtaaagtggggataaagatgtagggaa

SEQ ID NO: 693529 - DNA, 120 bp, Artificial Sequence
  ENSG00000188647_25 (sequence is synthesized)
agtaaacctctctctcactgttacggaaagcctggacttgagttaggtagactgccttaaagaagaagaaatatgtccttttctttggcatcatggttttgttgagtggcagactgttga

SEQ ID NO: 693530 - DNA, 120 bp, Artificial Sequence
  ENSG00000188647_26 (sequence is synthesized)
agtgagttgagacttaagaacgccagaaaagttgtctagcctggccccagtagacagaatttgttcttctctcaagtaaaaaattacctttttatagcttttatattatttagatgaaaa

SEQ ID NO: 693531 - DNA, 120 bp, Artificial Sequence
  ENSG00000188647_27 (sequence is synthesized)
aataccattatgaacataattccatggccctttgtgtacaaagcatattttgaattaaatacctcaaggtccacctagacctctatggataaaatcataagtttatgatttttagctcct

SEQ ID NO: 693532 - DNA, 120 bp, Artificial Sequence
  ENSG00000188647_28 (sequence is synthesized)
gtgagtgtttgggggcaaactacacagagaagacatgggtggttcagcccattccactaaaatatgttgccagattctggcctaactcagtattaccttttttcctaaaaatcatttttc

SEQ ID NO: 693533 - DNA, 120 bp, Artificial Sequence
  ENSG00000188647_29 (sequence is synthesized)
acattttgagtaatagggcttatgctttgatgtgaaaaaatgtcaggaaatgagtgtagacaataccctataaaacactagctaagttttatagtgctccatgcctttgtgtaccttcca

SEQ ID NO: 693534 - DNA, 120 bp, Artificial Sequence
  ENSG00000188647_30 (sequence is synthesized)
ctgattatcttgcctatctttggtgtgtaaactattttcatatcttctaaggctcttaacccactcttttctgaagccgcacagtcctttaatatgtcttgtttccttcctaaaagttta

SEQ ID NO: 693535 - DNA, 120 bp, Artificial Sequence
  ENSG00000188647_31 (sequence is synthesized)
aagtagagagcaaaaatgcaaatacccaaaggatactgttagtatgtaacttttgtgtgctgctttatttctagagtttgcattttttaattgttcattcacagaaaatcctaatattgc

SEQ ID NO: 693536 - DNA, 120 bp, Artificial Sequence
  ENSG00000188647_32 (sequence is synthesized)
cctatatggttggtttttttcctaagtggttaatatttaaacccgctagctgtagcatgataatgtctttgactgagcttatgtagtagaaaggatgtgtctgttttctgggacttttag

SEQ ID NO: 693537 - DNA, 120 bp, Artificial Sequence
  ENSG00000188647_33 (sequence is synthesized)
tcttcacttatttttctataacaatctaattgttaaaaggaaaagatggcttattgacacatatttcattaaactttcactggaagaacagtgggtcatcctactgtggattaagaatac

SEQ ID NO: 693538 - DNA, 120 bp, Artificial Sequence
  ENSG00000188647_34 (sequence is synthesized)
tactgacaagcaaaaagcattaagctctgtaactgtctccaacaccaccttcaccccgcctttagtgtaccttagtgtactttagtgtacctattttggcagtacggtgttttccagatt

SEQ ID NO: 693539 - DNA, 120 bp, Artificial Sequence
  ENSG00000188647_35 (sequence is synthesized)
ctacttgtgccctgcacattgtgaggactcattaaatatttattaaattaatgaatgactaacaggaagagaaagattgtttgtgagtgttaagaatgagtgatgattgagaaattgatg

SEQ ID NO: 693540 - DNA, 120 bp, Artificial Sequence
  ENSG00000188647_36 (sequence is synthesized)
gattagtgcaatggattgggaatgaatgatgctttctagtttcgtaatacttgggaagagctattgcatatagagtaagttgatttagactttttttttcttcatttcattaccttgttt

SEQ ID NO: 693541 - DNA, 120 bp, Artificial Sequence
  ENSG00000188647_37 (sequence is synthesized)
aaacttgttaaatcccagccaagaaatgcagctctgtaattgtcaattaactgtattataatatatattaaaaatttgtagagctaaagaacccacttgcattaagaacaccactttctg

SEQ ID NO: 693542 - DNA, 120 bp, Artificial Sequence
  ENSG00000188647_38 (sequence is synthesized)
ttcatttgtgatactagaggacagatcctgcatacagagccgaaactgcttttaatcatctgaagaaattctttgatttcagtgacttactgatctgtacctgtgcacatatcattttat

SEQ ID NO: 693543 - DNA, 120 bp, Artificial Sequence
  ENSG00000188647_39 (sequence is synthesized)
gcttctccttttttccccgcaacttgaactgtgactctttcagatatttcttaaatctgtatgagtcattttttaagcttagggatttgatatgtattaatgtcccctttgtcttctgta

SEQ ID NO: 693544 - DNA, 120 bp, Artificial Sequence
  ENSG00000188647_40 (sequence is synthesized)
gattttagcattttattacctcttaagaaactctgggcccagactttcagtcatatttcttattcctatggtacagttctcacttaaaggcttaattattagtagggttaaatatataca

SEQ ID NO: 693545 - DNA, 120 bp, Artificial Sequence
  ENSG00000188647_41 (sequence is synthesized)
ggttatctctaaaagtacttaaatttttaaataagggcttatgtgatacaagatacggaaacaaaagtttttggatttttatgcagtagtttgcaggaaagcaaatacatagtagatcgt

SEQ ID NO: 693546 - DNA, 120 bp, Artificial Sequence
  ENSG00000188647_42 (sequence is synthesized)
aggtcatgccagtttattcttgttgggccacacacacatgtatgtgtgtgtaaaaggaatttttagtattgaagcaaacaaattgtcagtttaataattttctcttacatagcacaagat

SEQ ID NO: 693547 - DNA, 120 bp, Artificial Sequence
  ENSG00000188647_43 (sequence is synthesized)
ggcagataccacctactgtacaacaatctaataatccctaccttagttcccctgagttatagaagatgctaaagatttagttgtaaagggaagtaacatgattttttttttctaaaaagc

SEQ ID NO: 693548 - DNA, 120 bp, Artificial Sequence
  ENSG00000188647_44 (sequence is synthesized)
tgttttaagctaactattattttgctactggaaaattatattttaaaacttacagatatttaaagtatgctagaaaatttgaacctgataacaactgaaccttttgtcttgaataaattt

SEQ ID NO: 693549 - DNA, 120 bp, Artificial Sequence
  ENSG00000188647_45 (sequence is synthesized)
ctcaaatagaactgtgcaaaccctagcactttatgtgttgctgcctccccatacctaggtatgctctgtaataagctcccatttaatggagagatgtgtggaggcactgagaagttaatg

SEQ ID NO: 693550 - DNA, 120 bp, Artificial Sequence
  ENSG00000188647_46 (sequence is synthesized)
aagaaaaatcaaccctaagaattccttattgtcacatagtgtcttttaaaaaataactgtagagactgtgttaattcgagtgcctttcttacttttttgggagcaagattatatttaatg

SEQ ID NO: 693551 - DNA, 120 bp, Artificial Sequence
  ENSG00000188647_47 (sequence is synthesized)
tttaagaaaacaggatggaagttttatcaaacagttgattgtggcccattgttttatttattcccatcgctaggcatggccccgtagggtattttatccttcagtgagagactgatataa

SEQ ID NO: 693552 - DNA, 120 bp, Artificial Sequence
  ENSG00000188647_48 (sequence is synthesized)
gcaggcaggatgctttgattattccattagttatcattttaagcaccctaccaagatttagttctttctttctggcaactaacgttttgggggttggaggcatcccatttagaggatggt

SEQ ID NO: 693553 - DNA, 120 bp, Artificial Sequence
  ENSG00000188647_49 (sequence is synthesized)
gtgtgcacaaatagattagcctgaaacctgcgtccaaagggaaacagtggcactctgccctaaaataaaggccagaacgttgtcctaaatgaatcctttgccttactttaggaccttcct

SEQ ID NO: 693554 - DNA, 120 bp, Artificial Sequence
  ENSG00000188647_50 (sequence is synthesized)
tccctctcaaattcaggcataatgtaatatagttgaaagggggaaaacagtacttgctttctctcaggtattggaggaaaagaagtaaatgcgtagatgaaattttaaatgtatcatttt

SEQ ID NO: 693555 - DNA, 120 bp, Artificial Sequence
  ENSG00000188647_51 (sequence is synthesized)
atctgtttgtatatggagaagggagggataggaattccatatttcaagatagcaaatataatttcatagaaatatatagctaaagattccaaagtgcttttacagagaactgttgaataa

SEQ ID NO: 693556 - DNA, 120 bp, Artificial Sequence
  ENSG00000188647_52 (sequence is synthesized)
tatattcctaaagggcagcaatatgccatgttcatggtgaagacagaaaaccaatgaatcagttgtggatctcaggtgggagaggaaacctcaggctcccaactttgacttctctactct

SEQ ID NO: 693557 - DNA, 120 bp, Artificial Sequence
  ENSG00000188647_53 (sequence is synthesized)
caccaggccatgttaacactgtaaaaccaaactctttgctaagaacaatacagggcagtagtttagtctgctgatgaaaccttgtgcttccaagaatattagctatatataatttgtgct

SEQ ID NO: 693558 - DNA, 120 bp, Artificial Sequence
  ENSG00000188647_54 (sequence is synthesized)
ttctggatgattctattgtccagaaagctaaccctgacgttacttttattagtctgttgttattcctcagggtgtagaagatttagtaaattcaggacaaattttatattcagtggcaaa

SEQ ID NO: 693559 - DNA, 120 bp, Artificial Sequence
  ENSG00000188647_55 (sequence is synthesized)
aagaaaaggcaaaaatatgctaaatatattattagctcttaaattttagtatagatcgtattttttataaactattaccagtacagtagctagtagatattctgtgactgcctcattgtt

SEQ ID NO: 693560 - DNA, 120 bp, Artificial Sequence
  ENSG00000188647_56 (sequence is synthesized)
tatcttgctgctttggtccctatggctctagtatgaacattctcgtgtcttctgtggaaatgatttctgtgttatagttccatctttggtagaggtggggatgattgtattttgttttag

SEQ ID NO: 693561 - DNA, 120 bp, Artificial Sequence
  ENSG00000188647_57 (sequence is synthesized)
ttgacatcattctcaacttttagaaatactgttgaggaaaatgattaccgttggttttcaaattgacaactattttgcttccaaagacttcagtttccctttgttttatgtgtagacctc

SEQ ID NO: 693562 - DNA, 120 bp, Artificial Sequence
  ENSG00000188647_58 (sequence is synthesized)
atatatgttcaacacattgcatactgccttgcacattgtaggaattcaacaagtcaagagttgataaaagctagaaagataaaactagcttagctatcatatcatcattgtccatattct

SEQ ID NO: 693563 - DNA, 120 bp, Artificial Sequence
  ENSG00000188647_59 (sequence is synthesized)
tagctttgggaaaaatataccattttgcataaaatacataatcagtttcaaatgcataaggcaaagatatacagttgcacaacattgcaagtgaaatttacaaaggatttttatttttgt

SEQ ID NO: 693564 - DNA, 120 bp, Artificial Sequence
  ENSG00000188647_60 (sequence is synthesized)
gtatgctaaaagtgctcctacttaaagcagttttctttattagaccaacaccttccagcaaagttagaaaccaaacacaagtgctcatttgcccaaattaaccagatagttatgtaaact

SEQ ID NO: 693565 - DNA, 120 bp, Artificial Sequence
  ENSG00000188647_61 (sequence is synthesized)
gttcatattaagtctttagtggtttacaaacaataacattctggcttttcttccataccttttaggaatcagccttaattttaagtatagcagtcactttcctcaaggtactatgcagca

SEQ ID NO: 693566 - DNA, 120 bp, Artificial Sequence
  ENSG00000188647_62 (sequence is synthesized)
tactttagattgcttatttatcattataaggtgataggtaataaatttgaggtttacttgtcatataatttcatatggcagatattgattcaaggagcattctattagaaaaagttgata

SEQ ID NO: 693567 - DNA, 120 bp, Artificial Sequence
  ENSG00000188647_63 (sequence is synthesized)
aattatcctcccttacaaatatcatcttgcatttggagcaggtatttttttcttattagttaaagactgggtacagttatagtagatgctcaataaatgcttagtcagtgattgatctaa

SEQ ID NO: 693568 - DNA, 120 bp, Artificial Sequence
  ENSG00000188647_64 (sequence is synthesized)
catcaaactaacagctttcagaaaggagactgttgacatcttttcaccaaggagtatatttgtagagtaatatatgtgtggaattttgaaattatatcatttgacatgatttatgaggct

SEQ ID NO: 693569 - DNA, 120 bp, Artificial Sequence
  ENSG00000188647_65 (sequence is synthesized)
tatttaagctggagttagtaacgtaatagaagtattatttatacagaacatagttgaaagataggagatgtgaaagattaagtagtattttcttgtgcaaggcatattaataaatgtaat

SEQ ID NO: 693570 - DNA, 120 bp, Artificial Sequence
  ENSG00000188647_66 (sequence is synthesized)
taaatgtcttaataagcagctggctgaactctagagagaactgctgtagtcttctgcaatcagtctctgtattggtatatccagtactatcgggtttaggttctttttatttttccttaa

SEQ ID NO: 693571 - DNA, 120 bp, Artificial Sequence
  ENSG00000188647_67 (sequence is synthesized)
atcttacttgtttctagcgtcttaagagtggtaatggtaaaatgtgaagttacaataaacttctgcttgttttctcagaacatctttggcatgaggaagaactttttgtgaatgatacag

SEQ ID NO: 693572 - DNA, 120 bp, Artificial Sequence
  ENSG00000188647_68 (sequence is synthesized)
tagtctcagcatctgttaatttgtggttttcaaagcatttttgacagagtttacctaatgtaaaaagattaaacagttttataaaacacaaataaacattcctacctgaactgtgaggaa

SEQ ID NO: 693573 - DNA, 120 bp, Artificial Sequence
  ENSG00000188647_69 (sequence is synthesized)
cagagtgtatagtacaaatgtaattaggcattgcctcctggcgaggttcttgatgcatgacttcgatgctggctgctgactgaggtgaccactgtcagtattgtactttggcatatgttg

SEQ ID NO: 693574 - DNA, 120 bp, Artificial Sequence
  ENSG00000188647_70 (sequence is synthesized)
tttttaggaaaataatggaatgcattcttagattaacttactgtttttgagttggaaaaaataaaagatgaggtattataagtatgccaaatatttatacactacaaaagattaaaaaag

SEQ ID NO: 693575 - DNA, 120 bp, Artificial Sequence
  ENSG00000188647_71 (sequence is synthesized)
gagagggagaaaaaaaaaggccagttatgattttaatagcgtctaatttttttttgactcgaattttgtggacactagtcaattgcataatttaacatggaggagctttcatttaaaaga

SEQ ID NO: 693576 - DNA, 120 bp, Artificial Sequence
  ENSG00000188647_72 (sequence is synthesized)
agttctcagctactatattctgccattaaaattaaccatgcctgttaattttacattgcttgaagatataagtaagctgccgtcaatattgttttaagattttcttatagtttatgttta

SEQ ID NO: 693577 - DNA, 120 bp, Artificial Sequence
  ENSG00000188647_73 (sequence is synthesized)
aatggaaaagttacatatataatctatggtgcagggtcaggcattggccattaaagataagtttggctaactattttactgaagagactaatggtcttccctctgttgtactgctatgtt

SEQ ID NO: 693578 - DNA, 120 bp, Artificial Sequence
  ENSG00000188647_74 (sequence is synthesized)
tcttgatctgtttttccccaatgtaacagtctacattgaagtcctttagctctctccatatactaattgacatttgttaaggattcaatattttgtgaattctttttacccttaaaatgc

SEQ ID NO: 693579 - DNA, 120 bp, Artificial Sequence
  ENSG00000188647_75 (sequence is synthesized)
atatctttcagagagataagaatgaattttgcaataatttatatgcagagtgtgcttatgggtttctgggagttcaagttagtaccccagagtgcttaaaagtatgatgctaaattctaa

SEQ ID NO: 693580 - DNA, 120 bp, Artificial Sequence
  ENSG00000188647_76 (sequence is synthesized)
ggctaatgtaatgactgtagattatctatgtccacattgttcaacagaaatataatgtgaaccacaacataatttttaattttctagtagccatattaaaaaagaaacaagcaaaattaa

SEQ ID NO: 693581 - DNA, 120 bp, Artificial Sequence
  ENSG00000188647_77 (sequence is synthesized)
aataacagtttatgtaacccagtatattaaaaatatcatttcaacatgtaatcaatataaaagattattaatgaaacaccttatcttctttttcttccatactaagtcttagatttgagt

SEQ ID NO: 693582 - DNA, 120 bp, Artificial Sequence
  ENSG00000188647_78 (sequence is synthesized)
gagtgtattttgcactcacagcacatctcaattctgactggccacattttaagtgctcagtagtcacatatggctaagggctactatactggacagtacagattcatagagtataaaata

SEQ ID NO: 693583 - DNA, 120 bp, Artificial Sequence
  ENSG00000188647_79 (sequence is synthesized)
tgactttaactttggagatggtgaggtaggcctgtaattatggtactttaaaaattcagaatatttagaaaagcatctaatagaattatccacttgttttccttcatcttcattttaata

SEQ ID NO: 693584 - DNA, 120 bp, Artificial Sequence
  ENSG00000188647_80 (sequence is synthesized)
tgttctagaagtaggatcagcctgttccaatttgccaagcattattaaggaggaataattccataccatgtaaaataccatgatatgctgattatactacattaacaaatttttaagttg

SEQ ID NO: 693585 - DNA, 120 bp, Artificial Sequence
  ENSG00000188647_81 (sequence is synthesized)
gttgcgttcactaaattctgtcctgtttcttcaaaataatatagcttaaattgcatgttaattgtatatcttacctattttgtttttatattattcttacaatataatcatgtatattaa

SEQ ID NO: 693586 - DNA, 120 bp, Artificial Sequence
  ENSG00000188647_82 (sequence is synthesized)
cagccctgggattctaatcttcctctgcaactgtcttccaggacttactggcacttattacactgtgataagtggcagaaaagtagaatgaaatattctttttccattagatttgttctt

SEQ ID NO: 693587 - DNA, 120 bp, Artificial Sequence
  ENSG00000188647_83 (sequence is synthesized)
atgtgaccatgtaccaagccagctataaagtattgtatttctgtagaatatggaaaatagtatttgtcttacctttgctaaatgtttgcaatttctaagtaaaccttttatctcctaaaa

SEQ ID NO: 693588 - DNA, 120 bp, Artificial Sequence
  ENSG00000188647_84 (sequence is synthesized)
aacatggccgagaccagcgaggaggtggcggtgctggtgcagcgggttgtgaaggacatcactaacgccttcaggaggaacccacacatgaaagagctgatcctctctggcactttaaat

SEQ ID NO: 693589 - DNA, 120 bp, Artificial Sequence
  ENSG00000188647_85 (sequence is synthesized)
agtagagaaactgatggtctggcaacttgagagaatcgcaacagctgctacctctggaggaaccctgtaattaaataaaaagcttgcattccccactagtgctgtttttggcagtcttaa

SEQ ID NO: 693590 - DNA, 120 bp, Artificial Sequence
  ENSG00000188647_86 (sequence is synthesized)
actgtcgcggccgccgccaacatggccgagaccagcgaggaggtggcggtgctggtgcagcgggttgtgaaggacatcactaacgccttcaggaggaacccacacatgtgatgattgtaa

SEQ ID NO: 693591 - DNA, 120 bp, Artificial Sequence
  ENSG00000188647_87 (sequence is synthesized)
aacagttaagaagccgttggatgttttgctcccttgtggcacacaattggagacgtgcaactgtgccacattaaaaacaaaacactgctggcctcaaaacacacctgccacctctgacag

SEQ ID NO: 693592 - DNA, 120 bp, Artificial Sequence
  ENSG00000188647_88 (sequence is synthesized)
catccacttccctcccccttatgactgctgcctttttcaaaatgagagtgtttggaatgatttcctggcagtatccatagtggttgctgagccttctaaagaatgctttgatgccttgct

SEQ ID NO: 693593 - DNA, 120 bp, Artificial Sequence
  ENSG00000188647_89 (sequence is synthesized)
gtatatcagtctttcgatttctttttgagaatgggagccttagtgcaagtaagagacgacctcaaaaaaaaaaaaagttggacaaatgaagagtgtattttctcatcactggtatttttc

SEQ ID NO: 693594 - DNA, 120 bp, Artificial Sequence
  ENSG00000188647_90 (sequence is synthesized)
tagaagaaattacagcagagattagaaatctaatacaaaatgtcgtaatcatcttatgttctcttctttgaggtagactaaaagagcatcattatatttgaagaaaccaagattgaatgt

SEQ ID NO: 693595 - DNA, 120 bp, Artificial Sequence
  ENSG00000188647_91 (sequence is synthesized)
tcattggcttggcagtttttaacacagtgcagtttggaacatgtcccagttcttgtggatcacatttatggaaactcttaaaggactttaatgcccctccctaatcctttttctactgta

SEQ ID NO: 693596 - DNA, 120 bp, Artificial Sequence
  ENSG00000188647_92 (sequence is synthesized)
aaacctcattaatatatcctcaatgtataatttattagtaataaggatttgggtcattcgagatttaaaactttgagataagttggatattcggaataatgtaatgatttgtaatatagg

SEQ ID NO: 693597 - DNA, 120 bp, Artificial Sequence
  ENSG00000188647_93 (sequence is synthesized)
tttaaatagcttaactcattgtttaagactagtcatcagctatatttgaatacatattccccacagtaaaactattttcaataatattactatgcatctttgtaagtgccttataatttg

SEQ ID NO: 693598 - DNA, 120 bp, Artificial Sequence
  ENSG00000188647_94 (sequence is synthesized)
ggcttttaaaaattgcctgcgctttcttcccttaatttagcccatttactcccaaaataaagaggctgtgtttctttttttttttttaaggcattgtttatctgtaacgtttgtatctaa

SEQ ID NO: 693599 - DNA, 120 bp, Artificial Sequence
  ENSG00000188647_95 (sequence is synthesized)
ctttactgtatctaattacactttcagtattatacaaaaatttttttgtttttcttgtccaaacttaagatcggttgtaattttattggccaacatctacttcattaaatacattgactt

SEQ ID NO: 693600 - DNA, 120 bp, Artificial Sequence
  ENSG00000188647_96 (sequence is synthesized)
tgtttatgtagaaatatttagccagaaggagttgaggatgcagtggtgagatgtggattttgttactgtatgatgtgaataggtaccttctctcagcctcagtttcctcttgatcttgtg

SEQ ID NO: 693601 - DNA, 120 bp, Artificial Sequence
  ENSG00000188647_97 (sequence is synthesized)
aggctgatgaaaacaggaaaatcacctcacacagtggtacttagttgccactcaataaatattagaccttccctgaatctctgtgttcctcaccaaaaatatattggacaaatgattggt

SEQ ID NO: 693602 - DNA, 120 bp, Artificial Sequence
  ENSG00000188647_98 (sequence is synthesized)
gaatatgaagcactttataaacctggataatactatataaatgctgtttgtatggttgagtattagataatcatattggattctctaaaactgaaaacttgacctagggatagtctttaa

SEQ ID NO: 693603 - DNA, 120 bp, Artificial Sequence
  ENSG00000188647_99 (sequence is synthesized)
cttagtgtatggaccctgtgctaatgtagaagacaacagtttataatgtaaacagtcacgttaaaattaatcttatccagcaagttattgttttttctattaaatattgaactcactgtt

SEQ ID NO: 693604 - DNA, 120 bp, Artificial Sequence
  ENSG00000188647_100 (sequence is synthesized)
ccaaatttctgaagacatgtaagccccataagttgttagcttttgaaaacgaaatataaaccattttacacttatttcttctccctattctttatacctgtgacaattctaaataggcat

SEQ ID NO: 693605 - DNA, 120 bp, Artificial Sequence
  ENSG00000188647_101 (sequence is synthesized)
tttgcccctttttgtgtggtgtcttcataaactttcttgcctgaaatataaattgtcatgttgagttacagtatactgtttgatacatgcttttattttccttcattttttggggtggga

SEQ ID NO: 693606 - DNA, 120 bp, Artificial Sequence
  ENSG00000188649_0 (sequence is synthesized)
gcggtggggcggttggtgatcatcctagcctgcggtagatggtgcgccctgccttccctgcccagacgtaagaaaagtgcactgtccgtccagaaagttgaaataaaaggaccatcatga

SEQ ID NO: 693607 - DNA, 120 bp, Artificial Sequence
  ENSG00000188649_1 (sequence is synthesized)
aaaaatctcaaagagaagatatttttaaaaagatgtcagaagagatggataatattacagctgaagaaattatagacaagcatctccaaaaagatttagatgcagaagaaaatcaaaatg

SEQ ID NO: 693608 - DNA, 120 bp, Artificial Sequence
  ENSG00000188649_2 (sequence is synthesized)
tagcaaagacattgagaggcaaagtgagagaaaagctaaaaatttctaagattaataaaggtgaaaaatcttcaactgagcagctcattgatagcgaaatacatcaaaggtccaagttgt

SEQ ID NO: 693609 - DNA, 120 bp, Artificial Sequence
  ENSG00000188649_3 (sequence is synthesized)
ctccacagactgaagtctcattggatgaaagtctttcatttttcattctgagtggtgaagaaggttcagctttgggcaagtcttcagagcagagaccagtaaaccgtagttatcccaaat

SEQ ID NO: 693610 - DNA, 120 bp, Artificial Sequence
  ENSG00000188649_4 (sequence is synthesized)
gcttttcacttggtgttaatttacaaaatgttgctgagagtgaagaggaagagtttatgaaagaattcattttgacagatatactcaaagtaaaagctgctgactatgaagatgatcaag

SEQ ID NO: 693611 - DNA, 120 bp, Artificial Sequence
  ENSG00000188649_5 (sequence is synthesized)
aacaaataaaaaaacagaaggcaaatatttttgtaccaagtagttctccagtggttaaccagcgcaaactgccaaaagatatgatgccacgtattctagaagatgaaggattctatattc

SEQ ID NO: 693612 - DNA, 120 bp, Artificial Sequence
  ENSG00000188649_6 (sequence is synthesized)
agagaaagccagaaatatacaaaaagacctgcaacaaaatggaaaatcgcctgcttaaactagaagagggaaaatgttggtttggagaaagtggagaaataatgtcattacctacaccta

SEQ ID NO: 693613 - DNA, 120 bp, Artificial Sequence
  ENSG00000188649_7 (sequence is synthesized)
ttaaacagtcatggaatttcagactaaatgtaaggaaggaacctttaaatccattacttaagaccatatacaggaaggcagtaaaatatgacctgggaagttcatttatgaacaaaatgg

SEQ ID NO: 693614 - DNA, 120 bp, Artificial Sequence
  ENSG00000188649_8 (sequence is synthesized)
aaggttcaagggaaatataccagttagacctcaacattgtgggtttgcaattcagccatcatcatctcttcaatcaagagcaagtattatgcgcaaggcttctccaactttatgaatgtt

SEQ ID NO: 693615 - DNA, 120 bp, Artificial Sequence
  ENSG00000188649_9 (sequence is synthesized)
ttcaggacaggcagcaacagaatgtatctcagctgctttatgagaagctgaaagcactgacagatgctaccaaattgtcaaatgaaaattcagaaattaaccagctgaccagaaaatctt

SEQ ID NO: 693616 - DNA, 120 bp, Artificial Sequence
  ENSG00000188649_10 (sequence is synthesized)
tacaagattattattggcaaataagtaatacaaaacagatgtatgacttagaaaggggaaaggacctctccctactacacagtatattacgaacttggaaacagattaaatctcttcgac

SEQ ID NO: 693617 - DNA, 120 bp, Artificial Sequence
  ENSG00000188649_11 (sequence is synthesized)
atgggcaagggtttacaagcaccccaataaagttacaggttcagaggattaaaatgaataaatgtgatgaacaagagcaaatctcagaaatgtctgaaactgagaagaaaaatgaaggaa

SEQ ID NO: 693618 - DNA, 120 bp, Artificial Sequence
  ENSG00000188649_12 (sequence is synthesized)
aagaacttaagaatgggaaaaaactggagagcctctcatatctagcttcagacgaaacagaaattgaaagaataaagccaattaccttgaggccacaactttctttcactgcagaattaa

SEQ ID NO: 693619 - DNA, 120 bp, Artificial Sequence
  ENSG00000188649_13 (sequence is synthesized)
caagcttatccaagtgttccttgcatgaacaaaaaagaagagccaaaattcagaagctcaaatactttattaaaatattttacaacaataaacaggtttcttgtacttcagtatctcccc

SEQ ID NO: 693620 - DNA, 120 bp, Artificial Sequence
  ENSG00000188649_14 (sequence is synthesized)
tacagtttgattttaaagtcatgtttcagcaaattttcaatattcagttaatgtattggcctgaagtgatttgtttggaggtttatgaaaaaagtaaaaggacaagcttactggcaaaac

SEQ ID NO: 693621 - DNA, 120 bp, Artificial Sequence
  ENSG00000188649_15 (sequence is synthesized)
tatatatacctttacctaactacacagagctgaaaggcaaaaccgctttgcaatatgtagagtttagctctgataagctggtcatgcctgccgatggagaagtaggaagcaatgtgcctt

SEQ ID NO: 693622 - DNA, 120 bp, Artificial Sequence
  ENSG00000188649_16 (sequence is synthesized)
ttcttcttgagggaaatggaactgaagaactctgtcttttgacatcaggaaaacttagctattctctatcatggagcttagatgaaaatggtcttcctctgatacctatgccacaatcat

SEQ ID NO: 693623 - DNA, 120 bp, Artificial Sequence
  ENSG00000188649_17 (sequence is synthesized)
taagatcttcttactgcagtatgttaaggaatgtagatgcaagaagtgttcctggaattccatggctcatgaatgaacagaagctttttgaatgggcaaatgaagtcagaattgatccaa

SEQ ID NO: 693624 - DNA, 120 bp, Artificial Sequence
  ENSG00000188649_18 (sequence is synthesized)
gtttctgaagaggaaatggcaaagagtaaacgtttccagctattgcaacttagaaatgcaggtcaattagataatttccttctacagcaaatgcccctccatgatacagagattccagat

SEQ ID NO: 693625 - DNA, 120 bp, Artificial Sequence
  ENSG00000188649_19 (sequence is synthesized)
ttagtcttccaggagtatgaaagtcagaaagagaaggaggtatccgtttcagatgtaaattctattacagcacaaaggattaattctgccaattttctgaaaaaggtgagaaggttgata

SEQ ID NO: 693626 - DNA, 120 bp, Artificial Sequence
  ENSG00000188649_20 (sequence is synthesized)
atgaagagaattgttaaaattagcaaatgtaacttgtcagatattgtgaatgattatgaagaaattgtatctacaagccaattgacagatgcagtttgtaagtttgttgaaccacggaga

SEQ ID NO: 693627 - DNA, 120 bp, Artificial Sequence
  ENSG00000188649_21 (sequence is synthesized)
aagttaaaacctcagaggaaagaaaggaaaaaagtcacagcgcaggcgatctctgacggagatattaagattcttgtccgaatagtgagggcctataatattcctaccagaaaaacaaca

SEQ ID NO: 693628 - DNA, 120 bp, Artificial Sequence
  ENSG00000188649_22 (sequence is synthesized)
attaatggatccttggatatgcctacttgtttgaaatcatctatatcttgcctcagacatagagaaacaatcaaatcagtagcctcagatgagaccttacatgaggatactgtacatcca

SEQ ID NO: 693629 - DNA, 120 bp, Artificial Sequence
  ENSG00000188649_23 (sequence is synthesized)
ttcgtggaagtttctttccagcacactgtatacaaaaccaatacagcaagtggatctcatccatgctggaatgaagaaattaaagtagattttgtctcaccaggacatgattatagcttc

SEQ ID NO: 693630 - DNA, 120 bp, Artificial Sequence
  ENSG00000188649_24 (sequence is synthesized)
tcaagcttatctaaaataaaagataacatatatatcaacatttttgatgaaatgatgactgaaaaacatgaggatcactgtctcaagagctgtagtggtcactcatatataagaaagaat

SEQ ID NO: 693631 - DNA, 120 bp, Artificial Sequence
  ENSG00000188649_25 (sequence is synthesized)
tggcttggatgcattgtcttccctttttctgctcttctgcaacaatctgagattagtggaacatttcaagtaactattccaccagttttgctcgggtatacttggagtaatacttatgta

SEQ ID NO: 693632 - DNA, 120 bp, Artificial Sequence
  ENSG00000188649_26 (sequence is synthesized)
tttcctaaagaagattccaatgagcagaatttaaaagaatgtacattcttaaatatttttgctaccattgaacctcaaatatcatatgtcacctgtaatccaacactagataagttttta

SEQ ID NO: 693633 - DNA, 120 bp, Artificial Sequence
  ENSG00000188649_27 (sequence is synthesized)
gatcaaacagaggtcttgcagagagcacagatttttaaaaagaattgtaaggcaatgtttcccaaccgaagaatcgtaactactgtttttaatgatgaagggatacagttcttagtcaca

SEQ ID NO: 693634 - DNA, 120 bp, Artificial Sequence
  ENSG00000188649_28 (sequence is synthesized)
agatatatcaaggcattaaatccacctcagcaacttctggatatatttcttcacaattctaatgcaacatttgacctcattgctcgatttgtatctttgattccttttgtgcctaataca

SEQ ID NO: 693635 - DNA, 120 bp, Artificial Sequence
  ENSG00000188649_29 (sequence is synthesized)
ccagatgaaaatgatggctctgatatatggatgacatcagagcactgcatcagtttagctatcggaaataaggaggagcatgccatccttctctgtaatttctttctgtattttggaaag

SEQ ID NO: 693636 - DNA, 120 bp, Artificial Sequence
  ENSG00000188649_30 (sequence is synthesized)
aaggcactggtcctcttgggaacgtcagtgttagaagggcatgtggcttatgtagtaactcaagaaactaatgaatatttgctttggaatccatcaactggccaatgttataagcagttt

SEQ ID NO: 693637 - DNA, 120 bp, Artificial Sequence
  ENSG00000188649_31 (sequence is synthesized)
gacccgttttgtcccttaaaaagtgtagattgtttgtttgatgatagaaatgtctggtttaatattcaacaaaataatacaccaatggctgtattttttgactattcaaaggaaagtttc

SEQ ID NO: 693638 - DNA, 120 bp, Artificial Sequence
  ENSG00000188649_32 (sequence is synthesized)
tggaagcagttgcttccaaaaaacgttcaaggaacaaaaatacaaagcatacagcctgaagaaataatttattttgaaactgataaaagcatggtagaagatctaaggaataggatcgaa

SEQ ID NO: 693639 - DNA, 120 bp, Artificial Sequence
  ENSG00000188649_33 (sequence is synthesized)
aggactctgaagagtaaagtgatggaatggcgacctaaacacccaacacattggaatcgacagtgtacttttattttgcgacaaatccttcctaagctggaatttggcataggaagcttt

SEQ ID NO: 693640 - DNA, 120 bp, Artificial Sequence
  ENSG00000188649_34 (sequence is synthesized)
gtttcatctgaaggagataatgaatttgaaagaatactacaattttattgggtcacgggatttcccatccagatgccatacattgatgtacagtcaattattgatgctgtttatcaaact

SEQ ID NO: 693641 - DNA, 120 bp, Artificial Sequence
  ENSG00000188649_35 (sequence is synthesized)
ggaattcactctgctgaatttccccagacagaatttgctttagctgtatacattcacccatacccaaacaacatattatctgtgtgggtctatttggcttccttagttcaacatcaatga

SEQ ID NO: 693642 - DNA, 120 bp, Artificial Sequence
  ENSG00000188649_36 (sequence is synthesized)
tcagaagcatttgcattttagcagggcacttttgaatagtgaaaagccattaagtcataaaggaacaaatttctaatggaattgcagtgggtaacataaaatatagtaagatggcgttca

SEQ ID NO: 693643 - DNA, 71 bp, Artificial Sequence
  ENSG00000188649_37 (sequence is synthesized)
tatcacctttcttatagattcgcatatacatcagaagttttaaactgtaccagtcctttcctttatgctca

SEQ ID NO: 693644 - DNA, 120 bp, Artificial Sequence
  ENSG00000188649_38 (sequence is synthesized)
ccttgagattttgctgtttattctcaagtccagctaagtgctgggcccaatttttgattcacttacagagctgggcactatggagactcgcacccctgagtgagtctttgaggaggagtc

SEQ ID NO: 693645 - DNA, 120 bp, Artificial Sequence
  ENSG00000188649_39 (sequence is synthesized)
tagatgagcttctcaccagagacctctccaggaaggacctttggatagtctggctttcttgggtcactgtctgcagtaggtcttattctgggaaagaagcaattttggcctcttctccta

SEQ ID NO: 693646 - DNA, 120 bp, Artificial Sequence
  ENSG00000188649_40 (sequence is synthesized)
agaccaatgtttctcaaattgtagaattcacaccacctccatttgaatcatctggagagccttgttgaaaatgcagattactagatcctcctcaagacccactgaatcagcacctctggg

SEQ ID NO: 693647 - DNA, 120 bp, Artificial Sequence
  ENSG00000188649_41 (sequence is synthesized)
agtgaagctacagactctgcattattttcaacaagctccccagataattctgatgcactgttatgagggagagcccagccttatagaatgttgtcactactaaactaaggctggtacgtt

SEQ ID NO: 693648 - DNA, 120 bp, Artificial Sequence
  ENSG00000188649_42 (sequence is synthesized)
tgatgctgggtctgatacaatttcagatggaagctgctcgagtggaaaactaaggtcattgcctctcatggataaaatgttatttcactggtaaagaaaaataaaataaaatctaccatg

SEQ ID NO: 693649 - DNA, 120 bp, Artificial Sequence
  ENSG00000188649_43 (sequence is synthesized)
gccccgcagcgtcctccccggggacgcccgctcagccgggagctcgcggccggtactcacccgctgggtatactcttcttcttcaccaggacgagagggatgagagacccacgccccagg

SEQ ID NO: 693650 - DNA, 120 bp, Artificial Sequence
  ENSG00000188649_44 (sequence is synthesized)
cagctgctttatgagaagctttaaaaaattgtacaagtaataccggaatacgttctccctggaaaagattaattgtagaagtgtcaagatgtgaaagccctacttcgttcatcacctcat

SEQ ID NO: 693651 - DNA, 120 bp, Artificial Sequence
  ENSG00000188649_45 (sequence is synthesized)
tagttctccaggtaacattctttcccagtaaaatattcaagtcattaacgaattatgttatgggataatagctttattgtatgctggataaataaaaaatactgatctaaaattatagta

SEQ ID NO: 693652 - DNA, 120 bp, Artificial Sequence
  ENSG00000188649_46 (sequence is synthesized)
acttttctatatttgtttttcatgacttccctgaattaagggaactgattaagagaactcattcttcatttaaaaaatgtacatatataggcatatgtatttatatatagagagagagag

SEQ ID NO: 693653 - DNA, 120 bp, Artificial Sequence
  ENSG00000188649_47 (sequence is synthesized)
cgagcgagaaagtaagagacagtgagagagaggctttctgctagacttcagtagtagggtgtaattatagttgtttgtactacttatttggtcaatatccatttaatattttggacttta

SEQ ID NO: 693654 - DNA, 120 bp, Artificial Sequence
  ENSG00000188655_0 (sequence is synthesized)
gctctacctcttggacttccaacttctgtgagtcaacatagtgcctcttgcatttaagtgtctgcaggaaaaatgatgagaactctcatcaccacacacccactgcccctgcttctattg

SEQ ID NO: 693655 - DNA, 120 bp, Artificial Sequence
  ENSG00000188655_1 (sequence is synthesized)
ccgcagcagctgctgcagctggtgcagtttcaagaggtggatacagattttgatttcccagaagaagataaaaaagaagaatttgaagagtgtttggaaaaattttttagtacagggccc

SEQ ID NO: 693656 - DNA, 120 bp, Artificial Sequence
  ENSG00000188655_2 (sequence is synthesized)
gccagaccacctaccaaagaaaaagtcaaaagacgtgtccttattgaacctggaatgccactaaatcatatagagtactgtaaccatgaaatcatgggaaaaaatgtttactacaaacac

SEQ ID NO: 693657 - DNA, 120 bp, Artificial Sequence
  ENSG00000188655_3 (sequence is synthesized)
cgttgggtggcagaacattacttccttcttatgcaatatgacgagctccaaaaaatctgttacaacagatttgtgccatgtaagaatggaattaggaaatgtaacaggagcaaaggtctt

SEQ ID NO: 693658 - DNA, 120 bp, Artificial Sequence
  ENSG00000188655_4 (sequence is synthesized)
cacttgttcatggcaaaatgaaatgcaaaaacgtattcctcatactataaatgatctcgtggagccacctgaacacagaagtttcctcagtgaggatggtgtctttgtcatatcgcccta

SEQ ID NO: 693659 - DNA, 120 bp, Artificial Sequence
  ENSG00000188655_5 (sequence is synthesized)
gcagagcgttctctgagagcttagggtgggaggaatatttctctccatactgatccttatagatcaaagttgagaatggtaattttgcttccattcactttaatcacccaccttcctttc

SEQ ID NO: 693660 - DNA, 120 bp, Artificial Sequence
  ENSG00000188655_6 (sequence is synthesized)
ttcctttcccaacacctcacaaaagcaccttaggctaggttcacagacggtgctctgagatgtggtctcatgcaggtcccctaagttagcatgccttgaatgtgttacggatacagatgc

SEQ ID NO: 693661 - DNA, 120 bp, Artificial Sequence
  ENSG00000188655_7 (sequence is synthesized)
ctgcagtggaaggatgaccagcaccaagaggaaaaggaaatggttgcctgaagtgtgctccaaagacacatccatgtgattctctagttcagcagaaagaataaaaattgcttcaatcta

SEQ ID NO: 693662 - DNA, 120 bp, Artificial Sequence
  ENSG00000188655_8 (sequence is synthesized)
gctctacctcttggacttccaacttctgtgagtcaacatagtgcctcttgcatttaagaaacatctcatcacactcttatcagcattgagttttgtctgcaggaaaaatgatgagaactc

SEQ ID NO: 693663 - DNA, 120 bp, Artificial Sequence
  ENSG00000188655_9 (sequence is synthesized)
gctctacctcttggacttccaacttctgtgagtcaacatagtgcctcttgcatttaagaaacatctcatcacactcttatcagcattgagtttaaatttcaattagtgagaactgaggaa

SEQ ID NO: 693664 - DNA, 120 bp, Artificial Sequence
  ENSG00000188655_10 (sequence is synthesized)
gctctacctcttggacttccaacttctgtgagtcaacatagtgcctcttgcatttaagaaatttcaattagtgagaactgaggaaaaaccaagaagcctgcattccacagtgtctgcagg

SEQ ID NO: 693665 - DNA, 120 bp, Artificial Sequence
  ENSG00000188655_11 (sequence is synthesized)
gctctacctcttggacttccaacttctgtgagtcaacatagtgcctcttgcatttaagaaatttcaattagtgagaactgaggaaaaaccaagaagcctgcattccacagatcaagatgt

SEQ ID NO: 693666 - DNA, 120 bp, Artificial Sequence
  ENSG00000188655_12 (sequence is synthesized)
tgcagaggctccgcgttcttgtgagagtatgttccgagctctctgacctgtcaccatgggatcactcttttgaagagacttcctggaggacactgatgacagtgtgaaagcagggatggg

SEQ ID NO: 693667 - DNA, 120 bp, Artificial Sequence
  ENSG00000188655_13 (sequence is synthesized)
aggaaaagcagggaggggagggacagtgtggcacatggccgccccagagtgcccattctcacatcgccattttaggcaactttttcttttctttcccattctctgcactcctatgctcaa

SEQ ID NO: 693668 - DNA, 120 bp, Artificial Sequence
  ENSG00000188655_14 (sequence is synthesized)
ctttcctgtctctactttctgatgtgttccccaacacccacctttctttaattccatcattctctaacctttctacacacatatatacaaacttagtatccagcctagaacaggaggctg

SEQ ID NO: 693669 - DNA, 120 bp, Artificial Sequence
  ENSG00000188655_15 (sequence is synthesized)
tccatctccatcactgatagatcaaggtctccaggtaatgactgttagagaatcactcaggttgccaccaagtaggacttcttttacaacgagcctggtaaggtaagaaaactcaggagg

SEQ ID NO: 693670 - DNA, 120 bp, Artificial Sequence
  ENSG00000188655_16 (sequence is synthesized)
ttgcttctgcaattaaataattggttcttcatggagcatggaccaatttgtcaaagcactctaggggctcaaattccgttttagcactggccatttcagtagtcattgtgtttgacagcc

SEQ ID NO: 693671 - DNA, 120 bp, Artificial Sequence
  ENSG00000188655_17 (sequence is synthesized)
tagagagagagatacagtctagccttaagaagggaaaccagactgatagaggccatagaatagcagctaaggacagatgtgtggaatttagacaaaaataggcttgaaccaggagtctgc

SEQ ID NO: 693672 - DNA, 120 bp, Artificial Sequence
  ENSG00000188655_18 (sequence is synthesized)
cggatctaatgtgagattttaagcaacttcccttcacggagagatgttaataactttacacttctttttgcaactttcattgttataataacaacaatgctaaaaataatatatttatta

SEQ ID NO: 693673 - DNA, 120 bp, Artificial Sequence
  ENSG00000188655_19 (sequence is synthesized)
tagggttgtttggatgatggtgataatgtacttagagtgcttagtctagtgcttggcacttaactcctcattatgctagctatgactgtgtatcattgtttttactttagggtgacttca

SEQ ID NO: 693674 - DNA, 120 bp, Artificial Sequence
  ENSG00000188655_20 (sequence is synthesized)
agaatgtatttatcccagctgctcaaacttgaaccttccttgaccccttccccaagggcatctatggtcaaataagggcaagaggagaaagaaagacatggttaaggaatttttcttatc

SEQ ID NO: 693675 - DNA, 120 bp, Artificial Sequence
  ENSG00000188655_21 (sequence is synthesized)
aaagtggaatgttcgaaaggggagggtggctcttttcagagcaagttctcaactcctggaaagggaaaagatgcatttatttcagacgaaaggagcatgtgagcctcctctctgcaccct

SEQ ID NO: 693676 - DNA, 120 bp, Artificial Sequence
  ENSG00000188655_22 (sequence is synthesized)
cctttctccttccctctctccttaatctctctcttgctccatttcttccttgtttccttttcttcctccttacctttatttctctccctttctcattctccttcctttcaccttttcttc

SEQ ID NO: 693677 - DNA, 120 bp, Artificial Sequence
  ENSG00000188655_23 (sequence is synthesized)
tcttaccacagctctagactgactgtaggcctagtaaggtcatttttgtcaataatttagaagtattcagatcgattatgagttggtaatttaaaaatggtccaaaatcttagagcccag

SEQ ID NO: 693678 - DNA, 120 bp, Artificial Sequence
  ENSG00000188655_24 (sequence is synthesized)
aacagcaacatgtggcataactgtgccccacacaggaaatggaagcaagcacattatcacaatagaacatatcccgttatctcttttagtgtctgcaggaaaaatgatgagaactctcat

SEQ ID NO: 693679 - DNA, 120 bp, Artificial Sequence
  ENSG00000188659_0 (sequence is synthesized)
ttgccttgactacggcgggcgctgtgggagtggagaagctgcaagtgctgaggcgcggtggaggaaagcatgggagccaagagtatgaggagctggtgtctgtgtcagatttgtagctgc

SEQ ID NO: 693680 - DNA, 120 bp, Artificial Sequence
  ENSG00000188659_1 (sequence is synthesized)
gggtcggattattgtccttatgaaatagttaaacagcctcgccatgtgccagaagaatataaaccaaaacaagggaagattgatcttggtactacctacaaacgggatttgaattcgtat

SEQ ID NO: 693681 - DNA, 120 bp, Artificial Sequence
  ENSG00000188659_2 (sequence is synthesized)
aaagtgcagcctgtggcaatagtccggcctttggagagacaagttaaaaaaggaaaattggacactgtcccaacctataaagacgattatagagcttgggaccttcataaaagtgaactt

SEQ ID NO: 693682 - DNA, 120 bp, Artificial Sequence
  ENSG00000188659_3 (sequence is synthesized)
tataagccagaacaaacttaccacccgcctactgtgaaatttggaaattcaactacatttcaggatgattttgttcctcaggagataaagcctaggcaaagctttaaaccctcctctgtg

SEQ ID NO: 693683 - DNA, 120 bp, Artificial Sequence
  ENSG00000188659_4 (sequence is synthesized)
gtcaaacgttctacagccccttttaatggtattacaagtcatcgccttgattatatacctcatcagcttgaactcaagtttgaaaggccaaaagaagtttacaaaccaactgaccaacgc

SEQ ID NO: 693684 - DNA, 120 bp, Artificial Sequence
  ENSG00000188659_5 (sequence is synthesized)
tttgaggatctcacaactcaccggtgtgactttcagggtctcattggtgaaactgcaaaactctgcagacctgtacacaccagagtgacccagaatgctctgtttgaaggaagcactgaa

SEQ ID NO: 693685 - DNA, 120 bp, Artificial Sequence
  ENSG00000188659_6 (sequence is synthesized)
ttccgtgaaagttttcaaccatgggaaatcccaccacctgaggtcaagaaagtaccagagtatgtgcctcctacaggtagcatgctgttaaacagcacaagccatcttgactatgttcca

SEQ ID NO: 693686 - DNA, 120 bp, Artificial Sequence
  ENSG00000188659_7 (sequence is synthesized)
tatcaggccaaccatgttgttcccatcaggccagtttctcaaaaaagaagtaacaattttcctttccaaggaaaaagcatcatgaaagaagattttccagcatgggaaagttgtcgtcaa

SEQ ID NO: 693687 - DNA, 120 bp, Artificial Sequence
  ENSG00000188659_8 (sequence is synthesized)
ggacttattaagaagcagcagcagattcccaacccatctggaaaatttgatggtttgagcactttcagatctcactatgtgccacatgaattgatcccaacagagagttgcaaaccttta

SEQ ID NO: 693688 - DNA, 120 bp, Artificial Sequence
  ENSG00000188659_9 (sequence is synthesized)
aatattgcttttaagagttctgttccatttgatgatgtaaccatgtactctgtagagtacacaccgaaaagacaggaaatttgcccagccagctatccctctcctccaggttatattttc

SEQ ID NO: 693689 - DNA, 120 bp, Artificial Sequence
  ENSG00000188659_10 (sequence is synthesized)
gacaatacaaattcccaaggtcataaattcttccgcaagattattcctgcagtgaaggccttctaataaccaaaatgtgcttaaaaggaaggtactagcaagttgttgtttttccaagag

SEQ ID NO: 693690 - DNA, 120 bp, Artificial Sequence
  ENSG00000188659_11 (sequence is synthesized)
tattttaatcaagattgttctttaatgtgcatttcagaaggttgaataatatgcattcccatgagaactattttagtattcaacatactgcttagtagcttgtccccagtctattatcat

SEQ ID NO: 693691 - DNA, 120 bp, Artificial Sequence
  ENSG00000188659_12 (sequence is synthesized)
ataattatggcaattgtatggttattcacataccatttgtcatttatcaagcacatcaggattatctagaacaacattgaaaatgatacatggattcctcttccaaggcaacaggattca

SEQ ID NO: 693692 - DNA, 120 bp, Artificial Sequence
  ENSG00000188659_13 (sequence is synthesized)
ttatactcagacttcacggcatctacatagcatccactgaatcaagttttggttggtggtatacagactgctgcactgctcctcaccatgttcaagttagcaagaggcactgtggtgtgg

SEQ ID NO: 693693 - DNA, 120 bp, Artificial Sequence
  ENSG00000188659_14 (sequence is synthesized)
caaggaaaggctctgtgtgctgggaatcgaaggacttgagttcaagttctgactaataattattattatttttagagacagggtctcactgtcacccgtgctggagtccagtggcataat

SEQ ID NO: 693694 - DNA, 82 bp, Artificial Sequence
  ENSG00000188659_15 (sequence is synthesized)
ggtgtgccaccacacctggctattttttttaaacatactttgtagagacaggttcttgctgtattagtcaggctgttcaatc

SEQ ID NO: 693695 - DNA, 120 bp, Artificial Sequence
  ENSG00000188659_16 (sequence is synthesized)
ttttaaacatactttgtagagacaggttcttgctgtattagtcaggctgttcaatctattggccaggctgctattgaatcccaccttggcttcccaaagcactgggattacaggcatgag

SEQ ID NO: 693696 - DNA, 120 bp, Artificial Sequence
  ENSG00000188659_17 (sequence is synthesized)
gagtttaagttctaataatatagatttctatttgtactaccttaggcagtgactcatatctctgagcctcagtgtctttatttgtaaaatgatgtctgttctcaaaaagagtttgttttg

SEQ ID NO: 693697 - DNA, 120 bp, Artificial Sequence
  ENSG00000188659_18 (sequence is synthesized)
agcatcagactgtatggtacattttaatccttaaagtacaaatgtggaggatttttttttaaaattgctcaatctctttttgtacttgttttctccttttcaaattaggataattactta

SEQ ID NO: 693698 - DNA, 120 bp, Artificial Sequence
  ENSG00000188659_19 (sequence is synthesized)
ctcaatgctcattttctggcctgtagcaaggattgtaaaataacctaatttgctttgagcttatgagtagtatatacttctgagaggagtcttgtcctttaaaacttcatgagcacctga

SEQ ID NO: 693699 - DNA, 120 bp, Artificial Sequence
  ENSG00000188659_20 (sequence is synthesized)
gaaattcttaacagagaatggaaagcttggaatggggtaaatacagtggtttgaataacagtatttgcagaaaggaaaaagtattatttgctagggtagttttaggaagactgacagctc

SEQ ID NO: 693700 - DNA, 120 bp, Artificial Sequence
  ENSG00000188659_21 (sequence is synthesized)
tgaagaaatctttagggtaaatgtaggtaattttgcacctaattgccaggccaagtcactgtttagaggaagaaccagccccagcagggggcataatcacctggttcacctcttccggtg

SEQ ID NO: 693701 - DNA, 120 bp, Artificial Sequence
  ENSG00000188659_22 (sequence is synthesized)
tgaagataagtgataaggtaaagaatgatgccagtaagtatagtagaaacactctattgcatttataaatgctaaaaatttccgaatgaattaaactcttattgggtggtttcttttttt

SEQ ID NO: 693702 - DNA, 120 bp, Artificial Sequence
  ENSG00000188659_23 (sequence is synthesized)
aaaaaaattaaataattgcattatgggagaatatgatttattttagcataaagtgaattttagtcttttatggcttcagaattatttcaaaatatactttattgaaaatcaatatttggt

SEQ ID NO: 693703 - DNA, 120 bp, Artificial Sequence
  ENSG00000188659_24 (sequence is synthesized)
tattttaattgttcaaaagtaatttgttctttacatttattagtaaaagtatggtgtgtgaaactatatttccatgcaacataataaaatcaataaaaggaatggattttcaagaaatca

SEQ ID NO: 693704 - DNA, 120 bp, Artificial Sequence
  ENSG00000188659_25 (sequence is synthesized)
agaagctgcaagtgctgaggcgcggtggaggaaagcatgggagccaagagtatgaggagctggtgtctgtgtcagatttgtagctgcggcccctgagactcccaatcaaggatgcaaagt

SEQ ID NO: 693705 - DNA, 120 bp, Artificial Sequence
  ENSG00000188659_26 (sequence is synthesized)
aaaatgccacccgggccaggcgacatcattgtccacgtggaaccacaaggatttatgaaaattctggggtgttttgccctacaactgaatatttggaaaaatatcctatgtatgacaatg

SEQ ID NO: 693706 - DNA, 120 bp, Artificial Sequence
  ENSG00000188659_27 (sequence is synthesized)
gctttaacatctaatatcaaattataactttggtgtgctgccaaacttagcctccatggcttaggaaagaacatttctctctttggcaaaatagtattgtatagtaacaaaagaaaatag

SEQ ID NO: 693707 - DNA, 120 bp, Artificial Sequence
  ENSG00000188659_28 (sequence is synthesized)
gccatttgtctgattgagtggtaaaagacccacaatcccatccaaattcatctactttgttagttttctgtctcaaaacatgaaaaacaaaggatgccattaaagaagcattatgtcaca

SEQ ID NO: 693708 - DNA, 120 bp, Artificial Sequence
  ENSG00000188659_29 (sequence is synthesized)
gctgccaagttaggaaaccagcttgcaaatcaagatgccgcctaacaacttctagctccaatctcttgttgcctctattatgttccatgcaagcaaaataaatgttgtgccttgactctc

SEQ ID NO: 693709 - DNA, 120 bp, Artificial Sequence
  ENSG00000188659_30 (sequence is synthesized)
cgggcgctgtgggagtggagaagctgcaagtgctgaggcgcggtggaggaaagcatgggagccaagagtatgaggagctggtgtctgtgtcagatttgtagctgcggctttctgtcctcc

SEQ ID NO: 693710 - DNA, 120 bp, Artificial Sequence
  ENSG00000188659_31 (sequence is synthesized)
ggatccgcctgactgaaaagtcaaccaggactgacaagggagccactgcctctgccataatcagaaaattgcaacagagctgtagactccagaatcactcgtctcttccaaggtcaagaa

SEQ ID NO: 693711 - DNA, 120 bp, Artificial Sequence
  ENSG00000188659_32 (sequence is synthesized)
gaagctgcaagtgctgaggcgcggtggaggaaagcatgggagccaagagtatgaggagctggtgtctgtgtcagatttgtagctgcgggtaagaaacggctggtgtagcggcgggcccgg

SEQ ID NO: 693712 - DNA, 120 bp, Artificial Sequence
  ENSG00000188659_33 (sequence is synthesized)
gcttgggagccgacctagggcctaggtgcacggagccggctcctcgggaaccctgagagtggccgtcccccggagatgaagggacgagggcgcagcgacatccccacttatcccgctccg

SEQ ID NO: 693713 - DNA, 120 bp, Artificial Sequence
  ENSG00000188672_0 (sequence is synthesized)
gccttgcagcctgagataaggcctttggcgggtgtctcccctatcgctccctcaagccctcaagtaggtgttggagagaggggtgatgcctggtgctggtggaacccctgcacagagacg

SEQ ID NO: 693714 - DNA, 120 bp, Artificial Sequence
  ENSG00000188672_1 (sequence is synthesized)
gacacaggatgagctctaagtacccgcggtctgtccggcgctgcctgcccctctgcgccctaacactggaagcagctctcattctcctcttctatttttttacccactatgacgcttcct

SEQ ID NO: 693715 - DNA, 120 bp, Artificial Sequence
  ENSG00000188672_2 (sequence is synthesized)
tagaggatcaaaaggggctcgtggcatcctatcaagtcggccaagatctgaccgtgatggcggcccttggcttgggcttcctcacctcaaatttccggagacacagctggagcagtgtgg

SEQ ID NO: 693716 - DNA, 120 bp, Artificial Sequence
  ENSG00000188672_3 (sequence is synthesized)
ccttcaacctcttcatgctggcgcttggtgtgcagtgggcaatcctgctggacggcttcctgagccagttccctcctgggaaggtggtcatcacactgttcagtattcggctggccacca

SEQ ID NO: 693717 - DNA, 120 bp, Artificial Sequence
  ENSG00000188672_4 (sequence is synthesized)
tgagtgctatgtcggtgctgatctcagcgggtgctgtcttggggaaggtcaacttggcgcagttggtggtgatggtgctggtggaggtgacagctttaggcaccctgaggatggtcatca

SEQ ID NO: 693718 - DNA, 120 bp, Artificial Sequence
  ENSG00000188672_5 (sequence is synthesized)
gtaatatcttcaacacagactaccacatgaacctgaggcacttctacgtgttcgcagcctattttgggctgactgtggcctggtgcctgccaaagcctctacccaagggaacggaggata

SEQ ID NO: 693719 - DNA, 120 bp, Artificial Sequence
  ENSG00000188672_6 (sequence is synthesized)
aatccaaaggaagaatgccatgttcaacacctactatgctctagcagtcagtgtggtgacagccatctcagggtcatccttggctcacccccaaaggaagatcagcatgacttatgtgca

SEQ ID NO: 693720 - DNA, 120 bp, Artificial Sequence
  ENSG00000188672_7 (sequence is synthesized)
cagtgcggtgttggcaggaggcgtggctgtgggtacctcgtgtcacctgatcccttctccgtggcttgccatggtgctgggtcttgtggctgggctgatctccatcgggggagccaagtg

SEQ ID NO: 693721 - DNA, 120 bp, Artificial Sequence
  ENSG00000188672_8 (sequence is synthesized)
cctgccggtgtgttgtaaccgagtgctggggattcaccacatctccgtcatgcactccatcttcagcttgctgggtctgcttggagagatcacctacattgtgctgctggtgcttcatac

SEQ ID NO: 693722 - DNA, 120 bp, Artificial Sequence
  ENSG00000188672_9 (sequence is synthesized)
tgtctggaacggcaatggcatgattggcttccaggtcctcctcagcattggggaactcagcttggccatcgtgatagctctcacgtctggtctcctgacaggtttgctcctaaatctcaa

SEQ ID NO: 693723 - DNA, 120 bp, Artificial Sequence
  ENSG00000188672_10 (sequence is synthesized)
aatatggaaagcacctcatgtggctaaatattttgatgaccaagttttctggaagtttcctcatttggctgttggattttaagcaaaagcatccaagaaaaacaaggcctgttcaaaaac

SEQ ID NO: 693724 - DNA, 120 bp, Artificial Sequence
  ENSG00000188672_11 (sequence is synthesized)
aagacaacttcctctcactgttgcctgcatttgtacgtgagaaacgctcatgacagcaaagtctccttatgtataatgaaacaaggtcagagacagatttgatattaaaaaattaaagac

SEQ ID NO: 693725 - DNA, 120 bp, Artificial Sequence
  ENSG00000188672_12 (sequence is synthesized)
taaaaacttagtttaagagtcaatttaataagtttaaaataaatgtttagtttcattaggatgatgctatcaatattttcttggttacagacacattattaaagttttgggttaatttta

SEQ ID NO: 693726 - DNA, 80 bp, Artificial Sequence
  ENSG00000188672_13 (sequence is synthesized)
tccacaggctgggcagcgctgtgggccccgcgggcgccgagtccgcaggacccgcgagggcactaccgcgaagcatcggc

SEQ ID NO: 693727 - DNA, 120 bp, Artificial Sequence
  ENSG00000188672_14 (sequence is synthesized)
ctccgggccgggccgggccggaccgggagcctgctcggcgggtccgggctcctgcaaggcggggacgcggggccggcgacccttcacgcttcgtactcattgagcgccgattttatgcca

SEQ ID NO: 693728 - DNA, 120 bp, Artificial Sequence
  ENSG00000188672_15 (sequence is synthesized)
ggcaccgtgctggatctcccagtgcctggaagagaaaacccattctgtttcgaagggcatccagagctggtcacagtggggacccaccctccttttccaggctacgccagaccctgggtg

SEQ ID NO: 693729 - DNA, 120 bp, Artificial Sequence
  ENSG00000188672_16 (sequence is synthesized)
tgtgtacgtttcaatggaagtgaatttaaatgtactttataaatcaaagactttttctgagactttggagagttccagtaatgagagcttctcattgttatcaaagccagggctggagac

SEQ ID NO: 693730 - DNA, 120 bp, Artificial Sequence
  ENSG00000188672_17 (sequence is synthesized)
ggggccaggtgctcagtaggcttcggtgaatatttgttggctgatttattcagaaattatgtccagcccctaccttggatggatttatcacctctccaggccacctcttctttccaaata

SEQ ID NO: 693731 - DNA, 120 bp, Artificial Sequence
  ENSG00000188672_18 (sequence is synthesized)
cgggtgctgtcttggggaaggtcaacttggcgcagttggtggtgatggtgctggtggaggtgacagctttaggcaccctgaggatggtcatcagtaatatcttcaacgattggcttccag

SEQ ID NO: 693732 - DNA, 120 bp, Artificial Sequence
  ENSG00000188674_0 (sequence is synthesized)
agtctgagatgcgcggatgcttcagcatgcctccagaagcagagaaagaacaaaagcactggaaccggtctccggttgcctctagactcagagaagctgggtctaagtgtagtgttagct

SEQ ID NO: 693733 - DNA, 120 bp, Artificial Sequence
  ENSG00000188674_1 (sequence is synthesized)
gcagatacctgctcagctggctaagcctttaacatggaaagaaggctcataaagaaggaaatgaaaaagctcttgggagattatattggcatcagacttcgggaaaatgaatttgaccca

SEQ ID NO: 693734 - DNA, 120 bp, Artificial Sequence
  ENSG00000188674_2 (sequence is synthesized)
aaaggaagacggcaactcacctttctagatgatatggcacactatgacttggccatcagtgttgctttgcaatggctggatccctcagaagacttaacttggctggagtgggaggaactg

SEQ ID NO: 693735 - DNA, 120 bp, Artificial Sequence
  ENSG00000188674_3 (sequence is synthesized)
aaaataccactccatggcagacccatatatccaaatcgtagagaacgagaagctatgattttatcatcttatgctggaatcttaatgaacagtatcccgattgaggaagtctttaaaatt

SEQ ID NO: 693736 - DNA, 120 bp, Artificial Sequence
  ENSG00000188674_4 (sequence is synthesized)
cccgcaaacagagtgtcaagtcaagaaaggtaacaacaaataaaaatgccaccagcatctctgcaaaggaagcaaatgccacagaatggaaatcatcacaaaggttttcagacacacagc

SEQ ID NO: 693737 - DNA, 120 bp, Artificial Sequence
  ENSG00000188674_5 (sequence is synthesized)
caaagcacaaagtcacttagaaaattggaattgtaccatggaacttcataatagattctctgggagcagacgagaagcatcatcttaaaaccacagctcttgccagtacatttttcttta

SEQ ID NO: 693738 - DNA, 120 bp, Artificial Sequence
  ENSG00000188674_6 (sequence is synthesized)
caactgtttttggtacaactgcactgaagtgttatttttgatgttgagctttcttcttttagaagcatattgcatggctacattttcttaaaaaaaaaaactgtgaccttatgctacttc

SEQ ID NO: 693739 - DNA, 120 bp, Artificial Sequence
  ENSG00000188674_7 (sequence is synthesized)
attgtgactggaagactgctggagaattcagaaagtatatagtatttctgtgttagagcaagctggctttgtagcacattttacaaatgtgtggcattgaatattgcacagtgatggagt

SEQ ID NO: 693740 - DNA, 120 bp, Artificial Sequence
  ENSG00000188674_8 (sequence is synthesized)
gggaggcagatttccaaagagttaatccaaaataaaattaatctgtcattgattgcctttactgtgttctcatatgaaaagaatgtttaaatcatttcaataaagcattaaaaaaatgaa

SEQ ID NO: 693741 - DNA, 120 bp, Artificial Sequence
  ENSG00000188674_9 (sequence is synthesized)
aagaacaaaagcactggaaccggtctccggttggtgagcgattctcaaaggggaatttgttaagagcaggcacttaatagaacagcccgagagacctgtaccacgattgcagcctctaga

SEQ ID NO: 693742 - DNA, 120 bp, Artificial Sequence
  ENSG00000188676_0 (sequence is synthesized)
agtccagatgatagttaagaaagcagtaagaatacagagagtccacaatgagatgaaaatgcactgccagttgaaacatcctcctacactggagctttataaatattttaaagacaagga

SEQ ID NO: 693743 - DNA, 120 bp, Artificial Sequence
  ENSG00000188676_1 (sequence is synthesized)
ttggattagatttgacattagaaatgtaccataatacagaaggcaatggacacctaaagaacagaatgaaaaccttcttaggaaatgaagcttgacacttcacccaccaggccaccacaa

SEQ ID NO: 693744 - DNA, 120 bp, Artificial Sequence
  ENSG00000188676_2 (sequence is synthesized)
gaatgttgcattttcattattatgatacttcaaacaaaataatggagccccacagaccgaatgtgaagacagcagtgccattgtctttggaaagctatcacatatctgaagagtatggct

SEQ ID NO: 693745 - DNA, 120 bp, Artificial Sequence
  ENSG00000188676_3 (sequence is synthesized)
ttcttcttccagattctctgaaagaacttccagatcattataggccttggatggaaattgccaacaaacttcctcaattgattgatgctcaccagcttcaagctcatgtggacaagatgc

SEQ ID NO: 693746 - DNA, 120 bp, Artificial Sequence
  ENSG00000188676_4 (sequence is synthesized)
ccctgctgagctgccagttcctgaagggtcaccgggagcagcgcctggcccacctggtcctgagcttcctcaccatgggttatgtctggcaggaaggagaggcgcagcctgcagaggtcc

SEQ ID NO: 693747 - DNA, 120 bp, Artificial Sequence
  ENSG00000188676_5 (sequence is synthesized)
tgccaaggaatcttgcccttccatttgtcgaagtctccaggaacttggggctccctcctatcctggtccactcagacttggtgctgacgaactggaccaaaaaagatccagacggattcc

SEQ ID NO: 693748 - DNA, 120 bp, Artificial Sequence
  ENSG00000188676_6 (sequence is synthesized)
tggaaattgggaacctggagaccatcatctcatttcctgggggagagagcctgcatggttttatactggtgactgctttggtagagaaagaagcagtgcctgggataaaggctcttgttc

SEQ ID NO: 693749 - DNA, 120 bp, Artificial Sequence
  ENSG00000188676_7 (sequence is synthesized)
aggccacgaatgctatcttgcagcccaaccaggaggccctgctccaagccctgcagcgactgagactgtctattcaggacatcaccaaaaccttaggacagatgcatgattatgtagatc

SEQ ID NO: 693750 - DNA, 120 bp, Artificial Sequence
  ENSG00000188676_8 (sequence is synthesized)
cagacatattttatgcaggcatccggatctttctctctggatggaaagacaacccagcaatgcctgcagggctgatgtatgaaggagtttcccaagagcccctgaaatactccggcggga

SEQ ID NO: 693751 - DNA, 120 bp, Artificial Sequence
  ENSG00000188676_9 (sequence is synthesized)
acagtgcttcatgcctttgatgagttcttaggcattcgtcatagcaaggaaagtggtgactttctgtacagaatgagggattacatgcctccttcccataaggccttcatagaagacatc

SEQ ID NO: 693752 - DNA, 120 bp, Artificial Sequence
  ENSG00000188676_10 (sequence is synthesized)
cactcagcaccttccctgagggactacatcctgtcatctggacaggaccacttgctgacagcttataaccagtgtgtgcaggccctggcagagctgcggagctatcacatcaccatggtc

SEQ ID NO: 693753 - DNA, 120 bp, Artificial Sequence
  ENSG00000188676_11 (sequence is synthesized)
accaaatacctcatcacagctgcagccaaggcaaagcatgggaagccaaaccatctcccagggcctcctcaggctttaaaagacaggggcacaggtggaaccgcagttatgagctttctt

SEQ ID NO: 693754 - DNA, 120 bp, Artificial Sequence
  ENSG00000188676_12 (sequence is synthesized)
aagagtgtcagggataagaccttggagtcaatccttcacccacgtggttaggaggctgccctctccccagcaatgcagagcccccatggagggcaggtgggcctggagaatgagggtcag

SEQ ID NO: 693755 - DNA, 120 bp, Artificial Sequence
  ENSG00000188676_13 (sequence is synthesized)
ggttctgcctgggatcatccaggaaggatctcagccctattcatgtttctgctctacagagcactatattctccttgttgagagctgttggcttcacaaaggagagttgatgtggccaag

SEQ ID NO: 693756 - DNA, 120 bp, Artificial Sequence
  ENSG00000188676_14 (sequence is synthesized)
cctttccctccctacctgatcactgcttaacggcatgtataatggatacttcctcatgcagaacccccagaggagtgactgtatgccattctctttgccaagtaatagaaaaccaatcta

SEQ ID NO: 693757 - DNA, 120 bp, Artificial Sequence
  ENSG00000188676_15 (sequence is synthesized)
aatgtcaaaaatcagataaaattgcctggggatacattacttgttgattttcttaaaaaacaaattcacttaacaattcattaagttcatactgagcactgcctccaagattaaaaccag

SEQ ID NO: 693758 - DNA, 120 bp, Artificial Sequence
  ENSG00000188676_16 (sequence is synthesized)
gatttctgtggtcccagaccagccctcttctccctgaatgtgttgagttggtggcaggaggttggaaatgctccagtggagatgggaagatagaggatgctgacaataaggacttggaag

SEQ ID NO: 693759 - DNA, 120 bp, Artificial Sequence
  ENSG00000188676_17 (sequence is synthesized)
tcactagtgtgaaaatgagcagttaatgatatgggaacggatgagactttccacgtggtacctagatttgcaaattctattgtaatgcctttatttttagaagaattattctctcttctt

SEQ ID NO: 693760 - DNA, 120 bp, Artificial Sequence
  ENSG00000188676_18 (sequence is synthesized)
actctgaaaatctgtatttgtaaaatgaatgaatggatcctatataagtaaataagaaaactgggaataagtagtaaatcaatgtgtttagtgtgcaaataaatgtaaatgcttttattg

SEQ ID NO: 693761 - DNA, 120 bp, Artificial Sequence
  ENSG00000188676_19 (sequence is synthesized)
gttgtagcaataaaagagcagtggaggtggggtggaagaagactcatttttgtcttcattactgctatgtggagcaagggcccaagcttttaaaaacaagagctcagagacatggccctg

SEQ ID NO: 693762 - DNA, 120 bp, Artificial Sequence
  ENSG00000188676_20 (sequence is synthesized)
gccttggaagatgccctagagacgctgaggtggttgtacttttgccataggagtggcagccagagaactgagcccaatgaatgcaaaggctggtgcctggaaatattgtgactttgccac

SEQ ID NO: 693763 - DNA, 87 bp, Artificial Sequence
  ENSG00000188676_21 (sequence is synthesized)
gcacctagagatggggttttaccacgttggccagtctggtatcgaatcctcgacctcataatccacctgcctcagccttccaaagtg

SEQ ID NO: 693764 - DNA, 120 bp, Artificial Sequence
  ENSG00000188676_22 (sequence is synthesized)
cactgtgcccagcctaataatatattaagatggccacaggccaaatattctggggctggaatgtgagtggaaatgtcgctcaccctttatcacatagcaccccatagtccagccacaact

SEQ ID NO: 693765 - DNA, 120 bp, Artificial Sequence
  ENSG00000188676_23 (sequence is synthesized)
tgcagaattcaaagtaagtgtggatgtgtgtgtgcctgcagtgccttgcacacaagtgtgcatgcctgtggacatgtgaccctagaagttattaatatatctggtttacaaactgaattg

SEQ ID NO: 693766 - DNA, 120 bp, Artificial Sequence
  ENSG00000188676_24 (sequence is synthesized)
ttcttttattttttttctctcttggtggtcatcaataactgaaattgggctagattcctggaaattgggtaagttctcagaaatcatttacgcactttagaatccaggccaaatttaaaa

SEQ ID NO: 693767 - DNA, 120 bp, Artificial Sequence
  ENSG00000188676_25 (sequence is synthesized)
tcttacaataaaacaaagaacaaagcatgctaaattatatgtataatataatatcaaccatataaaatgcataaaaaatatactagaaggaaatgtgcctaaaattcacagtctaaaatt

SEQ ID NO: 693768 - DNA, 120 bp, Artificial Sequence
  ENSG00000188676_26 (sequence is synthesized)
taacagtgattgcctcttccttgtatagataagggatttttttttactgtattttccagtctgtacataataaaacaagtaatgtgcaatgcaaacaaaacaaaatgaaactttatcaaa

SEQ ID NO: 693769 - DNA, 88 bp, Artificial Sequence
  ENSG00000188676_27 (sequence is synthesized)
aatgtgcaatgcaaacaaaacaaaatgaaactttatcaaatttcagtaactccttgaagtttaattttttttttgagactgagtctta

SEQ ID NO: 693770 - DNA, 120 bp, Artificial Sequence
  ENSG00000188676_28 (sequence is synthesized)
tgcacccagttgaagtttaatagtgtgaaaaaaatatttctcatctcactatatcttctatgggaggccagattgcagattgtctacagaaaaatcccttcaaaagaccttgttattaca

SEQ ID NO: 693771 - DNA, 120 bp, Artificial Sequence
  ENSG00000188676_29 (sequence is synthesized)
tagactggagctcatggggcaggtctggtccacacatccttaggctccgcttctcctggaaaacaaaaatagcctctgatccagtgttgcctctcccatcaccaaacctcagcttctatc

SEQ ID NO: 693772 - DNA, 120 bp, Artificial Sequence
  ENSG00000188676_30 (sequence is synthesized)
gccaaactcatcaaataagagtgtccagtagaaaaactgggcagatgggggcacagaaggtgaagacatcatttcccaagctaatgttgctgctggaacaatagtctcactctatctccc

SEQ ID NO: 693773 - DNA, 86 bp, Artificial Sequence
  ENSG00000188676_31 (sequence is synthesized)
actctatcttctgcaacctcttgcctcagtctcttgcgtagctgggattacaggcatgccccgccatgcccagctaatttttgtat

SEQ ID NO: 693774 - DNA, 120 bp, Artificial Sequence
  ENSG00000188676_32 (sequence is synthesized)
ttacggagaggagaaagttgtgcagtgattccaccctgcagttatctaactcggcagggaactctgggcagtgagtactcacggtacagtctccacacctctaatcatgtgctcctctcc

SEQ ID NO: 693775 - DNA, 120 bp, Artificial Sequence
  ENSG00000188677_0 (sequence is synthesized)
gctccacacgcgctgcgcccgccgccggccccacgcgcggcccatgtcctccgcgccgcgctcgcccaccccgcggccccgcaggatgaagaaggacgagtcgttcctgggcaagctggg

SEQ ID NO: 693776 - DNA, 120 bp, Artificial Sequence
  ENSG00000188677_1 (sequence is synthesized)
tcgttcctgggcaagctgggcggcaccctggccaggaagcggagggcgcgcgaggtgagtgacctgcaggaagaaggcaagaatgccatcaactcaccgatgtcccccgccctggtggat

SEQ ID NO: 693777 - DNA, 120 bp, Artificial Sequence
  ENSG00000188677_2 (sequence is synthesized)
gttcaccctgaagacacccagcttgaggagaacgaggagcgcacgatgattgaccccacttccaaggaagaccccaagttcaaggaactggtcaaggtcctcctcgactggattaatgac

SEQ ID NO: 693778 - DNA, 120 bp, Artificial Sequence
  ENSG00000188677_3 (sequence is synthesized)
gtgctggtggaggagaggatcattgtgaagcagctggaggaagacctgtatgacggccaggtgctgcagaagctcttggaaaaactggcagggtgcaagctgaatgtggctgaggtgaca

SEQ ID NO: 693779 - DNA, 120 bp, Artificial Sequence
  ENSG00000188677_4 (sequence is synthesized)
cagtccgaaatagggcagaaacagaagctgcagacggtgctggaagcagtacatgacctgctgcggccccgaggctgggcgctccggtggagcgtggactcaattcacgggaagaacctg

SEQ ID NO: 693780 - DNA, 120 bp, Artificial Sequence
  ENSG00000188677_5 (sequence is synthesized)
gtggccatcctccacctgctggtctctctggccatgcacttcagggcccccatccgccttcctgagcatgtaacggtgcaggtggtggtcgtgcggaaacgggaaggcctgctgcattcc

SEQ ID NO: 693781 - DNA, 120 bp, Artificial Sequence
  ENSG00000188677_6 (sequence is synthesized)
agccacatctcggaggagctgaccacaactacagagatgatgatgggccggttcgagcgggatgccttcgacacgctgttcgaccacgccccggataagctcagcgtggtgaagaagtct

SEQ ID NO: 693782 - DNA, 120 bp, Artificial Sequence
  ENSG00000188677_7 (sequence is synthesized)
ctcatcacttttgtgaacaagcacctgaacaagctgaatttggaggtgacggaactggagacccagtttgcagatggcgtgtacctggttctgctcatgggccttctggaagactacttt

SEQ ID NO: 693783 - DNA, 120 bp, Artificial Sequence
  ENSG00000188677_8 (sequence is synthesized)
gttcctctccaccacttctacctgactccggaaagcttcgatcagaaggtccacaatgtgtccttcgcctttgagctgatgctggacggaggcctcaagaaacccaaggctcgtcctgaa

SEQ ID NO: 693784 - DNA, 120 bp, Artificial Sequence
  ENSG00000188677_9 (sequence is synthesized)
gacgtggttaacttggacctcaaatccaccctgagggttctttacaacctgttcaccaagtacaagaacgtggagtgacgggggagctgtggatggtggcaggagtgtcccagcaagaaa

SEQ ID NO: 693785 - DNA, 120 bp, Artificial Sequence
  ENSG00000188677_10 (sequence is synthesized)
ggcggcatccgtctgtgccctgtgcctttccagggagccaggcgccatgggcttctggtccaagctgtgttgactgtcatccccaccccacccctacctcacgcctgccccaccccctgc

SEQ ID NO: 693786 - DNA, 120 bp, Artificial Sequence
  ENSG00000188677_11 (sequence is synthesized)
ctcttttggttgttgttcttaatctcctctccatgtagttcccagtgggcaagagcctttgaaaatgcaggattctaaacactcgtgcttgcgtttgaagcctcgcgtcactcagtcgcg

SEQ ID NO: 693787 - DNA, 120 bp, Artificial Sequence
  ENSG00000188677_12 (sequence is synthesized)
tgggatgatgagtccgttgttgtctgccttggccgaaagatgaaaaaaagcctgaaccccaacccccagctggttgagagcaccctgcattctgcctcatggtgcagttagcgatcacag

SEQ ID NO: 693788 - DNA, 120 bp, Artificial Sequence
  ENSG00000188677_13 (sequence is synthesized)
gccttcagaagtacaacatcagctcagcaggaacgccggctccccgaggacccaggcttgacgattcaccggggatctcctgggctgggctctccttggaagtgaggccttttattaaaa

SEQ ID NO: 693789 - DNA, 120 bp, Artificial Sequence
  ENSG00000188677_14 (sequence is synthesized)
ataaaagggttttgcagtttgaaaaactttaaagtcccagaagcttagatgtgacatgggtgtcctccacccacattcctatcacttcttggtcactcgttttaatgtaggttttgcaca

SEQ ID NO: 693790 - DNA, 120 bp, Artificial Sequence
  ENSG00000188677_15 (sequence is synthesized)
aacatccaagactcaggatggcccagctcccacagtccttgaaaggagctgtctgctggggacgtttcttaatttcttgctgtggttgaggggctgggtctggagatggctctaattgtg

SEQ ID NO: 693791 - DNA, 120 bp, Artificial Sequence
  ENSG00000188677_16 (sequence is synthesized)
ctgcttgagacagcttgggtcacagctttccccttcagaggccctttttgggaatgaatgcatctttggaaactttaaaatgaggggggtgcattggttcactggcactgtgtagtaaag

SEQ ID NO: 693792 - DNA, 120 bp, Artificial Sequence
  ENSG00000188677_17 (sequence is synthesized)
tgccacaggggagtggctcagacatcagagaattacatcctcaggcctttcgccttggcttgtagatgccggcttctccccgtgtcttcacatggtctcccctctgtgtgtctgtgtcct

SEQ ID NO: 693793 - DNA, 71 bp, Artificial Sequence
  ENSG00000188677_18 (sequence is synthesized)
tttttttttttttgagacaagttctcactgtgtcacccaggagtaaagtggtgccatctcagctcactgca

SEQ ID NO: 693794 - DNA, 88 bp, Artificial Sequence
  ENSG00000188677_19 (sequence is synthesized)
gcctatttttttttttttttttgagacaagttctcactgtgtcacccaggagtaaagtggtgccatctcttgatcctcccacctcagc

SEQ ID NO: 693795 - DNA, 72 bp, Artificial Sequence
  ENSG00000188677_20 (sequence is synthesized)
ggcttgagcggacatgcccagcctgcacccctctttttagaagggctgcggtcctattggattagggcccac

SEQ ID NO: 693796 - DNA, 120 bp, Artificial Sequence
  ENSG00000188677_21 (sequence is synthesized)
ctttttagaagggctgcggtcctattggattagggcccacttatatgacctcatttaatcttgattacctccataaagaccctgtctccaaataccatcacatcagaggtgctggggtta

SEQ ID NO: 693797 - DNA, 120 bp, Artificial Sequence
  ENSG00000188677_22 (sequence is synthesized)
ggacttcagcatgtggatttgtggggggcataatttgccttgtaccgggaggatatgaagtgttcatgttactctccctgtagccctgagagcatctcccttagagtatcctataaaagg

SEQ ID NO: 693798 - DNA, 120 bp, Artificial Sequence
  ENSG00000188677_23 (sequence is synthesized)
agtcgctgctcactcagttatgggttgttcaccccctcgctcaccccagctctgcagagaactggggatcccatcggccatgctttctgggctggcctctggtcgcagtcagtccctcgc

SEQ ID NO: 693799 - DNA, 120 bp, Artificial Sequence
  ENSG00000188677_24 (sequence is synthesized)
tgtggcgcccccccctcccccagctccttcccagggtgatgacccgctgaccccctggggtgcacctgctgcaaagcagcccccttccttggcatctctcagcattctccgtagtgagcc

SEQ ID NO: 693800 - DNA, 120 bp, Artificial Sequence
  ENSG00000188677_25 (sequence is synthesized)
tggcctttctgatcttgttagctttttgtcttcctgccgcagatcagagctttggagtaagttttgatatgaaatcgaatgccaacaccgaagttttagaaaacagtttaatattccctc

SEQ ID NO: 693801 - DNA, 120 bp, Artificial Sequence
  ENSG00000188677_26 (sequence is synthesized)
tcagttccggctgttgctaggctggggatgggttcagaatagccattttgatggaggtgatttcccagcaggggaaagaaataattaaaacagcattacggtgtctcttgcgggatgcag

SEQ ID NO: 693802 - DNA, 120 bp, Artificial Sequence
  ENSG00000188677_27 (sequence is synthesized)
tgacattcaaaagccacactgacaaaaagcctggggctggaacgttctgtgctgcctgcatggcatgtacaggaccgcggccccctggagctggtggagtggcccagccttgccctgctc

SEQ ID NO: 693803 - DNA, 120 bp, Artificial Sequence
  ENSG00000188677_28 (sequence is synthesized)
agctggtggagtggcccagccttgccctgctcacaggtggacctggagagggcactgtgccttcccagggattgggatttgaaaagaacagagcttggccaggtgcggtggctcacgcct

SEQ ID NO: 693804 - DNA, 120 bp, Artificial Sequence
  ENSG00000188677_29 (sequence is synthesized)
agaaaaaagaaaaagaaaagaacagagctgtgattttcagccaaaatgagcagccctggcccattctgtgtcatcagaggggagaggacggttactgtgggagggggcttcagcttctca

SEQ ID NO: 693805 - DNA, 120 bp, Artificial Sequence
  ENSG00000188677_30 (sequence is synthesized)
gggaggtcctggcggcccccatctagtaaaccagtaaacccatgcctatcctcatgcccacgtcacactcttgtgggtttcaagtcgaacagtaaaaggaatcataagatctgtggggaa

SEQ ID NO: 693806 - DNA, 120 bp, Artificial Sequence
  ENSG00000188677_31 (sequence is synthesized)
gctacatgggcacttgtgtttcacaacagggacccttaaaggcgatgtttccagcaaaggatgtgattttttttttttttttttttgagataagttctcactgcgttgcccaggctggag

SEQ ID NO: 693807 - DNA, 84 bp, Artificial Sequence
  ENSG00000188677_32 (sequence is synthesized)
ttttttgagataagttctcactgcgttgcccaggctggagtgcagtggtcattcacagacacacacatagcagactacagacta

SEQ ID NO: 693808 - DNA, 120 bp, Artificial Sequence
  ENSG00000188677_33 (sequence is synthesized)
cgcacccggcttggatgtgatcttttgtccacattcttttccaattggttcaaaggtgtaggtgtgccttttgcatacctgggaagggccccattaggctcgactcctcatttttctcca

SEQ ID NO: 693809 - DNA, 120 bp, Artificial Sequence
  ENSG00000188677_34 (sequence is synthesized)
ttcaccatcagtttgagtctgaattcatagcatggcctggacagatgcagcaaggggccagttccaaggcagaattcagggtgaactcgattcctataggcttgggatgaatggctgctg

SEQ ID NO: 693810 - DNA, 120 bp, Artificial Sequence
  ENSG00000188677_35 (sequence is synthesized)
ggacatgaggcttgggtgtgagatgccccgtctgctgctgctcttggttcttagttcagagaaattctgggacccttcctcctcccggcaccacgttttcagtgaatggttctttgaaga

SEQ ID NO: 693811 - DNA, 120 bp, Artificial Sequence
  ENSG00000188677_36 (sequence is synthesized)
ggaaccctggtccataggaactgagtgaaagcaaggccaagtatgtccacccatggggacaaacgtcccagcacaaaggggtctcaggcctgcaaggcccaagtggacgctcggacaagg

SEQ ID NO: 693812 - DNA, 120 bp, Artificial Sequence
  ENSG00000188677_37 (sequence is synthesized)
gcaggaaggtatttgctgattctccttctccatgtgacgtgtctctcaacccacaccagctaggggagcctcccgcagcttcagttcccctttgacgcccacacagtgttatgcaagcac

SEQ ID NO: 693813 - DNA, 120 bp, Artificial Sequence
  ENSG00000188677_38 (sequence is synthesized)
cgagcccagagtcccgctgggccgtggtgtcctaattgtcttggtgacaaagagcaattttattttaaagcaactgaatcctttccccctgttttgtgtgccagtattttactgtcttct

SEQ ID NO: 693814 - DNA, 120 bp, Artificial Sequence
  ENSG00000188677_39 (sequence is synthesized)
taattgttttaagcaatgtttactttggatttctggatgttatataaaagccacgaaaaccctggccatgctgtttgtcaggcccacctggctgagtgcaggaagcaagcgcttttcagg

SEQ ID NO: 693815 - DNA, 120 bp, Artificial Sequence
  ENSG00000188677_40 (sequence is synthesized)
agctcactgcaacaccgggcaaacacttcttccgccagggatgcggttaggacaatgccacgtggcgtcacagtatgctgttatttattccaataaagacctcgtgagcatgggcctgtc

SEQ ID NO: 693816 - DNA, 120 bp, Artificial Sequence
  ENSG00000188677_41 (sequence is synthesized)
ctgccacgtccctatatgaacggggtgtgtgcccgcctgccctccgacgtccgccggctgtgctggtctgcagagctgccgccagctgcaccctcctcgccatgagtgacctgcaggaag

SEQ ID NO: 693817 - DNA, 120 bp, Artificial Sequence
  ENSG00000188677_42 (sequence is synthesized)
tctgtgcactcactcactgggaatctttgaggagaagctgctcaccactcccgtctcccccattgcttccgctgccgcctgcctgagatcagggcctggcctcgtggttctccaggatcc

SEQ ID NO: 693818 - DNA, 120 bp, Artificial Sequence
  ENSG00000188677_43 (sequence is synthesized)
caaaggccctacactttgacgtcctccccatctccggcagctccttaaactaagaactcattttaatttctgaattctccctttttaaagaccagataaatttacctttgggacagttag

SEQ ID NO: 693819 - DNA, 120 bp, Artificial Sequence
  ENSG00000188677_44 (sequence is synthesized)
atgtgcacaaatgcaccatgtgtttaaagatcaccaaagaggagagaaaaggggattccttagtccagagaacaaaaactgcaggaggctggagctgagacgtgggtgttcctgcagctg

SEQ ID NO: 693820 - DNA, 120 bp, Artificial Sequence
  ENSG00000188677_45 (sequence is synthesized)
gggcctgtgctcccaggcactcatggcttctctggctggttcacttctccctggctcagacagatcaggagtggaaacatctgaatatgctcaaggaggagtgagtgacctgcaggaaga

SEQ ID NO: 693821 - DNA, 90 bp, Artificial Sequence
  ENSG00000188677_46 (sequence is synthesized)
attgtgtgttccgcccatgcgttctgttgtccggggcagcaaagtcgacctgcaccacgtgggtgcttgaaggcctactaagagctgtcg

SEQ ID NO: 693822 - DNA, 120 bp, Artificial Sequence
  ENSG00000188677_47 (sequence is synthesized)
gttttgttttgttttcttgaaggcctactaagagctgtcggaaactctgcttctgtagaaaagatgagatctcactctgatgcccaggctgaagtgcagtggtgcagtcatagctcactg

SEQ ID NO: 693823 - DNA, 120 bp, Artificial Sequence
  ENSG00000188677_48 (sequence is synthesized)
ctgagctgcaagatcttcactgaagtacaactggacttatttttagaaaaactgctctgttaagaagaccttcgtgcctgatgaagttagttattctgataaattacagcttctacgaag

SEQ ID NO: 693824 - DNA, 120 bp, Artificial Sequence
  ENSG00000188677_49 (sequence is synthesized)
aaaccacacccctctgagtacggatggaagttggaaaattcatagaaagctgtcatttcctggcagaggcctggaaaacctcatttaacagagatgtctttgggttcctgcttaagccca

SEQ ID NO: 693825 - DNA, 120 bp, Artificial Sequence
  ENSG00000188677_50 (sequence is synthesized)
gaggagctggtggcgtgagttggcacagagccgcacctttctttctcctcctccccagtcccttggaagctcacaccctccacaccctccagacactgagagaatgcatgccagcatgcc

SEQ ID NO: 693826 - DNA, 120 bp, Artificial Sequence
  ENSG00000188677_51 (sequence is synthesized)
tgtgccagcgcgcctgtgccagcacacccgggccagcacacccgggccagcagatctttctctgtgactgaagacagccggcacttcacatctttgaagggtttgtctttctggcaatga

SEQ ID NO: 693827 - DNA, 120 bp, Artificial Sequence
  ENSG00000188677_52 (sequence is synthesized)
gctgaatagaacgggcgtggaggcaggaggaggagcaggacgccgggcactgctgatgctgctttcgctggggtgagtgacctgcaggaagaaggcaagaatgccatcaactcaccgatg

SEQ ID NO: 693828 - DNA, 120 bp, Artificial Sequence
  ENSG00000188677_53 (sequence is synthesized)
gggtggctggatgtaatctggttcattgccggcatccctctgagtggtctttaaacacagcccagaaggcttttattttaaacctgttcagccatcattagcaggataaaagcttcaggt

SEQ ID NO: 693829 - DNA, 120 bp, Artificial Sequence
  ENSG00000188677_54 (sequence is synthesized)
aagcacagggtcatcccatggctgcttttggatcacagggagtcaggactccaagggcctcgagcgttacctggtccaggcccattttacagatgaaggcactgagccccaaatcacgga

SEQ ID NO: 693830 - DNA, 120 bp, Artificial Sequence
  ENSG00000188677_55 (sequence is synthesized)
agtcacttagaggtcacagagcaagtgaaatgaacaaggtgtctgattcccaggaaggttcttgtccacataaagaaagtggcccaagacttccagggccccagagggagctgtcgggtc

SEQ ID NO: 693831 - DNA, 120 bp, Artificial Sequence
  ENSG00000188677_56 (sequence is synthesized)
ggccttcggagatgccgcaggttctgagtagaggacgccggcctggcctgggggtggggcggccttgcagctcatatggaagaacgagcgaagagttgccaggcaaagaacggaagagca

SEQ ID NO: 693832 - DNA, 120 bp, Artificial Sequence
  ENSG00000188687_0 (sequence is synthesized)
tttcaccttcctgcagagtgctgacaccatcacagtatgttcccttctcaaccctggacatggttcagaaacagctaaagcagacaagaatctggggcagccaatattgtaccacctgcc

SEQ ID NO: 693833 - DNA, 120 bp, Artificial Sequence
  ENSG00000188687_1 (sequence is synthesized)
aaagcttggcacaaacaatctggaagccaaaaattgcacatactgtggaacagagcaagtggttctggcctccctgggatttggatcctggtttccagagctaagaacacaaagtcatga

SEQ ID NO: 693834 - DNA, 120 bp, Artificial Sequence
  ENSG00000188687_2 (sequence is synthesized)
aggtgaaggaggagaaggctggggtaggaaagctggaccacactaaccacaggaggagatttccggatcagaaagaatgccctcctatccacattgggcttccagtacccacttaccctc

SEQ ID NO: 693835 - DNA, 120 bp, Artificial Sequence
  ENSG00000188687_3 (sequence is synthesized)
aaagaaaaactgaccagaagggacatctttcaggcctgcaaaaagtccactggggcctgcggccagaccagccacagcaggaactgactggcccagggagtggggcaagcagccaggaca

SEQ ID NO: 693836 - DNA, 120 bp, Artificial Sequence
  ENSG00000188687_4 (sequence is synthesized)
gcagcatggatcttatcagcaggactcggtccccagctgctgagcagctccaggacatcctgggggaggaagatgaggctcccaaccccaccctctttacagagatggatactctgcagc

SEQ ID NO: 693837 - DNA, 120 bp, Artificial Sequence
  ENSG00000188687_5 (sequence is synthesized)
atgacggagaccagatggagtggaaggagtcagccaggtggataaagtttgaagaaaaggtagaggaaggcggcgaacgctggagcaagccccacgtgtccacactatccctgcacagcc

SEQ ID NO: 693838 - DNA, 120 bp, Artificial Sequence
  ENSG00000188687_6 (sequence is synthesized)
tcttcgagctccgtacctgcctgcagacggggacggtgctgctggatttggacagtggctccttaccacagatcatagatgatgtcattgagaagcagattgaggatggtctcctgcggc

SEQ ID NO: 693839 - DNA, 120 bp, Artificial Sequence
  ENSG00000188687_7 (sequence is synthesized)
cagagctccgggagagggtcagttacgtcctcctgaggaggcaccgccaccaaaccaagaagcccatccaccgctccttagctgacattgggaagtcagtctccaccacaaatcgcagtc

SEQ ID NO: 693840 - DNA, 120 bp, Artificial Sequence
  ENSG00000188687_8 (sequence is synthesized)
ctgcccggagccctggtgctggcccgagtctacaccactccacggaagacctgcggatgcggcagagtgcaaattacggacgtctgtgtcatgcccagagcagaagcatgaatgacattt

SEQ ID NO: 693841 - DNA, 120 bp, Artificial Sequence
  ENSG00000188687_9 (sequence is synthesized)
ctctcaccccaaacacagaccagcggaaaaacaaattcatgaagaagatccccaaggactcagaagcgtccaacgtgctcgtgggcgaggtggacttcctagaccagccattcatcgcgt

SEQ ID NO: 693842 - DNA, 120 bp, Artificial Sequence
  ENSG00000188687_10 (sequence is synthesized)
tcgtgcgcctcatccagtcggccatgctgggaggagtgaccgaggtgcctgtccccaccagatttctgtttatactactgggaccttctgggagagcaaaatcctacaatgaaattggcc

SEQ ID NO: 693843 - DNA, 120 bp, Artificial Sequence
  ENSG00000188687_11 (sequence is synthesized)
gtgccattgcaaccctcatggtagatgatctcttcagtgacgtggcctacaaagcccgcaatcgggaagatctgatcgcaggaattgatgaatttctggatgaggtcatcgtccttcctc

SEQ ID NO: 693844 - DNA, 120 bp, Artificial Sequence
  ENSG00000188687_12 (sequence is synthesized)
ctggagaatgggacccaaatatccggattgagccccccaagaaggtgccctctgctgacaagaggaaatctgtgttctccctagcagagctgggccagatgaatggctctgtgggaggag

SEQ ID NO: 693845 - DNA, 120 bp, Artificial Sequence
  ENSG00000188687_13 (sequence is synthesized)
gcggcggagctcctggaggaggcaatggaggtggtggtggtggtggcagtggcggcggggctggcagtggcggggccggcggaacaagcagcggggatgatggagagatgccagccatgc

SEQ ID NO: 693846 - DNA, 120 bp, Artificial Sequence
  ENSG00000188687_14 (sequence is synthesized)
atgaaatcggggaggaacttatctggacaggaaggttcttcggtggcctgtgtctggatatcaagaggaagttgccctggttcccaagtgacttctatgatggcttccacattcagtcca

SEQ ID NO: 693847 - DNA, 120 bp, Artificial Sequence
  ENSG00000188687_15 (sequence is synthesized)
tctctgccatcctattcatctacctcggctgtatcaccaacgcgatcacctttggtgggcttctgggggatgccaccgacaattatcagggagtgatggagagcttcctgggcactgcca

SEQ ID NO: 693848 - DNA, 120 bp, Artificial Sequence
  ENSG00000188687_16 (sequence is synthesized)
tggctggctccttgttctgcctcttctcgggacagcctctcatcattctcagcagcacggggcccatcctcatctttgagaagctcctcttcgacttcagcaaaggcaatggcctggact

SEQ ID NO: 693849 - DNA, 120 bp, Artificial Sequence
  ENSG00000188687_17 (sequence is synthesized)
acatggagttccgcctctggattggcctacactcagctgtccagtgccttatcctagtggccacagatgccagctttatcatcaaatatatcacccgcttcaccgaggagggcttctcca

SEQ ID NO: 693850 - DNA, 120 bp, Artificial Sequence
  ENSG00000188687_18 (sequence is synthesized)
cccttatcagcttcatcttcatctacgatgccatcaagaagatgatcggtgccttcaagtactaccctatcaatatggacttcaagccaaacttcatcactacctacaagtgcgagtgtg

SEQ ID NO: 693851 - DNA, 120 bp, Artificial Sequence
  ENSG00000188687_19 (sequence is synthesized)
tcgcccctgacacagtgaatacaaccgtgttcaatgcttcagccccattggcaccagacaccaacgcttctctgtacaacctccttaacctcacagcgttggactggtccctgctgagca

SEQ ID NO: 693852 - DNA, 120 bp, Artificial Sequence
  ENSG00000188687_20 (sequence is synthesized)
agaaggagtgtctgagctacggcgggcgcctgcttgggaattcctgcaagtttatcccagacctggcgctcatgtccttcatccttttctttgggacatactccatgaccctgaccctga

SEQ ID NO: 693853 - DNA, 120 bp, Artificial Sequence
  ENSG00000188687_21 (sequence is synthesized)
agaagttcaaattcagccgctattttcctaccaaggtccgggccctggtggctgacttttccattgttttctccatcctgatgttctgtggaatcgatgcctgttttggcctagaaactc

SEQ ID NO: 693854 - DNA, 120 bp, Artificial Sequence
  ENSG00000188687_22 (sequence is synthesized)
ccaagctgcatgtgcccagtgtcatcaagccaacgcggcctgaccgaggctggttcgtggccccctttgggaagaacccgtggtgggtatacccagcaagcatcctgcccgccctgctgg

SEQ ID NO: 693855 - DNA, 120 bp, Artificial Sequence
  ENSG00000188687_23 (sequence is synthesized)
tgaccatcctgatcttcatggaccagcagatcactgccgtcattgtcaaccggaaggagaacaaactgaagaaggctgccggctaccatctggacctgttctgggtgggcatcctcatgg

SEQ ID NO: 693856 - DNA, 120 bp, Artificial Sequence
  ENSG00000188687_24 (sequence is synthesized)
ctttgtgctcctttatggggctcccctggtacgtggctgccacggtcatctccatcgcccacatcgacagcctcaagatggagacagagaccagtgcccctggggagcagccccagtttc

SEQ ID NO: 693857 - DNA, 120 bp, Artificial Sequence
  ENSG00000188687_25 (sequence is synthesized)
ttcctctacatgggcgtggcctccctgaatggcatccagatggggaccggagggtcagaattcaaaatccagaagaagctgactccattctgggaacgctgcaagctcttcctgatgcca

SEQ ID NO: 693858 - DNA, 120 bp, Artificial Sequence
  ENSG00000188687_26 (sequence is synthesized)
gccaagcaccagccggaccatgccttcctgcggcacgtgccgctgcgccggatccacctcttcaccctggtgcagatcctctgcctggcggtgctctggatcctcaaatccacggtggct

SEQ ID NO: 693859 - DNA, 120 bp, Artificial Sequence
  ENSG00000188687_27 (sequence is synthesized)
gccatcatcttcccggtcatgatcctgggcctcatcatcgttcgaaggcttctggatttcatcttttcccagcacgacctggcctggattgacaacatcctcccagagaaggaaaaaaag

SEQ ID NO: 693860 - DNA, 120 bp, Artificial Sequence
  ENSG00000188687_28 (sequence is synthesized)
gagacagacaagaagaggaagagaaaaaaaggggcccacgaggactgtgatgaggagccccagttccctcctccctcggttataaagattcccatggaaagtgtccaatcagatccccaa

SEQ ID NO: 693861 - DNA, 120 bp, Artificial Sequence
  ENSG00000188687_29 (sequence is synthesized)
aacggtatccactgcattgccagaaaaagatcttccagttggagttactcactctgattcttccttcagtgacacagaacttgaccgaagcatcaccttgcacttcaaaatatcctgtcc

SEQ ID NO: 693862 - DNA, 120 bp, Artificial Sequence
  ENSG00000188687_30 (sequence is synthesized)
agcttcacctgctttcagctactcacggaacccagtgttcatggtgccacaggtgaagatagagatggagtcagactatgacttcacagacatggataaataccgaagagaaactgacag

SEQ ID NO: 693863 - DNA, 120 bp, Artificial Sequence
  ENSG00000188687_31 (sequence is synthesized)
tgagaccaccctctaggatgaagcagcttctcccagatgggagatggagagcctggcttagtcttcactgggagggtcttaacttctctgtgcctgtttccttctttatcaaacagaggg

SEQ ID NO: 693864 - DNA, 120 bp, Artificial Sequence
  ENSG00000188687_32 (sequence is synthesized)
agtccgtctgcctatagaaaactggagatctattgatgaaaagtattgcttagatgcaaagctctcccctttgtagtaattaaaatacctaaagctaaatattatattttattttaaaat

SEQ ID NO: 693865 - DNA, 120 bp, Artificial Sequence
  ENSG00000188687_33 (sequence is synthesized)
gcagttcagcatagaaattctaacatttctttggaaataaaaaaatgcttgtttccccaaaccatagctaagataaaggggcaatagtcaattcatatttaaaacaaatatcaatttaaa

SEQ ID NO: 693866 - DNA, 120 bp, Artificial Sequence
  ENSG00000188687_34 (sequence is synthesized)
attgtttaaaggttagatttaaatatagatgttctcaaacaaacttgtaatatacttttatgtcactagaccatctttggaatatttggcaattctgcatattaagaaatgctgaaaagg

SEQ ID NO: 693867 - DNA, 120 bp, Artificial Sequence
  ENSG00000188687_35 (sequence is synthesized)
agaaatgctgaaaaggtcctatcttttctccctgtcacatccaatttcctaagggttatatgaaaagtttgaaccagccgggcacagtggcacacgcctgtaatcctagcactttgggag

SEQ ID NO: 693868 - DNA, 62 bp, Artificial Sequence
  ENSG00000188687_36 (sequence is synthesized)
atccaaacaaaaaaaaagtttgaaccatctgcattatgggccttgctccagaagtgtgactg

SEQ ID NO: 693869 - DNA, 120 bp, Artificial Sequence
  ENSG00000188687_37 (sequence is synthesized)
aaccatctgcattatgggccttgctccagaagtgtgactggggctttcccagattgaaaagccagttccaaaactctgttaatgaaagaaccaatgcatctgagtggataaatgtttcta

SEQ ID NO: 693870 - DNA, 120 bp, Artificial Sequence
  ENSG00000188687_38 (sequence is synthesized)
aaataaaatagttcttgttaaagtgaaatttgaaaccacatgttaaatcaaaatgatcctttaaattagtatcactggtttttcatacctggaatcacatttcatgatacatttgggtgg

SEQ ID NO: 693871 - DNA, 120 bp, Artificial Sequence
  ENSG00000188687_39 (sequence is synthesized)
gtcctccctgcaaattttcaatgtttattcccaaagtcaaactcccattcatgtgaacaatacaggttagacagaggtaaggtcacattttacattacaactttgcaatattaatcaacc

SEQ ID NO: 693872 - DNA, 120 bp, Artificial Sequence
  ENSG00000188687_40 (sequence is synthesized)
tagtactttaaaggaatgattgaaaactatttgggaagataaaaaccagtttcaatgaagcaaacctattcctcatgaaacttaagatcagtcattttatcttcaatccacatttaatga

SEQ ID NO: 693873 - DNA, 120 bp, Artificial Sequence
  ENSG00000188687_41 (sequence is synthesized)
acaccaaccatgttgatttaatgcctactatgaccctgacagccacagtgcatctgacacttactttctccaaaacaactatgatttaaaccttgagtaaatcacttgaaccttgaggtt

SEQ ID NO: 693874 - DNA, 120 bp, Artificial Sequence
  ENSG00000188687_42 (sequence is synthesized)
agagttactatatttgctcaagatgacaaatgcaggtgctttcttttttaaagaaaaatgacactagatcattaacaccttgagtataggacaggtaattgcctctgtaattcccagcgt

SEQ ID NO: 693875 - DNA, 120 bp, Artificial Sequence
  ENSG00000188687_43 (sequence is synthesized)
ctagtgtagtgcctggtccatagaaagctctcaataagtgtttgattacatttaatctcagagctcccttccaagggatactgccaagaggtaaagctccaaacctctactcttactgag

SEQ ID NO: 693876 - DNA, 120 bp, Artificial Sequence
  ENSG00000188687_44 (sequence is synthesized)
agcagaatttcttagaatttccagaaccatctcctatgcttaagtataaattcttgtcagacacagtggctcacacctgtaatcccgctacttgggaggcagaggtggggggaatcagca

SEQ ID NO: 693877 - DNA, 120 bp, Artificial Sequence
  ENSG00000188687_45 (sequence is synthesized)
gaccagcctgggcaacatagtgagacccatctctaaacaaatgtttaaaaattagctaggcatgctggcacacacctgtagtcccagccatttcagaggctgatgcaggaggatcgttta

SEQ ID NO: 693878 - DNA, 89 bp, Artificial Sequence
  ENSG00000188687_46 (sequence is synthesized)
gggagacagctggaatccatgtcttataaacaataataattaatttttaaaaaaagtatttatcatccacaccaatcctggggaagcta

SEQ ID NO: 693879 - DNA, 120 bp, Artificial Sequence
  ENSG00000188687_47 (sequence is synthesized)
aaaaaagtatttatcatccacaccaatcctggggaagctaacaatccacccttaacacatttcagttttaaaacctggctgatctggaatagaactttgtccaaattaaattgtagaaat

SEQ ID NO: 693880 - DNA, 120 bp, Artificial Sequence
  ENSG00000188687_48 (sequence is synthesized)
gctatggattcaagagtaaacctgcttgattaatcaaacaagctggaaaactactgttaatttctttgttgtaaattgatcactgtaattttaccttacatgtcatttatattttgtata

SEQ ID NO: 693881 - DNA, 120 bp, Artificial Sequence
  ENSG00000188687_49 (sequence is synthesized)
tacatgaacattttaatttccatagcttttaacaggttgacataatacttctccatgcagtaagtcagtcattttttccacttgtaactgtaattcaataaaatttaatcctgtctggtc

SEQ ID NO: 693882 - DNA, 120 bp, Artificial Sequence
  ENSG00000188687_50 (sequence is synthesized)
ccaccctaaaggaattggagtcagggcccaggagccacaggccactgcactggggcatcccaggatttggaattcagctgtgagctcatgagctgatggatgtttccaggagtaccctga

SEQ ID NO: 693883 - DNA, 120 bp, Artificial Sequence
  ENSG00000188687_51 (sequence is synthesized)
gttaggtctaccccaggacatattcccatcagactttccctctccaaaaccctctatgtccacccttcccaatgtgggtggtgccaaccacaaactcagtcctacaggaattcatccctg

SEQ ID NO: 693884 - DNA, 120 bp, Artificial Sequence
  ENSG00000188687_52 (sequence is synthesized)
gccctaaatgttctggtggaaagatctttgccccatccaccctggtcaagttcctttcctcgccccagactctgcaagttcttgtaaatagccctgcccctgcactggtgttagtggtga

SEQ ID NO: 693885 - DNA, 120 bp, Artificial Sequence
  ENSG00000188687_53 (sequence is synthesized)
atctttaattaactcagtgtagcttttctctctcaaacacttttgcataatctttctcacacttacacttaccacacctatattctctctacatatagcctctctctccacctccccagt

SEQ ID NO: 693886 - DNA, 120 bp, Artificial Sequence
  ENSG00000188687_54 (sequence is synthesized)
ccttcacacattccttttctctctctctttttctcccctcaaaccccccttcttctctccccacacctcccctggtgcttaactggaaacaaaagtgagtttgttgtgtgaagaagagga

SEQ ID NO: 693887 - DNA, 120 bp, Artificial Sequence
  ENSG00000188687_55 (sequence is synthesized)
ccggatccacctcttcaccctggtgcagatcctctgcctggcggtgctctggatcctcaaatccacggtggctgccatcatcttcccggtcatgccccagttccctcctccctcggttat

SEQ ID NO: 693888 - DNA, 120 bp, Artificial Sequence
  ENSG00000188687_56 (sequence is synthesized)
gttttcttgggtgtatacccagaagtggaatttacttaattgttcttgaatagggaatacctctgtatggtggacaatataaaaggtacaagaagtcatagagttccctgagccccgacc

SEQ ID NO: 693889 - DNA, 120 bp, Artificial Sequence
  ENSG00000188687_57 (sequence is synthesized)
tccaagttcccctcccaggaagcatcactgtaaccagtttctgtgacctcttccctggagagaccatactgtacccataggcaccctctacacaggcatgatgacagccataagcactct

SEQ ID NO: 693890 - DNA, 120 bp, Artificial Sequence
  ENSG00000188687_58 (sequence is synthesized)
tacacaggcatgatgacagccataagcactcttctacactttccctttttcctacttaacaatatttcttttttaaaaatttaaaaatctatttatttttttcttcaacttttattttaa

SEQ ID NO: 693891 - DNA, 120 bp, Artificial Sequence
  ENSG00000188687_59 (sequence is synthesized)
tggtggtttgctgcacagatcatcccattacctagatattaagcccagcaaatattagctgttcttcctgatgctctccctcccctaacaatatttctaaaaaaatcattccatagcacc

SEQ ID NO: 693892 - DNA, 120 bp, Artificial Sequence
  ENSG00000188687_60 (sequence is synthesized)
ctaaaaaaatcattccatagcaccatttaaagaatatcctcattctatttaaaaggttcatcgttttccaaagtagagacaaaacttgtttttctttctttcttttttaaaatcagtcct

SEQ ID NO: 693893 - DNA, 120 bp, Artificial Sequence
  ENSG00000188687_61 (sequence is synthesized)
ttattcatggacattcaggttgtttccaatgttttgccactgtgaacaatgctcggatgataacagccagcatttcctgaatgcttaccatgtgccaggcccttgttaaaatccttccca

SEQ ID NO: 693894 - DNA, 120 bp, Artificial Sequence
  ENSG00000188687_62 (sequence is synthesized)
tgtatcatatttaattctcactacaactgtgacataagcacagggaggtgagtaactgtcccaaaccacatctctgtttttgtccacaggtgggagtgtaagataaccttccagataaag

SEQ ID NO: 693895 - DNA, 120 bp, Artificial Sequence
  ENSG00000188690_0 (sequence is synthesized)
ttccacaagcatttgattgccttcttcttgtgtaccgtccccatcggaaattgcttaggaagagtctttgagatctaattaagatctgtttccttgctctgtcgcagtgccctataagga

SEQ ID NO: 693896 - DNA, 120 bp, Artificial Sequence
  ENSG00000188690_1 (sequence is synthesized)
ctgccaggcaataatgaaggttcttttactgaaggatgcgaaggaagatgactgtggccaggatccgtatatcagggaattaggattatatggacttgaagccactttgatccctgtttt

SEQ ID NO: 693897 - DNA, 120 bp, Artificial Sequence
  ENSG00000188690_2 (sequence is synthesized)
atcgtttgagtttttgtctcttcccagtttctctgagaagctttctcatcctgaagattacgggggactcatttttaccagccccagagcagtggaagcagcagagttatgtttggagca

SEQ ID NO: 693898 - DNA, 120 bp, Artificial Sequence
  ENSG00000188690_3 (sequence is synthesized)
aaacaataaaactgaagtctgggaaaggtctctgaaagaaaaatggaatgccaagtcagtgtatgtggttggaaatgctactgcttctctagtgagtaaaattggcctggatacagaagg

SEQ ID NO: 693899 - DNA, 120 bp, Artificial Sequence
  ENSG00000188690_4 (sequence is synthesized)
agaaacctgtggaaatgcagaaaagcttgcagaatatatttgttccagggagtcctcagcactgcctcttctatttccctgtggaaacctcaaaagagaaatcctgccaaaagcgctcaa

SEQ ID NO: 693900 - DNA, 120 bp, Artificial Sequence
  ENSG00000188690_5 (sequence is synthesized)
atggaaagcataactgtgtatcagacagttgcacacccaggaatccaagggaacctgaacagctactattcccagcagggggttccagccagcatcacattttttagtccctctggcctc

SEQ ID NO: 693901 - DNA, 120 bp, Artificial Sequence
  ENSG00000188690_6 (sequence is synthesized)
acatacagtctcaagcacattcaggagttatctggtgacaatatcgatcaaattaagtttgcagccatcggccccactacggctcgcgcgctggccgcccagggccttcctgtaagctgc

SEQ ID NO: 693902 - DNA, 120 bp, Artificial Sequence
  ENSG00000188690_7 (sequence is synthesized)
actgcagagagccccacgccacaagccctggccactggcatcaggaaggctctccagccccatggctgctgctgagtcagccacctagcgctggccccatgcagcctccctgggctgggc

SEQ ID NO: 693903 - DNA, 120 bp, Artificial Sequence
  ENSG00000188690_8 (sequence is synthesized)
tggctctggatggagccaggcatcggcaagggctctcgggagctgctgccgtcagactcctgcctcaagcctgagtggaagcacctgaggaccggggatcgggacctgacctggggctgg

SEQ ID NO: 693904 - DNA, 120 bp, Artificial Sequence
  ENSG00000188690_9 (sequence is synthesized)
cctcaggcccacgtgcacgtgactgccctctgtggaagccagcttaaaccctagccctgtgagagcttcctgtgcccagcaggaaggaagtcaaataaaccacactgactacctgtgctt

SEQ ID NO: 693905 - DNA, 120 bp, Artificial Sequence
  ENSG00000188690_10 (sequence is synthesized)
ccacgcgaccccagtctgaggtgcggggtcctggggcccggcgcgggtggccgccgcggcccctcgggctgcgtggggagggggcttccgcccctgttgtcattgctcctgcagcctttt

SEQ ID NO: 693906 - DNA, 120 bp, Artificial Sequence
  ENSG00000188690_11 (sequence is synthesized)
cgcccctgttgtcattgctcctgcagccttttcgctgggactgcgcgacaccgccccccgaccgggtgcccgctgtgtgccaggccgggtgctgggcacggtcccgcgagtgccctataa

SEQ ID NO: 693907 - DNA, 120 bp, Artificial Sequence
  ENSG00000188690_12 (sequence is synthesized)
actggagcagaggatgccagcatcagccgggaaccactcctgtgctaaaaccgccttggtggcctgtggcttgagggggttccagccagcatcacattttttagtccctctggcctcaca

SEQ ID NO: 693908 - DNA, 120 bp, Artificial Sequence
  ENSG00000188690_13 (sequence is synthesized)
tacagtctcaagcacattcaggagttatctggtgacaatatcgatcaaattaagatgaggagatggaggccagagaggatgggccacgggccaaggtcattgtcctgtggagctgggatt

SEQ ID NO: 693909 - DNA, 120 bp, Artificial Sequence
  ENSG00000188690_14 (sequence is synthesized)
taaatcccaaccctgtgcccacagagccctgaccttgatggctctactttcttggggattcagtcactgcccctgccacaccatcctccccttgatcagacccagggcccccaacacccg

SEQ ID NO: 693910 - DNA, 120 bp, Artificial Sequence
  ENSG00000188690_15 (sequence is synthesized)
gcaggatgtgacccagagcccaaggacagacactgccactcactgcagtcaggaagagcaaaaggcttcacctgccttctcacaggtgcatctcatgtggggagtatgcaccgctctccc

SEQ ID NO: 693911 - DNA, 120 bp, Artificial Sequence
  ENSG00000188690_16 (sequence is synthesized)
agttttaaagatggagcacggggctcagagacatcatatggcctgtctgtaggtcacactgctgagaaggaagagctgcagttgaacctgggaagactgattccacattgtcagccatgg

SEQ ID NO: 693912 - DNA, 120 bp, Artificial Sequence
  ENSG00000188690_17 (sequence is synthesized)
tgatgccttgccatggtctcaggagctgctgagcagttgatgcacttctgggcagtaactgatacaattctcacaccagtccagtggtgggtatccagaaaaagaggtcagtgttcctca

SEQ ID NO: 693913 - DNA, 120 bp, Artificial Sequence
  ENSG00000188690_18 (sequence is synthesized)
ttacaggtgaggacactgagggctagagaggtgaaacaacttgccaaagtcatgttttgagttcctagaaggcccaggactcacacaggtcaccgaggaagaaaaacaatatctgaatct

SEQ ID NO: 693914 - DNA, 120 bp, Artificial Sequence
  ENSG00000188690_19 (sequence is synthesized)
tgtggttagaaagattagagagaggccgggcgctgtggctcccacctggaatcccagcactttgggaggcctcaggcggatcacctgaggtcaggtgttccagaccagcctgtccaatat

SEQ ID NO: 693915 - DNA, 90 bp, Artificial Sequence
  ENSG00000188690_20 (sequence is synthesized)
gtgacaagagtgaaactccgtacctgccccttaaagagataggacccataaagtgcttagcatggcaactggtccatatgaccagcgctt

SEQ ID NO: 693916 - DNA, 120 bp, Artificial Sequence
  ENSG00000188690_21 (sequence is synthesized)
aagtgcttagcatggcaactggtccatatgaccagcgcttacgtcatattgcaggtcaggatgggtcacggtgctggtcctgctctggttcttgtccctctgtgccctgctgcctctccc

SEQ ID NO: 693917 - DNA, 120 bp, Artificial Sequence
  ENSG00000188690_22 (sequence is synthesized)
ctgggcctgtaggaggagtccccacctccaccccacccacccacccccaagtcacacaatgctgtgagatgcctggtggtataagcctaacacagttttccccaagcttcttagtgtttg

SEQ ID NO: 693918 - DNA, 120 bp, Artificial Sequence
  ENSG00000188690_23 (sequence is synthesized)
cctagaggaagaacaaaagatttatactctatcttctttcaaagtgagcatatttaaaagcacaaatggatactcagcatctgaaccaagaactcaggcctttctgaatagactgctgcc

SEQ ID NO: 693919 - DNA, 120 bp, Artificial Sequence
  ENSG00000188690_24 (sequence is synthesized)
ttctgcagccctccagacactctgaggagctctcagtagccccctcgcctcttactacagtgattgattaccctgcctgccagtagttaacacctctgccattgctgaggaggagaaagt

SEQ ID NO: 693920 - DNA, 120 bp, Artificial Sequence
  ENSG00000188690_25 (sequence is synthesized)
gacagagctggccttgctcacagtgactatggactgcttgggggccacgaaggcactgtgtgtgggttgtgagttgtccctcgacactgggacttggcgctggatagtgaggtgctttca

SEQ ID NO: 693921 - DNA, 120 bp, Artificial Sequence
  ENSG00000188690_26 (sequence is synthesized)
aggttcacagaggacacagtcctagcccgtgagttggtagttaggcttttctgtctcagctcagcctcagatttgctactgtcctccctccccaggagtccctgtagggcccactgtttg

SEQ ID NO: 693922 - DNA, 120 bp, Artificial Sequence
  ENSG00000188690_27 (sequence is synthesized)
tacagcattgcacaacatgcaggcgcaccacaaaagatcaaagggggtgacttccgacctgaacttgctacttatccattgacttgggaagaccacgcacttgtctataaatgccacaga

SEQ ID NO: 693923 - DNA, 120 bp, Artificial Sequence
  ENSG00000188690_28 (sequence is synthesized)
gatgtcactgcaaagcagtaggtaagcagattcgtaatcaccaccaccacactaatggcagcagctgaatttcctgtgtacagcaaaatgcccttgcagcctgtgaggtgggtatcttca

SEQ ID NO: 693924 - DNA, 120 bp, Artificial Sequence
  ENSG00000188690_29 (sequence is synthesized)
cacctagtgctcactagccacagtggcagagccaggctgtgaacgtggctgctgcccccaaagccaggctggtgcactcacgtccagtttgtgccagggatggagaaagaacgttgatgc

SEQ ID NO: 693925 - DNA, 120 bp, Artificial Sequence
  ENSG00000188690_30 (sequence is synthesized)
tgggccccctcgcctggcctggggaagactgctgctctgtggggcagcatcatgtgagcattcattgacacaggagtgaaaggctcctgtgaaaaagctgctgtttcaccaaactgttga

SEQ ID NO: 693926 - DNA, 120 bp, Artificial Sequence
  ENSG00000188690_31 (sequence is synthesized)
tacccctgctctaggactacagtcatgtttgccatttgctggttcccagtcccagggagtttctttttttcaaatttttaaatagctttattgagatgtaattcacaaaccataaaattt

SEQ ID NO: 693927 - DNA, 120 bp, Artificial Sequence
  ENSG00000188690_32 (sequence is synthesized)
acaaaccataaaatttactttttatgattttaatatgtaaacttaaaaattttttttttatttttttagagatggggtctcactgtgttgcctaggctgatctcaaactcctggcctcaa

SEQ ID NO: 693928 - DNA, 120 bp, Artificial Sequence
  ENSG00000188690_33 (sequence is synthesized)
aggtgtgagccaccacgcccagcccaatatgtaaactttaacatgatttttatgagagtcacagatttgtgcaaccatcaccactgtctagttccaggacatatcatcaccccaaagaga

SEQ ID NO: 693929 - DNA, 120 bp, Artificial Sequence
  ENSG00000188690_34 (sequence is synthesized)
ggacatatcatcaccccaaagagaaacccggtacccattcgcagccacccctcattccctcattcctcccactccttggcaaccactcaactgtttttcatctccatggatttacctatt

SEQ ID NO: 693930 - DNA, 120 bp, Artificial Sequence
  ENSG00000188690_35 (sequence is synthesized)
ccggacatctcatattaatagaatcatacagtatgtggtcttttgtaactgactcttttcactagcatagtgttttcaaggttcatccatgctgtagctggtaccagtacttcatccctt

SEQ ID NO: 693931 - DNA, 120 bp, Artificial Sequence
  ENSG00000188690_36 (sequence is synthesized)
tttagtgccaaataatagtacatgctgaggaccgttttatttacccattcactagttgatggatatttggattgttttccactttcaggctattaaataatgctaaacattcaaatacaa

SEQ ID NO: 693932 - DNA, 120 bp, Artificial Sequence
  ENSG00000188690_37 (sequence is synthesized)
gtgcaactggccccccaggcccagaggggctagcagtgagaactgaagatgttccctctggaccttccggccacagctcattgatgggacatgttctcagacagtgttgtaagttttgtg

SEQ ID NO: 693933 - DNA, 120 bp, Artificial Sequence
  ENSG00000188690_38 (sequence is synthesized)
tgctttaactcatgagttacacgtggtcactcacttaatgagttaagcgttaatacaacttccctgtgaatagaaggtaacaaaataaaaacattgtgttgtatacaagtcttcagaaaa

SEQ ID NO: 693934 - DNA, 120 bp, Artificial Sequence
  ENSG00000188690_39 (sequence is synthesized)
atgacattggggaaagaaagttttctggaacaaggtgacactgtgggcacaaaaactatcccaactctagacttcttgagtgtaaaagacatatcgacttctatcttgtttaagccacta

SEQ ID NO: 693935 - DNA, 120 bp, Artificial Sequence
  ENSG00000188690_40 (sequence is synthesized)
ttactacgagattttttcttttacaatcaaatctaaatgataaaataatcaagtgaattggtagagtaaacatcaagataaaccgtttccgagtttgaataaaatgcccttttaagaaaa

SEQ ID NO: 693936 - DNA, 120 bp, Artificial Sequence
  ENSG00000188690_41 (sequence is synthesized)
actgatacaattctcacaccagtccagtgtttgcagccatcggccccactacggctcgcgcgctggccgcccagggccttcctgtaagctgcactgcagagagccccacgccacaagccc

SEQ ID NO: 693937 - DNA, 120 bp, Artificial Sequence
  ENSG00000188690_42 (sequence is synthesized)
aatgaagccatttattttttgttgacctcacaaccactacctagggaaaagaatatttcctcagtgcattcttggtggtgagattgattggtgagcatcgtataacccactctgggagca

SEQ ID NO: 693938 - DNA, 120 bp, Artificial Sequence
  ENSG00000188690_43 (sequence is synthesized)
tagcctatttgtatttgtgtatgtctatactttgtgaggtttagcccacttccttctaccccctgtaccaaagaacttgacttgaacataacacaaaataaaacatttgggagataaaaa

SEQ ID NO: 693939 - DNA, 120 bp, Artificial Sequence
  ENSG00000188690_44 (sequence is synthesized)
aaaaaaaaaagaaagaaagaaagaaaagctctcaacaaagagagggattctccaagcaggtttctccctcattattgaataccaggggtaccacacatgagctgatgaggccaggctcct

SEQ ID NO: 693940 - DNA, 120 bp, Artificial Sequence
  ENSG00000188690_45 (sequence is synthesized)
cccctgcgtaaggtgcgaatcctagtgactccgccccgttcccccagcacgcacacgaggatgcccaggtaaaccataggtagtatcggaaaaggcaacatttgattggttaaaaggcat

SEQ ID NO: 693941 - DNA, 120 bp, Artificial Sequence
  ENSG00000188690_46 (sequence is synthesized)
tattcggaaagaatcaattgggaaagggcagacaaacgggcagacgttctgcccctgggtcgctggtttcatctgggaccagcaatctggtctttcagacttcaggctgttctgggcttg

SEQ ID NO: 693942 - DNA, 120 bp, Artificial Sequence
  ENSG00000188690_47 (sequence is synthesized)
aaggtgaggtctcaccggggacccttccctatctgcctaggcatttgtctgcctcctgcttgtatcatcattttcttaattgcctgcagtgactttatcaagccccctcctgagctgcgt

SEQ ID NO: 693943 - DNA, 120 bp, Artificial Sequence
  ENSG00000188690_48 (sequence is synthesized)
aataataatactgtgttaggattttcagtgttattactcatcatcagcccggacagcccagaattccaggccttcttcctgttaaacgaacggagagcagagcctttgagctccacagtt

SEQ ID NO: 693944 - DNA, 120 bp, Artificial Sequence
  ENSG00000188690_49 (sequence is synthesized)
cactatctctgtgtcagccttaaccatcccattggcctgttggggctgaagataaatccccaggcattaagcatattccaaaagggaataactcctttgtctttggctttttgaagtggg

SEQ ID NO: 693945 - DNA, 120 bp, Artificial Sequence
  ENSG00000188690_50 (sequence is synthesized)
ctagttttcaggacatgtagttgtagatctctcctcaccagcaaaggaggactcagccaggacattttcaattttctcctttctgctgacagggtggtgccttttcagtgaagtcagctg

SEQ ID NO: 693946 - DNA, 120 bp, Artificial Sequence
  ENSG00000188690_51 (sequence is synthesized)
agctggttggacatttgtgggccctgtgtgcctgcagagccaagctctctgcaaggcacaggtggtggagagatagagacaagcagctgccctcagggagccgcgtaccccttcggccca

SEQ ID NO: 693947 - DNA, 120 bp, Artificial Sequence
  ENSG00000188690_52 (sequence is synthesized)
gccttgtgagtcagagataagaatgagcagctcaggactccactggaccctcacaagaggtgctgccaagggaagattcctgactctttccaaggcccctcgcacacctgtggggctggg

SEQ ID NO: 693948 - DNA, 120 bp, Artificial Sequence
  ENSG00000188690_53 (sequence is synthesized)
cttgctgaaaaactggactgtagttctcttactggatccccaggaagagctttggcccctaacatcttccaccctgcattccccaacacacacatagacacacagaaacggggaagaaaa

SEQ ID NO: 693949 - DNA, 120 bp, Artificial Sequence
  ENSG00000188690_54 (sequence is synthesized)
ttgcctctgaacatggctttgaaaatatgtctctagggatgcagagcatgaaaacatttcctcgcactggaagagagaaatcagcaggcatctattaacgaatttaacaatctcccaatt

SEQ ID NO: 693950 - DNA, 120 bp, Artificial Sequence
  ENSG00000188690_55 (sequence is synthesized)
cattattttattttatgttggtacagatatttacagagcagtttaaataaagaaaacattcaccagtatgtagcctttatacacttgaaattaagtggcctgcagttattcctgttgttt

SEQ ID NO: 693951 - DNA, 120 bp, Artificial Sequence
  ENSG00000188690_56 (sequence is synthesized)
ggctgctgcttgctagaggtggtactggatggaaaggggttgttttgctccttcctctcgttgtagtcaccagagaagatgtgatcagagagatcataaggatgtgagaaaatatacaat

SEQ ID NO: 693952 - DNA, 120 bp, Artificial Sequence
  ENSG00000188690_57 (sequence is synthesized)
cacatttggggaagattctggcatttgacaacttatcagcttttttggacagtattgttgcaaattggcattcaaatcctatgctgtcctcactattctgcaaagagttaagggctgaaa

SEQ ID NO: 693953 - DNA, 120 bp, Artificial Sequence
  ENSG00000188690_58 (sequence is synthesized)
atgcccttaagtcttcccagagtggagatgctgggagcagaggttgtggtgaaaggagaggcaggccgttcttagcaggcttctctctctaaggcctgtgcattcgccttttggcacttg

SEQ ID NO: 693954 - DNA, 120 bp, Artificial Sequence
  ENSG00000188690_59 (sequence is synthesized)
gcctagtggctgttggtgtggctagaagaggagtgggcagtgagcttgtctttgttgggggtggctgcagagccactcctggctgccggttaccggctgcctcctgagcatgagccctgg

SEQ ID NO: 693955 - DNA, 120 bp, Artificial Sequence
  ENSG00000188690_60 (sequence is synthesized)
ctcatctggagcctctttaaaggtagaaaatgtttgccccagtgccagtcagcaccaggcctgatcttcaccttcctgacttagttaaggtgcaaagtctgccttctaaatagtgactgc

SEQ ID NO: 693956 - DNA, 120 bp, Artificial Sequence
  ENSG00000188690_61 (sequence is synthesized)
aggctagggagtcacttcaggatcagaaggagttaaaagaatgtggctaacttgtttgtgtggatgttcattttctgagcacctccacacacattacctcttatgatcttcatataacaa

SEQ ID NO: 693957 - DNA, 120 bp, Artificial Sequence
  ENSG00000188690_62 (sequence is synthesized)
cccttcaagttcggcaaggtagcaggtgctcttcctgtttacagatgctgaaactgagtcctagaagcagagccaggcctggagcccagggctgcttcccccttcccaaagctgcccctc

SEQ ID NO: 693958 - DNA, 120 bp, Artificial Sequence
  ENSG00000188690_63 (sequence is synthesized)
acctgcgcaccttttgctgtcacatagttagtctgggagcaaagtctatcagtggtttggagtaccagctttcggatgagataaaaacagatttgaattctccctcttgctgtttattag

SEQ ID NO: 693959 - DNA, 120 bp, Artificial Sequence
  ENSG00000188690_64 (sequence is synthesized)
aaggaatcttttgaagtgaagaaagtgggtttggacgtgcccttatgctgatgaatcattggagtaatatctggggtttagccgcatccttggtggcaaggcggtggggaaagcccctga

SEQ ID NO: 693960 - DNA, 120 bp, Artificial Sequence
  ENSG00000188690_65 (sequence is synthesized)
tcgtgccatctcagacctaccctccctacctgggctgtacctaaagagatactgctaggctttctctagaatgtttcatgagccagcactgtgagacattttcaagctaaaaacatacag

SEQ ID NO: 693961 - DNA, 120 bp, Artificial Sequence
  ENSG00000188690_66 (sequence is synthesized)
ttcaggagactgtaatctgtggtagaaagtgttcaccatttgctgctagtaaagacggttggccctgtgcttctctggccacttgtgccacatggtgttctcggaagaggcctctccatg

SEQ ID NO: 693962 - DNA, 120 bp, Artificial Sequence
  ENSG00000188690_67 (sequence is synthesized)
caccagtgtggagaagccctctggaggccaattcaaagagcatctgaggctaagcaactgaaaggaaaaggcctgatggccaacgtgttgctttctgtggaatgttccagactggattgc

SEQ ID NO: 693963 - DNA, 120 bp, Artificial Sequence
  ENSG00000188690_68 (sequence is synthesized)
tgggggtcattttctttaacagcagcctagacaggcagtgactctcttttattcagccaggtgttgaaatagctgcagggaagccacagacagttgttccagctttccggatcagagagc

SEQ ID NO: 693964 - DNA, 120 bp, Artificial Sequence
  ENSG00000188690_69 (sequence is synthesized)
actggttgggccccgtgccatgtggccccagccccatgggatcgctcctcaggtcatggagccacacatcagtgtggagggttcgctccaggggttcctggtacaggatgcagatgggtc

SEQ ID NO: 693965 - DNA, 120 bp, Artificial Sequence
  ENSG00000188690_70 (sequence is synthesized)
ttgtctggctccaggctttttgtttctaatgttgtttctagagagtcatcatcaccgcataaatggtatcaaagcccttcttttaaaaatgtagaaataaatgtaaatggtagatcttga

SEQ ID NO: 693966 - DNA, 120 bp, Artificial Sequence
  ENSG00000188690_71 (sequence is synthesized)
cctctggccaggcagacacagacctggggcagcaccagctttctgatggcagcctgctctttccaacagttccctaccagaatcctgcctcactggagcagaggatgccagcatcagccg

SEQ ID NO: 693967 - DNA, 120 bp, Artificial Sequence
  ENSG00000188690_72 (sequence is synthesized)
ggaaccactcctgtgctaaaaccgccttggtggcctgtggcttgaggtcttgatgcggatgaagccggaggaatgttgtctctcctcagtctcatggcaaggactgatcttgttttctgt

SEQ ID NO: 693968 - DNA, 120 bp, Artificial Sequence
  ENSG00000188691_0 (sequence is synthesized)
atgacattacccagcaacaactccacttccccagtctttgaattcttcctcatttgtttccccagtttccagagctggcagcactggctgtctctgcccctcagcctcctcttcctcctg

SEQ ID NO: 693969 - DNA, 120 bp, Artificial Sequence
  ENSG00000188691_1 (sequence is synthesized)
gccatgggggccaatgccacccttctgatcaccatctatctggaagcctctctgcaccagcccctgtactacctgctcagcctcctctccctgctggacatcgtactctgcctcaccgtc

SEQ ID NO: 693970 - DNA, 120 bp, Artificial Sequence
  ENSG00000188691_2 (sequence is synthesized)
atccccaaggtcctggccatcttctggtttgacctcagatcaatcagcttccctgcctgcttccttcaggtgttcatcatgaacagttttctgactatggagtcctgcacattcatgatc

SEQ ID NO: 693971 - DNA, 120 bp, Artificial Sequence
  ENSG00000188691_3 (sequence is synthesized)
aatggccttcttactatgcctatccccatactttcttctcgactcagatactgtgcaggacacatcatcaagaactgcatctgtactaacgtgtctgtgtctaaactctcttgtgatgac

SEQ ID NO: 693972 - DNA, 120 bp, Artificial Sequence
  ENSG00000188691_4 (sequence is synthesized)
atcaccttgaatcagagctaccagtttgttataggttggaccctgctgggctctgacctcatccttattgttctctcttacttttttatcttgaaaactgtgctaaggattaagggtgag

SEQ ID NO: 693973 - DNA, 120 bp, Artificial Sequence
  ENSG00000188691_5 (sequence is synthesized)
ggagatatggccaaagctctaggtacttgtggttcccacttcatcctcatcctcttcttcaccacagtcctgctggttctggtcatcactaacctggccaggaagagaattcctccggat

SEQ ID NO: 693974 - DNA, 120 bp, Artificial Sequence
  ENSG00000188691_6 (sequence is synthesized)
gtccccatcctgctcaacatcctgcaccaccttattcccccagctctgaaccccattgtttatggtgtgagaaccaaggagatcaagcagggaatccagaacctgctgaggaggttgtaa

SEQ ID NO: 693975 - DNA, 120 bp, Artificial Sequence
  ENSG00000188694_0 (sequence is synthesized)
gcacagcgaccactgagcatgcctgcaggctccatgtctactacaggctatcctggggtctgcagtaccacatcatacagaactcactgttatatcccagtgacctcttctgttactctt

SEQ ID NO: 693976 - DNA, 120 bp, Artificial Sequence
  ENSG00000188694_1 (sequence is synthesized)
agctccagtgatttaagccctacctttggacactgcttacccagtagctaccaaggaaatctctggctcctggattactgccaagaatcctacggtgaagcaccaacctgcaaatctccc

SEQ ID NO: 693977 - DNA, 120 bp, Artificial Sequence
  ENSG00000188694_2 (sequence is synthesized)
agctgtgagcccaagacctgcagtaccactggttgtgacccgtcaaactcctctgtgccctgcaactccccatcagcaggccaagtcttcagtgtctgtgaaactaccaacgtcagcccc

SEQ ID NO: 693978 - DNA, 120 bp, Artificial Sequence
  ENSG00000188694_3 (sequence is synthesized)
agccccagctgcagcccaagcacccagaccaatgggtatgtatgcaattgccacatacccactcgaaatgcatccaaagcctgccaaaccctccgcaacggttccaactgctttggacaa

SEQ ID NO: 693979 - DNA, 120 bp, Artificial Sequence
  ENSG00000188694_4 (sequence is synthesized)
cttaactgcttatccaagagtttccaaactctaaaccactgcagattgagtactttggggtataaaagctaccaaaatccttgcttcatacccagctacgtctcaccattatgttatatt

SEQ ID NO: 693980 - DNA, 120 bp, Artificial Sequence
  ENSG00000188694_5 (sequence is synthesized)
tccaacagctgccaaccccaaagctatttagtgagaaattatcactattcaagctacaggcctacgagctgccgaccactgagctatttatctagaagcttcagatctctgagctatata

SEQ ID NO: 693981 - DNA, 120 bp, Artificial Sequence
  ENSG00000188694_6 (sequence is synthesized)
gcagctggaaattgcccaatggggaagattctactaagtactagaacgtctaattttctgctgaatctctttattcagcctaagaatcttgttacattaagttcaaatacaactcccagg

SEQ ID NO: 693982 - DNA, 120 bp, Artificial Sequence
  ENSG00000188694_7 (sequence is synthesized)
tttattaaccacagccagtatcacctgctaggttttcttttttctgttgttctgttattgctctttgtactaaaagctgaccctgaaggtaacatcattatttctgagatttattacaat

SEQ ID NO: 693983 - DNA, 120 bp, Artificial Sequence
  ENSG00000188694_8 (sequence is synthesized)
ggacttaccgaagagactccatttgaaatacaaccatcaccggctttcttactttggctgtcactgtcacttgtctgacagtgtgattatcacctacctttcctgatgaaatggggcctc

SEQ ID NO: 693984 - DNA, 120 bp, Artificial Sequence
  ENSG00000188694_9 (sequence is synthesized)
catggtttgactgcagattccagcatgcaaattcattcggatggctttgattgtcattaatatttttgtcaactacctaactagcaccttgctaataagccgatagaaaacactatcttg

SEQ ID NO: 693985 - DNA, 120 bp, Artificial Sequence
  ENSG00000188694_10 (sequence is synthesized)
agcataataagttgaactatttcatccttttcttactgattgattgtaagaacaggcaaatagcaatggtgactagagctcaaaaatagaagacttcagcaaatcttctcttccagagaa

SEQ ID NO: 693986 - DNA, 120 bp, Artificial Sequence
  ENSG00000188694_11 (sequence is synthesized)
gccataaaacaagattcactggtactcagcttttgttctccatgcctaagaaaaagcctcagaattagctaaagcatgaaaattatttgttgaaagaagaacaaatactgttagagaccc

SEQ ID NO: 693987 - DNA, 120 bp, Artificial Sequence
  ENSG00000188694_12 (sequence is synthesized)
tttacaattatgtgtaatctgcgtttaggattctcctatcatcttgccttgccaatttattgcattctgactctggaaaatgtcctagttcttagttaataaacaaatttctgtctggaa

SEQ ID NO: 693988 - DNA, 120 bp, Artificial Sequence
  ENSG00000188706_0 (sequence is synthesized)
ccatttggccagtggtgggcggttgccacagctggtttagggccccgaccactggggccccttgtcaggaggagacagcctcccggcccggggaggacaagtcgctgccacctttggctg

SEQ ID NO: 693989 - DNA, 120 bp, Artificial Sequence
  ENSG00000188706_1 (sequence is synthesized)
ccgacgtgattccctgggacggtccgtttcctgccgtcagctgccggccgagttgggtctccgtggttcaggccggctcccccttcctggtctcccttctcccgctgggccggtttatcg

SEQ ID NO: 693990 - DNA, 120 bp, Artificial Sequence
  ENSG00000188706_2 (sequence is synthesized)
ggaggagattgtcttccagggctagcaattggacttttgatgatgtttgacccagcggcaggaatagcaggcaacgtgatttcaaagctgggctcagcctctgtttcttctctcgtgtaa

SEQ ID NO: 693991 - DNA, 120 bp, Artificial Sequence
  ENSG00000188706_3 (sequence is synthesized)
tcgcaaaacccattttggagcaggaattccaatcatgtctgtgatggtggtgagaaagaaggtgacacggaaatgggagaaactcccaggcaggaacaccttttgctgtgatggccgcgt

SEQ ID NO: 693992 - DNA, 120 bp, Artificial Sequence
  ENSG00000188706_4 (sequence is synthesized)
catgatggcccggcaaaagggcattttctacctgacccttttcctcatcctggggacatgtacactcttcttcgcctttgagtgccgctacctggctgttcagctgtctcctgccatccc

SEQ ID NO: 693993 - DNA, 120 bp, Artificial Sequence
  ENSG00000188706_5 (sequence is synthesized)
tgtatttgctgccatgctcttccttttctccatggctacactgttgaggaccagcttcagtgaccctggagtgattcctcgggcgctaccagatgaagcagctttcatagaaatggagat

SEQ ID NO: 693994 - DNA, 120 bp, Artificial Sequence
  ENSG00000188706_6 (sequence is synthesized)
agaagctaccaatggtgcggtgccccagggccagcgaccaccgcctcgtatcaagaatttccagataaacaaccagattgtgaaactgaaatactgttacacatgcaagatcttccggcc

SEQ ID NO: 693995 - DNA, 120 bp, Artificial Sequence
  ENSG00000188706_7 (sequence is synthesized)
tccccgggcctcccattgcagcatctgtgacaactgtgtggagcgcttcgaccatcactgcccctgggtggggaattgtgttggaaagaggaactaccgctacttctacctcttcatcct

SEQ ID NO: 693996 - DNA, 120 bp, Artificial Sequence
  ENSG00000188706_8 (sequence is synthesized)
ttctctctccctcctcacaatctatgtcttcgccttcaacatcgtctatgtggccctcaaatctttgaaaattggcttcttggagacattgaaagaaactcctggaactgttctagaagt

SEQ ID NO: 693997 - DNA, 120 bp, Artificial Sequence
  ENSG00000188706_9 (sequence is synthesized)
cctcatttgcttctttacactctggtccgtcgtgggactgactggatttcatactttcctcgtggctctcaaccagacaaccaatgaagacatcaaaggatcatggacagggaagaatcg

SEQ ID NO: 693998 - DNA, 120 bp, Artificial Sequence
  ENSG00000188706_10 (sequence is synthesized)
cgtccagaatccctacagccatggcaatattgtgaagaactgctgtgaagtgctgtgtggccccttgccccccagtgtgctggatcgaaggggtattttgccactggaggaaagtggaag

SEQ ID NO: 693999 - DNA, 120 bp, Artificial Sequence
  ENSG00000188706_11 (sequence is synthesized)
tcgacctcccagtactcaagagaccagtagcagcctcttgccacagagcccagcccccacagaacacctgaactcaaatgagatgccggaggacagcagcactcccgaagagatgccacc

SEQ ID NO: 694000 - DNA, 120 bp, Artificial Sequence
  ENSG00000188706_12 (sequence is synthesized)
tccagagcccccagagccaccacaggaggcagctgaagctgagaagtagcctatctatggaagagacttttgtttgtgtttaattagggctatgagagatttcaggtgagaagttaaacc

SEQ ID NO: 694001 - DNA, 120 bp, Artificial Sequence
  ENSG00000188706_13 (sequence is synthesized)
tgagacagagagcaagtaagctgtcccttttaactgtttttctttggtctttagtcacccagttgcacactggcattttcttgctgcaagcttttttaaatttctgaactcaaggcagtg

SEQ ID NO: 694002 - DNA, 120 bp, Artificial Sequence
  ENSG00000188706_14 (sequence is synthesized)
gcagaagatgtcagtcacctctgataactggaaaaatgggtctcttgggccctggcactggttctccatggcctcagccacagggtccccttggaccccctctcttccctccagatccca

SEQ ID NO: 694003 - DNA, 120 bp, Artificial Sequence
  ENSG00000188706_15 (sequence is synthesized)
gccctcctgcttggggtcactggtctcattctggggctaaaagtttttgagactggctcaaatcctcccaagctgctgcacgtgctgagtccagaggcagtcacagagacctctggccag

SEQ ID NO: 694004 - DNA, 120 bp, Artificial Sequence
  ENSG00000188706_16 (sequence is synthesized)
gggatcctaactgggttcttggggtcttcaggactgaagaggagggagagtggggtcagaagattctcctggccaccaagtgccagcattgcccacaaatccttttaggaatgggacagg

SEQ ID NO: 694005 - DNA, 120 bp, Artificial Sequence
  ENSG00000188706_17 (sequence is synthesized)
taccttccacttgttgtatttattagtgtagcttctcctttgtctcccatccactctgacacctaagccccactcttttcccattagatatatgtaagtagttgtagtagagataataat

SEQ ID NO: 694006 - DNA, 120 bp, Artificial Sequence
  ENSG00000188706_18 (sequence is synthesized)
tgacatttctcgtagactacccagaaacttttttaatacctgtgccattctcaataagaatttatgagatgccagcggcatagcccttcacactctctgtctcatctctcctcctttctc

SEQ ID NO: 694007 - DNA, 120 bp, Artificial Sequence
  ENSG00000188706_19 (sequence is synthesized)
ttaatttgtttttccttttgactcctgctcccattaggagcaggaatggcagtaataaaagtctgcactttggtcatttcttttcctcagaggaagcctgagtgctcacttaaacactat

SEQ ID NO: 694008 - DNA, 120 bp, Artificial Sequence
  ENSG00000188706_20 (sequence is synthesized)
cccctcagactccctgtgtgaggcctgcagaggccctgaatgcacaaatgggaaaccaaggcacagagaggctctcctctcctctcctctcccccgatgtaccctcaaaaaaaaaaaaat

SEQ ID NO: 694009 - DNA, 120 bp, Artificial Sequence
  ENSG00000188706_21 (sequence is synthesized)
gctaaccagttcttccattaagcctcggctgagtgagggaaagcccagcactgctgccctctcgggtaactcaccctaaggcctcggcccacctctggctatggtaaccacactgggggc

SEQ ID NO: 694010 - DNA, 120 bp, Artificial Sequence
  ENSG00000188706_22 (sequence is synthesized)
ttcctccaagccccgctcttccagcacttccaccggcagagtcccagagccacttcaccctgggggtgggctgtggcccccagtcagctctgctcaggacctgctctatttcagggaaga

SEQ ID NO: 694011 - DNA, 120 bp, Artificial Sequence
  ENSG00000188706_23 (sequence is synthesized)
agatttatgtattatatgtggctatatttcctagagcacctgtgttttcctctttctaagccagggtcctgtctggatgacttatgcggtgggggagtgtaaaccagaacttttcatcta

SEQ ID NO: 694012 - DNA, 120 bp, Artificial Sequence
  ENSG00000188706_24 (sequence is synthesized)
tttgaaggcgattaaactgtgtctaatgcaaacttcctgcctcctccttcccccttccatttcaagaatatgtttgtgtgtagggtgggggtgggggttggaaggggttgcttgttactc

SEQ ID NO: 694013 - DNA, 120 bp, Artificial Sequence
  ENSG00000188706_25 (sequence is synthesized)
cccaaacttccattaaccagggcacccttgggttggagaggtagttccaaactctccattgatctatactacattctgggctgaaggttttcttattctggactatgaagaaaggacttt

SEQ ID NO: 694014 - DNA, 120 bp, Artificial Sequence
  ENSG00000188706_26 (sequence is synthesized)
caaggagatatagtgtgaacaggatcaggaaggtagagggattatatttacttaagagaacaagctctatattaggatattgttttgaagcagatggatgccgttaattgctaataagtc

SEQ ID NO: 694015 - DNA, 120 bp, Artificial Sequence
  ENSG00000188706_27 (sequence is synthesized)
ttagttattaacgcaggctcatcagggcccccccttggaaatatttgatcagtggtcttttacaagtgatggtatatatttctttctaggtggtgtataatcaagactccctatcaattc

SEQ ID NO: 694016 - DNA, 120 bp, Artificial Sequence
  ENSG00000188706_28 (sequence is synthesized)
ccatctcatacttcccagttaattggaattaatgaaatttggctgctcccagacctttttccatgtcttcctttttccttttaacaggatttaagttgagcattcttgagagagagagag

SEQ ID NO: 694017 - DNA, 120 bp, Artificial Sequence
  ENSG00000188706_29 (sequence is synthesized)
agagagagattggaagagagatggggagagactgactcagatccctctcctgtctgcttctttttctggttctctcagttttttttcttgaagttataaagccaaacctggagaatttgt

SEQ ID NO: 694018 - DNA, 120 bp, Artificial Sequence
  ENSG00000188706_30 (sequence is synthesized)
aagttgttaggtttccccaggtaacttggcactcatatgaaccccattttaataagtactcagcccatctcctctcctgggctcagatggctctctctcctccctcaccttacctcaagt

SEQ ID NO: 694019 - DNA, 120 bp, Artificial Sequence
  ENSG00000188706_31 (sequence is synthesized)
gttctcctgaggacccttaggtcagacagagaagctttctctttctgatgggaagggtcaaagtggaaatctcttatctctagtgtgaaatgattttctgctttttcatactccctgccc

SEQ ID NO: 694020 - DNA, 120 bp, Artificial Sequence
  ENSG00000188706_32 (sequence is synthesized)
tctttcttttccttaataaatcttccatgtttaagatgttggcctgaagatctgtcccattcataccatgcaccagctgggactgtccctatctgatcagaggggagattaaagaatcaa

SEQ ID NO: 694021 - DNA, 120 bp, Artificial Sequence
  ENSG00000188706_33 (sequence is synthesized)
tgttcccaggggaaaagggccttaaattgtttggtcttttcaatggctgacactgtctccaactctccccttcctccttcttcctcaagcttcctatgcaccctactttcccaggccagg

SEQ ID NO: 694022 - DNA, 120 bp, Artificial Sequence
  ENSG00000188706_34 (sequence is synthesized)
atggttggcactgatcccaaacctctgggggcaggtggaaattggctgtggtgagccatttcttcatgtccattcagctctgaggccttcctggccctagctgagatcatcatctcctcc

SEQ ID NO: 694023 - DNA, 120 bp, Artificial Sequence
  ENSG00000188706_35 (sequence is synthesized)
tttgcttttaccccaggagtgaggttgggttagaggtggattctgattccgtagcagctaaattccattctccctgtcctgaccatcctgcctttacccataaagcacccgttcctactg

SEQ ID NO: 694024 - DNA, 120 bp, Artificial Sequence
  ENSG00000188706_36 (sequence is synthesized)
accaaatctctttactttgttggagaaaaaaagtattttgtttttaaatctattttctaatttaaatgcaatttaatatgtaaatctctgcacttttgtgtgagcctacaaatgtgtatg

SEQ ID NO: 694025 - DNA, 120 bp, Artificial Sequence
  ENSG00000188706_37 (sequence is synthesized)
tgttgggggtttttcactctctggtatttcttaataaagaaatctttcttttggggggaagccaattaatgaaggagccttgaatggttttagaaatacagggctgtctgtttctttgtg

SEQ ID NO: 694026 - DNA, 120 bp, Artificial Sequence
  ENSG00000188706_38 (sequence is synthesized)
tggcggagtcagggcgggcctcgagaggccgcgcccgcggctcggccccggactccggcctccggcctccggccccccgctggggagccggtcgctgcttcccgacggattttgatcttt

SEQ ID NO: 694027 - DNA, 120 bp, Artificial Sequence
  ENSG00000188706_39 (sequence is synthesized)
caagaatttccagataaacaaccagattgtgaaactgaaatactgttacacatgcaagatcttccggcctccccgggcctcccattgcagcatctgtgacaactgtgtggattttcctgt

SEQ ID NO: 694028 - DNA, 120 bp, Artificial Sequence
  ENSG00000188706_40 (sequence is synthesized)
actggattttcatgtgggacccaccttacatagtgggaggagacacctagtccactggagggcagcattgaggaaggaaggtctgtctaagacgcaacccaagaagaggaaagttgctag

SEQ ID NO: 694029 - DNA, 120 bp, Artificial Sequence
  ENSG00000188706_41 (sequence is synthesized)
tgggcactgtgctaagtgatttacctttctctcatttaagacttgtaacagccccatgagattggtattatccccattttacggatgaggaaataggtgaagcaccagtatgtaagttca

SEQ ID NO: 694030 - DNA, 120 bp, Artificial Sequence
  ENSG00000188706_42 (sequence is synthesized)
cataattagtatgagattaagctagagcaggtctgattccaaactgcttatttcttctctttgctgctgctgcaagagggtcaggtatatgtgtgtctaatacagtggtctgtacttcca

SEQ ID NO: 694031 - DNA, 120 bp, Artificial Sequence
  ENSG00000188706_43 (sequence is synthesized)
tccacatatatgtggctttgttgtaatcactgcctactgtgtgctaaaccctggccaagatgagaaatgggccataaagattcctgttgataggcctatatgtgaaattgcttatatcat

SEQ ID NO: 694032 - DNA, 120 bp, Artificial Sequence
  ENSG00000188707_0 (sequence is synthesized)
aagaaataaccaaaaaatgggtaaccagtagccctggagctgctctgcctatggagtagccatccttttacttctttgctttcttaataaacttgttttcactttactctatgggcttgc

SEQ ID NO: 694033 - DNA, 120 bp, Artificial Sequence
  ENSG00000188707_1 (sequence is synthesized)
cttgcatgagatccaagaaccctctcttagggcctggatcgggacccctttctgataacaccaggagacaccctgggtggatttcctgaaccgaccgatagatgagccttccacgcggga

SEQ ID NO: 694034 - DNA, 120 bp, Artificial Sequence
  ENSG00000188707_2 (sequence is synthesized)
ttccacgcgggagacctggatccttatcgtctttgtggccccttccatctgcacgtgcggacgaggtccgggtcgcactcgggcggtcagcctggcacgcacagcgccggcgtgcagggg

SEQ ID NO: 694035 - DNA, 120 bp, Artificial Sequence
  ENSG00000188707_3 (sequence is synthesized)
gccttgggtgccaccgagtccgggaggaaatctaggccgccatccgtccggagactggcacctgtgaccaccacccaacatgtattgaacaagggcttggaggtcctttctctaaggccg

SEQ ID NO: 694036 - DNA, 120 bp, Artificial Sequence
  ENSG00000188707_4 (sequence is synthesized)
caccgataaacgattaccgactgttgacctcacggccccttcgcttccggccgcaccgcctcgctgcccacgcctgcgcactcaggcaccgcagattcatttggattcaaggttggctct

SEQ ID NO: 694037 - DNA, 120 bp, Artificial Sequence
  ENSG00000188707_5 (sequence is synthesized)
caacagtgccagctgcactgtcatcctaaagtacttctgtggaagagaacatggtggtgtcactgttgtaccagtgatgacacaaaatcccagatctacctgacgggcctgcgagggttg

SEQ ID NO: 694038 - DNA, 120 bp, Artificial Sequence
  ENSG00000188707_6 (sequence is synthesized)
aagattgtgaagcaatagcctaagttaccgtgatgctgaatcagcgctgcagcagggcaggacgctggctgtgcacaccacatgaagaggccctctcttacggggctcccttgaacccaa

SEQ ID NO: 694039 - DNA, 120 bp, Artificial Sequence
  ENSG00000188707_7 (sequence is synthesized)
gaatttggaaacgttaagaattttagttcttgcttcatatatccttccctggacagcacaggatgggtacaggggcactggtcttaaaatttagcgttcccaagtcacgtcttttacgaa

SEQ ID NO: 694040 - DNA, 120 bp, Artificial Sequence
  ENSG00000188707_8 (sequence is synthesized)
tacacacgcataccctctgttgtggatggtaggcctagcacagtccagtgaaggacggacctggtgtgtgaagcaagtcccatgccctaggattaggaaaccctcacctaaccgtggtgt

SEQ ID NO: 694041 - DNA, 120 bp, Artificial Sequence
  ENSG00000188707_9 (sequence is synthesized)
cccttggtgtctctgcaccttagtctaattttcaatcttccactagccagagatcaagtcttgatgctatccagttgaaacctagtctcccgtgaaacattttcaaggtcggggggtttc

SEQ ID NO: 694042 - DNA, 120 bp, Artificial Sequence
  ENSG00000188707_10 (sequence is synthesized)
aggaggacactgtggcagaaaagccaagtctctggcaaacatgaggtagttcaataggctgggtcctccatatagttgctcttcgtggttagaaaaacaaccagaagtattcctgctatg

SEQ ID NO: 694043 - DNA, 120 bp, Artificial Sequence
  ENSG00000188707_11 (sequence is synthesized)
caggcctggagcttctgccgacttatccctgaggttgctcagtacctgagaagagtaaagagtgagggaccgagattaaagtagacaacagcacaaacaacattaaggggaataaaagct

SEQ ID NO: 694044 - DNA, 120 bp, Artificial Sequence
  ENSG00000188707_12 (sequence is synthesized)
aagatgcacggacgtatcggtgacacagctagtgctgtgggcacccgggagacgggggaccgaggtacggtatccaagggagcgaatcagtcccatcgcactggcctggagctgggtggg

SEQ ID NO: 694045 - DNA, 120 bp, Artificial Sequence
  ENSG00000188707_13 (sequence is synthesized)
gtgagtgtgggagccgcaggtctgcagcggtcccccagccacactctctgcctgtctccgccacccattgcttgggacacttcccagcaccctgtcccaagagtgggctgtgaggaaaca

SEQ ID NO: 694046 - DNA, 120 bp, Artificial Sequence
  ENSG00000188707_14 (sequence is synthesized)
agatgtgagtaaagcctggcctgcccatgaggaatttcctccctcagaaggtagtggctgtgggttgggtccgtcatctggcctcatgcttaatcatttcactccagcatgggaaatatt

SEQ ID NO: 694047 - DNA, 120 bp, Artificial Sequence
  ENSG00000188707_15 (sequence is synthesized)
atgattacctgtccttcttaaaaaggaaaacaacttccctgtccaggccacttttgaaagctggagattctaggggtagtgcctcagacaaagcatgtaggctcctgagtgatttccccc

SEQ ID NO: 694048 - DNA, 120 bp, Artificial Sequence
  ENSG00000188707_16 (sequence is synthesized)
agctgccctcgtttgcatttggatagagcttggttggagttccaagggctgatgctgggaaccttgctctggatgcgaggcctgcccctggagggagccgcggaggactggcagctgcag

SEQ ID NO: 694049 - DNA, 120 bp, Artificial Sequence
  ENSG00000188707_17 (sequence is synthesized)
atgctggagcaggccagcctgtggctgggccgtagcttcctgctggcaggcttcctggtatcgagcagctgccccagcctggagcaggcggccaagggtgagggctgttcccccatccct

SEQ ID NO: 694050 - DNA, 120 bp, Artificial Sequence
  ENSG00000188707_18 (sequence is synthesized)
tgtttcgcccactgcctcgactccctggtgagaaactttctgtgtcaccctcacagtgtccagatcatcctgggcactgccagggccacctgcagccatttctaaggctctgtggaggcc

SEQ ID NO: 694051 - DNA, 120 bp, Artificial Sequence
  ENSG00000188707_19 (sequence is synthesized)
cagggactcctcacccagctccagcgccagcgcagcctcctagcccaccagccctttgaggagctcttggaccactgggtctcggcctaccacctgctggagtggctggtggagcagcag

SEQ ID NO: 694052 - DNA, 120 bp, Artificial Sequence
  ENSG00000188707_20 (sequence is synthesized)
agctggggaaggctggtgttgccttgtcggccacattctggagcccggcagacagcctcagcaagctcctgtagcccttccagatggtggtccgcgaggcgagtgcggcacaggcctctc

SEQ ID NO: 694053 - DNA, 120 bp, Artificial Sequence
  ENSG00000188707_21 (sequence is synthesized)
tgagccaggtgctgccccagctgcgctacctgcacatcttcctggagcaggttcacacacactttcaggagcagagtgtcggggagaggggcgcagccatccagctggctgaggggttgg

SEQ ID NO: 694054 - DNA, 120 bp, Artificial Sequence
  ENSG00000188707_22 (sequence is synthesized)
cccggcagctctgcaccgactgtcagctcaacaagctcttctaccgcgaggagtttgtgctggccaccttgctggacccttgcttcaaggggaagattgaggccatcctgccatgggggc

SEQ ID NO: 694055 - DNA, 120 bp, Artificial Sequence
  ENSG00000188707_23 (sequence is synthesized)
cgaccgacattgaccactggaagcaagtcctcgtgtacaaggtgaaggagattagagtgtctgaatactctttgaactccccaagtcccctgcaaagccccaggggtctgtgcgtggacc

SEQ ID NO: 694056 - DNA, 120 bp, Artificial Sequence
  ENSG00000188707_24 (sequence is synthesized)
ccaccagggtagccaagagctccggggtggaggggagaagccagggggagcctctgcagagcagcagccactctggggccttcctgctggcccagagggagaagggcttgctggagagca

SEQ ID NO: 694057 - DNA, 120 bp, Artificial Sequence
  ENSG00000188707_25 (sequence is synthesized)
tggggctgctggcctctgagagaagcgggggctcgctgtccaccaagagccactgggccagcatcattgtcaagaagtatctgtgggagaatgagaccgttggagcccaggatgaccccc

SEQ ID NO: 694058 - DNA, 120 bp, Artificial Sequence
  ENSG00000188707_26 (sequence is synthesized)
tggcttactgggagaagaagcgagaagcctggccaccatctatctgtcttaccccccacaggagccttctctgaaagcatctttgcctccctgaacagccccacccttgtagagcaaaac

SEQ ID NO: 694059 - DNA, 120 bp, Artificial Sequence
  ENSG00000188707_27 (sequence is synthesized)
tcttctctcaaggtggaagccattgagcatctcctcttcttgaaggccaacctggagcagttccccaactacaccccgcctcccctcatctgctctagtggtgacctggccaaggggata

SEQ ID NO: 694060 - DNA, 120 bp, Artificial Sequence
  ENSG00000188707_28 (sequence is synthesized)
cagaccctgcagtccgctcagggtgggatggcagacatggcaggtgccggtgctcaccctgcccgtgaactcctagagagcccctgcctgtaataggtcaaagcagagagctgggtgttg

SEQ ID NO: 694061 - DNA, 120 bp, Artificial Sequence
  ENSG00000188707_29 (sequence is synthesized)
catcctgggcgccacatgctcatggccagaatcttaaacctatttggtaggaaagggtcagtttctcacttgacagattgccatatttttttttctgggagatgtcattttccatctccc

SEQ ID NO: 694062 - DNA, 120 bp, Artificial Sequence
  ENSG00000188707_30 (sequence is synthesized)
gattacttcctttacgtctagcagtatgtgccgagaagaggcttactctcttcgtaggtgactgtgaattttgtactacgtggctttgtacatgtgatgctctgttaaaacataagtggg

SEQ ID NO: 694063 - DNA, 120 bp, Artificial Sequence
  ENSG00000188707_31 (sequence is synthesized)
tatgaaggtccttgcatacaccttgtctgtgtggataagtggacacatgcccttaagaggcttgctttctcaaaaagtggccaaggatgtggagtgggcatgtgctggcaggtgggatat

SEQ ID NO: 694064 - DNA, 120 bp, Artificial Sequence
  ENSG00000188707_32 (sequence is synthesized)
gtcctcagcctttgggggcctggataagctattgcagcactttctgaggctttcactgtagggagaaggaaaccccaagggtagaatagccatttccagagggaagtacacacatacccc

SEQ ID NO: 694065 - DNA, 120 bp, Artificial Sequence
  ENSG00000188707_33 (sequence is synthesized)
cacacaccagtctttttgggggtttcagagtggccggagaaaccgactgaagggactgaccagctagctaggagagctgagacgccagtcctcaaatggcgttcttaccaatagtctatt

SEQ ID NO: 694066 - DNA, 120 bp, Artificial Sequence
  ENSG00000188707_34 (sequence is synthesized)
tccagactactggaaacgttggggtttcttcctccagtgacagcagcctcagtagctttcctgggctccaggcggctggctgcacaccctgcctgccatcacccttgcccctgcttgtcc

SEQ ID NO: 694067 - DNA, 120 bp, Artificial Sequence
  ENSG00000188707_35 (sequence is synthesized)
tggaccacttttaaaggggaagtcccttatttggaagagagaaaggatgtgtgtagcacacactcatcatggattgctcagagttcctttagggcagagctgagggcctgggatccagga

SEQ ID NO: 694068 - DNA, 120 bp, Artificial Sequence
  ENSG00000188707_36 (sequence is synthesized)
accagtgggattggatgggagaagaaggaagggggtggcccgtcacccccgcaagacttgcatccaggtagcctaaggactcctggtcactgggtagggtggctgctgagatgcaggtcg

SEQ ID NO: 694069 - DNA, 120 bp, Artificial Sequence
  ENSG00000188707_37 (sequence is synthesized)
gaagaggcaggggaaggctccaggcctaacttggagcatgtcactggccatgggggtgaggggacagactctgctctcactggctggcagccccaggagcctgttcccttgcctctcctg

SEQ ID NO: 694070 - DNA, 120 bp, Artificial Sequence
  ENSG00000188707_38 (sequence is synthesized)
gatgggttgtcagccctgtgtttcactgtgaccaattcattataacatttggatattactgaaaatgtaaggaagcaggaaaaattaactactttcattcagagatagcctctatcaata

SEQ ID NO: 694071 - DNA, 120 bp, Artificial Sequence
  ENSG00000188707_39 (sequence is synthesized)
gtttgacatttttccctcttttacattgagatcataccctaggtactgtttagtatgcaatattttcattttcgcagtataataattgcacctgttaaataaagttttgtaaacatttaa

SEQ ID NO: 694072 - DNA, 120 bp, Artificial Sequence
  ENSG00000188707_40 (sequence is synthesized)
ggaggaacgtaccaactgcgaggcggggggtgcgcgcgaagacccccgcaggctgcgcttccggaagtaacccctggcgcatcccggaatccagagcgcccactacggcctttggccagg

SEQ ID NO: 694073 - DNA, 120 bp, Artificial Sequence
  ENSG00000188707_41 (sequence is synthesized)
cctttggccaggccccctgggcgcgttccgggagctcaggcctgcggcgctgggagaagcacgctggccaacaagttgggtggtgggcacgcggcccaggggtcaggggccgccaggcgg

SEQ ID NO: 694074 - DNA, 120 bp, Artificial Sequence
  ENSG00000188710_0 (sequence is synthesized)
atggtaaggccttaccccctgatctacttcctcttcctgccgctgggcgcctgcttccctctactggacagaagagagcccacagacgccatgggtggcctcggagctggagaacgctgg

SEQ ID NO: 694075 - DNA, 120 bp, Artificial Sequence
  ENSG00000188710_1 (sequence is synthesized)
tggctgagagcttcacagccacaggccctgcttgtcatagccagggggctgcagacatcgggcagagagcatgctggctgcagattccgcttcgggaggcaggacgaaggcagtgaggcc

SEQ ID NO: 694076 - DNA, 120 bp, Artificial Sequence
  ENSG00000188710_2 (sequence is synthesized)
accggcttcctccctgctgcgggggagaagaccagcggcccgttagggaacctggctgaggagctcaatggctacagcaggaagaaaggcggcttcagcttccgcttcggtcggcggtga

SEQ ID NO: 694077 - DNA, 120 bp, Artificial Sequence
  ENSG00000188710_3 (sequence is synthesized)
cacaggacaggggcacctcaggccatcggaggcagccctggcctgggggatggaagctggttctggccagcaaagctcagtcatcggcttcaatccgcagaccctccgcccgaacctggg

SEQ ID NO: 694078 - DNA, 120 bp, Artificial Sequence
  ENSG00000188710_4 (sequence is synthesized)
cgctcagccccgaagtggaggatcgagattccagtgccttcctcaggtctctggggaagtgtccacaggctctctattcccatgacttctgatcccccagcagccgggatgcagggggca

SEQ ID NO: 694079 - DNA, 120 bp, Artificial Sequence
  ENSG00000188710_5 (sequence is synthesized)
gcccgcctgccctctcatcagactacatcctgtgtgaggttgtttttatcaacgcggtcagcactgcccctcttcaacaacagcgtccccaatggaatcccagggtcaggaatgcgcagc

SEQ ID NO: 694080 - DNA, 120 bp, Artificial Sequence
  ENSG00000188710_6 (sequence is synthesized)
aggcagtcggcagagcagcaagcgcaccgcgggccatataaagcagggagagcccaggggccatgcctcctggacgaggacccagagcagctctgcccagcccagccccggagcccagcg

SEQ ID NO: 694081 - DNA, 120 bp, Artificial Sequence
  ENSG00000188710_7 (sequence is synthesized)
gggccaggacgccttggaaggatttgcttcttggactcacccccattgtcttcactcctgccttctcccccagtctcaaagaccacgacacccagatgatgtaggcttggttacgatgaa

SEQ ID NO: 694082 - DNA, 120 bp, Artificial Sequence
  ENSG00000188710_8 (sequence is synthesized)
cgatccatggtaggacaggttaggtgtgtgcttacttttgatttccaactttgctgaagcgaaaaactaggcagtgtcaaaaaggaggctgtcttggagcctcggtcgtcccagcctctc

SEQ ID NO: 694083 - DNA, 120 bp, Artificial Sequence
  ENSG00000188710_9 (sequence is synthesized)
tcttcccctggggctttgactccgagcagccccctggccccaggggcacggagctgaggctgtggctgggccatgagtgtgaatagcagagcgaggcagcgggctgagtgcttacagttg

SEQ ID NO: 694084 - DNA, 120 bp, Artificial Sequence
  ENSG00000188710_10 (sequence is synthesized)
ggtaatcaaagttgtgacagtctctataggcacgactgcggctgacatcagagtgcaaatgagtgcattccactgggtacagaggatggttctgaaagttaaaaatgggaaaaaagaacc

SEQ ID NO: 694085 - DNA, 120 bp, Artificial Sequence
  ENSG00000188710_11 (sequence is synthesized)
cgatccccttctccatgccatgagcacaagatccccctggcaagaagcccctgctgtggtttgcctgcccctctgaccgcagcccttctccgcggcccagtgttagcccggccaggagtc

SEQ ID NO: 694086 - DNA, 120 bp, Artificial Sequence
  ENSG00000188710_12 (sequence is synthesized)
tcctgggagatgcgttgggaaggaatcccgtttttgctatagcaaggttgcatttcacatgttcaaaatcagaatatgtcgtgtgtatcttttcaaataaaagttgtgacaactgcaaaa

SEQ ID NO: 694087 - DNA, 120 bp, Artificial Sequence
  ENSG00000188716_0 (sequence is synthesized)
atgacatctggagaagtgaagacaagcctcaagaatgcctactcatctgccaagaggctgtcgccgaagatggaggaggaaggggaggaggaggactactgcacccctggagcctttgag

SEQ ID NO: 694088 - DNA, 120 bp, Artificial Sequence
  ENSG00000188716_1 (sequence is synthesized)
ctggagcggctcttctggaagggcagtccccagtacacccacgtcaacgaggtctggcccaagctctacattggcgatgaggcgacggcgctggaccgctataggctgcagaaggcgggg

SEQ ID NO: 694089 - DNA, 120 bp, Artificial Sequence
  ENSG00000188716_2 (sequence is synthesized)
cgcgacatggacatccagtaccacggcgtggaggccgacgacctgcccaccttcgacctcagtgtcttcttctacccggcggcagccttcatcgacagagcgctaagcgacgaccacagt

SEQ ID NO: 694090 - DNA, 120 bp, Artificial Sequence
  ENSG00000188716_3 (sequence is synthesized)
aagatcctggttcactgcgtcatgggccgcagccggtcagccaccctggtcctggcctacctgatgatccacaaggacatgaccctggtggacgccatccagcaagtggccaagaaccgc

SEQ ID NO: 694091 - DNA, 120 bp, Artificial Sequence
  ENSG00000188716_4 (sequence is synthesized)
tgcgtcctcccgaaccggggctttttgaagcagctccgggagctggacaagcagctggtgcagcagaggcgacggtcccagcgccaggacggtgaggaggaggatggcagggagctgtag

SEQ ID NO: 694092 - DNA, 120 bp, Artificial Sequence
  ENSG00000188725_0 (sequence is synthesized)
gccttcctgcttccggtctggcggtgagtggggagtgggatccgatcccgtggggctatgtaggggaagttggtggctgcagctgccgtggttttctcctggtgtccagcagaaacggcg

SEQ ID NO: 694093 - DNA, 120 bp, Artificial Sequence
  ENSG00000188725_1 (sequence is synthesized)
gcggcgcaaggtgtggctgggccaacccaggatctcccaggaccctccgctctgcgcgacaaggggcccgcgcttgccaaggccgacgggcaggagtgaacgtggcctccgtgggtctgc

SEQ ID NO: 694094 - DNA, 120 bp, Artificial Sequence
  ENSG00000188725_2 (sequence is synthesized)
agccccgataggccaattgtacagaatttaaaccgtctctcagatgtgtacagtagaactcaagaagacagactaccaagggtcatctgaagtcgtgattgggtcactaataacaccagg

SEQ ID NO: 694095 - DNA, 120 bp, Artificial Sequence
  ENSG00000188725_3 (sequence is synthesized)
acaaagttaagggatcactactcaagcataagccccagttttcataagactgctgtgaagatgtttgatataaaggcttgggctgagtatgttgtggaatgggctgcaaaggacccctat

SEQ ID NO: 694096 - DNA, 120 bp, Artificial Sequence
  ENSG00000188725_4 (sequence is synthesized)
ggcttccttacaaccgttattttggcccttactccactgttcctagcaagtgctgtactgtcttggaaattggccaagatgattgaggccagggagaaggagcaaaagaagaagcaaaaa

SEQ ID NO: 694097 - DNA, 120 bp, Artificial Sequence
  ENSG00000188725_5 (sequence is synthesized)
cgccaagaaaacattgcaaaagctaaacgactaaaaaaggattgaaggactgaacaggctttgcaaccagaggaaaatcatttggaaaattacacagctttggaagaatccactaaagtt

SEQ ID NO: 694098 - DNA, 120 bp, Artificial Sequence
  ENSG00000188725_6 (sequence is synthesized)
tcttctttggatttcttgacagtatgatttagtaaatgaaatttgaccaaatggaagaatcatgttagttctgacctcaatactatagtaacttttaggcgtgggtgtagaagtttatag

SEQ ID NO: 694099 - DNA, 120 bp, Artificial Sequence
  ENSG00000188725_7 (sequence is synthesized)
gtttctattgacagttattgtaaattagcatttactgtggtacaaattctttataactgacttagtcatttgccgcttagcagtttatatactgaaatgaaaacatcttgtggggaaaag

SEQ ID NO: 694100 - DNA, 120 bp, Artificial Sequence
  ENSG00000188725_8 (sequence is synthesized)
tgactttagattatgaactcaattcaaatgaactctatttaaaatggggtcctattttggacaaaggaaattaagaatgtaaaagtcagaacagtcttgaggtaaaaagtgtgctttggc

SEQ ID NO: 694101 - DNA, 120 bp, Artificial Sequence
  ENSG00000188725_9 (sequence is synthesized)
ttaaaagggatacagtatattaattacatcttttattattattgtttatttcttagaatcatttctggctttctcaaaacaaaataatattaatgagtacttctatttgctgcatttttc

SEQ ID NO: 694102 - DNA, 120 bp, Artificial Sequence
  ENSG00000188725_10 (sequence is synthesized)
ttattacagcctttgagacagctggtaattataagtcattttccattttttaaaacataattttataaagaattctcttatctcgactatgtagaataccacctactggacagaacaatt

SEQ ID NO: 694103 - DNA, 120 bp, Artificial Sequence
  ENSG00000188725_11 (sequence is synthesized)
tttgtactcacaaacactgccattttcttagagatggcttgagaggagtaacactatggtttaaagcttgcagtaaaaatgccaaacactgtagtaccttggaacccagtttattcttgt

SEQ ID NO: 694104 - DNA, 120 bp, Artificial Sequence
  ENSG00000188725_12 (sequence is synthesized)
gaactgtaaaatagttaaaatgtcttatcaagtaattcgccgattacaaagacaccatttgttttttatttcattctttgttttaactcatgtggtagtgatatttaatactttctgatc

SEQ ID NO: 694105 - DNA, 120 bp, Artificial Sequence
  ENSG00000188725_13 (sequence is synthesized)
aaacaggttcaaagtaaaacgttaaatttcacatttcttttaaagaactcttaaagtgtaacagttacgccatacttcataagtggtaaagaaaggtataaaatttggaaacattttgtt

SEQ ID NO: 694106 - DNA, 120 bp, Artificial Sequence
  ENSG00000188725_14 (sequence is synthesized)
gggcatagtagtgattgggtgaaaaggataaattatatcaaaatgagaatgtgctgtaattggaagtagggagctaaaggatgtttctttcagtttagtagaactggaacgttttactat

SEQ ID NO: 694107 - DNA, 120 bp, Artificial Sequence
  ENSG00000188725_15 (sequence is synthesized)
taaacatggcttttataaatgcatggtccaataattttattcactgttagtatttaattcactgtcagcttattaatgttttctgtacccattaatgaattttaaattacaaaaaattgt

SEQ ID NO: 694108 - DNA, 120 bp, Artificial Sequence
  ENSG00000188725_16 (sequence is synthesized)
ctagcagctacagtttaaaaatgaaactagacattaaaataaatttgataattttttataaagaggtcctggattttttttttttttttggaggaactaacattttaagttacattatgt

SEQ ID NO: 694109 - DNA, 120 bp, Artificial Sequence
  ENSG00000188725_17 (sequence is synthesized)
tatgcaagttagaatttcagttacagctaagcatacttgtaaaatttcaggactgtatctctcagaacctaaggaccactgagaatgtttatggaccagtttgaataacacttaatgcta

SEQ ID NO: 694110 - DNA, 120 bp, Artificial Sequence
  ENSG00000188725_18 (sequence is synthesized)
ttcttttagattatcagtctctacttggtgccagtgtgagcaacacattataactcaaggcactgaaattattcagtgttaagatatatctataatatgtttggttttctgcaatcaagc

SEQ ID NO: 694111 - DNA, 120 bp, Artificial Sequence
  ENSG00000188725_19 (sequence is synthesized)
tgttcatggaaagaatttatgtacatgttttacttagggtcacattttagagtaaaagtattgaagcaaaggatatagtcataattctcagttacctactaaagttatggtttcatcagt

SEQ ID NO: 694112 - DNA, 120 bp, Artificial Sequence
  ENSG00000188725_20 (sequence is synthesized)
tctgttgtaacaacttaaaggtatttaaaggtctgtttttctataatttattagtcttaacacatgccagttttgtatttgtttgacatatgctttttttttccacttttttccatcatt

SEQ ID NO: 694113 - DNA, 81 bp, Artificial Sequence
  ENSG00000188725_21 (sequence is synthesized)
ctggagtatagagaatattgtgaggtttgggattcttcagaaaaatcacctctcactgcaacagagtactgttgttaaaga

SEQ ID NO: 694114 - DNA, 120 bp, Artificial Sequence
  ENSG00000188725_22 (sequence is synthesized)
aaaatcacctctcactgcaacagagtactgttgttaaagaatcccatttgctattatctagaatacttttaagaaattgtttacttattacattgtttctgaagttctgagaactaagta

SEQ ID NO: 694115 - DNA, 120 bp, Artificial Sequence
  ENSG00000188725_23 (sequence is synthesized)
caatcaattaccattctaaagctggtcttgggggagaaagaaagctgtcccctggctgcctctaacaaacattttatcaaaaatcagcaaataaataaaagtttgtatgtcagaacttga

SEQ ID NO: 694116 - DNA, 120 bp, Artificial Sequence
  ENSG00000188729_0 (sequence is synthesized)
atgctggactggagattggcaagtgcacatttcatcctggctgtgacactgacactgtggagctcaggaaaagtcctctcagtagatgtaacaacaacagaggcctttgattctggagtc

SEQ ID NO: 694117 - DNA, 120 bp, Artificial Sequence
  ENSG00000188729_1 (sequence is synthesized)
gccactgacctgacagcaaaactcttgcttcttgatgaattggtgtccctagaaaatgatgtgattgagacaaagaagaaaaggagtttctctggttttgggtctccccttgacagactc

SEQ ID NO: 694118 - DNA, 120 bp, Artificial Sequence
  ENSG00000188729_2 (sequence is synthesized)
tcagctggctctgtagatcacaaaggtaaacagaggaaagtagtagatcatccaaaaaggcgatttggtatccccatggatcggattggtagaaaccggctttcaaattccagaggctaa

SEQ ID NO: 694119 - DNA, 120 bp, Artificial Sequence
  ENSG00000188729_3 (sequence is synthesized)
tgtagatcacaaaggtaaacagagatgcaacttccttgggtgaaatgtcacagcaatatggaagatgcttcactgaagttattcacacttcttaatgattaaacttttaaggaactgacc

SEQ ID NO: 694120 - DNA, 120 bp, Artificial Sequence
  ENSG00000188729_4 (sequence is synthesized)
ttctgcaaatcctttccaaagcttgaacttcagtccatcacattacagcattgttacagcttcaattaaattgtgtaaatcattttgatgcacgtacattttaaaattatatattttaat

SEQ ID NO: 694121 - DNA, 120 bp, Artificial Sequence
  ENSG00000188729_5 (sequence is synthesized)
tattcaagaatggttaacttccccttaaaccttacttttaaaaataataattaaatacacaatacagtgaaatgccttctgtatggatttaccatgcacatgtttgtagtcaaagaataa

SEQ ID NO: 694122 - DNA, 120 bp, Artificial Sequence
  ENSG00000188729_6 (sequence is synthesized)
taacaaaagacagatttgcttctgtaaaatttagttataatctgtccattattggggaatgaggaaaggcaatgctgtgtattttctgttgagtactttcacttccctgtattccatttt

SEQ ID NO: 694123 - DNA, 120 bp, Artificial Sequence
  ENSG00000188729_7 (sequence is synthesized)
tccaagagtctgatcggtaataattatgaaattaggcttctcttttcatattcaagtttcagtcatgttcagaaaaataaaacacagccccaatgagcctattgacttagaattaagaaa

SEQ ID NO: 694124 - DNA, 120 bp, Artificial Sequence
  ENSG00000188729_8 (sequence is synthesized)
gtgaaggacattactcatttgtcaaacttagatatcacttgtcccctaaaaactttccatttttctaaattctgacagttaagagcagtagtgtctcattaggaggggagtaagctcaca

SEQ ID NO: 694125 - DNA, 120 bp, Artificial Sequence
  ENSG00000188729_9 (sequence is synthesized)
cagaggtaaaaatgaaagtaggagggaagtcaaagaattaccaccagaacaggttaggaccagctaagcacacatcattttagctcagtacacttcagcatagtacaatgtgatcttttt

SEQ ID NO: 694126 - DNA, 120 bp, Artificial Sequence
  ENSG00000188729_10 (sequence is synthesized)
gatatcttggattaatctaagaaactgtttactgtgtttcacatattggcttctttggcttcaattgtcttattatccttagtaagccaattgaagagcataatgattttgagaatgatt

SEQ ID NO: 694127 - DNA, 120 bp, Artificial Sequence
  ENSG00000188729_11 (sequence is synthesized)
tcttaaaaatcattcagattatttttgaatgacttattaaaacataagttttcgtattgtagaaaactcagttctcagtaataactatgatgttactgtagcttggacacataggtccat

SEQ ID NO: 694128 - DNA, 120 bp, Artificial Sequence
  ENSG00000188729_12 (sequence is synthesized)
tgtgcattggatatactttgaaaacacacaaaaaaaactttctatggaacagagattcatcataagttacttagcagaagtttataaagcatcgaaaaacacttcctctgtaaaccctaa

SEQ ID NO: 694129 - DNA, 120 bp, Artificial Sequence
  ENSG00000188729_13 (sequence is synthesized)
tacgtgggaggaaaaaagttttgtccagtagagcaaaggcttatttcagcataaaaagagagtgttgtgagttgtgagaaggtgtcttaattttaaaggaagaggagagaaatgggcaat

SEQ ID NO: 694130 - DNA, 120 bp, Artificial Sequence
  ENSG00000188729_14 (sequence is synthesized)
tgctaatcttaactaaaaattaatggacttgtatgatccaaagaataaaataaactcaaagaaacataacaaaaatatattagaaaaagagttaaactaagaaattgacctttatgaagg

SEQ ID NO: 694131 - DNA, 120 bp, Artificial Sequence
  ENSG00000188729_15 (sequence is synthesized)
actaatttttcagttatccaatgtgctttttaaagataaagtttaaaagaggcaaaaagaggtgaaagaaatgaacatgtgtacttagaatatatatattggttttgtatgtaacttctt

SEQ ID NO: 694132 - DNA, 120 bp, Artificial Sequence
  ENSG00000188729_16 (sequence is synthesized)
agtttttctggatatttttaaaattgaaagtcttcaaaattaatttaggaaaaatagtaaataattttttttcattgtagtagagggctgtagccaagagaagtgaattttgggaaatct

SEQ ID NO: 694133 - DNA, 120 bp, Artificial Sequence
  ENSG00000188729_17 (sequence is synthesized)
aaccaattctttttttcataaacttgtgttagaaagctagcaatagcacatagggaagtatcctggaggactcaggagttgaaagaattatttaagaagttgtgatatccttgtctgcct

SEQ ID NO: 694134 - DNA, 120 bp, Artificial Sequence
  ENSG00000188729_18 (sequence is synthesized)
ttccccaaccttgtgatgaactatagaaatgtttcctattgcttagaagctctttctttccttgtatgcacatttgggtatttgtaagcttctaatccaattgggttctgcttcatgctt

SEQ ID NO: 694135 - DNA, 120 bp, Artificial Sequence
  ENSG00000188729_19 (sequence is synthesized)
tgacaaaaggtattaaaacctactttagcctaaaactttctcatggtaaatattggaagttggattatgcaaattgatttcctccattctttattttttaattcaaaattagactatgac

SEQ ID NO: 694136 - DNA, 120 bp, Artificial Sequence
  ENSG00000188729_20 (sequence is synthesized)
atccaacttaattaaaataagaagtcacaatatagtgatttatgctatagtttcatgtgtaatgtattttcacctaatatacacacaatttccatgaagggaagaaaatgttttctccac

SEQ ID NO: 694137 - DNA, 120 bp, Artificial Sequence
  ENSG00000188729_21 (sequence is synthesized)
ttataactctattttatttcatattttaatttttaccactacttcattcagagtagaaaataagtcagcaatatactaaataatggggctattcttttaacatagcagtaaattaagaca

SEQ ID NO: 694138 - DNA, 120 bp, Artificial Sequence
  ENSG00000188729_22 (sequence is synthesized)
gaatttttgttaagaatatgacaagtcatctcacttatttatccaatgcattaggtattactaatccaactatatttcaacttgaagggacttttttgttttgtttcaaaataatgcatt

SEQ ID NO: 694139 - DNA, 120 bp, Artificial Sequence
  ENSG00000188729_23 (sequence is synthesized)
acttttttctctttgcttctgtatgaacctttatagagcaaatgaatatatgtatatggagttctgggttctagtgtcaattacataatcaaatttcataaaaggatgttagttactggc

SEQ ID NO: 694140 - DNA, 120 bp, Artificial Sequence
  ENSG00000188729_24 (sequence is synthesized)
tatgttgtcctaaaatttacacacactaaaaaatgtctgtcaagttgtacctttaacctgttcatagctttagggaattaagtttcttaaaccaaattatgaaaaaataacttaatggaa

SEQ ID NO: 694141 - DNA, 120 bp, Artificial Sequence
  ENSG00000188729_25 (sequence is synthesized)
tcttctaaaaggaaaaagtataaaaagctttctgaatgatattaccccttatacctaaaggctcaagatgcttgaatatggttcaacttttccaaagttaataaacaagggatgatgaaa

SEQ ID NO: 694142 - DNA, 120 bp, Artificial Sequence
  ENSG00000188730_0 (sequence is synthesized)
gcgctagctcccatgctggcctcggtgccactcgcgcgccggccgcgctccgggcttctcttttccctccgacgcgccacggctgcccagacattccggctgccgggtctggagagctcc

SEQ ID NO: 694143 - DNA, 120 bp, Artificial Sequence
  ENSG00000188730_1 (sequence is synthesized)
ccgaacccctccgcggagaggagcgaggcggcgccagggtggcccccggggcgcgcttggtctcggagaagcggggacgaggccggaggatgagcgactgagggcgacgcgggcactgac

SEQ ID NO: 694144 - DNA, 120 bp, Artificial Sequence
  ENSG00000188730_2 (sequence is synthesized)
gcgagttggggccgcgactaccggcagctgacagcgcgatgagcgactccccagagacgccctagcccggtgtgcgcgccaggcggagcgcgcaggtggggctgggctgttagtggtccg

SEQ ID NO: 694145 - DNA, 80 bp, Artificial Sequence
  ENSG00000188730_3 (sequence is synthesized)
gttagtggtccgccccacgcgggtcgccggccggcccaggatgggcgctggcaacccgggcccgcgcccgccgctgctac

SEQ ID NO: 694146 - DNA, 120 bp, Artificial Sequence
  ENSG00000188730_4 (sequence is synthesized)
ggcgcgcccccgggctgtgaatgcgactcgcccctcggccgcgctccccgcccgcccgcccgccgggacgtggtaggggatgcccagctccactgcgatggcagttggcgcgctctccag

SEQ ID NO: 694147 - DNA, 120 bp, Artificial Sequence
  ENSG00000188730_5 (sequence is synthesized)
gcagttggcgcgctctccagttccctcctggtcacctgctgcctgatggtggctctgtgcagtccgagcatcccgctggagaagctggcccaggcaccagagcagccgggccaggagaag

SEQ ID NO: 694148 - DNA, 120 bp, Artificial Sequence
  ENSG00000188730_6 (sequence is synthesized)
gaagcgtgagcacgcctctcgggacggcccggggcgggtgaacgagctcgggcgcccggcgagggacgagggcggcagcggccgggactggaagagcaagagcggccgtgggctcgccgg

SEQ ID NO: 694149 - DNA, 120 bp, Artificial Sequence
  ENSG00000188730_7 (sequence is synthesized)
ccgtgagccgtggagcaagctgaagcaggcctgggtctcccagggcgggggcgccaaggccggggatctgcaggtccggccccgcggggacaccccgcaggcggaagccctggccgcagc

SEQ ID NO: 694150 - DNA, 120 bp, Artificial Sequence
  ENSG00000188730_8 (sequence is synthesized)
caggacgcgattggcccggaactcgcgcccacgcccgagccacccgaggagtacgtgtacccggactaccgtggcaagggctgcgtggacgagagcggcttcgtgtacgcgatcggggag

SEQ ID NO: 694151 - DNA, 120 bp, Artificial Sequence
  ENSG00000188730_9 (sequence is synthesized)
aagttcgcgccgggcccctcggcctgcccgtgcctgtgcaccgaggaggggccgctgtgcgcgcagcccgagtgcccgaggctgcacccgcgctgcatccacgtcgacacgagccagtgc

SEQ ID NO: 694152 - DNA, 120 bp, Artificial Sequence
  ENSG00000188730_10 (sequence is synthesized)
tgcccgcagtgcaaggagaggaagaactactgcgagttccggggcaagacctatcagactttggaggagttcgtggtgtctccatgcgagaggtgtcgctgtgaagccaacggtgaggtg

SEQ ID NO: 694153 - DNA, 120 bp, Artificial Sequence
  ENSG00000188730_11 (sequence is synthesized)
ctatgcacagtgtcagcgtgtccccagacggagtgtgtggaccctgtgtacgagcctgatcagtgctgtcccatctgcaaaaatggtccaaactgctttgcagaaaccgcggtgatccct

SEQ ID NO: 694154 - DNA, 120 bp, Artificial Sequence
  ENSG00000188730_12 (sequence is synthesized)
gctggcagagaagtgaagactgacgagtgcaccatatgccactgtacttatgaggaaggcacatggagaatcgagcggcaggccatgtgcacgagacatgaatgcaggcaaatgtagacg

SEQ ID NO: 694155 - DNA, 120 bp, Artificial Sequence
  ENSG00000188730_13 (sequence is synthesized)
cttcccagaacacaaactctgactttttctagaacattttactgatgtgaacattctagatgactctgggaactatcagtcaaagaagacttttgatgaggaataatggaaaattgttgg

SEQ ID NO: 694156 - DNA, 120 bp, Artificial Sequence
  ENSG00000188730_14 (sequence is synthesized)
tacttttccttttcttgataacagttactacaacagaaggaaatggatatatttcaaaacatcaacaagaactttgggcataaaatccttctctaaataaatgtgctattttcacagtaa

SEQ ID NO: 694157 - DNA, 120 bp, Artificial Sequence
  ENSG00000188730_15 (sequence is synthesized)
gtacacaaaagtacactattatatatcaaatgtatttctataatccctccattagagagcttatataagtgttttctatagatgcagattaaaaatgctgtgttgtcaaccgtcctcacc

SEQ ID NO: 694158 - DNA, 120 bp, Artificial Sequence
  ENSG00000188730_16 (sequence is synthesized)
gtgtacctgcatatctttttcagttctgattccatcacccaggaatgttccccctgcacattttcacagggcagagtcacgcatgaatggatcataagatattaggaccaatttccactg

SEQ ID NO: 694159 - DNA, 120 bp, Artificial Sequence
  ENSG00000188730_17 (sequence is synthesized)
aaaccctgtttaaattctatttaattacagacatatctctaatgttgatgtctacttcacataaatatatttcctttttataataatatatggcttttatctgcttcattctcagtcact

SEQ ID NO: 694160 - DNA, 120 bp, Artificial Sequence
  ENSG00000188730_18 (sequence is synthesized)
tgtgaaatgcaggtgtaaagatcactaactcacactttctcagttctttcccctaagctcctgtattgtacaccataggtaagcacatacatatatttcattcttatttacattattttc

SEQ ID NO: 694161 - DNA, 120 bp, Artificial Sequence
  ENSG00000188730_19 (sequence is synthesized)
tcttctaaggataactttaattcattccctaaactgaggaataaagtaggctggaaaatttgcattactgttccatcaagctgaagcagacaacaaaataggggaggagtccttcgattc

SEQ ID NO: 694162 - DNA, 120 bp, Artificial Sequence
  ENSG00000188730_20 (sequence is synthesized)
tcctaggatagttaaggaaaatcaaactcctaaacaagtttatatacctgaaatctaaatgtgctacagataactcagctgtcagttcagtggaatcatatttgtcatcagacttgagtc

SEQ ID NO: 694163 - DNA, 120 bp, Artificial Sequence
  ENSG00000188730_21 (sequence is synthesized)
atctatcctccataaactacacagtaaaatcttgactgataaccttgaattagccacccttcacaagcagagtgaggaagcagttattttgttaaaacaaagctgaagaccaagtgcact

SEQ ID NO: 694164 - DNA, 120 bp, Artificial Sequence
  ENSG00000188730_22 (sequence is synthesized)
ccacaactttcctatagttataattccaaaccaacttcttttctcttcatttgaacagagaacataaaaagccactgcaaagtcctgctaatctaattaatgcataatagaaaatagttc

SEQ ID NO: 694165 - DNA, 120 bp, Artificial Sequence
  ENSG00000188730_23 (sequence is synthesized)
tacctttatcaatcatatcagcatgcggtgtgttgatgaaagaggtaattggagtcttaataggtgtaggataaaaaaagcaaaactataatcactattaatgtctttaaaggattaaaa

SEQ ID NO: 694166 - DNA, 120 bp, Artificial Sequence
  ENSG00000188730_24 (sequence is synthesized)
tatatataatcattatttgaagcctctaaaggtatttttcatatttttgtttattctgaaattttgcattaagaacctattaagtacaaagcattgacaacaagggaataaggcttgatt

SEQ ID NO: 694167 - DNA, 120 bp, Artificial Sequence
  ENSG00000188730_25 (sequence is synthesized)
tcttgccttcttggactttcggtctctggcataagaagtatatgaaatcataatgtattgtattaggagccaaactagagaccagcaaatggagattagaaagccttcctaatgagaaga

SEQ ID NO: 694168 - DNA, 120 bp, Artificial Sequence
  ENSG00000188730_26 (sequence is synthesized)
tggagaacatgaaaaaatcattatataaaaaataattcaatcattaaagactgaataacattcaagaaaaatggatacatctatcataattgaaaaattaaactattgtgaaccttagta

SEQ ID NO: 694169 - DNA, 120 bp, Artificial Sequence
  ENSG00000188730_27 (sequence is synthesized)
agtataaagatgccactgactgagtcatcaaaacactacatatagtcatttaatttttgtcttgttcataaagaacaccttgagccaaaggaactaccagtacatagatttcatgaaaat

SEQ ID NO: 694170 - DNA, 120 bp, Artificial Sequence
  ENSG00000188730_28 (sequence is synthesized)
actcaggggaattattagctaattgttctcaggtgtaatcagctttccaaaatttaacctttgtattaaagactggtagacattggccatccctcctttattcaaggatggattgtttga

SEQ ID NO: 694171 - DNA, 120 bp, Artificial Sequence
  ENSG00000188730_29 (sequence is synthesized)
gacacagttatttaaagttgtcgttttgctaataaatggccctagcccccatgggtaggtgggccattagtaacctcttctctctccatcaggcatgatgcagttagagactcagtccat

SEQ ID NO: 694172 - DNA, 120 bp, Artificial Sequence
  ENSG00000188730_30 (sequence is synthesized)
gcagctcaaagtcttcctgtttcccttaataataattcctaccagaatggatgatgagctctgaaataattgcaatggtgttttcaatgctgtgagaatttcagaaaacctagtattttg

SEQ ID NO: 694173 - DNA, 120 bp, Artificial Sequence
  ENSG00000188730_31 (sequence is synthesized)
ttgcatatagagagaatgaacccagtatcatcttgggaagttaactgactcacttgctctaaacttagtttgacctgcagggtcaccagcacacactcctaagagctaaagctcaatggc

SEQ ID NO: 694174 - DNA, 120 bp, Artificial Sequence
  ENSG00000188730_32 (sequence is synthesized)
tgttattacaccaaagtaactcccctccccatctctgatttcaaccccctcattcctctctcctcatagaaataatgcataaaccaaacacatggaagaacttggatttttgacactgta

SEQ ID NO: 694175 - DNA, 120 bp, Artificial Sequence
  ENSG00000188730_33 (sequence is synthesized)
tatactcattaataataatggcattatttgcatttttgtccaagatcaacttcttcttgcagttagactttcacaaatacatagctatctcagattgacattctattttcctcccctctg

SEQ ID NO: 694176 - DNA, 120 bp, Artificial Sequence
  ENSG00000188730_34 (sequence is synthesized)
ttgtcagagaactctttgctgagattgtcaacaacaaactgttctattcaataaataacctgaataactgcccaataaaaaaggaaagtataagttactcaatttcaaaataatatggtt

SEQ ID NO: 694177 - DNA, 120 bp, Artificial Sequence
  ENSG00000188730_35 (sequence is synthesized)
tggagatagcacagaaaagggggcctcagaattcaagtatagaagttctggaaaagccataatcactaaaattcaaataggcctgctctataagtacctaataattgttaaatgatttgt

SEQ ID NO: 694178 - DNA, 120 bp, Artificial Sequence
  ENSG00000188730_36 (sequence is synthesized)
tcaagttaataaactaaatcgtgcttacaaatgtattaatgaatttatttcaaattttcaacccatatttagatctgaaagtataaagctacttatgtaagcaatagaatggttctggaa

SEQ ID NO: 694179 - DNA, 120 bp, Artificial Sequence
  ENSG00000188730_37 (sequence is synthesized)
attatctgatgtcttagaggttttcaagttaaattcattctttcagtgataggatatttacttgttgggtggattaacaatactttttattgacatttcccagaagtcttgagaaaagtc

SEQ ID NO: 694180 - DNA, 120 bp, Artificial Sequence
  ENSG00000188730_38 (sequence is synthesized)
atttcaaaaacttgtatttcatccctgcatgcaagaagtattagatgcactccagtccaggcaagtcctgctataatgttgcagctagtgcagatggagaggcacagtgtccttgacatc

SEQ ID NO: 694181 - DNA, 120 bp, Artificial Sequence
  ENSG00000188730_39 (sequence is synthesized)
aaggggtctgtaagccttgaaactaatttaggtttgattataatacttttaatcttttgatacttagaatttcatcacctgctttgtgcagtaaaacatgctaagaagaattatcatgca

SEQ ID NO: 694182 - DNA, 120 bp, Artificial Sequence
  ENSG00000188730_40 (sequence is synthesized)
gttttaagttcataacatcaataatatgtttaataaactttcttccctcgttctccaacataaatgttgcatttatataaggttaaaagtcctaaaaaatcataaaattcagatgtttaa

SEQ ID NO: 694183 - DNA, 120 bp, Artificial Sequence
  ENSG00000188730_41 (sequence is synthesized)
tttttgtttttaagcagtgaaatgggtttttaaatgtatacattatctgaaacttacaaaatatacactgtttcaaacaagcattgttggaaactaaatccattattttaaatgtggact

SEQ ID NO: 694184 - DNA, 120 bp, Artificial Sequence
  ENSG00000188730_42 (sequence is synthesized)
atttaaacatgtagaaaacaaaattatagacataaactatgattttaaaaatattaacaatttgctaaatttgcttcaatgggcaagagatcaatcctacttttcattgttatttttaat

SEQ ID NO: 694185 - DNA, 120 bp, Artificial Sequence
  ENSG00000188730_43 (sequence is synthesized)
atcatatttttccccaacataatgttattatgaagagtatcagatgtacaaataagcatcattggtaaaaacatacatgcttctttggccaacataatttgtaactgtcttactgaacct

SEQ ID NO: 694186 - DNA, 120 bp, Artificial Sequence
  ENSG00000188730_44 (sequence is synthesized)
acttacctactatattttttttcctcactagtagcatctgatggttgatacagtcagtaactattctgaagaatcagattaagagagaacaatttacttattcaggaataagtgcatttt

SEQ ID NO: 694187 - DNA, 120 bp, Artificial Sequence
  ENSG00000188730_45 (sequence is synthesized)
tacagtacatatttttcacatttcagctgcaacttccaaagatcaggttctcattgctccgtagcacagattaaacagcctacttatgtcatatcctcacttcacaccaacttcttcagt

SEQ ID NO: 694188 - DNA, 120 bp, Artificial Sequence
  ENSG00000188730_46 (sequence is synthesized)
ctattattttagttttctaaatgtagatctagttttcaactgaattctttgaggatcgcaatcacacacaaaataacatccaaactcctcaacatggaagactggtgtcttcacaattag

SEQ ID NO: 694189 - DNA, 120 bp, Artificial Sequence
  ENSG00000188730_47 (sequence is synthesized)
acttctgggccctgggtaccacagactatactctaaacatggtctttactatctcagatcctgccctgagtgtcctttgcagcatgttgagtattagccattttcaatgtccagttcaag

SEQ ID NO: 694190 - DNA, 120 bp, Artificial Sequence
  ENSG00000188730_48 (sequence is synthesized)
tgccattgctggtaaggcttctgtagttcttattggaagaattgtcactctatgtcccagtaatagtactaatttggtttcttattttaacatatcatttaggaatcataccatagtttg

SEQ ID NO: 694191 - DNA, 120 bp, Artificial Sequence
  ENSG00000188730_49 (sequence is synthesized)
cataatggttaattttatgcctgcttcttctattatttacaaatccctttagtttgggctgtgaaatattcaattcccaaaacatcacccaatatctatatgttaaaggcttgttgaatt

SEQ ID NO: 694192 - DNA, 120 bp, Artificial Sequence
  ENSG00000188730_50 (sequence is synthesized)
gtattccatctattagttcagagttatttgctattcttgtttaaggacaatgtatgtattaaagagcaactaaaaactcccattactgtttgccaacccagttgtcttttgatttctctg

SEQ ID NO: 694193 - DNA, 120 bp, Artificial Sequence
  ENSG00000188730_51 (sequence is synthesized)
tcaacttacaagtatcaaatatctaagtcacagaacccagagacacatcaaataccccaaataccccatggtagttttcggatgaactctgacagctattggccatttctggtgcaagtc

SEQ ID NO: 694194 - DNA, 120 bp, Artificial Sequence
  ENSG00000188730_52 (sequence is synthesized)
agaaaaaaattgcttttagtgtgaaatttttgatgctgaagaaagttgattgtattgaagagacactggccctttatgataaaggaagtcaagtttacagttttgatatttgtttacttt

SEQ ID NO: 694195 - DNA, 120 bp, Artificial Sequence
  ENSG00000188730_53 (sequence is synthesized)
cttatttctaatttttggaaaacaattttcttagactttcatttgtgatattgatcatttctgtgtgttttaatctttctacataacataattaaacacctcagtaggtatctagtgaac

SEQ ID NO: 694196 - DNA, 120 bp, Artificial Sequence
  ENSG00000188730_54 (sequence is synthesized)
tgatacaataatgagctgagtcatttgtacagaaatatagtagcttccataatctgaatgataaccatttaaaagtgatggttgttgaaattttactgtagtgtcaaatttcactttaaa

SEQ ID NO: 694197 - DNA, 120 bp, Artificial Sequence
  ENSG00000188730_55 (sequence is synthesized)
ttttgcaaagcacctgctattctagccttaacacaaagatttggctaatttttaaatgaacaaatcccattgaatattaagtgacactgacaatcaccctgaaaagtattcagccaaagt

SEQ ID NO: 694198 - DNA, 120 bp, Artificial Sequence
  ENSG00000188730_56 (sequence is synthesized)
ttcaatagaattaggaaacttaaatgaaaatgtgctctcagtgcttggcccatgagcagtttatgatttaagacgtgcatactgtttaactctttcctttaaagttcagaaaagtacata

SEQ ID NO: 694199 - DNA, 120 bp, Artificial Sequence
  ENSG00000188730_57 (sequence is synthesized)
aaacctctggctgacctattatataggcacagaattatcaaaagcaatcaaagtatgtacctaaagtcaatttagtatattatgaatacagcctgatgactaaacacaattgcaaatatt

SEQ ID NO: 694200 - DNA, 120 bp, Artificial Sequence
  ENSG00000188730_58 (sequence is synthesized)
attgcaaatattgcgactttagtttttaattcaattttcagcaagtagaaatatttctcaattttatttggtatctaattatattaagaccaacatatacattaaagtgtatttagatga

SEQ ID NO: 694201 - DNA, 120 bp, Artificial Sequence
  ENSG00000188730_59 (sequence is synthesized)
gatcattattttatttaatgattaatattttctattatttgaatttctgtaatttatgttttagaaagaactgtttccaaacacattttatggaaagatttcatttttccattcccttta

SEQ ID NO: 694202 - DNA, 120 bp, Artificial Sequence
  ENSG00000188730_60 (sequence is synthesized)
cttttatatttacattgtcaaataaatacaattctattttcatttctattagttttcagggtttattcttttcctaagcatataattcttataatggaaaaaagtgaaaagtatccagta

SEQ ID NO: 694203 - DNA, 120 bp, Artificial Sequence
  ENSG00000188730_61 (sequence is synthesized)
agtaatatacacctatgaaactattaatgttctttatactaccaagtagtttcatagttttaaaaagccattcttaagcagtcggtgaatgtatatcatcggccaaaagttatgctaggt

SEQ ID NO: 694204 - DNA, 120 bp, Artificial Sequence
  ENSG00000188730_62 (sequence is synthesized)
ttccttcacttattatcacatttaacctcacagttctcccaaattgtgggtaatgctatcccctttgttgcagaaaagtaaatataggctcagggaaatttaaaaactgccttaagattc

SEQ ID NO: 694205 - DNA, 120 bp, Artificial Sequence
  ENSG00000188730_63 (sequence is synthesized)
agtctagtgaatgagaggctgagttaagaatccaaatctgctttatatcagagcccgtgatttgaagtcttatcatttgtgtttaggtcagggacctctagaaaatagacagaaatttcc

SEQ ID NO: 694206 - DNA, 120 bp, Artificial Sequence
  ENSG00000188730_64 (sequence is synthesized)
aaaatggtcttttaccccactccccataaataagataatgaatagcaacactgatccctaattctagaatatcaatcttgatacttgtcaaagtaaatagtagctcgtcacaaaaatgtt

SEQ ID NO: 694207 - DNA, 120 bp, Artificial Sequence
  ENSG00000188730_65 (sequence is synthesized)
gtagcctccctagtctaaatgcttatgctatattttgtttcctaaatctagagatctctttttaaaaatagtattgaagcatcaggttgttcaggtatgattctcatattgaaatttaca

SEQ ID NO: 694208 - DNA, 120 bp, Artificial Sequence
  ENSG00000188730_66 (sequence is synthesized)
aaatataaccaaatattgtgacccagtttttctggagccaagagaagtaaactgccatttattaggtgatgattatagggcaaacactacaatttcaaatttcatattcttttatctgat

SEQ ID NO: 694209 - DNA, 120 bp, Artificial Sequence
  ENSG00000188730_67 (sequence is synthesized)
tattcttttatctgatttattcattttatcaactctgctatattgatgaagaagtcaacatatggtgggtaacttatccaaatttcagtgatgggctgggcgtggtggctcacgcctata

SEQ ID NO: 694210 - DNA, 74 bp, Artificial Sequence
  ENSG00000188730_68 (sequence is synthesized)
atcaggagtttgaggccaacctcctgggcatggtggcacatgcctgtaatctactcgggaggctgaggcaggag

SEQ ID NO: 694211 - DNA, 66 bp, Artificial Sequence
  ENSG00000188730_69 (sequence is synthesized)
ggttgctttaaaaaaaaaaaaaaaatcagtgatggaactgaggccaaatctgtctggttccaaagc

SEQ ID NO: 694212 - DNA, 120 bp, Artificial Sequence
  ENSG00000188730_70 (sequence is synthesized)
cagtgatggaactgaggccaaatctgtctggttccaaagctatcctacatggggcacagtcaggactggaatggatagctctacctgcttccaaatattcttccctggggagcagctgtg

SEQ ID NO: 694213 - DNA, 120 bp, Artificial Sequence
  ENSG00000188730_71 (sequence is synthesized)
agtcttactgaatcgatttattcattgcattctatgtgtcaactgcaatttagacctgggtgatagagtcatatatggtctttggacccatgaagctctgagtcaaggataccagcagat

SEQ ID NO: 694214 - DNA, 120 bp, Artificial Sequence
  ENSG00000188730_72 (sequence is synthesized)
atccttaaactaataaaaaaagcgatggcatcacatgccattttgaacttttgcattaaagtcataaacttacatcagtattatgatttatacttttaagcaaaattttgccattttctg

SEQ ID NO: 694215 - DNA, 120 bp, Artificial Sequence
  ENSG00000188730_73 (sequence is synthesized)
atacatagtagctagctagtgataaaattatgaagttaccattgtatgttccaatgacataaaaaactaagtgcctgcttgggctagttatactctgcagtataccctggtttattgtga

SEQ ID NO: 694216 - DNA, 120 bp, Artificial Sequence
  ENSG00000188730_74 (sequence is synthesized)
ggattaaataaaaaatcctcacaaaccccaatttaatttaatatagattaattataaaaataatctacccatgttacataatgttaaatctgtagtttcaaggtgtatgctatttcttaa

SEQ ID NO: 694217 - DNA, 120 bp, Artificial Sequence
  ENSG00000188730_75 (sequence is synthesized)
aacaaaaacaaagattgtccccactccaaacaataacagcaatggtgaaggttgtgggtggacagaggtagtcccactcatccccagggggctcagctgccaccggccaggtctatctat

SEQ ID NO: 694218 - DNA, 120 bp, Artificial Sequence
  ENSG00000188730_76 (sequence is synthesized)
tgctcccacctgctctgactgttttctctcaagaaaaagattttcattttaagataggcatcagtgcaataaaggagcttgatacaaaaatcattatgttctatatatgtttttgtaggt

SEQ ID NO: 694219 - DNA, 120 bp, Artificial Sequence
  ENSG00000188730_77 (sequence is synthesized)
tttagattaattatggccaactgataccttaaaatatttgttacaaataacactgaagtgagattcaaaattgtgccttctattgaagccaagaaagtaaatgtctttaaaataaacata

SEQ ID NO: 694220 - DNA, 120 bp, Artificial Sequence
  ENSG00000188730_78 (sequence is synthesized)
atggtgtttttttttggtacaataaacagcatacctacatttcagaggacaaatcatgttattataataaccaggagagaaaataaaaggagacattaatttggatatggaagcaaaatg

SEQ ID NO: 694221 - DNA, 120 bp, Artificial Sequence
  ENSG00000188730_79 (sequence is synthesized)
gaacagagcaatatagagcaaaacagaggtttgtctgaaacatttaaaatattaagaagtatgactaaaaaactcaaacattttaatacacgatgaatccttttcttaaggaaaaaatga

SEQ ID NO: 694222 - DNA, 120 bp, Artificial Sequence
  ENSG00000188730_80 (sequence is synthesized)
aaataataaaagtggtatttggatgagataattttcctttaaatttattcctcagaatgatgtaaattttccagctggaaggtcatctttctatacatgcatgcatctatacaaatggtt

SEQ ID NO: 694223 - DNA, 120 bp, Artificial Sequence
  ENSG00000188730_81 (sequence is synthesized)
aaacagttactctctcaatttgctgtgataggaaaggtggatataaatataagcaagggtctgattaaaacaaaacaaaacaaacaaaagacaagagaagcactgcattgttggcaagaa

SEQ ID NO: 694224 - DNA, 120 bp, Artificial Sequence
  ENSG00000188730_82 (sequence is synthesized)
attccttttaagtcagacttaagtccacggaaagctggacctaagcagtgaaggatgtaagggaacagagagagactctgcttggccgagtttgctattctcatttgtctatgtcaatac

SEQ ID NO: 694225 - DNA, 120 bp, Artificial Sequence
  ENSG00000188730_83 (sequence is synthesized)
gtcaatacggctacataaagttcacaactatttgcacatagctataaatatagcatgaataaaacacatatgtatttaattgtgttatttactatttataatttgaattgtttaaaataa

SEQ ID NO: 694226 - DNA, 120 bp, Artificial Sequence
  ENSG00000188730_84 (sequence is synthesized)
acttattccataaactcagtatttgaaaacttaaaaaaaaagtcattttaaataacatcatttaccaagtctgtgtgatgctttacaaggtacctgatgaatgtaaaattatagcttttt

SEQ ID NO: 694227 - DNA, 120 bp, Artificial Sequence
  ENSG00000188730_85 (sequence is synthesized)
gtcttcatttctaatagactgttataggggaaatgtactaaaatgttgtacttattacatttatgaatttctgacagtttctatagactgagaataatgatatgcttttataaattattt

SEQ ID NO: 694228 - DNA, 120 bp, Artificial Sequence
  ENSG00000188730_86 (sequence is synthesized)
ggtgaaagttttccagtaagtgttcatgtcctgtacaaatttattaaacaacatcaattttacctaacaactgtaaccactaataaatcatcagtcaccacctttcctgcatatctgaca

SEQ ID NO: 694229 - DNA, 120 bp, Artificial Sequence
  ENSG00000188730_87 (sequence is synthesized)
gatggagaacactgtgcttagtgttgaagataccaaagggaattcaagtgaggggaaaagaggagagcaaactgatcaaaagggaatgcccatgatgctttcaggaaaccagggtgagaa

SEQ ID NO: 694230 - DNA, 120 bp, Artificial Sequence
  ENSG00000188730_88 (sequence is synthesized)
catgctggctggaggatgggtctggtttccagcagagatgataggagttaaaaggcataggtgagttgttcccatccctggcctgagccttactccatagctatagagacatagtctcta

SEQ ID NO: 694231 - DNA, 120 bp, Artificial Sequence
  ENSG00000188730_89 (sequence is synthesized)
gaaacaaaggccagagcatccttttaacatttatatcataagtattctcaataaacgtttgcaatttatttgctttaatgtaacttggcagtaaagactttggcctttggaggtctgatt

SEQ ID NO: 694232 - DNA, 120 bp, Artificial Sequence
  ENSG00000188730_90 (sequence is synthesized)
ctaatcccagttctaccacttactggttatttatcaggtacacgttacctacctctctgtaactcagattgctcatcagtaacatggggagagtggtatcaaccactaagaggattaaat

SEQ ID NO: 694233 - DNA, 120 bp, Artificial Sequence
  ENSG00000188730_91 (sequence is synthesized)
gagtgaatatttgtaaaacacgtagcctagaatagatatttataaagcacaagatctatgtaaagtgtttataacataatacattggaatatgagacttgaacattttgaagattctaat

SEQ ID NO: 694234 - DNA, 120 bp, Artificial Sequence
  ENSG00000188730_92 (sequence is synthesized)
ttttgtaataccttaattttatgtggagttgaatttaaataattaggccgaatttgtatgtattgttggatgggtatgtgtattgacctgatttataaaataaagtatttattaaactga

SEQ ID NO: 694235 - DNA, 120 bp, Artificial Sequence
  ENSG00000188732_0 (sequence is synthesized)
ctttggcttccccaccggcaatggagcggttgacgttgcctctcggcggcgcggcggcggtggacgagtacctggagtaccggagaattgttggtgaggatgatggagggaaacttttta

SEQ ID NO: 694236 - DNA, 120 bp, Artificial Sequence
  ENSG00000188732_1 (sequence is synthesized)
ctcctgaagaatatgaagaatacaaaagaaaagttttacctctgcgcttacaaaacagattatttgtgagctggcggtcaccaacagggatggattgtaaacttgtgggcccagagacac

SEQ ID NO: 694237 - DNA, 120 bp, Artificial Sequence
  ENSG00000188732_2 (sequence is synthesized)
tgtgtttttgtacacataggtataaacaacataaaactgacttggaagcgattcctcagcagtgccccattgatctgccctgccaagtgactggctgccagtgcagggcttacctttatg

SEQ ID NO: 694238 - DNA, 120 bp, Artificial Sequence
  ENSG00000188732_3 (sequence is synthesized)
tccccttgaatggtagccagcccattcgctgcaggtgcaaacactttgctgatcagcacagtgctgcgcctggctttacatgcaatacatgttccaagtgttcaggattccatagctgct

SEQ ID NO: 694239 - DNA, 120 bp, Artificial Sequence
  ENSG00000188732_4 (sequence is synthesized)
tcacttgtgcttgtggtcagcctgcatatgcccatgacacagtagtggaaactaagcaagaaagattggctcaggaaaaaccagtgggacaggacattccttatgcagccatgggaggat

SEQ ID NO: 694240 - DNA, 120 bp, Artificial Sequence
  ENSG00000188732_5 (sequence is synthesized)
tctcccattacggcagtagacagcccattcctaaaagcatttcaagcatcatctagttcttctccagaaacgttaacagatgtaggtacaagtagtcaagtttcttcattaaggagacct

SEQ ID NO: 694241 - DNA, 120 bp, Artificial Sequence
  ENSG00000188732_6 (sequence is synthesized)
gaagaggatgatatggctttctttgaaagacgataccaggaaaggatgaaaatggaaaaggctgctaagtggaaaggaaaagctccattgccatcagctacaaaaccttcatgaagacta

SEQ ID NO: 694242 - DNA, 120 bp, Artificial Sequence
  ENSG00000188732_7 (sequence is synthesized)
ttggagaaattaaaaccatcatccaagtatctttttcatgtttatttaaatgtaataatacagtttatttttcctgaaattatttactttttttttttactgtataaatgtcttttggga

SEQ ID NO: 694243 - DNA, 120 bp, Artificial Sequence
  ENSG00000188732_8 (sequence is synthesized)
tgtttccttaatttatttaaataactaaaaatgcctattacttttgtcaaaactcataatttactactttgtatgtacctttctttctcctgacaaatgaggttattttatatgagtctg

SEQ ID NO: 694244 - DNA, 120 bp, Artificial Sequence
  ENSG00000188732_9 (sequence is synthesized)
tctgagagtacagtaaatgtttttagtacataataatttaactgtttcaggtatttaaaaaattaaagatattatcaagggttttggacaaacatatgagccatttttttgtcattcaaa

SEQ ID NO: 694245 - DNA, 120 bp, Artificial Sequence
  ENSG00000188732_10 (sequence is synthesized)
catatgagccatttttttgtcattcaaaatagtaagttaaaaacaagagaacaaaagaaaaaaatagttaaaatcattaatttttttatttttcaaactttgtaatgttatgttttcaaa

SEQ ID NO: 694246 - DNA, 79 bp, Artificial Sequence
  ENSG00000188732_11 (sequence is synthesized)
ggaccacaggcgtcagtggtttggctttgttacccagactggtctggaactcctgggcttaagttatctgtctacctcg

SEQ ID NO: 694247 - DNA, 120 bp, Artificial Sequence
  ENSG00000188732_12 (sequence is synthesized)
tggtctggaactcctgggcttaagttatctgtctacctcgggctttccaaagtactcagattacacgtgtgcgccaccatgctcagctgacccaactcaactttgatggagaagttatta

SEQ ID NO: 694248 - DNA, 120 bp, Artificial Sequence
  ENSG00000188732_13 (sequence is synthesized)
tatttagtactgatccactcagtgagatttcttccaaactttttcaccccactattaaagtggtatatgattatcaaggaaaatgggggatatatagaaacatagaatatattctatata

SEQ ID NO: 694249 - DNA, 120 bp, Artificial Sequence
  ENSG00000188732_14 (sequence is synthesized)
catagaatatattctatatacaatatatagaagcagctcactacccaaagccagctgctagttttttttttttacaatatctgtatgactttttcttttttttttgagacggagtttcac

SEQ ID NO: 694250 - DNA, 120 bp, Artificial Sequence
  ENSG00000188732_15 (sequence is synthesized)
ccatttaactgttgtgaagtatgtgtgtgcataaaatactgagccactttttaatgacagaatcatagaaatatgtttccacattgttatgtgctgatcaaaaacaagatttttaatacc

SEQ ID NO: 694251 - DNA, 120 bp, Artificial Sequence
  ENSG00000188732_16 (sequence is synthesized)
tgccagctagtccagctagtccagtggtgtttatctgtgttctccggagctgtgagggagccttgggggtgtgccaggtggaagggcaggttagaaggggaaactctattctgttcttcc

SEQ ID NO: 694252 - DNA, 120 bp, Artificial Sequence
  ENSG00000188732_17 (sequence is synthesized)
tttcgctttaaccaattctgcatttgttttatgtattctggttctataaaagattttatttgacaaaagggtttcactgctaaaatgtttgaaaactgttgtctagtaatttacttactg

SEQ ID NO: 694253 - DNA, 120 bp, Artificial Sequence
  ENSG00000188732_18 (sequence is synthesized)
gttctcttatgtcgtgtgggtgtgtgtataatgtagctgatgtaagtactattgctaatattattggtatgcataaagctttttctatatatggaattattttcttagggtatattttcc

SEQ ID NO: 694254 - DNA, 120 bp, Artificial Sequence
  ENSG00000188732_19 (sequence is synthesized)
ggtatattttccaaaaatgaaatttctggttcaaagaatggaccttttcaagtttcttgaaacattattaaatagaatttgttcttttgtaacactcttttttttttttttttttttgag

SEQ ID NO: 694255 - DNA, 120 bp, Artificial Sequence
  ENSG00000188732_20 (sequence is synthesized)
tacaggcatgtgccacaggctcctggccctttcgtaacactcttgatagcattgtgtattacatatagtttttaaaaactttgactctttttgctaagttaaaatggtatctcattttaa

SEQ ID NO: 694256 - DNA, 120 bp, Artificial Sequence
  ENSG00000188732_21 (sequence is synthesized)
gattacaggtgtgagccaccgcaaccggcctttaatttgcatttctttgattaatattgagaataataaatttagtattattttactgaatatcacctatgagaagaaagtgagtgatct

SEQ ID NO: 694257 - DNA, 120 bp, Artificial Sequence
  ENSG00000188732_22 (sequence is synthesized)
tcacctatgagaagaaagtgagtgatctatttaagaaaattacaatactataagaaggagctttggctttcaaaaatattgataatttattttgaagtcaaaagtcatattaaaataaat

SEQ ID NO: 694258 - DNA, 120 bp, Artificial Sequence
  ENSG00000188732_23 (sequence is synthesized)
tacatcaacacatgtttattgaatatatttctattttaagtagcaaacatgcaaataaatttaagtaatgcactgtgacaaaaataacattggtaaagaactttttcttttctttttttt

SEQ ID NO: 694259 - DNA, 120 bp, Artificial Sequence
  ENSG00000188732_24 (sequence is synthesized)
tagatgacagtgggattggtagatggatccttctgagagctgagcgggactggggagcagaatgtgttccctgtctacttgaaacacagtaggtacaagtagtcaagtttcttcattaag

SEQ ID NO: 694260 - DNA, 120 bp, Artificial Sequence
  ENSG00000188732_25 (sequence is synthesized)
atgtgttccctgtctacttgaaacacaggtgtgtaagttttttttttcttttttacaacaagcatgtattttttcatttaaaaattacataaatacaagtgtatattttcttttcttttc

SEQ ID NO: 694261 - DNA, 120 bp, Artificial Sequence
  ENSG00000188732_26 (sequence is synthesized)
tgctgggattacaggcttcagccaccacgccaggcccatacgagtatatattttcttgtaaaagattcaaacaatagaaattaagtggaaaaagaaagaaattaagtgcaaaacaccctt

SEQ ID NO: 694262 - DNA, 120 bp, Artificial Sequence
  ENSG00000188732_27 (sequence is synthesized)
attaagtgcaaaacacccttgaatacttctctttgtctaattctttccccgagggtaatttgctatcatcaattaatttttctctttaacatacaattttactatttactttttaatttt

SEQ ID NO: 694263 - DNA, 120 bp, Artificial Sequence
  ENSG00000188732_28 (sequence is synthesized)
taaaaattatttgtatttattgtttaagagatagggtcttgctatggtggtaggctaggtttgaactcctgggttcaagcgatcctccagtctcagtcttcctagtagctgggattacag

SEQ ID NO: 694264 - DNA, 120 bp, Artificial Sequence
  ENSG00000188732_29 (sequence is synthesized)
gcatgcatcaccatacctggctttacttttttttcaacttagaaaaatgtgaaggcctattgtgtcaggacacacaagtctacttcattctttttaactgctgtatggtattccacactg

SEQ ID NO: 694265 - DNA, 120 bp, Artificial Sequence
  ENSG00000188732_30 (sequence is synthesized)
tagataaagcagtttatctaaccatttccttgttcatggcatttagatttccatctttgaatttgtctgcctgtatccttgcatgaatttgactctaaggtagatacagagaagtaaaac

SEQ ID NO: 694266 - DNA, 120 bp, Artificial Sequence
  ENSG00000188732_31 (sequence is synthesized)
tattggagcgtgttaacctgtaaaattctaatacattctgccagaatgtcctccaaaaatgctctgcttgtttttacatcctctactgatgctttagcttgcctgtttcctcacatttag

SEQ ID NO: 694267 - DNA, 120 bp, Artificial Sequence
  ENSG00000188732_32 (sequence is synthesized)
gctaatcattgatattattaaacttgattttttttgccagtctgacatgtaaaattgttattgttgtttcaatttgatttccctggttattagtgagatagggatcttttcatatttatt

SEQ ID NO: 694268 - DNA, 120 bp, Artificial Sequence
  ENSG00000188732_33 (sequence is synthesized)
ggccatttcactttctgtgaattgcctattcatatcccttgctcattttttttttgtttttatcttttgtcattgacttataggaagtctttttatatattctgtatatttttttgttat

SEQ ID NO: 694269 - DNA, 120 bp, Artificial Sequence
  ENSG00000188732_34 (sequence is synthesized)
ggagacagtcctttcctatttcagttttataaatatattctcctgcgttttattttaatacttttttatgtttagctttttcatatatctgtaatttattttttgtgaaagtgtgaggta

SEQ ID NO: 694270 - DNA, 120 bp, Artificial Sequence
  ENSG00000188732_35 (sequence is synthesized)
ggtagatgtttctaacttcagtttttgtctaaattgatggccagttattcaagcaccattcttgcccaaatcatttgaaactctaccatattctttatttttattttactttaagttctg

SEQ ID NO: 694271 - DNA, 61 bp, Artificial Sequence
  ENSG00000188732_36 (sequence is synthesized)
gtgccatggtgatctgaatgccctccctccactcgcctcccaccctctgacaggcccctgt

SEQ ID NO: 694272 - DNA, 120 bp, Artificial Sequence
  ENSG00000188732_37 (sequence is synthesized)
ctatttgtcctaatgccctccctccactcgcctcccaccctctgacaggcccctgtgtgtgatgttgccctccttgtgtccatgtgttctcactgttcaactcccacttgtgagtgagaa

SEQ ID NO: 694273 - DNA, 78 bp, Artificial Sequence
  ENSG00000188732_38 (sequence is synthesized)
ttctgttcctgcattagtttgctgagaatgatggcttccagcctcatccatgtccctgcaaaataaactaccatattc

SEQ ID NO: 694274 - DNA, 120 bp, Artificial Sequence
  ENSG00000188732_39 (sequence is synthesized)
tgtcatattctccattttgtaccactggcccatttgtctatcctgtgccaatattatatatttatgtaatatatattttttatgatagcttcctggtgtgtcatgatatttgatatggta

SEQ ID NO: 694275 - DNA, 120 bp, Artificial Sequence
  ENSG00000188732_40 (sequence is synthesized)
aattcctcctgtttgtgattgttttcaagattgtcttgatatttttgtgcattttctcttctaggtaattttataactagcttgttaaatttcataagtaaattcttctgcagttttatg

SEQ ID NO: 694276 - DNA, 120 bp, Artificial Sequence
  ENSG00000188732_41 (sequence is synthesized)
ggtgcataattgtgttaggctcaagcaacagctaaagaaaacccaactaccagtgtcaaaacataatgatgatgatgatcatgtttgatgacggcagctttgtactaccagcagttgttt

SEQ ID NO: 694277 - DNA, 120 bp, Artificial Sequence
  ENSG00000188732_42 (sequence is synthesized)
gaaccacatcacttaatcctcacaacaactctgtgagttagattattattcctattttacagatgaggatacgcagcacagagaagtaaaataagttgctcagtgttattcaactaggaa

SEQ ID NO: 694278 - DNA, 120 bp, Artificial Sequence
  ENSG00000188732_43 (sequence is synthesized)
gtagcagggttgggttcaacctgaagatttctgtgggctctctagtctgccacattgttggctatttgtgtacagccactatgttgttttcattactgcagctttatcataaataaatta

SEQ ID NO: 694279 - DNA, 120 bp, Artificial Sequence
  ENSG00000188732_44 (sequence is synthesized)
gttaatatttatgacttcattttattgcttcagaattttcctgacctgttcttatgttttaattctttcagaactttggcatcattttgttaaggtgtaccttcagttgaatttttagaa

SEQ ID NO: 694280 - DNA, 120 bp, Artificial Sequence
  ENSG00000188732_45 (sequence is synthesized)
ccacccattgtctatgactgtactggacacatcttgtgtgccactgcaaatcctcttggccccgtttcttactccattactgctgtggaacactttccagcaggcttctgatagcggaag

SEQ ID NO: 694281 - DNA, 120 bp, Artificial Sequence
  ENSG00000188732_46 (sequence is synthesized)
tctcttgcttccttctgcagggatcttctgacactgtggcttgggatgcccactagaaccccactgtatgatacatatgcagcccaaagatgttggggagctagtgactttggggccact

SEQ ID NO: 694282 - DNA, 120 bp, Artificial Sequence
  ENSG00000188732_47 (sequence is synthesized)
cttgattaatgggaggtggaagcccaatacataagtgctctcccgtctgttgggaagacaattctgaaatgcatttcataaacttcctcagaaagtcctatcgttgagctccagtcaccc

SEQ ID NO: 694283 - DNA, 120 bp, Artificial Sequence
  ENSG00000188732_48 (sequence is synthesized)
atagcagtggccaactcaataataatatatccttatctttcttttttccttttccactcctctacccctccctctagttccctcagatcacttcccaaataaactacttgtataacaaca

SEQ ID NO: 694284 - DNA, 80 bp, Artificial Sequence
  ENSG00000188735_0 (sequence is synthesized)
agttgcgcgcgtggctctggctgcgcaggaacagctggtgcctccgagggcggtcggcgagcgcgcgggcgtggggcgct

SEQ ID NO: 694285 - DNA, 120 bp, Artificial Sequence
  ENSG00000188735_1 (sequence is synthesized)
accgccgccttgcaccatcgcatcatgtccgggcagctggagcgttgcgagcgcgaatggcacgagctggagggagaatttcaagaactgcaggagacgcacaggatctacaagcagaag

SEQ ID NO: 694286 - DNA, 120 bp, Artificial Sequence
  ENSG00000188735_2 (sequence is synthesized)
ctggaggagctggctgcgctgcagacgctgtgtagcagttccatcagtaagcagaagaagcacctcaaggacttgaagcttacactccagaggtgcaaacgccatgccagtcgggaggag

SEQ ID NO: 694287 - DNA, 120 bp, Artificial Sequence
  ENSG00000188735_3 (sequence is synthesized)
gcggagctcgttcagcagatggcagcgaacatcaaggagcggcaggacgtcttcttcgacatggaggcctacctgcccaagaagaacgggctctacttgaacctggtcctcggcaatgtg

SEQ ID NO: 694288 - DNA, 120 bp, Artificial Sequence
  ENSG00000188735_4 (sequence is synthesized)
aacgtgaccctcctcagcaaccaggccaagttcgcctacaaggacgaatatgagaagttcaagctctacctgaccatcatcctgctcctgggtgccgtggcatgtcgatttgtccttcac

SEQ ID NO: 694289 - DNA, 120 bp, Artificial Sequence
  ENSG00000188735_5 (sequence is synthesized)
tacagggtgactgacgaagtcttcaacttcctgctggtgtggtattactgcaccctgaccattcgggagagcattctcatcagcaacggctcaagaattaaaggctggtgggtgtctcac

SEQ ID NO: 694290 - DNA, 120 bp, Artificial Sequence
  ENSG00000188735_6 (sequence is synthesized)
cactacgtctccacattcctgtccggagtgatgctgacctggcctaatggacccatttatcagaagtttcgcaaccagttcttagcattttccatttttcagagctgcgtccagttcctg

SEQ ID NO: 694291 - DNA, 120 bp, Artificial Sequence
  ENSG00000188735_7 (sequence is synthesized)
caatattattaccagaggggctgcctctaccggctgcgggccctgggggagaggaaccacctggatctcacagtggaagggttccagtcctggatgtggcggggcctcacctttctcctg

SEQ ID NO: 694292 - DNA, 120 bp, Artificial Sequence
  ENSG00000188735_8 (sequence is synthesized)
cccttcctcttctgtggccatttctggcagctctacaatgccgtcacgctgtttgagctctccagccacgaggaatgcagagaatggcaggtgttcgtactggcgttcaccttcctcatc

SEQ ID NO: 694293 - DNA, 120 bp, Artificial Sequence
  ENSG00000188735_9 (sequence is synthesized)
ctcttcctcggcaacttcctgaccacgctcaaagtcgtgcatgccaagctccagaagaacagaggcaagacaaagcagccgtgagcctcgggctcctgtgccctcggcccggacttcaga

SEQ ID NO: 694294 - DNA, 120 bp, Artificial Sequence
  ENSG00000188735_10 (sequence is synthesized)
ctgcagggggctcccgggctccttcccagcagccctctcaggcccgtggcatcgctgggagagggcccaggccctggtcccccagtggaccccagtggtctagaggaatgtgagccccgc

SEQ ID NO: 694295 - DNA, 120 bp, Artificial Sequence
  ENSG00000188735_11 (sequence is synthesized)
ctgtccgcacagtgtccgcccacctatttatgacatatttaatgctgggtcccccatcgtccctggaacccgaggcctcactcctgtgcttgaaggtggctgaggccgggccagtcttcc

SEQ ID NO: 694296 - DNA, 120 bp, Artificial Sequence
  ENSG00000188735_12 (sequence is synthesized)
tggggatggggcctgaagcctcagggagcccctctgttcccactcctgtcatttgaacccctctgggtggggtttggatgtgcctcgcggggttggatttatgctgacctgctacttacc

SEQ ID NO: 694297 - DNA, 120 bp, Artificial Sequence
  ENSG00000188735_13 (sequence is synthesized)
aggcccaggctggggtggtgtgaaccctcagtgtcctgtggcgcccccaccccggggccactctgcttctgctgtgagccccctcctcgcccaccccgccacgtggtgagggttatttta

SEQ ID NO: 694298 - DNA, 120 bp, Artificial Sequence
  ENSG00000188735_14 (sequence is synthesized)
agttctcagagacccaccgcgtctgcctcgtgctcttcttgcccctggagcgctgggggcatcctgagtcaggctgtgagaagattcgccaccagagggcgccccgggccctgggtcgtc

SEQ ID NO: 694299 - DNA, 120 bp, Artificial Sequence
  ENSG00000188735_15 (sequence is synthesized)
caaggggacaaggacgttcccgtctgtgcttcggggttccctgacccccccatcctgcagcccaccttcctgcagtgtcgtggcaggtacttggagagtgggaccaagacccttggcccc

SEQ ID NO: 694300 - DNA, 120 bp, Artificial Sequence
  ENSG00000188735_16 (sequence is synthesized)
tgtggaggggaaccacctcccccctccttcccagagcttctggatgttgtgggagggaggtgggggtgcctggcaggctcacccccaggggccgcaccctgaggcggggtcagagccact

SEQ ID NO: 694301 - DNA, 120 bp, Artificial Sequence
  ENSG00000188735_17 (sequence is synthesized)
gggcatcgcttgggtgagattctgcattcgacgggaggcagagaggccaccaggtttggctgagtgctctgccccaccattcatatatgggcctcagctccccctaactgtggccctaca

SEQ ID NO: 694302 - DNA, 120 bp, Artificial Sequence
  ENSG00000188735_18 (sequence is synthesized)
aatccctaggccagacctcacagcagtgcccacaggcatgccttgtttagccctcctcaaggaattttaaaatttttaattactttttttttttttgagacagggtctgttgcctaggcg

SEQ ID NO: 694303 - DNA, 90 bp, Artificial Sequence
  ENSG00000188735_19 (sequence is synthesized)
tactttttttttttttgagacagggtctgttgcctaggcgggagtgcagtggcatcataggtcactgtagcctccgcctccatggagtag

SEQ ID NO: 694304 - DNA, 66 bp, Artificial Sequence
  ENSG00000188735_20 (sequence is synthesized)
cctaattacatttttaaaatgagatttccccacccctacagtgagattccacataaaaatccagat

SEQ ID NO: 694305 - DNA, 120 bp, Artificial Sequence
  ENSG00000188735_21 (sequence is synthesized)
tccccacccctacagtgagattccacataaaaatccagatttctgctttccctagaaaaacggacctggcaacattcccgtggcacaggacgcctactctccagttgccacaggccctgc

SEQ ID NO: 694306 - DNA, 120 bp, Artificial Sequence
  ENSG00000188735_22 (sequence is synthesized)
cacccccctgcccttcattctggtctcctttctggtcctttttaggcacctgcgtttgccctagattaggagtcagctagctgtctgtaaagggccagatggcaactattttgagcttta

SEQ ID NO: 694307 - DNA, 120 bp, Artificial Sequence
  ENSG00000188735_23 (sequence is synthesized)
actattttgagctttatgggccaggtggtttgtggcagctactcttcacctgcagccccagagcacaaggcaatgcagaaaggaatgggtgttgctgtgttccaataaaactttatttac

SEQ ID NO: 694308 - DNA, 120 bp, Artificial Sequence
  ENSG00000188735_24 (sequence is synthesized)
agatgtggcccacaggctgtagttgttggacctctaccgtagaccatcatgaggcctggggttcttcgagaacaagaactccttggttgattccccagggtacggcagggccttgggaac

SEQ ID NO: 694309 - DNA, 120 bp, Artificial Sequence
  ENSG00000188735_25 (sequence is synthesized)
ctgggtgggttggggagggtctcagaaggctccttcctttggcaacctgacttcttggaagctcaggtttagctgacgccccagcactgggccaggggggctgaggcaggagatatgggg

SEQ ID NO: 694310 - DNA, 120 bp, Artificial Sequence
  ENSG00000188735_26 (sequence is synthesized)
aaggctaggagttgcctgaagccattatcccatcttaggcgacaccgactcctaggcgccctccagagccaagcagcttgcgacttctggtaggcaccggaatcccctgggatgcttgtt

SEQ ID NO: 694311 - DNA, 120 bp, Artificial Sequence
  ENSG00000188735_27 (sequence is synthesized)
aaattcccagaccctcggccccagaccttcccaaaggaggctcagggattaggtatctggctgttggtgacacaggtggtctatgaaccagttctgagaaactgtcccgcgtggacaggg

SEQ ID NO: 694312 - DNA, 120 bp, Artificial Sequence
  ENSG00000188735_28 (sequence is synthesized)
ggtagatcccatcagttctcaaaggaggccaggatgtctcgcctcctgaactccacaggctggtagaagcggggcttgagggacagcaggttgggagcttgaggactaagtgggccagtc

SEQ ID NO: 694313 - DNA, 120 bp, Artificial Sequence
  ENSG00000188735_29 (sequence is synthesized)
ctgtcctaccacagtggggggaacagtccacagaaaacttgctcatgaccacactgggagccgactgttcttcccatcccaagtctctgacactgggggctttgggtgaaaccttaagga

SEQ ID NO: 694314 - DNA, 120 bp, Artificial Sequence
  ENSG00000188735_30 (sequence is synthesized)
gatggtcagatgggtggtccagggtatacttttaacaactgagaagccattttttctgccccctgggcacatgtgcccagctctgcaaagacagtggccaagttgaagacaagtcttcca

SEQ ID NO: 694315 - DNA, 120 bp, Artificial Sequence
  ENSG00000188735_31 (sequence is synthesized)
tgtggggtggagatgggaggggtgggtgccaggctgcagcctgtgtcctcctgataggcccagccccctcggtggcctccgtgttcctgggggaaggaaggaaggagctggaggatacag

SEQ ID NO: 694316 - DNA, 120 bp, Artificial Sequence
  ENSG00000188735_32 (sequence is synthesized)
tggtgcctatctcgggagcccagggaggcagggacacaggagtggcaggcttggggcgcccgcgtggaacagtgccaggtctacgtttacccactaccagatagactttttcatttcaag

SEQ ID NO: 694317 - DNA, 120 bp, Artificial Sequence
  ENSG00000188735_33 (sequence is synthesized)
cataacttgagtctgcactggggagacactcgtggtgggggtggctgtgatgagggcacttgcgagtcccgacaacagacactggctcctgcacccacatcaccaccatgtcccaggggc

SEQ ID NO: 694318 - DNA, 120 bp, Artificial Sequence
  ENSG00000188735_34 (sequence is synthesized)
agcctggaggggagtttgtggtcagagccccagccaggaaaggagagagttccagaatgttccaagagtctagccgcaggccccagacaccatgagctggagggtcgggatggggcagcc

SEQ ID NO: 694319 - DNA, 120 bp, Artificial Sequence
  ENSG00000188735_35 (sequence is synthesized)
tccctggtgcaatcggcacctgggcccccgggccctgtcagtgctgtcgtgaggtctgtctgccctgggtcagagcagcaggcagagccggcgcttcttctgccgttgcgccttcttcag

SEQ ID NO: 694320 - DNA, 120 bp, Artificial Sequence
  ENSG00000188735_36 (sequence is synthesized)
agcgctgagagccaccttggcggcctcccggaagacgtcctccacattctcccgaaacttggcggaacattccaggtagagagcagctcggatctgttcgcaggcgctcaggccctgggt

SEQ ID NO: 694321 - DNA, 120 bp, Artificial Sequence
  ENSG00000188735_37 (sequence is synthesized)
ggggggaggagccagcattaggtgaggggcccctggaggtctcctagcaccacctggtgggtttgggactggctctgaggactctgcagggatggaggccttggtttgggcctgtctgtc

SEQ ID NO: 694322 - DNA, 120 bp, Artificial Sequence
  ENSG00000188735_38 (sequence is synthesized)
tcctccatcctggctgcccctcacagtgtgtgggtggaatggagggccagggcagtgcagcccgcaggttggaagaagccctgtccaggcccccaccctggcctctctccagctccgggc

SEQ ID NO: 694323 - DNA, 120 bp, Artificial Sequence
  ENSG00000188735_39 (sequence is synthesized)
agggaggggctgaatcctgagacccggggttggttcccccaggtgtctcccaggcctgtgagaagagttggaggcctcaagacagaaaggacttccagccacctctctcccttctctgaa

SEQ ID NO: 694324 - DNA, 68 bp, Artificial Sequence
  ENSG00000188735_40 (sequence is synthesized)
gacagaaaggacttccagccacctctctcccttctctgaaagtaccatttaggcaaattaatttgccc

SEQ ID NO: 694325 - DNA, 71 bp, Artificial Sequence
  ENSG00000188735_41 (sequence is synthesized)
ggatttgcccttattaatggttatttcttgtgaaagtttctttttgcctttgcattccttttattctgttt

SEQ ID NO: 694326 - DNA, 120 bp, Artificial Sequence
  ENSG00000188735_42 (sequence is synthesized)
gaaagtttctttttgcctttgcattccttttattctgtttattcccccatgcctcacccaaagagttgcacggtcaattggcccgtgaaggggacgcctactttcaaacaaggcagacag

SEQ ID NO: 694327 - DNA, 120 bp, Artificial Sequence
  ENSG00000188735_43 (sequence is synthesized)
gacacgacaggacggcggctcatagcacagactttggattgcagtggatgggaccagatcctggctccacttctcgctagctgtgtggccctgggcaagctgcttaacctctctgggcct

SEQ ID NO: 694328 - DNA, 120 bp, Artificial Sequence
  ENSG00000188735_44 (sequence is synthesized)
cagtttctccccctgtaaactgggggatgtgaacagcgcctgcctccgagtcctaaggattgggagtagtcgtgtaaagtgctcaggtccacaggccatcaatactaatagttaaaaatt

SEQ ID NO: 694329 - DNA, 120 bp, Artificial Sequence
  ENSG00000188735_45 (sequence is synthesized)
attcttagaatcttgcttccctcagctccctgaaaggccactaaggcaccccagttgcagaggccaaaggtccgggaggcttcacagccacggctgtgccccagggtcttggccccggcc

SEQ ID NO: 694330 - DNA, 120 bp, Artificial Sequence
  ENSG00000188735_46 (sequence is synthesized)
cacctgcatgtaggtgatgggctccagctgggcggcccggagcttccgcagctgctccttgtccttcctcaggtctgtcttgcagccgatgagcaccatggggatcccgcggcagaaatg

SEQ ID NO: 694331 - DNA, 120 bp, Artificial Sequence
  ENSG00000188735_47 (sequence is synthesized)
cgtgacctcagggaaccactgtggagggaggaggcgggatcaggggtgcggccgggcccagatgtggggccaccacccaggaggccggcctcaccttgatgaggacgttgtcgtagctgg

SEQ ID NO: 694332 - DNA, 120 bp, Artificial Sequence
  ENSG00000188735_48 (sequence is synthesized)
tgggattcatgacgtcatagcagatgagcacgaggtgggtgttctggtaggacaggggccgcagccggtcatagtcttcttgccctgaaagcacagagcagcgggggtcaggggacgtcc

SEQ ID NO: 694333 - DNA, 120 bp, Artificial Sequence
  ENSG00000188735_49 (sequence is synthesized)
cctccctgtctggactctgacgggtgaaggggaaggggccaggcaagtgaccctgccttagggcctcaatttcctcatctatacaatgggcagcaagccaggagtgctggcacaggcctg

SEQ ID NO: 694334 - DNA, 77 bp, Artificial Sequence
  ENSG00000188735_50 (sequence is synthesized)
atacaatgggcagcaagccaggagtgctggcacaggcctgtggtcgcagctactcgggaggctgaggcgtgatcatg

SEQ ID NO: 694335 - DNA, 120 bp, Artificial Sequence
  ENSG00000188735_51 (sequence is synthesized)
tcttaacaacaaaacccatgagcggcagccccccagtcctggatggtggtaaagaatcctcaagatcaaacccacgcagtgctgagagcttggcctgattctagggctggggctggagaa

SEQ ID NO: 694336 - DNA, 120 bp, Artificial Sequence
  ENSG00000188735_52 (sequence is synthesized)
actgctagagatgatgccgatagccagtgtgatccccctgccctgatggtcaagggcagagtgcagactggaaccctcccctccccaaagattcagacctgtggggctgagtgggctcat

SEQ ID NO: 694337 - DNA, 120 bp, Artificial Sequence
  ENSG00000188735_53 (sequence is synthesized)
agtgtccccaagtcctgagaggctggtgtctggcttcagcctccagcttctcaggttctgatgcagtcagctgagttccctgcctattcttgcaagcactaggaggagggtggtgggttg

SEQ ID NO: 694338 - DNA, 120 bp, Artificial Sequence
  ENSG00000188735_54 (sequence is synthesized)
ctgggaacagcaccgagcgccctccccacccagattcacagagcacactccctggggggatactttaatccggaggccgtgacgcctggctccgccccgagacgagctgaatccaaatac

SEQ ID NO: 694339 - DNA, 120 bp, Artificial Sequence
  ENSG00000188735_55 (sequence is synthesized)
ggatctaggcttgagcttggttgggtttgcttttttcttcttcttctttataaacaattctttgtaactttttgtattgacagtttcaaacttacagtaaaattgcaacacgagtatgaa

SEQ ID NO: 694340 - DNA, 120 bp, Artificial Sequence
  ENSG00000188735_56 (sequence is synthesized)
acagtaaaattgcaacacgagtatgaagagctctctgactgtgattcaccacctgtttgcattggcccctctgactttatctggagacagacacttctgtttctccctgtcagggcacgg

SEQ ID NO: 694341 - DNA, 120 bp, Artificial Sequence
  ENSG00000188735_57 (sequence is synthesized)
taactgtagacatctgcctcttcaccccttagctcagcgcctatctgctgagaacaagggcgttctctcccctgccccaagcccccagaaaccgcatggactctgcattctaatctgatc

SEQ ID NO: 694342 - DNA, 120 bp, Artificial Sequence
  ENSG00000188735_58 (sequence is synthesized)
cacagaccatagtcagattttgaccatttcaccaatattgtcctttatttttttccccgttgaggagccagcccagcccagggttctacactgcacttagtcatcctgccccggtatttt

SEQ ID NO: 694343 - DNA, 120 bp, Artificial Sequence
  ENSG00000188735_59 (sequence is synthesized)
tttaaaatccccacagtgagaactgagagcttttcaggctcattggtgaccagccccccgcccctccacttccttccactgaacaaggaacgtggaggcccaggaatccccctgccctgt

SEQ ID NO: 694344 - DNA, 120 bp, Artificial Sequence
  ENSG00000188735_60 (sequence is synthesized)
ccgcagctgttgcaggtgctgggtggcaccagcctgccccccgttccttctctgccagacacctctcaggacaagtggcctctccacggagtaccaccaggccatgtctgctcctaaccc

SEQ ID NO: 694345 - DNA, 120 bp, Artificial Sequence
  ENSG00000188735_61 (sequence is synthesized)
cttgctggtgatggggcatggccaccctctccccactggatccccctcaacccagggacctccaaaagtcttcagccagctcccccatggaacagtgcttaagggtgaggtcactagaga

SEQ ID NO: 694346 - DNA, 120 bp, Artificial Sequence
  ENSG00000188735_62 (sequence is synthesized)
cagatgagacacatgttcaaatcccagctctgccctcactggctgtgtgaccttgacttagacaggacagtggtgggagtcttggcttccccatctgggacatgaaaatcataaaatcta

SEQ ID NO: 694347 - DNA, 65 bp, Artificial Sequence
  ENSG00000188735_63 (sequence is synthesized)
cttggcttccccatctgggacatgaaaatcataaaatctacctcacggggctgtcaccagccaag

SEQ ID NO: 694348 - DNA, 120 bp, Artificial Sequence
  ENSG00000188738_0 (sequence is synthesized)
attcctggtcaggtccggacagagggacaacggggtgctagagaaggagagcggggcgggtgaggaaggggctgagggggctgtgccggccatggagctgtacctcggcgcctgctccaa

SEQ ID NO: 694349 - DNA, 120 bp, Artificial Sequence
  ENSG00000188738_1 (sequence is synthesized)
gcctgccaaagtcgccgtcaccaagacggtcgccagcgtcctggccgcggacacccagcagtgcagagacggcgtgcacaaaacccactttgcaggggttggaccggctcagctactgga

SEQ ID NO: 694350 - DNA, 120 bp, Artificial Sequence
  ENSG00000188738_2 (sequence is synthesized)
cctacctctcggggtcaagctgcctgtgatcccaggaagcaatgctgtattctatactacgaatttcggtgaaaagctttttcgaccttcttatggttttaacctgactgatccctattg

SEQ ID NO: 694351 - DNA, 120 bp, Artificial Sequence
  ENSG00000188738_3 (sequence is synthesized)
tcgacttttggaaaaccaatataaaagcctccatgatccacatttaaaagcatactataagcgcaaagatattttgaagagattaaagaaaggtggctacatcaccagcaataataaagt

SEQ ID NO: 694352 - DNA, 120 bp, Artificial Sequence
  ENSG00000188738_4 (sequence is synthesized)
tgtatgtaccttgagagaattgaataagtacaggcaatatcttaccagtttaaaattagactttgagagaaactatataaaagaacaaagaatacttgcaaaacaactacataacatacc

SEQ ID NO: 694353 - DNA, 120 bp, Artificial Sequence
  ENSG00000188738_5 (sequence is synthesized)
ggaaaacaatcaaatccctcaacattgtgatgttgcacaagtccaaaactggttgttaaaggagggcactgaatctattaaggaccaggagcggctgatgaggcatagatatttggatat

SEQ ID NO: 694354 - DNA, 120 bp, Artificial Sequence
  ENSG00000188738_6 (sequence is synthesized)
gataagtagaaaactagaacaacttgaacgcacagcagaagaacaacgcctattcctaatggatagagaagaaagacgacagcgggaacacacaagaagaaaacttactcttcgtagaaa

SEQ ID NO: 694355 - DNA, 120 bp, Artificial Sequence
  ENSG00000188738_7 (sequence is synthesized)
aatagaagaggaatggaagacaaaagagatgttacttctgacaaggatggcagaagatgttaaaagagaagagaggatagaagaacaacagcatagaaacagagaagagagtgacaggaa

SEQ ID NO: 694356 - DNA, 120 bp, Artificial Sequence
  ENSG00000188738_8 (sequence is synthesized)
gaaacaagatcttctagagaaaaaaatggcttatcatttacaaaaaatgcaagatactggctttaacggagaagatataggaaaaaatacatttaaatacagaggtcaagatggaacaca

SEQ ID NO: 694357 - DNA, 120 bp, Artificial Sequence
  ENSG00000188738_9 (sequence is synthesized)
tgcttctccaaagaataaaaagaagacttctgaagatataatgttagtttatcctgctggagaccagaatacatataaagaaacacatggacatacagcaaatgctgctcatcagcgtca

SEQ ID NO: 694358 - DNA, 120 bp, Artificial Sequence
  ENSG00000188738_10 (sequence is synthesized)
aaatagttcaaataattttacgaaaaaaaactcagcttctgttgtttatcaggcagatgtacaggataatggtataaatcaaaagagagatgggatggtatctaaaaactcaagtatttt

SEQ ID NO: 694359 - DNA, 120 bp, Artificial Sequence
  ENSG00000188738_11 (sequence is synthesized)
cgatgatagaggaggtataaatatttcaggccaaggttcaattatttcagcgcaggtatcacccacgagaaatttttccagagtttcacaggcatttttggatccttcaaaagaagagaa

SEQ ID NO: 694360 - DNA, 120 bp, Artificial Sequence
  ENSG00000188738_12 (sequence is synthesized)
ggagacaaatgctgattgggatggaagaccaaccaagagatcaagctatctctgcgaatcaggacctcaggctcatgctacagacccgggtatattttcttctcctgtttacacaaatat

SEQ ID NO: 694361 - DNA, 120 bp, Artificial Sequence
  ENSG00000188738_13 (sequence is synthesized)
gcaacagaacttgctgcaaaattgcttgcaagaaaaagtaacttctgaagaactgaatattataattcagaatgtaatgacctgggttgtggctacagtgaccagtatattgtacccagc

SEQ ID NO: 694362 - DNA, 120 bp, Artificial Sequence
  ENSG00000188738_14 (sequence is synthesized)
catcacaaagtatgaaaaaagattgcaaaataatacatacccagtatctgatgactccatcctctcttcagatagttcaagtttctgtagcacgtgcagtgaagactttacatatagaag

SEQ ID NO: 694363 - DNA, 120 bp, Artificial Sequence
  ENSG00000188738_15 (sequence is synthesized)
ctacacatctgcaacaactaaaacatttcaggcagaaccctgtgcatttgtagttgacacgtcagtaaggagaccaaccacacctataaaacctcctcctgcacatgtggaaaaaacagt

SEQ ID NO: 694364 - DNA, 120 bp, Artificial Sequence
  ENSG00000188738_16 (sequence is synthesized)
tgtggggaaaacatgtcacataaaaggacaatctataatctctaaacataaatataataaaaccaacttgctatattcataccctaagctcagaagttgtaaatcagatagtcacctttt

SEQ ID NO: 694365 - DNA, 120 bp, Artificial Sequence
  ENSG00000188738_17 (sequence is synthesized)
agcatcatttgaaacaggcacaaaaaaatctaaggatgctaccactgaaacagatagcttagggagttcattgcattgtgataaaacagcaaaagccatggatgaaatgaagaatttaaa

SEQ ID NO: 694366 - DNA, 120 bp, Artificial Sequence
  ENSG00000188738_18 (sequence is synthesized)
aaatgtttttgttaactttaaatgttacttgaaaggggaaactgaagtgattttagaaagcattttgcgagaaataatgtctgatttaacccaggccattccctctctctcttctgttac

SEQ ID NO: 694367 - DNA, 120 bp, Artificial Sequence
  ENSG00000188738_19 (sequence is synthesized)
tgctgaagtttttgttgaacaatgtgaacgtgaaaaagaaatcttgctttccaatgctcatattccctcagttgcttctgagattgtggaaaatatgcttgagaagttagagtctgcagt

SEQ ID NO: 694368 - DNA, 120 bp, Artificial Sequence
  ENSG00000188738_20 (sequence is synthesized)
tgagaaaaaatgtgttgagatgttttcacaagatttgtcagtcgacattaaaccaagtttagcagccagtgatgaacttctcacatcatctaatggaaaacctttgaaaaattcaatgcc

SEQ ID NO: 694369 - DNA, 120 bp, Artificial Sequence
  ENSG00000188738_21 (sequence is synthesized)
tcatactttggacccaatgtgtgatattgcagaggacatggtgcatgccattttagaaaagctaatgactcttgtttcttttaagcaaaatgaatttcttcatcttaaagacacaaataa

SEQ ID NO: 694370 - DNA, 120 bp, Artificial Sequence
  ENSG00000188738_22 (sequence is synthesized)
gctttcctgccagcaacataagacagacccaatatgtatgttccttcaaagagctggcaaaaataaatctagtcttgaatctgatgaagctagtttaattgtcaatgaagaagtacaaaa

SEQ ID NO: 694371 - DNA, 120 bp, Artificial Sequence
  ENSG00000188738_23 (sequence is synthesized)
tttaatatcaaatattttttcccagtcttctttggttgcttatatagaggaagcaatcaatgctatactaggttatatacaaactgaactaaataatgagagaattattgcatctgaaga

SEQ ID NO: 694372 - DNA, 120 bp, Artificial Sequence
  ENSG00000188738_24 (sequence is synthesized)
aaccgtagtactccttcagctacttgaggacatcctttttcagctccatcaggaaccagtaaatgaaagttttcaaaaaagtaggcaacctagaataagtagtccttctgacaccaaaga

SEQ ID NO: 694373 - DNA, 120 bp, Artificial Sequence
  ENSG00000188738_25 (sequence is synthesized)
aaagtacagactcactggcactagattatcaaatagtcctaggtctggaagaccatttccacctataaatgttccaggcatggttctttattctgatgatgaaaatgaggaaatagacaa

SEQ ID NO: 694374 - DNA, 120 bp, Artificial Sequence
  ENSG00000188738_26 (sequence is synthesized)
tattgtaaaaaatgtgcttgattcaactttcaaagatgaaaaagtaaaatcacaagaacagattcctaatcattggtttacaaagggaaacacttgttttgaatgcaaaagaaatatcaa

SEQ ID NO: 694375 - DNA, 120 bp, Artificial Sequence
  ENSG00000188738_27 (sequence is synthesized)
accacctacaaagcctggttctagaagcaaagctgcatttcatgattgggaattaaagactgagccaccatctactaatcatgaagatattttaaagaaaaaactttcttcgaataaaga

SEQ ID NO: 694376 - DNA, 120 bp, Artificial Sequence
  ENSG00000188738_28 (sequence is synthesized)
catttcaactttcagccaagatcaaaagcatcaaatagaaaaggcttcagaaaacatagtcacaagtattttaaaggaaatgctcaaggacatatcttccgttccttttggtcacttaga

SEQ ID NO: 694377 - DNA, 120 bp, Artificial Sequence
  ENSG00000188738_29 (sequence is synthesized)
cagcaaaactggcagtgaagcttcagttcttgtttcagaaaagcctcaaggactgtcacatcaagaatggatagaccagatgttttctgtttcagaaatcagtacagtggctcaagaaat

SEQ ID NO: 694378 - DNA, 120 bp, Artificial Sequence
  ENSG00000188738_30 (sequence is synthesized)
aacagattctgtgttaaacatacttcataaggcatcaaactacatttccaataccactaaaagttccatttcatcatcagttcatcagatttccttacataattctgacactgaacacat

SEQ ID NO: 694379 - DNA, 120 bp, Artificial Sequence
  ENSG00000188738_31 (sequence is synthesized)
agtcaaagaagcaccaaataaatacccattaaaaacatggtttgacagtgaaaagaaaatgaaatatttatctttatttgacgttgatcctgaaaagcctccctggttaaaatctggaaa

SEQ ID NO: 694380 - DNA, 120 bp, Artificial Sequence
  ENSG00000188738_32 (sequence is synthesized)
aagtgaacctaaacctgtagatgacattaatgataagatcattcgtacaatttttaaaagactgaagtcatttatttgtccaaaattgcatatgggcttcaaatcttcattacgatctca

SEQ ID NO: 694381 - DNA, 120 bp, Artificial Sequence
  ENSG00000188738_33 (sequence is synthesized)
acttagtaagtacacagctaaaatagtaaacattgttttatgtgctatccagaatgaactggaacttcacaaggaaaacctaaatcttagggagattgaccataccaaatcccttacaga

SEQ ID NO: 694382 - DNA, 120 bp, Artificial Sequence
  ENSG00000188738_34 (sequence is synthesized)
taaaggattttttgctaatactgataaaaaattagaatctcttgtcacgagtattgatgatgacattttggcgagtccattattaacctgtatttatgatatgttgttatcaagtgaaaa

SEQ ID NO: 694383 - DNA, 120 bp, Artificial Sequence
  ENSG00000188738_35 (sequence is synthesized)
tgcacatcaaagaagcatttcactctcttctcgtaagccaaagtctgcaactgacagtgttgatgtacaaagcattttgccaaataggcaagataaaaaatcttttcacaaatatttggc

SEQ ID NO: 694384 - DNA, 120 bp, Artificial Sequence
  ENSG00000188738_36 (sequence is synthesized)
tactccttgtactcaccacagtgtcaatggtggaaaccatattaaagagaatgcaaaattgcaagtgttagaaagaattggggaaacactacatgaaatgttaagcaagctcctggggac

SEQ ID NO: 694385 - DNA, 120 bp, Artificial Sequence
  ENSG00000188738_37 (sequence is synthesized)
ccatcttcattctcagctatcttgtagtcaacaaagcagagagatgaccaataagaatcagaaaatggctgctgcattgcagtctaatattcagttaatttctaaagcaattttggatta

SEQ ID NO: 694386 - DNA, 120 bp, Artificial Sequence
  ENSG00000188738_38 (sequence is synthesized)
tatccttgcaaaattatgtggtgttgacatggataccagttttgcaagttgtggattaaaagctatctcagagtctcttgacattgacaacccatcatttgcttcaattattgagaaaat

SEQ ID NO: 694387 - DNA, 120 bp, Artificial Sequence
  ENSG00000188738_39 (sequence is synthesized)
ggccaaatccaccaaaataatctccagcatagtttccagaagggttcaggaggacaataaagaagagactaaaagcaaggcaaaacctgttgctcctgtgtcttccaaaacaccaagcac

SEQ ID NO: 694388 - DNA, 120 bp, Artificial Sequence
  ENSG00000188738_40 (sequence is synthesized)
aaaagaaatgcatccaaataaactaaaagctgtagcttcagatattcttaatatggtttttgctaaactggaagggtttgccaacggacatttagaaattttgggtgctattaatgatgg

SEQ ID NO: 694389 - DNA, 120 bp, Artificial Sequence
  ENSG00000188738_41 (sequence is synthesized)
aaataagaaaagcaataagataggctgggaatatgaaagcaccaatatttccagagacacacatgaagcatcatttctgtctgctttatatatgcatgcaaagaaggtatcaagtgctat

SEQ ID NO: 694390 - DNA, 120 bp, Artificial Sequence
  ENSG00000188738_42 (sequence is synthesized)
tttgaaggttattcaaacagaattaaatgtgacctcatcagatttgaagacaagtgtagaaaacccaccacctgagactcaaatacttaagtatgtagtcaagttaattttagatgcagt

SEQ ID NO: 694391 - DNA, 120 bp, Artificial Sequence
  ENSG00000188738_43 (sequence is synthesized)
atcttccgatatgtttaatgaaatggaatctgaagggggaggcattgaaacttatcgatacaggccaacatatggaagtcttcctggaggagctgaatcagattcatttctagaagatga

SEQ ID NO: 694392 - DNA, 120 bp, Artificial Sequence
  ENSG00000188738_44 (sequence is synthesized)
tgcatatacagcgaaaaaaattattgatgagagatccccacaaagagaagaagtgaaaacacgttctcttaaacaatgggctctcgaaaaaaccttaaacaaaattgaagtaaaactcaa

SEQ ID NO: 694393 - DNA, 120 bp, Artificial Sequence
  ENSG00000188738_45 (sequence is synthesized)
agaaccacatatatctccaattgctcccattataagaaatattttgaatgaaatttttcaaagtactttaatcaatcaattaaatgtcctttctctctcccactctaattttaatggcat

SEQ ID NO: 694394 - DNA, 120 bp, Artificial Sequence
  ENSG00000188738_46 (sequence is synthesized)
gcctcacaatgttgatgagccaactccccaaacatctgttcaatttatggataaaatgatggatcctttactttcggaagcagatataaccatagtaacagataatattgttaggactgt

SEQ ID NO: 694395 - DNA, 120 bp, Artificial Sequence
  ENSG00000188738_47 (sequence is synthesized)
atttcacaaactttattcagctgccatgacagaaagaaatgtaagggaaaataggtataaaactatcactttttcagcaaatgtttcttctcatgaacacacctataaaggaaagtcctc

SEQ ID NO: 694396 - DNA, 120 bp, Artificial Sequence
  ENSG00000188738_48 (sequence is synthesized)
tgtcacggctttggatgaaaatccatgtacttttcagtctagattcagcgttgctgacaaggagacaaaggtaaatctagctgaagatattgtacaggcaatattaacaaatttagaaac

SEQ ID NO: 694397 - DNA, 120 bp, Artificial Sequence
  ENSG00000188738_49 (sequence is synthesized)
ttttgctacttccaaagtaaaatctctcttttattctcaagtcaactttacagttccagtggctttacctattcagcaagatcacagtacattgagcaaagcattatcagccaaagattc

SEQ ID NO: 694398 - DNA, 120 bp, Artificial Sequence
  ENSG00000188738_50 (sequence is synthesized)
atattctgatgagcaattttcctgttgctcagtagatcataccaagtcaggaaagaccaacttgtgccaactgtctttgtctaaattaaatacttatgcactacaagtggctagaagaaa

SEQ ID NO: 694399 - DNA, 120 bp, Artificial Sequence
  ENSG00000188738_51 (sequence is synthesized)
tttacaaggaatcaaacaggaattagataaagaaagggaaaatccttttttaactcatgacattgggatttctgaaagtattgcaagtcaaattgttaacgcattgttagacattatatc

SEQ ID NO: 694400 - DNA, 120 bp, Artificial Sequence
  ENSG00000188738_52 (sequence is synthesized)
acgtaaaggcaaatgtgacaaaaacagttctgacaaagagatcgatttagatcagcaaaaaggtgttattgaaaagctgctcaatgagaccaaatatcgaaaagtacttcaacttcaaat

SEQ ID NO: 694401 - DNA, 120 bp, Artificial Sequence
  ENSG00000188738_53 (sequence is synthesized)
acaagataccattgaaggtatcctatgtgatatttatgaaaaaaccctgtttcagaataatctctcatttgccacacccactctgaaatgtagcatagctgataaacattcagaagaaaa

SEQ ID NO: 694402 - DNA, 120 bp, Artificial Sequence
  ENSG00000188738_54 (sequence is synthesized)
ttctgaaatgttcatggagggtgcaaataagattattcctaagctttcagttcctaaatcagatgtcattttgatatccaatgatatagtgaatattgttcttcataatctcagttctgc

SEQ ID NO: 694403 - DNA, 120 bp, Artificial Sequence
  ENSG00000188738_55 (sequence is synthesized)
tgccacgcttgtcataaatgcaaagaatcctacttctgcaagattgcccctgacattttgtgatacgtttccaaaaatagactgtcaacagcctcttaaggggtcaaaaactgaaagaaa

SEQ ID NO: 694404 - DNA, 120 bp, Artificial Sequence
  ENSG00000188738_56 (sequence is synthesized)
aacagagcgtttttcatattcaagaaatcagaaatcagcttatgctgatgataatcagataactgtagtagagaaagaagacactcagaaatctgctactgactcatgtgaggaaaatgc

SEQ ID NO: 694405 - DNA, 120 bp, Artificial Sequence
  ENSG00000188738_57 (sequence is synthesized)
taacttcattactaaaactatttttaaacgtttggaatcttttgccacagaaagaatagattcattaattacccttgctttccaaagtaaagaaaagtcatttgttatcccagaattgga

SEQ ID NO: 694406 - DNA, 120 bp, Artificial Sequence
  ENSG00000188738_58 (sequence is synthesized)
aaattgtaaacaaaatgacagcatcttttatgattcaagccaagtggaatcagatgtaaatgtcctgaaaatatcagcaactgaaaccattctcagccaagagcttacagatttcacttt

SEQ ID NO: 694407 - DNA, 120 bp, Artificial Sequence
  ENSG00000188738_59 (sequence is synthesized)
tgttggtcgcagagaaaaacttggatccacaattcacctatcgcaagctaggcttaagacatatgctgacgtcattgccagtgccattttgaagcttattaaaaatgacttagacttaga

SEQ ID NO: 694408 - DNA, 120 bp, Artificial Sequence
  ENSG00000188738_60 (sequence is synthesized)
aattcaaaagatatatccatatcaaaacaatattttgttccaagaaaacatcattgtgagtgaaattgttgacagtatgttaaagatgttagatgataaaagatctgtaaaggaaatttg

SEQ ID NO: 694409 - DNA, 120 bp, Artificial Sequence
  ENSG00000188738_61 (sequence is synthesized)
ttttaattcaaaagaaaattctaacttttcacaattagctttatcaaatgaaatattgctgggtcacaaagagaaggaaagaagtaccaaacaatctctatttacaaagtatccattaga

SEQ ID NO: 694410 - DNA, 120 bp, Artificial Sequence
  ENSG00000188738_62 (sequence is synthesized)
gcaaaaccaaatgatattggaaaacaaaaggcagataattgttttggaagaaatatttatgagaaatggagaatcaaaaaacaaagaaaaaggtgaactgctcattgcagtggaagaact

SEQ ID NO: 694411 - DNA, 120 bp, Artificial Sequence
  ENSG00000188738_63 (sequence is synthesized)
tttgaataagttgtatcaaagagtaagggaagtcacaggccatttgcctccacttaatgaaactgccaactttatatctaattctaagattaaaacatcagacacaacacagaaaaacag

SEQ ID NO: 694412 - DNA, 120 bp, Artificial Sequence
  ENSG00000188738_64 (sequence is synthesized)
ttttcaatcacatattaacagtgtagcaaatgacatagttgaaagtgttttggggaaaatgtacttggtagttgtgacatcattatatgaaaataataaaagtaggacagaagttgaaat

SEQ ID NO: 694413 - DNA, 120 bp, Artificial Sequence
  ENSG00000188738_65 (sequence is synthesized)
atctgaccacaatgattccttactaatgaaaccattaaggtttagagaaactaaacaagcaggaaaaataagtaattcccctagatatgcgatatcacaggcttattcttatgtcgacag

SEQ ID NO: 694414 - DNA, 120 bp, Artificial Sequence
  ENSG00000188738_66 (sequence is synthesized)
tcaaaatatctctgtgatggaaaacactcttttgccatatttaccattgcaagtgaagaaagacttaattcaaatggttctcaataagatcacaaattttgtctcacttcctttaaaggt

SEQ ID NO: 694415 - DNA, 120 bp, Artificial Sequence
  ENSG00000188738_67 (sequence is synthesized)
gagccctaaggacaaccctaagccatgctttaaagcacatttaaaaacaagatcaaaaattaccactttgcctaaatttacaaaaaaaacacacttaggactgagtgctgctaaggccaa

SEQ ID NO: 694416 - DNA, 120 bp, Artificial Sequence
  ENSG00000188738_68 (sequence is synthesized)
aagcaaaaccaagttaggtcctggagagaagaccctaaaagacagcagatccaagactgccattgggttgtcacacatcatgtcagctggagatgccaaaaatttactggacacaaaatt

SEQ ID NO: 694417 - DNA, 120 bp, Artificial Sequence
  ENSG00000188738_69 (sequence is synthesized)
gcccacttcagaactaaaaatatatgccaaggatataataattaacatcctagaaacaattgtgaaggaatttggaaaggtaaagcaaaccaaagctttaccatctgatcaaatcatagc

SEQ ID NO: 694418 - DNA, 120 bp, Artificial Sequence
  ENSG00000188738_70 (sequence is synthesized)
agcaggtaaaatagttaatacagttttgcaagaattatatgttaccaataactgcaatttggcttacccgatgaaatcctcacatctcagactttcacaggggaatataggcacaggatc

SEQ ID NO: 694419 - DNA, 120 bp, Artificial Sequence
  ENSG00000188738_71 (sequence is synthesized)
ccttcctaaacaacaagcatgtttttacttggagaatgtttcttcacagctagagcacatttttcctagagaaggtatatttaaaaaattgtttgacaagtggcaaacagaatcaaatga

SEQ ID NO: 694420 - DNA, 120 bp, Artificial Sequence
  ENSG00000188738_72 (sequence is synthesized)
caaggaaaatgaaaaatgtaagctattgatgatagctgaaaatgttttgactgaaatttcaataaaagcaaaagaattagaatattctctttcacttttaaatttgccccctcttgagaa

SEQ ID NO: 694421 - DNA, 120 bp, Artificial Sequence
  ENSG00000188738_73 (sequence is synthesized)
ttgtgaaagcaggttttataatcattttaaaggagcttctactagagccgaggatactaaagcacaaattaatatgtttggaagggaaattgttgaaatgctacttgaaaaactacagct

SEQ ID NO: 694422 - DNA, 120 bp, Artificial Sequence
  ENSG00000188738_74 (sequence is synthesized)
atgctttctgtcccaaattcccactccagatagtgaagaaactctatcaaacagtaaagaacacattactgctaaaagtaaatatggttttccaaacaagcatagcctcagcagtttacc

SEQ ID NO: 694423 - DNA, 120 bp, Artificial Sequence
  ENSG00000188738_75 (sequence is synthesized)
aatctataacacaaagacaaaagaccaaatttctgtgggctccagcaaccaaattgttcaagagattgtagaaacggttttaaacatgttagagtcatttgtggacttgcagtttaaaca

SEQ ID NO: 694424 - DNA, 120 bp, Artificial Sequence
  ENSG00000188738_76 (sequence is synthesized)
tatctccaaatatgagttttctgaaattgtgaaaatgcctatagaaaacctttcttctatccaacagaaactgttaaacaaaaaaatgttgccaaaattacaaccactgaaaatgttttc

SEQ ID NO: 694425 - DNA, 120 bp, Artificial Sequence
  ENSG00000188738_77 (sequence is synthesized)
tgataaatccgagtcaaatactattaatttcaaggaaaacatacagaatatccttctacgggttcattcattccattcacaattacttacatatgctgttaatatcatcagtgacatgct

SEQ ID NO: 694426 - DNA, 120 bp, Artificial Sequence
  ENSG00000188738_78 (sequence is synthesized)
tgctgtaattaagaacaagctagacaacgaaataagccaaatggaaccatcttcaattagcatattgaaagagaacattgtagcaagtgagatcattggcacactaatggaccagtgtac

SEQ ID NO: 694427 - DNA, 120 bp, Artificial Sequence
  ENSG00000188738_79 (sequence is synthesized)
ttatttcaatgagtctttgatacaaaacctttcaagagaaagtttgttccaaggagctgaaaatgcctacactgttaatcaggttgaattagcaactaatatgaaaatgttcacatcaaa

SEQ ID NO: 694428 - DNA, 120 bp, Artificial Sequence
  ENSG00000188738_80 (sequence is synthesized)
gttaaaggaaggtagtttggggattaatccttcacaagtgagtaaaactgggtttgtgttttgttcagatgaagatatgaaagaaaagtacagggtttcatcagatttacccacctctgt

SEQ ID NO: 694429 - DNA, 120 bp, Artificial Sequence
  ENSG00000188738_81 (sequence is synthesized)
cagatcctctgtagaagacacagttaaaaactcagagccaacgaaaaggcctgattcagaaactatgccatcgtgttctactagaaacaaagtacaagaccacagaccaagggaatctaa

SEQ ID NO: 694430 - DNA, 120 bp, Artificial Sequence
  ENSG00000188738_82 (sequence is synthesized)
ctttggtagttttgatcagaccatgaaaggaaatagctacctccctgaaggcagtttcttacaaaagctgcttaggaaagcaagtgactccacagaagcagcattaaagcaagtcttgtc

SEQ ID NO: 694431 - DNA, 120 bp, Artificial Sequence
  ENSG00000188738_83 (sequence is synthesized)
attcatagaaatgggaaaaggtgaaaatctaagagtgtttcattatgagaacctaaaaccagttgttgaaccaaaccaaattcagacaaccatttcccctctcaaaatatgtttagctgc

SEQ ID NO: 694432 - DNA, 120 bp, Artificial Sequence
  ENSG00000188738_84 (sequence is synthesized)
agaaaatattgtcaatactgtgctatccagctgtggctttccaagtcaaccacacactaatgagaacagggaaataatgaaaccatttttcatatcaaaacaaagctctttatctgaagt

SEQ ID NO: 694433 - DNA, 120 bp, Artificial Sequence
  ENSG00000188738_85 (sequence is synthesized)
atctggagggcaaaaggataacgaaaaaagtttgcttagaatgcaggataaaaaaatcaactatatacctgaggaagaaaatgaaaaccttgaagccagccgggaagattcttctttttt

SEQ ID NO: 694434 - DNA, 120 bp, Artificial Sequence
  ENSG00000188738_86 (sequence is synthesized)
ccacatctgtggtcacatatttgaagaactttgaaactacagtttttagtgaggaaaagatgtctgtttctacatggtcaaggaaaaaatatgaatcaaaacagttcctaagaaacatat

SEQ ID NO: 694435 - DNA, 120 bp, Artificial Sequence
  ENSG00000188738_87 (sequence is synthesized)
acgatgattcttcaatttatcaatgttgtgaacatctcactgagtcagtactttaccatttaacttcgagcatttctgatggcaccaaaaagggtagagaaaaagagaaagcatgggaaa

SEQ ID NO: 694436 - DNA, 120 bp, Artificial Sequence
  ENSG00000188738_88 (sequence is synthesized)
ttcaagaagcaacatttagcaagattatttcaattcattctcaagtgtttgagagcaggtcaatttccattggagaacttgctttatgtatttctgaaatcattattaaaattcttttta

SEQ ID NO: 694437 - DNA, 120 bp, Artificial Sequence
  ENSG00000188738_89 (sequence is synthesized)
ataataaaattatacaggctgacattgcacagaaaatggttgccatacctacaaaatacacttactgtccaggaatagtttctggtggctttgatgacctctttcaggatctcttagtag

SEQ ID NO: 694438 - DNA, 120 bp, Artificial Sequence
  ENSG00000188738_90 (sequence is synthesized)
gagtgattcatgtactgtccaaagaaatagaagtagattatcactttgaaagcaatgtaagaaacaaatcattttctatgcatagaaataatagtgtacccctttgcaacaaaatcaata

SEQ ID NO: 694439 - DNA, 120 bp, Artificial Sequence
  ENSG00000188738_91 (sequence is synthesized)
gacaggcaagccccagagactggcaattttctactcaacaaattggtcaactttttcaaaaaaataagttaagttatcttgcatgtaagttaaacagcctggttggtaacctaaaaacaa

SEQ ID NO: 694440 - DNA, 120 bp, Artificial Sequence
  ENSG00000188738_92 (sequence is synthesized)
gtgaatccaaagaagtagtcaataaagtttttaatattgtttcagatttattttcaccagatgaatgcctagatacgggtatggattctggtaaaatacaaagaacatatttctactcct

SEQ ID NO: 694441 - DNA, 120 bp, Artificial Sequence
  ENSG00000188738_93 (sequence is synthesized)
cgaataatgagcaacctaatagcatacttaccaataacctacagctctcctcaaaatcagtttttcttctcaatgttgtatgtgagaaacttatcagaatacttttggaagaatgcacaa

SEQ ID NO: 694442 - DNA, 120 bp, Artificial Sequence
  ENSG00000188738_94 (sequence is synthesized)
gcactgcttttcctgataaagggtctgtttcagaggaaacatcagcagaagaatgtcaacttttaaaaatgcttcaaagtgtagaagatggaaaatctgattatcgtaagggaggaatgg

SEQ ID NO: 694443 - DNA, 120 bp, Artificial Sequence
  ENSG00000188738_95 (sequence is synthesized)
actgtgaatgccttcaagtagattacatgtcagaccttttggagaatgtggcagaaattgatcaagacttattgacatcagactctatgcttactattatttcccacagcttggttaaat

SEQ ID NO: 694444 - DNA, 120 bp, Artificial Sequence
  ENSG00000188738_96 (sequence is synthesized)
cattgatggacaaattatctcacagcatacaacaagctccggaaagtctaccttttgcaaataagcatttgaactacagaacaagagaaatacagtctagtttcataaaagcaagaaagt

SEQ ID NO: 694445 - DNA, 120 bp, Artificial Sequence
  ENSG00000188738_97 (sequence is synthesized)
cagaattaatagaattaggacagagtaaaagttctttagaactcaggagctatgatagtaattctttgacagtatccctgaataatcccagtgtggttagctccaaaatacaagcaccat

SEQ ID NO: 694446 - DNA, 120 bp, Artificial Sequence
  ENSG00000188738_98 (sequence is synthesized)
ttaacaagcattgtgcagtaaaatcctcttctgtgtcaccttttgaaagacagagaacaaaggaaatggataaggtagccattcataataagctacatcaggaaggtatatatgctggtg

SEQ ID NO: 694447 - DNA, 120 bp, Artificial Sequence
  ENSG00000188738_99 (sequence is synthesized)
tttattcagccacatttttggaaggaataatttcagaattgttttttaatctctctatgtcattgtggggcaaaaataaaaacatcactgtgtcctggctcaatgagatgaatacattat

SEQ ID NO: 694448 - DNA, 120 bp, Artificial Sequence
  ENSG00000188738_100 (sequence is synthesized)
ttgtcaacaatgtagtgaatgaatttaataatgctcaagtcactgttctacggaatgctgaagaaaggctgtgttttccaccagttcatacagaaactgttagcaaaattgttgactcag

SEQ ID NO: 694449 - DNA, 120 bp, Artificial Sequence
  ENSG00000188738_101 (sequence is synthesized)
tttattatgatgttttacagcagtatgaattaaaagtggcctgtggtaataatccggtatacgacaatgcctcaatagcagaacaaataacaaatggcatattgttagagattttagact

SEQ ID NO: 694450 - DNA, 120 bp, Artificial Sequence
  ENSG00000188738_102 (sequence is synthesized)
acaaactgccatcttgcttcaaggaacatctcataccccattcatattaccctctcaaacctgaaattatattgcaaaagcttcaaagtaacctaacagaatttacttctctacccaggt

SEQ ID NO: 694451 - DNA, 120 bp, Artificial Sequence
  ENSG00000188738_103 (sequence is synthesized)
cttcatcagactatagtaccatgttatcacattcatttttagaagatgtcataagaaggcttttatctcagctaattcctccacccattacatgttcctctttaggaaaaaaatatttaa

SEQ ID NO: 694452 - DNA, 120 bp, Artificial Sequence
  ENSG00000188738_104 (sequence is synthesized)
tgagttctgattttaatgaaatgtccacttgtataataaataaggttatgtcagccatttcaaaacataaaatctggttcactatatatgataatcaatatctatatactggaaaaaacc

SEQ ID NO: 694453 - DNA, 120 bp, Artificial Sequence
  ENSG00000188738_105 (sequence is synthesized)
tccaaaagatggtggattctgtatattgtaatattttgcaaatgtctgactctcttgtttcaatacaaaaaagtatagtaagccgaagcccaattatgattgaccaaatagccagcttta

SEQ ID NO: 694454 - DNA, 120 bp, Artificial Sequence
  ENSG00000188738_106 (sequence is synthesized)
tcatccaagagattatcgaaaatcatcttcaaccatttttgagtggagaggttttatgtcatccaaggactccactggatccagtgtctactattgttacacaggttctgagtgaagtga

SEQ ID NO: 694455 - DNA, 120 bp, Artificial Sequence
  ENSG00000188738_107 (sequence is synthesized)
tagagtcacacagacctcagaagcaatcacctttagatattcaccttgattcatttgtaagggagattgttgccagacttttgtcaaagattttcagcccaaagcataacactgaaattg

SEQ ID NO: 694456 - DNA, 120 bp, Artificial Sequence
  ENSG00000188738_108 (sequence is synthesized)
agttgaaaaacatgacccaaagaatagtaaactccataaataggcatttcaataaagctaaaattcacattctctatgatgacaaagaacaggctttcttttctttcaatacagatattg

SEQ ID NO: 694457 - DNA, 120 bp, Artificial Sequence
  ENSG00000188738_109 (sequence is synthesized)
tggatgaacttgccacctcagtttatagaaatgctttaaagcagcatgggctagaccttgctgttgataaagagtctgaagacagtggcatttttgtggaaaatattaccaatttaattg

SEQ ID NO: 694458 - DNA, 120 bp, Artificial Sequence
  ENSG00000188738_110 (sequence is synthesized)
tagcagctatttcagattaccttcttcatccactgttttctggggatttttcagcttctacctattctaattcagtggctgagaatattgttcaggacatccttagtaacatcagtaaat

SEQ ID NO: 694459 - DNA, 120 bp, Artificial Sequence
  ENSG00000188738_111 (sequence is synthesized)
ctactgagccaagccagagtgtacctctatataacaccttgctgccatacacatttttagaagatatgatcagagtactattatctaaattattttcttctgcatctagcctggttctaa

SEQ ID NO: 694460 - DNA, 120 bp, Artificial Sequence
  ENSG00000188738_112 (sequence is synthesized)
acagagacacccaaaaagatatatcaagagtgaatttcaatgacattgcttcaaacctagttagtgatattaggatgaaagtttcccaacatgaaattcgattttcaaaagaggaagaag

SEQ ID NO: 694461 - DNA, 120 bp, Artificial Sequence
  ENSG00000188738_113 (sequence is synthesized)
aaaccaagtttatttattcagaagatgatattcagcaccttgttgattcagtatttgcaaatgttgtgcaaacctctggttctcaagaatcagctgtgcaaaatatcacaagcagtaatg

SEQ ID NO: 694462 - DNA, 120 bp, Artificial Sequence
  ENSG00000188738_114 (sequence is synthesized)
acattcttatagatagaatagcaggtttcatcattaaacatatctgtcaaaaacatcttcagccatttgtgagtggaaaatcattatcttcatcagacacatattttgatgatgagagaa

SEQ ID NO: 694463 - DNA, 120 bp, Artificial Sequence
  ENSG00000188738_115 (sequence is synthesized)
ggcagttattttataccagtgtttactcttcaacattcttggaagatgtaatctctggggttttaagaaaaatattccacagggtagtaggcattgtacaaacaaaatccataagagatt

SEQ ID NO: 694464 - DNA, 120 bp, Artificial Sequence
  ENSG00000188738_116 (sequence is synthesized)
cagaagatgaactgtttgagaaagctgaagaactcatacatttgattacaggggaattctcaaaagcccaagttagcattatagataatactgaggaaagactgtgtttacctccagtgg

SEQ ID NO: 694465 - DNA, 120 bp, Artificial Sequence
  ENSG00000188738_117 (sequence is synthesized)
agagggatgtagtcaaaacaattgttgacatggtgtacagcaaagttttgcaagaatatgaaatggaagtcgtgcccaataaagattttctaaatgacacaaagacattggctgcaagaa

SEQ ID NO: 694466 - DNA, 120 bp, Artificial Sequence
  ENSG00000188738_118 (sequence is synthesized)
taactaatatcatcctggctgaaatttttgatttccaaattcatccagatcttatagcaaatctgccttttaaatcacattccaaactcagtgcaaatgttttaatacaaagagttcaat

SEQ ID NO: 694467 - DNA, 120 bp, Artificial Sequence
  ENSG00000188738_119 (sequence is synthesized)
atgatataagtaaatcaagattccaaagacaagcttcaacaatgtataccactatgttatcacatagtcatttggaaaaaatagttactcagcttacatctcagataagtccattgaaca

SEQ ID NO: 694468 - DNA, 120 bp, Artificial Sequence
  ENSG00000188738_120 (sequence is synthesized)
ccagtgcagagcagtcagatactactaaatcagacttaagtaatacagtgataaaactgataaatgaaattatgtcaataatttcaaaacatgaaatatgtattattaaatatgggaata

SEQ ID NO: 694469 - DNA, 120 bp, Artificial Sequence
  ENSG00000188738_121 (sequence is synthesized)
aaaaacagagtatgatttcagcaaaagatatccagtctatggttgattccatttatgctgatctttctcattcaaatatataccagtccattacaaaagataaaaagagcataagtgaca

SEQ ID NO: 694470 - DNA, 120 bp, Artificial Sequence
  ENSG00000188738_122 (sequence is synthesized)
tacctgtttcaaaaatagcgagttttataataaaagaaatctttaaccatcatattcaatcatttttatctgaagataaaactctccttttggcagcagttgatcaaacttataaattga

SEQ ID NO: 694471 - DNA, 120 bp, Artificial Sequence
  ENSG00000188738_123 (sequence is synthesized)
aagcaatagatcctaaacaaagagaattatcttttattgtgaactcatctgtctttttggaggaagtaatttctgagctcttatgcaaaattctttatgcattttcacataacatgttgg

SEQ ID NO: 694472 - DNA, 120 bp, Artificial Sequence
  ENSG00000188738_124 (sequence is synthesized)
ttactgaaaatccagatagagtgaaactgaaacttaccaggattgttacaacattggtaaattcaattgttctggagttcaccacatcagagattttagttgcagataactttgataaaa

SEQ ID NO: 694473 - DNA, 120 bp, Artificial Sequence
  ENSG00000188738_125 (sequence is synthesized)
atttgtgtttctcagaaagatacaaagaaatggttcaaaaaatagtcaactcagtatatggaaaagtattagatcaatataaatctctgattcaaatacatagggttatacaaagtgaca

SEQ ID NO: 694474 - DNA, 120 bp, Artificial Sequence
  ENSG00000188738_126 (sequence is synthesized)
caatatgttttggtaggaaaatatattatttgctattggaagaaatatatgattatcaagtgcagtcattagtttcaggagaattagagtcttcttcttattcgtatccccaagctgata

SEQ ID NO: 694475 - DNA, 120 bp, Artificial Sequence
  ENSG00000188738_127 (sequence is synthesized)
atatcatcagaaatgtgcttaacataatcacaaaggatagccatgccttgccaccatatattactgtgttgcctcattctcttttagaagatatggtttacaggcttctagggcatgtct

SEQ ID NO: 694476 - DNA, 120 bp, Artificial Sequence
  ENSG00000188738_128 (sequence is synthesized)
tcccttcaactcacactgaaaatgaactaaaagagaaaaagtttccaccggatgatgaatttgtggaggcagcttcaaaattgactgatgaaattataaaagaaatttctgaacatgaga

SEQ ID NO: 694477 - DNA, 120 bp, Artificial Sequence
  ENSG00000188738_129 (sequence is synthesized)
ttcgactttccatggcagaggataatgcagaaagtatgcagttagaacctattgaaaatttggtcgactccatatgtaataatattttgaaaacatctgaattccaagctgaagtacaaa

SEQ ID NO: 694478 - DNA, 120 bp, Artificial Sequence
  ENSG00000188738_130 (sequence is synthesized)
aagatgcagacaaaaaaggatgctcattcctcagtaaattagctggttttattatgaaagaaatcatgtatcatcatttacagccatttttacatggtgaagaatcatctttcagtgact

SEQ ID NO: 694479 - DNA, 120 bp, Artificial Sequence
  ENSG00000188738_131 (sequence is synthesized)
tatctgattatgaccatgtctctgaacttgctaaatctggtaaagaaaagacacagccttctctctattcagctacatttttggaagacataatcattgaccttgttcacaaattttgtt

SEQ ID NO: 694480 - DNA, 120 bp, Artificial Sequence
  ENSG00000188738_132 (sequence is synthesized)
ctctcctcattattactgaagattctaagaaaaatgaaatggcagagctagatattatgggcttggctctaaaacttgcaaattctctgataagggaatttaagaaaagtgatattaaag

SEQ ID NO: 694481 - DNA, 120 bp, Artificial Sequence
  ENSG00000188738_133 (sequence is synthesized)
ttttaccaaatgctgaaaaaatgttttcttttccaccaattgataaagagacagttgataaaatatccaattttgtatatgaacagttcatagaaaaatgcacatctcatgatattcaaa

SEQ ID NO: 694482 - DNA, 120 bp, Artificial Sequence
  ENSG00000188738_134 (sequence is synthesized)
aaggtgatgaaagtaacattgctatagggatgattgctgctctaacccagaaggcaatatctgcattcaggattcaaccacttttttcaggagactggtcttccaccttcttttcatttc

SEQ ID NO: 694483 - DNA, 120 bp, Artificial Sequence
  ENSG00000188738_135 (sequence is synthesized)
taaatccagataatatcacccaaagggttcaacacctaccacaaaacacctttacacaaataagcagatgtgcaaaagagaaccaactttctttaccagatcaatcatataaagatactt

SEQ ID NO: 694484 - DNA, 120 bp, Artificial Sequence
  ENSG00000188738_136 (sequence is synthesized)
cttccaccccagattgcaaaaacatgatgagcactttggaaataaatagaggtacaatgaatagaaagaaaagttttaaaaccaaggacacatcagtgaaaaaaggtgacatccaaaatc

SEQ ID NO: 694485 - DNA, 120 bp, Artificial Sequence
  ENSG00000188738_137 (sequence is synthesized)
cagtacttagctctataaatgcaattatgaaaagcggcatgattaacctaacatcagggttggctacaggtgtgacaaataaaaaggaagtggatgaaaataaagtgggaatttgtactc

SEQ ID NO: 694486 - DNA, 120 bp, Artificial Sequence
  ENSG00000188738_138 (sequence is synthesized)
aaaaacatagtgagaatgtatcaaaagttacttcaactaccactgtgaaaagtaaagatactcaggagccaaatttgagtgaaacatttaataataatgaaattgagaagaaaagaaatt

SEQ ID NO: 694487 - DNA, 120 bp, Artificial Sequence
  ENSG00000188738_139 (sequence is synthesized)
taattccaacagataaaaaagggaaagatgatgagatatacacacatttttcattaataattgatgatacagaatatgagaaggaagtacttggatcagattctgaaataggctataaaa

SEQ ID NO: 694488 - DNA, 120 bp, Artificial Sequence
  ENSG00000188738_140 (sequence is synthesized)
agaagattgacaatgcaagggaaagctcatttaaaaaagatgacaagctctttcagttatcctccttgaagtccaagagaaatctagggactacaacagatactttggaaataagaattc

SEQ ID NO: 694489 - DNA, 120 bp, Artificial Sequence
  ENSG00000188738_141 (sequence is synthesized)
gaacatcaagcaatgaggggagaagagactctccaacacaaacgtgtagggatgaggaacaccactcagattatgaacatgttcaaaatgtcattgaaaatatttttgaagatgttttag

SEQ ID NO: 694490 - DNA, 120 bp, Artificial Sequence
  ENSG00000188738_142 (sequence is synthesized)
aactatcttcttctccagaaccagcatattattcgaaactcagttatgaccaaagccccccaggtgataatgtattaaatgtaattcaagagattagcagggattcggcacagtctgtta

SEQ ID NO: 694491 - DNA, 120 bp, Artificial Sequence
  ENSG00000188738_143 (sequence is synthesized)
caacaaaaaaagtatcctcctcaactaacaaaaatatctctgccaaagaaaaagaagaggaagagagagaaaaagagaaagtaagagaggagattaaaagtgaacccagtaaaccagatg

SEQ ID NO: 694492 - DNA, 120 bp, Artificial Sequence
  ENSG00000188738_144 (sequence is synthesized)
atcctcaaaaccaacgagaaagtaaacctggaatttttcccgctaagtttttagaagatgttattactgagatggttaaacaattgatcttttcttctataccagaaacacaaatacaag

SEQ ID NO: 694493 - DNA, 120 bp, Artificial Sequence
  ENSG00000188738_145 (sequence is synthesized)
atagatgtcaaaatgttagtgataagcaaaatcaagccaaactctatgacactgctatgaaactcatcaattcactgttaaaggagttctcagatgctcaaattaaggttttcaggccag

SEQ ID NO: 694494 - DNA, 120 bp, Artificial Sequence
  ENSG00000188738_146 (sequence is synthesized)
ataagggaaatcagttccctgggggtaaagtgtcttcagttcctaaagtacctccaaggtataaagagccaactacagatgaagcaccatccagcattaagataaaatctgcagataaaa

SEQ ID NO: 694495 - DNA, 120 bp, Artificial Sequence
  ENSG00000188738_147 (sequence is synthesized)
tgccacctatgcataaaatgatgagaaaaccttcttcagataagataccatcaattgacaaaacattggtcaataaagttgttcactcctctgtttgtaatattttaaatgactatggat

SEQ ID NO: 694496 - DNA, 120 bp, Artificial Sequence
  ENSG00000188738_148 (sequence is synthesized)
ctcaagactctatttggaagaatataaacagtaatggagaaaatttagcaagaagactaactagtgcagtgataaatgaaattttccaacgtcaggttaacttgatattttgtgatgagg

SEQ ID NO: 694497 - DNA, 120 bp, Artificial Sequence
  ENSG00000188738_149 (sequence is synthesized)
tttcagtttcagcatgtttgcctctggaatctaaggatgttgttaaaaaggtccaaaagttggcccaaacagccagcaaagaatgtcaaacttcatcaccatatacaataatattacctc

SEQ ID NO: 694498 - DNA, 120 bp, Artificial Sequence
  ENSG00000188738_150 (sequence is synthesized)
ataaatttttggagaatgtgatttctgctcttttctccaaaattttctcaacaatatccagcacaaaaacaaaagaacctgaggacaatttgtccacagaactgaatttccttcaaatga

SEQ ID NO: 694499 - DNA, 120 bp, Artificial Sequence
  ENSG00000188738_151 (sequence is synthesized)
agttagtaagtgcagttgcaacagagatctcccaagataaatatatgactatacagtatgtagaaaccttacaatctgatgatgatgaaattattcaattagtggttcagtctgtttata

SEQ ID NO: 694500 - DNA, 120 bp, Artificial Sequence
  ENSG00000188738_152 (sequence is synthesized)
ataatctcttgccacagtttggatcacaagagattatacaaaattgtgtaaccagtggatgcaaaatcctttcagaaaacatagttgacttggttctacgagaagtggctagcaatcagc

SEQ ID NO: 694501 - DNA, 120 bp, Artificial Sequence
  ENSG00000188738_153 (sequence is synthesized)
tgcagagctatttttgtggagagctaactccacatcagtgtgtggaagttgaaaacatcgttgaaaagatccttaaagatgttttccaaactactgatgtgcccctacctaaaccttcac

SEQ ID NO: 694502 - DNA, 120 bp, Artificial Sequence
  ENSG00000188738_154 (sequence is synthesized)
atgctgataagctgtcttataacataatagaagaaattgctgtgaaatttttatcaaagcttttatctatatttccaaaagtacataaagaaagaacaaaatctctagagactgatatgc

SEQ ID NO: 694503 - DNA, 120 bp, Artificial Sequence
  ENSG00000188738_155 (sequence is synthesized)
aaaaaataacttcaaaagtactaaattcagtccaagaatttatctccaaaagtaagattaaacttgtaccacccaccaaggaatcacctactgtgcctgtagctgataatgcaactattg

SEQ ID NO: 694504 - DNA, 120 bp, Artificial Sequence
  ENSG00000188738_156 (sequence is synthesized)
aaaacatagttaattctatttataccagtgttttaaagcactctggctcttatacttctgtatttaaagatttaatgggtaaaagcaatgtcctctctgatacaataggctttttaatgg

SEQ ID NO: 694505 - DNA, 120 bp, Artificial Sequence
  ENSG00000188738_157 (sequence is synthesized)
tgaatgcaatttcgaattctgaatttcaacctcaagtagaggaagaagtatcaaattcagaattagttctggaagctgtcaaaattatggaaaaagtgatcaaaattattgatgaactta

SEQ ID NO: 694506 - DNA, 120 bp, Artificial Sequence
  ENSG00000188738_158 (sequence is synthesized)
agtctaaggaaaagtcttcatccagaaaaggtttgacattagatgccaaacttttagaagaggtgttggccttgttcttggctaaactaataaggttgccaagttcctcaagcaaagatg

SEQ ID NO: 694507 - DNA, 120 bp, Artificial Sequence
  ENSG00000188738_159 (sequence is synthesized)
aaaaaaacttatcaaagactgagttaaataaaattgcatctcaactgtcaaaattggtaacagctgaaatttccagaagtagcattagtctaatagcttctgatcctgaagagcactgtt

SEQ ID NO: 694508 - DNA, 120 bp, Artificial Sequence
  ENSG00000188738_160 (sequence is synthesized)
taaatccagaaaatacagaaaggatttatcaggttgtcgattccgtttatagtaacatactgcaacaatcaggaaccaacaaagaattttattatgatataaaagatacaaatacagcct

SEQ ID NO: 694509 - DNA, 120 bp, Artificial Sequence
  ENSG00000188738_161 (sequence is synthesized)
ttcctaaaaaagtggctagtttaattattgatggagtttcaagttttccattagatacaattaactcaacaatttcaaatgctgatctctctggagagctagacgttaatagaattgttc

SEQ ID NO: 694510 - DNA, 120 bp, Artificial Sequence
  ENSG00000188738_162 (sequence is synthesized)
aaaaggcccaagaacatgcttttaatgtgattcctgaattagagcaagaaaagttagatcaaaatttatctgaagaggaatctccaattaaaatagttccacatgttggaaaaaaaccag

SEQ ID NO: 694511 - DNA, 120 bp, Artificial Sequence
  ENSG00000188738_163 (sequence is synthesized)
tcaaaatagatccaaaaattatttcagaacacttagcagttatttctataaaaactcaacctcttgagaaacttaagcaggagtgtttgaaaagaactggacatagcatagcagaactga

SEQ ID NO: 694512 - DNA, 120 bp, Artificial Sequence
  ENSG00000188738_164 (sequence is synthesized)
gaagagcatcaataagtgggagaaattactccttaggatcacctgatttagaaaagagaaagacagaaagacgtacctcattggataagactggaagactggatgtaaaacccctagagg

SEQ ID NO: 694513 - DNA, 120 bp, Artificial Sequence
  ENSG00000188738_165 (sequence is synthesized)
ccgttgctagaaattcatttcagaatataagaaagcctgatattacaaaggtggagctcttaaaagatgttcaaagtaaaaatgatcttattgttcgattagtagctcatgatattgatc

SEQ ID NO: 694514 - DNA, 120 bp, Artificial Sequence
  ENSG00000188738_166 (sequence is synthesized)
aagtgtatttggaaaattacataaaagaggaacgagattctgatgaagatgaagttgttttaacacagacttttgcaaaagaagaaggcatcaaagtatttgaagatcaagtgaaagaag

SEQ ID NO: 694515 - DNA, 120 bp, Artificial Sequence
  ENSG00000188738_167 (sequence is synthesized)
tcaagaagccaatacaaagcaaactttctcctaagtcaacactaagcacgagcagcctgaaaaaatttttgtcactaagtaaatgttgtcagaccacagccagtgcaaatattgaaagta

SEQ ID NO: 694516 - DNA, 120 bp, Artificial Sequence
  ENSG00000188738_168 (sequence is synthesized)
ctgaagcaatctcaaatcaggtaatagaatccaaggagacacatgttaaaagagctgttgctgagcttgacatggccacaccaaagacgatgcctgaaacagcctcttcatcttgggagg

SEQ ID NO: 694517 - DNA, 120 bp, Artificial Sequence
  ENSG00000188738_169 (sequence is synthesized)
aaaagccccagtgtaagaaagaagaaaagaatcttgttactgaaccaacacattacttcatacacagaattatgagttcatcttcatacaaccaagaagatctcatttcatctactggtg

SEQ ID NO: 694518 - DNA, 120 bp, Artificial Sequence
  ENSG00000188738_170 (sequence is synthesized)
aggctgaagattgtcactcagacccaagtgctaaaatattagaagaaagttctcaggaacaaaagccagagcatggaaacagtgttaagtttatcaccatctttgaaagatccaaggatg

SEQ ID NO: 694519 - DNA, 120 bp, Artificial Sequence
  ENSG00000188738_171 (sequence is synthesized)
ttcttggcagtgcaaatccctcaaaggaagtcatttcagaaactcccaagcccgatgtctccaaacaaggatctaaaatgctgacaaaaatgtcttcaactttgtcaaaggtgttttctc

SEQ ID NO: 694520 - DNA, 120 bp, Artificial Sequence
  ENSG00000188738_172 (sequence is synthesized)
aatgtaacaccaatatttccagatcttcctcaccagctcaccaggatgaacactgaagcttttgtacctgatataagtatgcttacttcttttagaaaataaaatggtttttaaagcata

SEQ ID NO: 694521 - DNA, 120 bp, Artificial Sequence
  ENSG00000188738_173 (sequence is synthesized)
tttggaagaaatgcttgattatatgtagagtgttcttctaataatattttgatcctttattattgacaaagtaattgaatattttttccaagtgaaaatttacagtaggaataaacaata

SEQ ID NO: 694522 - DNA, 120 bp, Artificial Sequence
  ENSG00000188738_174 (sequence is synthesized)
tggccaagaatgggaaagggactgggttatctatcaacacaccagtggtagctggcataattcaataactaaattgctagtcagatgtgttgtttccccctgagctaatgccaataacaa

SEQ ID NO: 694523 - DNA, 120 bp, Artificial Sequence
  ENSG00000188738_175 (sequence is synthesized)
acatctcttgtggcagaaagattcttaaattgaaacctaaaacagtttgagccataggaaaagaacaataattatctgtagtgttctacagtgattcaagaatatgtacactctgtgttt

SEQ ID NO: 694524 - DNA, 120 bp, Artificial Sequence
  ENSG00000188738_176 (sequence is synthesized)
gtactcatacacgtgcacctgtaaaaatgttgttcttgaatgtgaacaaaatgttgttcttgaatgtgaagtagaatgattgggtgtagagtgaatggttatggatagtgacttcctttt

SEQ ID NO: 694525 - DNA, 90 bp, Artificial Sequence
  ENSG00000188738_177 (sequence is synthesized)
gatttttgacttaaaggtgtgttgtgtgaattcagattttagggtcaagaggtttggatcaaagtgagaaaggtatatttacatgagtgt

SEQ ID NO: 694526 - DNA, 120 bp, Artificial Sequence
  ENSG00000188738_178 (sequence is synthesized)
tcaagctatctctgcgaatcaggtaaatatcagcagtaattattgagtaaatcttgcattctatttattctttcaactgacatttactgagtttttgcttcatgttagatatggtgctaa

SEQ ID NO: 694527 - DNA, 120 bp, Artificial Sequence
  ENSG00000188738_179 (sequence is synthesized)
gttttaatcattcaaggaaaaatggcacaatttttgctcagggttcttacagtatacttggaaagatagtcatggcccaatatgataagagcaataaaggaagtgggtatgtgtaaaagc

SEQ ID NO: 694528 - DNA, 120 bp, Artificial Sequence
  ENSG00000188738_180 (sequence is synthesized)
tgggaaagttatgggaaagagaatgcatagacctatctagggtcatcatagaagcctttataatttagaaagagactgcgttgagacatgaaggatcagaaggaatttcctattttcttt

SEQ ID NO: 694529 - DNA, 120 bp, Artificial Sequence
  ENSG00000188738_181 (sequence is synthesized)
ttgttatttttattgtttgtactaatgttgacaaccaaaatttgcaaaaaaattaaagtttttgtactcatatccttatacttactgttttctgcttttacagcagcttctctcccacac

SEQ ID NO: 694530 - DNA, 120 bp, Artificial Sequence
  ENSG00000188738_182 (sequence is synthesized)
cacaactttattaaggtatagtggataatttaaaactgtatatattgacggtacagatggtccccaacttgtaatgattcaatttagggtttttcaactttactgtcggtttattggggt

SEQ ID NO: 694531 - DNA, 120 bp, Artificial Sequence
  ENSG00000188738_183 (sequence is synthesized)
tacaacttgatatgtgtatatacagtaaagtgttcaccacaagcaagccaattaacatatcctcacttcatgtagttactatttgtgtgtggtggcagaagaacacttaagagctactct

SEQ ID NO: 694532 - DNA, 120 bp, Artificial Sequence
  ENSG00000188739_0 (sequence is synthesized)
agtctgggagtctttggagtaagaatggccttggaagggatgagcaaacggaagagaaagagaagtgtccaggagggagagaatcctgacgacggcgttcgcgggagtccgccggaagac

SEQ ID NO: 694533 - DNA, 120 bp, Artificial Sequence
  ENSG00000188739_1 (sequence is synthesized)
tacaggcttggacaggtcgccagtagcttatttcgcggcgaacaccattccagaggtggcaccggtcggctggcgtccctcttcagttctctggagccccagattcaacccgtgtacgtg

SEQ ID NO: 694534 - DNA, 120 bp, Artificial Sequence
  ENSG00000188739_2 (sequence is synthesized)
cctgtgcctaaacaaaccatcaaaaaaacgaaacggaatgaggaggaagaaagtacatcccagattgaaagaccactttcgcaagaacctgccaaaaaagtgaaagcgaagaagaaacac

SEQ ID NO: 694535 - DNA, 120 bp, Artificial Sequence
  ENSG00000188739_3 (sequence is synthesized)
actaacgcagaaaaaaagttggcagacagggaaagcgctctagcgagtgctgatttagaagaagaaattcaccagaaacaagggcagaaaaggaaaaattctcaacctggtgttaaagta

SEQ ID NO: 694536 - DNA, 120 bp, Artificial Sequence
  ENSG00000188739_4 (sequence is synthesized)
gcagatagaaaaatacttgatgacacagaagacacagttgtcagtcaaagaaagaaaattcaaatcaaccaagaagaagagagattaaagaatgagagaactgtgtttgttgggaatttg

SEQ ID NO: 694537 - DNA, 120 bp, Artificial Sequence
  ENSG00000188739_5 (sequence is synthesized)
cctgttacatgtaataagaagaagctgaagtcgttttttaaagagtatggacaaatagaatctgtacgatttcgttctctgattccagcagagggaacgctatccaaaaagttggcagca

SEQ ID NO: 694538 - DNA, 120 bp, Artificial Sequence
  ENSG00000188739_6 (sequence is synthesized)
ataaaacgtaaaattcatcctgatcagaaaaatattaatgcctatgttgtgtttaaggaggagagtgctgccacgcaagcattgaaaagaaatggggcccagattgcagatggatttcgt

SEQ ID NO: 694539 - DNA, 120 bp, Artificial Sequence
  ENSG00000188739_7 (sequence is synthesized)
ggtttttgtggggaatctcccttataaagttgaagaatctgccattgagaagcactttctggactgtggaagtatcatggccgtgaggattgtgagagacaaaatgacaggcatcggcaa

SEQ ID NO: 694540 - DNA, 120 bp, Artificial Sequence
  ENSG00000188739_8 (sequence is synthesized)
agggtttggctatgtgctctttgagaatacagattctgttcatcttgctctgaaattaaataattctgaactcatggggagaaaactcagagtcatgcgttctgttaataaagaaaaatt

SEQ ID NO: 694541 - DNA, 120 bp, Artificial Sequence
  ENSG00000188739_9 (sequence is synthesized)
taaacaacaaaattcaaatccacgattgaagaatgtcagtaaacctaagcagggacttaattttacttccaaaactgcagaaggacatcctaaaagcttatttattggagaaaaagctgt

SEQ ID NO: 694542 - DNA, 120 bp, Artificial Sequence
  ENSG00000188739_10 (sequence is synthesized)
tctccttaaaacgaagaagaaaggacagaagaaaagtggacgccctaagaaacagagaaaacagaaataacaaccaggaactgctttttcttttcctgctgagtactgctaataaaagtg

SEQ ID NO: 694543 - DNA, 120 bp, Artificial Sequence
  ENSG00000188739_11 (sequence is synthesized)
ctattatctgctgatagcatcgtctgctattcatgtgttgagttttatacttctttatggatggtgtatgtgaaatgtggagacttccacattctcagtttattcacattgtgatactac

SEQ ID NO: 694544 - DNA, 120 bp, Artificial Sequence
  ENSG00000188739_12 (sequence is synthesized)
agacttccacattctcagtttattcacattgtgatactacctttgaaggtttttttgtttttgttttgttttttgagatggagtttggctgttgtctcccaggctggagtgcagtggcgt

SEQ ID NO: 694545 - DNA, 120 bp, Artificial Sequence
  ENSG00000188739_13 (sequence is synthesized)
gagtggcgcgcggcacgagtacctggggagggatgttgtacgttccctcgtgctggcgaagcggtggtgcgtggcgtggctgagtttctgtcgtccatttctagagagaatcctgacgac

SEQ ID NO: 694546 - DNA, 120 bp, Artificial Sequence
  ENSG00000188739_14 (sequence is synthesized)
ttggtaaaattctcttatttgatgttaaagaaattagatggtaaattaacattcctatacttggaatattcgtcagttttatttcatatttctactttctttcaaaacttttattatgga

SEQ ID NO: 694547 - DNA, 120 bp, Artificial Sequence
  ENSG00000188739_15 (sequence is synthesized)
aaatccagtacatatagaaaagttgaaaaggctaagaaaccccgtgtactcagcatcagcaattactaatatttggctaacctttttgtatttttaccccactcatataccccctcatta

SEQ ID NO: 694548 - DNA, 120 bp, Artificial Sequence
  ENSG00000188739_16 (sequence is synthesized)
tatttttaccccactcatataccccctcattatttgtttttgtttgttttgagatggagtcttgatgccacgcccaggctgcagtagagtgcagtgatctcagctcactgcaacctccgc

SEQ ID NO: 694549 - DNA, 120 bp, Artificial Sequence
  ENSG00000188739_17 (sequence is synthesized)
cggtcggctggcgtccctcttcagttctctggagccccagattcaacccgtgtacgtgcctgtgcctaaagtaagtcactgggctttcttcccgaatagctcgttagaaccacttacata

SEQ ID NO: 694550 - DNA, 120 bp, Artificial Sequence
  ENSG00000188739_18 (sequence is synthesized)
atctgtacgatttcgttctctggtatgtttcattcccccgtaaaattacataatattaaaatttattgcatttaaatcagatgaacttattgctgttagtgagatggtgaagcactttaa

SEQ ID NO: 694551 - DNA, 120 bp, Artificial Sequence
  ENSG00000188739_19 (sequence is synthesized)
ccttttgaatcaataggttcaaatttaacccaagaaaagagttgctcttactatctactgctgactcttgaactttttaaataatgtattgagtttacttaataaaatgatactcttgct

SEQ ID NO: 694552 - DNA, 120 bp, Artificial Sequence
  ENSG00000188747_0 (sequence is synthesized)
ccggcccctccgcgggatcctggcccctcctcgagcgccgccaccggccgccatggcctctctgggggacctggtgcgcgcctggcacctgggcgcgcaggctgtggatcgtggggactg

SEQ ID NO: 694553 - DNA, 120 bp, Artificial Sequence
  ENSG00000188747_1 (sequence is synthesized)
actgggcccgcgccttgcacctcttctcgggcgtcccggcgccgcccgccaggctgtgcttcaacgcgggctgcgtgcacctgctggccggggaccccgaggccgcgctgcgggcatttg

SEQ ID NO: 694554 - DNA, 120 bp, Artificial Sequence
  ENSG00000188747_2 (sequence is synthesized)
tttgaccaagccgtgaccaaggacacctgcatggcggttggcttcttccagcgaggagtggccaacttccagctggcaaggttccaggaggctctgtctgacttctggctggccctggag

SEQ ID NO: 694555 - DNA, 120 bp, Artificial Sequence
  ENSG00000188747_3 (sequence is synthesized)
cagctgaggggccacgctgccatcgactacacgcagctgggcctgcggttcaagctgcaagcctgggaggtgctacacaatgtggcgtcggcacagtgccagctggggctctggacagag

SEQ ID NO: 694556 - DNA, 120 bp, Artificial Sequence
  ENSG00000188747_4 (sequence is synthesized)
gcggccagcagcctaagggaggccatgtccaagtggccggaggggtccctgaatggcctggactcagccctggaccaagtgcagagacggggctcactgccgccacggcaggtccccagg

SEQ ID NO: 694557 - DNA, 120 bp, Artificial Sequence
  ENSG00000188747_5 (sequence is synthesized)
ctcagcagccacagggaccaggagcgaaccatgatgccaggtccctaatcatggactccccaagagctggcacccaccagggccccctcgatgcagagacagaggtcggtgctgaccgct

SEQ ID NO: 694558 - DNA, 120 bp, Artificial Sequence
  ENSG00000188747_6 (sequence is synthesized)
gcacgtcgactgcctaccaggagcagaggccccaggtggagcaagttggcaaacaggctcctctctccccagggctgccggcaatgggggggcctggccccggcccctgtgaggaccccg

SEQ ID NO: 694559 - DNA, 120 bp, Artificial Sequence
  ENSG00000188747_7 (sequence is synthesized)
cgggtgctgggggagcaggtgcagggggctccgagcccctggtgactgtcaccgtgcagtgcgccttcacagtggccctgagggcacgaagaggagccgacctgtccagcctgcgggcac

SEQ ID NO: 694560 - DNA, 120 bp, Artificial Sequence
  ENSG00000188747_8 (sequence is synthesized)
tgctgggccaagccctccctcaccaggcccagcttgggcaactcagttacctagccccaggtgaggacgggcactgggtccccatccccgaggaggagtcgctgcagagggcctggcagg

SEQ ID NO: 694561 - DNA, 120 bp, Artificial Sequence
  ENSG00000188747_9 (sequence is synthesized)
acgcagctgcctgccccagggggctgcagctgcagtgcaggggagccgggggtcggccggtcctctaccaggtggtggcccagcacagctactccgcccaggggccagaggacctgggct

SEQ ID NO: 694562 - DNA, 120 bp, Artificial Sequence
  ENSG00000188747_10 (sequence is synthesized)
tccgacagggggacacggtggacgtcctgtgtgaagagcccgatgtcccccttgcagtggaccaggcatggctggagggccactgtgacggccgcatcggcatcttccccaagtgcttcg

SEQ ID NO: 694563 - DNA, 120 bp, Artificial Sequence
  ENSG00000188747_11 (sequence is synthesized)
tggtccccgccggccctcggatgtcaggagcccccggccgcctgccccgatcccagcagggagatcagccctaatgatgctgtgtccatgatgcttttaataaaaacaacccccactgca

SEQ ID NO: 694564 - DNA, 120 bp, Artificial Sequence
  ENSG00000188760_0 (sequence is synthesized)
ctccccgcagagcagagccagcggcccgagccgaatccccggagccgcgcctcgattcccctccagcagctgctctgggctgcgcagggttcttgcgctcggcactggagcctcagccgc

SEQ ID NO: 694565 - DNA, 120 bp, Artificial Sequence
  ENSG00000188760_1 (sequence is synthesized)
ggccgcagctgtccgacgtgtcactgcaagggccccgcccccggggtggggtctcgggctctcgctaccggagagggaggagaagggggaggttaaaggggaaggacccccggaagtgcc

SEQ ID NO: 694566 - DNA, 120 bp, Artificial Sequence
  ENSG00000188760_2 (sequence is synthesized)
ccctcctcagtgcgggagagggagacgccgggggcggagtcccctgcctcccgcggcgtggttggtgcgtcccatgtgacgtcagaagcagcccgcccctgcctggatggcccagcccga

SEQ ID NO: 694567 - DNA, 120 bp, Artificial Sequence
  ENSG00000188760_3 (sequence is synthesized)
gttcccggacgccgcgggactggagtgccagccggtgttggacgtggagcggcgccgccaccgcgccgacaccattctctccggcccagcagcccccttcctcgcacgacggactttccc

SEQ ID NO: 694568 - DNA, 120 bp, Artificial Sequence
  ENSG00000188760_4 (sequence is synthesized)
tggaccccagtcagttggagcctctggcgccccgcaaccccggcccctcgggcctctgcacagcctctttcactcagaagctcaggtcgcctccagcccagcactatgccggggactgtg

SEQ ID NO: 694569 - DNA, 120 bp, Artificial Sequence
  ENSG00000188760_5 (sequence is synthesized)
gcaacactgcggttccagctgctgccccctgagccagatgatgccttctggggtgcaccttgtgaacagcccctggagcgcaggtaccaggcactgccggccctcgtctgcatcatgtgc

SEQ ID NO: 694570 - DNA, 120 bp, Artificial Sequence
  ENSG00000188760_6 (sequence is synthesized)
tgtttgtttggagtcgtctactgcttcttcggttaccgctgcttcaaggcagtgctctttctcactgggttgctgtttggctcggtggtcatcttcctcctctgctaccgagagcgggtg

SEQ ID NO: 694571 - DNA, 120 bp, Artificial Sequence
  ENSG00000188760_7 (sequence is synthesized)
ctagagacacagctgagtgctggggcgagcgcgggcatcgctctgggcatcgggctgctctgcgggctggtggccatgctagtgcgcagcgtgggcctcttcctggtggggctgctgctc

SEQ ID NO: 694572 - DNA, 120 bp, Artificial Sequence
  ENSG00000188760_8 (sequence is synthesized)
ggcctgctgctcgcagctgctgccctgctgggctccgcaccctactaccagccaggctccgtgtggggtccactggggctgttgctggggggcggcctgctctgtgccctgctcactctg

SEQ ID NO: 694573 - DNA, 120 bp, Artificial Sequence
  ENSG00000188760_9 (sequence is synthesized)
gcgactccgggctgctcctgtgcccccactctgctggcgaagctgggccctgctggcactctggcccctgctcagcctgatgggcgttctggtgcagtggagggtgacagctgaggggga

SEQ ID NO: 694574 - DNA, 120 bp, Artificial Sequence
  ENSG00000188760_10 (sequence is synthesized)
ctcccacacggaagtggtcatcagccggcagcgccgacgcgtgcaactgatgcggattcggcagcaggaagatcgcaaggagaaaaggcggaaaaagagacctcctcgggctcccctcag

SEQ ID NO: 694575 - DNA, 120 bp, Artificial Sequence
  ENSG00000188760_11 (sequence is synthesized)
aggtccccgggctcctcccaggcctgggccaccagaccctgcttatcggcgcaggccagtgcccatcaaacgcttcaatggagacgtcctctccccgagctatatccagagcttccgaga

SEQ ID NO: 694576 - DNA, 120 bp, Artificial Sequence
  ENSG00000188760_12 (sequence is synthesized)
ccggcagaccgggagctccctgagctccttcatggcctcacccacagatgcggactatgagtatgggtcccggggacctctgacagcctgctcaggccccccagtgcgggtatagccata

SEQ ID NO: 694577 - DNA, 120 bp, Artificial Sequence
  ENSG00000188760_13 (sequence is synthesized)
tctgtctgtctagactctgcagtcaccagctctgccagctcgaggaggcctgctaggctgccactcagcctcctggctttggctgtccctctccccagcctggagagggctggcctggtc

SEQ ID NO: 694578 - DNA, 120 bp, Artificial Sequence
  ENSG00000188760_14 (sequence is synthesized)
actagaagggaggattgtctcaggcgagtcttggcctgagaggaaagccccctcccaagctcccaagaggctcctgaggaactcggggtgtgaaccccattggggtgtgctcagggttgt

SEQ ID NO: 694579 - DNA, 120 bp, Artificial Sequence
  ENSG00000188760_15 (sequence is synthesized)
gagtgtgttgcccgtgtgtctgtgtgtatgtgtgtgggggtgggcaggcttggaggggacgctgggacccttgccttagatttctgactggtagggtttctccaggctcagccccacctc

SEQ ID NO: 694580 - DNA, 120 bp, Artificial Sequence
  ENSG00000188760_16 (sequence is synthesized)
ttcactccctgccaaggtcccatgggccacctcctgcatgtctccgcggaggggctaccttccttcccatcgccctgcctcgcagccagactcatctaagggttcttgtccttgtctatg

SEQ ID NO: 694581 - DNA, 120 bp, Artificial Sequence
  ENSG00000188760_17 (sequence is synthesized)
gggcaaactgtagcatccctcaccctggtcccctggcctctgtaaagccaccagcctgagggcagtggcaggagatgggggtgggggggtgctgctctgggctgggttgggaagggagtt

SEQ ID NO: 694582 - DNA, 120 bp, Artificial Sequence
  ENSG00000188760_18 (sequence is synthesized)
ggggaggggtttaaatgcacggtgcatgtctggtgtctgtcatgccaacctagacacctcatgcttctgtctcccccaccccactctgttttacatcttttataaatgtgccaaactgtg

SEQ ID NO: 694583 - DNA, 120 bp, Artificial Sequence
  ENSG00000188760_19 (sequence is synthesized)
gtgacgtcaggagcagaggccggagctgtccatcagcaccaaaggccgcgggcgggctcagggcatggggccgcggttctggggcggcccgagccccggctcctgcgccttccccttcct

SEQ ID NO: 694584 - DNA, 120 bp, Artificial Sequence
  ENSG00000188761_0 (sequence is synthesized)
agttccaagtaggtaatccttctgagaagtcccacctttctgagcagctgtgtttgaagaaagctagtgggaaaagttccaggattacatgtcaggaaactacaagaggtagaaacattt

SEQ ID NO: 694585 - DNA, 120 bp, Artificial Sequence
  ENSG00000188761_1 (sequence is synthesized)
gttgatttaccagtgtttttaacttcctgctgggctgaaaactgcttgtttcgtggaaaagcaaaacttgacagcaaacatctaaaatgaagagctcccaaacttttgaggaacaaacgg

SEQ ID NO: 694586 - DNA, 120 bp, Artificial Sequence
  ENSG00000188761_2 (sequence is synthesized)
aatgcattgtgaacactctactcatggacttcttgagcccaacattgcaggttgccagccggaacctatgctgtgtagatgaagtagattcaggagagccttgttcttttgatgtggcta

SEQ ID NO: 694587 - DNA, 120 bp, Artificial Sequence
  ENSG00000188761_3 (sequence is synthesized)
tcattgctggtcgccttcggatgttgggtgaccagttcaacggagaattggaagcttctgccaaaaacgtcattgcagaaaccattaagggacagacaggagctatactccaggacactg

SEQ ID NO: 694588 - DNA, 120 bp, Artificial Sequence
  ENSG00000188761_4 (sequence is synthesized)
tggaatctctcagcaagacctggtgtgctcaggattccagcttagcttatgagagagcttttctggcagtgtcagtgaaacttcttgagtacatggctcacattgctcctgaagtagtgg

SEQ ID NO: 694589 - DNA, 120 bp, Artificial Sequence
  ENSG00000188761_5 (sequence is synthesized)
gacaggtggctatccccatgacgggtatgatcaatgggaaccaagccatccgggagttcatccagggccagggaggttgggaaaatctggagagctgaagagttggagctattcacgaga

SEQ ID NO: 694590 - DNA, 120 bp, Artificial Sequence
  ENSG00000188761_6 (sequence is synthesized)
ctgaacatcacttccttgttgactgattgggtgattgattcctgggaattcaaacaaacaaataaaaaagcacttttttcattttatcagaactgaacttagctgaataagttatttttt

SEQ ID NO: 694591 - DNA, 120 bp, Artificial Sequence
  ENSG00000188761_7 (sequence is synthesized)
actgattgttaaagttgggagcagctgccagaggcctgcagagttggtttttgttttgttttgttttgtcaacttaatgcaaaccacagagattttctactttctgttttcacatgagtt

SEQ ID NO: 694592 - DNA, 120 bp, Artificial Sequence
  ENSG00000188761_8 (sequence is synthesized)
ttaatgaggttctgttgaagcaaagacccctagacacaaagtaatgacttgttagtagtggaattataagcaacagggcaggcctttgctggaggtattttgagagaaagggagaacaat

SEQ ID NO: 694593 - DNA, 120 bp, Artificial Sequence
  ENSG00000188761_9 (sequence is synthesized)
ggaaactatttcttcagatgtagccctgtcttttggtaagaattgtgcctactaattttgcaatttaaaggatttcaggaagctttttggttgaaaaatcttgtttttttttttttagac

SEQ ID NO: 694594 - DNA, 120 bp, Artificial Sequence
  ENSG00000188761_10 (sequence is synthesized)
aggcgtgagccaccacgcccggcctaaaatcttgttattttaagttgagcattttcattcaaaatcatccctaaacttcatgttaatttcacctgagaaggactattttatgcattttag

SEQ ID NO: 694595 - DNA, 120 bp, Artificial Sequence
  ENSG00000188761_11 (sequence is synthesized)
tatgcattttagaggttggaagcaaaaaacaaacaaacaaacaaaaacagttgtttctactaggaaggtcaaagaaaataaaagttactccatttttactgccacaggatgcaggaagtg

SEQ ID NO: 694596 - DNA, 120 bp, Artificial Sequence
  ENSG00000188761_12 (sequence is synthesized)
ctggcccacatctaggacagcaaggccaccccagcttagatgaagctagctgcataacacaaagctttaaaagtgtggttcacacaccacttgtggaccttattgaattgctgattcgca

SEQ ID NO: 694597 - DNA, 120 bp, Artificial Sequence
  ENSG00000188761_13 (sequence is synthesized)
ttcctagagattctgattctgtaggggtaggctggagcctaggaacctaccttttaaactagttccataggtgattctgatgtacatatagagtgtgacagccatcactatagagaatag

SEQ ID NO: 694598 - DNA, 120 bp, Artificial Sequence
  ENSG00000188761_14 (sequence is synthesized)
attgataaattacaacccacgcgtcaaatctggcttgctgtcttattttgtaaataaagttttattggaatagagcaacattcacttgtttacatattgtccatggccgcttttgtgcta

SEQ ID NO: 694599 - DNA, 120 bp, Artificial Sequence
  ENSG00000188761_15 (sequence is synthesized)
caatggcagagttgaatgattatagaagaccatatggctggttaagtccaaaatatttactagctggccctttacagaaaaagttggctgaccccttctctaaatcaacatttctccttg

SEQ ID NO: 694600 - DNA, 120 bp, Artificial Sequence
  ENSG00000188761_16 (sequence is synthesized)
gtaactgaaactctattacagtcctgacaattccagcaaacacagctgtagatagggtttaaactcaaagatatttaactcttctttgggaacttagtctccatatgtttgttagttctt

SEQ ID NO: 694601 - DNA, 120 bp, Artificial Sequence
  ENSG00000188761_17 (sequence is synthesized)
gcataatccacagtttctctgggtcttcagccaatcagagagctctgtagctcctgagtagtccatttctctggccctacaagtgagagtgattggaagcaaagcttatgatttgtatga

SEQ ID NO: 694602 - DNA, 120 bp, Artificial Sequence
  ENSG00000188761_18 (sequence is synthesized)
taaatatcaagaagaaaggcattgctacagtgattcatgaaaagcagcattaataactttggctaaagtttaacaaagctaaccacttcccctctatcagccagccatctatgtatctcc

SEQ ID NO: 694603 - DNA, 120 bp, Artificial Sequence
  ENSG00000188761_19 (sequence is synthesized)
tctatcagccagccatctatgtatctcctctaaatgcagagaagtaaatatgtagtgctgttaatacatttttgctttttaaagttatgctttgtcctggcgcagtggctcatgcctgta

SEQ ID NO: 694604 - DNA, 89 bp, Artificial Sequence
  ENSG00000188761_20 (sequence is synthesized)
ggaggttgctgtgagctgagtaagcgaaactgtctaaaaaaaaaaaaagaaaataaataaagttatgctttttcctctattcctagtta

SEQ ID NO: 694605 - DNA, 120 bp, Artificial Sequence
  ENSG00000188761_21 (sequence is synthesized)
aaaataaataaagttatgctttttcctctattcctagttaaatcacaacaagttagtaatccataaatgatgtgtcctgtttctctttagtagaaattatatttttggctaccagttaag

SEQ ID NO: 694606 - DNA, 120 bp, Artificial Sequence
  ENSG00000188761_22 (sequence is synthesized)
aaacttgtactcctttgtcccttatgttactataaactcaagatgatgagttttgtggtatttgacttcataggcaaaatcaaaatttttactttgttgctattctgttttatgaaataa

SEQ ID NO: 694607 - DNA, 120 bp, Artificial Sequence
  ENSG00000188761_23 (sequence is synthesized)
acttctgtctatgcatttgaactaagtttcagcaaattcaatctaaattgaataattccagctcccagttttatcctatgttgctcataaaacagttccaagtatactgcattatcttga

SEQ ID NO: 694608 - DNA, 120 bp, Artificial Sequence
  ENSG00000188761_24 (sequence is synthesized)
gatttgaagatatggtgcccacggggattatactaggcaaatgcgttaagcagctctggcctaggtgttgtgtattttaagagactctatcttaggagagcttaagtgattgggctgcag

SEQ ID NO: 694609 - DNA, 120 bp, Artificial Sequence
  ENSG00000188761_25 (sequence is synthesized)
gaagaagacattgtaacccaggaattaaaaatggattcagattgcctgattttaacactttagtttcaccataggctaattatgtgacattgggcaagagacataattcttctgtacctt

SEQ ID NO: 694610 - DNA, 120 bp, Artificial Sequence
  ENSG00000188761_26 (sequence is synthesized)
agtttctacatttgtaaaatagagatgatttggtaacttattaataagatttttgtgagagataaataaaacaaatacattttgtaaagggtgagtacttggaatattttaaacactgtg

SEQ ID NO: 694611 - DNA, 120 bp, Artificial Sequence
  ENSG00000188761_27 (sequence is synthesized)
ccattagcaatttggaattctgtgttatgcagttcataaggttctagcttgacttttttctctctccattaaccctgtctctcacagatgcaaaccactcttaatggctttactttcaca

SEQ ID NO: 694612 - DNA, 120 bp, Artificial Sequence
  ENSG00000188761_28 (sequence is synthesized)
tcaatgtgagtgattcctaaatatgatttatttcccttctcaattccatacccacagatgcttattatttatttatgtgtacctttcttatccccatactctccctgtttgcgatacaac

SEQ ID NO: 694613 - DNA, 120 bp, Artificial Sequence
  ENSG00000188761_29 (sequence is synthesized)
tagctcaaaacctcagtcatttttaccttgtctctctctctccagtccaactcacccaactagtttttctcatttgttacttcatttttgtcctggttcttctaccagatttattagcaa

SEQ ID NO: 694614 - DNA, 120 bp, Artificial Sequence
  ENSG00000188761_30 (sequence is synthesized)
ctgcctggactattaataaagcctcctacttaggctttcaatagattgttctgttcctgctccattccagtctgtcctatatactgccatcagattgatcaaagctgtggtttctttgtc

SEQ ID NO: 694615 - DNA, 120 bp, Artificial Sequence
  ENSG00000188761_31 (sequence is synthesized)
tattattttgattcatttttagatatggtatcattcatttttaaatttaacataccaatgaagattacaagacttaaacatcttatcagaagggggcatttattttttaaatcaagaaat

SEQ ID NO: 694616 - DNA, 120 bp, Artificial Sequence
  ENSG00000188761_32 (sequence is synthesized)
aactttccaaaagcattgctttgaatgccattctcttaaagtccttcagtggaacttttgagtgtgattagacatgttcattatcttgattgtagtgattttatgggtgatgatttcaca

SEQ ID NO: 694617 - DNA, 120 bp, Artificial Sequence
  ENSG00000188761_33 (sequence is synthesized)
ccaacttatcaaactgcatactttgaaatgtgtagtttattgtacatcagcactaccttaataaggttgttttttttaaaaaaaaaaaaaaaaccttcagctgctccctactgttcatca

SEQ ID NO: 694618 - DNA, 120 bp, Artificial Sequence
  ENSG00000188761_34 (sequence is synthesized)
aataacagtctgatattcaaattcccccagtatctggccctaactgccctatatagccttaatcaatcatgattctcctctacaatcccaatgctctagtataaccgagccagtcactaa

SEQ ID NO: 694619 - DNA, 120 bp, Artificial Sequence
  ENSG00000188761_35 (sequence is synthesized)
agctgccctcctcctactgttccctatgtttcatattcctttttctgaggctctacctgtagacatcttcaagacccaacccaactgtcatgaagccttctccatgaaggctatccatat

SEQ ID NO: 694620 - DNA, 120 bp, Artificial Sequence
  ENSG00000188761_36 (sequence is synthesized)
aaccagaataagaagtggtctttgcctccttgaacttttgtttgtaccacttttatgtttcttatccaaaaaatggccttaagttgtaattatctgtatagtcatcttccccactaggat

SEQ ID NO: 694621 - DNA, 120 bp, Artificial Sequence
  ENSG00000188761_37 (sequence is synthesized)
aaaggattgctgaatgatacaatttgttgtatacttctgtaacacccctcctcttcattatctggcatgtacatcgatattaaaaatattcattaaatgaatgaatagctgattgactca

SEQ ID NO: 694622 - DNA, 120 bp, Artificial Sequence
  ENSG00000188761_38 (sequence is synthesized)
agcaagactctgtctcaaaaaaagaaccaccctcttaaccgttatgctttattcgtcctactatacacagcttgggcagtgtgcctacactatgttcaggcagagctggacctgttactc

SEQ ID NO: 694623 - DNA, 120 bp, Artificial Sequence
  ENSG00000188761_39 (sequence is synthesized)
gctggacctgttactcccagttgcttgccctgaggctgtcctaggtagttgatagctgagttgactttttttctcattaaacatatttttttttttggctgggtgctgtggctcatgcct

SEQ ID NO: 694624 - DNA, 84 bp, Artificial Sequence
  ENSG00000188761_40 (sequence is synthesized)
gaattgcttgaacccaggaggcagaaggaggttgcagtgaactgagatctcctctctcaaaataaataaataaatacaaataca

SEQ ID NO: 694625 - DNA, 83 bp, Artificial Sequence
  ENSG00000188761_41 (sequence is synthesized)
ctccaacctgggcaacagagcgagaccctctctcaaaataaataaataaaactgtaatcctagctacctgggaggctgagaca

SEQ ID NO: 694626 - DNA, 82 bp, Artificial Sequence
  ENSG00000188761_42 (sequence is synthesized)
agccgagatggtgccattgtactccaatcataaataaataaataaataatttgacttgaacttgttttaataaaaaaaaata

SEQ ID NO: 694627 - DNA, 120 bp, Artificial Sequence
  ENSG00000188761_43 (sequence is synthesized)
aaaaaatatattttgaaacagccctaaactcagggaaaggttgcaaggatagtacaaataatttctctcttgaatcatttgacagtaaggagttgacatatttcatcaacccctaatact

SEQ ID NO: 694628 - DNA, 120 bp, Artificial Sequence
  ENSG00000188761_44 (sequence is synthesized)
tttatacttccctcaaacaagaacattctgtaatgtaaccacaatctaaccatcaaaaccaggaaattaacattgattcattatcatctaatccttagatctcattcaagttttgccatt

SEQ ID NO: 694629 - DNA, 120 bp, Artificial Sequence
  ENSG00000188761_45 (sequence is synthesized)
tgtcccgataatgtaatttatagtaaaaagttgtaggccagaatcacatactgcatttagttgtgatttctctttagtttccttcaatctggaatttttccttagtctttccttgatttt

SEQ ID NO: 694630 - DNA, 120 bp, Artificial Sequence
  ENSG00000188761_46 (sequence is synthesized)
catgaccttgacacttgaagactatggtctatcttgttgaatgtcccttaactggggtttgcttgatgtttcttcttgaataaattaaggatatatacctttggcaggaatatcacagaa

SEQ ID NO: 694631 - DNA, 120 bp, Artificial Sequence
  ENSG00000188761_47 (sequence is synthesized)
gtattgctgtgttctcagtgcattgcatcaattggcacaagatttcattttataccagtattgatgttgttaactttaatcacttaagatggtgtctgtaaagcttctcctctataaagt

SEQ ID NO: 694632 - DNA, 120 bp, Artificial Sequence
  ENSG00000188761_48 (sequence is synthesized)
tactcttttcccctttgtaattaataagtgttttatggagaggtactttgaaactatgtaaatatcccacatctcatcaaaatttcattgcattcatttcttatcagcattggacccatg

SEQ ID NO: 694633 - DNA, 120 bp, Artificial Sequence
  ENSG00000188761_49 (sequence is synthesized)
aattcctactttattctgtggattataatctgttaacatcattattaatttagatgctcaaatcatcctagttttagctagtgggagtcctttcactctagactgcatctctttgatgtg

SEQ ID NO: 694634 - DNA, 120 bp, Artificial Sequence
  ENSG00000188761_50 (sequence is synthesized)
tctctattattatttgagtacttccttaatttctgacagaatatcttatacttccctagccccaaactgaaatcaaccattctccagagagctctggtttcttttattttttgagacggg

SEQ ID NO: 694635 - DNA, 60 bp, Artificial Sequence
  ENSG00000188761_51 (sequence is synthesized)
cagtggcacgatctccgctcactgcaacccctgcctctgccacgcctggctaattttttt

SEQ ID NO: 694636 - DNA, 80 bp, Artificial Sequence
  ENSG00000188761_52 (sequence is synthesized)
cttaggagagcaatggcgcaatctcggctctcttcaacctctgcctccccggttcacctgattctcctgcctcagcctcc

SEQ ID NO: 694637 - DNA, 72 bp, Artificial Sequence
  ENSG00000188761_53 (sequence is synthesized)
ctgctcctctggtttcttttaatggagaatgatatttagaaatcaagatctaggtgctctcccacatggatg

SEQ ID NO: 694638 - DNA, 120 bp, Artificial Sequence
  ENSG00000188761_54 (sequence is synthesized)
tatttagaaatcaagatctaggtgctctcccacatggatgtccttttcagcttgtttgggctctgatattcagctctgaccacccttggcccccctaaatccccacagatcttgcttgga

SEQ ID NO: 694639 - DNA, 120 bp, Artificial Sequence
  ENSG00000188761_55 (sequence is synthesized)
cccacctaatggattttagattccatttttgaaaaagaaagaggaaaaggaagagctactcaattattttaatgaattattattattttattattaattctaattaactactatttttga

SEQ ID NO: 694640 - DNA, 120 bp, Artificial Sequence
  ENSG00000188761_56 (sequence is synthesized)
gacagtctttctctgttgcctaggctggagtgtagtggctcaatgatagctcactctagcctcaatctcataggcttaagtgatcctccaacctcagcctcataagtagttgggactaca

SEQ ID NO: 694641 - DNA, 120 bp, Artificial Sequence
  ENSG00000188761_57 (sequence is synthesized)
cctccaacctcagcctcataagtagttgggactacaggcatgtgctaccatgcctagctactttttaaaatttttcatagagacagggtctcaatatgttgcccaggctagtcttgaact

SEQ ID NO: 694642 - DNA, 83 bp, Artificial Sequence
  ENSG00000188761_58 (sequence is synthesized)
aactcctgacctcatgtgatcctcccactttcgcctcccaaagtgttgggattacgggtgtgaaccactgcattcggtctttt

SEQ ID NO: 694643 - DNA, 120 bp, Artificial Sequence
  ENSG00000188761_59 (sequence is synthesized)
gagccactgcccccggcctttactttagagtctcccagacatttcctagtcattcaagcaatacctttacaatttaaccagctggactatcacatacttaatatttttctttcaaatcat

SEQ ID NO: 694644 - DNA, 120 bp, Artificial Sequence
  ENSG00000188761_60 (sequence is synthesized)
ttttcattcattttgtttaacctaagcaataatacctgaagtcatgggtttgatggactacttatgtattttcaagtgcccattaagataacaaaatattaaaatgagaaaagattattc

SEQ ID NO: 694645 - DNA, 120 bp, Artificial Sequence
  ENSG00000188761_61 (sequence is synthesized)
atctactctctaagatttccttagttaccaccagttgcacatttggcactctaagaaacaattgctttactggattcctgcacctgcagcctcctgcactttttgagtgatactctgttg

SEQ ID NO: 694646 - DNA, 120 bp, Artificial Sequence
  ENSG00000188761_62 (sequence is synthesized)
ttttgtactaatacctgggattccaattcatgaccctttttgtaaattggaaaccaacaggaaaacaggcttccctattttgctgaaaatgcctagattttcttgccatggaaaaatgga

SEQ ID NO: 694647 - DNA, 120 bp, Artificial Sequence
  ENSG00000188761_63 (sequence is synthesized)
gcagacagaagctcagcctgtggatgttggactcgagtcatgctaccttaaatattgactgctgactactgtaaagctaatcttcatttcctacacataatcatctataaagtatattca

SEQ ID NO: 694648 - DNA, 120 bp, Artificial Sequence
  ENSG00000188761_64 (sequence is synthesized)
tgatagagttctaatttcagcctggcttcactccgttcctttgtaaatttctgggtctttttttcctaacttctctatgtgtgtgttagggaagtcagaatcaccttaatagtatctaag

SEQ ID NO: 694649 - DNA, 120 bp, Artificial Sequence
  ENSG00000188761_65 (sequence is synthesized)
aaaaaacagtctttgctgtagtggtaactatataaggtattctaagcccatgttttagtaatcatcagaacttatgctgtcatagagcactcctttccatttacagggtcagtgaaagcc

SEQ ID NO: 694650 - DNA, 120 bp, Artificial Sequence
  ENSG00000188761_66 (sequence is synthesized)
ttaataagagctacatttcctggagctatctgcagatcatttcctggtttcttaggaagttcctgaaagcaattcctttgactgtaggattttctctgtcttccctaggaaaatctggag

SEQ ID NO: 694651 - DNA, 80 bp, Artificial Sequence
  ENSG00000188763_0 (sequence is synthesized)
ggctctggctcagcggcggctccggtggcagcggcggtggcggctaggcgggctcggcggctcctgtccctcgggcggct

SEQ ID NO: 694652 - DNA, 80 bp, Artificial Sequence
  ENSG00000188763_1 (sequence is synthesized)
gtgggcggctcagcgatggcccgcgccccgcgacgtggcgggcaggcaccggggcgcgggaccgctgagcccgagtgagc

SEQ ID NO: 694653 - DNA, 120 bp, Artificial Sequence
  ENSG00000188763_2 (sequence is synthesized)
ctgctgtggcagctgctggcggcgggcggcgcggcactggagatcggccgcttcgacccggagcgcgggcgcggggctgcgccgtgccaggcggtggagatccccatgtgccgcggcatc

SEQ ID NO: 694654 - DNA, 120 bp, Artificial Sequence
  ENSG00000188763_3 (sequence is synthesized)
tccccatgtgccgcggcatcggctacaacctgacccgcatgcccaacctgctgggccacacgtcgcagggcgaggcggctgccgagctagcggagttcgcgccgctggtgcagtacggct

SEQ ID NO: 694655 - DNA, 120 bp, Artificial Sequence
  ENSG00000188763_4 (sequence is synthesized)
gccacagccacctgcgcttcttcctgtgctcgctctacgcgcccatgtgcaccgaccaggtctcgacgcccattcccgcctgccggcccatgtgcgagcaggcgcgcctgcgctgcgcgc

SEQ ID NO: 694656 - DNA, 120 bp, Artificial Sequence
  ENSG00000188763_5 (sequence is synthesized)
ccatcatggagcagttcaacttcggctggccggactcgctcgactgcgcccggctgcccacgcgcaacgacccgcacgcgctgtgcatggaggcgcccgagaacgccacggccggccccg

SEQ ID NO: 694657 - DNA, 120 bp, Artificial Sequence
  ENSG00000188763_6 (sequence is synthesized)
gccccacaagggcctgggcatgctgcccgtggcgccgcggcccgcgcgccctcccggagacctgggcccgggcgcgggcggcagtggcacctgcgagaaccccgagaagttccagtacgt

SEQ ID NO: 694658 - DNA, 120 bp, Artificial Sequence
  ENSG00000188763_7 (sequence is synthesized)
acgtggagaagagccgctcgtgcgcaccgcgctgcgggcccggcgtcgaggtgttctggtcccggcgcgacaaggacttcgcgctggtctggatggccgtgtggtcggcgctgtgcttct

SEQ ID NO: 694659 - DNA, 120 bp, Artificial Sequence
  ENSG00000188763_8 (sequence is synthesized)
tctccaccgccttcactgtgctcaccttcttgctggagccccaccgcttccagtaccccgagcgccccatcatcttcctctccatgtgctacaacgtctactcgctggccttcctgatcc

SEQ ID NO: 694660 - DNA, 120 bp, Artificial Sequence
  ENSG00000188763_9 (sequence is synthesized)
aggagggcctggagaacacgggctgcacgctggtcttcctactgctctactacttcggcatggccagctcgctctggtgggtggtcctgacgctcacctggttcctggctgccgggaaga

SEQ ID NO: 694661 - DNA, 120 bp, Artificial Sequence
  ENSG00000188763_10 (sequence is synthesized)
aatggggccacgaggccatcgaggcccacggcagctatttccacatggctgcctggggcctgcccgcgctcaagaccatcgtcatcctgaccctgcgcaaggtggcgggtgatgagctga

SEQ ID NO: 694662 - DNA, 120 bp, Artificial Sequence
  ENSG00000188763_11 (sequence is synthesized)
ctgggctttgctacgtggccagcacggatgcagcagcgctcacgggcttcgtgctggtgcccctctctggctacctggtgctgggcagtagtttcctcctgaccggcttcgtggccctct

SEQ ID NO: 694663 - DNA, 120 bp, Artificial Sequence
  ENSG00000188763_12 (sequence is synthesized)
tccacatccgcaagatcatgaagacgggcggcaccaacacagagaagctggagaagctcatggtcaagatcggggtcttctccatcctctacacggtgcccgccacctgcgtcatcgttt

SEQ ID NO: 694664 - DNA, 120 bp, Artificial Sequence
  ENSG00000188763_13 (sequence is synthesized)
gctatgtctacgaacgcctcaacatggacttctggcgccttcgggccacagagcagccatgcgcagcggccgcggggcccggaggccggagggactgctcgctgccagggggctcggtgc

SEQ ID NO: 694665 - DNA, 120 bp, Artificial Sequence
  ENSG00000188763_14 (sequence is synthesized)
ccaccgtggcggtcttcatgctcaaaattttcatgtcactggtggtggggatcaccagcggcgtctgggtgtggagctccaagactttccagacctggcagagcctgtgctaccgcaaga

SEQ ID NO: 694666 - DNA, 120 bp, Artificial Sequence
  ENSG00000188763_15 (sequence is synthesized)
tagcagctggccgggcccgggccaaggcctgccgcgcccccgggagctacggacgtggcacgcactgccactataaggctcccaccgtggtcttgcacatgactaagacggacccctctt

SEQ ID NO: 694667 - DNA, 120 bp, Artificial Sequence
  ENSG00000188763_16 (sequence is synthesized)
tggagaaccccacacacctctagccacacaggcctggcgcggggtggctgctgccccctccttgccctccacgccctgccccctgcatcccctagagacagctgactagcagctgcccag

SEQ ID NO: 694668 - DNA, 120 bp, Artificial Sequence
  ENSG00000188763_17 (sequence is synthesized)
ctgtcaaggtcaggcaagtgagcaccggggactgaggatcagggcgggaccccgtgaggctcattaggggagatgggggtctcccctaatgcgggggctggaccaggctgagtccccaca

SEQ ID NO: 694669 - DNA, 120 bp, Artificial Sequence
  ENSG00000188763_18 (sequence is synthesized)
gggtcctagtggaggatgtggaggggcggggcagaggggtccagccggagtttatttaatgatgtaatttattgttgcgttcctctggaagctgtgactggaataaacccccgcgtggca

SEQ ID NO: 694670 - DNA, 120 bp, Artificial Sequence
  ENSG00000188766_0 (sequence is synthesized)
aagttggaggggagatgagggttgagggaacattccatgggagagcagggtttgagctcatgactgtgttgtccctgtccttccccccacctcctgcaggtacatggtgcgggtccgagc

SEQ ID NO: 694671 - DNA, 120 bp, Artificial Sequence
  ENSG00000188766_1 (sequence is synthesized)
tgtggtgatggcccgagatgactccagtgggggctggctgcctgtggggggcgggggcctcagccaggtgagcgtgtgtcgggtccgaggggccaggcccgaggggggggcccgccaggg

SEQ ID NO: 694672 - DNA, 120 bp, Artificial Sequence
  ENSG00000188766_2 (sequence is synthesized)
gcactacgtcatccacggggaacgcctccgggaccagaaaacaaccttggagtgtacactgaagccaggcttggtttacaacaaggtgaatcccatctttcaccactggagcctgggtga

SEQ ID NO: 694673 - DNA, 120 bp, Artificial Sequence
  ENSG00000188766_3 (sequence is synthesized)
ctgcaagtttggactgacgtttcagagccctgcagaggctgatgagttccagaagagcctgctggctgcgctggccgcactgggtcgaggctcactcaccccctcctcctcctcctcctc

SEQ ID NO: 694674 - DNA, 120 bp, Artificial Sequence
  ENSG00000188766_4 (sequence is synthesized)
ctcctctccttcccaggatactgcagagaccccctgccctctgacgtcccacgtggacagcgactcctcctccagtcacagccgccaggagactcctcccagcgccgctgcggcccccat

SEQ ID NO: 694675 - DNA, 120 bp, Artificial Sequence
  ENSG00000188766_5 (sequence is synthesized)
catcacgatggagtcagcttcaggcttcgggccgaccacgcccccccagcgccgccgctcctccgctcagagctaccctccgcttctaccgttcacggggattccggaaccctcagagcc

SEQ ID NO: 694676 - DNA, 120 bp, Artificial Sequence
  ENSG00000188766_6 (sequence is synthesized)
gcaggggcagggggcctggggtggggcggccgcggctacgaggattaccggcgctccgggccacccgcgcccctcgccctgtccacctgcgtcgtgcgcttcgccaagaccggcgcgttg

SEQ ID NO: 694677 - DNA, 120 bp, Artificial Sequence
  ENSG00000188766_7 (sequence is synthesized)
gcgtcgtgcgcttcgccaagaccggcgcgttgaggggcgctgccctgggtcccccagcggcactacctgcccctttgaccgaggctgcgcccccagcgccccccgctcgcccaccccccg

SEQ ID NO: 694678 - DNA, 120 bp, Artificial Sequence
  ENSG00000188766_8 (sequence is synthesized)
ggcctccccggaagcggaggaggcagcgcgctgcgtgcattgccgcgcgctcttccgtcgcagagcagacgggcgtggcggccgctgcgcagaggccccggacccgggtcgcctcctggt

SEQ ID NO: 694679 - DNA, 120 bp, Artificial Sequence
  ENSG00000188766_9 (sequence is synthesized)
gcgccgtctaagctgcctgtggtgcgccgagagcttgctctaccactgcctgtcggacgccgagggcgacttctcggacccgtgcgcctgcgagccgggccacccgcgccccgccgcgcg

SEQ ID NO: 694680 - DNA, 120 bp, Artificial Sequence
  ENSG00000188766_10 (sequence is synthesized)
cgctggccgcgctctccctggcagtgccctgcctctgctgctacgcgcccctgcgcgcgtgccactgggtcgcagcgcgatgcggctgcgccggctgcgggggtcgccacgaggaggctg

SEQ ID NO: 694681 - DNA, 120 bp, Artificial Sequence
  ENSG00000188766_11 (sequence is synthesized)
ggaggctgcgcggtgaggacggcctggtgggtcccctagccggcccgaggacccaaaattgagggtccaggaccccggactccgttcggacctaaaacccaaacctaggcacatccggaa

SEQ ID NO: 694682 - DNA, 120 bp, Artificial Sequence
  ENSG00000188766_12 (sequence is synthesized)
cttggagcttgagtttggattgagagatctcagacctggaacctggaacccaaacctaggactgagagaccccagccccagcttcattggggtgtctgtctaagaagtcccaggcgtcct

SEQ ID NO: 694683 - DNA, 120 bp, Artificial Sequence
  ENSG00000188766_13 (sequence is synthesized)
gagttctggcgttcccccacccccacaccccacgaggaggctccaggcgtccccatactttgcatctcagaaaggccagggagcacatagatcccgaaaagggcaggtccctgttgaaat

SEQ ID NO: 694684 - DNA, 120 bp, Artificial Sequence
  ENSG00000188766_14 (sequence is synthesized)
gaacaacctagaacccggtcacgcctggcaccatgtccctcagattacagccccacaattagtcaggacttgcccataactggctctgcctttattcaactcccagatcagatcttgaga

SEQ ID NO: 694685 - DNA, 120 bp, Artificial Sequence
  ENSG00000188766_15 (sequence is synthesized)
ccataggacctggagtcacccacaaacagttcctgaatattcacctaagacctggtgcccccacatctgagacattctcatagtcccaggacccctgagacagcaggacccctgagaaag

SEQ ID NO: 694686 - DNA, 120 bp, Artificial Sequence
  ENSG00000188766_16 (sequence is synthesized)
tttcaaacagagtttgaaactctgttatgctctggaatctccagatgctgcccctcaaatctacccacgacttagtgcccacagacctggcctccagtccgggaacactgaagtctaaga

SEQ ID NO: 694687 - DNA, 120 bp, Artificial Sequence
  ENSG00000188766_17 (sequence is synthesized)
tgtccagggaactcccagacaccctgggaccccagactcttaagatgcactgagtgctcggatatactgaaacacgagctgttctcttaccaaaatgacttgggagacccatcccagagc

SEQ ID NO: 694688 - DNA, 120 bp, Artificial Sequence
  ENSG00000188766_18 (sequence is synthesized)
ccccaagatccagatatcagacaccaagatgctctggaagccagggatcaaagacctccataggtccacccacccccaagccagggttctcaggagctttggatatcatttataggactc

SEQ ID NO: 694689 - DNA, 120 bp, Artificial Sequence
  ENSG00000188766_19 (sequence is synthesized)
ccctcctggacctggattttgagaccccaaatgtcctggaatcttcagcttctttctacccacagattcccaaccccttaagggctgggagtccagctcccagaagaggggatgctcatg

SEQ ID NO: 694690 - DNA, 120 bp, Artificial Sequence
  ENSG00000188766_20 (sequence is synthesized)
gtgacccagacctctgatgcccttggccctcagcccttgagtgaccctaaggtactttaggagcactggatccaataccccaaaggtgccactgacccccaaatgcaaggctcaagaccc

SEQ ID NO: 694691 - DNA, 120 bp, Artificial Sequence
  ENSG00000188766_21 (sequence is synthesized)
tacaacattgggattgttcctgatccaagaccttcatccctccataccagaggcgttcagattcgaggtgccccaagaccccagcaccctcagaccccagatttctttggattcaaacct

SEQ ID NO: 694692 - DNA, 120 bp, Artificial Sequence
  ENSG00000188766_22 (sequence is synthesized)
ctctagtctgatgaaccccaagttgcctctacacctgattcccccatccccacttgtcggacctcagagacctgctgccccttgaatcctgtcatccataggcccctaaaaccccaaggt

SEQ ID NO: 694693 - DNA, 120 bp, Artificial Sequence
  ENSG00000188766_23 (sequence is synthesized)
tccagcctctggaattctggtcccaaggatcccagcccaagcccccagcaatcctcagaattacccctttatcttagggtgggatccctaccatttggaactcattgtaggaccacccag

SEQ ID NO: 694694 - DNA, 84 bp, Artificial Sequence
  ENSG00000188766_24 (sequence is synthesized)
gggatccctaccatttggaactcattgtaggaccacccagggtggggcacagtggctcatgaggatcgcttaaggccaggagtt

SEQ ID NO: 694695 - DNA, 120 bp, Artificial Sequence
  ENSG00000188766_25 (sequence is synthesized)
aaaaaaaaaaaggaccaagtaggagctccctcactgtcacgtctaggacccagcattgtcacagatgattatgcagggtcttcattaagtgaaggcacacagcccagggtttcgaggagc

SEQ ID NO: 694696 - DNA, 120 bp, Artificial Sequence
  ENSG00000188766_26 (sequence is synthesized)
tggaagtcacaccagtctgctggccacactgtgccctcagaagaagtgtgtgcaatggaaactttcaggctagttatggctctgctgtcccacagcccccagtcttgcagaccttccttc

SEQ ID NO: 694697 - DNA, 120 bp, Artificial Sequence
  ENSG00000188766_27 (sequence is synthesized)
ttgcagaccttccttcaagcacaaccttaattcctagtccaggttcaagtcccaccttttatgttctccccctccattaaccccttctcttcctatttatttatttatttatttatttat

SEQ ID NO: 694698 - DNA, 68 bp, Artificial Sequence
  ENSG00000188766_28 (sequence is synthesized)
tttgagacagagtctcgctccctcccgggttcaagccattcgtctgcctcagcctcccgagtagctgg

SEQ ID NO: 694699 - DNA, 120 bp, Artificial Sequence
  ENSG00000188766_29 (sequence is synthesized)
ttacaggcatgagccactgcacctggctctcttccactttagagtgagaagttgcttcaggaagtttgaaagcctgtttcatggcccactgagtctcttctgtgcaaaggggggtgccac

SEQ ID NO: 694700 - DNA, 120 bp, Artificial Sequence
  ENSG00000188766_30 (sequence is synthesized)
aggcttttttcccccaagtgaaatggggcttccagtggatcgaagatctggtgtcctgtatgggggcctcaaggtcttggagcaagacagtctcaatgttgtatgggcttgggacctgca

SEQ ID NO: 694701 - DNA, 120 bp, Artificial Sequence
  ENSG00000188766_31 (sequence is synthesized)
tctggccccaagcatctggaactgtgcacttaacctttcttcattacccagacttggatggccttgttggggttcaagggataggtcctctgtctcttcctttaaattattaactattta

SEQ ID NO: 694702 - DNA, 120 bp, Artificial Sequence
  ENSG00000188766_32 (sequence is synthesized)
ttacatccggaacctgtgagattcagcactcccaaccagaccctgggatgggtgagagaaaagcgggggtgtctctcccctccccactctgcccagctctcatcactgtcagacccacca

SEQ ID NO: 694703 - DNA, 120 bp, Artificial Sequence
  ENSG00000188766_33 (sequence is synthesized)
gagctgagggcggagggattgggggctggggcagcctgggtccccatgcccctctctgtgcctcggtctccccccttccatggtgggcgggggggaagctccattcttaacctacctcgt

SEQ ID NO: 694704 - DNA, 120 bp, Artificial Sequence
  ENSG00000188766_34 (sequence is synthesized)
tttggggaggggtgggacgggggaccagagtgctgtacggtgctgtgggatctgcagatgaagcggtgggggctaaggaaaggtcccctggccgccacttcccagcagcgcctctcccag

SEQ ID NO: 694705 - DNA, 120 bp, Artificial Sequence
  ENSG00000188766_35 (sequence is synthesized)
gtcccccagtcctgctccctgctgagacccacctctgatccatgattccccttcattgcccccaaatcaggggtacatggagggccgccctgggagccaggcagacctcagaccctggag

SEQ ID NO: 694706 - DNA, 120 bp, Artificial Sequence
  ENSG00000188766_36 (sequence is synthesized)
cccccaggcccaatttcccagccgcttgcccctcagatcggatgcttggcccccagatttgggggaggcaccccaacatatatcttcctgatcttgtttctaagccagtctgtgacctca

SEQ ID NO: 694707 - DNA, 120 bp, Artificial Sequence
  ENSG00000188766_37 (sequence is synthesized)
atattgttagtgtcagtgcaggctgaagtggtgggggaggatgggggccaaagacccagccttgtcatcgggggagggggcacgagatctgctccaagaaatgtctgtgacaaagtctca

SEQ ID NO: 694708 - DNA, 120 bp, Artificial Sequence
  ENSG00000188766_38 (sequence is synthesized)
ctctggatgtgtcttcggtcgcccgtttctgacttcctctgcctccgtctccctctgagcctctctttctggccatttctggttctctccctgttccctgcccatctcccgttgctgggt

SEQ ID NO: 694709 - DNA, 120 bp, Artificial Sequence
  ENSG00000188766_39 (sequence is synthesized)
gggccggaactatgagtgtcaattcaatcccagttattctagtctttctgccctgtcatgattcacacgttcattcaagggtccttattgtgtaccttctgtataccaggcagtgcttta

SEQ ID NO: 694710 - DNA, 120 bp, Artificial Sequence
  ENSG00000188766_40 (sequence is synthesized)
ggcactgggttacatcagtgaacaaaaagttcctttcctcctggagcttctattctagtgtggaaaggcagaaaattaaaaaaaatatatatataaacaataaaaatgaataaatattga

SEQ ID NO: 694711 - DNA, 120 bp, Artificial Sequence
  ENSG00000188766_41 (sequence is synthesized)
gtacatggtgcgggtccgagctgtggtgatggcccgagatgactccagtgggggctggctgcctgtggggggcgggggcctcagccagacaaccttggagtgtacactgaagccaggctt

SEQ ID NO: 694712 - DNA, 120 bp, Artificial Sequence
  ENSG00000188766_42 (sequence is synthesized)
ctgtgcccttgacagtggccctaaccgcatccttatgaataggtactcttaggatccccgttttacagaggaggaaactgaggctcaaagagtcccacgtggacagcgactcctcctcca

SEQ ID NO: 694713 - DNA, 120 bp, Artificial Sequence
  ENSG00000188766_43 (sequence is synthesized)
cgtagaccaccacctctttagaaccttgagaccagtccctgtccctgccccgtcccctcctcatagcattagagaccaatggcgcagatgggtggaaaagtgggggatcccctctggatc

SEQ ID NO: 694714 - DNA, 120 bp, Artificial Sequence
  ENSG00000188766_44 (sequence is synthesized)
ttaagaaaatgggggctggggggttgctctctggagctagtgccgggctctaggacccagcaggcaagtaagcccgcctcgctcttacccctcccccaagccgccccttccccccccacc

SEQ ID NO: 694715 - DNA, 120 bp, Artificial Sequence
  ENSG00000188766_45 (sequence is synthesized)
cgtcttccaggttccccctccctcccccctcgccccggctcccggtgcccgtctccagcgccgccggagccagccagggagccggaacgaaaaggaggaggaggaggccgcgtcgccgcc

SEQ ID NO: 694716 - DNA, 120 bp, Artificial Sequence
  ENSG00000188770_0 (sequence is synthesized)
accagagtccccacctttctggaagctgcagggctctccatccaggatccagaagcattgaaggggaccagccgctgaagggattctcagtcccatctgactccccatgaggctcctggc

SEQ ID NO: 694717 - DNA, 120 bp, Artificial Sequence
  ENSG00000188770_1 (sequence is synthesized)
tttcctgagtctgctggccttggtgctgcaggagacagggacagcttctctcccaaggaaggagaggaagaggagagaggagcagatgcccagggaaggcgattcctttgaagttctgcc

SEQ ID NO: 694718 - DNA, 120 bp, Artificial Sequence
  ENSG00000188770_2 (sequence is synthesized)
tctgcggaatgatgtcctgaacccagacaactatggtgaagtcattgacctgagcaactatgaggagctcacagattatggggaccaactccccgaggttaaggtgactagcctcgctcc

SEQ ID NO: 694719 - DNA, 120 bp, Artificial Sequence
  ENSG00000188770_3 (sequence is synthesized)
tgcaaccagcatcagtcccgccaagagcactacggctccagggacaccctcgtcaaaccccacgatgaccagacctactacagcagggctgctactgagttcccagcccaaccatggtct

SEQ ID NO: 694720 - DNA, 120 bp, Artificial Sequence
  ENSG00000188770_4 (sequence is synthesized)
gcccacctgcctggtctgcgtgtgcctcggttcctctgtgtattgcgatgacattgacctagaggacattcctcctcttcctcggaggactgcctacctgtatgcacgcttcaaccgcat

SEQ ID NO: 694721 - DNA, 120 bp, Artificial Sequence
  ENSG00000188770_5 (sequence is synthesized)
ccaggacctcatcctcccagagaaccagttggaagctctgcccgtgctgcccagtggcattgagttcctggatgtccgcctaaatcggctccagagctcggggatacagcctgcagcctt

SEQ ID NO: 694722 - DNA, 120 bp, Artificial Sequence
  ENSG00000188770_6 (sequence is synthesized)
cagggcaatggagaagctgcagttcctttacctgtcagacaacctgctggattctatcccggggcctttgcccctgagcctgcgctctgtacacctgcagaataacctgatagagaccat

SEQ ID NO: 694723 - DNA, 120 bp, Artificial Sequence
  ENSG00000188770_7 (sequence is synthesized)
gcagagagacgtcttctgtgaccccgaggagcacaaacacacccgcaggcagctggaagacatccgcctggatggcaaccccatcaacctcagcctcttccccagcgcctacttctgcct

SEQ ID NO: 694724 - DNA, 120 bp, Artificial Sequence
  ENSG00000188770_8 (sequence is synthesized)
gcctcggctccccatcggccgcttcacgtagctcggagcccttccactcctcccaggtcatctcttggaccagcgggcatcacattctccagcagccgccatctcacacgcctccctcct

SEQ ID NO: 694725 - DNA, 120 bp, Artificial Sequence
  ENSG00000188770_9 (sequence is synthesized)
gtggccgccggcagcatggacaaaggtctccatgcagggggaggaggcctgcttctttccccacagctctcacgtctcccttctccctgcgggtgacaaagaagcccaaggaccacctcc

SEQ ID NO: 694726 - DNA, 120 bp, Artificial Sequence
  ENSG00000188770_10 (sequence is synthesized)
ttcctgcctcattgtaataaaattccccacactgaggccttcttgtcttcaacctggcctgtccagcccttccagatatggccaaacccatggcctggatgggcttgtgtacttcctttc

SEQ ID NO: 694727 - DNA, 120 bp, Artificial Sequence
  ENSG00000188771_0 (sequence is synthesized)
aatgacaggcgtaaaagaaaaccatattcaggacattccctttcttgagcaaaactgcaatttgcaaaatcatcggtgacaggtaatggtgactggtgattcattcctggtgatgtcttg

SEQ ID NO: 694728 - DNA, 120 bp, Artificial Sequence
  ENSG00000188771_1 (sequence is synthesized)
ggccaaattccagaatccaatgtatattcagaaggggcagggagaagatctgcatgtatgacttcacccagaagccctggcatataaacaagaggtgagttgtcagtttcacccaattcc

SEQ ID NO: 694729 - DNA, 120 bp, Artificial Sequence
  ENSG00000188771_2 (sequence is synthesized)
aggcctagcactttccaaacagactgagaccatggcagtcttccatgacatgctgctgcagccactggggatgtttctgtgcctcagtctgcagctttcttctgccacctttataaggta

SEQ ID NO: 694730 - DNA, 120 bp, Artificial Sequence
  ENSG00000188771_3 (sequence is synthesized)
cagtagcacctgcttcacctttgatgaatactacaccataaccctagacatcaaggccagttcacatatctacgaaagcaatgcagtctattctgtatttgttcccgtgaatgacagcgt

SEQ ID NO: 694731 - DNA, 120 bp, Artificial Sequence
  ENSG00000188771_4 (sequence is synthesized)
ctatgctgtggtcatgaaaaccttggacgagaacagtgactcagcgggcctctggcaaagagcggataaaaattgctacagcaactccacgtattacgtgaaagatcaatacatgacggt

SEQ ID NO: 694732 - DNA, 120 bp, Artificial Sequence
  ENSG00000188771_5 (sequence is synthesized)
cttagaggcacagtggcaagctcctgaacctgagaacataactgaagtggagatacaagctttcactgtccagatcagagcgctgcctatactttctactctgaagctaagagaaaaact

SEQ ID NO: 694733 - DNA, 120 bp, Artificial Sequence
  ENSG00000188771_6 (sequence is synthesized)
aagtcttcagcagccccatcacagaggccatttatatcctgcttgcttttctcaccagcacacttctcttctaaagggaagccagggaaacaattgtttctgcctccactgcatcctcct

SEQ ID NO: 694734 - DNA, 120 bp, Artificial Sequence
  ENSG00000188771_7 (sequence is synthesized)
acattcagttccaagctagtgctgggaaccgaatgtgtgtaaatgaaggctttacattctcaaatgtgcaactttgctgccacggcttcagaccaaaacaaagatctggaggcactcatt

SEQ ID NO: 694735 - DNA, 120 bp, Artificial Sequence
  ENSG00000188771_8 (sequence is synthesized)
ggcaggcttgggtcacatagatgttcatctggatctttcaggacacatattacactttttgaaaatatttagaactggccggaacttagtcacctaggttctccctattggttgaacagg

SEQ ID NO: 694736 - DNA, 120 bp, Artificial Sequence
  ENSG00000188771_9 (sequence is synthesized)
ttggcagccaattccacagccaatctcaacttttgttcactgccaaatgattcccctgcaacctctgagtttctgtgggaagaatccttccttactttcaagatgatctcagatttctaa

SEQ ID NO: 694737 - DNA, 120 bp, Artificial Sequence
  ENSG00000188771_10 (sequence is synthesized)
ccaaacccattcaggttacaaggaacttctgtgactcatgtgactcaagaaagaaaggagaaaggagaaatagctctgaggctgctggcagcttcccatttgtccacaccagtagatttt

SEQ ID NO: 694738 - DNA, 120 bp, Artificial Sequence
  ENSG00000188771_11 (sequence is synthesized)
gaagggcaagagaacaggaacgaaccatgtctgagaagccaatatagaaaaaaactatgttataaaaacatttttgtcacaacaaataaattatactttaaacaagaataatgaatgtgt

SEQ ID NO: 694739 - DNA, 120 bp, Artificial Sequence
  ENSG00000188778_0 (sequence is synthesized)
gggacagctagagaagatggcccaggctggggaagtcgctctcatgccttgctgtcccctcccctgagccaggtgatttgggagaccccctccttccttctttccctaccgccccacgcg

SEQ ID NO: 694740 - DNA, 120 bp, Artificial Sequence
  ENSG00000188778_1 (sequence is synthesized)
cgacccggggatggctccgtggcctcacgagaacagctctcttgccccatggccggacctccccaccctggcgcccaataccgccaacaccagtgggctgccaggggttccgtgggaggc

SEQ ID NO: 694741 - DNA, 120 bp, Artificial Sequence
  ENSG00000188778_2 (sequence is synthesized)
ggccctagccggggccctgctggcgctggcggtgctggccaccgtgggaggcaacctgctggtcatcgtggccatcgcctggactccgagactccagaccatgaccaacgtgttcgtgac

SEQ ID NO: 694742 - DNA, 120 bp, Artificial Sequence
  ENSG00000188778_3 (sequence is synthesized)
ttcgctggccgcagccgacctggtgatgggactcctggtggtgccgccggcggccaccttggcgctgactggccactggccgttgggcgccactggctgcgagctgtggacctcggtgga

SEQ ID NO: 694743 - DNA, 120 bp, Artificial Sequence
  ENSG00000188778_4 (sequence is synthesized)
cgtgctgtgtgtgaccgccagcatcgaaaccctgtgcgccctggccgtggaccgctacctggctgtgaccaacccgctgcgttacggcgcactggtcaccaagcgctgcgcccggacagc

SEQ ID NO: 694744 - DNA, 120 bp, Artificial Sequence
  ENSG00000188778_5 (sequence is synthesized)
tgtggtcctggtgtgggtcgtgtcggccgcggtgtcgtttgcgcccatcatgagccagtggtggcgcgtaggggccgacgccgaggcgcagcgctgccactccaacccgcgctgctgtgc

SEQ ID NO: 694745 - DNA, 120 bp, Artificial Sequence
  ENSG00000188778_6 (sequence is synthesized)
cttcgcctccaacatgccctacgtgctgctgtcctcctccgtctccttctaccttcctcttctcgtgatgctcttcgtctacgcgcgggttttcgtggtggctacgcgccagctgcgctt

SEQ ID NO: 694746 - DNA, 120 bp, Artificial Sequence
  ENSG00000188778_7 (sequence is synthesized)
tcgtggtggctacgcgccagctgcgcttgctgcgcggggagctgggccgctttccgcccgaggagtctccgccggcgccgtcgcgctctctggccccggccccggtggggacgtgcgctc

SEQ ID NO: 694747 - DNA, 120 bp, Artificial Sequence
  ENSG00000188778_8 (sequence is synthesized)
gcggcccgcgcgcctcctgcctctccgggaacaccgggccctgtgcaccttgggtctcatcatgggcaccttcactctctgctggttgcccttctttctggccaacgtgctgcgcgccct

SEQ ID NO: 694748 - DNA, 120 bp, Artificial Sequence
  ENSG00000188778_9 (sequence is synthesized)
ggggggcccctctctagtcccgggcccggctttccttgccctgaactggctaggttatgccaattctgccttcaacccgctcatctactgccgcagcccggactttcgcagcgccttccg

SEQ ID NO: 694749 - DNA, 120 bp, Artificial Sequence
  ENSG00000188778_10 (sequence is synthesized)
tcttcccctcgggcgttcctgcggcccggagcagcccagcgcagcccaggctttgccaacggctcgacggggcttcttggggagtttcttaggcctgaaggacaagaagcaacaactctg

SEQ ID NO: 694750 - DNA, 120 bp, Artificial Sequence
  ENSG00000188778_11 (sequence is synthesized)
ttgatcagaacctgtggaaaacctctggcctctgttcagaatgagtcccatgggattccccggctgtgacactctaccctccagaacctgacgactgggccatgtgacccaaggagggat

SEQ ID NO: 694751 - DNA, 120 bp, Artificial Sequence
  ENSG00000188778_12 (sequence is synthesized)
ccttaccaagtgggttttcaccatcctcttgctctctgtctgagagatgttttctaaaccccagccttgaacttcactcctccctcagtggtagtgtccaggtgccgtggagcagcaggc

SEQ ID NO: 694752 - DNA, 120 bp, Artificial Sequence
  ENSG00000188778_13 (sequence is synthesized)
tggctttggtaggggcacccatcacccggcttgcctgtgcagtcagtgagtgcttagggcaaagagagctcccctggttccattccttctgccacccaaaccctgatgagaccttagtgt

SEQ ID NO: 694753 - DNA, 120 bp, Artificial Sequence
  ENSG00000188778_14 (sequence is synthesized)
tctccaggctctgtggcccaggctgagagcagcagggtagaaaagaccaagatttggggttttatctctggttcccttattactgctctcaagcagtggcctctctcactttagccatgg

SEQ ID NO: 694754 - DNA, 120 bp, Artificial Sequence
  ENSG00000188778_15 (sequence is synthesized)
aatggctccgatctacctcacagcagtgtcagaaggacttcgccagggttttgggagctccagggttcataagaaggtgaaccattagaacagatcccttcttttccttttgcaatcaga

SEQ ID NO: 694755 - DNA, 120 bp, Artificial Sequence
  ENSG00000188778_16 (sequence is synthesized)
taaataaatatcactgaatgcagttcatcctcggccccctttccctccgtttgttttcttttcataatccacttactcccttcccttctactctgcgctggcttttgacagaggcagtaa

SEQ ID NO: 694756 - DNA, 120 bp, Artificial Sequence
  ENSG00000188778_17 (sequence is synthesized)
attaggcctaatcctcactcttttcttcctaatcttcatcaaacaaaaaatgaaaagtctgtctggacgaaggggagtgagcttgagcctttgatatcttgctcccccacccttcctgaa

SEQ ID NO: 694757 - DNA, 120 bp, Artificial Sequence
  ENSG00000188778_18 (sequence is synthesized)
actcttgaaatccagttgccattgagtagcaaagccacgctccccacaggacttggacagagggcccacagggggatgggctggctgtggccaggtttagggcagggggcatttgtcccc

SEQ ID NO: 694758 - DNA, 87 bp, Artificial Sequence
  ENSG00000188778_19 (sequence is synthesized)
ctggaggcacaggcacaaagcattgcttgggttggtcaaatgtcttgtgtcataaatatattctgatgtttcccagcctttccacaa

SEQ ID NO: 694759 - DNA, 120 bp, Artificial Sequence
  ENSG00000188778_20 (sequence is synthesized)
tgtcataaatatattctgatgtttcccagcctttccacaacctctaccttcccactcaccttccccagctacaaaaatctgtattatcctcttaaagtaaaactggagttacaaatttga

SEQ ID NO: 694760 - DNA, 120 bp, Artificial Sequence
  ENSG00000188778_21 (sequence is synthesized)
tgtgtccgtgggtcaactttttgagtgtggagtttattaagagaaggtgggatggctttgcttggagagaaaagggaacgaggagtagcgaaccaaaatgggacccagggtccttttctt

SEQ ID NO: 694761 - DNA, 120 bp, Artificial Sequence
  ENSG00000188778_22 (sequence is synthesized)
tccggatccagtcactagggtagaagcaaaggagggcgagcgggccgtcgttcctcacccaaggacccaaggtgcgccaccggaaagcgctgcggtgtcccgaggactctcgcctcgcct

SEQ ID NO: 694762 - DNA, 120 bp, Artificial Sequence
  ENSG00000188779_0 (sequence is synthesized)
atgatcccaaagagcctggtccaggcagcggaaacccagaggggtctctgcgagccaggagggaaaggaagagaggggagaagtggaggaaaaggggagacacgccccagaggagttgga

SEQ ID NO: 694763 - DNA, 120 bp, Artificial Sequence
  ENSG00000188779_1 (sequence is synthesized)
acgcaggagggaaaggggaccatacccggtagcccgagggaaaaacgaggcgagaggggagaaggcgaccccgcgctgctacccgcggaagatttatggcgcctcccgggttccaaggac

SEQ ID NO: 694764 - DNA, 120 bp, Artificial Sequence
  ENSG00000188779_2 (sequence is synthesized)
aggctgcgttcgtcgctgctgccaccgccgggacccccttcttctgactccgggcccggacccccctcctctcactcagggaaaaccgcgcagggacccaggaccctcaactgggccaga

SEQ ID NO: 694765 - DNA, 120 bp, Artificial Sequence
  ENSG00000188779_3 (sequence is synthesized)
aagcaaagtgcaaggaccagcagcaacttgtgtgcctggagccttgcaatggctacgaagatggctgagattccttctagcccatatgagccgggacagcgaggcatgaaggatactcag

SEQ ID NO: 694766 - DNA, 120 bp, Artificial Sequence
  ENSG00000188779_4 (sequence is synthesized)
agaggtgatgcccctcaaagaggaagcccagagccccgaatcctgcagttggcccgagtgggaaacgtatatctgaaggaggaaagctcaaggagtgggcgactggaagctaagaagtgg

SEQ ID NO: 694767 - DNA, 120 bp, Artificial Sequence
  ENSG00000188779_5 (sequence is synthesized)
atcccaacaaagttccttgagaacctctctgtcccacacgttgacctcggtggaaaccagctttggagcggcggcatggaggctctcaccactcagctggggccggggcgcgagggcagt

SEQ ID NO: 694768 - DNA, 120 bp, Artificial Sequence
  ENSG00000188779_6 (sequence is synthesized)
tcctcgcccaactccaagcaggagctgcagccgtactcgggctccagcgctctcaaacccaaccaggtgggcgagacgtcgctgtacggggtgcccattgtgtcgctggtcatcgacggc

SEQ ID NO: 694769 - DNA, 120 bp, Artificial Sequence
  ENSG00000188779_7 (sequence is synthesized)
caggagcgcctatgcctggcgcagatctccaacaccctcctcaagaactacagctataatgagatccacaaccgccgcgtggccctgggcatcacgtgcgtgcagtgcacgccggtacag

SEQ ID NO: 694770 - DNA, 120 bp, Artificial Sequence
  ENSG00000188779_8 (sequence is synthesized)
ctggagattctgcgtcgggccggggccatgcccatctcgtcgcgccgctgcggcatgatcactaagcgagaggccgaacgcctgtgcaagtcgttcctgggcgagcacaaaccacccaag

SEQ ID NO: 694771 - DNA, 120 bp, Artificial Sequence
  ENSG00000188779_9 (sequence is synthesized)
ctgcccgagaacttcgccttcgatgtggtgcacgagtgcgcgtggggctcgcgtggtagcttcatccctgcgcgttacaacagctctcgtgccaagtgcatcaagtgcggctactgcagc

SEQ ID NO: 694772 - DNA, 120 bp, Artificial Sequence
  ENSG00000188779_10 (sequence is synthesized)
tcctggcgtcgtcacctcaaactcagtgacaagtcggccacagacgaactgagccatgcttgggaggaccgcggacttggcctggcgactggagctagtggcccggcgggcccaggaggg

SEQ ID NO: 694773 - DNA, 120 bp, Artificial Sequence
  ENSG00000188779_11 (sequence is synthesized)
cccggtggcggcgccggcgtacgaagctacccggtgatcccggtgcccagcaaaggctttgggctcctgcaaaagctgcccccaccacttttcccccatccttacggcttccctacggcc

SEQ ID NO: 694774 - DNA, 120 bp, Artificial Sequence
  ENSG00000188779_12 (sequence is synthesized)
ttcggcctatgccccaaaaaggacgacccggttttaggcgcgggcgagccaaagggcggctcctacgtgtcggccttccggccggtggtcaaggacaccgagagcatcgctaagctctac

SEQ ID NO: 694775 - DNA, 120 bp, Artificial Sequence
  ENSG00000188779_13 (sequence is synthesized)
gggagcgcccgggaggcgtacggcgcggggcctgctcgggggccgggacccggcgctgggagcggcggctacgtgagcccggactttctgagcgagggcagctccagctacaattccgcc

SEQ ID NO: 694776 - DNA, 120 bp, Artificial Sequence
  ENSG00000188779_14 (sequence is synthesized)
tcgcccgacgtggacaccgcggacgagcccgaggtggacgtggaatccaaccgcttccccgacgacgaggacgcccaagaggagaccgagcccagcgcacccagcgcagggggcggccca

SEQ ID NO: 694777 - DNA, 120 bp, Artificial Sequence
  ENSG00000188779_15 (sequence is synthesized)
gacgctggccggcccgcatttggggacttggcagccgaagacttggtgcggagacctgagaggagcccgccaagcggcggcggcggctacgagctgcgagagccttgcgggcccctagga

SEQ ID NO: 694778 - DNA, 120 bp, Artificial Sequence
  ENSG00000188779_16 (sequence is synthesized)
ggccccgcgccggccaaggtgttcgcgcccgagagggatgagcacgtgaagagcgcggcggtggcgctggggcccgcggcctcctacgtctgcacccccgaggcccacgagccagataag

SEQ ID NO: 694779 - DNA, 120 bp, Artificial Sequence
  ENSG00000188779_17 (sequence is synthesized)
gaagacaatcactcgcccgccgatgatttggaaacgaggaaatcctatccagaccaaaggagtatctcccagccaagtcctgcaaatacagacagaggcgaagatgggcttaccttggat

SEQ ID NO: 694780 - DNA, 120 bp, Artificial Sequence
  ENSG00000188779_18 (sequence is synthesized)
gtcacaggaactcatttggtggagaaagatatcgagaacctggccagagaggaattgcaaaaactgctcctggaacaaatggagctccgcaagaagctggaacgggaatttcagagtctc

SEQ ID NO: 694781 - DNA, 120 bp, Artificial Sequence
  ENSG00000188779_19 (sequence is synthesized)
aaagataattttcaggatcaaatgaagagggaattggcttatcgagaagaaatggtgcaacagctgcaaattgtcagagataccctgtgtaacgaactcgaccaggagcggaaggcgcgc

SEQ ID NO: 694782 - DNA, 120 bp, Artificial Sequence
  ENSG00000188779_20 (sequence is synthesized)
tatgccatccagcagaaattgaaagaagcccacgacgccctgcaccatttctcctgcaagatgctgacgccccgccactgcactggcaactgctccttcaagccaccgctgttgccctag

SEQ ID NO: 694783 - DNA, 120 bp, Artificial Sequence
  ENSG00000188779_21 (sequence is synthesized)
gaagtccgggcttcaggacccgggccggcagcaccggctgcgagggttgccgaaggcgcacggatctgggcgctgaaaaagccaggatttggcaatggctttgctgtgtggccttgggca

SEQ ID NO: 694784 - DNA, 120 bp, Artificial Sequence
  ENSG00000188779_22 (sequence is synthesized)
agtcactctgcgtatctgggtttcacttccttcccaatccgaaaacgggattgggttccttgcagcccgggcattcctgaggagcggcggcatggaggctctcaccactcagctggggcc

SEQ ID NO: 694785 - DNA, 120 bp, Artificial Sequence
  ENSG00000188779_23 (sequence is synthesized)
tgccaatggcgggtcgggtgggcaggggaagggtggtgctggcggcggtggcggcggtggcccagggtgcggtgcagagatggccccaggcccgccgccccacaaaagcctgcgctgtgg

SEQ ID NO: 694786 - DNA, 120 bp, Artificial Sequence
  ENSG00000188779_24 (sequence is synthesized)
cccaaaaaggacgacccggttttaggcgcgggcgagccaaagggcggtcctggcactgggagcggcggcggcggcgcggggacaggcgggggtgcggggggcccgggagccagccacttg

SEQ ID NO: 694787 - DNA, 120 bp, Artificial Sequence
  ENSG00000188779_25 (sequence is synthesized)
ggcaggggcgggcccgggcggcggcgccatgttctgggggcatcaaccctccggggcagccaaggacgcagcggcagtggctgcagcggccgccgccgccactgtgtacccgacgtttcc

SEQ ID NO: 694788 - DNA, 120 bp, Artificial Sequence
  ENSG00000188779_26 (sequence is synthesized)
catgttctggccagcagcaggcagcctcccggtaccgtcctaccccgctgctcagagccaagccaaggccgtggcggcagccgtggcggcggcagcggcggcggcagcggcagctgctgg

SEQ ID NO: 694789 - DNA, 120 bp, Artificial Sequence
  ENSG00000188779_27 (sequence is synthesized)
cagcggtgccccagagcccctggacggtgccgagccagccaaagagagtggcctcggcgcggaggagcgctgcccgagcgctctgtcccgcgggcccctggacgaagacggcacggacga

SEQ ID NO: 694790 - DNA, 120 bp, Artificial Sequence
  ENSG00000188779_28 (sequence is synthesized)
ctcaagccatgctgctccttgtaaatacccgctgctgcggtggccctgagcgaggaacaagccattcggacccgaccgatgtaaatacagccgcccgtccgcccgccttcctcccgggct

SEQ ID NO: 694791 - DNA, 120 bp, Artificial Sequence
  ENSG00000188779_29 (sequence is synthesized)
ccccggccttgcccgccccctcccgggcgtccctgtccagggccccggcttggtttccaagtgtaaataccgcctcgcgcctcaaatccccctaccccgtgtgaactctagggcatcgga

SEQ ID NO: 694792 - DNA, 120 bp, Artificial Sequence
  ENSG00000188779_30 (sequence is synthesized)
cctcaaggggttaactggacagacggggggcgggaggggagagcgccccctcccattgtatagccttgaacccgattgtgaatacaatgtagcaacttcgctggcgcctgccccgcactc

SEQ ID NO: 694793 - DNA, 120 bp, Artificial Sequence
  ENSG00000188779_31 (sequence is synthesized)
cccgtcccgtccacttctgaaactcctgttcctaatgacaaagtggctatgtgcaatggatataaatgtactgtgagtctctcggttcagtattaggttcactttaatttatttatgctg

SEQ ID NO: 694794 - DNA, 120 bp, Artificial Sequence
  ENSG00000188779_32 (sequence is synthesized)
taagttatttttgcttccttctcctggacccacttccagtcccgttttgcattcccctttggattttgctttggctattttttgttgtaacctcttgatgtaacagcactttaaaagggc

SEQ ID NO: 694795 - DNA, 120 bp, Artificial Sequence
  ENSG00000188779_33 (sequence is synthesized)
gacaactgactcacgagatggcaaccacctggagcctgtttggggagaccaccctgtacccgtgactttcgtttttaataataataataataataataaaagatgtcacttctggggcta

SEQ ID NO: 694796 - DNA, 120 bp, Artificial Sequence
  ENSG00000188779_34 (sequence is synthesized)
gggcttcaggacccgggccggcagcaccggctgcgagggttgccgaaggcgcacggatctgggcgctgaaaaagccaggatttggcaatggctttgctgtgtggccttgggagcggcggc

SEQ ID NO: 694797 - DNA, 120 bp, Artificial Sequence
  ENSG00000188779_35 (sequence is synthesized)
cggcggatcccggactcccgcccgccgctcctcccgccgcgcacctccgctcaccgctcgcccggctccagccgccgccgcactgagcggcggcatggaggctctcaccactcagctggg

SEQ ID NO: 694798 - DNA, 120 bp, Artificial Sequence
  ENSG00000188782_0 (sequence is synthesized)
accacgagggggagtgagaccacttggagtgaagattctttgaggagaaggaagagactgagcaaacatgagggataatgaaaaggcctggtggcagcaatggacctcccatacaggcct

SEQ ID NO: 694799 - DNA, 120 bp, Artificial Sequence
  ENSG00000188782_1 (sequence is synthesized)
cgaggggtggggcgggactcaggaggaccgtatggggtttggaggggcagtagctgcactgaggggccgcccctctcccctgcagagtaccattcacgagtcctacggtcggccagagga

SEQ ID NO: 694800 - DNA, 120 bp, Artificial Sequence
  ENSG00000188782_2 (sequence is synthesized)
gcaagtgctcatcaaccgccaggaaatcacgaacaaagcggacgcctgggacatgcaggagttcatcactcacatgtacatcaagcagctgctccgacaccccgccttccaactgctgct

SEQ ID NO: 694801 - DNA, 120 bp, Artificial Sequence
  ENSG00000188782_3 (sequence is synthesized)
ggccctgctgctggtgatcaatgccatcaccatcgctctccgtaccaactcctacctggaccagaaacactatgagttgttctctaccatagatgacattgtgctgaccatccttctttg

SEQ ID NO: 694802 - DNA, 120 bp, Artificial Sequence
  ENSG00000188782_4 (sequence is synthesized)
tgaggttctccttggctggctcaatggcttctggattttctggaaggacggctggaacatcctcaacttcattatcgtctttatcttgctcttgcggttcttcattaatgaaatcaatat

SEQ ID NO: 694803 - DNA, 120 bp, Artificial Sequence
  ENSG00000188782_5 (sequence is synthesized)
tccctccatcaactacactctcagggcgcttcgtctggtgcatgtgtgcatggcggtggagcccctcgcccggatcatccgcgtcatcctgcagtcggtgcctgacatggccaatatcat

SEQ ID NO: 694804 - DNA, 120 bp, Artificial Sequence
  ENSG00000188782_6 (sequence is synthesized)
ggtcctcatcctcttcttcatgctggttttttccgtgtttggagtaacactctttggtgcattcgtgcccaagcatttccagaacatacaggttgcgctgtacaccctcttcatctgcat

SEQ ID NO: 694805 - DNA, 120 bp, Artificial Sequence
  ENSG00000188782_7 (sequence is synthesized)
ttcattggcatcaacctgttcgtcatcgtggtgaccaccaacctggagcaaatgatgaaggcaggagagcagggacaacagcaacgaataacctttagtgagacaggcgcagaggaagag

SEQ ID NO: 694806 - DNA, 120 bp, Artificial Sequence
  ENSG00000188782_8 (sequence is synthesized)
gaggagaatgaccagctgccactggtgcattgtgtggtcgcccgctcggagaaatctggtctcctccaggaaccccttgcgggaggccccctgtcgaacctctcagaaaacacgtgtgac

SEQ ID NO: 694807 - DNA, 120 bp, Artificial Sequence
  ENSG00000188782_9 (sequence is synthesized)
aacttttgcttggtgcttgaggcaatacaggagaacctgaggcagtacaaggagatccgagatgaactcaacatgattgtggaggaggtgcgcgcaatccgcttcaaccaggagcaggag

SEQ ID NO: 694808 - DNA, 120 bp, Artificial Sequence
  ENSG00000188782_10 (sequence is synthesized)
tcagaggtgttgaacaggcgctcgtcgacgagcgggtcgttggagactacgtcatccaaggacatccgccagatgtctcaacagcaagacttgctcagtgcgctcgttagcatggaaaag

SEQ ID NO: 694809 - DNA, 120 bp, Artificial Sequence
  ENSG00000188782_11 (sequence is synthesized)
gttcatgactctagctcacaaatactccttaaaaaacacaagagcagccactgagaggccaggatgggagccaaggggcctgcacacacacacccagccgctgcgtcttcctgtgtcctt

SEQ ID NO: 694810 - DNA, 120 bp, Artificial Sequence
  ENSG00000188782_12 (sequence is synthesized)
agtgtggcttggcagagcctggccagagcccatcctctcccttatacctgggcagaggccaggggctgtgaaggtggcagcacctgcaggtctggtgcctgtgagccccaggtccggtgg

SEQ ID NO: 694811 - DNA, 120 bp, Artificial Sequence
  ENSG00000188782_13 (sequence is synthesized)
agcaaggagagaggaggatgctggatgatgagagtgggaaccctagcagcaaggatgagcacagaagggggtgctggccaacgcagccaggatttgacctaaggatggggatccctggcc

SEQ ID NO: 694812 - DNA, 120 bp, Artificial Sequence
  ENSG00000188782_14 (sequence is synthesized)
ccctgctcttgcccagagctggtggggggcctcagtgggccccagaaccaagaagagaaaggcaaggccagtggggccagacatctgtgtgttgacaataaagttttgtgttggaatcaa

SEQ ID NO: 694813 - DNA, 120 bp, Artificial Sequence
  ENSG00000188782_15 (sequence is synthesized)
acctgaggcagtacaaggagatccgagatgaactcaacatgtaggggagggtactggggctgcccccaagtcatgattgtggaggaggtgcgcgcaatccgcttcaaccaggagcaggag

SEQ ID NO: 694814 - DNA, 120 bp, Artificial Sequence
  ENSG00000188783_0 (sequence is synthesized)
aaacacaagcacgcacacaccactgggagatcagatcttctagctggctctctgctgccacagctccgccgaagggagggggtggaagaggaggactaaactcagagctgagaggagagg

SEQ ID NO: 694815 - DNA, 120 bp, Artificial Sequence
  ENSG00000188783_1 (sequence is synthesized)
caggtgtgtgcaggtgcatcacctggatcatgaggtcacccctctgctggctcctcccacttctcatcttggcctcagtggcccaaggccagccaacaagacgaccaagacccgggactg

SEQ ID NO: 694816 - DNA, 120 bp, Artificial Sequence
  ENSG00000188783_2 (sequence is synthesized)
ggcccgggcgcagacccaggcccaggcccaggcccacacccagctttcctcagcctgatgaaccagcagagccaacagacctgcctcctcccctccctccaggccctccatctatcttcc

SEQ ID NO: 694817 - DNA, 120 bp, Artificial Sequence
  ENSG00000188783_3 (sequence is synthesized)
ctgactgtccccgcgaatgctactgcccccctgatttcccatctgccctctactgtgatagccgcaacctgcgaaaggtccctgtcatcccgccccgcatccattacctctatctccaga

SEQ ID NO: 694818 - DNA, 120 bp, Artificial Sequence
  ENSG00000188783_4 (sequence is synthesized)
acaacttcatcactgagctcccggtggagtccttccagaatgccacaggcctgcgatggattaacctggacaacaaccgaatccgcaagatagaccagagggtgctggagaaactgcccg

SEQ ID NO: 694819 - DNA, 120 bp, Artificial Sequence
  ENSG00000188783_5 (sequence is synthesized)
gcctggtgttcctctacatggagaagaaccagttggaagaggtcccctcggccctgccccggaacctggagcagctgaggctgagccagaaccacatctccagaatcccgcctggtgtct

SEQ ID NO: 694820 - DNA, 120 bp, Artificial Sequence
  ENSG00000188783_6 (sequence is synthesized)
tcagcaagctggagaacctgctgctcctggatctccagcacaacaggctgagcgacggcgtcttcaagcccgacaccttccatggcctcaagaacctcatgcagctcaacctggcccaca

SEQ ID NO: 694821 - DNA, 120 bp, Artificial Sequence
  ENSG00000188783_7 (sequence is synthesized)
acatcctgagaaagatgccgcccagggtccccaccgccattcaccagctctacctggacagtaacaagattgagaccatccctaacggatacttcaagagctttcccaatcttgccttca

SEQ ID NO: 694822 - DNA, 120 bp, Artificial Sequence
  ENSG00000188783_8 (sequence is synthesized)
ttcggcttaactacaacaagctgacagacaggggactccccaagaactcctttaatatctccaacctgcttgtgctccacctgtcccacaacaggatcagcagtgtgcccgccatcaaca

SEQ ID NO: 694823 - DNA, 120 bp, Artificial Sequence
  ENSG00000188783_9 (sequence is synthesized)
acaggctggaacacctgtacctcaacaacaatagcatcgagaaaatcaacggaacccagatttgccccaacgacctagtggcgttccatgacttctcctcggacctggagaacgtgccac

SEQ ID NO: 694824 - DNA, 120 bp, Artificial Sequence
  ENSG00000188783_10 (sequence is synthesized)
acctgcgctacctgcggctggatggaaactacttgaagccgcccatcccgctggacctcatgatgtgcttccgcctcctgcagtccgtggtcatctaggccctactccgccaccggatct

SEQ ID NO: 694825 - DNA, 120 bp, Artificial Sequence
  ENSG00000188783_11 (sequence is synthesized)
gctctgaccgcacttgaaggctggggcccaggcacctgtgccggccattcgttttctctctctccctttctttctcccagctttgcctcccttatcccaccctcgaggcagggaaaagcc

SEQ ID NO: 694826 - DNA, 120 bp, Artificial Sequence
  ENSG00000188783_12 (sequence is synthesized)
atctattcttctgcagcctcaggagcgagacttcaaggactcagtttggttccacccagttgaaagacacccagtgcacacccaaactcctggccttctgtggtttccctttgctccaga

SEQ ID NO: 694827 - DNA, 120 bp, Artificial Sequence
  ENSG00000188783_13 (sequence is synthesized)
aacacagatgtgtctaaagacttggtgtccccttctctctcctcccccacccgccactcctgggtacatctgggccgtggactatctgatcttggtcctggccgagcaaacagcccggag

SEQ ID NO: 694828 - DNA, 120 bp, Artificial Sequence
  ENSG00000188783_14 (sequence is synthesized)
gtaaggttcagaaagtccccctggggactcctccatcttcggcagctctggctcaaagaggccgagaaacccagttctcctgggccaaggatcccttctggcaaagctgctgctccgccg

SEQ ID NO: 694829 - DNA, 120 bp, Artificial Sequence
  ENSG00000188783_15 (sequence is synthesized)
cttggttccccggcaccagacatcgccctggccctgctggcccgggtatcgggaaggaggagcgagggaatgacggaggtagggtgcagggtcagggctcccgcaggggcctgcatctgg

SEQ ID NO: 694830 - DNA, 120 bp, Artificial Sequence
  ENSG00000188783_16 (sequence is synthesized)
ccagcaggacacagggatgcgcagggcgcccccttctgttccagggtgaacatagcacacgccctcctggctgggcctcaggaggaacagccaaggagaagaatggcccaaggaactagg

SEQ ID NO: 694831 - DNA, 120 bp, Artificial Sequence
  ENSG00000188783_17 (sequence is synthesized)
aagcagccatgggagaggggaagggttcaagcccgggatgggcccgcgtgacgtcgatgggtcctgcggcccccttgcccaacctcgggtttagggaggagggttcacagtgtttttgtg

SEQ ID NO: 694832 - DNA, 120 bp, Artificial Sequence
  ENSG00000188783_18 (sequence is synthesized)
ggggcgggggaaggaagaggcagccccgcccccgccatctgttctccatcagtgtgcgcggcccagccatttccaccctcgggaggcggctcctgagaaacagggaggaaggggcggagc

SEQ ID NO: 694833 - DNA, 120 bp, Artificial Sequence
  ENSG00000188783_19 (sequence is synthesized)
acctggacgtctcccagaagcccctccacgtttgaaaatgcgcctcctcctcggagacagacgcatcggtgccacctagtggctggtgggagtaacagctggtcccagtcttgcgcctgg

SEQ ID NO: 694834 - DNA, 120 bp, Artificial Sequence
  ENSG00000188783_20 (sequence is synthesized)
ccctcttcctggggtgattttcctcggtggaggaggcccgtggggtcccaacacggaagagccatgggccgtgtgcatggtgtcgctctcctctagggtctagcgggcacaaacgtcccc

SEQ ID NO: 694835 - DNA, 120 bp, Artificial Sequence
  ENSG00000188783_21 (sequence is synthesized)
aggctgggctcattcccatcgtgagtgagcccaggtgaggacatagtcggctcccgtttgttgtaggcccttcccaggtgccttctcagctccctcatctgtaaaccgaggaggtggata

SEQ ID NO: 694836 - DNA, 88 bp, Artificial Sequence
  ENSG00000188783_22 (sequence is synthesized)
gcgcctataatcccagctactgggaggctgaggcgggagaatcgcttgagccggggaggcggaggttgcagtgaggcgagattgtgcc

SEQ ID NO: 694837 - DNA, 120 bp, Artificial Sequence
  ENSG00000188783_23 (sequence is synthesized)
gactccgtctcaaaaaagaaaaaaaaaagatgctcctctgaggtccctccggcgctcatgttccgagtctgcagctccacactttaaatcatactcgaatgcaggacaagtcctaaatat

SEQ ID NO: 694838 - DNA, 120 bp, Artificial Sequence
  ENSG00000188783_24 (sequence is synthesized)
taaatcatactcgaatgcaggacaagtcctaaatatttgccccttcccttgcagtaatttattttctgtatggactgtccctcccccagaggcttccccaccctccattgcctggcccag

SEQ ID NO: 694839 - DNA, 120 bp, Artificial Sequence
  ENSG00000188783_25 (sequence is synthesized)
gtgagcagcttggcaggtctccaagtggaacccggtccagacagggctgcctcgacttcacctttccccctaacttcctccaagggatgctgccccttctcagccccctgcgtgtgtata

SEQ ID NO: 694840 - DNA, 120 bp, Artificial Sequence
  ENSG00000188783_26 (sequence is synthesized)
ttggtgggaggcatagaggatggatgttctagaaatgagtaagacacagtgcccacccccaagttaggatgaaaaaagttccagaggtttttaagaaattggattaagctgggtccctaa

SEQ ID NO: 694841 - DNA, 120 bp, Artificial Sequence
  ENSG00000188783_27 (sequence is synthesized)
cttcaagaaattcccattatgctccttctcacctttcttttttgctaattatggaaaatagggcccatttcatcatagcctccttcccccgtgctccactacaatcgccgcattctttct

SEQ ID NO: 694842 - DNA, 120 bp, Artificial Sequence
  ENSG00000188783_28 (sequence is synthesized)
agctgcagctggtttcttcaaggctcctgcttaaagtccacacgttattatggccgaaagcaacctggtgcttcggcctggataagagccccttctgcatcttattcacagcttgcagcc

SEQ ID NO: 694843 - DNA, 120 bp, Artificial Sequence
  ENSG00000188783_29 (sequence is synthesized)
tcagcccctttgatgaggccctcaggggagaggtcattaccttgatcctgcaaacccagactcgttgagcagcaacgcaatcaccatcatcccactgcccaatctagaatatgtctgctc

SEQ ID NO: 694844 - DNA, 120 bp, Artificial Sequence
  ENSG00000188783_30 (sequence is synthesized)
tcctttgctctctgcagctgtaagccagaggggattcaaggtaaataggctttacaggctcccctcctccaaacacacacagaatgggctggtttctttcaagtttaaaaaaagccccct

SEQ ID NO: 694845 - DNA, 120 bp, Artificial Sequence
  ENSG00000188783_31 (sequence is synthesized)
tctccatgcacaagttcattccctccatgctgtcgtcatcgacatatacaggtgtgtacgtaggtgtatgtgtgtactctgcacgtatatctcttctgtcttgaagaccctgttaacttt

SEQ ID NO: 694846 - DNA, 120 bp, Artificial Sequence
  ENSG00000188783_32 (sequence is synthesized)
gtgaaataacttccacatttcaacacacttcacagtacaggaaataaagtaatatgaaaaacaccctgcgtgaactcaacggtgtgaacaggtcaagaataacacttcaaagtcatcttg

SEQ ID NO: 694847 - DNA, 88 bp, Artificial Sequence
  ENSG00000188783_33 (sequence is synthesized)
tttcatcttgccacccaccccctaccattgagccaccatgcccagccccaaagcctcttaattgctctaacaagatgagtggggaaaa

SEQ ID NO: 694848 - DNA, 120 bp, Artificial Sequence
  ENSG00000188783_34 (sequence is synthesized)
caaagcctcttaattgctctaacaagatgagtggggaaaagattatactcttaagaaattcctacgaaagctatccaaaagccttttctttcctcttttcttattatttttaaatagagg

SEQ ID NO: 694849 - DNA, 88 bp, Artificial Sequence
  ENSG00000188783_35 (sequence is synthesized)
cagagtgctgggattacacacgtgagtcaccatgcccagccccaaagccatttcttgaagaatttctcgcaaactcacaaccctcatg

SEQ ID NO: 694850 - DNA, 120 bp, Artificial Sequence
  ENSG00000188783_36 (sequence is synthesized)
catttcttgaagaatttctcgcaaactcacaaccctcatgaaaaattaatcctcagttccacgagactgcccacccacagacaaaaaaatatatatattcctaaagtcggaccagaaatc

SEQ ID NO: 694851 - DNA, 120 bp, Artificial Sequence
  ENSG00000188783_37 (sequence is synthesized)
tgacagctgcctttgaaacccaaagcctcgggttctttcaagctacatgtactaaattgtcgaaggtctcccaggagctctgtactgaggcagacacagaaagacacaaaacggtcgtct

SEQ ID NO: 694852 - DNA, 120 bp, Artificial Sequence
  ENSG00000188783_38 (sequence is synthesized)
ttcctgcccaagtaaagcttacagactaactggggagatgtagtgtgcatacaaaacagtaaaagagccatctcaaggacagagagcatagaccaagtcatctggaatggtctacatgcc

SEQ ID NO: 694853 - DNA, 120 bp, Artificial Sequence
  ENSG00000188783_39 (sequence is synthesized)
atgcggaagtccaccgaagggttagaacagggtgtcccagactctctcttctgagggaaggttggttgcaaaagtgggattcatgaccctcccaggctacaccatcttctttagaatgag

SEQ ID NO: 694854 - DNA, 120 bp, Artificial Sequence
  ENSG00000188783_40 (sequence is synthesized)
aactgccaggtgacgccctcgctgctcctacctggctactaaacatcgacttcggttcacttcacggatgttcagtggatatcggtcacatgccaggtccccagctacgcattcaaggat

SEQ ID NO: 694855 - DNA, 120 bp, Artificial Sequence
  ENSG00000188783_41 (sequence is synthesized)
ggataatatacatagcagcacatccttgaggaactcataccttggtaaagggaaagaaatccatgaatggatacctctgtgtcctaagtgtttgtaataatgctgtgtgtcaggcctctg

SEQ ID NO: 694856 - DNA, 76 bp, Artificial Sequence
  ENSG00000188783_42 (sequence is synthesized)
gccatcatatcccctgtgacctgcatgtgcacatccagacggctggttcctggtccctgccttaactgatgacatt

SEQ ID NO: 694857 - DNA, 71 bp, Artificial Sequence
  ENSG00000188783_43 (sequence is synthesized)
tcctggctcaaaagctcccccactgaacaccttgcaacccccacccctgcatcttataaaatggccccatc

SEQ ID NO: 694858 - DNA, 120 bp, Artificial Sequence
  ENSG00000188784_0 (sequence is synthesized)
ctgctttcttctgctgccttttatgctccttgtgcacctcccttccccccaacctgggatgaaatctccccacgtgctggtgttcctttgcctcctggtggctctggtcaccgggaacct

SEQ ID NO: 694859 - DNA, 120 bp, Artificial Sequence
  ENSG00000188784_1 (sequence is synthesized)
ggttcagtttggggtgatgatcgagaagatgacaggcaagtccgccctgcagtacaacgactatggctgttactgcggcatcggtggctcccactggccggtggaccagactgactggtg

SEQ ID NO: 694860 - DNA, 120 bp, Artificial Sequence
  ENSG00000188784_2 (sequence is synthesized)
ctgccacgcccacgactgctgctacgggcgtctggagaagctgggctgtgagcccaaactggaaaagtatcttttctctgtcagcgaacgtggcattttctgcgccggcaggaccacctg

SEQ ID NO: 694861 - DNA, 120 bp, Artificial Sequence
  ENSG00000188784_3 (sequence is synthesized)
acaaccgcaaatatgcccattatcccaacaagctgtgcaccgggcccaccccgccctgctgaggctatgctcggcctcccccccgtccctggaggtcccgcctcgggctgctgtagtccc

SEQ ID NO: 694862 - DNA, 120 bp, Artificial Sequence
  ENSG00000188784_4 (sequence is synthesized)
aggcctggggaacattggcaccaaaggccctccctttggaaaattcctttcctgcaaactcatccctccttgagagctcagagatatgtcctggaccatcactagcctcccaggctaccc

SEQ ID NO: 694863 - DNA, 120 bp, Artificial Sequence
  ENSG00000188784_5 (sequence is synthesized)
cttctctgtagaaagaaccctgccccaggagccatggacccttcagcacccagaagactgtcactagcttctgggatctcagctccctcttctgaataagtgaataatgttttcccataa

SEQ ID NO: 694864 - DNA, 120 bp, Artificial Sequence
  ENSG00000188785_0 (sequence is synthesized)
gggcgggacttccgccgtcctcctggtggtggtcgttttggttctgtgtggtgtttcaccaacttcggcctatggctctgtctgacgtcaccgaagtgacggaacggaaaagcgcgagaa

SEQ ID NO: 694865 - DNA, 120 bp, Artificial Sequence
  ENSG00000188785_1 (sequence is synthesized)
gcggctcggttcccaccacggagaggcgggagtgagtcaactgacaagcgctggggacagtggcgtccttgtcttgcctttgtcgctcccgccccgctcttccctggctgggctggcgga

SEQ ID NO: 694866 - DNA, 120 bp, Artificial Sequence
  ENSG00000188785_2 (sequence is synthesized)
ggccttgctgatgaacctgactgagggccgtgtggtctttgaggacgtggccatatatttctcccaggaggagtgggggcaccttgatgaggctcagagattgctgtaccgtgatgtgat

SEQ ID NO: 694867 - DNA, 120 bp, Artificial Sequence
  ENSG00000188785_3 (sequence is synthesized)
gctggagaatttggcccttttgtcctcactaggttcttggcatggagctgaggatgaggaggcaccttcacagcaaggtttttctgtaggagtgtcagaggttacagcttcaaagccctg

SEQ ID NO: 694868 - DNA, 120 bp, Artificial Sequence
  ENSG00000188785_4 (sequence is synthesized)
tctgtccagccagaaggtccaccctagtgagacatgtggcccacccttgaaagacattctgtgcctggttgagcacaatggaattcatcctgagcaacacatatatatttgtgaggcaga

SEQ ID NO: 694869 - DNA, 120 bp, Artificial Sequence
  ENSG00000188785_5 (sequence is synthesized)
gctttttcagcacccaaagcagcaaattggagaaaatctttccagaggggatgattggataccttcatttgggaagaaccacagagttcacatggcagaggagatcttcacatgcatgga

SEQ ID NO: 694870 - DNA, 120 bp, Artificial Sequence
  ENSG00000188785_6 (sequence is synthesized)
gggctggaaggacttaccagccacctcatgccttctccagcaccagggccctcaaagcgagtggaagccatacagggacacagaggacagagaagcctttcagactggacaaaatgatta

SEQ ID NO: 694871 - DNA, 120 bp, Artificial Sequence
  ENSG00000188785_7 (sequence is synthesized)
caaatgtagtgaatgtgggaaaaccttcacctgcagctattcatttgttgagcaccagaaaatccacacaggagaaaggtcttatgaatgtaacaaatgtgggaaattctttaagtacag

SEQ ID NO: 694872 - DNA, 120 bp, Artificial Sequence
  ENSG00000188785_8 (sequence is synthesized)
tgccaatttcatgaaacatcagacagttcacactagtgaaaggacttatgagtgcagagaatgtggaaaatcctttatgtacaactaccgactcatgagacataagcgagttcacactgg

SEQ ID NO: 694873 - DNA, 120 bp, Artificial Sequence
  ENSG00000188785_9 (sequence is synthesized)
agaaaggccttatgagtgcaacacatgtgggaaattctttcggtacagctccacatttgttagacatcagagagttcacaccggagaaaggccgtatgagtgcagggaatgtgggaaatt

SEQ ID NO: 694874 - DNA, 120 bp, Artificial Sequence
  ENSG00000188785_10 (sequence is synthesized)
ctttatggacagctccacactcattaaacatcagagagttcacaccggagaaagaccttataagtgcaatgattgtgggaaattttttaggtatatctccacactcattagacatcagag

SEQ ID NO: 694875 - DNA, 120 bp, Artificial Sequence
  ENSG00000188785_11 (sequence is synthesized)
aattcacactggagaaaggccttatgagtgcagtgtatgtggggaattgtttaggtacaactccagccttgttaaacattggagaaatcacactggagaaaggccttataaatgcagtga

SEQ ID NO: 694876 - DNA, 120 bp, Artificial Sequence
  ENSG00000188785_12 (sequence is synthesized)
atgtgggaaatcatttaggtaccactgcaggctcattagacaccagagagtccacacgggagaaaggccttatgagtgcagcgaatgcgggaaattctttcgttacaactccaacctcat

SEQ ID NO: 694877 - DNA, 120 bp, Artificial Sequence
  ENSG00000188785_13 (sequence is synthesized)
taaacattggagaaatcacactggagaaaggccttacgagtgcagagagtgtgggaaagcctttagccacaagcatatacttgttgagcaccagaaaatccacagtggagaaagacctta

SEQ ID NO: 694878 - DNA, 120 bp, Artificial Sequence
  ENSG00000188785_14 (sequence is synthesized)
tgagtgcagcgaatgccagaaggcctttattagaaagtctcacctggttcatcaccagaaaatccacagtgaagagaggcttgtgtgctccatgaatgtggggaattctttagctaaaac

SEQ ID NO: 694879 - DNA, 120 bp, Artificial Sequence
  ENSG00000188785_15 (sequence is synthesized)
tccaacctcattaaacatcagagatttcacaatggagaaagtttaccattgactattgtaattgggtagtaatgttatataaattccacatttttatgcaactaatctccagaacatttt

SEQ ID NO: 694880 - DNA, 120 bp, Artificial Sequence
  ENSG00000188785_16 (sequence is synthesized)
tcctcttaccaagaagtaaaatgctgtacccattaacaacaactcattccccttccctacttccccagaaatgtctcaactatatttctatactctatggtacttatatgaggtaccaat

SEQ ID NO: 694881 - DNA, 120 bp, Artificial Sequence
  ENSG00000188785_17 (sequence is synthesized)
agatatctatgaatttgatatatatttgtacctcatataagtggattctacagtatttatcttttgagactggcttatttcacttaggataaggtcttcacggttcacccatgttgtata

SEQ ID NO: 694882 - DNA, 120 bp, Artificial Sequence
  ENSG00000188785_18 (sequence is synthesized)
atgtgtcagaatatccttcctttttaggtgaaataatattctatggtatttatataccacatttatttatccattcatctgttagtggatacttgggctacttccaccttttgcctattg

SEQ ID NO: 694883 - DNA, 120 bp, Artificial Sequence
  ENSG00000188785_19 (sequence is synthesized)
aaataatgctgctatgaagatgagtgtacaagtgtctattcaagattctactttcaattcttatagggtatatactcagaaatggtggtgctggatcatataggatttctattttttttt

SEQ ID NO: 694884 - DNA, 120 bp, Artificial Sequence
  ENSG00000188785_20 (sequence is synthesized)
gtgagccaccgcgcctggccaggatttctatttttaatatttttgggaaaatttttccatagtacctgtgccattttacattcccaccagcagtgcacaaggattgcaatctatatacat

SEQ ID NO: 694885 - DNA, 120 bp, Artificial Sequence
  ENSG00000188785_21 (sequence is synthesized)
cctcaccaacattgttcattttctatttctgtttttggggttttttgtagtgccttttgttttggatagcagctatcttgttggatgtgaggtggaatctatagtgtctttcatttttat

SEQ ID NO: 694886 - DNA, 120 bp, Artificial Sequence
  ENSG00000188785_22 (sequence is synthesized)
tttgtgaatgattgatgatgttgaggatcttttcatgtgcttgttaggcatttgtgtatctggaaaaatattcaagtcttttttttccatttttaatgggactatttgctttttgttgtt

SEQ ID NO: 694887 - DNA, 120 bp, Artificial Sequence
  ENSG00000188785_23 (sequence is synthesized)
gagttgtagttctttatacattctggatattaactccttaccaaatatatgctttttacatattacctcccagtccataggttgctttttcgctctgttgattgtgtcctttgatgaaat

SEQ ID NO: 694888 - DNA, 120 bp, Artificial Sequence
  ENSG00000188785_24 (sequence is synthesized)
tttaagttttgatgtactgttgactctttctgtctgtgggttctgtattcatggatcgaagcaaccatggatcaaaagtatttggagcatccatggattgcagtgatcattaatcaaaaa

SEQ ID NO: 694889 - DNA, 120 bp, Artificial Sequence
  ENSG00000188785_25 (sequence is synthesized)
tatttggaaaacaaaaagggtagttgcatctgtactaaacatgaacagacattttttcttgtcattattccctaaactatatagtataataaatatttacatagcatttacattgtatta

SEQ ID NO: 694890 - DNA, 120 bp, Artificial Sequence
  ENSG00000188785_26 (sequence is synthesized)
gaagttataaataacctaatgataatctatataggaagatgtgtgtaggttatattcaaacactatgcctttttatgtgagggacctcttgagcatcagatgattttggtatccacaagg

SEQ ID NO: 694891 - DNA, 120 bp, Artificial Sequence
  ENSG00000188785_27 (sequence is synthesized)
ggtcctggaatcagtcccccacagacaccaagggatgactgtagtgcattttatctatttttacttctgttacctgggcttttgatgttatatattaaaaaaaattagtatcaaatccaa

SEQ ID NO: 694892 - DNA, 120 bp, Artificial Sequence
  ENSG00000188785_28 (sequence is synthesized)
ccaatgccaagcattttccctatgctttattctaagaattttatatttgaaggtcttacatttaggtcttttttttttttttcttttggaggcagagtcttgctctgtcacccagcctgg

SEQ ID NO: 694893 - DNA, 85 bp, Artificial Sequence
  ENSG00000188785_29 (sequence is synthesized)
agtgcagtagtggagagccatcaccccacctcagcctcccaagtagcttggattacaagtgtacaccaccacacctggctaattt

SEQ ID NO: 694894 - DNA, 89 bp, Artificial Sequence
  ENSG00000188785_30 (sequence is synthesized)
ggtcttaaacttctggccttaagtgatccccctgcaggagttgtaatgcactgtgcctggctacatttagatctttaatctacttgggg

SEQ ID NO: 694895 - DNA, 120 bp, Artificial Sequence
  ENSG00000188785_31 (sequence is synthesized)
actgtgcctggctacatttagatctttaatctacttggggttcatttttgcatatggtttaaggcaaaagtccactttatgtggctatccagttttccaagcaccattttttgaaaagag

SEQ ID NO: 694896 - DNA, 120 bp, Artificial Sequence
  ENSG00000188785_32 (sequence is synthesized)
catctttcctctgttgagtagtcttggcacacttgtcaaaatcatttgtccatatatgccatggtttatatgtggattctctattttattggtcatatgtctgtctttatgtcagtacca

SEQ ID NO: 694897 - DNA, 120 bp, Artificial Sequence
  ENSG00000188785_33 (sequence is synthesized)
cacattttaggtgtgtgtgtgtgagactcagtgttgaggacaaggctagtgggctttcacactccagactgctgtattccagcccaaattactcaaattagccaatccatggggaacatg

SEQ ID NO: 694898 - DNA, 120 bp, Artificial Sequence
  ENSG00000188785_34 (sequence is synthesized)
gaaaacgtagctaatgcaatccgcttgccttacctaagttgtcccctgcagcctcaggttgctgttactgtgtttcagatgcaaccctctgtgggaccctacccaagttctctcattctt

SEQ ID NO: 694899 - DNA, 120 bp, Artificial Sequence
  ENSG00000188785_35 (sequence is synthesized)
agctataggtaataaattgttctgattttgtgtatccaagtgacattgggttgtttcttgctatcagaagaacccagaaaagtattatgaatctagtgaatgttggaaaatctttagcca

SEQ ID NO: 694900 - DNA, 120 bp, Artificial Sequence
  ENSG00000188785_36 (sequence is synthesized)
ttagcataacctcatttcgtgccagcatgttcaccctagagaaaagtagaagtgaaggcaatgtcatctttccttgttaacatgataactcagtagagcaatgctttggagattagcttt

SEQ ID NO: 694901 - DNA, 120 bp, Artificial Sequence
  ENSG00000188785_37 (sequence is synthesized)
ttagggagagagccagcagttgagcctcctgcatctgaacatccacactagggatattgtctgtactgccagatatatgggaagattttgtgaactgtgttgcagttttcaacttgactg

SEQ ID NO: 694902 - DNA, 120 bp, Artificial Sequence
  ENSG00000188785_38 (sequence is synthesized)
gggcctttcccagagttatgcccctgccagtgcctatttaaaaatgtcatctcttttctaccaactggcaaagagccatggtgtgtagcattttagtcacattaaaatgcagttatggca

SEQ ID NO: 694903 - DNA, 120 bp, Artificial Sequence
  ENSG00000188785_39 (sequence is synthesized)
aagagcagatttccgggagaagatcacaggttggattttggacatggtgattctcaaatgtctcaagatggatatgtcacacagacaggtggacataaaggttgtcatttcaggtgggct

SEQ ID NO: 694904 - DNA, 120 bp, Artificial Sequence
  ENSG00000188785_40 (sequence is synthesized)
ctgtgttgagagaacagggggctgagacttgggggccagaccattggtggctccacagacatcatactctgtccagaacggtgcagacctggcataacagggattctggattgcatctgt

SEQ ID NO: 694905 - DNA, 120 bp, Artificial Sequence
  ENSG00000188785_41 (sequence is synthesized)
gtcaactgacaagcgctggggacagtggcgtccttgtcttgcctttgtcgctcccgccccgctcttccctggctgggctggcggaggccttgctgatgaacctgactgagaatggagttg

SEQ ID NO: 694906 - DNA, 120 bp, Artificial Sequence
  ENSG00000188785_42 (sequence is synthesized)
gggaagtcagcataaagagcagatttccgggagaagatcacaggttggattttggacatggtgattctcaaatgtctcaagatggatatgtcacacagacaggtggacataaaggtgggc

SEQ ID NO: 694907 - DNA, 120 bp, Artificial Sequence
  ENSG00000188785_43 (sequence is synthesized)
agagttcgaagtttcaagttaggaaaaccaggttaggaatggacacagggagacgcgaaaaggccctgaggccactgcagtagacccaggagaattatggttggggctggaccagtgaca

SEQ ID NO: 694908 - DNA, 120 bp, Artificial Sequence
  ENSG00000188785_44 (sequence is synthesized)
gtagagggagatgtgatgagattcttcataggcctgaaagatagggcccgtaggttttcctggtgcttcagttatgtctgaacaaaggcagtgaagaaccgtttcaagtgtttgttttgt

SEQ ID NO: 694909 - DNA, 120 bp, Artificial Sequence
  ENSG00000188785_45 (sequence is synthesized)
caaaggcagctctgcgtttcccacagtgagaccgtgggtgctgcttcttttccctgtttcttggcatatatgctgtgggaggcagggctgggccgtgtgttttataccccctttttccta

SEQ ID NO: 694910 - DNA, 120 bp, Artificial Sequence
  ENSG00000188785_46 (sequence is synthesized)
aggttcagagcatggaggcgctgccgagtgggctgtgttggggcgtcaggggtgtgtgttgtttctgcgggaaagagagggttttgtgaattctcgcttggaatggcaacctgagcagcc

SEQ ID NO: 694911 - DNA, 120 bp, Artificial Sequence
  ENSG00000188785_47 (sequence is synthesized)
gtggtaggggagatggaaacacatttggctgttagtttggccctgtgtttaatgggtggtaaatataagtagaaaatagagaacttaagtaaatacagcttgaaaagaagctgcttatgt

SEQ ID NO: 694912 - DNA, 120 bp, Artificial Sequence
  ENSG00000188786_0 (sequence is synthesized)
aatcatggtgccgctggggaggggagaagctgctgctgccgccgttgccgggagccgcggagacaagtcattacgttttcatttctcacaactgggctgagcacaactgaaccatggggg

SEQ ID NO: 694913 - DNA, 120 bp, Artificial Sequence
  ENSG00000188786_1 (sequence is synthesized)
aacacagtccagacaacaacatcatctactttgaggcagaggaagatgagctgacccccgatgataaaatgctcaggtttgtggataaaaacggactggtgccttcctcatctggaactg

SEQ ID NO: 694914 - DNA, 120 bp, Artificial Sequence
  ENSG00000188786_2 (sequence is synthesized)
tttatgataggaccactgttcttattgagcaggaccctggcactttggaggatgaagatgacgacggacagtgcggagaacacttgccttttctagtagggggtgaagagggctttcacc

SEQ ID NO: 694915 - DNA, 120 bp, Artificial Sequence
  ENSG00000188786_3 (sequence is synthesized)
tgatagatcatgaagcaatgtcccagggttatgtgcagcacattatctcaccagatcagattcatttgacaataaaccctggttccacacccatgccaagaaatattgaaggtgcaaccc

SEQ ID NO: 694916 - DNA, 120 bp, Artificial Sequence
  ENSG00000188786_4 (sequence is synthesized)
tcactctgcagtcggaatgtccggaaacaaaacgtaaagaagtaaagcggtaccaatgtacctttgagggctgtccccgcacctacagcacagcaggcaacctgcgaacccaccagaaga

SEQ ID NO: 694917 - DNA, 120 bp, Artificial Sequence
  ENSG00000188786_5 (sequence is synthesized)
ctcaccgaggagagtacacctttgtctgtaatcaggagggctgtggcaaagccttccttacctcttacagcctcaggatccacgtgcgagtgcacacgaaggagaagccatttgagtgtg

SEQ ID NO: 694918 - DNA, 120 bp, Artificial Sequence
  ENSG00000188786_6 (sequence is synthesized)
acgtgcagggctgtgagaaggcattcaacacactgtacaggctgaaagcacatcagaggcttcacacagggaaaacgtttaactgtgaatctgaaggctgcagcaaatacttcaccacac

SEQ ID NO: 694919 - DNA, 120 bp, Artificial Sequence
  ENSG00000188786_7 (sequence is synthesized)
tcagtgatctgaggaagcacattcgaactcatacaggggaaaagccatttcggtgcgatcacgatggctgtggaaaagcatttgcagcaagccaccaccttaaaactcacgttcgtacac

SEQ ID NO: 694920 - DNA, 120 bp, Artificial Sequence
  ENSG00000188786_8 (sequence is synthesized)
atactggtgaaagacccttcttctgccccagtaatggctgtgagaaaacattcagcactcaatacagtctcaaaagtcacatgaaaggtcatgataacaaaggacactcatacaatgcac

SEQ ID NO: 694921 - DNA, 120 bp, Artificial Sequence
  ENSG00000188786_9 (sequence is synthesized)
ttccacaacacaatggatcagaggatacaaatcactcactttgtctaagtgacttgagccttctgtccacagattctgaattgcgagaaaattccagtacgacccagggccaggacctca

SEQ ID NO: 694922 - DNA, 120 bp, Artificial Sequence
  ENSG00000188786_10 (sequence is synthesized)
gcacaatttcaccagcaatcatctttgaatcaatgttccagaattcagatgatacggcaattcaggaagatcctcaacagacagcttccttgactgaaagttttaatggtgatgcagagt

SEQ ID NO: 694923 - DNA, 120 bp, Artificial Sequence
  ENSG00000188786_11 (sequence is synthesized)
cagtcagtgatgttccgccatccacaggaaattcagcatctttatctcttccacttgtactgcaacctggcctctccgagccaccccagcctctactacctgcctcagctccgtctgctc

SEQ ID NO: 694924 - DNA, 120 bp, Artificial Sequence
  ENSG00000188786_12 (sequence is synthesized)
ctccgcctgctccctccctaggacctggctcccagcaagctgcatttggcaacccccctgctctcttacaacctccagaagtgcctgttccccacagcacacagtttgctgctaatcatc

SEQ ID NO: 694925 - DNA, 120 bp, Artificial Sequence
  ENSG00000188786_13 (sequence is synthesized)
aagagtttcttccgcacccccaggcaccgcagcccattgtaccaggactttctgttgttgctggggcttctgcatcagcagcggcagtggcatcagctgtggcagcaccagccccaccac

SEQ ID NO: 694926 - DNA, 120 bp, Artificial Sequence
  ENSG00000188786_14 (sequence is synthesized)
aaagtactactgagcccctgccagccatggtccagactctgcccctgggtgccaactctgtcctaactaataatcccacaataaccatcaccccaactcccaacacagctatcctgcagt

SEQ ID NO: 694927 - DNA, 120 bp, Artificial Sequence
  ENSG00000188786_15 (sequence is synthesized)
ccagcctagtcatgggagaacagaacttacaatggatattaaatggtgccaccagttctccacaaaaccaagaacaaattcagcaagcatctaaagttgagaaggtgttttttaccactg

SEQ ID NO: 694928 - DNA, 120 bp, Artificial Sequence
  ENSG00000188786_16 (sequence is synthesized)
cagtaccagtagccagtagcccagggagctctgtccagcagattggcctcagtgttcctgtgatcatcatcaaacaagaagaggcatgtcagtgtcagtgtgcatgccgggactctgcaa

SEQ ID NO: 694929 - DNA, 120 bp, Artificial Sequence
  ENSG00000188786_17 (sequence is synthesized)
aggagcgggcatccagcaggagaaagggctgctcctccccaccccctccagagccgagcccccaggctcctgatgggcccagcctgcagctcccagcgcagactttctcttcagcccctg

SEQ ID NO: 694930 - DNA, 120 bp, Artificial Sequence
  ENSG00000188786_18 (sequence is synthesized)
ttcccgggtcatcatcctctaccttgccctcctcctgtgagcaaagccgacaagcagagactccttcagaccctcagacagaaacattaagtgccatggatgtgtcagagtttctatccc

SEQ ID NO: 694931 - DNA, 120 bp, Artificial Sequence
  ENSG00000188786_19 (sequence is synthesized)
tccagagcctggacaccccgtccaatctgattcccattgaagcactactgcagggggaggaggagatgggcctcaccagcagcttctccaagtgaagggcccatgtgtgctcacctctgg

SEQ ID NO: 694932 - DNA, 120 bp, Artificial Sequence
  ENSG00000188786_20 (sequence is synthesized)
gaaaagcgggtgagcaggaggcatgaggtacaatgcctgccatcatgggtcagaaatttgaaggatgaagaaatctactgtttgaaatcctcacctttcagacgtattttctttattcac

SEQ ID NO: 694933 - DNA, 88 bp, Artificial Sequence
  ENSG00000188786_21 (sequence is synthesized)
ctaagttataagtgaactgtttggctgcactgtatgtcacttttgcttgttgtcatgtgaacttggaaactaaggttactcgtgtgca

SEQ ID NO: 694934 - DNA, 120 bp, Artificial Sequence
  ENSG00000188786_22 (sequence is synthesized)
gttgtcatgtgaacttggaaactaaggttactcgtgtgcataaaaattctaaatgaaagggtgtggtttccatcaatctgatgctgcccatcgcttgcactggggtctttgtggatcggg

SEQ ID NO: 694935 - DNA, 120 bp, Artificial Sequence
  ENSG00000188786_23 (sequence is synthesized)
caggagttttcagtgtgttgggtgttgctccttcctatgtgtcttttgaatctgaggctgacatttgcttggaaggccagacccttgctccatcagagagggcagtggcaaaggccagtg

SEQ ID NO: 694936 - DNA, 120 bp, Artificial Sequence
  ENSG00000188786_24 (sequence is synthesized)
aggcagctgtgagttggacagggttcaggtgagatggtgttgtcatttgtgcttagtgttggtggtgctcagggtggataacacgggtcgttctgcagcccgcttcagcacaaataggca

SEQ ID NO: 694937 - DNA, 120 bp, Artificial Sequence
  ENSG00000188786_25 (sequence is synthesized)
gcttaaggcctggctcacaggctgtggggttgatctggctctgcagaggccctaggcagcttgttgactgctgtctgttgatgacgtgtgtgcaaagcaggctctagcaacatgatcact

SEQ ID NO: 694938 - DNA, 120 bp, Artificial Sequence
  ENSG00000188786_26 (sequence is synthesized)
gtccttgccttcctggttctttctctcggttggttgccagggcttgcagatcgcagtgaattttccttggggaacatcgctgttttgtcctagagtgaacttgtggcttatggccagtgc

SEQ ID NO: 694939 - DNA, 120 bp, Artificial Sequence
  ENSG00000188786_27 (sequence is synthesized)
tgtttggtggtctgccttctttttaatggtattttcttcctcagagcagaagggctgcattttgcttatcagaagaaggtgcagatttaagggaattcatatgaggtggcatgtaattgg

SEQ ID NO: 694940 - DNA, 120 bp, Artificial Sequence
  ENSG00000188786_28 (sequence is synthesized)
caggccaggtgtcctggttccaggttccagccaggctttgggttgccccctccatctctgcccccctctggattttgcatacagcctcatacagtgcaaacaaggatgtgacttgctcag

SEQ ID NO: 694941 - DNA, 120 bp, Artificial Sequence
  ENSG00000188786_29 (sequence is synthesized)
aaaaaaaaaaaagaaacacaaaacgatgatcttctactcagggtatagcaaaacaaaaaaattccctttccaccaaaaagcctgaaatgttgcaataagttatctcatttggaatgtttc

SEQ ID NO: 694942 - DNA, 120 bp, Artificial Sequence
  ENSG00000188786_30 (sequence is synthesized)
aagttatctcatttggaatgtttcattaagttgtgttataggaaaaaattgtgtgtgtgtgttatagaattatatccatatgtctgcctttggctccaagtcattgcctcttaaaataaa

SEQ ID NO: 694943 - DNA, 120 bp, Artificial Sequence
  ENSG00000188786_31 (sequence is synthesized)
agatacaatccatactagcatgaaaagtttccctcaacaggctatattaacatagtcatgagtgctgaccaaactcaccgagctcagaggccaggcatggcctgaggtgcagaataggcc

SEQ ID NO: 694944 - DNA, 120 bp, Artificial Sequence
  ENSG00000188786_32 (sequence is synthesized)
tctgcctcccaagagccctttccttgccctgagcaaggagtggtgttccacaaacaaggctgctcttctaagccaacagtgtcaggcaggaagcagccataattttgccttgcattttca

SEQ ID NO: 694945 - DNA, 120 bp, Artificial Sequence
  ENSG00000188786_33 (sequence is synthesized)
atctgcattggtcactctcctgttctctgagccattgctcagggccagccaagatattattgagaacagataatttaccttggagccagaggccctccctgcctttagcaaggatgttca

SEQ ID NO: 694946 - DNA, 120 bp, Artificial Sequence
  ENSG00000188786_34 (sequence is synthesized)
gggacagacaaagagggcagtggtggtgaatgttgttactgccatgaggagaaatggcagtaagaaatcttaactacaagcagccaatttctcattccaggaccctagccagaataattg

SEQ ID NO: 694947 - DNA, 120 bp, Artificial Sequence
  ENSG00000188786_35 (sequence is synthesized)
tacaggtgtgagccaccatgcctggtctagggaattgacttctttttgaccttctgcactcccttccccaaaaggattgtggcttctgttgaccattgacctcagcagaagttgataagg

SEQ ID NO: 694948 - DNA, 120 bp, Artificial Sequence
  ENSG00000188786_36 (sequence is synthesized)
ccattgacctcagcagaagttgataaggcaggaggtttccagtcctcctggaaaaccaactgctgagcatgagttgtccttggctgtctctgggcctcgcacccatgggaagttttgagg

SEQ ID NO: 694949 - DNA, 120 bp, Artificial Sequence
  ENSG00000188786_37 (sequence is synthesized)
tagggcccttgctgtttacaacttctgagagagtagtgatgggaccccaaagtaagcttgtatcagagggcagtaatgaccttcccatatccccatcctgtggtcacctgggatttgggt

SEQ ID NO: 694950 - DNA, 120 bp, Artificial Sequence
  ENSG00000188786_38 (sequence is synthesized)
tccctggggcggaagtgggaaataggagcccagggaaggacatctgaagcacccacagtttaaatagcgactcttcttggttagccagggctgtgctcatgttgggccctacccaggtca

SEQ ID NO: 694951 - DNA, 120 bp, Artificial Sequence
  ENSG00000188786_39 (sequence is synthesized)
gtggccttttcactctcaaagatcgggggtgacgaagcagcatcttaaacagtgtttaggctgacagatttttccagttgaagaagctgaagtatctgccttttgagggtgactctagat

SEQ ID NO: 694952 - DNA, 120 bp, Artificial Sequence
  ENSG00000188786_40 (sequence is synthesized)
tacaagagagactatcagatccaatcagcttttgaaaaatcaggaatgtgcttaaaatgccagtgagtggttgtgaagatcaggtttatttcccaggataggcagtctttctttccctcc

SEQ ID NO: 694953 - DNA, 120 bp, Artificial Sequence
  ENSG00000188786_41 (sequence is synthesized)
ttttccagttctcttttcctacctgtccttccataagcctggtctctagtgccgaggaccttggagaagagagggcccctagctaagctggagccagaaagaaccttcatggtgagtgtg

SEQ ID NO: 694954 - DNA, 120 bp, Artificial Sequence
  ENSG00000188786_42 (sequence is synthesized)
gtttcccaaacttgggaaatgaacctagggtgaggttagggaggatttgtagaattctagcaggtaaaaatcaagcctttttcccctcccatagtaaacttaaccattttcaccctgtac

SEQ ID NO: 694955 - DNA, 120 bp, Artificial Sequence
  ENSG00000188786_43 (sequence is synthesized)
gttatcttctagctcctactaacatctccaattagacaaccgcttcaaagggtgcttagcaccagggattggggttcatggacttaggaggtggtaaggaaactggctggcaccaccaaa

SEQ ID NO: 694956 - DNA, 120 bp, Artificial Sequence
  ENSG00000188786_44 (sequence is synthesized)
ctgccttagtgaacttggcccttcccaggcaggtaggttgggcattgagggaaggtggcccagtctttgctggcagggtctggccagtctcatgggggcaccaccagtttggtgacagaa

SEQ ID NO: 694957 - DNA, 120 bp, Artificial Sequence
  ENSG00000188786_45 (sequence is synthesized)
gtggtgtcatttattgaattccacctccgtttagaaggagatcatggtacaaagcccaggaggggccttaagatgtgaagatctctctgagtaaaaggcaaggggcttctcttcttcacc

SEQ ID NO: 694958 - DNA, 120 bp, Artificial Sequence
  ENSG00000188786_46 (sequence is synthesized)
tctgggatagttggtagatcggagagttttattttcagggtcaaggctgtggactgatggggatattggagggtgggtgggttttcctgagagactttgtataatgctgaatgtgtccag

SEQ ID NO: 694959 - DNA, 120 bp, Artificial Sequence
  ENSG00000188786_47 (sequence is synthesized)
agggacaagtttgcagaacctcatattggtatattaaagaaataataaaataaaaaagcactttaggttattttatctttaacccgattgctgcaatttcttttgtgtgtatatatacat

SEQ ID NO: 694960 - DNA, 120 bp, Artificial Sequence
  ENSG00000188786_48 (sequence is synthesized)
atatatactttccacaaagttttattttttgctcagaataaaaagttaaattgaggtgtgaaaagaaaagcacttaccttggtgcaatatgtgtagcttgatggtcgttgtcccatgtgg

SEQ ID NO: 694961 - DNA, 120 bp, Artificial Sequence
  ENSG00000188786_49 (sequence is synthesized)
ccctggcctggcagcgtttttccgctcaatcagccctgtgctgtgagactgtccatagggaaacactattatgcattctcagcaaccgctcaatctatgcaagccttccctgtgtgcccc

SEQ ID NO: 694962 - DNA, 120 bp, Artificial Sequence
  ENSG00000188786_50 (sequence is synthesized)
agggcgccccctcaggctctctgaagaactgctgtgggtcctgttttctgctgactgttgaggccctttttcatcacttcttggtctctcgccatcttttccctcttcaccattacaaaa

SEQ ID NO: 694963 - DNA, 120 bp, Artificial Sequence
  ENSG00000188786_51 (sequence is synthesized)
tgatgcctgaaaggaaggaacagattgttcctaggtagaaacctggcaccttctagacttttatatttgtaatcacatccattgtccttaaagacttttccagagtgattgaaaccattg

SEQ ID NO: 694964 - DNA, 120 bp, Artificial Sequence
  ENSG00000188786_52 (sequence is synthesized)
atttgtggaactgcaacaatatttctcaagagtttacaattgtcttacaccaccaatcagaaatatgtttggggaggcatgggtggcagggggcaacatgagccatttccatactgctcc

SEQ ID NO: 694965 - DNA, 120 bp, Artificial Sequence
  ENSG00000188786_53 (sequence is synthesized)
ccatactacctgtgttggttccttaagcaaaaaggcctccagccttcattaaatcctataaacaaacattacatcccatgaatcattatcaactttcttcctttactccacctcccccat

SEQ ID NO: 694966 - DNA, 120 bp, Artificial Sequence
  ENSG00000188786_54 (sequence is synthesized)
tttatcttcaattctcaggctatagaatagacaagttttagaatatacttcagccaaagcagaaggattttcatagatccaatatgcaaatagttctgctgtgacatagatcagaaattg

SEQ ID NO: 694967 - DNA, 120 bp, Artificial Sequence
  ENSG00000188786_55 (sequence is synthesized)
tctgttccttaatatttgggggtggaggcaacaaaactgaagcatatttctgattggttagccattttggcctgtttcctcttgcatgttttttagggagagagggaaacagtcctgtat

SEQ ID NO: 694968 - DNA, 120 bp, Artificial Sequence
  ENSG00000188786_56 (sequence is synthesized)
ttcttctgatgccctttggggaagccgacgaccactgggcatttctcactgttactcctgttcaagagagggcttctcagtctgcactgaaaaatgcaaattaaactggatctttatgtc

SEQ ID NO: 694969 - DNA, 120 bp, Artificial Sequence
  ENSG00000188786_57 (sequence is synthesized)
aatgtgtacatagtacaagcttttttactggaattgaggtttaaaaccacacactgcccttttggtggtgtgcctgttgggccaaaaattgggtgataatgtagtgtcactttctcagct

SEQ ID NO: 694970 - DNA, 120 bp, Artificial Sequence
  ENSG00000188786_58 (sequence is synthesized)
caatgcagtttctactttttcttatgggaaaatttttcataaaacctttttgcaccaaaacccaggggtgttttttgcaatatccttgttatcctcgtagtgtgccaagtcagaggcttt

SEQ ID NO: 694971 - DNA, 120 bp, Artificial Sequence
  ENSG00000188786_59 (sequence is synthesized)
ctcttgcccttttcctgctgtgttctcaggcctcccaagggctatttgactcaacagtctacatccttcgttgtgttttggagaatgtgggggtgggggtcagagttcaaggtgtctgtt

SEQ ID NO: 694972 - DNA, 120 bp, Artificial Sequence
  ENSG00000188786_60 (sequence is synthesized)
cccttttcctgtgaactctttctagtccctatttggggagggtggctggaaacagatttttgctgaatttctggctcagatcttctagccaggaaaggcaagagcccccaagagcccttt

SEQ ID NO: 694973 - DNA, 120 bp, Artificial Sequence
  ENSG00000188786_61 (sequence is synthesized)
tttttgacatacactaatcattggccggggtcttggtgacaacttttaaaatcccaaatagttttatttggattatgtaaaagtaagtgtgaaacatgggaacaacggacttccactgag

SEQ ID NO: 694974 - DNA, 120 bp, Artificial Sequence
  ENSG00000188786_62 (sequence is synthesized)
cgatgtgaaaacgttacaggttcagtacttccaaaggaagaaacctccaaacccaaaaaagaataaatatgaatttgtatttttgaagaatgtgaaataatggtgtttgcttaattgctc

SEQ ID NO: 694975 - DNA, 120 bp, Artificial Sequence
  ENSG00000188786_63 (sequence is synthesized)
aattgctcattttgtataaacttaatattgtactttaaaatatctgctaaaaagtgaaaatttaactttttggaattgaaaaagcaatattaaatactaatgaaatcctaattaaatgct

SEQ ID NO: 694976 - DNA, 120 bp, Artificial Sequence
  ENSG00000188800_0 (sequence is synthesized)
atatttagattcctgaagcttctgcacatgtagttcctagagctgctgcttattaaaatgtcaacatcttcatcttctagctgggacaacctcttagagtctctctctctcagcacagta

SEQ ID NO: 694977 - DNA, 120 bp, Artificial Sequence
  ENSG00000188800_1 (sequence is synthesized)
tggaattggatacaagcaagttttttgggagagactagtgcacctcagcaaacaagtttgggactattagataatcttgctccagctgtgcaaatcatcttgaggatttctttcttgatt

SEQ ID NO: 694978 - DNA, 120 bp, Artificial Sequence
  ENSG00000188800_2 (sequence is synthesized)
aagggctcacatatttttgaggctttgctagccaacccagaaggaagtggtctccgaattcaagacaataataatcttttcctgtccttgggtctgcaagagaaaattttgaaaaaactt

SEQ ID NO: 694979 - DNA, 120 bp, Artificial Sequence
  ENSG00000188800_3 (sequence is synthesized)
aagacagtggaaaacaaaatgaagaacctagaagggataatcgttgctcaaaaacctgccacgaagagggattgctcctctgagccctactgcagctgctctgactgccagagtcccttg

SEQ ID NO: 694980 - DNA, 120 bp, Artificial Sequence
  ENSG00000188800_4 (sequence is synthesized)
tccacatcagggtttacttcccccatttgaaatgtgatggactccaatcttttccaggaaagcactgtttccctcatgtgtgcagtggtgtatcaataaagatagagaacgctattgaaa

SEQ ID NO: 694981 - DNA, 74 bp, Artificial Sequence
  ENSG00000188800_5 (sequence is synthesized)
aaagaacaaatggcagaggaagagaagacttggtagatggagtctcgttctgtcaccaaggctggagcacaaca

SEQ ID NO: 694982 - DNA, 80 bp, Artificial Sequence
  ENSG00000188803_0 (sequence is synthesized)
cccgcgcctcgatggcgccatcgccccggagccgctgaccgctcagcgcctccagcccggcccgcgcggcgggtcctccg

SEQ ID NO: 694983 - DNA, 80 bp, Artificial Sequence
  ENSG00000188803_1 (sequence is synthesized)
ctgccgcggaagcctccccgcgccctcccgcccggccccgccatggcgctgcggcgcctcctgctgctgctgctgctctc

SEQ ID NO: 694984 - DNA, 120 bp, Artificial Sequence
  ENSG00000188803_2 (sequence is synthesized)
ctgctgctgctgctgctctcgctggagtccctggacctgctgcccagcgtccacggagcccgcggccgcgccgccaaccggaccctgagtgcaggcggcgctgccgtcgggggccggagg

SEQ ID NO: 694985 - DNA, 120 bp, Artificial Sequence
  ENSG00000188803_3 (sequence is synthesized)
cgcccggaatcccggaggcgggaagccggcgggggcagcccgcggcggctgtggcggcggcggccagcgcggccgtcacctacgagacgtgctggggctactacgacgtgagcggccagt

SEQ ID NO: 694986 - DNA, 120 bp, Artificial Sequence
  ENSG00000188803_4 (sequence is synthesized)
tacgagacgtgctggggctactacgacgtgagcggccagtacgacaaggagttcgagtgtaacaacagcgagagcggctacctgtactgctgcggtacctgctactaccgcttctgctgc

SEQ ID NO: 694987 - DNA, 120 bp, Artificial Sequence
  ENSG00000188803_5 (sequence is synthesized)
aagaagcgccacgagaagctggaccagcgccagtgcaccaactaccagagcccggtgtgggtacagacgcccagcaccaaggtggtgtcgccggggcccgagaacaagtacgacccggag

SEQ ID NO: 694988 - DNA, 120 bp, Artificial Sequence
  ENSG00000188803_6 (sequence is synthesized)
aaggacaagaccaacttcaccgtctacatcacctgcggggtgatcgccttcgtcatcgtggccggcgtcttcgccaaggtctcctacgacaaggcccaccgccctccacgggagatgaac

SEQ ID NO: 694989 - DNA, 120 bp, Artificial Sequence
  ENSG00000188803_7 (sequence is synthesized)
atccacagggctctggctgacatcttaagacaacagggaccaatccccatagcacactgtgaaagagaaactatctcggctatcgatacctctcccaaagagaacacgccggtcagatcg

SEQ ID NO: 694990 - DNA, 120 bp, Artificial Sequence
  ENSG00000188803_8 (sequence is synthesized)
tcctccaaaaaccactacactcctgtgcgtacggccaagcagactccagggcattatgggaaggatgcttaccgaagtggaggacctgatctccataacttcatctcatctggatttgtc

SEQ ID NO: 694991 - DNA, 120 bp, Artificial Sequence
  ENSG00000188803_9 (sequence is synthesized)
acattaggaagaggacacaccaagggtgatcatcaatataaccatccgattttgagcagtgttacccagatcccgccacatgagaagccacggatgaacaacatcctgacatcagccacc

SEQ ID NO: 694992 - DNA, 120 bp, Artificial Sequence
  ENSG00000188803_10 (sequence is synthesized)
gagccctatgacctctccttctcccgctcgttccagaacttggcccacctgcccccatcctacgagtctgcagtaaagaccaaccccagcaagtattcatctctgaagaggctaaccgac

SEQ ID NO: 694993 - DNA, 120 bp, Artificial Sequence
  ENSG00000188803_11 (sequence is synthesized)
aaggaggctgacgagtattacatgagacggcggcacctgcccgacctggctgcccgcggcaccctccccctcaatgtcatccagatgtcccaacagaagccgttgccaagggaacgaccc

SEQ ID NO: 694994 - DNA, 120 bp, Artificial Sequence
  ENSG00000188803_12 (sequence is synthesized)
cgccggcccatccgggccatgtcccaggacagggtcctgtccccggatcggggcctgccagatgagttcagcatgccctacgaccgcatcctgtccgacgagcagctgctctccacggag

SEQ ID NO: 694995 - DNA, 120 bp, Artificial Sequence
  ENSG00000188803_13 (sequence is synthesized)
cgcctgcactcccaggacccgctgctgtccccggagcggacggcctttcccgagcagtcgctgtccagggccatctcgcacacggacgtctttgtgtccacacccgtgctggaccgctac

SEQ ID NO: 694996 - DNA, 120 bp, Artificial Sequence
  ENSG00000188803_14 (sequence is synthesized)
cgcatgagcaagatgcactctcatcccagtgcctccaataactcatacgccaccctgggccagagccagacggcagccaagcgtcatgcctttgcctcacgcagacacaacacggtggag

SEQ ID NO: 694997 - DNA, 120 bp, Artificial Sequence
  ENSG00000188803_15 (sequence is synthesized)
cagctgcactacatcccgggccaccacacctgctacacagccagcaagaccgaagtgaccgtgtgaccggcggggcagggccggggctgctgggcgtggcagagcagagcgggggccggg

SEQ ID NO: 694998 - DNA, 120 bp, Artificial Sequence
  ENSG00000188803_16 (sequence is synthesized)
aggggccaggagcagagcttctagccttgccactctcccttcccttgtcccctctgtaggaagtgggggtgggccacctttgcccaaaaagccatacccccggggacacagccccgatgg

SEQ ID NO: 694999 - DNA, 120 bp, Artificial Sequence
  ENSG00000188803_17 (sequence is synthesized)
cctggtccaatacacttagacccaggaccaagagcaatcgctcttgctcctccagaagaatcagtggggagtgaggagggggctaggccccattctcacccccgaccaccttcaccaact

SEQ ID NO: 695000 - DNA, 120 bp, Artificial Sequence
  ENSG00000188803_18 (sequence is synthesized)
ccctttccgtcccgcgcctccttctccccatccgggggactcagctgcaggttctgtcagcagagagacccttgcttgactgtggtctgaagctgcctgggtttgaaggggccagcgggt

SEQ ID NO: 695001 - DNA, 120 bp, Artificial Sequence
  ENSG00000188803_19 (sequence is synthesized)
ccaatcagtgggctgaccggataggctactcggtctcattcattcatctagaaccgcatcacagaaatctcctagtgcctaaaaactgcctgctcgctctctcagagccagggagctgct

SEQ ID NO: 695002 - DNA, 120 bp, Artificial Sequence
  ENSG00000188803_20 (sequence is synthesized)
gtgtccataagcacaataatgattcttttcttgcctgctggaactctctggtccccactgagtgacccttcctttgctgacccctgagggcccaaccctggccctgtgcccctcccctca

SEQ ID NO: 695003 - DNA, 120 bp, Artificial Sequence
  ENSG00000188803_21 (sequence is synthesized)
actccaggaccaggaggggttcccttccttcagctgcctccccattggtgggaactccacccccttccagctgactgcccgcccataaggaccctgggcctgtcctttcagcgggctgtg

SEQ ID NO: 695004 - DNA, 120 bp, Artificial Sequence
  ENSG00000188803_22 (sequence is synthesized)
ctccttccctggccctgaggatttcacccttgagttttctggggttttggctgtagccttcgcagaggggagtagcaatggggtgctggccctcccagacacccgatcatctccgcactc

SEQ ID NO: 695005 - DNA, 120 bp, Artificial Sequence
  ENSG00000188803_23 (sequence is synthesized)
cctccaggcctctagacctgaccatgactgccactcaggctgccttctccacccctgctctgctcccaggaggcacctgcggtggccagagagccagggtggggagggccactgtgatgt

SEQ ID NO: 695006 - DNA, 120 bp, Artificial Sequence
  ENSG00000188803_24 (sequence is synthesized)
gcggggtctcgggctcaacattcgcatcctgcagggctccacctgttcccacatgcacctccggcaggacctagacagaagtttctagagagcagcttttcagcccccagacaaggagga

SEQ ID NO: 695007 - DNA, 120 bp, Artificial Sequence
  ENSG00000188803_25 (sequence is synthesized)
tgagaggtggttgtcctgcatcctctccgctcatccttccttccccatctctgtctacctgctcagttcagagatcactcctactgcctgtgtccccttcccccacatcctccctgcaac

SEQ ID NO: 695008 - DNA, 120 bp, Artificial Sequence
  ENSG00000188803_26 (sequence is synthesized)
tttattcctcctagctgatccttcagatccgtgcctcctctggatcaaagggacaaagacctattagcaaaagcaaacaaaggtcctccaggcgactggcctaggggctaactgggcagg

SEQ ID NO: 695009 - DNA, 120 bp, Artificial Sequence
  ENSG00000188803_27 (sequence is synthesized)
tccccacagcatcatccctttgtgcaggcactggggtacctggtagaccatggtcctcagctctgttgggggaccgccactgcccgcccacctcagcctcttccccgcctccagcctggg

SEQ ID NO: 695010 - DNA, 120 bp, Artificial Sequence
  ENSG00000188803_28 (sequence is synthesized)
ggttggcatggtgtgacggcctcctggggaggtgacagtgaattcagcagcatccgctcccccaagaccagagagcctggtgggggaaagaaggggttccctcattctcagggccagggc

SEQ ID NO: 695011 - DNA, 120 bp, Artificial Sequence
  ENSG00000188803_29 (sequence is synthesized)
acccgctgggttggggctgggggaatcaactccaggctattgggtgaaggtgtgatcctaaaaacagtcagatccaacagcagtgcccttataaatggggttttacctgccctcagttct

SEQ ID NO: 695012 - DNA, 120 bp, Artificial Sequence
  ENSG00000188803_30 (sequence is synthesized)
gcactcatggccctttaaaaaggcgagtgtagaaggagaatttattggtgtcagccctggagatttttaatctaaccaagtccacaaaccacagagaaagcaatggactgtgtcctttca

SEQ ID NO: 695013 - DNA, 120 bp, Artificial Sequence
  ENSG00000188803_31 (sequence is synthesized)
aacaggaaaccatcaccctggatcttagggggatggaggctgggggttgtgaaagccactgtcagaccccacactggggatgcattcctggagtcgtgcggctggaaggccagggactac

SEQ ID NO: 695014 - DNA, 120 bp, Artificial Sequence
  ENSG00000188803_32 (sequence is synthesized)
cctctctgctttcctcccaacagacacataaaccttcttaagggctggtccccaggggtttataagagtttgttccagaaggtgaggctaagagggttggaaaggaagaagtgagtctga

SEQ ID NO: 695015 - DNA, 120 bp, Artificial Sequence
  ENSG00000188803_33 (sequence is synthesized)
atagagcaggtggctcccagctgggcccctgagcccagcacctttgaatcgtctaatctgtggccatcccttggaaggcaggatgctggtggtgaggggaaaggacctgagtggctgaga

SEQ ID NO: 695016 - DNA, 120 bp, Artificial Sequence
  ENSG00000188803_34 (sequence is synthesized)
atgcccttcccaggtgtctacatgcaggtatacaccaaaccagaaagctgatcccatctccagtgtcaaagcttctcagcaccaagttctccagcccccagggtgacacttttccccagg

SEQ ID NO: 695017 - DNA, 120 bp, Artificial Sequence
  ENSG00000188803_35 (sequence is synthesized)
ggtcctccccaagccctgtctctgacagggtttctgtctctctcaggggttgttgatgagttgattccaagacatttctcatcccagccttaccactgtctggctgaaaggctctgatgt

SEQ ID NO: 695018 - DNA, 120 bp, Artificial Sequence
  ENSG00000188803_36 (sequence is synthesized)
cagttgggttggaaaattctactgcaatgcttacttcttttcaaggatttcttctgcttcacctttgggtctagaagcaaggaatgaagggagggagagagggagggagggaggggagga

SEQ ID NO: 695019 - DNA, 120 bp, Artificial Sequence
  ENSG00000188803_37 (sequence is synthesized)
gggaagaaaaaagaagtagagataggtctacagacttgctccaattcagtcccacatttcaaaatccagaaaactatgtcatagctgggacagagaggtatcccatttattcagctgtcc

SEQ ID NO: 695020 - DNA, 120 bp, Artificial Sequence
  ENSG00000188803_38 (sequence is synthesized)
catccatcttcatggaacaagcaaagccacatcaataggcaagttcacgtagcagataaaagaggcttctggggctggaacctagatgccatgatttctagcccaaccaggctggtggcc

SEQ ID NO: 695021 - DNA, 120 bp, Artificial Sequence
  ENSG00000188803_39 (sequence is synthesized)
tctaccatacatagaagtaccatccacccttacagtaaaagcctccctcctgctcacaaaggaagcctaaagcccaagatttccctctccttgttttattcatttttgcacatctctgtt

SEQ ID NO: 695022 - DNA, 120 bp, Artificial Sequence
  ENSG00000188803_40 (sequence is synthesized)
gctctaacagaaatgaactggaatctgcacaggttctctcctgccctgaaagttctgcctggtttccttggcctctgatggcattgaagctttcacaatccctcctgcatctccaccttc

SEQ ID NO: 695023 - DNA, 120 bp, Artificial Sequence
  ENSG00000188803_41 (sequence is synthesized)
cctgtcttgctccaggctcctggctccatgccttcctgtgtcaaaaaggctttgccaagaattacttcacctcctaaccaggcttctgccctcagggctcccccagtgtcttgggagtgt

SEQ ID NO: 695024 - DNA, 120 bp, Artificial Sequence
  ENSG00000188803_42 (sequence is synthesized)
cttgggccacacgactgcctcttagaaagttccaaccttgcccccaattcaaatttctcctcccctctttccactctccctcccagaaactcctgatttccagaaaacctcagatttcca

SEQ ID NO: 695025 - DNA, 120 bp, Artificial Sequence
  ENSG00000188803_43 (sequence is synthesized)
ggccaggtcactcattccttcctctcatctccctcttcctccatctaccttcctccattcaccttcctccattcctaatttcttttccctggtcttgctataatctccagctctaaaaat

SEQ ID NO: 695026 - DNA, 120 bp, Artificial Sequence
  ENSG00000188803_44 (sequence is synthesized)
cagagctctcaatgaaaacaatggaagaataagacattctttcggtcttctgtttgcctcactggtgtatccttcatctcctgcccctgtgagttgataccccagtgcacggagccaagg

SEQ ID NO: 695027 - DNA, 120 bp, Artificial Sequence
  ENSG00000188803_45 (sequence is synthesized)
gcttttcccctctgagctctgggagggaagggaatggagctctgggtttgagatgtcatggcctgtgatagtcagtttggttcctgccactagcaagtcccctgaagctcccaacccagc

SEQ ID NO: 695028 - DNA, 120 bp, Artificial Sequence
  ENSG00000188803_46 (sequence is synthesized)
ctgatgttagcccagaagctcctgctctggccaaagactcctatccttgagggctctcagccactgctccaacacacttgcccccttcctgcttgtgtatgtcacttatcctcctttgtc

SEQ ID NO: 695029 - DNA, 120 bp, Artificial Sequence
  ENSG00000188803_47 (sequence is synthesized)
cacaaagacttgagggcctcctgagtctccaagcatggaggaatatccatgccaacatccctgccatcaaactcaatccattttcttcagagataccttgtctgtcaccagcctccaact

SEQ ID NO: 695030 - DNA, 120 bp, Artificial Sequence
  ENSG00000188803_48 (sequence is synthesized)
tcatattccttccacaggcaactgtgcacttgacccaaggtaaaatgaaagggctgccaatcactcggactccagaaggtgcctgccctgagaagagctggcatgttacctcccacatac

SEQ ID NO: 695031 - DNA, 120 bp, Artificial Sequence
  ENSG00000188803_49 (sequence is synthesized)
atttcctgtcatcctgtccgaatctgggaaattttgctctggagtattttcaagaaagcgcattgtgttttaatgaagtatttttcagggttccaatgttattttttataaatgcagcat

SEQ ID NO: 695032 - DNA, 120 bp, Artificial Sequence
  ENSG00000188803_50 (sequence is synthesized)
tttaatggcagattcaatatgaaggacatgtcttcctgggctctatatttgattttggaaggcagcatactctaggagaaaaaaagcatagggctgaggctctgaagacacagcttccag

SEQ ID NO: 695033 - DNA, 120 bp, Artificial Sequence
  ENSG00000188803_51 (sequence is synthesized)
ccctggctttgtctccgagggggagtcatgttccccactcagtgcctcagtttccccatctgtaaaatgaggggctttgactagatgagctctgaagtttcatccagctcttacactgta

SEQ ID NO: 695034 - DNA, 120 bp, Artificial Sequence
  ENSG00000188803_52 (sequence is synthesized)
gggctttcattccctgccagcacctgctctccccgttcctccccacctccactgagctgcacacatcccacaatgcctgccccacagcgatgtcctcagatgtcctggacagccaccgca

SEQ ID NO: 695035 - DNA, 120 bp, Artificial Sequence
  ENSG00000188803_53 (sequence is synthesized)
ctcctcactagagcctggggtgggcctgatgggctcggccacccagggatgccctcgtacctgaagtttaagggcctaaccattcaataggtcaccaactgtgtgccatggaagccctct

SEQ ID NO: 695036 - DNA, 120 bp, Artificial Sequence
  ENSG00000188803_54 (sequence is synthesized)
tgtaaagacacacctaaaccatcctaagtgactgtggaattctggggaattctgagtttggagtttccatttggatacggtccttatagctggagggaggcggttccaatttcagagagg

SEQ ID NO: 695037 - DNA, 120 bp, Artificial Sequence
  ENSG00000188803_55 (sequence is synthesized)
gagctggctggagagaaaggtctggaggttggcccataagggcatgaagtttgtacttgagggcagctgggaaattcatttcaagctgcagaggaacgtgttcacaggctgttgtgtggc

SEQ ID NO: 695038 - DNA, 120 bp, Artificial Sequence
  ENSG00000188803_56 (sequence is synthesized)
aatgaatgtcatgataacccactctggaatatgtgtcctgaagaccaagtctggacactgaggctccattccaactggaggaggaggcatctccatctgggctgctaggaaggggcactc

SEQ ID NO: 695039 - DNA, 120 bp, Artificial Sequence
  ENSG00000188803_57 (sequence is synthesized)
atcccatcctagtacctttgtagcccttcgtcatgacactaccgtcctcccggtgaaggcttgtgaagcaagaatggagagtccaagtttgtgatattcaaacccatcttgtaaatcagc

SEQ ID NO: 695040 - DNA, 120 bp, Artificial Sequence
  ENSG00000188803_58 (sequence is synthesized)
aaacacattaaccttccatcagtcagagaaataatgttgtggctgtgtgtttccttaatgctctccctcctgagggaggagaagaccctgctcaactttgctgcccaccctgcagtgacc

SEQ ID NO: 695041 - DNA, 120 bp, Artificial Sequence
  ENSG00000188803_59 (sequence is synthesized)
cctgaatgccacaccatgggaggactcattcattggctttgtagtggcaaatattcctctagttctataactcaactagacattttgtagtaaagaattcttgaaattctctaataaaaa

SEQ ID NO: 695042 - DNA, 120 bp, Artificial Sequence
  ENSG00000188803_60 (sequence is synthesized)
gcaattcttactgtaatatttttagtttggggacacaatttcctaaggggggattaatgaacatttttatgcattagcccaatttatgaattccatgtttattatatggtagtactgatg

SEQ ID NO: 695043 - DNA, 120 bp, Artificial Sequence
  ENSG00000188803_61 (sequence is synthesized)
aaaagtacctttctatctgtatctttgcagtttcttcgttactcatatgtaagcctcatggtaagcagtgctctagtaactgcttctctgtacaaatctcatcgttctacttacctgtca

SEQ ID NO: 695044 - DNA, 120 bp, Artificial Sequence
  ENSG00000188803_62 (sequence is synthesized)
aagcacattctacatgtactgtaaacagatacactttagtaagatttagtcttaaggatttttccacttttgtcagtaacagatatttatggattaaaaaataaagccgtttcaacataa

SEQ ID NO: 695045 - DNA, 120 bp, Artificial Sequence
  ENSG00000188803_63 (sequence is synthesized)
aagaggacacaccaagggtacagtggaaaccattttttactaaaatacagaggttgcctagggaacgccatctgaaatgagaagatggtgtggaggccagaggcttgtctgggacaggaa

SEQ ID NO: 695046 - DNA, 120 bp, Artificial Sequence
  ENSG00000188803_64 (sequence is synthesized)
taagtggggtggttccatggcagcttgtcctggtgacatgcgtggcttctgacaggagttactggaggtcacaggtgtgactttagagggcgatagacttccaagagacacccatcccac

SEQ ID NO: 695047 - DNA, 120 bp, Artificial Sequence
  ENSG00000188803_65 (sequence is synthesized)
ggcggggacacagatgccggcggctccttgtgggaagggaccacagggagtgtggtggaaaactgccggtggatgtagcagcatttgcaatgtgtgtgttcgcctcttggctattattcc

SEQ ID NO: 695048 - DNA, 120 bp, Artificial Sequence
  ENSG00000188803_66 (sequence is synthesized)
ttttccttttgaaagctacattttataaaccaatgtcaatgttctgtactgtggtatctaagccggtgtgcatgtggagagtttcagcatcctaagtgtgtctccataaacactctatga

SEQ ID NO: 695049 - DNA, 120 bp, Artificial Sequence
  ENSG00000188803_67 (sequence is synthesized)
tgtggacacaaaggtagaaggttatgcagaccttcaagcctcaagatgaaagctaacctagagtttctgctgagctgctttacaacctagctgacagcttgcagagcatctgtgcagggg

SEQ ID NO: 695050 - DNA, 120 bp, Artificial Sequence
  ENSG00000188803_68 (sequence is synthesized)
gcatggactcctcctcaattctgtcttttgtttaaacaaggtcctacgagtgttgtgagcattctgtcacatcaagagtcactggatccctaactcctttaattaccgtcccaacacctg

SEQ ID NO: 695051 - DNA, 120 bp, Artificial Sequence
  ENSG00000188803_69 (sequence is synthesized)
tgtgctgttatagatcaaatgtgaattctgttgtaggggtagtgtatccctgtcttcccctgagatacgtgtcttgtgtgagtaaacaaggaactgtgcaatattttcttacattccatg

SEQ ID NO: 695052 - DNA, 120 bp, Artificial Sequence
  ENSG00000188803_70 (sequence is synthesized)
cacctactttttaaattccttatgtgatgtttgttcatcctatagagaaaaaaaaatctgtatctgtgtatgtattttctgttgtgtctatttgtgtctaaataaagtttatcgaggata

SEQ ID NO: 695053 - DNA, 120 bp, Artificial Sequence
  ENSG00000188807_0 (sequence is synthesized)
catggagggagtgagcgcgctgctggcccgctgccccacggccggcctggccggcggcctgggggtcacggcgtgcgccgcggccggcgtgttgctctaccggatcgcgcggaggatgaa

SEQ ID NO: 695054 - DNA, 120 bp, Artificial Sequence
  ENSG00000188807_1 (sequence is synthesized)
aggatgaagccaacgcacacgatggtcaactgctggttctgcaaccaggatacgctggtgccctatgggaaccgcaactgctgggactgtccccactgcgagcagtacaacggcttccag

SEQ ID NO: 695055 - DNA, 120 bp, Artificial Sequence
  ENSG00000188807_2 (sequence is synthesized)
gagaacggcgactacaacaagccgatccccgcccagtacttggagcacctgaaccacgtggtgagcagcgcgcccagcctgcgcgacccttcgcagccgcagcagtgggtgagcagccaa

SEQ ID NO: 695056 - DNA, 120 bp, Artificial Sequence
  ENSG00000188807_3 (sequence is synthesized)
gtcctgctgtgcaagaggtgcaaccaccaccagaccaccaagatcaagcagctggccgccttcgctccccgcgaggagggcaggtatgacgaggaggtcgaggtgtaccggcatcacctg

SEQ ID NO: 695057 - DNA, 120 bp, Artificial Sequence
  ENSG00000188807_4 (sequence is synthesized)
gagcagatgtacaagctgtgccggccgtgccaagcggctgtggagtactacatcaagcaccagaaccgccagctgcgcgccctgttgctcagccaccagttcaagcgccgggaggccgac

SEQ ID NO: 695058 - DNA, 120 bp, Artificial Sequence
  ENSG00000188807_5 (sequence is synthesized)
cagacccacgcacagaacttctcctccgccgtgaagtccccggtccaggtcatcctgctccgtgccctcgccttcctggcctgcgccttcctactgaccaccgcgctgtatggggccagc

SEQ ID NO: 695059 - DNA, 120 bp, Artificial Sequence
  ENSG00000188807_6 (sequence is synthesized)
ggacacttcgccccaggcaccactgtgcccctggccctgccacctggtggcaatggctcagccacacctgacaatggcaccacccctggggccgagggctggcggcagttgctgggccta

SEQ ID NO: 695060 - DNA, 120 bp, Artificial Sequence
  ENSG00000188807_7 (sequence is synthesized)
ctccccgagcacatggcggagaagctgtgtgaggcctgggcctttgggcagagccaccagacgggcgtcgtggcactgggcctactcacctgcctgctggcaatgctgctggctggccgc

SEQ ID NO: 695061 - DNA, 120 bp, Artificial Sequence
  ENSG00000188807_8 (sequence is synthesized)
atcaggctccggaggatcgatgccttctgcacctgcctgtgggccctgctgctggggctgcacctggctgagcagcacctgcaggccgcctcgcctagctggctagacacgctcaagttc

SEQ ID NO: 695062 - DNA, 120 bp, Artificial Sequence
  ENSG00000188807_9 (sequence is synthesized)
agcaccacatctttgtgctgcctggttggcttcacggcggctgtggccacaaggaaggcaacgggcccacggaggttccggccccgaaggtcagagaagcagccatgactgcggggggag

SEQ ID NO: 695063 - DNA, 120 bp, Artificial Sequence
  ENSG00000188807_10 (sequence is synthesized)
gacacacggatgctcaggcccaggctttgccaggtccgaagcgggcccctctctgtcctgcctcttttcacctgctcacgccctcccacccccaccctacagccccaggtcctggcccag

SEQ ID NO: 695064 - DNA, 120 bp, Artificial Sequence
  ENSG00000188807_11 (sequence is synthesized)
tccctccactgcctcgaagagtcagtctgccctgccttttcctttcgggcaccaccagccatccccgagtgccctgtagccactcaccactgctgccacctctctggccaatggcccttt

SEQ ID NO: 695065 - DNA, 120 bp, Artificial Sequence
  ENSG00000188807_12 (sequence is synthesized)
cactggcctggtgactggaatgtgggcagcgcccacacaggctctggcccatggcttcctactggcagctccaggcacccccctctcaccacgccgtttgctggctctgacactgttggg

SEQ ID NO: 695066 - DNA, 120 bp, Artificial Sequence
  ENSG00000188807_13 (sequence is synthesized)
tgagggtcctggtcctgctgtcttcccttctggcctctgcacaggggtggtgacagtggctacaggctgggcccctggcgtgccctgaccgtgcagcagagtgaggctggggcagcagag

SEQ ID NO: 695067 - DNA, 120 bp, Artificial Sequence
  ENSG00000188807_14 (sequence is synthesized)
agccccagcctcacccctgaggagcacctgtggtctgtccccttggtcctgcttatggctggaccggccctgcaggaggtggtggagccgtgaaggaggccgagctgcagctctggctgc

SEQ ID NO: 695068 - DNA, 120 bp, Artificial Sequence
  ENSG00000188807_15 (sequence is synthesized)
tgcttggcctcctgctccaagaccctcccgagtccccggaaatggagagtgcagttcttgggcccagcctggccttcgccatgagtttggggagcgagaccccacctgagacaggcagta

SEQ ID NO: 695069 - DNA, 120 bp, Artificial Sequence
  ENSG00000188807_16 (sequence is synthesized)
tgaccttggggaatctgagcttttccaagggtaaggggcccagggtatgcaggccttcagtgacatcaggtcgttgtcatcctttccctccctgacctgtcacgagcctctgcaggtgcc

SEQ ID NO: 695070 - DNA, 120 bp, Artificial Sequence
  ENSG00000188807_17 (sequence is synthesized)
tgctcaccatggcccagcgccactctgtcctccgactcaggtgagggggcagcccacagacctgctcctcagtagcagggcctggccaggcccctgctgttctcagcctcagtttgccat

SEQ ID NO: 695071 - DNA, 120 bp, Artificial Sequence
  ENSG00000188807_18 (sequence is synthesized)
ctatgaaatgaggtggacccctctccatagcccttgggtgccagctcagtgggtgtggggatcacatgaggtggctcatgaggacacactctggaagtcgaggggctgccacgtgcagag

SEQ ID NO: 695072 - DNA, 120 bp, Artificial Sequence
  ENSG00000188807_19 (sequence is synthesized)
gaagttcccggcctgggggctttatccaggggtcccagtcgagagtggcccgaggccgtccctcaccgggcatgttccctctggctgcccactccctcagggcccacatgtcctgccact

SEQ ID NO: 695073 - DNA, 120 bp, Artificial Sequence
  ENSG00000188807_20 (sequence is synthesized)
cgccactctgagcacgagttcaccttccagatgtggccagggtgtgccagctcctctctcctgtgcgttggaaccccgggggaggcaagagcagatcacaggtgcatgagggttacaccc

SEQ ID NO: 695074 - DNA, 120 bp, Artificial Sequence
  ENSG00000188807_21 (sequence is synthesized)
gtcacctgggtctgccgggatgggttgggggggcaggtgccaggcctcactgctgtgaatctgccacgcctgggggtcctagaggctgccccaccccagtgattgggtagcagctcacat

SEQ ID NO: 695075 - DNA, 120 bp, Artificial Sequence
  ENSG00000188807_22 (sequence is synthesized)
cccacccagcttcacaagtgaggaacccaggtgcatcgggagaccctcgggggcttctgtggcctctgtgcccgatgacctgcgtggcttcagacaaggccccagcgttactgggctcag

SEQ ID NO: 695076 - DNA, 120 bp, Artificial Sequence
  ENSG00000188807_23 (sequence is synthesized)
cttgttgttctgtgtggagcgtgaggtgagaaaacccctctgaaaagatgtggtcggggccacgcttcccactggttctgcagtgaggagttggggcgggtgagccaaagcggcccccca

SEQ ID NO: 695077 - DNA, 120 bp, Artificial Sequence
  ENSG00000188807_24 (sequence is synthesized)
tggtgtctacctgaggggcagggaaccgcctgcctgtgcactcacgccaccccccagcccacaaagagcccatctgagagaaggacgtggtggagccaggacgggaaagcgtcctgtcgg

SEQ ID NO: 695078 - DNA, 120 bp, Artificial Sequence
  ENSG00000188807_25 (sequence is synthesized)
ctggccatgctgttgcttgcgtctcgaatcttcggttctcgaggaagtgttgacagtgtgatgctaatgtctgcttttcttggcgttgggtagaagcaggacatctgtgtgtatgtgcgt

SEQ ID NO: 695079 - DNA, 120 bp, Artificial Sequence
  ENSG00000188807_26 (sequence is synthesized)
atttaaattagattatttataataaccagagccagccctcgcgctggccaggatcctcctgccgagctgatgtcgctcctgccctctgccggggtccggaagcgacatctcaggaggtag

SEQ ID NO: 695080 - DNA, 120 bp, Artificial Sequence
  ENSG00000188807_27 (sequence is synthesized)
ctctcagcagagtgaggattcctgcctttcgtagagttttgtgtgactttttaaattattcatgtgtcccttaaaagtttcactacgtggagaaaattccagcaccaagtgttgtggcaa

SEQ ID NO: 695081 - DNA, 120 bp, Artificial Sequence
  ENSG00000188807_28 (sequence is synthesized)
cagctgagagagtgcaggcaccactgtgttgtggcttgttgaccgggaatgtgtcacccctgccagggaactcttctcctcgcgggggacttgggatggccatcagaccttctagggtct

SEQ ID NO: 695082 - DNA, 120 bp, Artificial Sequence
  ENSG00000188807_29 (sequence is synthesized)
ggctggggtcatcctaggtatgggtgaccgtccctgagacataagcgaggtagattcagccatcctcaccctcagacttgaggtccccacccaggccaagccggccccccgtaccccttg

SEQ ID NO: 695083 - DNA, 120 bp, Artificial Sequence
  ENSG00000188807_30 (sequence is synthesized)
cctgggagcaaaccgccaggacgcagcctccacgccgcacctgccacattcagccctgcccaggaaggaacacatgacccttctgtctgtgactgttgctgagtctctgtctcatgtcgt

SEQ ID NO: 695084 - DNA, 120 bp, Artificial Sequence
  ENSG00000188807_31 (sequence is synthesized)
agaattgtggataattgtctagtgaccctctcatcactgtaaccatcgcgcctggcctagatgtcgtgttttggatgctgtgttttcaataaatgcctctggggccctgcttttacccgc

SEQ ID NO: 695085 - DNA, 120 bp, Artificial Sequence
  ENSG00000188807_32 (sequence is synthesized)
ccggccttttccccaccagccccagcttggccatccctcacccgagtgtcggaggctctccagcgtctctgttcatccccagcccgcccagcttcctgcccctcgccaaccagcagctct

SEQ ID NO: 695086 - DNA, 120 bp, Artificial Sequence
  ENSG00000188807_33 (sequence is synthesized)
tccggtctcctcgacggacctcaccctcctcattgcctggccgcctcagccgggccctctctctgggaaccataccctctctgactcgagcagactccggctatctgttcagcggtagcc

SEQ ID NO: 695087 - DNA, 120 bp, Artificial Sequence
  ENSG00000188807_34 (sequence is synthesized)
gcccaccatctcaggtgtctcgatctggggagtttcctgtttcagattacttctctcttctgtcggggagctgcccctcctccccactcccttccccagcgccttccgtggccggctcgg

SEQ ID NO: 695088 - DNA, 120 bp, Artificial Sequence
  ENSG00000188807_35 (sequence is synthesized)
tggcctccagctccggctctctgcgccaccgcaggcccctcatcagccctgcccggctcaacctgaagggacagaagctgctgctgttcccgtcaccccctggagaggcccccaccacgc

SEQ ID NO: 695089 - DNA, 120 bp, Artificial Sequence
  ENSG00000188807_36 (sequence is synthesized)
ccagcagctccgatgagcactcgcctcacaacggcagcctcttcaccatggagccgccccatgttccccggaagccgcccctgcaggacgtgaagcacgccctggacctgagatccaagc

SEQ ID NO: 695090 - DNA, 120 bp, Artificial Sequence
  ENSG00000188807_37 (sequence is synthesized)
tgctcggaggaggccgccacctggagaggtcgtttcggcccttccctggtccggggcctcctggccgtgagcttggccgccaacgccctgttcacctcggtgtttctgtaccagagcctg

SEQ ID NO: 695091 - DNA, 120 bp, Artificial Sequence
  ENSG00000188807_38 (sequence is synthesized)
cgctgacccaccgttggagcccctcggaggggagcaacccggtgcctgctgcttcaccactgccggcctcaggaccctccctggaggggctgccacctctgccctcatctccagggcctt

SEQ ID NO: 695092 - DNA, 120 bp, Artificial Sequence
  ENSG00000188807_39 (sequence is synthesized)
gacctcactggactgtgactgtcctcaggacacctgcccctcctcacctaacggactgcagggctgagcatgtgtctgaggtcacactctctgcccactcacctccttggctgacatcgg

SEQ ID NO: 695093 - DNA, 120 bp, Artificial Sequence
  ENSG00000188807_40 (sequence is synthesized)
ttgtgtttggtgctgacactctgatcccgaagccagggagccccaaggggctgcatgaccctggggtgccccacacagttcagccctgcctggcagggacgccagtactactgtaactgc

SEQ ID NO: 695094 - DNA, 120 bp, Artificial Sequence
  ENSG00000188807_41 (sequence is synthesized)
agcaggagctgcccggcctgccttctggccccacgcccacaggcgtagtcacatctttgtactgtactcccctgtctcacctggggcaacctcagagccccactaagctgaaggccccct

SEQ ID NO: 695095 - DNA, 120 bp, Artificial Sequence
  ENSG00000188807_42 (sequence is synthesized)
gggggagggggaagcatggtccttatcatctgccctatcttgccccttcctgtggagtgggcagaagggctcccgggatcctcagagctcccaggtctgagcagccaaaggcccagctgg

SEQ ID NO: 695096 - DNA, 120 bp, Artificial Sequence
  ENSG00000188807_43 (sequence is synthesized)
gcctccaggaccagcgcgagcccctgccccaccctcccctgccccatgtgccctgctttgtgacctctgttgaccttcctggaagcagccccattaccctgagaatgcggagcgccctgg

SEQ ID NO: 695097 - DNA, 120 bp, Artificial Sequence
  ENSG00000188807_44 (sequence is synthesized)
cccacctcgccctgtgtttccaggcctgcacgtctggtccttcagctgcacatggaactgcagggcaggctggcggggggccttcagatctcagatgagactgcaccccttcgaccaccc

SEQ ID NO: 695098 - DNA, 120 bp, Artificial Sequence
  ENSG00000188807_45 (sequence is synthesized)
tactgggcacctgcctccagcccctgagaactccatcttcccctagttctgcccaggagcccctgagaaccccatcttcccctggttctcttgcccactcccctgctggggctccttcct

SEQ ID NO: 695099 - DNA, 120 bp, Artificial Sequence
  ENSG00000188807_46 (sequence is synthesized)
ggcactgaggaggggcgctcccaatgctgtgaggcagcggggagggaccgtgcacccgtggctatcagagcccctccgctgtcccaccctgggcctgggacacgggcctggggcagtgtg

SEQ ID NO: 695100 - DNA, 120 bp, Artificial Sequence
  ENSG00000188807_47 (sequence is synthesized)
tgtctgctggtcatgtgctggtgccagttggggaggaatcagctgtctcggtggattctgagactcactgtggggcgggaagaagggtcttcactctgccattcagggataaagtttaat

SEQ ID NO: 695101 - DNA, 120 bp, Artificial Sequence
  ENSG00000188807_48 (sequence is synthesized)
tttatttttctacacattttgccaggtcaggcattttgctagtaagcaggatgcccccaactctccctgccatggaggattcttttttttaagctttgggtgcttttttaatactttttt

SEQ ID NO: 695102 - DNA, 120 bp, Artificial Sequence
  ENSG00000188807_49 (sequence is synthesized)
ttttaatgtggggaaggagcttgctctgacgtcaccctcctctcccctgactcctgtcctgagagctgtggatgccgcctcctgccctgcctacccctgaaacgtggggaatgggggccc

SEQ ID NO: 695103 - DNA, 120 bp, Artificial Sequence
  ENSG00000188807_50 (sequence is synthesized)
caggacagcatcaggacttttgagtccagctgccagcaatggttccaactcggaggcagcgcctcttggtccccatttctgtatagcaggcgtgtgtgtgtgtgtcgaggttttttattt

SEQ ID NO: 695104 - DNA, 120 bp, Artificial Sequence
  ENSG00000188807_51 (sequence is synthesized)
tttgcttaatcaaactccattcccaaatgcactccatctctggctctgagggcgctccctcctctcagccgggcagcctggcctctcctgcccagacctgcggtcccagcatcccccaga

SEQ ID NO: 695105 - DNA, 120 bp, Artificial Sequence
  ENSG00000188807_52 (sequence is synthesized)
gccagggaacaggcccagcgggagggggttttatgttttgtttcaaacagaaaacacaaccttatttttctttacaaaagcaaaaaaggaaaccaaaaaagatacagcctttgaatgatg

SEQ ID NO: 695106 - DNA, 120 bp, Artificial Sequence
  ENSG00000188807_53 (sequence is synthesized)
aagcagcgggcgctgggcctgggaatcacaggtcagcaggcggaacaaggatgtgtccagtccggctgaccggggccttccccagggtccccagctcagctcctgccttgatgcccacat

SEQ ID NO: 695107 - DNA, 120 bp, Artificial Sequence
  ENSG00000188807_54 (sequence is synthesized)
tcgccaaacatggcctcgcctttggttctgaagtccaggtggtctcctggcaccttggaaggcattagaaaggttacatgattctccgggaagtcaagagctggccccacactttcctta

SEQ ID NO: 695108 - DNA, 120 bp, Artificial Sequence
  ENSG00000188807_55 (sequence is synthesized)
tcatgctgggcgcaggtcccttaagcagcccccggctcctgcagggcgtgggccagcctgcccgctcaccagcacgttgtccactgggctcatttgtcccttggcaccgaggttcttccc

SEQ ID NO: 695109 - DNA, 120 bp, Artificial Sequence
  ENSG00000188811_0 (sequence is synthesized)
attcgccctggtctctgttccctttcgtactcaaagctcgtgcatccagggaggggaaaccggagatagggtcttcgggccccgggcagaccctctgtgccgctgcaaaccgttgcagcc

SEQ ID NO: 695110 - DNA, 120 bp, Artificial Sequence
  ENSG00000188811_1 (sequence is synthesized)
tgaggctgtcaggtcctcccccagacacctgcggaccctccctctcctggcttcccgtctggtcatggcgagattctgggtctgcgtagccggtgctggcttctttcttgcatttttggt

SEQ ID NO: 695111 - DNA, 120 bp, Artificial Sequence
  ENSG00000188811_2 (sequence is synthesized)
tttgcattcgcgtttttgtggctctccagttttgaggaactttacttttgcagtttcctggagaactgagaaaattctttaccggctggatgtgggttggcctaagcacccagaatattt

SEQ ID NO: 695112 - DNA, 120 bp, Artificial Sequence
  ENSG00000188811_3 (sequence is synthesized)
taccggaacaacattttgtgttgcagttgactccctcaatggattggtttacataggtcaaagaggggataacatcccaaagatattagtgttcacagaggatggatatttcctacgagc

SEQ ID NO: 695113 - DNA, 120 bp, Artificial Sequence
  ENSG00000188811_4 (sequence is synthesized)
ctggaattatacagttgacacacctcatggtatatttgcagccagtactctatatgaacaatccgtctggatcacggatgtaggaagtggattctttggtcatactgttaaaaaatacag

SEQ ID NO: 695114 - DNA, 120 bp, Artificial Sequence
  ENSG00000188811_5 (sequence is synthesized)
ttcttttggtgatcttgttcaagtcttgggtactccaggcaaaaaaggcactagtttgaatcctttgcagtttgataacccagcagaattatatgtagaggacacaggagatatttacat

SEQ ID NO: 695115 - DNA, 120 bp, Artificial Sequence
  ENSG00000188811_6 (sequence is synthesized)
tgtggatggagatggaggattgaataacagattgatcaaactgtcccaagatttcatgatcctttggctgcatggagaaaatgggacagggcctgctaagttcaacatacctcacagtgt

SEQ ID NO: 695116 - DNA, 120 bp, Artificial Sequence
  ENSG00000188811_7 (sequence is synthesized)
tacacttgattcagctggtcgggtgtgggttgctgaccgaggaaataaaagaatccaagtatttgataaagacactggggagtggttaggagcatggaataattgtttcacagaagaggg

SEQ ID NO: 695117 - DNA, 120 bp, Artificial Sequence
  ENSG00000188811_8 (sequence is synthesized)
accttcttcagtcaggtttactcctgatgggaagtacttgattgtggcccagctgaatcttagcaggctctcagtcgtagcagcacccccagtgggaagcattggggagtgttctgtgat

SEQ ID NO: 695118 - DNA, 120 bp, Artificial Sequence
  ENSG00000188811_9 (sequence is synthesized)
cagcacaatccaactagcagatcaagttttgccacatctcctagaagtcgacagaaagactggagcagtctatgtagcagaaattggagcaaaacaagtacaaaaatatgtccctttgaa

SEQ ID NO: 695119 - DNA, 120 bp, Artificial Sequence
  ENSG00000188811_10 (sequence is synthesized)
tagctatgttccttcatttggttcataatgtttctttcctgggaatatttcaagtggcagttcagattctcaattcactaagtgcttaaaaatgatgttcaagcacaagaatttattttt

SEQ ID NO: 695120 - DNA, 120 bp, Artificial Sequence
  ENSG00000188811_11 (sequence is synthesized)
ctagtataaaagatctagtatcagaaagatttgtttttgtatcattaagaatcttatattttgttgccctcttgggacttagttttatttgtaagtgcataaggatattttaatgaaagg

SEQ ID NO: 695121 - DNA, 120 bp, Artificial Sequence
  ENSG00000188811_12 (sequence is synthesized)
aaagtaactaaaaaatggggttgggaagagggactaaggtggtaacctcattatttgccctggtagactgattctccctgggtaaaaaaaatgggaataaaaatgagcttgcatgataat

SEQ ID NO: 695122 - DNA, 120 bp, Artificial Sequence
  ENSG00000188811_13 (sequence is synthesized)
ttattaaatttcatgtgaagaactccagacctccagattgtgcaactaacataaaatgagctgcttgagagattgtaaataagatgaactattgattaatttgagtacccacagagtgct

SEQ ID NO: 695123 - DNA, 120 bp, Artificial Sequence
  ENSG00000188811_14 (sequence is synthesized)
gcagtctagtggggagacaagcaggcaaacagtcacaacacagcaaaagcgaccttggagcatagtgggacttttggagtaggagtgctgcatttgactgagggaatcatggatacttcg

SEQ ID NO: 695124 - DNA, 120 bp, Artificial Sequence
  ENSG00000188811_15 (sequence is synthesized)
caggagaagtgaatttgagctcagacttgaaaactgaggaggagcttaccaagggacaaggaggagaaaacaataatttccaagtaaagaaggtataaaaagttagaagtgtactgtaaa

SEQ ID NO: 695125 - DNA, 120 bp, Artificial Sequence
  ENSG00000188811_16 (sequence is synthesized)
ctttgataggcttttaggccttttttaaagcccaacttggcttctgtccattacctataagatatttaatgtcagtcagcctttaaatgtaggaataaaatggctggcatctaagcactt

SEQ ID NO: 695126 - DNA, 88 bp, Artificial Sequence
  ENSG00000188811_17 (sequence is synthesized)
ctttaaatgtaggaataaaatggctggcatctaagcactttagtaaaagaggtttttacaaataactaaggattgtagagcttccttc

SEQ ID NO: 695127 - DNA, 120 bp, Artificial Sequence
  ENSG00000188811_18 (sequence is synthesized)
aaatttcaagattatttagataacatggatatgtgccaaatcctttgagctgttaagatgataatttcctgctttcctcctacatcttctcctcccactccctcctttggtgtgaatatt

SEQ ID NO: 695128 - DNA, 120 bp, Artificial Sequence
  ENSG00000188811_19 (sequence is synthesized)
ggcttcccaattaagacctttttttttttttttccagtttgttttagcttattataggttttggaggaactttgccattttgtaatctttcaaatcattcttcacccttcctcacatcag

SEQ ID NO: 695129 - DNA, 120 bp, Artificial Sequence
  ENSG00000188811_20 (sequence is synthesized)
cttcctgcttttcccagtgttttactgtaaattgtgtagcatatgacaaatcttgagctgactttcctcttcacctgttatggctggagtattttccagacctgaagggactcacacttg

SEQ ID NO: 695130 - DNA, 120 bp, Artificial Sequence
  ENSG00000188811_21 (sequence is synthesized)
ttttgatacttggatcacatctccgtgaggttaggaaggtaaatctaccaacaggaagccctgtactctgtattccaaggccattggtaaatgtgttggtgccactgatcggactgtatg

SEQ ID NO: 695131 - DNA, 120 bp, Artificial Sequence
  ENSG00000188811_22 (sequence is synthesized)
accttaaacaagtcaccttagttttcagtgaaatgggaatatcattgtctcctctttcatgaatgctgtgagaatcagatgtgcaacaggtacagacttgccctttgaaatctatacctc

SEQ ID NO: 695132 - DNA, 120 bp, Artificial Sequence
  ENSG00000188811_23 (sequence is synthesized)
tggatacattagaggcattttattaacaaaggcccttctaaatgtgctatttatttgacaataactatcagatttgccttaattttgtgtttatagcatttatcaaaacgtatcctcata

SEQ ID NO: 695133 - DNA, 120 bp, Artificial Sequence
  ENSG00000188811_24 (sequence is synthesized)
gactttatgcagattaatatggtcaattgatttggataaaagaaagtaatttcagggtttgtttttaagccaggacaagaagtgcaaatgcctctttgaagcaatttaggctaaactgat

SEQ ID NO: 695134 - DNA, 120 bp, Artificial Sequence
  ENSG00000188811_25 (sequence is synthesized)
tttgaaatttcaaaatgttttattttactttgttttattaagccaggacaagaagtgcaaatgcctctttgaagcaattcaggctaggtaaaccgattttgccatttcaaaacgttttat

SEQ ID NO: 695135 - DNA, 120 bp, Artificial Sequence
  ENSG00000188811_26 (sequence is synthesized)
tttactttgttttatatcagagtcttataaaacctgctgcaaatatttctgaatgtctttgtaaaagtgtttgttagtgtacctgtgattatagtacttcacttttttcctttggattaa

SEQ ID NO: 695136 - DNA, 120 bp, Artificial Sequence
  ENSG00000188811_27 (sequence is synthesized)
ttggttaaatgaatgagaaatgtgttatgttttttactaaaaagtataaattaaaattttggaaagaaaaggcaatattatctggctccccaattaaagtttgattttattgtcacaaaa

SEQ ID NO: 695137 - DNA, 120 bp, Artificial Sequence
  ENSG00000188811_28 (sequence is synthesized)
atactttggtggccactgaaagtcagcggcgcggactgccctgagggcgggaaagggtggtcactgggtcagcccgaagcacctgacatgagggcggggaccccgaaatgcacacgaagt

SEQ ID NO: 695138 - DNA, 120 bp, Artificial Sequence
  ENSG00000188811_29 (sequence is synthesized)
cacggtcgtggcatggaggtggcaggccctggttccctcagtagcttgtctcaaagcctgcacctgggtccaaactgccttgaccctttgagtttaaaaatttgtgtatgttacatcgcc

SEQ ID NO: 695139 - DNA, 120 bp, Artificial Sequence
  ENSG00000188811_30 (sequence is synthesized)
attttcctctttcccaactcttactacatcctcaaataatttgcagacttgtattgtggtcgtgttggtctttaggcatctaagctcatttctttggaattatttcagtccagcaaactt

SEQ ID NO: 695140 - DNA, 120 bp, Artificial Sequence
  ENSG00000188811_31 (sequence is synthesized)
ctagttgtcaaggcatgcttaaaaataagccctgttacccggcccccccgccctttttttgttcttacctagacggtaaactaaatctgaattgtctgattttgtttaaggttttgagga

SEQ ID NO: 695141 - DNA, 120 bp, Artificial Sequence
  ENSG00000188811_32 (sequence is synthesized)
tgtttaaaatcagagttgctgaatctaattgtaatttctttaacgattcatgaaatcacatgtttttaacaaactttattttgtacttctgtggaattaagaaatttaacaagggctgga

SEQ ID NO: 695142 - DNA, 120 bp, Artificial Sequence
  ENSG00000188811_33 (sequence is synthesized)
gggtcttttcctctttaaagcatcagttgctcttctcagattaaataactctaaactgaagccaaataaagtggcagtctctgaaagcaatgactggaatccttgactcttattttcctt

SEQ ID NO: 695143 - DNA, 120 bp, Artificial Sequence
  ENSG00000188811_34 (sequence is synthesized)
ttccagttttctttcataaaagattgtgaaatcgtaactgctttgttgctcaaagtgcaaagattgcagaaactgttgttaatgtttttgaaattctactgactgaagcatgtctgaaat

SEQ ID NO: 695144 - DNA, 120 bp, Artificial Sequence
  ENSG00000188811_35 (sequence is synthesized)
cttcctgccatcaaatatttttagtagaaaaagctgaaaaatgaagtgagcacaactgaatgtgcagctatggagaaagttttcagagaaacaattcacctgtggctgtagcttaagaca

SEQ ID NO: 695145 - DNA, 120 bp, Artificial Sequence
  ENSG00000188811_36 (sequence is synthesized)
aggcaatacctgagatatcctggcattaccctaggaattcaggaagaaatgggattataaagacattatttctagtattccttggcccagttatgttcttgaattgagagacatcctggt

SEQ ID NO: 695146 - DNA, 120 bp, Artificial Sequence
  ENSG00000188811_37 (sequence is synthesized)
tctacagtcctggctgattcagataccattttttagagataatgagttctcagtttctgtaagtagtgccattatcacagctgttctcagaacccataagatttctgggcctcagctgat

SEQ ID NO: 695147 - DNA, 120 bp, Artificial Sequence
  ENSG00000188811_38 (sequence is synthesized)
ggcccatttatttcatgctgtgttttacatagtatgaatctggttcaaccaaaaaaagtctatagattatcactgagtgaattgttaatactataatgagagtctattttcacttttttc

SEQ ID NO: 695148 - DNA, 120 bp, Artificial Sequence
  ENSG00000188811_39 (sequence is synthesized)
ctgaagatccactgttaaagaccatttctttgagttcattttattcatgtgatttttaaaaataagacttccttgattcccagaaataaaaagagcacagacgatctcttcattttttcc

SEQ ID NO: 695149 - DNA, 120 bp, Artificial Sequence
  ENSG00000188811_40 (sequence is synthesized)
attacagctaattttctacccagagatctgaagacagttttatattcccatttcccaaaggaataaatttcctctaatgaaaaatatggctacaaattagccttttttttttgagaaaat

SEQ ID NO: 695150 - DNA, 120 bp, Artificial Sequence
  ENSG00000188811_41 (sequence is synthesized)
tttttattggtagtcttttttgctagtttttagaaacttggaggcttatgtgttttttattgctatgaactttagctcaactgtctaaaagtgtaatagtaaataaattatttaacatag

SEQ ID NO: 695151 - DNA, 120 bp, Artificial Sequence
  ENSG00000188811_42 (sequence is synthesized)
aattgtaatgcaagctgattcactttctttctggtaagctcaatgtatccagtttgtcttttgaatacctatcaattaatttggcatatgtaccttcaaattgatttctgttcactgctt

SEQ ID NO: 695152 - DNA, 120 bp, Artificial Sequence
  ENSG00000188811_43 (sequence is synthesized)
tatgatattcccttattagtagtctgctttatgctcttgcttgtaagataattttaacttaaagaaattttaacgtgagaaaataagatactcatgatttacaaagattattttcttctt

SEQ ID NO: 695153 - DNA, 120 bp, Artificial Sequence
  ENSG00000188811_44 (sequence is synthesized)
agcaaagaaaagttgggttgaattttgaatgtctccacaaggtgaaaatgcagttaaaaaaaaaatctgtaccatagagaacgtttttgttgacttactgaaatttaaggtctgtatgtg

SEQ ID NO: 695154 - DNA, 120 bp, Artificial Sequence
  ENSG00000188811_45 (sequence is synthesized)
agtgattgaaataacagtttcaaatataagttgttccctttacattttcttcttgatttcctttcataagcaatgcttattcaaggtcataagattaaaaaagaaaatggtgcaccaata

SEQ ID NO: 695155 - DNA, 120 bp, Artificial Sequence
  ENSG00000188811_46 (sequence is synthesized)
gtgtgtgtgtgtgtgtgtgtgtgtctgggcatgtatatatagattgtggtatacatgtgtgtctgggcatgtggatacatgtgtgttagtgggtatgtctgggtaattactctggggctg

SEQ ID NO: 695156 - DNA, 120 bp, Artificial Sequence
  ENSG00000188811_47 (sequence is synthesized)
gggtaattactctggggctgggtgtgcacacatactttcttacaagtgtttgagtcctatagtgagggggttccccaaacatttagaaaggagcaaaatggatttcctgtaccatttaaa

SEQ ID NO: 695157 - DNA, 120 bp, Artificial Sequence
  ENSG00000188816_0 (sequence is synthesized)
cgggcgaggaaggggcatttgcaccggggctgggcgggcgcacccagagccaggcgggcaggaacccctgcgcagccatccggtgcctgcatgtccctggcgcggaagggacgcctcacc

SEQ ID NO: 695158 - DNA, 120 bp, Artificial Sequence
  ENSG00000188816_1 (sequence is synthesized)
agcctcggcgccccctccccctagatttcctccccgcccctccccactgcctgcctgctgcaccaccttccacccagatcacccagatcgtctctaaagggagttcttggtttccttcga

SEQ ID NO: 695159 - DNA, 120 bp, Artificial Sequence
  ENSG00000188816_2 (sequence is synthesized)
tttcttatgaacccaggatgggcagcaaagaagatgcgggcaaggggtgtccggcggccggtggcgtctccagcttcaccatccagtccatcctgggcgggggcccctcggaggcaccgc

SEQ ID NO: 695160 - DNA, 120 bp, Artificial Sequence
  ENSG00000188816_3 (sequence is synthesized)
gggagcccgtcggctggccagccaggaagcgcagcctgtccgtgtcctcggaggaggaggagccggacgacggctggaaggcgcccgcctgcttctgcccagaccagcacggccctaagg

SEQ ID NO: 695161 - DNA, 120 bp, Artificial Sequence
  ENSG00000188816_4 (sequence is synthesized)
agcagggccccaagcaccatccccccatcccttttccttgcctgggtacccccaagggcagcggaggctcgggcccgggcggcttggagcgcacgcctttcctctctccttcgcactcgg

SEQ ID NO: 695162 - DNA, 120 bp, Artificial Sequence
  ENSG00000188816_5 (sequence is synthesized)
actttaaagaagagaaagagaggctcctgcccgcgggctcgccctcgccggggtccgagcggccgcgggacggcggcgctgagcggcaggccggcgcggccaagaagaagacgcgcaccg

SEQ ID NO: 695163 - DNA, 120 bp, Artificial Sequence
  ENSG00000188816_6 (sequence is synthesized)
gagcgcgcctgcctcgcctccagcctgcagctcacggagacccaggtaaagacttggttccagaaccgccgcaacaagtggaagcggcagctctcggctgagctggaggcggccaacatg

SEQ ID NO: 695164 - DNA, 120 bp, Artificial Sequence
  ENSG00000188816_7 (sequence is synthesized)
gcgcacgcgtcggcgcagactctggtgagcatgccgctggtgttccgggacagttcgctgctgcgcgtgccggtgccgcgctcgctcgcctttcccgcgccgctctactacccgggaagc

SEQ ID NO: 695165 - DNA, 120 bp, Artificial Sequence
  ENSG00000188816_8 (sequence is synthesized)
aacctctcggccttacctctctacaacctatacaacaagctcgactactgaccggcccgccgccccgcgccgcccccagctgcccgcagagccgggcgcgtactgtactgtaagcagggc

SEQ ID NO: 695166 - DNA, 120 bp, Artificial Sequence
  ENSG00000188816_9 (sequence is synthesized)
tccggagcaaggcggcgtgtttccagaaatatgaagaaatacaccatgtgtattcattagctcttatttatggtctctgccctactttttgttttgattgtttcgggtatttattggcat

SEQ ID NO: 695167 - DNA, 120 bp, Artificial Sequence
  ENSG00000188816_10 (sequence is synthesized)
tccctaagtcagagagcctgcttcctacctagaccgaaccagtacgctttgaaaaccattcggagtgagatgttctcgggtggtggtgggaaagggagttttggccagacaggctgtggt

SEQ ID NO: 695168 - DNA, 120 bp, Artificial Sequence
  ENSG00000188816_11 (sequence is synthesized)
tggtagggaaaaaaatcaggaaaacacctacaaaaccaggtacactcctcccccatatatacacctgtatatatgtacatgcatacacgctcggccaagccaggccctcagaggctttgg

SEQ ID NO: 695169 - DNA, 120 bp, Artificial Sequence
  ENSG00000188816_12 (sequence is synthesized)
acaattactaaattgcttcttttcgtttccctcatcccgaggatggtagggacgaaaaggggagagttcagatctgtaaatatttttaaaaagaaaaaaaaataaaacattttaaacatc

SEQ ID NO: 695170 - DNA, 120 bp, Artificial Sequence
  ENSG00000188817_0 (sequence is synthesized)
agaagatgagagaatgggtggctgtatgcacagtacccaggacaaatctctccacttggaaggagatcccaatccttctgcagccccaacatccacctgcgcacctaggaaaatgcccaa

SEQ ID NO: 695171 - DNA, 120 bp, Artificial Sequence
  ENSG00000188817_1 (sequence is synthesized)
aaggatttcaatatccaaacaactggcttcagtgaaagctctgaggaagtgctcagatctggaaaaagctattgccaccactgctctgattttcagaaattcttctgactctgatggtaa

SEQ ID NO: 695172 - DNA, 120 bp, Artificial Sequence
  ENSG00000188817_2 (sequence is synthesized)
acttgaaaaagctattgccaaagatctgctgcaaacccaatttaggaatttcgcagagggacaagaaaccaagccaaaatacagagagatcctttctgaacttgatgagcacacagaaaa

SEQ ID NO: 695173 - DNA, 120 bp, Artificial Sequence
  ENSG00000188817_3 (sequence is synthesized)
taagctagattttgaagacttcatgatcttgctcttaagcatcactgtcatgtcagatctgctacaaaatatacggaatgtaaaaattatgaaatgaacagttttaaatatgctgtataa

SEQ ID NO: 695174 - DNA, 120 bp, Artificial Sequence
  ENSG00000188817_4 (sequence is synthesized)
aataatggcaaaagacagtgttattaaaatgtttccatcttatttttgattaattgaatatatctatcatgcatctgaaattgcctaggatggttctgattgctggtattcagatccaat

SEQ ID NO: 695175 - DNA, 120 bp, Artificial Sequence
  ENSG00000188817_5 (sequence is synthesized)
gtaactccaaatatttacccatacacttcaagaatgtttgaatgataaggtctctgtgtgctttacaataggatagatttgataccactgaataataaatggcttttgctgagtcagtag

SEQ ID NO: 695176 - DNA, 120 bp, Artificial Sequence
  ENSG00000188817_6 (sequence is synthesized)
ctacttatagtcattgagtcactcatttattcactaaacatttgttgagcatctacttgatggaactgctgaggatacagtaatgaattggccaggcaattccttccttcagacatgttt

SEQ ID NO: 695177 - DNA, 120 bp, Artificial Sequence
  ENSG00000188817_7 (sequence is synthesized)
gcagaagtctagcagaagagatagacattgaacaatttttaaataattgcatacacagtataattagaattgaaataagggctataggatgctaaaagagattatcacctgatcggagtt

SEQ ID NO: 695178 - DNA, 120 bp, Artificial Sequence
  ENSG00000188817_8 (sequence is synthesized)
caaaggtcagaaaagctttactgacattctataaaaagcaaaaaaaaaaaaattggtccatggatgccagggatatgggtgggaaatggggctgtccacaaatggcacaaggggagtttt

SEQ ID NO: 695179 - DNA, 87 bp, Artificial Sequence
  ENSG00000188817_9 (sequence is synthesized)
tctggccaaggggacttttaagggggctggaaatggtctccattttgattgtgaggtggtggctacaagattgcatgcatttgtcaa

SEQ ID NO: 695180 - DNA, 120 bp, Artificial Sequence
  ENSG00000188817_10 (sequence is synthesized)
attgtgaggtggtggctacaagattgcatgcatttgtcaaactcatagaactgcacactgaaaagagtgaattgtactgtatgtcaattatacctaaataaatctgacttaacaaaaaaa

SEQ ID NO: 695181 - DNA, 120 bp, Artificial Sequence
  ENSG00000188817_11 (sequence is synthesized)
aaacccaatttaggaatttcgcagagctccccttcaccttctaccatgagtggaagcagcctgaggtcctcaccacatgcagatgcctgatcttgaactttccagccatcagaattggac

SEQ ID NO: 695182 - DNA, 120 bp, Artificial Sequence
  ENSG00000188817_12 (sequence is synthesized)
atctgctgcaaacccaatttaggaatttcgcagagccctgtgaagattcaaggagaagttggccatctgcaaagctggaagagtctacccttagtagacactggatctgaagggcacctt

SEQ ID NO: 695183 - DNA, 120 bp, Artificial Sequence
  ENSG00000188817_13 (sequence is synthesized)
ggtcttggacttcccagcctccaaaactgtgagatgctgtttgagccattcatctatggtgggctgttatagtagcccaaattgactatgataaggactaaggtacaaaatgagagttgg

SEQ ID NO: 695184 - DNA, 120 bp, Artificial Sequence
  ENSG00000188817_14 (sequence is synthesized)
tggagatcctgagaaagtatcaggcctattcagagatgaggaaagcttattccaggtgaaggtagggagtggcacaggtgagaggaatcttgggtgggtgggtgtttatggtaggtctcg

SEQ ID NO: 695185 - DNA, 120 bp, Artificial Sequence
  ENSG00000188817_15 (sequence is synthesized)
actaacgaatgtattcgtataatgaataaggaattgtggaagtaggaggagatgttgtatttattctgtttatttctacagatctctttactcttttctaccctgccttgtttccagaaa

SEQ ID NO: 695186 - DNA, 120 bp, Artificial Sequence
  ENSG00000188817_16 (sequence is synthesized)
ggctgacctgcatggactgcatcaacaggcaatcttgtctttggcttctcattgcattaggccaatgaccttgtagatgattagtggtggaggaacatgaacatataatggctagatgga

SEQ ID NO: 695187 - DNA, 120 bp, Artificial Sequence
  ENSG00000188817_17 (sequence is synthesized)
caaaaggaaagatgaatgaataaaatcagtggcctctgaatgttactattaggtggcttgaccttgactttctagtacatatttgggtagaatcatttgttcatcctctgtgatacttct

SEQ ID NO: 695188 - DNA, 63 bp, Artificial Sequence
  ENSG00000188817_18 (sequence is synthesized)
tgtttgtttgttttgagatggatacacctctcgggtccaagcaattctcctgcctcaacctcc

SEQ ID NO: 695189 - DNA, 89 bp, Artificial Sequence
  ENSG00000188817_19 (sequence is synthesized)
attctcctgcctcaacctcccaagtagtggggactagaggtgcacaccaccacacccagcttaatttttgtatctttagtgatcttgaa

SEQ ID NO: 695190 - DNA, 86 bp, Artificial Sequence
  ENSG00000188817_20 (sequence is synthesized)
ctcagattcttatgtagttctatggctaagttttagaagtcccatttcagggggtaattaatagagtcatatttcttccaacaaag

SEQ ID NO: 695191 - DNA, 120 bp, Artificial Sequence
  ENSG00000188817_21 (sequence is synthesized)
tcagggggtaattaatagagtcatatttcttccaacaaagttgtaatctctgagctgtttgtgctcttggcacaaaagaggatgcagacaggaggatatagttgaaaaaagaaattatga

SEQ ID NO: 695192 - DNA, 120 bp, Artificial Sequence
  ENSG00000188817_22 (sequence is synthesized)
gaagcattttgcaaagtaaaattaggaggagggaatgatgaagctaaaataaatgtttcctgttgaagtctgctttgtattacaaatcatgaaggggcttgattggatagcctgctggtg

SEQ ID NO: 695193 - DNA, 120 bp, Artificial Sequence
  ENSG00000188817_23 (sequence is synthesized)
acaaatagcctgcaattcatttctcttactgacatttggccaaaatgctgcaagatacacataaatgttacttgacagtgcctttcagcattttgagggaggataaggcagggctctgct

SEQ ID NO: 695194 - DNA, 120 bp, Artificial Sequence
  ENSG00000188817_24 (sequence is synthesized)
caaagaaatacctgagtttttggaaccaattctactgcacattacccttaaccctatatgctcctttaccaatcaagggacctacaagatacaagtaacacattcaaacatgctaattga

SEQ ID NO: 695195 - DNA, 120 bp, Artificial Sequence
  ENSG00000188817_25 (sequence is synthesized)
aaagtgctgacagggtttgagagaaccagcaaggtatgatgaagcaccctggacctagtatgaaagcaacacagaagaaaccggaggtgagagaggcagaaagaggggttcatgttgacg

SEQ ID NO: 695196 - DNA, 120 bp, Artificial Sequence
  ENSG00000188817_26 (sequence is synthesized)
ctgtacaagcacctggctccagtcttgttggagtgcagcaattcatgaagctagattctccctctacctctcaattatgtaagccagtttgtcatcttttttggcttgagctagttgaag

SEQ ID NO: 695197 - DNA, 120 bp, Artificial Sequence
  ENSG00000188817_27 (sequence is synthesized)
ctagtttttatcacttgcaatactgctcatctaggctcccttttccctgagtccatccctacagtgctatcaatcactttgtacagtgccatttattttttgcgggggatgggaatcaga

SEQ ID NO: 695198 - DNA, 120 bp, Artificial Sequence
  ENSG00000188817_28 (sequence is synthesized)
ctcccccactagactcagagttttcacttttcctctttacctggggcctggtgcaagtttgtaagtgtttaacaaatatggaaagcaagcaatacaagagtcagggttccaagacaaggt

SEQ ID NO: 695199 - DNA, 120 bp, Artificial Sequence
  ENSG00000188817_29 (sequence is synthesized)
agttcagtattcctagtttcttaataaggtaataaggaagatgatgttgattatgatgaccaccaccactaggtggtagttgtggtaatgataatggtaatgatgacatttaccatttat

SEQ ID NO: 695200 - DNA, 120 bp, Artificial Sequence
  ENSG00000188817_30 (sequence is synthesized)
tgaggattgcacctttaagggctttacaaacattttctcattacatcatcagaaccaccacctcaagtagctgtgttagaccatgcttctcatcaggaagcagaggctcagagatttcag

SEQ ID NO: 695201 - DNA, 120 bp, Artificial Sequence
  ENSG00000188817_31 (sequence is synthesized)
gcaactcatccaaagtcacacagctagaagtggcagtcacagaatattcactccaaagtccatgctcttatccatcatgtgaatagcccccaagcctttctttctacttcttcattttcc

SEQ ID NO: 695202 - DNA, 120 bp, Artificial Sequence
  ENSG00000188817_32 (sequence is synthesized)
tgaataaaactccctatcctgacatgccattcttgactctgcctttgcttgaactctatcagagcaaggaaataggactaagcattttcccgtctcacctccttatgccaggcctggccc

SEQ ID NO: 695203 - DNA, 120 bp, Artificial Sequence
  ENSG00000188817_33 (sequence is synthesized)
ctgatataccatgtggcttcatgtcaggctgagcacagaagcatcttcacagaatcactttggggcctgagaaatatggtggcacctgaatcatagagttcatacccaaaagtttaggag

SEQ ID NO: 695204 - DNA, 120 bp, Artificial Sequence
  ENSG00000188817_34 (sequence is synthesized)
gaacaaagcctgattcctacttcagaacgtccaagttaattccccaaaatatccaatgcttccttagggcccagaagcaacctaaagcatcatcgaagcatacagctttgaagtcaaatc

SEQ ID NO: 695205 - DNA, 120 bp, Artificial Sequence
  ENSG00000188817_35 (sequence is synthesized)
cacctgggtcttaattctgactctttcacaatctgggtgactttcggcaaattgcatcaactggggaatgcctacctcagaaaaatgatgagagaatggagagaattagcactgaccgta

SEQ ID NO: 695206 - DNA, 120 bp, Artificial Sequence
  ENSG00000188817_36 (sequence is synthesized)
gtaaactaatggtatcttgcatatagcaattattccagcagtagtagctatatttattattatcgaaatctcttgtttttcagatgactgaaagccaaaaaagcttccagaggagttaca

SEQ ID NO: 695207 - DNA, 120 bp, Artificial Sequence
  ENSG00000188817_37 (sequence is synthesized)
gggaaatgggggaaagataaagaatcccgttactccacacctctactacctattgttccccatacacacatgtatatgtctccatcttttaacaggcatgcatccttctccaggaagtct

SEQ ID NO: 695208 - DNA, 120 bp, Artificial Sequence
  ENSG00000188817_38 (sequence is synthesized)
ttggaccctccttcccccagtggtgttaagagttgcctgatttacgtaataaaaatatggaacacccagtgaaatttgaacttcagataaacagcaaataccttttacagtataaatatg

SEQ ID NO: 695209 - DNA, 120 bp, Artificial Sequence
  ENSG00000188817_39 (sequence is synthesized)
tcccaagcaatattttgaacatacttatactaaaaaagcatgttttgtttatctgaaattcaaatttaactaggcattttatccacagtcctagttatacgctcctctgcagtgtgtcac

SEQ ID NO: 695210 - DNA, 120 bp, Artificial Sequence
  ENSG00000188817_40 (sequence is synthesized)
aactctcctgtgcagtgtttttctttctgtattataattggcctatgtcaggagctgacacctgtcacatctgagttaacgtgtaactttaagatcctctgatattaaagaattaatgtt

SEQ ID NO: 695211 - DNA, 120 bp, Artificial Sequence
  ENSG00000188818_0 (sequence is synthesized)
gtgaacgggttgtgggacctgtcgctgtgtgggggctgtcgagcactccccagaacgtaacaaatcctcaggggaactgatgggcggtcgcgcgggcactgggtcctccacaccctggag

SEQ ID NO: 695212 - DNA, 120 bp, Artificial Sequence
  ENSG00000188818_1 (sequence is synthesized)
agccgttttccgttgccactcggctctggccggggtcacattctgcagcatgtctgttcattcccctgggcggggccctgcaccgactccagcccagcccctgctccctctgcggggaac

SEQ ID NO: 695213 - DNA, 120 bp, Artificial Sequence
  ENSG00000188818_2 (sequence is synthesized)
gtggccccaggcagtgctgggccattggctgtcagtgctggtcctggcggctgcattcccagtccccttggtctctgtgacagtgggcggggccggccctcccaggatctgacggcgcag

SEQ ID NO: 695214 - DNA, 120 bp, Artificial Sequence
  ENSG00000188818_3 (sequence is synthesized)
gtcctccccttctgtgtcctgcagatggacacccgctccgggagccagtgttccgtcaccccagaagccatactcaataatgaaaagctggtcttgccgccccgcatctccagagtgaac

SEQ ID NO: 695215 - DNA, 120 bp, Artificial Sequence
  ENSG00000188818_4 (sequence is synthesized)
ggctggtcgttacccctgcactacttccaggtggtgacctgggctgtcttcgtgggcctttcctcggccaccttcgggatcttcattcccttcctgcctcacgcgtggaaatacattgcc

SEQ ID NO: 695216 - DNA, 120 bp, Artificial Sequence
  ENSG00000188818_5 (sequence is synthesized)
tacgtggtgaccggggggatcttctcgttccacctcgtcgtccacctgatcgcgtcctgcatcgacccggccgactccaatgtcagactcatgaagaactattctcagcccatgcccctc

SEQ ID NO: 695217 - DNA, 120 bp, Artificial Sequence
  ENSG00000188818_6 (sequence is synthesized)
ttcgacagatcaaaacatgcacacgtgatccagaatcagttctgccacctgtgcaaggtcaccgtgaacaagaaaaccaaacactgcatttcctgcaataagtgtgtgtccggcttcgac

SEQ ID NO: 695218 - DNA, 120 bp, Artificial Sequence
  ENSG00000188818_7 (sequence is synthesized)
caccactgcaaatggatcaacaactgcgtgggaagccggaattattggttcttcttcagcactgtggcctcggccacagctggcatgctctgcctgatcgccatcctgctgtatgtcctc

SEQ ID NO: 695219 - DNA, 120 bp, Artificial Sequence
  ENSG00000188818_8 (sequence is synthesized)
gtccagtacctcgtgaaccccggggtgctccgcacggaccccaggtatgaagatgtcaagaatatgaacacgtggctgctgttcctccccctgttcccggtgcaggtgcagaccctgata

SEQ ID NO: 695220 - DNA, 120 bp, Artificial Sequence
  ENSG00000188818_9 (sequence is synthesized)
gtcgtgatcatcgggatgctcgtgctcctgctggactttcttggcttggtgcacctgggccagctgctcatcttccacatctacctgaaggccaagaagatgaccacctttgagtatctc

SEQ ID NO: 695221 - DNA, 120 bp, Artificial Sequence
  ENSG00000188818_10 (sequence is synthesized)
caaggagctggcgccctgggctcatctgcacagggagtcaaagccaagagctccctgctgattcacaagcacttatgtcacttctgcacttcagtaaaccaggatggggattcgacggca

SEQ ID NO: 695222 - DNA, 120 bp, Artificial Sequence
  ENSG00000188818_11 (sequence is synthesized)
cgggaaggggatgaagacccgtgtccatctgcacttggagccaaggccaggaactcccggctgatttgcaggcgcctgtgtcagttctccactcgtgtacacccagacgggggctcgatg

SEQ ID NO: 695223 - DNA, 120 bp, Artificial Sequence
  ENSG00000188818_12 (sequence is synthesized)
gcacaggaagcagatgatgccccgagtatatctacacttgggctgcaacaagaaacaacagagcccatgaaaactgacagtgctgaaagtgaagactgagattcaggagctcaggtgccc

SEQ ID NO: 695224 - DNA, 120 bp, Artificial Sequence
  ENSG00000188818_13 (sequence is synthesized)
ctgtgatccaggtcttctaccctgaaaccccaccctccatcaaggtcctgcctgtagagtctaccttgcaaagcctcctgctcctacccatgctacaggccaggaaccagagcccatcat

SEQ ID NO: 695225 - DNA, 120 bp, Artificial Sequence
  ENSG00000188818_14 (sequence is synthesized)
ctcagaggcccctggatgtccttcgaaggaaccaggaccctcagagcccagcatccatctctgtcatcatcttcatcacacccaaagaagagccagccttgcaggagggtttacatctcc

SEQ ID NO: 695226 - DNA, 120 bp, Artificial Sequence
  ENSG00000188818_15 (sequence is synthesized)
aggaagatgggctgccagcaactgcagaggatgcagccacctgcttaactgtgctgtccagccagccagccagctgcagggcctcttgctgcttaagagctgatgggccgggcatgttgg

SEQ ID NO: 695227 - DNA, 120 bp, Artificial Sequence
  ENSG00000188818_16 (sequence is synthesized)
ctcacacctgtgagcacagtactgggaaatgggagcacagtactaggaaatgggagcacagtactgggaaatgggagcacagtactgggaaatgggggctcacagcactgcaaaatggga

SEQ ID NO: 695228 - DNA, 120 bp, Artificial Sequence
  ENSG00000188818_17 (sequence is synthesized)
gcacagtattgggaaatgggagcacagtactgggaagtgggagcacagtactgagaagtgggagcacagtactgagaaatgggagtacactactgagaaatgggagcacagtactgggaa

SEQ ID NO: 695229 - DNA, 120 bp, Artificial Sequence
  ENSG00000188818_18 (sequence is synthesized)
atgggcatacagtactgagaaatgggagcacacagtactgggaaatgggagcacagtactgggaaatgggagcccacagtactgggaaaggggagttcacagtactcggaaatgggagca

SEQ ID NO: 695230 - DNA, 120 bp, Artificial Sequence
  ENSG00000188818_19 (sequence is synthesized)
tagtactgggaaatgggagcacagtactgggaaatgggagcatagtactgggaaaccccagacctggattctgagtttttcagcctagcccagacttcttatcttagtagacaaaaagag

SEQ ID NO: 695231 - DNA, 120 bp, Artificial Sequence
  ENSG00000188818_20 (sequence is synthesized)
tcaataccagagaaccagaggcatcctctgtattttaatgaactctgcattttaatctgtttagtagtcattttttaaaagataatcagttttccaaatatatctataagttactacgtg

SEQ ID NO: 695232 - DNA, 120 bp, Artificial Sequence
  ENSG00000188818_21 (sequence is synthesized)
caaggggcctcatcctcgcctccagccgtctttccgggtggtagtatcgggtctggggtggtcggcccctcttgtcccagggagaggccggggcaggcagccccatgcaggctctgacct

SEQ ID NO: 695233 - DNA, 120 bp, Artificial Sequence
  ENSG00000188818_22 (sequence is synthesized)
ggcccgacggcagcagcccagtgttcatacagcccagcagcccccagcgcgcgggaggcaggctcggggagggcgctggccacgctgctctgtagatgctgccaggtcgtgtcaggcgag

SEQ ID NO: 695234 - DNA, 120 bp, Artificial Sequence
  ENSG00000188818_23 (sequence is synthesized)
atctgagggcgggagctgacgtcccaggcacggggagcccagcttctcctggctccaggggacaaggatcctctccccagtgcccccgcagccaggctctgagcccagagggcccaagaa

SEQ ID NO: 695235 - DNA, 120 bp, Artificial Sequence
  ENSG00000188818_24 (sequence is synthesized)
gcacacgtgatccagaatcagttctgccacctgtgcaaggtcaccgtgcctcaacaccctcccccagcctcccattccctgctggacgccctctccccaggccgcacagggctggttcct

SEQ ID NO: 695236 - DNA, 120 bp, Artificial Sequence
  ENSG00000188818_25 (sequence is synthesized)
cttgcctgcacttccagcaaagatttggagacacactcggtggaaatcgattgagcccccagcccaccctggcccagactcagccaccaaagttccctcactgcatgtggcacacgggct

SEQ ID NO: 695237 - DNA, 120 bp, Artificial Sequence
  ENSG00000188818_26 (sequence is synthesized)
cacatgaggcctggtctgaagcagagaagatccgctcagcatcatgttgaatcccaagcccgcgtctccgtgggctccaggacaatcctatgaaagtgacaccgtcgttcattgttcaca

SEQ ID NO: 695238 - DNA, 120 bp, Artificial Sequence
  ENSG00000188818_27 (sequence is synthesized)
tcggggaggagaattccatctgaaaatgcacgtgacttcactgacacccgcgtccgtggcacagccctgtgctgagctccacagacctacagtccatcgcctccccttggagtgggccca

SEQ ID NO: 695239 - DNA, 120 bp, Artificial Sequence
  ENSG00000188818_28 (sequence is synthesized)
cagctgcagacagtgttgtccaaagaagatgctctgagtagatgaatggaacaaactggaaactccagaaacaagcccttctttacatttctaatgtttggcttaaatggaaggtgccaa

SEQ ID NO: 695240 - DNA, 120 bp, Artificial Sequence
  ENSG00000188818_29 (sequence is synthesized)
gctggtcgttacccctgcactacttccaggtggtgacctgggctgtcttcgtgggcctttcctcggccaagaagatgaccacctttgagtatctcattaataaccgcaaagaagagagtt

SEQ ID NO: 695241 - DNA, 120 bp, Artificial Sequence
  ENSG00000188818_30 (sequence is synthesized)
gctggcatgctctgcctgatcgccatcctgctgtatgtcctcgtccagtacctcgtgaaccccggggtgctccgcacggaccccaggtatgaagcagcgccaggaccctgaccaggagga

SEQ ID NO: 695242 - DNA, 120 bp, Artificial Sequence
  ENSG00000188818_31 (sequence is synthesized)
cctgggccagagaagcccctcggggtgcaggacaagactgccagtctcagccccaggcatggctgcacccgcactgcacacagcccgggtggcgagacagggaggacttgcctgcccttg

SEQ ID NO: 695243 - DNA, 120 bp, Artificial Sequence
  ENSG00000188818_32 (sequence is synthesized)
ttccagaacattccggagccaacacggtgtgacatttttttcaaggatgagctttgccagctccacgtggaagtccctaaagctcctccttccacttcgaagcgtgactgatgcctccag

SEQ ID NO: 695244 - DNA, 120 bp, Artificial Sequence
  ENSG00000188818_33 (sequence is synthesized)
cggccacagctggcatgctctgcctgatcgccatcctgctgtatgtcctcgtccagtacctcgtgaaccccggggtgctccgcacggaccccagatgtcaagaatatgaacacgtggctg

SEQ ID NO: 695245 - DNA, 120 bp, Artificial Sequence
  ENSG00000188818_34 (sequence is synthesized)
atctacctgagtatgtcccccaccctaagcccccgatccccccaaggctgggtggtcagagctgctcatcttacacctctacttgagtatgtccctaaccctgagccccccacgcctggg

SEQ ID NO: 695246 - DNA, 120 bp, Artificial Sequence
  ENSG00000188818_35 (sequence is synthesized)
gccagagtctttgtcccccgtgtgcgcatgtgttcagggtcagcctctcccagaagtgagatcatggacaaaaagggcaaatcacaggaagaaattaaatccatgaggacccagcaggcc

SEQ ID NO: 695247 - DNA, 120 bp, Artificial Sequence
  ENSG00000188818_36 (sequence is synthesized)
cagcaagaagctgaactcacgccgagacctgcaggagtggtgccaggtgcttgaagtaacaagtttaaaatgttcagagacaatggaatggaatctattaggcaagaacaggacattatg

SEQ ID NO: 695248 - DNA, 120 bp, Artificial Sequence
  ENSG00000188818_37 (sequence is synthesized)
tggtcttgcttggtctcacagtgggcacagcggtaggcggtcagtcatgttgctgaacgacggagggtaaactccccagccccaaggaaacctgtgttggaagtaacaacaacctccctg

SEQ ID NO: 695249 - DNA, 120 bp, Artificial Sequence
  ENSG00000188818_38 (sequence is synthesized)
ctcctggcaccagccgttttggtcatggtgggccagctgcaaagcgtcttccattctctgggcagtggtggccccgaggctgtggcctctcagggggtttctgtggacacgggcagcaga

SEQ ID NO: 695250 - DNA, 120 bp, Artificial Sequence
  ENSG00000188818_39 (sequence is synthesized)
gtgtgtccaggccagcccccaagaatgccctgctcctgacagcttggccaacccctggtcagggcagagggagttgggtgggtcaggctctgggctcacctccatctccagagcatcccc

SEQ ID NO: 695251 - DNA, 120 bp, Artificial Sequence
  ENSG00000188818_40 (sequence is synthesized)
tgcctgcagttgtggcaagaacgcccagctcagaatgaacacaccccaccaagagcctccttgttcataaccacaggttaccctacaaaccactgtccccacacaaccctggggatgttt

SEQ ID NO: 695252 - DNA, 120 bp, Artificial Sequence
  ENSG00000188818_41 (sequence is synthesized)
taaaacacacacctctaacgcatatcttacagtcactgttgtcttgcctgagggttgaattttttttaatgaaagtgcaatgaaaatcactggattaaatcctacggacacagagctgaa

SEQ ID NO: 695253 - DNA, 120 bp, Artificial Sequence
  ENSG00000188818_42 (sequence is synthesized)
atttttttcaaggatgagctttgccagctccacgtggaagtccctaaagctcctccttccacttcgaagcgtgactgatgcctccagggcctcacagccgcttctgaagcacttcctgaa

SEQ ID NO: 695254 - DNA, 120 bp, Artificial Sequence
  ENSG00000188818_43 (sequence is synthesized)
agccagctccaccctggcgaggccctgacctcagcggacccaagcccaggacgatgcctgttgcgttcttctcccccagtagcaagtcaccttccccagcagcctccatgttgtctgggc

SEQ ID NO: 695255 - DNA, 120 bp, Artificial Sequence
  ENSG00000188818_44 (sequence is synthesized)
tctccctgtgggggatgccaggggagagtgagagagcagaggtggccaagatggcatgtgctgccttctctcctggaacatgctgcttccacagggcagtgccagtgtctccgtgtgaat

SEQ ID NO: 695256 - DNA, 120 bp, Artificial Sequence
  ENSG00000188818_45 (sequence is synthesized)
tcattgattgtggcctgagtgaattcctgggtttgctgttccagatgattctgcagggcttcaaaaccagcaaggccctgagcaaagctgctccttcttctcatgggctgaactcatcgt

SEQ ID NO: 695257 - DNA, 120 bp, Artificial Sequence
  ENSG00000188818_46 (sequence is synthesized)
gatgtcactggctaaggggggcagcatggggtccagcccggcccaggcacatggagctgcggtcctgtcaggctgagtgtggtgtttgccttctaggatggccccgaggccaccagttcc

SEQ ID NO: 695258 - DNA, 120 bp, Artificial Sequence
  ENSG00000188818_47 (sequence is synthesized)
agagagggtctgtcaccgaaagacatccatgctgagtcacccaaagacatccatgctgaatccatccctctgccattctgccttgccccaccctctgccattctgccttgcctggccctc

SEQ ID NO: 695259 - DNA, 120 bp, Artificial Sequence
  ENSG00000188818_48 (sequence is synthesized)
tgccattctgcattacgcctgatttttggaagtgtggttttgagtgttggcagcccagtgtcacagaggaccatatcttagaaatgaccccaggcgagagctgtggctttcctgttctat

SEQ ID NO: 695260 - DNA, 120 bp, Artificial Sequence
  ENSG00000188818_49 (sequence is synthesized)
ttgaaggcagctgttttagggtgcagcgggtccagggacacagagtgggccatgagcaagggatgggtgctggggcctggcagagctggcaggctctgtgaccccggcacttaggaaggg

SEQ ID NO: 695261 - DNA, 120 bp, Artificial Sequence
  ENSG00000188818_50 (sequence is synthesized)
gtgggcaccgtgaccctggcactaaataaggaagggatgggtgctgtgaccctggcacttagtgaggaaggggtgggcactgtgaccccggcacttagtgaggaaggggtgggcactgtg

SEQ ID NO: 695262 - DNA, 120 bp, Artificial Sequence
  ENSG00000188818_51 (sequence is synthesized)
accccggcacttagtgaggaaggggtgggcactgtgaccctggcacttagtgaggaaggggtgggcactgtgaccccggcacttagtaaggaaggggtgggcactgtgaccctggcactt

SEQ ID NO: 695263 - DNA, 120 bp, Artificial Sequence
  ENSG00000188818_52 (sequence is synthesized)
agtaaggaaggggtgggtgctggggccctggcacttaggaaaggatgggtgctggggcccggcagagccggcaggcactgtgaccccagcacttaggaaggggtgggtgctgtgaccccg

SEQ ID NO: 695264 - DNA, 120 bp, Artificial Sequence
  ENSG00000188818_53 (sequence is synthesized)
gcacttaggaaggggtgggcactgtgaccctggcactaaataaggaagggatgggtgctgtgaccctggcacttagtgaggaaggggtgggcactgtgaccccggcacttagtgaggaag

SEQ ID NO: 695265 - DNA, 120 bp, Artificial Sequence
  ENSG00000188818_54 (sequence is synthesized)
gggtgggcactgtgaccccggcacttagtgaggaaggggggtgggcgctgtgaccccggcacttaggaaggggtgggcgctgtgaccctggctcttagtgagcaaggggtgggcgctgtg

SEQ ID NO: 695266 - DNA, 120 bp, Artificial Sequence
  ENSG00000188818_55 (sequence is synthesized)
accccagcacttaggaaggggtgggcactgtgaccccggcacttagtgacaatgttggagcctcacctcccagatccataaagcagggatcatgaaaaccaaccgaaggcagcagggcct

SEQ ID NO: 695267 - DNA, 120 bp, Artificial Sequence
  ENSG00000188818_56 (sequence is synthesized)
gtcgccgtgaggtcgctccaatgtcgccgtacactgttgctgcctggctaccttcccatctctgtcatcatggagagtgtgggcaggggacccctggccctcttccttcttctcctgccc

SEQ ID NO: 695268 - DNA, 120 bp, Artificial Sequence
  ENSG00000188820_0 (sequence is synthesized)
gctgatttagcttatggaagaggaaccagaaatttgtccttgaataatgtttcccgacaacgaagaggcagaaggatctgggcctgtgcgcgacgccccgggggacgaggctcatggaga

SEQ ID NO: 695269 - DNA, 120 bp, Artificial Sequence
  ENSG00000188820_1 (sequence is synthesized)
agtttcgggcggtgctggacctgcacgtcaagcaccacagcgccttgggctacggcctggtgaccctgctgacggcgggcggggagcgcatcttctccgccgtggcattccagtgcccgt

SEQ ID NO: 695270 - DNA, 120 bp, Artificial Sequence
  ENSG00000188820_2 (sequence is synthesized)
gcagcgccgcctggaacctgccctacggcctggtcttcttgctggtgccggcgctcgcgctcttcctcctgggctacgtgctgagcgcacgcacgtggcgcctgctcaccggatgctgct

SEQ ID NO: 695271 - DNA, 120 bp, Artificial Sequence
  ENSG00000188820_3 (sequence is synthesized)
cgcccgcgcgagttgcggatcggcgctgcgcggctccctggtgtgcacgcaaatcagcgcggccgccgcgctcgcgcccctcacctgggtggccgtggcgctgctcgggggcgcctttta

SEQ ID NO: 695272 - DNA, 120 bp, Artificial Sequence
  ENSG00000188820_4 (sequence is synthesized)
tgcctcggccgcaaccgcagctgcgccgcggagctgccgctggtgccgtgcaaccaggccaaggcgtcggacgtgcaggacctcctgaaggatctgaaggctcagtcgcaggtgttgggc

SEQ ID NO: 695273 - DNA, 120 bp, Artificial Sequence
  ENSG00000188820_5 (sequence is synthesized)
tggatcttgatagcagttgttatcatcattcttctgatttttacatctgtcacccgatgcctatctccagttagttttctgcagctgaaattctggaaaatctatttggaacaggagcag

SEQ ID NO: 695274 - DNA, 120 bp, Artificial Sequence
  ENSG00000188820_6 (sequence is synthesized)
cagatccttaaaagtaaagccacagagcatgcaactgaattggcaaaagagaatattaaatgtttctttgagggctcgcatccaaaagaatataacactccaagcatgaaagagtggcag

SEQ ID NO: 695275 - DNA, 120 bp, Artificial Sequence
  ENSG00000188820_7 (sequence is synthesized)
caaatttcatcactgtatactttcaatccgaagggccagtactacagcatgttgcacaaatatgtcaacagaaaagagaagactcacagtatcaggtctactgaaggagatacggtgatt

SEQ ID NO: 695276 - DNA, 120 bp, Artificial Sequence
  ENSG00000188820_8 (sequence is synthesized)
cctgttcttggctttgtagattcatctggtataaacagcactcctgagttatgaccttttgaatgagtagaaaaaaaaattgttttgaattattgctttattaaaaaataaacattggta

SEQ ID NO: 695277 - DNA, 120 bp, Artificial Sequence
  ENSG00000188822_0 (sequence is synthesized)
ggcactcaacaggtgctctgagtggcacccacggccaggtcctgggagaggacagaaaacaactgggactcctcagcccccggcagctcccagtgcccagccacccacaacacaacccaa

SEQ ID NO: 695278 - DNA, 120 bp, Artificial Sequence
  ENSG00000188822_1 (sequence is synthesized)
agccttctagacaagctcagtggaatctgaagggcccaccccatggaggaatgctgggtgacagagatagccaatggctccaaggatggcttggattccaaccctatgaaggattacatg

SEQ ID NO: 695279 - DNA, 120 bp, Artificial Sequence
  ENSG00000188822_2 (sequence is synthesized)
atcctgagtggtccccagaagacagctgttgctgtgttgtgcactcttctgggcctgctaagtgccctggagaacgtggctgtgctctatctgatcctgtcctcccaccaactccgccgg

SEQ ID NO: 695280 - DNA, 120 bp, Artificial Sequence
  ENSG00000188822_3 (sequence is synthesized)
aagccctcatacctgttcattggcagcttggctggggctgacttcctggccagtgtggtctttgcatgcagctttgtgaatttccatgttttccatggtgtggattccaaggctgtcttc

SEQ ID NO: 695281 - DNA, 120 bp, Artificial Sequence
  ENSG00000188822_4 (sequence is synthesized)
ctgctgaagattggcagcgtgactatgaccttcacagcctctgtgggtagcctcctgctgaccgccattgaccgatacctctgcctgcgctatccaccttcctacaaagctctgctcacc

SEQ ID NO: 695282 - DNA, 120 bp, Artificial Sequence
  ENSG00000188822_5 (sequence is synthesized)
cgtggaagggcactggtgaccctgggcatcatgtgggtcctctcagcactagtctcctacctgcccctcatgggatggacttgctgtcccaggccctgctctgagcttttcccactgatc

SEQ ID NO: 695283 - DNA, 120 bp, Artificial Sequence
  ENSG00000188822_6 (sequence is synthesized)
cccaatgactacctgctgagctggctcctgttcatcgccttcctcttttccggaatcatctacacctatgggcatgttctctggaaggcccatcagcatgtggccagcttgtctggccac

SEQ ID NO: 695284 - DNA, 120 bp, Artificial Sequence
  ENSG00000188822_7 (sequence is synthesized)
caggacaggcaggtgccaggaatggcccgaatgaggctggatgtgaggttggccaagaccctagggctagtgttggctgtgctcctcatctgttggttcccagtgctggccctcatggcc

SEQ ID NO: 695285 - DNA, 120 bp, Artificial Sequence
  ENSG00000188822_8 (sequence is synthesized)
cacagcctggccactacgctcagtgaccaggtcaagaaggcctttgctttctgctccatgctgtgcctcatcaactccatggtcaaccctgtcatctatgctctacggagtggagagatc

SEQ ID NO: 695286 - DNA, 120 bp, Artificial Sequence
  ENSG00000188822_9 (sequence is synthesized)
cgctcctctgcccatcactgcctggctcactggaagaagtgtgtgaggggccttgggtcagaggcaaaagaagaagccccgagatcctcagtcaccgagacagaggctgatgggaaaatc

SEQ ID NO: 695287 - DNA, 120 bp, Artificial Sequence
  ENSG00000188822_10 (sequence is synthesized)
actccgtggccagattccagagatctagacctctctgattgctgatgaggcctcttcccaatttaaacaactcaagtcagaaatcagttcactccctggaagagagagaggggtcttggc

SEQ ID NO: 695288 - DNA, 120 bp, Artificial Sequence
  ENSG00000188822_11 (sequence is synthesized)
actctcttcttacttaaaccagtcccagacacctagacacggacccctttttgctgatgagtgttgggactgactcctggaagacagcctggccttgcccacctgcacacagtctgttgg

SEQ ID NO: 695289 - DNA, 120 bp, Artificial Sequence
  ENSG00000188822_12 (sequence is synthesized)
ataggtagggccacgaggagtagccaggtaggcgagacacaaaaggcctgggacagggtcagtacaagtcaggtcaggcttcatgcctgcatcctccagagaccacaggagccaaagcga

SEQ ID NO: 695290 - DNA, 120 bp, Artificial Sequence
  ENSG00000188822_13 (sequence is synthesized)
gcctccaggcccagcaatgagggacttgggagaaatctgagaagaatgggttgttctcttgggaagtcagggtatcagatgggatggacatccaggtcttctctctgcctaattgtcaag

SEQ ID NO: 695291 - DNA, 120 bp, Artificial Sequence
  ENSG00000188822_14 (sequence is synthesized)
gcctccttggctctggagctatgaaaggccccactttcaagtcacccttgccactgaggaccgaggactatgctatgatgaggattaaggtgttgacttgcctctttcagagataaatga

SEQ ID NO: 695292 - DNA, 120 bp, Artificial Sequence
  ENSG00000188822_15 (sequence is synthesized)
caagccttcagtttggggcatcctgttgtttgggcgaggaccctctctgatattctgataatccccacctgtaacctcaggtccctggaaatacagaggaggctgggatcgcctgagaca

SEQ ID NO: 695293 - DNA, 120 bp, Artificial Sequence
  ENSG00000188822_16 (sequence is synthesized)
caaaaatctttggagaattttcttgaccctctgaagtccttccagcagcagtcctggtggtgctgctggaagcaggcaatgtcctagtctaacctaactcgaagaaaaaaaggaagatat

SEQ ID NO: 695294 - DNA, 120 bp, Artificial Sequence
  ENSG00000188822_17 (sequence is synthesized)
tcacaaagattgtataaatctccaaactgttcccctatctgcccccaattcagctcccttgcctcctccacacccctattacatataataagcagagcaagtgggaggaggggaaatgtc

SEQ ID NO: 695295 - DNA, 120 bp, Artificial Sequence
  ENSG00000188822_18 (sequence is synthesized)
aggggaaatgtccttcctatatgccaggtatggggctgacatttcagtctattgaccccagctagaatatagctccatgattttaaagatctcaggggccaggcatggtagctcatgcct

SEQ ID NO: 695296 - DNA, 120 bp, Artificial Sequence
  ENSG00000188822_19 (sequence is synthesized)
ggcggcaggaagattgcagaggaattctaatgcaattatttgggacctcaaatggaataaaatgaaagatattggttaaacatgtcttcgtttaatactttcaagacaaaatatccacta

SEQ ID NO: 695297 - DNA, 120 bp, Artificial Sequence
  ENSG00000188822_20 (sequence is synthesized)
gctattcacttattcattcatctcataaacatgagccaggctctgtgcagggtcctgagtacccagccataaatgagactgtgcccctgtctcatggggcttacagtctatatcctgctt

SEQ ID NO: 695298 - DNA, 120 bp, Artificial Sequence
  ENSG00000188822_21 (sequence is synthesized)
gcaagacagccaataagtcaataaagaagataattacaggcagtacaacaaaggaaatatgcaggttcatgtcatgtaatagggattaattgagttaactcaataaacggtaggatagac

SEQ ID NO: 695299 - DNA, 120 bp, Artificial Sequence
  ENSG00000188822_22 (sequence is synthesized)
ctaccatgtgccggctcacttttattgagcctttactatgtgccaggcagggggctaagtgtttttaaatgccttatttcacttcatgtttcccaacaacctaataagaaggtcttagtt

SEQ ID NO: 695300 - DNA, 120 bp, Artificial Sequence
  ENSG00000188822_23 (sequence is synthesized)
atcttcattttacagatgtggcaacctcaaagatgcaaagtcacttgtctaaggtcaccctgctaagtaccagagctgaggtctccaacctagttctgtttgacttcaaagcctgccctc

SEQ ID NO: 695301 - DNA, 120 bp, Artificial Sequence
  ENSG00000188822_24 (sequence is synthesized)
ttaaccactaaccttttgtcctagttcagtcaaattctgcttgattattgctcattagggataatattagctatctgtagcatcagattgctgcaaagttaactcatcgtagattctcaa

SEQ ID NO: 695302 - DNA, 120 bp, Artificial Sequence
  ENSG00000188822_25 (sequence is synthesized)
tatactccattttattaaatggccccgtattaatctcctgtaataaatttcacaaatccagtggcttatcaacagaaatttactgtctcataattctggaggccagaagtcaaaatcaag

SEQ ID NO: 695303 - DNA, 120 bp, Artificial Sequence
  ENSG00000188822_26 (sequence is synthesized)
atgtggtagggccctgctccctccaaaagtttaaggggagaattattccttgactctttcaacttctggcagtccctgtcattccttggcttgtggaaacatcactcctacctctgactc

SEQ ID NO: 695304 - DNA, 72 bp, Artificial Sequence
  ENSG00000188822_27 (sequence is synthesized)
attccttggcttgtggaaacatcactcctacctctgactctgtcttcatatggcatttcctctgtgtcttct

SEQ ID NO: 695305 - DNA, 88 bp, Artificial Sequence
  ENSG00000188822_28 (sequence is synthesized)
gtgatccgcccaccttggcctcctaaatggcctggtgtcttttttaaagaatatcagtcactggatttgggcccaccctaatcctaat

SEQ ID NO: 695306 - DNA, 120 bp, Artificial Sequence
  ENSG00000188822_29 (sequence is synthesized)
gaatatcagtcactggatttgggcccaccctaatcctaatagtatgacttcatcttaatttaaccaattatatctgtagagaccctgtttccaaataaggtcacattcacagattccagg

SEQ ID NO: 695307 - DNA, 120 bp, Artificial Sequence
  ENSG00000188822_30 (sequence is synthesized)
tggacaagaagtttaggcggacactattcaactcagtacagacccaggaacaaagtccacccactgggctgtgttgagtggcagtcactagtttatcctccctcaacaagatgagctcca

SEQ ID NO: 695308 - DNA, 120 bp, Artificial Sequence
  ENSG00000188822_31 (sequence is synthesized)
ggttgacctctgcatccccagtgctcagtcaggacccagcagagcatctgaagggatctggtcaatatgtgtggaactgaactgtttctgaaaagctctgacgtatgttttggaaaatca

SEQ ID NO: 695309 - DNA, 120 bp, Artificial Sequence
  ENSG00000188822_32 (sequence is synthesized)
aatcttgttttaatccagacaccaatctttttgtaaggcaaacaagtagcataaatgtttaaaagtgaatttgcatgtttatatactgtcattccttaaagttgaagcatgcctttcttt

SEQ ID NO: 695310 - DNA, 120 bp, Artificial Sequence
  ENSG00000188822_33 (sequence is synthesized)
attcatcggtggaatcctttctcattttggcaaagaaaatgcccaagtgcctggcacaaacaagcactgagtaaatacttcttgaatgaataaaactagattctaaaaatcatttgatca

SEQ ID NO: 695311 - DNA, 84 bp, Artificial Sequence
  ENSG00000188822_34 (sequence is synthesized)
cttgaatgaataaaactagattctaaaaatcatttgatcaaacgcaactccacactttctacttctcttcttttagaaccacac

SEQ ID NO: 695312 - DNA, 120 bp, Artificial Sequence
  ENSG00000188822_35 (sequence is synthesized)
agcccctatgtctgctttaagtggagaagcagagcttatgagggaggagaacaagggtgcaaaagggacctagatatcactgagaactgcccttgttgtttggttgaggaaatgggccca

SEQ ID NO: 695313 - DNA, 120 bp, Artificial Sequence
  ENSG00000188822_36 (sequence is synthesized)
gacagtggacaagacttgctcagggagacaaacgagatggtgtccagtgcaacaaacctaggtttcctaacttccagttctgtccactctacatcagtgcctctcacctgtccctgcagg

SEQ ID NO: 695314 - DNA, 120 bp, Artificial Sequence
  ENSG00000188822_37 (sequence is synthesized)
ttcacattttggttatgtggataaggagaaataaattgaagatcacaatgtcccattttatcttccccaagacaagctctgtaacattaaagaccactatgcaaaccgattactagaaaa

SEQ ID NO: 695315 - DNA, 120 bp, Artificial Sequence
  ENSG00000188827_0 (sequence is synthesized)
gcaggcgcgcgagtctccgttaagaaggtgccgcggcggcgccggagatgtgtaattaagtgaaccatatatgtttcatcatcatggagatcttggagaattatctgagcaccaggttca

SEQ ID NO: 695316 - DNA, 120 bp, Artificial Sequence
  ENSG00000188827_1 (sequence is synthesized)
ttggagaattatctgagcaccaggttcatatgtattcgatctcagaggcatctattggacaacaaaacactctttcagttgtgaactttatttatttattattattattttttgagacag

SEQ ID NO: 695317 - DNA, 81 bp, Artificial Sequence
  ENSG00000188827_2 (sequence is synthesized)
caggttcaagcgattctctttaccacgcctggccaattttttgtattttcagttgaaacgaggtttcaccatattggccag

SEQ ID NO: 695318 - DNA, 60 bp, Artificial Sequence
  ENSG00000188827_3 (sequence is synthesized)
tgggattacaggcatctgctaccacgcctggccaattttttgtattttcagttgaacccg

SEQ ID NO: 695319 - DNA, 120 bp, Artificial Sequence
  ENSG00000188827_4 (sequence is synthesized)
ccgcgcccggcccagttgtggactttaacagagggaagctttaaacatgtttaaccacaggcccaatttgaacaaagatacttcaatcattatagagaggaaaacagtactttttgttca

SEQ ID NO: 695320 - DNA, 120 bp, Artificial Sequence
  ENSG00000188827_5 (sequence is synthesized)
attgtgcaaactctccaagtatctaatggagaagtagagaagaaccctaatgaaactgagtgtgaatgaggctcagctaggcttctacttgggttcactttctcatctgtctgcctgtcc

SEQ ID NO: 695321 - DNA, 120 bp, Artificial Sequence
  ENSG00000188827_6 (sequence is synthesized)
tgggattgaccctcgctcctctgaagaccagcctgaaagccttaaaactggtcagatgatggatgagtctgatgaggactttaaagaactctgcgctagctttttccaaagggtgaaaaa

SEQ ID NO: 695322 - DNA, 120 bp, Artificial Sequence
  ENSG00000188827_7 (sequence is synthesized)
acatggaatcaaggaagtgtcaggagaaaggaagacacaaaaggctgcctcaaacggcactcagataagaagcaaattgaaaaggaccaaacaaactgctaccaagaccaaaacccttca

SEQ ID NO: 695323 - DNA, 120 bp, Artificial Sequence
  ENSG00000188827_8 (sequence is synthesized)
aggccctgcagagaagaaacctccgtctggcagccaggcccctaggactaaaaagcaaagggtaaccaaatggcaagcaagtgaaccggcccactctgtgaatggggaggggggtgtgct

SEQ ID NO: 695324 - DNA, 120 bp, Artificial Sequence
  ENSG00000188827_9 (sequence is synthesized)
tgcctctgctccagatccacctgtgctccgggaaacagcacaaaacacccagacgggtaaccagcaagaaccatcgccaaacctttccagagagaaaaccagagagaatgtgcccaacag

SEQ ID NO: 695325 - DNA, 120 bp, Artificial Sequence
  ENSG00000188827_10 (sequence is synthesized)
cgactcccagcctcctccttcctgtttgacaacagcagtgccaagtccctccaaaccccgcacagcacaattggtcctacagcgaatgcagcagttcaagagagcagaccccgagcgttt

SEQ ID NO: 695326 - DNA, 120 bp, Artificial Sequence
  ENSG00000188827_11 (sequence is synthesized)
gagacacgcttcagaagagtgctccctcgaggctgcgcgggaagaaaatgtcccaaaggatcctcaagaggagatgatggcggggaatgtgtatgggcttgggccccctgccccagagag

SEQ ID NO: 695327 - DNA, 120 bp, Artificial Sequence
  ENSG00000188827_12 (sequence is synthesized)
cgacgctgcggtggccttgaccctgcagcaggagtttgcacgggtaggagcatcggcacatgatgatagcctggaggaaaagggtttgttcttctgccagatttgtcaaaagaacctctc

SEQ ID NO: 695328 - DNA, 120 bp, Artificial Sequence
  ENSG00000188827_13 (sequence is synthesized)
agccatgaacgtgacccgaagggaacagcatgtgaacaggtgcttggatgaagctgaaaagacactaagaccttctgtgcctcagatccctgagtgcccgatttgtgggaaaccgtttct

SEQ ID NO: 695329 - DNA, 120 bp, Artificial Sequence
  ENSG00000188827_14 (sequence is synthesized)
taccttaaagagcagaaccagtcacttgaagcagtgtgctgtgaagatggaggttggcccccagctcctgcttcaggctgtgcggctgcagacagcacagcctgagggtagcagcagccc

SEQ ID NO: 695330 - DNA, 120 bp, Artificial Sequence
  ENSG00000188827_15 (sequence is synthesized)
acccatgttcagcttcagtgatcacagtagaggtctgaaacggagaggacccaccagcaagaaggagccacggaagaggcggaaggtggacgaggcaccgtccgaggacctgctggtggc

SEQ ID NO: 695331 - DNA, 120 bp, Artificial Sequence
  ENSG00000188827_16 (sequence is synthesized)
catggctctgtcccggtcggagatggagccgggtgcggctgtaccagcgctcaggctggaaagtgccttttctgagaggataagaccagaagcagagaataaaagtcgcaagaagaaacc

SEQ ID NO: 695332 - DNA, 120 bp, Artificial Sequence
  ENSG00000188827_17 (sequence is synthesized)
cccggtatcccccccattgttgttagtccaggactctgaaaccacaggccgacagatagaggaccgtgtggccctgctcctctctgaggaagtggaattgtctagcacgccaccacttcc

SEQ ID NO: 695333 - DNA, 120 bp, Artificial Sequence
  ENSG00000188827_18 (sequence is synthesized)
tgccagcaggattttaaaggaagggtgggaaagagcgggccagtgtcctcctccacctgaacgcaagcagagctttctgtgggagggcagcgcactgactggggcctgggccatggagga

SEQ ID NO: 695334 - DNA, 120 bp, Artificial Sequence
  ENSG00000188827_19 (sequence is synthesized)
cttctacacggccaggctggtccctcctctcgtgccccagcggcctgcccagggccttatgcaggagcccgtgccgcctctggtgccacctgagcactcagagctgagcgagcgaaggtc

SEQ ID NO: 695335 - DNA, 120 bp, Artificial Sequence
  ENSG00000188827_20 (sequence is synthesized)
acccgctctccacggcacccccactgcaggctgtggctccaggggcccgtcgccttcggccagccagagggagcaccaggccctgcaggacctcgtggacctggcgagggagggactgag

SEQ ID NO: 695336 - DNA, 120 bp, Artificial Sequence
  ENSG00000188827_21 (sequence is synthesized)
cgccagcccgtggcccggcagtgggggcctggctggctcggaagggactgcagggttggacgtggtgcccggcggccttcctctgactgggtttgtggtgccatcgcaggacaagcaccc

SEQ ID NO: 695337 - DNA, 120 bp, Artificial Sequence
  ENSG00000188827_22 (sequence is synthesized)
ggacaggggcggccgcaccttgctctccctcgggctgctggttgctgactttggcgccatggtcaataacccacacctgagtgatgtccagtttcagacggacagcggggaggtgcttta

SEQ ID NO: 695338 - DNA, 120 bp, Artificial Sequence
  ENSG00000188827_23 (sequence is synthesized)
cgcccacaagttcgtgctttatgcccgatgcccgctcctcatccagtatgtgaacaatgaaggcttctccgctgtagaggacggggttctgacccagcgtgtcctgctgggtgacgtgag

SEQ ID NO: 695339 - DNA, 120 bp, Artificial Sequence
  ENSG00000188827_24 (sequence is synthesized)
caccgaggccgcccgcacgttcctgcactatctctacactgcggacactggccttcctcctggccttagctctgagctgagctccctggcccacaggtttggcgtgagtgagctcgttca

SEQ ID NO: 695340 - DNA, 120 bp, Artificial Sequence
  ENSG00000188827_25 (sequence is synthesized)
cctgtgcgaacaggtgcctattgccactgactcagagggcaaaccatgggaggagaaggaagcagagaattgcgaaagcagggccgagaatttccaggaactcttgaggtcaatgtgggc

SEQ ID NO: 695341 - DNA, 120 bp, Artificial Sequence
  ENSG00000188827_26 (sequence is synthesized)
agatgaagaggaggaagcggagactttgttgaaatccaaggaccacgaagaagatcaagaaaacgtgaatgaagcagaaatggaagaaatttatgaatttgcagctactcagcgaaagct

SEQ ID NO: 695342 - DNA, 120 bp, Artificial Sequence
  ENSG00000188827_27 (sequence is synthesized)
tctccaggaagaaagggcagcgggtgccggcgaggacgctgactggctggagggtggcagtccggtttctgggcaactcctagcaggtgtccaggtgcagaaacagtgggacaaggtgga

SEQ ID NO: 695343 - DNA, 120 bp, Artificial Sequence
  ENSG00000188827_28 (sequence is synthesized)
ggagatggagccgttggagccaggaagagatgaggccgccaccacctgggagaagatgggacagtgcgctctcccgccaccccagggccagcactcaggggcacggggagcagaggcccc

SEQ ID NO: 695344 - DNA, 120 bp, Artificial Sequence
  ENSG00000188827_29 (sequence is synthesized)
tgagcaggaggcgccagaggaggcgcttggccattccagctgctccagcccttccagggactgccaggcagagagaaaagaaggctctcttccgcactcagatgatgccggggattacga

SEQ ID NO: 695345 - DNA, 120 bp, Artificial Sequence
  ENSG00000188827_30 (sequence is synthesized)
gctccctggcaggcatctccaccgcacccgtgccgcttcctattggggcctccccagggcgggagtccccgcgggtctcatcacacaagtgggtcgtccctgtcaacaccccggtcccgt

SEQ ID NO: 695346 - DNA, 120 bp, Artificial Sequence
  ENSG00000188827_31 (sequence is synthesized)
ggcggaacttcccaggtgggctccccaaccttgctgtctccagctgtgccatcaaagcagaaaagggacaggagcatcctcacgctgtctaaagagccagggcaccagaaaggcaaagag

SEQ ID NO: 695347 - DNA, 120 bp, Artificial Sequence
  ENSG00000188827_32 (sequence is synthesized)
cgtcggtccgtgctggagtgcagaaataagggggtcctgatgttcccagaaaaatctccgtctattgacctaacccagtcaaatcctgaccattcgagctccagatctcagaaatcttca

SEQ ID NO: 695348 - DNA, 120 bp, Artificial Sequence
  ENSG00000188827_33 (sequence is synthesized)
tccaaactgaacgaagaagatgaggtcatcctcttactggactcggatgaggagctggagctagaacaaaccaaaatgaagtccatttctagtgatcctctggaagaaaagaaagctcta

SEQ ID NO: 695349 - DNA, 120 bp, Artificial Sequence
  ENSG00000188827_34 (sequence is synthesized)
gaaattagccctaggtcctgtgagctgttttccatcattgatgttgatgcagatcaggaaccttcccagagcccaccaagaagcgaagctgtgctgcagcaggaggatgagggggcgctg

SEQ ID NO: 695350 - DNA, 120 bp, Artificial Sequence
  ENSG00000188827_35 (sequence is synthesized)
ccggagaatcggggctctttgggcaggagaggggctccctggctgttctgtgaccgtgagagcagccccagcgaggccagcaccacagacacctcgtggctggtgcccgccaccccgctg

SEQ ID NO: 695351 - DNA, 120 bp, Artificial Sequence
  ENSG00000188827_36 (sequence is synthesized)
gccagcagaagccgtgactgttcttcccagacccaaatcagcagcctcaggagcgggctggccgtgcaggcggtgactcagcacacgcccagggcctcagtaggaaacagggaagggaac

SEQ ID NO: 695352 - DNA, 120 bp, Artificial Sequence
  ENSG00000188827_37 (sequence is synthesized)
gaagtcgcacagaagttttctgtcatcaggccccagacaccaccgccccagacaccgtcctcatgcctcactcccgtctctccaggaacttctgacggcagaaggcaaggccacagaagc

SEQ ID NO: 695353 - DNA, 120 bp, Artificial Sequence
  ENSG00000188827_38 (sequence is synthesized)
ccttcccgtccccaccccgggggccacccgcactcctctccgctggctccacatcccatctcaggggaccgcgcccacttcagcaggcggttcctgaaacactcgccgcctgggccaagc

SEQ ID NO: 695354 - DNA, 120 bp, Artificial Sequence
  ENSG00000188827_39 (sequence is synthesized)
ttcctgaaccagaccccagcgggtgaagtggtggaagtcggagacagtgacgatgagcaggaggtggcctcccatcaggccaacagaagccccccactggacagtgaccccccaattcca

SEQ ID NO: 695355 - DNA, 120 bp, Artificial Sequence
  ENSG00000188827_40 (sequence is synthesized)
attgacgactgctgctggcacatggagcccctctcgccaattcccattgaccactggaacctggagcggaccggccccctgagcaccagcagccccagccgcaggatgaacgaggccgcc

SEQ ID NO: 695356 - DNA, 120 bp, Artificial Sequence
  ENSG00000188827_41 (sequence is synthesized)
gacagccgtgactgtcgctccccgggactcctggacaccacccccatccgaggaagctgcactacccagaggaaattgcaagagaagtcctcgggcgcgggctccctggggaatagcagg

SEQ ID NO: 695357 - DNA, 120 bp, Artificial Sequence
  ENSG00000188827_42 (sequence is synthesized)
ccgagctttctgaattcggctctgtgggacgtttgggacggggaagagcagaggcctccagagacccctcctccggcccagatgccaagcgctggtggagctcagaagcccgaagggtta

SEQ ID NO: 695358 - DNA, 120 bp, Artificial Sequence
  ENSG00000188827_43 (sequence is synthesized)
gagacacccaaaggtgctaatcggaagaagaacttgccccccaaagtgcccataacgccgatgccacagtattccattatggagacgccggtgctgaagaaggaactggataggtttgga

SEQ ID NO: 695359 - DNA, 120 bp, Artificial Sequence
  ENSG00000188827_44 (sequence is synthesized)
gtccgccctctgcctaaacgccagatggttctgaagctgaaggagatattccagtacactcaccagaccctggactcagactccgaggacgagagccagtcctcacagccgctgttgcag

SEQ ID NO: 695360 - DNA, 120 bp, Artificial Sequence
  ENSG00000188827_45 (sequence is synthesized)
gcgcctcactgccagaccctcgcctcccagacctacaagccttcaagggcaggggtccatgcccagcaggaggccaccacaggacctggggcccataggcccaagggacctgctaagacc

SEQ ID NO: 695361 - DNA, 120 bp, Artificial Sequence
  ENSG00000188827_46 (sequence is synthesized)
aagggcccccgacatcaaaggaagcatcatgaaagcatcacacccccaagcaggtcgcccaccaaggaggcacctccaggcctcaatgatgacgcccagatcccagcctctcaagaatcc

SEQ ID NO: 695362 - DNA, 120 bp, Artificial Sequence
  ENSG00000188827_47 (sequence is synthesized)
gtggccacctctgtggatggcagtgacagctccttgagctcacagagttcttcctcctgtgagtttggagcggcatttgagtctgcaggtgaagaggagggcgagggggaggtcagtgcc

SEQ ID NO: 695363 - DNA, 120 bp, Artificial Sequence
  ENSG00000188827_48 (sequence is synthesized)
tcgcaggcagccgtgcaggcggcggacacagacgaggcgctgaggtgctacatccgctccaagccggccctgtaccagaaggtgctgctgtaccagccctttgagctgcgggagctgcag

SEQ ID NO: 695364 - DNA, 120 bp, Artificial Sequence
  ENSG00000188827_49 (sequence is synthesized)
gcagagctgaggcagaacggcctccgtgtgtcctcgcgcaggctgttggacttcctggacacccactgtatcaccttcaccactgccgccacccgcagggagaagctccagggcaggagg

SEQ ID NO: 695365 - DNA, 120 bp, Artificial Sequence
  ENSG00000188827_50 (sequence is synthesized)
cggcagcctcggggcaagaagaaggtggagcggaactgatggggccatcccgaccccaccccaacctgccatcagcagcccccacccccgccatttgcagggaggacctgggacacccag

SEQ ID NO: 695366 - DNA, 120 bp, Artificial Sequence
  ENSG00000188827_51 (sequence is synthesized)
cgtgggtcaggcctccacaggcatttctgggcctggggaccacatcagctctgcgctgtgatgatgaccacagcccaatccagggcttcctcctctgggctctgctttctagggtggcat

SEQ ID NO: 695367 - DNA, 120 bp, Artificial Sequence
  ENSG00000188827_52 (sequence is synthesized)
gggctctgctttctagggtggcatttggagcatgtcacccactggatttacagactccagccccttcctctgtccgtgctcacagtgtgtctccctttttggttttctttttttttttct

SEQ ID NO: 695368 - DNA, 89 bp, Artificial Sequence
  ENSG00000188827_53 (sequence is synthesized)
gtttcaccatgttgctcaggctggtcacaaactccagagctcaggcaatccgcctgctgcagccactgcgcccggcccagtgtgtctcc

SEQ ID NO: 695369 - DNA, 120 bp, Artificial Sequence
  ENSG00000188827_54 (sequence is synthesized)
gccagccactgcgcccggcccagtgtgtctcccttaacccaagagggccctcagctgtcccagggggcagtgggccatcaccagctggccagggcatggcctattctgccacatttgcca

SEQ ID NO: 695370 - DNA, 120 bp, Artificial Sequence
  ENSG00000188827_55 (sequence is synthesized)
ccctctgagcccaccagtcctgggcacagctgccctacatgtctgtcctgagatggacgtcaggtccagcctgccccggcagcccgggcccgtcctcctcagcactcaggccaaccccag

SEQ ID NO: 695371 - DNA, 120 bp, Artificial Sequence
  ENSG00000188827_56 (sequence is synthesized)
ccaccgccagcctgagaccaggtgtcctgaggctccctgcactgccacagcccagatgcagttctcctgacccagccgtgctacccggacacttgtcattgttaccagcagtctccaaac

SEQ ID NO: 695372 - DNA, 120 bp, Artificial Sequence
  ENSG00000188827_57 (sequence is synthesized)
tggacagtgcacaagggcccagaacaactctgatgccaccacaaaacaaacatgttcactagcggattccattctttgggttaaagctgcctccagcctcaggagcagtgtggaggaaga

SEQ ID NO: 695373 - DNA, 120 bp, Artificial Sequence
  ENSG00000188827_58 (sequence is synthesized)
tgagggccaggaaagaaggaaaccttggtttctccatccttgtgaatgtcctcgtctgtttcaaatacagtgcagtcagttttatatgatgtgcaataaaccaaaaaggctttattaaaa

SEQ ID NO: 695374 - DNA, 120 bp, Artificial Sequence
  ENSG00000188827_59 (sequence is synthesized)
atctccacaccttaccatgacaacagcacctcagctttgttgtcaacctacccctttttaaaaataacttcgttgagatacaattcacagaacatatagttcacccatttaaactgaaca

SEQ ID NO: 695375 - DNA, 120 bp, Artificial Sequence
  ENSG00000188827_60 (sequence is synthesized)
aatcactacttttgggatattcacacagttgggcaactgtcaccacaatcacttctggattattttcatcacccccaaaagaatccccacacccattggcagccactccctattgcccct

SEQ ID NO: 695376 - DNA, 120 bp, Artificial Sequence
  ENSG00000188827_61 (sequence is synthesized)
ttgaggttcatccatgttgtagcatggagcaggcttcattcctttttatggctgagcagtatctcattgtatggctagactgtgtttttcccattcttagatgaggaatatgaccatggt

SEQ ID NO: 695377 - DNA, 120 bp, Artificial Sequence
  ENSG00000188827_62 (sequence is synthesized)
ttatcctttcgtccattggcggacatttggagcatttctaccctttgggattgtggatagagctgccgtgaacatgggtttcatgtatttgtttgggtacctgctttcagttctttgggg

SEQ ID NO: 695378 - DNA, 120 bp, Artificial Sequence
  ENSG00000188827_63 (sequence is synthesized)
tctctacttaggagtggaatttctaagtcatcatgtaactgcatttaatctttccttgctttctttagccaactttgctgacagatacctaagtgtagtgtctaggggctgactgccggg

SEQ ID NO: 695379 - DNA, 120 bp, Artificial Sequence
  ENSG00000188827_64 (sequence is synthesized)
agacggagccaggctgtgtagaggggattggctttggggaacttgctttgaccacagcacgtctgtgttgacctggacccacatttgctccaatccacattcctggggagggtggttctc

SEQ ID NO: 695380 - DNA, 120 bp, Artificial Sequence
  ENSG00000188827_65 (sequence is synthesized)
aggtaagtcgacgaaaaggaagaaaaccaagccaaataatgctgtgtgcactcagggctttttctatttaaaaaagctttttatgggctggacgcagtagttcacacctgtaatcgcagc

SEQ ID NO: 695381 - DNA, 90 bp, Artificial Sequence
  ENSG00000188827_66 (sequence is synthesized)
tgggaggccaaggtgggcagatcaccttagatcaggagttcgataccagcctggccgacatggtacaatatggtggcacatgcctgtagt

SEQ ID NO: 695382 - DNA, 120 bp, Artificial Sequence
  ENSG00000188828_0 (sequence is synthesized)
gtgcctttaaattactgctttcggagggtgcatctagggggaggtgggaggcaggaaaacatcttcctaccggtctccctcctccctcccctccaagactcttcagggtttggagagtga

SEQ ID NO: 695383 - DNA, 120 bp, Artificial Sequence
  ENSG00000188828_1 (sequence is synthesized)
ttgctgcccagagagaatcttttccagctcccagctggcaggctaaggccctccggagcccaaggcgagcccaagcagaagccagtagggttatctgtgtcaggatcatttccaggggaa

SEQ ID NO: 695384 - DNA, 120 bp, Artificial Sequence
  ENSG00000188828_2 (sequence is synthesized)
tagttctggcccctggcaggtaaagacaggccagaggagaagaggcagaagaggagagaaagcaggctcttttgcgagcagcccaggttggagaaaggctctgtacttttggcgttcctg

SEQ ID NO: 695385 - DNA, 120 bp, Artificial Sequence
  ENSG00000188828_3 (sequence is synthesized)
cagggatatcccctctcacattggcagccaggctgagaaagggcttcaagatccccgcagaatgacaactcttgttcctgcaaccctctccttccttcttctctggaccctgccagggca

SEQ ID NO: 695386 - DNA, 120 bp, Artificial Sequence
  ENSG00000188828_4 (sequence is synthesized)
ggtcctcctcagggtggccttggcaaaagaggaagtcaaatctggaaccaaggggtcccagcccatgtccccctctgatttcctagacaaacttatggggcgaacatctggatatgatgc

SEQ ID NO: 695387 - DNA, 120 bp, Artificial Sequence
  ENSG00000188828_5 (sequence is synthesized)
caggattcggcccaattttaaaggcccacccgtgaacgtgacctgcaacatcttcatcaacagtttcagctccatcaccaagaccacaatggactaccgggtgaatgtcttcttgcggca

SEQ ID NO: 695388 - DNA, 120 bp, Artificial Sequence
  ENSG00000188828_6 (sequence is synthesized)
acagtggaatgacccacgcctgtcctaccgagaatatcctgatgactctctggacctcgatccctccatgctggactctatctggaagccagacctcttctttgctaatgagaaaggggc

SEQ ID NO: 695389 - DNA, 120 bp, Artificial Sequence
  ENSG00000188828_7 (sequence is synthesized)
ttccccatggacatccagacctgcacgatgcagcttgagagctttggctacaccatgaaagacctcgtgtttgagtggctggaagatgctcctgctgtccaagtggctgaggggctgact

SEQ ID NO: 695390 - DNA, 120 bp, Artificial Sequence
  ENSG00000188828_8 (sequence is synthesized)
ctgccccagtttatcttgcgggatgagaaggatctaggctgttgtaccaagcactacaacacagggaaattcacctgcatcgaggtaaagtttcacctggaacggcagatgggctactat

SEQ ID NO: 695391 - DNA, 120 bp, Artificial Sequence
  ENSG00000188828_9 (sequence is synthesized)
ctgattcagatgtacatccccagcctactcatcgtcatcctgtcctgggtctccttctggatcaacatggatgctgcccctgcccgtgtgggcctgggcatcaccaccgtgctcaccatg

SEQ ID NO: 695392 - DNA, 120 bp, Artificial Sequence
  ENSG00000188828_10 (sequence is synthesized)
accacccagagctctggctcccgggcctctttgcctaaggtgtcctacgtgaaggcaatcgacatctggatggctgtgtgtctgctctttgtgttcgctgccttgctggagtatgctgcc

SEQ ID NO: 695393 - DNA, 120 bp, Artificial Sequence
  ENSG00000188828_11 (sequence is synthesized)
ataaattttgtttctcgtcagcataaagaattcatacgacttcgaagaaggcagaggcgccaacgcttggaggaagatatcatccaagaaagtcgtttctatttccgtggctatggcttg

SEQ ID NO: 695394 - DNA, 120 bp, Artificial Sequence
  ENSG00000188828_12 (sequence is synthesized)
ggccactgcctgcaggcaagagatggaggtccaatggaaggttctggcatttatagtccccaacctccagcccctcttctaagggaaggagaaaccacgcggaaactctacgtggactga

SEQ ID NO: 695395 - DNA, 120 bp, Artificial Sequence
  ENSG00000188828_13 (sequence is synthesized)
gccaagagaattgacaccatctcccgggctgtcttccctttcactttcctcatcttcaatatcttctactgggttgtctataaagtgctatggtcagaagatatccaccaggctctgtga

SEQ ID NO: 695396 - DNA, 120 bp, Artificial Sequence
  ENSG00000188828_14 (sequence is synthesized)
ggtggatagccaggagagtttgcgttaaggggaagaatttggatgaagactgaggggtgggaggagggttcccttgcactgtgatgggccccagtaagccgatgtcacttctttcttact

SEQ ID NO: 695397 - DNA, 120 bp, Artificial Sequence
  ENSG00000188828_15 (sequence is synthesized)
tcaaaacgcttgggtgttttgcccaaagtcacacagtggaaggttcaggattcaaacccaggcagtctgactctggagccctcctgctccttatcctcttgctgtgcagtcacgtgaaag

SEQ ID NO: 695398 - DNA, 120 bp, Artificial Sequence
  ENSG00000188828_16 (sequence is synthesized)
aagagacatgcaagggaacttgcttgccatagagtaccccatttcccattcatcccaatgtgccctcctgctcaccatttaccttggatttaaggttgagaagacccactgggcaaaagc

SEQ ID NO: 695399 - DNA, 120 bp, Artificial Sequence
  ENSG00000188828_17 (sequence is synthesized)
tggtgtcctgcattctctctccctgtaatatactgctaataacattgttgacaatgtggaggctggggttagggatactatctggctagggaatgaggagagacagtgccttactttgac

SEQ ID NO: 695400 - DNA, 120 bp, Artificial Sequence
  ENSG00000188828_18 (sequence is synthesized)
tctcttcaggaaatactagcatgtccaaggtcaaaagatcctcagcaagtagaaagtcctactgcctcataatacaaatgaggagaatacagcccagagtggtaaaataaccttcttaag

SEQ ID NO: 695401 - DNA, 120 bp, Artificial Sequence
  ENSG00000188828_19 (sequence is synthesized)
atcatgccttataagaaacaaccaaaacaatatcagagttttgaaccaatttctgtcatcttactgtatcagaaattagaaactatcacaaagcgctctagagatattatcctttctttt

SEQ ID NO: 695402 - DNA, 120 bp, Artificial Sequence
  ENSG00000188833_0 (sequence is synthesized)
ccaggtgcacagcgcatcgcccgaggctgtcaccgccctgccccgcccaccccagctgtcctggacccaggggcagggagaggctggacgccaggtgcgcggacacagaagcgtctaagc

SEQ ID NO: 695403 - DNA, 120 bp, Artificial Sequence
  ENSG00000188833_1 (sequence is synthesized)
acagcttcctccttgccgctccgggaagtgggcagccagcccaggaaccagtaccacctgcaccatggggctgtcccggaaggagcaggtcttcttggccctgctgggggcctcgggggt

SEQ ID NO: 695404 - DNA, 120 bp, Artificial Sequence
  ENSG00000188833_2 (sequence is synthesized)
ctcaggcctcacggcactcattctcctcctggtggaggccaccagcgtgctcctgcccacagacatcaagtttgggatcgtgtttgatgcgggctcctcccacacgtccctcttcctgta

SEQ ID NO: 695405 - DNA, 120 bp, Artificial Sequence
  ENSG00000188833_3 (sequence is synthesized)
tcagtggctggcgaacaaggagaatggcacgggtgtggtcagccaggccctggcctgccaggtggaagggcctggaatctcctcctacacttctaatgctgcacaggctggtgagagcct

SEQ ID NO: 695406 - DNA, 120 bp, Artificial Sequence
  ENSG00000188833_4 (sequence is synthesized)
gcagggctgcttggaggaggcgctggtgctgatcccagaggcccagcatcggaaaacacccacgttcctgggggccacggctggcatgaggttgctcagccggaagaacagctctcaggc

SEQ ID NO: 695407 - DNA, 120 bp, Artificial Sequence
  ENSG00000188833_5 (sequence is synthesized)
cagggacatctttgcagcagtcacccaggtcctgggccggtctcccgtggacttttggggtgccgagctcctggccgggcaggccgaaggtgcctttggttggatcactgtcaactacgg

SEQ ID NO: 695408 - DNA, 120 bp, Artificial Sequence
  ENSG00000188833_6 (sequence is synthesized)
cttggggacgctggtcaagtactccttcactggagaatggatccagcctccggaggagatgctggtgggtgccctggacatgggaggggcctccacccagatcacgttcgtgcctggggg

SEQ ID NO: 695409 - DNA, 120 bp, Artificial Sequence
  ENSG00000188833_7 (sequence is synthesized)
ccccatcttggacaagagcacccaggccgattttcgcctctacggctccgactacagcgtctacactcacagctacctgtgctttggacgggaccagatgctgagcaggctcctcgtggg

SEQ ID NO: 695410 - DNA, 120 bp, Artificial Sequence
  ENSG00000188833_8 (sequence is synthesized)
ccctgggcccgctgtatgagtcaccctgtgtccacgccacgcccccgctgagcctcccccagaacctcacagttgaagggacaggcaaccctggagcctgcgtctcagccatccgggaac

SEQ ID NO: 695411 - DNA, 120 bp, Artificial Sequence
  ENSG00000188833_9 (sequence is synthesized)
ttttcaacttctccagctgccagggccaggaggactgcgcctttgacggggtctaccagcccccgctgcggggccagttctatgtggaggccagctaccctgggcaggaccgctggctgc

SEQ ID NO: 695412 - DNA, 120 bp, Artificial Sequence
  ENSG00000188833_10 (sequence is synthesized)
gggactactgtgcctcaggcctgtacatcctcaccctcctgcacgagggctacgggttcagcgaggagacctggcccagcctcgagttccgaaagcaggcgggcggtgtggacattggct

SEQ ID NO: 695413 - DNA, 120 bp, Artificial Sequence
  ENSG00000188833_11 (sequence is synthesized)
ggacactgggctacatgctgaacctgaccgggatgatcccggccgatgcgccggctcagtggcgggcagagagctacggcgtctgggtggccaaagtggtgttcatggtgctggccctgg

SEQ ID NO: 695414 - DNA, 120 bp, Artificial Sequence
  ENSG00000188833_12 (sequence is synthesized)
tggcggtggtgggggctgccttggtccagctcttctggttgcaggactagtgggaaggcggaggtgggcccccacagagcccacaggcagctgcgtcccggatgctggaggcttcctgag

SEQ ID NO: 695415 - DNA, 120 bp, Artificial Sequence
  ENSG00000188833_13 (sequence is synthesized)
ccctgagcgccgtggggccttgctctgtggctctgcccacggtcaggtgacagccacctccagggcaccgtcagggtggtgctggccacagaggctgcatgacctcccctcccggcgtcc

SEQ ID NO: 695416 - DNA, 120 bp, Artificial Sequence
  ENSG00000188833_14 (sequence is synthesized)
ctcccccaacctccttccgcaactgggcttccagggccgtaggtgcctttctgcacacaggccgccaggactcgtggtgtctccaggctgtgtgactgcagggccacatgctgcctgcaa

SEQ ID NO: 695417 - DNA, 120 bp, Artificial Sequence
  ENSG00000188833_15 (sequence is synthesized)
acagggcaagaccacggaggcacaggggtcctgctcctgatggggcctcaggaggggcggagaggggtggaagggagggagctgccccacctggacccccgctctccctgctgttgtctg

SEQ ID NO: 695418 - DNA, 120 bp, Artificial Sequence
  ENSG00000188833_16 (sequence is synthesized)
agcagatggatggagtccaggcctgggggcttctgctgggccagcccggcctcccacacccacttggagggtgagactgcagtgggggttgtttttattaaaagcatcatggacacagca

SEQ ID NO: 695419 - DNA, 120 bp, Artificial Sequence
  ENSG00000188833_17 (sequence is synthesized)
acttcctgaacctcacctccaggcagcccctgagcacggtcaacgccaccatctgggagttttgccagaggccctggaaactggtggaggccagctaccctgggcaggaccgctggctgc

SEQ ID NO: 695420 - DNA, 120 bp, Artificial Sequence
  ENSG00000188833_18 (sequence is synthesized)
ggctgcaaatggaaaacgacgggcgccgcggggctgcaggcgcttccgcccccgccccgggcctggaccttcggggtcacctgactccgacctgcccgggccgggcggcacggggggtaa

SEQ ID NO: 695421 - DNA, 120 bp, Artificial Sequence
  ENSG00000188833_19 (sequence is synthesized)
gtaaagtccgggccggggtcaggagcgcggctgcgggccgtggggggcggggtcccggagttctgcccctcgcagctccaggctcctcctcagcttccctctcctgcctcccaccccccc

SEQ ID NO: 695422 - DNA, 120 bp, Artificial Sequence
  ENSG00000188833_20 (sequence is synthesized)
ggcgaccctgggcaccgagacagacccgcgggtgggagatgcggggagaccctgggcgggggacccgagggtggagtgggcggggcgaccttgggcgctggcctcagcctgcgggccctg

SEQ ID NO: 695423 - DNA, 120 bp, Artificial Sequence
  ENSG00000188833_21 (sequence is synthesized)
gccttggcacccacggggagtggctgcagaagccatggtctcagccagcgtggcaggcagggtggggccgggcccaggcttccagccagctccagcccctggtcctctgtgcccagccgg

SEQ ID NO: 695424 - DNA, 120 bp, Artificial Sequence
  ENSG00000188846_0 (sequence is synthesized)
ggcggtgcgttcttctacacatgcgcagggttgggcgggtcttcttccttctcgcctaacgccgccaacatggtgttcaggcgcttcgtggaggttggccgggtggcctatgtctccttt

SEQ ID NO: 695425 - DNA, 120 bp, Artificial Sequence
  ENSG00000188846_1 (sequence is synthesized)
ggacctcatgccggaaaattggtcgcgattgtagatgttattgatcagaacagggctttggtcgatggaccttgcactcaagtgaggagacaggccatgcctttcaagtgcatgcagctc

SEQ ID NO: 695426 - DNA, 120 bp, Artificial Sequence
  ENSG00000188846_2 (sequence is synthesized)
actgatttcatcctcaagtttccgcacagtgcccaccagaagtatgtccgacaagcctggcagaaggcagacatcaatacaaaatgggcagccacacgatgggccaagaagattgaagcc

SEQ ID NO: 695427 - DNA, 120 bp, Artificial Sequence
  ENSG00000188846_3 (sequence is synthesized)
agagaaaggaaagccaagatgacagattttgatcgttttaaagttatgaaggcaaagaaaatgaggaacagaataatcaagaatgaagttaagaagcttcaaaaggcagctctcctgaaa

SEQ ID NO: 695428 - DNA, 120 bp, Artificial Sequence
  ENSG00000188846_4 (sequence is synthesized)
ctgctgctgctgctgctgctgctgctaaagttccagcaaaaaagatcaccgccgcgagtaaaaaggctccagcccagaaggttcctgcccagaaagccacaggccagaaagcagcgcctg

SEQ ID NO: 695429 - DNA, 120 bp, Artificial Sequence
  ENSG00000188846_5 (sequence is synthesized)
gttcctgcccagaaagccacaggccagaaagcagcgcctgctccaaaagctcagaagggtcaaaaagctccagcccagaaagcacctgctccaaaggcatctggcaagaaagcataagtg

SEQ ID NO: 695430 - DNA, 120 bp, Artificial Sequence
  ENSG00000188846_6 (sequence is synthesized)
gcaatcataaaaagtaataaaggttctttttgacctgttgacaaatgtatttaagcctttggatttaaagcctgttgaggctggagttaggaggcagattgatagtaggattataataaa

SEQ ID NO: 695431 - DNA, 71 bp, Artificial Sequence
  ENSG00000188846_7 (sequence is synthesized)
ctggagttaggaggcagattgatagtaggattataataaacattaaataatcatcaggccggactgcagtg

SEQ ID NO: 695432 - DNA, 120 bp, Artificial Sequence
  ENSG00000188846_8 (sequence is synthesized)
aaagtgctaggattgcaggcatgagccgccgcgcctggcctaaataatcagttctttaatctcactctctgcccatacttggataggtagtgcaaaatcattgcagtcataattgatcat

SEQ ID NO: 695433 - DNA, 120 bp, Artificial Sequence
  ENSG00000188846_9 (sequence is synthesized)
ggataggtagtgcaaaatcattgcagtcataattgatcatgtcatgagaaatcatgataacttagaacaccaagtgacacaagtgacatttttttcttatggtcaccttggcttcagaac

SEQ ID NO: 695434 - DNA, 120 bp, Artificial Sequence
  ENSG00000188846_10 (sequence is synthesized)
accttggcttcagaacatcttttttccttgtacaaatatgtttgccataaataggtaaagtgacagcctcttgatgctcaagagtctagcagatttattttatttatttatttttttttt

SEQ ID NO: 695435 - DNA, 65 bp, Artificial Sequence
  ENSG00000188846_11 (sequence is synthesized)
gagcgggggattataggcatgggccactgcacttggcctttttttgtttttttgagacagagtct

SEQ ID NO: 695436 - DNA, 85 bp, Artificial Sequence
  ENSG00000188846_12 (sequence is synthesized)
tgtctcggcctcccagagcgggggattataggcatgggccactgcacttggcctttttttgtttttttgagacagagtcttgatc

SEQ ID NO: 695437 - DNA, 120 bp, Artificial Sequence
  ENSG00000188846_13 (sequence is synthesized)
ggctcagcgcaacctctgcctcctgggctcaagcggttctcctgctcagccttctgagtagttgggactataggtgtgtgccaccacgtctggctagtttttgtatttttagtggagatg

SEQ ID NO: 695438 - DNA, 88 bp, Artificial Sequence
  ENSG00000188846_14 (sequence is synthesized)
caaattttcttataaaaagtaaactaggaaaatagggcaagtataaaaattgcaggttgagcatatttctaatccaaaaagctctaac

SEQ ID NO: 695439 - DNA, 120 bp, Artificial Sequence
  ENSG00000188846_15 (sequence is synthesized)
attgcaggttgagcatatttctaatccaaaaagctctaacctctgaaactgagctatgacactacaatttaaaaatccctagcctacccgcatggtgggttatggtcaaaatacaggtac

SEQ ID NO: 695440 - DNA, 120 bp, Artificial Sequence
  ENSG00000188846_16 (sequence is synthesized)
acagcactattcagtgtccctgaggaagaaatagttaaccttcagggtacatgtatatgaagcataaatgaatttcctgtatagacctaggtcccatccccaaagtgtcatgtatatgca

SEQ ID NO: 695441 - DNA, 120 bp, Artificial Sequence
  ENSG00000188846_17 (sequence is synthesized)
cttaactccaacatcagaacacatctcgtcctaagtgtttcagataagagatacttatcctgtgtatagtaggttggacttctgtttctctctaccacaagatacaggtaatttggggca

SEQ ID NO: 695442 - DNA, 120 bp, Artificial Sequence
  ENSG00000188846_18 (sequence is synthesized)
gtaaaagatcctggatagatttaaaaatactacaaagctgtacatgaaacaggattacttttttttttttttttgagacagagccttactcttgcccaggctggaatgtagtggcacgat

SEQ ID NO: 695443 - DNA, 120 bp, Artificial Sequence
  ENSG00000188846_19 (sequence is synthesized)
actgcgacctccacctcccaggttcaagttgttctgcctcagcctcccaagtagcaggggttaaatgcgtgtaccaccatgcccctctaatattgtattagagatggggttttgccatgt

SEQ ID NO: 695444 - DNA, 61 bp, Artificial Sequence
  ENSG00000188846_20 (sequence is synthesized)
tggccaggaatacattttaaataaatttgtttcctaaccaaaagctagcttcaggcgtcac

SEQ ID NO: 695445 - DNA, 120 bp, Artificial Sequence
  ENSG00000188846_21 (sequence is synthesized)
taaatttgtttcctaaccaaaagctagcttcaggcgtcactggggtaaaggaaaaagcacattgatttgcttgataataggcaagtggtatggtgtaataaggaaaatatggatgatttc

SEQ ID NO: 695446 - DNA, 120 bp, Artificial Sequence
  ENSG00000188846_22 (sequence is synthesized)
ggattacctgttctactctgggaggtagagaattgtctagagaaagtggcatctatacctaaaataagaagaaggtggtgtaaggggaagaatgacacgagataggaaataaacgaactg

SEQ ID NO: 695447 - DNA, 120 bp, Artificial Sequence
  ENSG00000188846_23 (sequence is synthesized)
atagtgtagaggactggctcgggaccacatcaaggaagtaggttagtggttagatcgtgtaggggaacacgggaagctactgagggttttttaaaatggcgtgatatctcagatttagat

SEQ ID NO: 695448 - DNA, 120 bp, Artificial Sequence
  ENSG00000188846_24 (sequence is synthesized)
cattgaactgttaagactgaatcttatgggatcaagactgggaatgctcgggttggcagtatgaagtttggcagtaatccaaggaagtgacagtggtaatgccatttaggtggtcttgat

SEQ ID NO: 695449 - DNA, 120 bp, Artificial Sequence
  ENSG00000188846_25 (sequence is synthesized)
catgcattggactgcagaaataagggagaaaacaatgtgtcagggtttctggtttgtacctctggttcattggttgtgagggaacatgaggcagggtaaagtttatctaggtaaaatgag

SEQ ID NO: 695450 - DNA, 120 bp, Artificial Sequence
  ENSG00000188846_26 (sequence is synthesized)
ttagttttcatgtagactatctgggtgtatatgcaaagactgcagacaatctatactaaaatcctggctctgcctcttgaaagctatgtagtttaggcacatagtcaaaatccagtttcc

SEQ ID NO: 695451 - DNA, 120 bp, Artificial Sequence
  ENSG00000188846_27 (sequence is synthesized)
tgggattcatgaatatgtaagtggtcactgattccccaggggtaggatgacaacaatcaagagacgaatagaggttggaaaggagtcatgaggggtgggaaactagcaggggcacatgga

SEQ ID NO: 695452 - DNA, 120 bp, Artificial Sequence
  ENSG00000188846_28 (sequence is synthesized)
agctagggaaagaattttgcttgagatcgtcaaagtgaggggaagagggtagtaagcaaaggagaaatgttatatggggttcggaggttttgtgtttgtaaatctggagtgatgggcatg

SEQ ID NO: 695453 - DNA, 120 bp, Artificial Sequence
  ENSG00000188846_29 (sequence is synthesized)
ttcaaatgcttctgggaaaggagctaataggagagaaacttagcccttcgaaaaacaggaagggatggatcctaggggagaggaggaaggattggctttagaggaaagatgtcctttacg

SEQ ID NO: 695454 - DNA, 120 bp, Artificial Sequence
  ENSG00000188846_30 (sequence is synthesized)
tgaggaaaaggaagaaaaggtgggtttagatactaaatctgtaggtttgctgttaggaaattaaggacttttcacctttatctctgaaatttctctggagttagcaaggcaaggtcatac

SEQ ID NO: 695455 - DNA, 120 bp, Artificial Sequence
  ENSG00000188846_31 (sequence is synthesized)
actgagaaggagggatgaggcagtgtagatttgcagacatacaggttgtaattccttatggaggaaaggggagagcacttttgtcagactgcctgtggctttgagagccctttggctaca

SEQ ID NO: 695456 - DNA, 120 bp, Artificial Sequence
  ENSG00000188846_32 (sequence is synthesized)
gtccatgaggtgctcagaggatgagaaagcttcagggtagaagcagtattcaagctgcacctagaaaacagtgcaatacagaacagtggaaattggaaattccaatcttggaatctctag

SEQ ID NO: 695457 - DNA, 120 bp, Artificial Sequence
  ENSG00000188846_33 (sequence is synthesized)
tggaatctctaggaaagtaactgaggcatacgatgcctgaaaaggagtagaaaataaaattaataaggtgggaccatatgataagagatttgaggccgggcactgtggctcacacctgta

SEQ ID NO: 695458 - DNA, 120 bp, Artificial Sequence
  ENSG00000188846_34 (sequence is synthesized)
ctcaaaaaaaagacttgagcaagggcgtaatcttcaggaaggtcagtctggtagcatagtgtggattgggttgggggatggggaaggagagcagaaaattattgaaatatccaggtgcat

SEQ ID NO: 695459 - DNA, 120 bp, Artificial Sequence
  ENSG00000188846_35 (sequence is synthesized)
aaaagtctactttgattatggagaactacacacttgttcagtcaccctcattggagacgggggatggcatacgaaaagaatgctgatttcaggctgggcacggtggctcatgcctttaat

SEQ ID NO: 695460 - DNA, 120 bp, Artificial Sequence
  ENSG00000188846_36 (sequence is synthesized)
agtcatattcaggtttaaattctgtcattcagcccaaactcattactttatgttacttatgggaacctcatctaaaaagcaaggatcctgatacctgcctcatattgtggcaaggatcaa

SEQ ID NO: 695461 - DNA, 120 bp, Artificial Sequence
  ENSG00000188846_37 (sequence is synthesized)
atgagtcaaataagatgcttgtgaaagtgaggacaggatctatcctcaacacctagtgcaattctttttacacattaggtacttagtaatttgggttgaattgtgttgaactaacctggc

SEQ ID NO: 695462 - DNA, 120 bp, Artificial Sequence
  ENSG00000188846_38 (sequence is synthesized)
ggtataggcaaaatttggaagtttggttttcagaaagtcttgacttcctcttatctctaagtaattggcatgtcctctaattcatattttcccccctcatctgttgggtgaaatactgtt

SEQ ID NO: 695463 - DNA, 120 bp, Artificial Sequence
  ENSG00000188846_39 (sequence is synthesized)
tatcctttagtactaaaattaaaagttacctcattcttctagctagctgatttttttttttaatctaggctaaatcatgaatacatttacatttaaataaaatattacagttgaaagtaa

SEQ ID NO: 695464 - DNA, 120 bp, Artificial Sequence
  ENSG00000188846_40 (sequence is synthesized)
agggtcctttcattatctccacttccaattccagtaccctgtgtaaaggaaaacatatacatcttgcagacattttttaatgtgtttgtaatataggtacataaaaatatatgtgcttgt

SEQ ID NO: 695465 - DNA, 120 bp, Artificial Sequence
  ENSG00000188846_41 (sequence is synthesized)
tttaagcaaatttcatactctgcaacttgccttttttcttaatacgttctggagatcttatctagtcagcctctaaattagagttcttcagaaaaccaatgggatggatgaatggactca

SEQ ID NO: 695466 - DNA, 120 bp, Artificial Sequence
  ENSG00000188846_42 (sequence is synthesized)
agagattgtggaaaccaagaagtcccacaaaataccatctgcaagctggagaaccaggaaagctgattgggataattcaaactgggtccagaggcctgagaactggaagggccagtggtg

SEQ ID NO: 695467 - DNA, 120 bp, Artificial Sequence
  ENSG00000188846_43 (sequence is synthesized)
taagtcctggtctgagaccaaaggcttgatcaagaatcaagagcatcaacaaccgagggcaggagaggatgggtttcccagattaaaaaagcaaattcacgcttcctcccccattttgtt

SEQ ID NO: 695468 - DNA, 120 bp, Artificial Sequence
  ENSG00000188846_44 (sequence is synthesized)
ctatttgaaccttccgtggataggatgatgcccacctgcattggtgaaggtcatctttactcagtctacccattcaaatgccaatctcttccagaggtaatctcacagatttagaaatgt

SEQ ID NO: 695469 - DNA, 120 bp, Artificial Sequence
  ENSG00000188846_45 (sequence is synthesized)
ttcgccagctagctgaacaatccttagcccagtcaagtgcacacataaccataacaattcttactaatctacctcattcttttttatcttctgcataataatccacaacatgaatgttca

SEQ ID NO: 695470 - DNA, 120 bp, Artificial Sequence
  ENSG00000188846_46 (sequence is synthesized)
cgtttgacctctattgatagacatttcggatgatgccaatttctttttctggtttttgttttttgtgtgtgtgtgttttttttttttttgagacgaggtcttgctctcgcccaggctgga

SEQ ID NO: 695471 - DNA, 90 bp, Artificial Sequence
  ENSG00000188846_47 (sequence is synthesized)
tagtagatggatgggcatttgaatgggtagactgagtgatcctgacctcgtgatccactccccagtctcccaaagtactgggattacagg

SEQ ID NO: 695472 - DNA, 120 bp, Artificial Sequence
  ENSG00000188846_48 (sequence is synthesized)
tgggattacaggcgtgagccacggcaccaggccctctttttctatttaaacagtgcttccgtgaatgtccttgtgtacacctccttctgtacacaatgatgtttatctgatgcacattgc

SEQ ID NO: 695473 - DNA, 120 bp, Artificial Sequence
  ENSG00000188846_49 (sequence is synthesized)
caatcagtgcacttgctggattgaagaatgtgagtgtttgtatcactctttcagtaggctgtaccaatttagacttgctctaccaatttagatttccatcagcagtaaacaaagacattc

SEQ ID NO: 695474 - DNA, 120 bp, Artificial Sequence
  ENSG00000188846_50 (sequence is synthesized)
ctgcctggcagtcttgaactcctgctattatctcttaaatttttgccagtgtgtgaaaagtagtatcttactttaacttgtattttcctggtccaatagtgcactaaatgcccgagttct

SEQ ID NO: 695475 - DNA, 120 bp, Artificial Sequence
  ENSG00000188846_51 (sequence is synthesized)
gtatttattctatttggatagccattagatagccattaagtccactcatagagttattttaaatgttttcctttagtttccaaccacattttcaaataaaatttagaattagcttgtcaa

SEQ ID NO: 695476 - DNA, 120 bp, Artificial Sequence
  ENSG00000188846_52 (sequence is synthesized)
cttctcgcctaacgccgccaacatggtgagtcttactgttgcgggctccggggccgtcgaccatgccgctcgacctccacctccgctgggaagctgaggcgccaaacggctcccagaggg

SEQ ID NO: 695477 - DNA, 120 bp, Artificial Sequence
  ENSG00000188846_53 (sequence is synthesized)
ttgttttggagtaaacaatacggaagattcagagccatcctgaagagggatttgcatcatagaagtagacagggattatttacttttaaaatgtcttgcctgcgcgtgatagctcatgcc

SEQ ID NO: 695478 - DNA, 120 bp, Artificial Sequence
  ENSG00000188846_54 (sequence is synthesized)
tgtaatcccagtactttgggaggccacggtgggagggtctcttgagcccaagtttcaagaccagcatgggcaacatggcgaaaacccccatctctacaaaaaataaaaaaaaaattcgtt

SEQ ID NO: 695479 - DNA, 90 bp, Artificial Sequence
  ENSG00000188846_55 (sequence is synthesized)
gtaggggggccttgggggtgctgagttgggaggatcgttttagcgaggtcgaggctgcagagagccgtgatcatgccactgcactccagc

SEQ ID NO: 695480 - DNA, 120 bp, Artificial Sequence
  ENSG00000188846_56 (sequence is synthesized)
ggtgagtcttactgttgcgggctccggggccgtcgaccatgccgctcgacctccacctccgctgggaagctgaggcgccaaacggctcccagagggtcccgggaagcgcatggtgagggt

SEQ ID NO: 695481 - DNA, 120 bp, Artificial Sequence
  ENSG00000188846_57 (sequence is synthesized)
catggtgagggtccccgggccggctgtgcagcggaatcgggcccttcccggactcgcgcccttcccggactcgccgctggcgagcgcgtggagggcccggcaggcctggcgcgccttggg

SEQ ID NO: 695482 - DNA, 120 bp, Artificial Sequence
  ENSG00000188846_58 (sequence is synthesized)
gcctccgccgctggagctggatggctgatgcggctcgtggtccgagagccttgtcctgccgtgtgggccttgcggacctgggagctggcgggcgttgggaaccgggcttaagctactgag

SEQ ID NO: 695483 - DNA, 120 bp, Artificial Sequence
  ENSG00000188846_59 (sequence is synthesized)
cggaaaattggtcgcgattgtagatgttattgatcagaacagggtaagtgtcacaactttttactaaacatggcagtggacatgtgccctgcagatggcaataatgaattgtctcgatgg

SEQ ID NO: 695484 - DNA, 120 bp, Artificial Sequence
  ENSG00000188846_60 (sequence is synthesized)
ctgtgtaagatgaggatgctatgggtagtcgctttattttaccattgaggaaacaggtaatggtacgggttttaagcacagcctgaagttagctattagtattgaatttcagtattagcc

SEQ ID NO: 695485 - DNA, 120 bp, Artificial Sequence
  ENSG00000188846_61 (sequence is synthesized)
agtttagaacagatccagcacgtagaaagcacttttgtatttactgctgtgtatttgaaacaagcaaactaaggagttgaccactgactataaatcagcagggatcagagtcctaaagtt

SEQ ID NO: 695486 - DNA, 120 bp, Artificial Sequence
  ENSG00000188846_62 (sequence is synthesized)
gcctgtaaattacatgtggttggtttctatggggtactatatagtttaagaaggagcatttaatgatgtggagaaatgtttgtgttgagcaaaagacatacatatatataacccagatag

SEQ ID NO: 695487 - DNA, 120 bp, Artificial Sequence
  ENSG00000188846_63 (sequence is synthesized)
gacaatccttgtcttttctgagcaatttattaaaatagtagtgtgggtttgatggccctgaacggataagtaatgttacagaaccatctgaccattttaattgctgttagattttgcact

SEQ ID NO: 695488 - DNA, 120 bp, Artificial Sequence
  ENSG00000188848_0 (sequence is synthesized)
gtttcggaagccggaccccgcccgcagccgcagaagcctcgagtccacatctgggtctctaaagtctcgccgtagccagatcccggatccccaccttcttcaccagttcccgggcgtcct

SEQ ID NO: 695489 - DNA, 120 bp, Artificial Sequence
  ENSG00000188848_1 (sequence is synthesized)
ccaggcattggcgaggcagcctgtcaatcaggagctcgggcggcagccccccgcgcgggggctcggcgatgccagcctcagcgacaggcggcggcggcggcggccacggcacagacacac

SEQ ID NO: 695490 - DNA, 80 bp, Artificial Sequence
  ENSG00000188848_2 (sequence is synthesized)
gcggaggcaccctcggagcccggcgcccggcggggaggggacgtgctccgagggaccggccccgaggcgccggatggagg

SEQ ID NO: 695491 - DNA, 120 bp, Artificial Sequence
  ENSG00000188848_3 (sequence is synthesized)
gaggaagagatgcagccggcagaggaggggcccagcgtccccaaaatctacaagcagcgcagcccctacagcgtcctcaagacgttccccagcaagagaccggcgctggccaagcgctac

SEQ ID NO: 695492 - DNA, 120 bp, Artificial Sequence
  ENSG00000188848_4 (sequence is synthesized)
caagagaccggcgctggccaagcgctacgagcgacccaccctggtggagctgccgcacgtgcgggcgcccccgccgcccccgccgcccttcgcgccgcacgccgccgtctccatcagcag

SEQ ID NO: 695493 - DNA, 120 bp, Artificial Sequence
  ENSG00000188848_5 (sequence is synthesized)
agttccaggcgcagagctcctacccccccgggcccggccgggccgccgccgccgcttcgtcgtcgtcgccgtcctgcacgcccgccacatcccagggccacttgaggactccggcgcagc

SEQ ID NO: 695494 - DNA, 120 bp, Artificial Sequence
  ENSG00000188848_6 (sequence is synthesized)
gcgtcccccgccgcctcctcgtcgtcttcgttcgccgctgtcgtcaggtatggcccaggcgcggcggcggccgccggcaccggcggcacgggtagcgacagcgccagcctggagctcagc

SEQ ID NO: 695495 - DNA, 120 bp, Artificial Sequence
  ENSG00000188848_7 (sequence is synthesized)
gcagagagtcgaatgatcttggatgcctttgcccagcagtgcagtcgagttcttagcctcttaaattgtggaggaaaactcctggactccaaccattctcagtccatgatttcttgcgta

SEQ ID NO: 695496 - DNA, 120 bp, Artificial Sequence
  ENSG00000188848_8 (sequence is synthesized)
aagcaggaaggctcaagttacaacgaaagacaggagcactgtcacattgggaaaggggtccacagtcagacctcagacaatgtagacatagagatgcagtatatgcaaaggaaacaacaa

SEQ ID NO: 695497 - DNA, 120 bp, Artificial Sequence
  ENSG00000188848_9 (sequence is synthesized)
acttctgcctttttgagggttttcactgactctctacaaaattacctgctctcgggaagctttccaactccaaacccctcgtcagccagtgaatatggccatctggccgacgtggatcct

SEQ ID NO: 695498 - DNA, 120 bp, Artificial Sequence
  ENSG00000188848_10 (sequence is synthesized)
ctgtcaacctctcctgtgcatacattaggtggctggacttccccagcaacgtccgaatcccatggccacccatcttcatctacactgccagaagaggaggaggaggaggacgaggaaggc

SEQ ID NO: 695499 - DNA, 120 bp, Artificial Sequence
  ENSG00000188848_11 (sequence is synthesized)
tattgtcctcgatgccaagagctggagcaggaggttatttcactgcaacaagaaaatgaagagctcagaaggaaattagagagcatcccagtgccctgccagaccgttttagattacttg

SEQ ID NO: 695500 - DNA, 120 bp, Artificial Sequence
  ENSG00000188848_12 (sequence is synthesized)
aagatggttctgcagcaccacaaccaactcctgataccacagccagctgaccagccgacagagggaagcaagcagctgttgaacaactatcctgtctacataacgagcaaacagtgggat

SEQ ID NO: 695501 - DNA, 120 bp, Artificial Sequence
  ENSG00000188848_13 (sequence is synthesized)
gaggctgtaaattcttcaaagaaagatgggagacggctccttcgatacctcatcagatttgttttcacaaccgatgagcttaagtactcatgcggccttgggaaaaggaaaaggtcagtg

SEQ ID NO: 695502 - DNA, 120 bp, Artificial Sequence
  ENSG00000188848_14 (sequence is synthesized)
cagtcaggagagacaggtcccgaaagacgccctctggatccagttaaagtaacatgcctccgagaattcattaggatgcattgtacctccaaccccgattggtggatgccctcggaagag

SEQ ID NO: 695503 - DNA, 120 bp, Artificial Sequence
  ENSG00000188848_15 (sequence is synthesized)
cagataaacaaagtgttcagcgacgctgtcggtcacgcccgacaggggcgggcggtggggactttcctgcacaacggtggctcattttatgaagggatcgatcaccaggcttctcaggat

SEQ ID NO: 695504 - DNA, 120 bp, Artificial Sequence
  ENSG00000188848_16 (sequence is synthesized)
gaagtcttcaataaaagttcccaggatggatctggggattagtggacagaatcttcctgttgtagcagctggtcctctcaagagttccaattgtgaatgtcctgttcctgtcacctgaga

SEQ ID NO: 695505 - DNA, 120 bp, Artificial Sequence
  ENSG00000188848_17 (sequence is synthesized)
gtccaaagcctgtcattctgccatagtctacacattctcagctgccacagtacccaaatagaaatccattttagggttgtttgggaagtctgtggcacctacaacagacttttggaatat

SEQ ID NO: 695506 - DNA, 120 bp, Artificial Sequence
  ENSG00000188848_18 (sequence is synthesized)
tatattataaaaagaaaaaactacatctgatttttaaatgattactagctagatcatgagggtgaaaaaataggtgagctcctagttacctttctgaaatcttcaaactctgctacctgg

SEQ ID NO: 695507 - DNA, 120 bp, Artificial Sequence
  ENSG00000188848_19 (sequence is synthesized)
gcagagatagtccccaaggtaggctggggtagtgtttctgcccatgggagaaggtggagacatggagttgtgttaagggacaagaagcaaacattctcttaattcaaataagttgtcttt

SEQ ID NO: 695508 - DNA, 120 bp, Artificial Sequence
  ENSG00000188848_20 (sequence is synthesized)
atgttttccaaagacttgacttcatatttctcggcaaagacataggatagatgacatcatataccattttgacattaataatgtctattactaaaaggaaaccagagaacagaggcaaca

SEQ ID NO: 695509 - DNA, 120 bp, Artificial Sequence
  ENSG00000188848_21 (sequence is synthesized)
tctgcagacagtgattaattacaggtcaactgtttttctgttgtttaaaaaccactgtgttgatcaagaaggcactatttgatctctggagtttacaaacagtagtcatttttcattgtt

SEQ ID NO: 695510 - DNA, 120 bp, Artificial Sequence
  ENSG00000188848_22 (sequence is synthesized)
agtcaagaaacatccaaagatccaaaaccattttcaaatgctcagttttgtaggttaataaatccgcagtttccatagccttaaatcaggctttgttgacacaatgccaaagtgatgggt

SEQ ID NO: 695511 - DNA, 120 bp, Artificial Sequence
  ENSG00000188848_23 (sequence is synthesized)
agaacaatgaaaatttaaagcaattagttgtttggtgcactgaagaccaaacaagtggtgtgactgatggtattcgctgaattgactagatgttctggcattgtatacacacagcttcaa

SEQ ID NO: 695512 - DNA, 120 bp, Artificial Sequence
  ENSG00000188848_24 (sequence is synthesized)
ggcgattctgacaactatgcaatgggcttgtcagtaattgctctgaaatttgagggtctttctctgctgagctgatctttagaatttgtatgaaacttgtttcccattgtccttgatgaa

SEQ ID NO: 695513 - DNA, 120 bp, Artificial Sequence
  ENSG00000188848_25 (sequence is synthesized)
aacatttcatcccctccgtgcctcctttaccccaatgtaccccttagctatggctaagtcagcactgtgccgctatcccctggttaatttgttgagttccatatgtgaaattagtggtat

SEQ ID NO: 695514 - DNA, 120 bp, Artificial Sequence
  ENSG00000188848_26 (sequence is synthesized)
ctttggaaactttccatattggcaaatgctatagaggtgctagagtcatcatttctgagggcttcctgtttggactcaggagaggctttctttaccaaactagtccagattactacattc

SEQ ID NO: 695515 - DNA, 120 bp, Artificial Sequence
  ENSG00000188848_27 (sequence is synthesized)
tttgtagagcaaagggctaaatggacagcgtttattgaaggctactaatgtcatctacagacatgaccaagggtttttgaaaattggttggagattcaggttaatgagcatccattgata

SEQ ID NO: 695516 - DNA, 120 bp, Artificial Sequence
  ENSG00000188848_28 (sequence is synthesized)
aagggtttttgggctatttttgtcaacataaactcataaattgtcctttagatttaatatttagtttgtattcactatatacaaagtcctagaaacaggtctttctgtagcttttgttta

SEQ ID NO: 695517 - DNA, 120 bp, Artificial Sequence
  ENSG00000188848_29 (sequence is synthesized)
ttagcttttttgtattactagaattcatccattgaaaagtttaatgtttatggaggtggtcatctgtcagatctgctcaatgatgtagtgggcactaatatttcaatcctgttttgagaa

SEQ ID NO: 695518 - DNA, 120 bp, Artificial Sequence
  ENSG00000188848_30 (sequence is synthesized)
aattaactaaaatttgtcatatcattcaatggaatagggagaaccaatattcaattctatttggggcaaattagctaaaatttggaagtaaaagaaatgatatgggcaaatgccatgttc

SEQ ID NO: 695519 - DNA, 120 bp, Artificial Sequence
  ENSG00000188848_31 (sequence is synthesized)
ttacggcagccatgagaccagtctctttggctctccaaggaagaaagatacctcttaaagcattttttagaggtccgagaagtcagtgtctgtcttataagattctttgacaacatgaca

SEQ ID NO: 695520 - DNA, 120 bp, Artificial Sequence
  ENSG00000188848_32 (sequence is synthesized)
tcttcgctagaagaaaaacaccaccatagcctcatctgtttttccatcttaccttaatttttcattggccttaagttgtccttactgctgaatacatcgttctgtttttctaaagcaaca

SEQ ID NO: 695521 - DNA, 120 bp, Artificial Sequence
  ENSG00000188848_33 (sequence is synthesized)
atatttgatcactgcttttaagaaaaacagactagcccttcttgtttttctggaagtttgagagtcctgaatatttcttcatatccaaatatcatcttggagccctatcgtgctggtctt

SEQ ID NO: 695522 - DNA, 120 bp, Artificial Sequence
  ENSG00000188848_34 (sequence is synthesized)
cgctgaggctgatgagagcactttctgcacccctgctccatggccgtacatgacaacgcacctgcaccactgctgcaagggcggggggcagcagcctgtgttttggctgtcactgttacc

SEQ ID NO: 695523 - DNA, 120 bp, Artificial Sequence
  ENSG00000188848_35 (sequence is synthesized)
tgtttctccatccacagattctgaatgttgagactaattgttgggcatctcttttgcacaaggctgacagactccatactcagcatcgcacagccagttctaactcctctgctgggtctc

SEQ ID NO: 695524 - DNA, 120 bp, Artificial Sequence
  ENSG00000188848_36 (sequence is synthesized)
ggacctacagcttttgcctgagtgaaatgttcctacgacttttgctcctgagtgagatattccattgtacttctactgtttgtgtatctgctgggttcctttagccaagcctagcgtctg

SEQ ID NO: 695525 - DNA, 120 bp, Artificial Sequence
  ENSG00000188848_37 (sequence is synthesized)
acgcaggcactagccgccactgaggccgtgatacagcatcactgtggacactgctggctcctctccttgggacatatccacactgccccttgagcttcacctttaaggctggtatgtacg

SEQ ID NO: 695526 - DNA, 120 bp, Artificial Sequence
  ENSG00000188848_38 (sequence is synthesized)
taagttcacggtggtcgtctgcatggtctcctcttgtttaaatcaggaccaacaaaggatgttcatttgtattttggcaaggcccattgggcctctgtgtagccaggttaaaagctcact

SEQ ID NO: 695527 - DNA, 120 bp, Artificial Sequence
  ENSG00000188848_39 (sequence is synthesized)
cactaggatcggatgctgtcattgctctgtgagcctttcagttgaaatccttggagacttgaaggtgttgcttattattttgatttgattttctgcatctttatctggcaaatggacaga

SEQ ID NO: 695528 - DNA, 120 bp, Artificial Sequence
  ENSG00000188848_40 (sequence is synthesized)
ttgctctcacaagaaacttagtcatgtcagcttttagagtccttcttgagtcatgttagcattggtagtgtaaaatagattgagttaaaacagctcaggatgcagctgtgcccccactta

SEQ ID NO: 695529 - DNA, 120 bp, Artificial Sequence
  ENSG00000188848_41 (sequence is synthesized)
attggtgagaggaggaggtcacggggctggcttgacaacaaagactaaatgtggcttttttgtcggtgactaggtgtggtccataagcagaagagccatacctacaaaaagtgacaactg

SEQ ID NO: 695530 - DNA, 120 bp, Artificial Sequence
  ENSG00000188848_42 (sequence is synthesized)
tcctgtgttttccaaattaaaatcttgttacaaagatcatgccggcttttcgcagtgagttgaagccccaagctcagttccagccaggctcaggatgaccctcaaatgatatgtattgga

SEQ ID NO: 695531 - DNA, 120 bp, Artificial Sequence
  ENSG00000188848_43 (sequence is synthesized)
tagtgtaggtcaggagcctgtggaggggaccagtattttgcaagcagttactaaagtcacatttctcactgactcttgacggtgcattgttcaaaatctcatggcttaaccttagtgtta

SEQ ID NO: 695532 - DNA, 120 bp, Artificial Sequence
  ENSG00000188848_44 (sequence is synthesized)
aatgctttcaagaaaaactgtaaccatttcaattttacaagtactttctcattttacttgaacattttacaagtactttctgtatttacttgtaaatatttcctctagcccttgaacccg

SEQ ID NO: 695533 - DNA, 120 bp, Artificial Sequence
  ENSG00000188848_45 (sequence is synthesized)
cgcatcacttttttggttttcctcattccaccacagcatttaggtgaccgttaccatttatgtttcattaagcttcactaggaatgtaaggataatattagagcatttgcagaaaattgt

SEQ ID NO: 695534 - DNA, 120 bp, Artificial Sequence
  ENSG00000188848_46 (sequence is synthesized)
tatctccttttgtaggggattcgagacatatttgtagctacttcacggctgtagagttagtgggtgatcgggtattctgcattgttccttatccctttgtcagtgacagacacattgaca

SEQ ID NO: 695535 - DNA, 120 bp, Artificial Sequence
  ENSG00000188848_47 (sequence is synthesized)
taagagattcctacaggattataaggagagataaattattaaccatttttttacttgatccaactactccatgtcccatcaactagtggtaactgatgttgataggattttttttaagtc

SEQ ID NO: 695536 - DNA, 120 bp, Artificial Sequence
  ENSG00000188848_48 (sequence is synthesized)
cagtaactattcttgcagtatcagatgtttaccccaaattaggcaataacccagacttcgaatctgtaggtttatgattcctacattcccctgccgctctcaatggcttgttgcctccct

SEQ ID NO: 695537 - DNA, 120 bp, Artificial Sequence
  ENSG00000188848_49 (sequence is synthesized)
tctgttgctctcagaaaacagatggagatcaggtaaagatgaaacgtgcactatatgttcagaaaagcaaacatccattgtcctcatttagattccatccttcaatttatgctctagaac

SEQ ID NO: 695538 - DNA, 120 bp, Artificial Sequence
  ENSG00000188848_50 (sequence is synthesized)
ctaaacctaatacccattgactacctcctgagtttcttaggtttcaattatttttttgaaatgtcatccatggataatagcttcaattttaggaaagatttaaatgtataactttcctca

SEQ ID NO: 695539 - DNA, 120 bp, Artificial Sequence
  ENSG00000188848_51 (sequence is synthesized)
ttcagtgctgtgtcatttcacagtacagatctgcgttaatttttgacagctcatatatacagatttttagaaatgtaatagaaaatgattttgcacatatggtgcaagtcttgctggtgt

SEQ ID NO: 695540 - DNA, 120 bp, Artificial Sequence
  ENSG00000188848_52 (sequence is synthesized)
atgtttaatgtggcaacacgtgccagaactgtttggcaaaacatgtcaaatggagtgcttgagtcagaactctaatgtaaatgtgtctaaacagcagtatgtatcattatgatgtatttt

SEQ ID NO: 695541 - DNA, 120 bp, Artificial Sequence
  ENSG00000188848_53 (sequence is synthesized)
tgtaaacatagtgatggctgctttcagtcatgtaagtgctggataaaaataaccacttcagttggagtaatgtaggaaaacgtcacccagcagatgggtagtcctctgcaaagttacact

SEQ ID NO: 695542 - DNA, 120 bp, Artificial Sequence
  ENSG00000188848_54 (sequence is synthesized)
gtcagccagtggcactggttcttttatttatgttgggtttttgttttttttttagaggagagtgaagaattgacatcagacaacatggagtgcaaaaataataacccatcaatatttgcc

SEQ ID NO: 695543 - DNA, 120 bp, Artificial Sequence
  ENSG00000188848_55 (sequence is synthesized)
ttctaaatgtaaaatgtaaaagtttaactgatctgtgtacacattagagaccactttcacacgccacaatatgttcagttgcaggttaacactgagaggttgagacttccctcatctgat

SEQ ID NO: 695544 - DNA, 120 bp, Artificial Sequence
  ENSG00000188848_56 (sequence is synthesized)
gaccagcttggttaatttgacttctgaaggcactaaattaccaagtatttgcagtaatggggaccggattaattttcctcacaattctctatagctgtctgatataagggctgtgttttt

SEQ ID NO: 695545 - DNA, 120 bp, Artificial Sequence
  ENSG00000188848_57 (sequence is synthesized)
attgaatcacagatcctcaaattacagtgaaagcatgtcttgctagtaagactcatttgaaaacctctttattcttggaataattgggccagtacaagtggccagatgtatcctggccac

SEQ ID NO: 695546 - DNA, 120 bp, Artificial Sequence
  ENSG00000188848_58 (sequence is synthesized)
attggaaaactatttgggcccgttcagaaccacttaactgcaacaacagtagtaactatagttaatatctatctattgagttattgtgtgacagttacttggataagtactttaatgcat

SEQ ID NO: 695547 - DNA, 120 bp, Artificial Sequence
  ENSG00000188848_59 (sequence is synthesized)
tctcattttaatcctcacagctaccctatgaggctgttactgttcttatccccattgtattgataaggaaactgcccagggtactcagctaagaagaggattgctttgggcataggaagc

SEQ ID NO: 695548 - DNA, 120 bp, Artificial Sequence
  ENSG00000188848_60 (sequence is synthesized)
agaatgacgagttcagtcttcctcagtagttggagcacagttctcaaagcccatcaacactttggaatggatttgttgttttatttatgccatcaagggagagttgatatttgtgtattg

SEQ ID NO: 695549 - DNA, 120 bp, Artificial Sequence
  ENSG00000188848_61 (sequence is synthesized)
ctaaaaactactaaagtatgtcgatgcttaggtaggaacatacaaaccatatatcctctgggatctgcccaggtttctgtataaggcttgacctacgtaagatcctatgatgaagaccag

SEQ ID NO: 695550 - DNA, 120 bp, Artificial Sequence
  ENSG00000188848_62 (sequence is synthesized)
aaaactttttttaaaagtaggtaaattaaaattaaaatcacgagtttgttcacatttgtcccataggttcctagtgcaaaaatgcagggagataaaagcaaacatttgaactcagtgaag

SEQ ID NO: 695551 - DNA, 120 bp, Artificial Sequence
  ENSG00000188848_63 (sequence is synthesized)
tgagagtctttgggaactcctagatgttagaaatagcaccggggcatcaggtagccaacgttcaattcacttttcacgtttgtgtctttgtagctttagagctgatgagtctgattggtt

SEQ ID NO: 695552 - DNA, 120 bp, Artificial Sequence
  ENSG00000188848_64 (sequence is synthesized)
tggaagagagagttttaatttatgatgtcactgtgagaactgttgtgaaaattttgtaagaaaatacagtaatctgttgattttttcctgtagttttggctttcacatccctttggctgt

SEQ ID NO: 695553 - DNA, 120 bp, Artificial Sequence
  ENSG00000188848_65 (sequence is synthesized)
gtttaagttcaagagcatgccaaggccatgagggtcctggcttgcacttcttgggaacagggcatgctagaggtgggtcatgaagctttcaaggtcactgttccagcccgaccctgcgca

SEQ ID NO: 695554 - DNA, 120 bp, Artificial Sequence
  ENSG00000188848_66 (sequence is synthesized)
atttaggcattgcctttatgtctctcctctctggaacttcatgtagcagcctaacaccggggccgagttgcctttactctattttctatgatgaatacttgtggagaaactgtgacaaat

SEQ ID NO: 695555 - DNA, 120 bp, Artificial Sequence
  ENSG00000188848_67 (sequence is synthesized)
ccattgatcctgatatttttattgttggagtcttgttgattctctatgaataatttctatttgattgtactgtgtagagttaatacccactagggatatgttaataaagctacaaatgca

SEQ ID NO: 695556 - DNA, 120 bp, Artificial Sequence
  ENSG00000188848_68 (sequence is synthesized)
tagtgtaatatagaatagcaagatttttttgtgaacaatttatatagaagagtaagttgttttttaagtgttaggctcatttcttttagaaacttaaaatgttataaaagttttttaaac

SEQ ID NO: 695557 - DNA, 120 bp, Artificial Sequence
  ENSG00000188848_69 (sequence is synthesized)
attcaatatttttaattataagagacatttgttactagagccaattatttcaggtgttctaattggagtgttgattttattacctcatatacctctagaatgccacgtgttctgttgggg

SEQ ID NO: 695558 - DNA, 120 bp, Artificial Sequence
  ENSG00000188848_70 (sequence is synthesized)
ataaaattgcacaataaatgtcaagtctctgttaagtgttttaacttggtttttgcatctttctaattcattgtaaatacttttctgtttctttgaatacataacttttctctccctgaa

SEQ ID NO: 695559 - DNA, 120 bp, Artificial Sequence
  ENSG00000188848_71 (sequence is synthesized)
gcgatgctcggggaaagcaggaccccaaagccccgtaaacaccgcgcgaccacccgggccaagatcttcaagaggttcttttcagaaggatcggagagcaattcccgattggtagaagaa

SEQ ID NO: 695560 - DNA, 80 bp, Artificial Sequence
  ENSG00000188859_0 (sequence is synthesized)
gtcctgtgctgctccagccgttggggctctccaccccgggccacagcctcctggcgccccccgggccgaggcagccgggc

SEQ ID NO: 695561 - DNA, 80 bp, Artificial Sequence
  ENSG00000188859_1 (sequence is synthesized)
cggcggctgctgctgctgccgccgcggaggcagacagaccgggcgctgccaccgccgccctcccccggctccatgccgcc

SEQ ID NO: 695562 - DNA, 80 bp, Artificial Sequence
  ENSG00000188859_2 (sequence is synthesized)
cctccctgccctccgcccgggcgctggagccggcgagggcacccgccgcctcctaggagtgcaccctccgcgcgccctgc

SEQ ID NO: 695563 - DNA, 120 bp, Artificial Sequence
  ENSG00000188859_3 (sequence is synthesized)
cggagcgagggggcgggcgtgggcggacgtcggggcagcggggaccccgcgcggctgcaagaggagggggcttccccaaggatgcccggcggctccccgctcctaggtgcgagctgagtc

SEQ ID NO: 695564 - DNA, 80 bp, Artificial Sequence
  ENSG00000188859_4 (sequence is synthesized)
cggctgcccgcgcgggcccccgcgctgccccacgccgcgccgtgccggcaccgggctgcaggatgggctgtatccaaagc

SEQ ID NO: 695565 - DNA, 120 bp, Artificial Sequence
  ENSG00000188859_5 (sequence is synthesized)
tccaaagcatcacctgcaaggcgcggatccggcgcgagaacatcgtggtgtacgatgtgtgcgccaccatcgaccagtgccccacgcgcatcgaggagacctcgcccatcgtcctgcgct

SEQ ID NO: 695566 - DNA, 120 bp, Artificial Sequence
  ENSG00000188859_6 (sequence is synthesized)
catgccccccatcccccgccacgagacctgggtggtgggctggattcaggcgtgcaatcagatggagttcttcaacacctacagcgacctgggcatgtcaagctgggaactgcctgactt

SEQ ID NO: 695567 - DNA, 120 bp, Artificial Sequence
  ENSG00000188859_7 (sequence is synthesized)
gagggaagggagagtaaaagccatcagtgactcagatggggtgagctacccttggtacgggaacaccacagaaactgtgaccctggttggccccaccaacaagatctccaggttctccgt

SEQ ID NO: 695568 - DNA, 120 bp, Artificial Sequence
  ENSG00000188859_8 (sequence is synthesized)
cagcatgaatgacaacttctaccccagtgtgacatgggcagtgcctgtgagtgacagcaatgtgccactgctcacaagaatcaagagagaccaaagtttcacgacctggctggtggccat

SEQ ID NO: 695569 - DNA, 120 bp, Artificial Sequence
  ENSG00000188859_9 (sequence is synthesized)
gaacaccaccacaaaggagaagatcattctgcagaccatcaagtggaggatgagggtggacattgaagtggaccctcttcagctcttggggcagcgggcccggctggtgggcaggactca

SEQ ID NO: 695570 - DNA, 120 bp, Artificial Sequence
  ENSG00000188859_10 (sequence is synthesized)
gcaggagcagccccggatcctgagccggatggaacccatcccccctaatgcactagtgaaacccaatgccaatgatgcccaggtcctcatgtggaggcccaagcgggggccacctctggt

SEQ ID NO: 695571 - DNA, 120 bp, Artificial Sequence
  ENSG00000188859_11 (sequence is synthesized)
tgtgatccctcctaagtagaagcagactggcctgactgtgtgtggatcacacgcctctgagacatgcagtgagggtgccaggggtggcaggagccaaacagagtttctgagccaaagcag

SEQ ID NO: 695572 - DNA, 120 bp, Artificial Sequence
  ENSG00000188859_12 (sequence is synthesized)
acctctcggtttgccagcctttgcagccacttttgaagagtagggctgctccttgggtggtagaaccataatccttaggaaaaatcccttcctcttaggaataaagaaatcactgatttg

SEQ ID NO: 695573 - DNA, 120 bp, Artificial Sequence
  ENSG00000188859_13 (sequence is synthesized)
tgcaggggatggaaacgaaattaaacagtgcctgtggcaaatgctgcttcccagccaattagaagtaggagtgaaaacatccacaccaggtggtctcctagtaggacaaggaaagcccag

SEQ ID NO: 695574 - DNA, 120 bp, Artificial Sequence
  ENSG00000188859_14 (sequence is synthesized)
caagcacaaccacatggcagagactgagaaggaggaagtgagcaatggctggcggctccagaagctgaatccctggacagctgatttcccattaaaatgtgtgccatcctgcctacctcc

SEQ ID NO: 695575 - DNA, 120 bp, Artificial Sequence
  ENSG00000188859_15 (sequence is synthesized)
tcgccttcctcccgtcccgtgaccagtccctcctacccaccctccacgagccatgtggcacttgccctgggctgattgggctgcctgcttggcccatggggagctgtgttaaagtgagag

SEQ ID NO: 695576 - DNA, 120 bp, Artificial Sequence
  ENSG00000188859_16 (sequence is synthesized)
ttgtgcctgctgtatctttttgtgtgtagaaagatggggttcattcagatcccaagtcctttccccaaccctcaaagtgaagcctcctagggatgaagagctggtcagcctggactttaa

SEQ ID NO: 695577 - DNA, 120 bp, Artificial Sequence
  ENSG00000188859_17 (sequence is synthesized)
atacctaatgtggcccagccttggttcccaaaccctgccttccctccctatgcttttgggtgggaaacgggggatttgtatctcccttcctcctccttctccatgtgggtggcctctcta

SEQ ID NO: 695578 - DNA, 120 bp, Artificial Sequence
  ENSG00000188859_18 (sequence is synthesized)
ggtttctctgtgttctctgatccttggagagccagagccaaggcagtcatcttgttcccccttccacggccaggctgggtgccttcaggtgaccaggggcagagtgtaagtcaccaggtt

SEQ ID NO: 695579 - DNA, 120 bp, Artificial Sequence
  ENSG00000188859_19 (sequence is synthesized)
caatggggtgaggggagaaccaccttaagagggaaaaaatggtgtgcattggtttatttattggtttatttattggcttgcttactgatgtatttatttgtatttattatacaacacaaa

SEQ ID NO: 695580 - DNA, 120 bp, Artificial Sequence
  ENSG00000188859_20 (sequence is synthesized)
atccatttccattttttaagcatcagccccagaatttgtcttcctgggcccatagagcacagcgaattatttctctttgaagcttcagaatagagagggaaatttttctccttacgccca

SEQ ID NO: 695581 - DNA, 120 bp, Artificial Sequence
  ENSG00000188859_21 (sequence is synthesized)
aacacctccacctcagccacattttcaaccagacatgggattagaaatcaccagctaacaaggctgtaaagtcacacaaatcagcagaggcttgactgtctagatagccctcagaatccg

SEQ ID NO: 695582 - DNA, 120 bp, Artificial Sequence
  ENSG00000188859_22 (sequence is synthesized)
caaaacttctcattctgctctgatgtagtattctaacatcagatgcacgttagaatcatctgaggagcttaaaaaatatccatgcctggtcccctgcccaaaccaattatagcatcgaag

SEQ ID NO: 695583 - DNA, 120 bp, Artificial Sequence
  ENSG00000188859_23 (sequence is synthesized)
ggtagatcctgggcatcggagttttttaagttacccagatgactctaatgtgaaaatagggttggaaagttctagtatcacctctcccttgcccctccccacccagattctttcatctct

SEQ ID NO: 695584 - DNA, 120 bp, Artificial Sequence
  ENSG00000188859_24 (sequence is synthesized)
acttcccaagctttctctggagtcctcttcccgttcctccagccccttctcctctctgcaccttccccatcagctcagccaaccatagcagatccctggagagggggcaggtcccatgag

SEQ ID NO: 695585 - DNA, 120 bp, Artificial Sequence
  ENSG00000188859_25 (sequence is synthesized)
tggtactctgaggctggttcctgcatccagcctgcgggctgctcccaaacaatttccagcttttctaggagcagaaacctactctctgcaggattctctgttcacctgcaccttctccag

SEQ ID NO: 695586 - DNA, 120 bp, Artificial Sequence
  ENSG00000188859_26 (sequence is synthesized)
gttcccaaactccaaaagtttaaagggcactttggcgacatttctgtctccaagccccagtcttgatggtatggcccatgtaagtcttataacccaagccttggccatttctgcagagcc

SEQ ID NO: 695587 - DNA, 120 bp, Artificial Sequence
  ENSG00000188859_27 (sequence is synthesized)
acctgagttgaatgaggatctactgttaacagagaaaggggtcacagtgctcccccagcaagtcctttttccaacaaccaacctcctcagccatctaggatttgggtccacaatgcagca

SEQ ID NO: 695588 - DNA, 120 bp, Artificial Sequence
  ENSG00000188859_28 (sequence is synthesized)
gctactgtgcattcaaatcctagatggctgagaagaggcatctcacccttcacatctacaagatctccactgctgggtatgagtaaatgtgtgtgtgagtgcgtgtacacgtacatgtgc

SEQ ID NO: 695589 - DNA, 120 bp, Artificial Sequence
  ENSG00000188859_29 (sequence is synthesized)
acacactgtctacatacaaaccatctagatctatagagatgccaggcttcactttacatgtgattacattctacatgaaaacagttgagggcttttgttatctttcacttgatggagttt

SEQ ID NO: 695590 - DNA, 120 bp, Artificial Sequence
  ENSG00000188859_30 (sequence is synthesized)
ttgatggagtttcactgtattatgttcatgatgggccccagtgaactccatatcaggtatatacatagaatgtataatatatacaaactgttagacacactacacacacacacacacaca

SEQ ID NO: 695591 - DNA, 120 bp, Artificial Sequence
  ENSG00000188859_31 (sequence is synthesized)
cacacaaagcctagggaaacctgtgatgtgggtaagttcattttgccatcccatctcctccatctaagtaatttcccggggcaagcattgtttcacacactcccctcagctgcccagcca

SEQ ID NO: 695592 - DNA, 120 bp, Artificial Sequence
  ENSG00000188859_32 (sequence is synthesized)
ttccctctccagcgtcccataccaccaagccttctttccccatcagtccaaatgtccctgccctatgtcccatctctcagggtcctactctctgataggtgacagttcagtcagtgggtg

SEQ ID NO: 695593 - DNA, 120 bp, Artificial Sequence
  ENSG00000188859_33 (sequence is synthesized)
ctaaagagtcgagtgttacccttcccaggtgacatttacattttaataggggctacagataatgccttaatcagaaagagtggctgtagtggtgggaatttcaggcccagaagtgggcca

SEQ ID NO: 695594 - DNA, 120 bp, Artificial Sequence
  ENSG00000188859_34 (sequence is synthesized)
gtaagggagattcttttatatcaggagggcattttagagcccccgagtcatacctgtctgtaagcgcagcccttcataagtgcatgagcacaagcaagcacacttgcctacattataccc

SEQ ID NO: 695595 - DNA, 89 bp, Artificial Sequence
  ENSG00000188859_35 (sequence is synthesized)
tgcatgagcacaagcaagcacacttgcctacattataccctccataattttgagatacctcccttgcattggccctatctttaaaaatg

SEQ ID NO: 695596 - DNA, 120 bp, Artificial Sequence
  ENSG00000188859_36 (sequence is synthesized)
acgtagcctattttttcaccggctgccagccatctggcccaccccaccctgttcaatttcccttctgctctttatcttttcagctatgactgactatatcagttaatttacttgtacgtg

SEQ ID NO: 695597 - DNA, 120 bp, Artificial Sequence
  ENSG00000188859_37 (sequence is synthesized)
tcctctctgctgtctccttaccctgctcccctacaccatgtatttccttcctttaccatttcctccttggaattgtgctgtgtttcgttgtcctggaggacagaagagcaggttaaggca

SEQ ID NO: 695598 - DNA, 120 bp, Artificial Sequence
  ENSG00000188859_38 (sequence is synthesized)
tgagcatgtgtgtatcactttgaagaaagagaaaccaggtattctgctacagtttggagaaaaacccaatgaaggaagaaatgaaagctggctctgcagagtgccttaaaaatgacttta

SEQ ID NO: 695599 - DNA, 120 bp, Artificial Sequence
  ENSG00000188859_39 (sequence is synthesized)
attaggaaattctgagttgtcagtcttcagatgttacataaactcaaacagatgttgcatttcacttctctgggattaaaaaaagttaaatacagtgtgtattcaacaacaacaacaaaa

SEQ ID NO: 695600 - DNA, 120 bp, Artificial Sequence
  ENSG00000188859_40 (sequence is synthesized)
gtaagacagactcctgctgtctgactggagggtgctggggaaatgggtggtgaaagaatgggtgatggggagaggaaagaataaggttttatgacacattaatacttctgcatttattag

SEQ ID NO: 695601 - DNA, 120 bp, Artificial Sequence
  ENSG00000188859_41 (sequence is synthesized)
ttgataatcagatcaacacactcaatggaatgaatgcttagaaaactagacaaatactgatatttgctcctttctgagggagaaagcctccttggaactgtccaaggtgctgatgtgaac

SEQ ID NO: 695602 - DNA, 120 bp, Artificial Sequence
  ENSG00000188868_0 (sequence is synthesized)
agtcgctcgctgagagacgccctggaacgtctgtgtagcctcagtcgctgagagacgccctggaacgtctgtggcagcctctgtcacagtgggacccgcactggcagcgggaggcagagg

SEQ ID NO: 695603 - DNA, 120 bp, Artificial Sequence
  ENSG00000188868_1 (sequence is synthesized)
gaggaccctggaacatcccggaagccgggaaatggacgcagtggcctttgaggatgtggctgtgaacttcacccaggaggaatgggctttgctgggtccatcacagaagaatttatacag

SEQ ID NO: 695604 - DNA, 120 bp, Artificial Sequence
  ENSG00000188868_2 (sequence is synthesized)
atatgtgatgcaagaaaccatcaggaacctggactgtataagaatgatatgggaagaacagaatactgaagatcagtacaaaaatcctaggagaaatctaagatgtcatatggtagagag

SEQ ID NO: 695605 - DNA, 120 bp, Artificial Sequence
  ENSG00000188868_3 (sequence is synthesized)
attcagtgaaagtaaagacagtagtcagtgtggagaaacatttagcctcattcgagatagtattgtgaacaacagcatttgtcctggagaagatccatgtcaaagcgctgagtgtgaaga

SEQ ID NO: 695606 - DNA, 120 bp, Artificial Sequence
  ENSG00000188868_4 (sequence is synthesized)
agtcataatgggtcatttatcccttaatagccacatcagagttgattctggacacaaaccacatgagtatcaggaatatggagagaagccacatacacataaacaacgtgggaaagcctt

SEQ ID NO: 695607 - DNA, 120 bp, Artificial Sequence
  ENSG00000188868_5 (sequence is synthesized)
cagttaccatcactcctttcagtcgcgtggaaggcctcacactggaaagaaacgctatgagtgtaaggaatgtggaaaaaccttcagttctcgtagaaaccttcgaagacacatggtagt

SEQ ID NO: 695608 - DNA, 120 bp, Artificial Sequence
  ENSG00000188868_6 (sequence is synthesized)
acacatggtagtgcaaggtggaaatagaccttataaatgtaagttgtgtgggaaagcttttttttggcccagtttattacgtatgcatgaaagaactcacactggagagaaaccgtatga

SEQ ID NO: 695609 - DNA, 120 bp, Artificial Sequence
  ENSG00000188868_7 (sequence is synthesized)
ttctaaagcctttcctttttacagttcctatcgaagacatgagagaatgcacactggggagaaaccgtatgaatgtaagcagtgttctaaagccttgcctgattccagttcctatataag

SEQ ID NO: 695610 - DNA, 120 bp, Artificial Sequence
  ENSG00000188868_8 (sequence is synthesized)
acatgaaagaactcacactggagagaaaccatatacatgtaaacagtgtgggaaagccttcagtgtttccagttcccttcgaagacatgaaaccactcacagtgcagagaaaccctatga

SEQ ID NO: 695611 - DNA, 120 bp, Artificial Sequence
  ENSG00000188868_9 (sequence is synthesized)
gtgtaagcaatgcgggaaaacatttcatcatcttggaagctttcagatacacatgaaaaggcacactggagatcgacctcataaatgtaagatatgtgggaaaggctttgatcgtcccag

SEQ ID NO: 695612 - DNA, 120 bp, Artificial Sequence
  ENSG00000188868_10 (sequence is synthesized)
tttagttcgatatcatgaacgaattcacactggagagaaaccctatgaatgcaagcagtgtgggaaaacgttatctcatagctcaagctttcgaagacacatgataatgcacactggagg

SEQ ID NO: 695613 - DNA, 120 bp, Artificial Sequence
  ENSG00000188868_11 (sequence is synthesized)
gacacgaaaagtctcacagtggagagaaaccctatgaatgcaagcagtgtgggaaagcgttatctcatagctcaagctttcgaagacatatggtaatgcatacgggagatgggccgaata

SEQ ID NO: 695614 - DNA, 120 bp, Artificial Sequence
  ENSG00000188868_12 (sequence is synthesized)
aatgcaaggtatgtgggaaagcctttgtttatcccagtgtatgtcaaagacatgaaaagactcactggagagaaacaatatgaatgtaaactattataaagccttctatatttccagttc

SEQ ID NO: 695615 - DNA, 120 bp, Artificial Sequence
  ENSG00000188868_13 (sequence is synthesized)
cctttgatatcatgaataaacttacactggacagaaaccctataaatgtaaatgtgggaaagcctttcataatttttattcctttcaaaatcatgaaatatctcacactggagagatgct

SEQ ID NO: 695616 - DNA, 120 bp, Artificial Sequence
  ENSG00000188868_14 (sequence is synthesized)
gtatgatataaggaatgtgggaaagtgatcgatttttttttaacaccattgtcaacataaaacaactcacagagcagaaaaactctgtgagtgtaaaatatgtagggaagccttcagtca

SEQ ID NO: 695617 - DNA, 120 bp, Artificial Sequence
  ENSG00000188868_15 (sequence is synthesized)
tcacgcctgtaatcccagcacttagggtgggcaaattgcttgacctcaggaatttgaggcctgcctgggcaaaatggtgaaaccatgtctctacaaaaaatagaaaaagtagcaggtgtg

SEQ ID NO: 695618 - DNA, 86 bp, Artificial Sequence
  ENSG00000188868_16 (sequence is synthesized)
tgacctcaggaatttgaggcctgcctgggcaaaatggtgaaaccatgtctctacaaaaaatagaaaaagtagcaggtgtggtggta

SEQ ID NO: 695619 - DNA, 120 bp, Artificial Sequence
  ENSG00000188868_17 (sequence is synthesized)
agaccctgtctcaaaaaaaaaaaaaaagtacatgaaaggattcactctggagagaagtcatatgaatgtaagaaatgtagaaaagcattgagttctctcaggtccttgcatagacataaa

SEQ ID NO: 695620 - DNA, 120 bp, Artificial Sequence
  ENSG00000188868_18 (sequence is synthesized)
aaaagcattgagttctctcaggtccttgcatagacataaaaggactcactggagagatactctataaatgtgtgaaatgtagggaagtattctttaatgttatttcatttcagatagaaa

SEQ ID NO: 695621 - DNA, 120 bp, Artificial Sequence
  ENSG00000188868_19 (sequence is synthesized)
taattctcattggagataaaccctatgaatgtaaacacatagtaaagccttaattttaagcctcagtttctttcaaatacagttatcccctaatatttgcaggagcgtggttctaccacc

SEQ ID NO: 695622 - DNA, 120 bp, Artificial Sequence
  ENSG00000188868_20 (sequence is synthesized)
aggagcgtggttctaccaccccctgggcatacataaatcgacacatgccaagtccttttttaaaaatgacatatttggtacaaaattacccggatgtgatggcacatgcctgtaatccca

SEQ ID NO: 695623 - DNA, 120 bp, Artificial Sequence
  ENSG00000188869_0 (sequence is synthesized)
acacagtcttcttcctgagaactagcgggcagagcaaactccgctgcttccattcagaaacctcggaacagacctttgcctgccaacttcctagctctctggccagcttctgattgttag

SEQ ID NO: 695624 - DNA, 120 bp, Artificial Sequence
  ENSG00000188869_1 (sequence is synthesized)
cagtgggttagctcccatgaaaacctcgaaggcatcccagcgctatagaggcatccggagaaatgccagccagtgctacctctaccaggaatctctgctgctcagcaacttggatgacag

SEQ ID NO: 695625 - DNA, 120 bp, Artificial Sequence
  ENSG00000188869_2 (sequence is synthesized)
ctttagtgctgatgaaacaggggacagcaatgatccggaacaaatcttccagaatatacagttccagaaagatctcatggcaaacattcgctgcagaccctggactatgggacagaagct

SEQ ID NO: 695626 - DNA, 120 bp, Artificial Sequence
  ENSG00000188869_3 (sequence is synthesized)
gagggcattgagacaagcgaagaacattgtgctgaagtttgaagggaggctgaccaggacccgaggctaccaagcagcaggtgcagagctctggcggaaatttgctcgtctcgcctgtaa

SEQ ID NO: 695627 - DNA, 120 bp, Artificial Sequence
  ENSG00000188869_4 (sequence is synthesized)
ctttgtggtcatcttcattccctgggaaatgaggataaagaaaatcgagagtcattttggatctggcgttgcctcctatttcatattcttgagatggttatttggaattaatattgtgct

SEQ ID NO: 695628 - DNA, 120 bp, Artificial Sequence
  ENSG00000188869_5 (sequence is synthesized)
caccattatgacaggtgcttttattgtcattccagagctgattgcaggccagccctttggaagcacagccaggaagaccatccccaaggagcaggtttcgtctgcccaagacctggacac

SEQ ID NO: 695629 - DNA, 120 bp, Artificial Sequence
  ENSG00000188869_6 (sequence is synthesized)
cgtctggtctctggggggctacctccagtactctgtcctcttctacggatattacggcagggagaggaagatcgggagagctggctaccggctgcccttggcgtatttcctagtggggat

SEQ ID NO: 695630 - DNA, 120 bp, Artificial Sequence
  ENSG00000188869_7 (sequence is synthesized)
ggcagtgtttgcttacagcttcatcattcttttaaaaaagatggctaagaactcccgcacgagtcttgccagtgcttccaatgaaaactataccttctgctggcgggtgttctgtgcctg

SEQ ID NO: 695631 - DNA, 120 bp, Artificial Sequence
  ENSG00000188869_8 (sequence is synthesized)
ggattacctcattggaaacccagaggctgcagagagcaaaacagctgccatagtgaacagcatcagggaagctatattggaagaacaggagaaaaagaaaagcaaaaacctggcagtgac

SEQ ID NO: 695632 - DNA, 120 bp, Artificial Sequence
  ENSG00000188869_9 (sequence is synthesized)
catctgcctgaggattattgccaacatcctggtgcttctctcactggctgggagcatttatctcatctactttgtggtggaccggtcccagaagctggagcagtcgaagaaggagctgac

SEQ ID NO: 695633 - DNA, 120 bp, Artificial Sequence
  ENSG00000188869_10 (sequence is synthesized)
actttgggaaaagaatgaggtcagtgtggtggtctccctcgtcaccatgatagcaccatcagcctttgacctcattgctgccttagagatgtaccaccccaggaccacgctgcgcttcca

SEQ ID NO: 695634 - DNA, 120 bp, Artificial Sequence
  ENSG00000188869_11 (sequence is synthesized)
gcttgcaagggtccttgtgctgtatttgggaaatctctacagcctgatcattgctctcctggacaaagttaacagcatgagcattgaggaaatggctaccaaaaataacacaagtcattg

SEQ ID NO: 695635 - DNA, 120 bp, Artificial Sequence
  ENSG00000188869_12 (sequence is synthesized)
gatagattccaccaccttctttgcaaccaggacagcccctgaagaagagaaatggtccacatctcggcctggaatggggctcaggagaaacaacacatgggccttggaagagaccagcat

SEQ ID NO: 695636 - DNA, 120 bp, Artificial Sequence
  ENSG00000188869_13 (sequence is synthesized)
ttcagcttataccatgcctcttataaaggccaacaagactagcctccacactcagagtccacaagaccagtgctgggagacatacgttggtcaggagatgctgaagctctccatcattga

SEQ ID NO: 695637 - DNA, 120 bp, Artificial Sequence
  ENSG00000188869_14 (sequence is synthesized)
catgctcttcaccgtggcgagcattctgctcatagacttcttccgaggacttttcgtgcggtacttaagtgactactggtgttgggatctggagagcaagtttcctgaatatggagaatt

SEQ ID NO: 695638 - DNA, 120 bp, Artificial Sequence
  ENSG00000188869_15 (sequence is synthesized)
caaaatagctgagaatgtgctacatttagtctacaaccaaggaatgatttggatgggggccttcttctccccatgtctcccagcgttcaacgttctcaaactcattgggctcatgtacct

SEQ ID NO: 695639 - DNA, 120 bp, Artificial Sequence
  ENSG00000188869_16 (sequence is synthesized)
gagaagctgggctgtgctgacctgcaatgtgccccaccagcaagtatttcgagcctcaagatccaacaacttctacttggcaatgctcctgtttatgctgtttctgtgcatgctgccaac

SEQ ID NO: 695640 - DNA, 120 bp, Artificial Sequence
  ENSG00000188869_17 (sequence is synthesized)
catttttgctattgtccgatacaagccatctctaaactgtgggccattcagtggacaagagaaaatttatgacattgtgtcagaaacgattgagaaagactttcctgtgtggtttggctc

SEQ ID NO: 695641 - DNA, 120 bp, Artificial Sequence
  ENSG00000188869_18 (sequence is synthesized)
cgtggttggacacatcagtagccccgtggtcatcctgcccgcagtactcctgcttttcatgctcatctattatctccagagcatcgcacggtctctaaagctcagcaaccaccagctcaa

SEQ ID NO: 695642 - DNA, 120 bp, Artificial Sequence
  ENSG00000188869_19 (sequence is synthesized)
gaagcttccaaacgacagtgatcttaccagccagctgtcctcagcgcactcgggcacaccccaaaacaacggcaacgtggcccattttgactcagggagcagcaagagtggcaggataga

SEQ ID NO: 695643 - DNA, 120 bp, Artificial Sequence
  ENSG00000188869_20 (sequence is synthesized)
gacagtcgcacagtccatgccccagagcccgaggccaggggacagggctcctagctcacctctccctggggtccccaaatccaggctagagcatgaaactaacaggtatctgcacggtct

SEQ ID NO: 695644 - DNA, 120 bp, Artificial Sequence
  ENSG00000188869_21 (sequence is synthesized)
gtgtgcaagcaccagtgaccttcacaggaacagatcgcgcacacctatgacatttacaacgcacatcgaagatgtacactcagaacctcttttccgaaaagactttcagcaaatcaaccc

SEQ ID NO: 695645 - DNA, 120 bp, Artificial Sequence
  ENSG00000188869_22 (sequence is synthesized)
tcctcaccgtggaccacaggcctcgactttgctggcacagggtcccaggccccacgcccccagatactatgtcattaatgaatgtgactcttacaagaaaaaacatctaaatgtctggcc

SEQ ID NO: 695646 - DNA, 120 bp, Artificial Sequence
  ENSG00000188869_23 (sequence is synthesized)
agaaagacatttcaagatagatgcttcaggtgacattgtggagctgtaccccaggaacgtgcgacaatatgcatcccgggtcccccgccagcctccctccccacagctgagtgaagaaga

SEQ ID NO: 695647 - DNA, 120 bp, Artificial Sequence
  ENSG00000188869_24 (sequence is synthesized)
ggaggagacgccaagcagagattggatcaaacggtctcttcccccacgctccctgatagacctccgtcgggctcctcatttttatattggggagaggtccgaaagtcagacccgggatcc

SEQ ID NO: 695648 - DNA, 120 bp, Artificial Sequence
  ENSG00000188869_25 (sequence is synthesized)
cgagcaccaggggagggtgcactacaagtcgtggaatgaagattttgagggtcaccttgagaggccagcctatgtgcccagaaagccacgatcccggaatttccaatacccacagccccc

SEQ ID NO: 695649 - DNA, 120 bp, Artificial Sequence
  ENSG00000188869_26 (sequence is synthesized)
tctgaagcccagagggaagcccaggttcgagccatccctcacggaatctgactccgtgtcggcagcatccagcagtgaccagcagaacagcagcgctgaccagtacctgcaggtcaccca

SEQ ID NO: 695650 - DNA, 120 bp, Artificial Sequence
  ENSG00000188869_27 (sequence is synthesized)
cagccagggcaggttcccgaggtccgtgggccagcccagcaggaggaaggccaagtcggggcaggagctgaccgtggatctggatgacttgatttgttcagatgtctaggcttcctccag

SEQ ID NO: 695651 - DNA, 120 bp, Artificial Sequence
  ENSG00000188869_28 (sequence is synthesized)
tgtcccgttcctagaggtcaggcccctgttggagtgctgggccagcacatggcatctccctttctggaaaaagaggtgaacaagtgtgttagagacctgaggggcatggtcagcggctgc

SEQ ID NO: 695652 - DNA, 120 bp, Artificial Sequence
  ENSG00000188869_29 (sequence is synthesized)
tagctgaggccctgaggctgacagggctacagatacctattctacagctactgttagccaaatttatccgagttaggtggcaccaaagtatgtcaccagcagtgaatcatcacgggtctg

SEQ ID NO: 695653 - DNA, 120 bp, Artificial Sequence
  ENSG00000188869_30 (sequence is synthesized)
cagcaatctcaatacttgcctcctcggaagaaagaatttggcagaggggctcaagacagaaggagagactgaggcaagttttagagcaggcatgaaagtttactgaaaagctttaaagca

SEQ ID NO: 695654 - DNA, 120 bp, Artificial Sequence
  ENSG00000188869_31 (sequence is synthesized)
ggaatgaaagaacgtaaaacatacttagtagagggccaagcaggcgacttgagagatccagtgcactgtttgacctttgacttggggttttacacgttggcatgcttccggggtcttgcg

SEQ ID NO: 695655 - DNA, 120 bp, Artificial Sequence
  ENSG00000188869_32 (sequence is synthesized)
ttgcttctccccacgattcttccctttcttcccttggggtgggctgtccgcatgcgcagtagtggcctgctagcgctggggaggggagcatgcgcagtgtgtttactggagttgtgcacg

SEQ ID NO: 695656 - DNA, 120 bp, Artificial Sequence
  ENSG00000188869_33 (sequence is synthesized)
cgctcactcgaggttcttcccttaccaggggaatgctccattttgtctcttagtgcgcatgtttgagcccactcgcccaactcctgacattttatggggaagctgccgatcaccagtttc

SEQ ID NO: 695657 - DNA, 120 bp, Artificial Sequence
  ENSG00000188869_34 (sequence is synthesized)
aggttttttctatctattgggagactgtcgttccctggtgccagctgtgaccaattattattttagagagacaatcagcagccacctgaccatcacctgatggtcgcctgacattcctgg

SEQ ID NO: 695658 - DNA, 120 bp, Artificial Sequence
  ENSG00000188869_35 (sequence is synthesized)
gggttgtgttgaagaaggaattcatgaattttacaagtataatcaaagacaaccaaaaatttttactttttccttcaaaagctaagtgtagtgtagctcccccatagtctaagttaaaga

SEQ ID NO: 695659 - DNA, 120 bp, Artificial Sequence
  ENSG00000188869_36 (sequence is synthesized)
agaacactaactgcctgtttttccttctgtgctcagcaagccttatctgtacttgctagtttcacattccttgaggctcagcgagttcctgcttcaccaccctagcgcagctgcaaagtt

SEQ ID NO: 695660 - DNA, 120 bp, Artificial Sequence
  ENSG00000188869_37 (sequence is synthesized)
acaaggttgatgcagaaacatggtttcccagggatgtggaacatgtagtatagataaatgtaaaagactgaacaactgcctttgctctcgcttctgtaagtacgcttcctgcctcgcgta

SEQ ID NO: 695661 - DNA, 120 bp, Artificial Sequence
  ENSG00000188869_38 (sequence is synthesized)
ctcccggccaccgactgcttaaaaggtggctgctttctttatccagggctcagactttcctggacgctagtcctactgagccaggtgatcaccttttaataaagacctttcctgaactca

SEQ ID NO: 695662 - DNA, 120 bp, Artificial Sequence
  ENSG00000188869_39 (sequence is synthesized)
cacatcttcaaggtttctgtgactcttggccacccactatggtgcaaggccaccaatccccagatgtccaagagttatttctaagaatacccagggatggctcccctttgctaggaggaa

SEQ ID NO: 695663 - DNA, 120 bp, Artificial Sequence
  ENSG00000188878_0 (sequence is synthesized)
cgcacctccgggggcacggcgcgtaacaggaggcttccggggctgagagcgttacaggctgcgctccggggccagataggccgggcgctcagaaggggagtatgagcctgatgtgggcag

SEQ ID NO: 695664 - DNA, 120 bp, Artificial Sequence
  ENSG00000188878_1 (sequence is synthesized)
aatccagatgagctggccagtgctgtgaaggagctgagagcacccccgagagccgtgagatggcaccaaaaaccaagaaaggatgtaaaggctccattgatgattttcttggtgaccttc

SEQ ID NO: 695665 - DNA, 120 bp, Artificial Sequence
  ENSG00000188878_2 (sequence is synthesized)
taggggatgatatgacactacctgagaagcctgttaaactagcttcacataccagagacaccacaggtgtatctcagatgttcccttcttcaaaggcgagaacaaagtccctcctgggtg

SEQ ID NO: 695666 - DNA, 120 bp, Artificial Sequence
  ENSG00000188878_3 (sequence is synthesized)
atgatgtcttcagcaccatggcaggcctggaagaagctgatgctgaggtttcaggtatctcagaggcagacccacaggctctgctccaggccatgaaggacctggacggcatggatgctg

SEQ ID NO: 695667 - DNA, 120 bp, Artificial Sequence
  ENSG00000188878_4 (sequence is synthesized)
atatcttaggtctgaagaaatctaattcagcccctagcaaaaaagctgcaaaggaccctgggaaaggagagctgcccaaccaccccaagcctgcagggggtgccattcccaccaagaagt

SEQ ID NO: 695668 - DNA, 120 bp, Artificial Sequence
  ENSG00000188878_5 (sequence is synthesized)
cacttccgtctcccagcagctctgggcatcagaacaggaggttttcctctgaagacttggaagacccattgagaggacttctctcctatgatgaaggaggaatcaccaagcagccgcctg

SEQ ID NO: 695669 - DNA, 120 bp, Artificial Sequence
  ENSG00000188878_6 (sequence is synthesized)
tgacacagagtaaaacagcttctgacaagagccccagcacagtgagagatcaaggtccctctattcctctaactcctggggacacccccatccgaaaaaaagaagaattgttgtttgatg

SEQ ID NO: 695670 - DNA, 120 bp, Artificial Sequence
  ENSG00000188878_7 (sequence is synthesized)
atggggatgacatcatggccaccttggggtttggagacagccccaaagcagagaagaggcagataggagaccaggaagggcctcgccctgctcgctccacgctggatgagctgctgggtc

SEQ ID NO: 695671 - DNA, 120 bp, Artificial Sequence
  ENSG00000188878_8 (sequence is synthesized)
gaggcatggccaccaaactcctggcccgcccgggcaccggggagcacagggagttcaagctagacaagaagtaccagaggccacaggacagtgaagatatgtggggtgacgaggacttca

SEQ ID NO: 695672 - DNA, 120 bp, Artificial Sequence
  ENSG00000188878_9 (sequence is synthesized)
cctttggagcctatcagcccactgtggtctcctctgagggccggcagtcccgccggcagtctgtcagtaggttcttcgcagacagtggcgcagaccccaagggagaaccaggctccaaac

SEQ ID NO: 695673 - DNA, 120 bp, Artificial Sequence
  ENSG00000188878_10 (sequence is synthesized)
agagccctccaatggcttccagccccatccagcccaggaagggaggagctgactggttgggcctcaaggacgaggacttggacctgttccctgcctcacccaccagagaggcccatcggg

SEQ ID NO: 695674 - DNA, 120 bp, Artificial Sequence
  ENSG00000188878_11 (sequence is synthesized)
aaagttcagtgcctgtcacgccctcagtgcctcctcctgcgagccagcactccacgccagctgggctgcccccctccagggcaaagccaccaactgaaggtgcagggtcccctgccaaag

SEQ ID NO: 695675 - DNA, 120 bp, Artificial Sequence
  ENSG00000188878_12 (sequence is synthesized)
ccagccaggcttccaagctgcgagcctccaaggaggagaaagaggactggctgagccatgccctgtctcggaagaagtcccaaggcctggccagagagcagcatgctgggacctctgagg

SEQ ID NO: 695676 - DNA, 120 bp, Artificial Sequence
  ENSG00000188878_13 (sequence is synthesized)
gcctgcatttggcggggacagcgggccatcccccttctggcagccaacctctcaccagcacacaagggcttgagcacgcagctgctggagggagttctggaacaactgcacgagaaagac

SEQ ID NO: 695677 - DNA, 120 bp, Artificial Sequence
  ENSG00000188878_14 (sequence is synthesized)
cgtgtgtcaggcctggtgtctcggggtcccctgtgactcagaaccatgccgcctcagcactccctacaggttccccaaagaggggaacagcccctggagacctctcagccactgagcctg

SEQ ID NO: 695678 - DNA, 120 bp, Artificial Sequence
  ENSG00000188878_15 (sequence is synthesized)
cccacagagccttccgtgcccgtccagcccctgctcccagagtccctggcccggagcctgctgccgagcacagaataccagaagcagctcctggcagcacaggtgcaacttcagtgcagc

SEQ ID NO: 695679 - DNA, 120 bp, Artificial Sequence
  ENSG00000188878_16 (sequence is synthesized)
cccgctgagctccaggccgagctgctgcatagccaggcccggctggcagagctggaggcccaggtgcggaagctggagctagaacgggcccagcatgagctgctgctggggagtctgcag

SEQ ID NO: 695680 - DNA, 120 bp, Artificial Sequence
  ENSG00000188878_17 (sequence is synthesized)
cagcagcaccaggcagacctggagctcatcgagagtgcacacagaagccgcatcaaggtgctagaaacatcgtaccagcaacgggaggagcggctccggagagagaacgaagagctgtca

SEQ ID NO: 695681 - DNA, 120 bp, Artificial Sequence
  ENSG00000188878_18 (sequence is synthesized)
gctcggtatctgtcgcagtgccaggaggccgaacaggcccgtgctgagcttacggcccagcaccagcggcgcttggcggccatagcgcaggagaaggaccaggaaatggagcggctccgg

SEQ ID NO: 695682 - DNA, 120 bp, Artificial Sequence
  ENSG00000188878_19 (sequence is synthesized)
gagctgcagcgggcgtccatcctagacatgcgcagagaccacgaggagcagctgcagcggctaaagctgctgaaggaccgagaggtcgatgcggccaccagtgccacctcccacacgcgg

SEQ ID NO: 695683 - DNA, 120 bp, Artificial Sequence
  ENSG00000188878_20 (sequence is synthesized)
tccctgaatagcatcatccaccagatggagaagttctccagcagcctgcacgagttgtcctcccgcgtggaggcctcgcacctcaccacctcccaggagcgggagctggggatccggcag

SEQ ID NO: 695684 - DNA, 120 bp, Artificial Sequence
  ENSG00000188878_21 (sequence is synthesized)
cgtgacgagcagctgcgggcactgcaggagcggctgggccagcagcagcgggacatggaggaggagcggagccggcaacaggaggtcatcgggaagatggaggcacggctgaatgagcag

SEQ ID NO: 695685 - DNA, 120 bp, Artificial Sequence
  ENSG00000188878_22 (sequence is synthesized)
agccggctgctggagcaggaacgctggcgggtgactgccgagcagtccaaggcggagtccatgcagcgcgccctagaggagcaaaggaaggtcacggcccagcagatggccatggaaagg

SEQ ID NO: 695686 - DNA, 120 bp, Artificial Sequence
  ENSG00000188878_23 (sequence is synthesized)
gcggagctggaacgggccaagagcgccttgctggaggagcagaagtctgtcatgctcaagtgcggggaggagcggcggcgcctggctgccgagtgggcggagttctccgcgcagcaaaag

SEQ ID NO: 695687 - DNA, 120 bp, Artificial Sequence
  ENSG00000188878_24 (sequence is synthesized)
ctgagtaaggagcgggccgagcgcgaggccgagcgggcattgcaggtggacacccagcgggagggcaccctcatcagcctggccaaggagcaggctgagctgaagatcagggccagcgag

SEQ ID NO: 695688 - DNA, 120 bp, Artificial Sequence
  ENSG00000188878_25 (sequence is synthesized)
ctccgggccgaggagaagcagctggcagcggagagagcagccctggagcaggagcggcaggagctgcggctggagaaggagaggatcaacgccaccgccctgcgtgtcaagctccgcgcc

SEQ ID NO: 695689 - DNA, 120 bp, Artificial Sequence
  ENSG00000188878_26 (sequence is synthesized)
gaggaggtggagagcatgagcaaggtggcctccgagaagtacgaggagggggagcgggcattgcgcgaggcccagcaggtgcaggcagagcagcaggcccggttgcaggcggtgcagcaa

SEQ ID NO: 695690 - DNA, 120 bp, Artificial Sequence
  ENSG00000188878_27 (sequence is synthesized)
cagcaggagcggctgcggaagcaggagcagcacatgcaccaggagcatctgagtctggcccagcagaggctgcaactggaccgcgcacgacaggacctgccctctagcctcgtgggtctg

SEQ ID NO: 695691 - DNA, 120 bp, Artificial Sequence
  ENSG00000188878_28 (sequence is synthesized)
ttccccagggcccagggccctgcagcctccagccagagtgccctcatgcctcctgctcccaccacccgttggtgcagccagccgccaactggcctggaccccagccccttgcacctccat

SEQ ID NO: 695692 - DNA, 120 bp, Artificial Sequence
  ENSG00000188878_29 (sequence is synthesized)
gccaggctggcactgctgaggcacatggcagagcaggaccgtgacttcttggagaatgaacagttcttcctggagaccctgaagaaagggtcctacaatttgacatctcattcagcctga

SEQ ID NO: 695693 - DNA, 120 bp, Artificial Sequence
  ENSG00000188878_30 (sequence is synthesized)
atgcaacactctgggggctgggcggcaaggaccaggatggagaccctggagaagagtgacaggaggtggcattgataccaaactttcgacgaccaaggtttcttctgagactctgagtgt

SEQ ID NO: 695694 - DNA, 120 bp, Artificial Sequence
  ENSG00000188878_31 (sequence is synthesized)
ccagctggaagcgtttttaagtgtctgtcactggtattgaggagtcaggggcacggaatagaagacatttccggtcacatgacatctcggctgggagggtttgcatgtcgtgtctgggaa

SEQ ID NO: 695695 - DNA, 120 bp, Artificial Sequence
  ENSG00000188878_32 (sequence is synthesized)
aggagtgacctgcccgcccattggcacccatcgctggttagcagggctgtttccacgctctgaatgagtccgttctcagaaactataggaacacataaaggacttacatctctaaatgcc

SEQ ID NO: 695696 - DNA, 120 bp, Artificial Sequence
  ENSG00000188878_33 (sequence is synthesized)
catggaggcagtgcctggggaggattctgagatgcttgaggcctgatgacagctcttccgtggacagggtgcaagtgcatcctttccaaatgtgccagcccggggcagcccctgcctctg

SEQ ID NO: 695697 - DNA, 120 bp, Artificial Sequence
  ENSG00000188878_34 (sequence is synthesized)
gggctctgtggtgtaggctatcttaccatggctttggctgccctgccccaaagccattggcttggatctgagggtctgagttggcagcaaggacccccagctctcactgggctctgtggg

SEQ ID NO: 695698 - DNA, 120 bp, Artificial Sequence
  ENSG00000188878_35 (sequence is synthesized)
ctccccctgggctctgtgggctccccctgctccacaggtagactgttgtgggctctttttgcctgggcctcttctgaggcaggagctttcttgagggatgccacaaacagccttccctac

SEQ ID NO: 695699 - DNA, 120 bp, Artificial Sequence
  ENSG00000188878_36 (sequence is synthesized)
tccctgccagagcagttccctccctgatgagctggagaagggccctctggcctcctgacagtacagggagggcaccagctagatcctcccttgtggtgtgagatgttcctggaactcagc

SEQ ID NO: 695700 - DNA, 120 bp, Artificial Sequence
  ENSG00000188878_37 (sequence is synthesized)
caggccctcctcctcctgggcttgcccagagcccccaccctattcccagcattgcccgaaggaccaaccagtttgggtgaacagtggcctcctcagcttcctccccatctgggtgcccca

SEQ ID NO: 695701 - DNA, 120 bp, Artificial Sequence
  ENSG00000188878_38 (sequence is synthesized)
ccggcggcggagggagctgtggcgatggtggggtgtggggagggacgaggagggaagcctctgtgctgctcacctgcccaaagcccagctcagcgggtacgcagtggaggcgacaaggaa

SEQ ID NO: 695702 - DNA, 120 bp, Artificial Sequence
  ENSG00000188878_39 (sequence is synthesized)
ccaatcacaactacagaggtttctctgatcctcctccactcccgctgcttcaacttgactaagcttaaaaaaactgcttttgccatggctcatcggagtttatacttatttcttagaaaa

SEQ ID NO: 695703 - DNA, 120 bp, Artificial Sequence
  ENSG00000188878_40 (sequence is synthesized)
tgtttcctgttatttgctggacaagtcccaaagaacaggcagatgttcttattaaaagatcagcctataagattggtcaggaccaggcgcctctggccacgtgcctctcccctccagcac

SEQ ID NO: 695704 - DNA, 120 bp, Artificial Sequence
  ENSG00000188878_41 (sequence is synthesized)
ctgcggtctgcggtggcacctggcagctggaccacagccaggagaagggtactattagccctgcttcaaacatgcagaaactgaggcccggggagattaaataacctgcctgaaatgaca

SEQ ID NO: 695705 - DNA, 120 bp, Artificial Sequence
  ENSG00000188878_42 (sequence is synthesized)
ggagcggctgcggaagcaggagcagcacatgcaccaggcaaggctccctgagtgtatggcgcccctgcccccggcacccccagcctcccacctcacagctgagtccttctttctggggga

SEQ ID NO: 695706 - DNA, 120 bp, Artificial Sequence
  ENSG00000188878_43 (sequence is synthesized)
agcctccagccagagtggtgagtggctccagaaggaagggccggcggctcaggactgggcaggggcagtgctaggagtgggcaggccctcctccagccgctccagttaaggcggccagct

SEQ ID NO: 695707 - DNA, 120 bp, Artificial Sequence
  ENSG00000188878_44 (sequence is synthesized)
gggttttatagtcgccttatttcttttttacacaaataatgtgtgttaattttagataaatcagaaatagaggaacactattatgaaaaatgtcacctttttgtaactctggactcagga

SEQ ID NO: 695708 - DNA, 120 bp, Artificial Sequence
  ENSG00000188878_45 (sequence is synthesized)
ggggccgttggtgctggtggcagggttgcgacaggaggggacactgagagtggctggaagcttccccaggagggaggaagggctgttggcacagggcagcgtggagtacagccacctccc

SEQ ID NO: 695709 - DNA, 120 bp, Artificial Sequence
  ENSG00000188878_46 (sequence is synthesized)
gccctttggccttggcaaaccaagcctagaaaatccccatagtctgagaagcccgtacaggatcgataggagatgccagaagttccttgatgtgttatgggacacatttggacttgacag

SEQ ID NO: 695710 - DNA, 120 bp, Artificial Sequence
  ENSG00000188878_47 (sequence is synthesized)
gccaatacttgggacataaagaggacccctctgactcctttcttccaggacatcctgtagggagtatgagcctgatgtgggcagaatccagatgagctggccagtgctgtgaaggagctg

SEQ ID NO: 695711 - DNA, 120 bp, Artificial Sequence
  ENSG00000188878_48 (sequence is synthesized)
agggcccagggttgcctgcgcccctccatctggacacatccgcttccagtcttaggaaaggagagtgtagcactaatgtcacaagagcatagggattaaaacagtaatcgcatcatcatg

SEQ ID NO: 695712 - DNA, 120 bp, Artificial Sequence
  ENSG00000188878_49 (sequence is synthesized)
gtattgtcccaggtgcattatacacattttatttgatcctcatgttcccatgactttggtcatttagaaatgaggaaaccgaacttcagagttgagcctgccacagtcacgtggcttgtg

SEQ ID NO: 695713 - DNA, 120 bp, Artificial Sequence
  ENSG00000188878_50 (sequence is synthesized)
agggcagcactccggcttggccccaggcttctctggctctccctggaagcccctggctccaccacctcctcccaggggcagggtgggcagaggggaccctagagtcctgcacagagtgca

SEQ ID NO: 695714 - DNA, 120 bp, Artificial Sequence
  ENSG00000188883_0 (sequence is synthesized)
ctcagcgtctccgggtggcggggcgcgcgggatggaggagtcttgggaggctgcgcccggaggccaagccggggcagagctcccaatggagcccgtgggaagcctggtccccacgctgga

SEQ ID NO: 695715 - DNA, 120 bp, Artificial Sequence
  ENSG00000188883_1 (sequence is synthesized)
gcagccgcaggtgcccgcgaaggtgcgacaacctgaaggtcccgaaagcagcccaagtccggccggggccgtggagaaggcggcgggcgcaggcctggagccctcgagcaagaaaaagcc

SEQ ID NO: 695716 - DNA, 120 bp, Artificial Sequence
  ENSG00000188883_2 (sequence is synthesized)
aaaaagccgccttcgcctcgccccgggtccccgcgcgtgccgccgctcagcctgggctacggggtctgccccgagccgccgtcaccgggccctgccttggtcaagctgccccggaatggc

SEQ ID NO: 695717 - DNA, 120 bp, Artificial Sequence
  ENSG00000188883_3 (sequence is synthesized)
cggggctgagcctgcgcccagcgcctgggcgcccatggagctgcaggtagatgtgcgcgtgaagcccgtgggcgcggccggtggcagcagcacgccatcgcccaggccctccacgcgctt

SEQ ID NO: 695718 - DNA, 120 bp, Artificial Sequence
  ENSG00000188883_4 (sequence is synthesized)
cctcaaggtgccggtgcccgagtcccctgccttctcccgccacgcggacccggcgcaccagctcctgctgcgcgcaccatcccagggcggcacgtggggccgccgctcgccgctggctgc

SEQ ID NO: 695719 - DNA, 120 bp, Artificial Sequence
  ENSG00000188883_5 (sequence is synthesized)
agcccggacggagagcggctgcgacgcagagggccgggccagccccgcggaaggaagcgccggctccccgggctcccccacgtgctgccgctgcaaggagctggggctggagaaggagga

SEQ ID NO: 695720 - DNA, 120 bp, Artificial Sequence
  ENSG00000188883_6 (sequence is synthesized)
tgcggcgctgttgccccgcgcggggttggacggcgacgagaagctgccccgggccgtaacgcttacggggctacccatgtacgtgaagtccctgtactgggccctggcgttcatggctgt

SEQ ID NO: 695721 - DNA, 120 bp, Artificial Sequence
  ENSG00000188883_7 (sequence is synthesized)
gctcctggcagtctctggggttgtcattgtggtcctggcctcaagagcaggagccagatgccagcagtgccccccaggctgggtgttgtccgaggagcactgttactacttctctgcaga

SEQ ID NO: 695722 - DNA, 120 bp, Artificial Sequence
  ENSG00000188883_8 (sequence is synthesized)
ggggcctggcgaggcccccagggctggcactggatcgacgaggccccactcccgccccagctactccctgaggacggcgaggacaatctggatatcaactgtggggccctggaggaaggc

SEQ ID NO: 695723 - DNA, 120 bp, Artificial Sequence
  ENSG00000188883_9 (sequence is synthesized)
acgctggtggctgcaaactgcagcactccaagaccctgggtctgtgccaaggggacccagtgatctgggctctgcctggtcctcagcctgccaggcagatgcagcaccccctacagggga

SEQ ID NO: 695724 - DNA, 120 bp, Artificial Sequence
  ENSG00000188883_10 (sequence is synthesized)
ggccagttgagagcttgggcagcctcttcctggacccagttatccaggtcttcatgctctgctcaagggggccacatgagcgagcctaggagctggacttcaacccaggaagatgcatcc

SEQ ID NO: 695725 - DNA, 120 bp, Artificial Sequence
  ENSG00000188883_11 (sequence is synthesized)
gagggaaaggagattttctatggcctcaggcctgagtgccaatattagtctccagcttctgtggatgatcggtttgatgacattgggatggttgtttagcatttctgtgccttggtttca

SEQ ID NO: 695726 - DNA, 120 bp, Artificial Sequence
  ENSG00000188883_12 (sequence is synthesized)
ttaaaatgacaatttccccctagaggaaaaagacagggttaacaaccacagcggattccaatctgggttctcattccggctcatggaaatgagtctgccgttgttcagtggcagtgggac

SEQ ID NO: 695727 - DNA, 120 bp, Artificial Sequence
  ENSG00000188883_13 (sequence is synthesized)
ttggcagggataacgtcattgctgtgaattctacttcaggcagctgggtgtacatcggacacagcctaccggcagcctctggaaaattaaccaaggaaaaggagcggtcagccctggaaa

SEQ ID NO: 695728 - DNA, 120 bp, Artificial Sequence
  ENSG00000188883_14 (sequence is synthesized)
gaggggagagcaaggttttccttccccaccctgagagttggcaaagggttggcagacaggaaggttctgggtggagatcccgcatgtgggctggccagcccctggcacgctgatgcccaa

SEQ ID NO: 695729 - DNA, 120 bp, Artificial Sequence
  ENSG00000188883_15 (sequence is synthesized)
gggtgagacaaggcagagaggacagggccacctggcaggagaagccaggagagcaccccagcttggtaggtggaagctgaggagtctgagtgaaaaaggaaatcagagaaatgcaggcac

SEQ ID NO: 695730 - DNA, 120 bp, Artificial Sequence
  ENSG00000188883_16 (sequence is synthesized)
gttccaggcagctcttctacccacagctgcagagacgaccaacctgaagatgtctccatgctggggtgcagtgaagaccttcaggctggaggatgtggctgacagagttgtgtagttcct

SEQ ID NO: 695731 - DNA, 120 bp, Artificial Sequence
  ENSG00000188886_0 (sequence is synthesized)
atggagggtgtagggggtctctggccttgggtgctgggtctgctctccttgccaggtgtgatcctaggagcgcccctggcctccagctgcgcaggagcctgtggtaccagcttcccagat

SEQ ID NO: 695732 - DNA, 120 bp, Artificial Sequence
  ENSG00000188886_1 (sequence is synthesized)
ggcctcacccctgagggaacccaggcctccggggacaaggacattcctgcaattaaccaagggctcatcctggaagaaaccccagagagcagcttcctcatcgagggggacatcatccgg

SEQ ID NO: 695733 - DNA, 120 bp, Artificial Sequence
  ENSG00000188886_2 (sequence is synthesized)
ccgagtcccttccgactgctgtcagcaaccagcaacaaatggcccatgggtggtagtggtgtcgtggaggtccccttcctgctctccagcaagtacgatgagcccagccgccaggtcatc

SEQ ID NO: 695734 - DNA, 120 bp, Artificial Sequence
  ENSG00000188886_3 (sequence is synthesized)
ctggaggctcttgcggagtttgaacgttccacgtgcatcaggtttgtcacctatcaggaccagagagacttcatttccatcatccccatgtatgggtgcttctcgagtgtggggcgcagt

SEQ ID NO: 695735 - DNA, 120 bp, Artificial Sequence
  ENSG00000188886_4 (sequence is synthesized)
ggagggatgcaggtggtctccctggcgcccacgtgtctccagaagggccggggcattgtccttcatgagctcatgcatgtgctgggcttctggcacgagcacacgcgggccgaccgggac

SEQ ID NO: 695736 - DNA, 120 bp, Artificial Sequence
  ENSG00000188886_5 (sequence is synthesized)
tcctctgtgatgcactatgggaggctcgccttcagccggcgtgggctgcccaccatcacaccactttgggcccccagtgtccacatcggccagcgatggaacctgagtgcctcggacatc

SEQ ID NO: 695737 - DNA, 120 bp, Artificial Sequence
  ENSG00000188886_6 (sequence is synthesized)
acccgggtcctcaaactctacggctgcagcccaagtggccccaggccccgtgggagagggtcccatgcccacagcactggtaggagccccgctccggcctccctatctctgcagcggctt

SEQ ID NO: 695738 - DNA, 120 bp, Artificial Sequence
  ENSG00000188886_7 (sequence is synthesized)
ttggaggcactgtcggcggaatccaggagccccgaccccagtggttccagtgcgggaggccagcccgttcctgcagggcctggggagagcccacatgggtgggagtcccctgccctgaaa

SEQ ID NO: 695739 - DNA, 120 bp, Artificial Sequence
  ENSG00000188886_8 (sequence is synthesized)
aagctcagtgcagaggcctcggcaaggcagcctcagaccctagcttcctccccaagatcaaggcctggagcaggtgcccccggtgttgctcaggagcagtcctggctggccggagtgtcc

SEQ ID NO: 695740 - DNA, 120 bp, Artificial Sequence
  ENSG00000188886_9 (sequence is synthesized)
accaagcccacagtcccatcttcagaagcaggaatccagccagtccctgtccagggaagcccagctctgccagggggctgtgtacctagaaatcatttcaaggggatgtccgaagattaa

SEQ ID NO: 695741 - DNA, 120 bp, Artificial Sequence
  ENSG00000188886_10 (sequence is synthesized)
ccaccccatgtcctgctgtctggtctcaccggtgggtgctccaggcatctgtgtatgcccctgtctgtctggaccaggtgtgatcctaggagcgcccctggcctccagctgcgcaggagc

SEQ ID NO: 695742 - DNA, 120 bp, Artificial Sequence
  ENSG00000188886_11 (sequence is synthesized)
cttcctaatgcggcaggtgttcctctcttcccttttcctcttacaccatcacatcccttccacctccccacccgaagaacctgtccacagatgcccttctgttgctgaaggtctcctgag

SEQ ID NO: 695743 - DNA, 120 bp, Artificial Sequence
  ENSG00000188886_12 (sequence is synthesized)
tagggagggttaaaatctgatgggaaggtatgtcgagtggggatctggttccccttgagaccatgcggtgcagaggacagtgacctacccaaggccacacagccagggtctgtctggggc

SEQ ID NO: 695744 - DNA, 120 bp, Artificial Sequence
  ENSG00000188895_0 (sequence is synthesized)
atgcgtcctccggttggcggcggctgcggcggtggcggctacgagcggctccgtttttttaaagggaaacgctgaggcgccgggggtgactgtgggggagggggaccccgagccgcggag

SEQ ID NO: 695745 - DNA, 120 bp, Artificial Sequence
  ENSG00000188895_1 (sequence is synthesized)
acccccgggagaggcgacagaccccctctcccggagtaggagggctttgggcggacccagccctccaccccctcctgaggaggaggggggggaaatggaggctcggggcggttgaggcga

SEQ ID NO: 695746 - DNA, 80 bp, Artificial Sequence
  ENSG00000188895_2 (sequence is synthesized)
agacgaggcgggcccggccgggccagggggggccgaagcgagctccggggatgagctcgggggcggctgggtgcgagctc

SEQ ID NO: 695747 - DNA, 80 bp, Artificial Sequence
  ENSG00000188895_3 (sequence is synthesized)
gggtgcgagctcctgcctctgaggcgaaggcggcggcggcggcagcagaggcggcggcgaggcccccatgggccggcggc

SEQ ID NO: 695748 - DNA, 120 bp, Artificial Sequence
  ENSG00000188895_4 (sequence is synthesized)
gatggcgcccgggccccggaggagccgcgctagcggaggcctgctgccgcgctgctgaggcgagcccgccaaactcccctcccccccctcagtcctcgaccccccgcacctcgccccttc

SEQ ID NO: 695749 - DNA, 120 bp, Artificial Sequence
  ENSG00000188895_5 (sequence is synthesized)
ccccctcctccgcctcggtgcccggcgctgctccggaccactatgaccatgagatccgcggtgttcaaggcggccgcggcccctgccggcggcaatcctgagcagcgactggactacgag

SEQ ID NO: 695750 - DNA, 120 bp, Artificial Sequence
  ENSG00000188895_6 (sequence is synthesized)
actacgagcgggctgcggcgctgggcgggcccgaggacgagcctggggcggccgaagcccacttcctcccccggcaccgtaagctcaaggagccggggcccccgctggcctcctcccagg

SEQ ID NO: 695751 - DNA, 120 bp, Artificial Sequence
  ENSG00000188895_7 (sequence is synthesized)
ccggctgcggcggcaagggccggggcttgttactcccggccggggcggcccccgggcagcaggaagagagctggggcggttcggtgcccttgccctgtccgcccccggccaccaagcaag

SEQ ID NO: 695752 - DNA, 120 bp, Artificial Sequence
  ENSG00000188895_8 (sequence is synthesized)
ccggccaccaagcaagccggcattgggggggagcctgccgcagccggagccggctgcagcccccggcccaagtatcaggcggtgctgcccattcagacgggctctctcgtggcggcggcc

SEQ ID NO: 695753 - DNA, 120 bp, Artificial Sequence
  ENSG00000188895_9 (sequence is synthesized)
gctctctcgtggcggcggccaaagagcctacgccctgggctggggacaagggtggggcggcctcccccgctgccaccgcctcggacccggcgggacccccaccactacctctgcccgggc

SEQ ID NO: 695754 - DNA, 120 bp, Artificial Sequence
  ENSG00000188895_10 (sequence is synthesized)
gccaccgccgggaccctggcggccagcgagggcagatggaagagtatgaggaagagccctctcgggggtggtggcggctcgggagcctccagtcaggccgcctgcctcaaacagatcctt

SEQ ID NO: 695755 - DNA, 120 bp, Artificial Sequence
  ENSG00000188895_11 (sequence is synthesized)
ctgctgcaattggacctcatcgaacagcagcagcagcagctgcaggccaaggaaaaggagatcgaggagctgaagtcagagagagacacgctccttgctcggattgaacgtatggaaagg

SEQ ID NO: 695756 - DNA, 120 bp, Artificial Sequence
  ENSG00000188895_12 (sequence is synthesized)
cggatgcagctggtaaagaaggataacgagaaagaaaggcacaagctgtttcagggctatgaaactgaagagagagaggaaacagagctatctgagaaaattaaactggagtgccagccg

SEQ ID NO: 695757 - DNA, 120 bp, Artificial Sequence
  ENSG00000188895_13 (sequence is synthesized)
gagctttccgagacatcccagactctgcctcccaagcccttctcatgtgggcggagtggaaagggacataaaaggaaatccccatttggaagtacagaaagaaagactcctgttaaaaag

SEQ ID NO: 695758 - DNA, 120 bp, Artificial Sequence
  ENSG00000188895_14 (sequence is synthesized)
ctggctcctgaattttcaaaagtcaaaacaaaaactcctaagcactctcctattaaagaggaaccctgtggttccttatctgaaactgtttgtaaacgtgaattgaggagccaagaaacc

SEQ ID NO: 695759 - DNA, 120 bp, Artificial Sequence
  ENSG00000188895_15 (sequence is synthesized)
ccagaaaagccccggtcttcagtggacaccccaccaagactctccactccccaaaagggacccagcacccatcccaaggagaaagccttctcaagtgagatagaagatttgccgtacctt

SEQ ID NO: 695760 - DNA, 120 bp, Artificial Sequence
  ENSG00000188895_16 (sequence is synthesized)
tccaccacagaaatgtatttgtgtcgttggcaccagcctcccccatcaccgttaccattacgggaatcctctccaaagaaggaggagactgtagcaaggtgtctgatgccatcaagtgtt

SEQ ID NO: 695761 - DNA, 120 bp, Artificial Sequence
  ENSG00000188895_17 (sequence is synthesized)
gcaggagaaacttcagtcttggctgttccttcttggagggaccactcagtagagcctctaagggacccaaatccttcagaccttttggagaacctggatgacagtgtgttttcgaagcgg

SEQ ID NO: 695762 - DNA, 120 bp, Artificial Sequence
  ENSG00000188895_18 (sequence is synthesized)
catgcaaaactggagctggatgagaagagaaggaaaagatgggatattcagaggatcagggaacaaagaattttacagcgactgcagctcagaatgtataaaaagaaaggaattcaggaa

SEQ ID NO: 695763 - DNA, 120 bp, Artificial Sequence
  ENSG00000188895_19 (sequence is synthesized)
tctgagcctgaggttacctcatttttccctgagccagatgatgttgaaagtttgatgattacccccttcttgcctgttgtagcatttggacgaccattaccaaaattaactccacagaat

SEQ ID NO: 695764 - DNA, 120 bp, Artificial Sequence
  ENSG00000188895_20 (sequence is synthesized)
tagttgtagcatgccattcccgagagtggcagagacctgtatatgtgacctttgtcctcacatatgttatcactcgctgataataccctttcatacttccttgactttgttttcattact

SEQ ID NO: 695765 - DNA, 120 bp, Artificial Sequence
  ENSG00000188895_21 (sequence is synthesized)
ctgatttcacaaaaactctttcattcggctaattgtgagttatggagggtgattgggatttcttttcccttttttgggaaatgggctctcaagctaaagctataggatggcagattcaga

SEQ ID NO: 695766 - DNA, 120 bp, Artificial Sequence
  ENSG00000188895_22 (sequence is synthesized)
agtttcaggggtctgtttctatacatttgcctatgttaaaggggtaaaagggctctcttcattagacatgtggaagatgaagcagccccttcctttagagctgtgcctgcatggcactct

SEQ ID NO: 695767 - DNA, 120 bp, Artificial Sequence
  ENSG00000188895_23 (sequence is synthesized)
tctcaccctggtacaccctccttatagtgggtatagtgatttttaaccctaaaataaaacaaacaacctcaccatgagctttaggaccagaagaggaatgacaagtgaagcgatgaagca

SEQ ID NO: 695768 - DNA, 120 bp, Artificial Sequence
  ENSG00000188895_24 (sequence is synthesized)
agccatcttcacagagtagaaaagacatcggagagttggtagataactgtctgaaaagatagttgttcatttgaaactattctgtgatacagtcatgtgggaagggatgtttggctgtga

SEQ ID NO: 695769 - DNA, 120 bp, Artificial Sequence
  ENSG00000188895_25 (sequence is synthesized)
ttattttttcagttaatggataacaatttctttactgctcaaaaaccaaaatctttggaaaagaaagtggggatggttagtttcagaacaagttacagctgtaaacaaaagcacttagta

SEQ ID NO: 695770 - DNA, 120 bp, Artificial Sequence
  ENSG00000188895_26 (sequence is synthesized)
tttgggatggcatgccaaaacctgtataaatgtccttgtatcacatcacttctcaagtattccttcattgggcttcatccttttagcagaactcttggtggtgggatagagacttaggga

SEQ ID NO: 695771 - DNA, 120 bp, Artificial Sequence
  ENSG00000188895_27 (sequence is synthesized)
gggtagggggagagtgtggaaataggtgcttcctttggctggcaaatgtctacatcttgaaacaaacagatgtacctaatgagcttctccattcactttgtaaaaataatttgtatgtgt

SEQ ID NO: 695772 - DNA, 120 bp, Artificial Sequence
  ENSG00000188895_28 (sequence is synthesized)
accatcttggtcctctcccctcccgttttgttaaaatatcaggatagcactcccaggccactttggtctcagtgtaagatccctattaactatctgaaaggaaaatagagccaagacctc

SEQ ID NO: 695773 - DNA, 120 bp, Artificial Sequence
  ENSG00000188895_29 (sequence is synthesized)
tggtctcaaatatataggaattgcctttctttagtcttcaggactattgtgtgaaaacaagtaggggtctaatctcctagaaggtaggggcttttatccttaaagagaatatgtccccag

SEQ ID NO: 695774 - DNA, 120 bp, Artificial Sequence
  ENSG00000188895_30 (sequence is synthesized)
attattagcacttttagaggagaagccaaggtatgtagggtgtgtggctggcccatcagtggagcacgaagagagaatgggataccattgtgggaagagaagaaaagttcctcaggggcc

SEQ ID NO: 695775 - DNA, 120 bp, Artificial Sequence
  ENSG00000188895_31 (sequence is synthesized)
tcccactgctaaagttttttgtgagatgttgatctgtgcttcctggatttgacttttaaaggaattattctggcagcacatgtagtattcttggatgatcttgctgctcttatttctcct

SEQ ID NO: 695776 - DNA, 120 bp, Artificial Sequence
  ENSG00000188895_32 (sequence is synthesized)
tttgtgtgtgtgtgtgtgtgtgtgtggctatgggttttcatttgtaactccatctgcttaggagagtgggctctctataagggaacctgctgtaaacttcattgcagcaaggatgtagag

SEQ ID NO: 695777 - DNA, 120 bp, Artificial Sequence
  ENSG00000188895_33 (sequence is synthesized)
agaaataggacttaattccactaggggctctcatctcacaccttaaggaggagatttctagaaaaactgggccagattttctttgttctccatcattttaatgtggcaggctgttcagtt

SEQ ID NO: 695778 - DNA, 120 bp, Artificial Sequence
  ENSG00000188895_34 (sequence is synthesized)
ttcttactcttacctatgtgatatttcttcgtaacgtgtccaaaaagaaaaaagacccaatcagtgtctcttgactttgttctttgatccctcagtttcttcttgatttcagcatgtgtc

SEQ ID NO: 695779 - DNA, 120 bp, Artificial Sequence
  ENSG00000188895_35 (sequence is synthesized)
gggttcctaattttgggtatgagttagcaaatttaaccattgtgtttgtgccctacccaggggactccccagtttctgacttgaagtagactgagaagaatccacgaggtgctatctggc

SEQ ID NO: 695780 - DNA, 120 bp, Artificial Sequence
  ENSG00000188895_36 (sequence is synthesized)
cagatttaagtagattctatttccttggttctccctctccctgaggacctcttattttattgtcccctcttctaggttaattctcctttgatttgactttgttgagaaggaggttggaca

SEQ ID NO: 695781 - DNA, 120 bp, Artificial Sequence
  ENSG00000188895_37 (sequence is synthesized)
gtagattagcaaagttccaagtgcaaaattacagtgtgttagagtgtggggggaaaattagtcttatttttccctacatgggatacaacactgtgaattcaatcttcaactgaaggccct

SEQ ID NO: 695782 - DNA, 120 bp, Artificial Sequence
  ENSG00000188895_38 (sequence is synthesized)
gcagttctcctaaaacatagttgtttgtttttctttaacaaagtttaagctagtgttaataaattaaaaaaaattgcttgtctgtctacttcagctttgttttatgcccatttcatattg

SEQ ID NO: 695783 - DNA, 120 bp, Artificial Sequence
  ENSG00000188895_39 (sequence is synthesized)
ttgtctgtgttgtaattcataacttttgataccatttctgatgtgtaaaattggttgtcttgtaaatatcttataaagagttcaattgtaaataaactattgtggctgttaatttttgaa

SEQ ID NO: 695784 - DNA, 120 bp, Artificial Sequence
  ENSG00000188895_40 (sequence is synthesized)
cttctgcttcaatttattatatttattggcaaacaaacaattctgcttgtatatttgaaacattggaaaaagaaatccattttctcaataaaaaagaataacacattattttccccttta

SEQ ID NO: 695785 - DNA, 120 bp, Artificial Sequence
  ENSG00000188895_41 (sequence is synthesized)
gcctttggcatttttaaaaaagtgcaatcaataaagcagagttctgtcaagaatgagtaagttaacagccagagacagacactgtgcaggcattgcaaatagatggaattacagcaaaat

SEQ ID NO: 695786 - DNA, 120 bp, Artificial Sequence
  ENSG00000188895_42 (sequence is synthesized)
gtgctcaatgtatttgcctgcttacaacactgggagatgtgtttgccagtaagttgctcatcacaagagcaccagacttgggggtgtaatctccggcaacttgcatgccctctgaaagaa

SEQ ID NO: 695787 - DNA, 120 bp, Artificial Sequence
  ENSG00000188895_43 (sequence is synthesized)
gggttttctgtgctgtgaaatgcatagaactatactttgccatgcacgactgttcctgcaattgatattgtgtgaaatctgggagggtggtctttgggtgttctcaggggccaatggtaa

SEQ ID NO: 695788 - DNA, 120 bp, Artificial Sequence
  ENSG00000188895_44 (sequence is synthesized)
tttttgggttggggagccagcttggggtggggaattttcacctgggcctccgctctttaactatataaacatttatctgtatatctatgtccctgtctggggggcaggaggaatctgcca

SEQ ID NO: 695789 - DNA, 120 bp, Artificial Sequence
  ENSG00000188895_45 (sequence is synthesized)
aagaccaacagtcttactttatcttactatacttcacaaaggttctaaaatgtgaagagtttacttggattgcagtagcccattggttgttcatatatttaaataaaatggtctacaaac

SEQ ID NO: 695790 - DNA, 120 bp, Artificial Sequence
  ENSG00000188895_46 (sequence is synthesized)
ccttgaggagcctgagttgtgaataaacatgtgaatccttattcttgatgcccctatctcaagaggaaggctcaatggcttgttctaggggagccaaagtctttgtgcatgttgttcagg

SEQ ID NO: 695791 - DNA, 120 bp, Artificial Sequence
  ENSG00000188895_47 (sequence is synthesized)
ctggaccagcaaggtagtttgtttggagggaggagggagctgtttaagaagactacatatgtaagttttgagaacactgatcttttatttgaaaaatagggtcaacttttactcacctgc

SEQ ID NO: 695792 - DNA, 120 bp, Artificial Sequence
  ENSG00000188895_48 (sequence is synthesized)
catgttctgagtttaaggtttgatatccttggccatcaactgttgcagggaaaccaccctaaataatgaagaaaagaagtcgtctcagtgtaaaaaaaaaaagtggtgggcttattttct

SEQ ID NO: 695793 - DNA, 120 bp, Artificial Sequence
  ENSG00000188895_49 (sequence is synthesized)
tttcttttgtctgttgttccctcttcccctcccccagagagaaattctcaaaagaacaactcaaaaaacaaaatggcttcctagtgagaacttcagtgatgatcctttcctccatttggg

SEQ ID NO: 695794 - DNA, 120 bp, Artificial Sequence
  ENSG00000188895_50 (sequence is synthesized)
gggcggagtggaaagggacataaaaggtgtgctgataactttgtttgatgaggacccttgttaccagtgattgagagtaggagattgggatttatgaattggttttatagcaatcataac

SEQ ID NO: 695795 - DNA, 63 bp, Artificial Sequence
  ENSG00000188895_51 (sequence is synthesized)
gagattgggatttatgaattggttttatagcaatcataacttgctttagaagtcttctatgcg

SEQ ID NO: 695796 - DNA, 64 bp, Artificial Sequence
  ENSG00000188895_52 (sequence is synthesized)
gaggttgcagtgagccgggattgcgaagtcttctatgctgagaaactatcttgaaacattctta

SEQ ID NO: 695797 - DNA, 120 bp, Artificial Sequence
  ENSG00000188895_53 (sequence is synthesized)
tatctcatggtgttgatttgtggaagttactcaacatggaggtggcactgctcagactgtactgcagtctaggggtgtgatggtaccgtaattacaacacatcatatccttgtatggggg

SEQ ID NO: 695798 - DNA, 120 bp, Artificial Sequence
  ENSG00000188895_54 (sequence is synthesized)
gagtgggaagagaaggaccagtgaaggagaaaaaaatcaaggaaatgtcacccacaaatggtggttaagggctgtgaatcaaaacatatacaaggagatgaaatgagagtatggctgata

SEQ ID NO: 695799 - DNA, 120 bp, Artificial Sequence
  ENSG00000188895_55 (sequence is synthesized)
atgaattgtcaggtattggtttagggtttttgtgatcctgagtttggcagactgcaatggcattttaggttcttttataccatagcaaggacactgaatatggcttcagggaggccatag

SEQ ID NO: 695800 - DNA, 120 bp, Artificial Sequence
  ENSG00000188895_56 (sequence is synthesized)
aatggattcctatcacttggtaactttgtctcttctggggagagacctcttatcctagtgaatagttgtgcaactttggatttaagggtggttccacccctcctccctttctttttctct

SEQ ID NO: 695801 - DNA, 120 bp, Artificial Sequence
  ENSG00000188895_57 (sequence is synthesized)
aacctgacctccctttttcatgctgtggagaatcttggagtgcttaacactcttacattactggcttcccagttggttgaatatcttagttggaaatggtagttgttgcggtaaacatgt

SEQ ID NO: 695802 - DNA, 120 bp, Artificial Sequence
  ENSG00000188895_58 (sequence is synthesized)
ttggcctctttttgtgtatgaccttcctcaattctactttctgtggaacaccaacacatgatctaaacggtagacctaaacagctctcccttaacaaggcagtcatttctctttaccctg

SEQ ID NO: 695803 - DNA, 120 bp, Artificial Sequence
  ENSG00000188895_59 (sequence is synthesized)
tctagaggagtcagcaagggtcttcctagcatctggattgtgtgagttgcttttatagagcaggttttgggtaaacagtaatgttgggtttctttgttttgtttggtttgtttttcccag

SEQ ID NO: 695804 - DNA, 120 bp, Artificial Sequence
  ENSG00000188897_0 (sequence is synthesized)
attcctttcaggaccacgctgagctgctctggagcctgaggctggtggcacggggctggcccaggaagtgatgccggcccccgtgggactcctcggtctggtcctgctctggccgctgat

SEQ ID NO: 695805 - DNA, 120 bp, Artificial Sequence
  ENSG00000188897_1 (sequence is synthesized)
ggcagtgactgcggagaaaattccagattcgcaggtggggcaggtggcctcctgcatgactgcgtgcacagggtcagctgggccccacctccctgtgggcaccagatacacctatcattt

SEQ ID NO: 695806 - DNA, 120 bp, Artificial Sequence
  ENSG00000188897_2 (sequence is synthesized)
ttccaccaacaccagcaccagcctgcaggacgtcctggtggaggggagtggtcttggcctccaaggcttggctgtccttgatgtgcttggcctgtgccagatggctttatggctccaaga

SEQ ID NO: 695807 - DNA, 120 bp, Artificial Sequence
  ENSG00000188897_3 (sequence is synthesized)
cttccaggtgacatccatcctgggggccaaggtggagcttctgaaggagtcggagagcctgagtgccaccctgggccgtaacccactccgcttcatcctgcactctgggcgtgtggccca

SEQ ID NO: 695808 - DNA, 120 bp, Artificial Sequence
  ENSG00000188897_4 (sequence is synthesized)
cctgtgtccccatcccactgagccacgctgggtgctgaacgtgaagcgtgctgtgctgagcctcctgcagggccacccaggggcccacagccccaagacctttgatgaggtggacatcct

SEQ ID NO: 695809 - DNA, 120 bp, Artificial Sequence
  ENSG00000188897_5 (sequence is synthesized)
gggccgatgtcctaccacataccagcaccatggggactggctacacaagacaaaggacctggcacggtgctccctgcgcaggggacgctcatcactccattctcaggccctgcctggagt

SEQ ID NO: 695810 - DNA, 120 bp, Artificial Sequence
  ENSG00000188897_6 (sequence is synthesized)
ggctcccggcctgacctcccgcctgacctgcgtccagagcttccgggccggagtgctgagggaggcctcctgcacagagctggactccgcggggccacttcctgcaaaggcaagcgctgt

SEQ ID NO: 695811 - DNA, 120 bp, Artificial Sequence
  ENSG00000188897_7 (sequence is synthesized)
gcagatgaggaccctctcctcactcagtctgctgcacgagatgccccaagatccagcgggcacagatccagatgatagagacgatgaagacatgaccccaagcagcctgctgtatgagtg

SEQ ID NO: 695812 - DNA, 120 bp, Artificial Sequence
  ENSG00000188897_8 (sequence is synthesized)
ggaggagacaccatcccaggccatggtggccaccgcagccacattagtaaggaggctgtgcctggctcagaccactagcttggaggccatggacttgttcctgacactggtgtcccagct

SEQ ID NO: 695813 - DNA, 120 bp, Artificial Sequence
  ENSG00000188897_9 (sequence is synthesized)
ccagggcctttctgggggtgagctgatggaactctggcaatattcttccttcaaatgccgagacaatgggcagccactgttggatgccctgccttcctgtgggacggagcactgtgtggg

SEQ ID NO: 695814 - DNA, 120 bp, Artificial Sequence
  ENSG00000188897_10 (sequence is synthesized)
cctcatgaaggaactcatcgcatcagccgcggtggaggcagacgaggtggaggcgtggctctcatcactggccttcctcccacagcccacagatgctatggtccacatgctgctgccact

SEQ ID NO: 695815 - DNA, 120 bp, Artificial Sequence
  ENSG00000188897_11 (sequence is synthesized)
gctccagaccccgagggccagccctggcgccttcctgggcatctcagccctggtgcacaacctctgtgcttctctggacgggccctgcggccagctgcctggagtcggctccctagtgag

SEQ ID NO: 695816 - DNA, 120 bp, Artificial Sequence
  ENSG00000188897_12 (sequence is synthesized)
gatcctgggagacgccttgggtgagaactgtaccatccaggagccctcggatgatgacaagctccagcttgtgctgaaggcagtcggcaacgcgggcttggcagccatggctctcacccc

SEQ ID NO: 695817 - DNA, 120 bp, Artificial Sequence
  ENSG00000188897_13 (sequence is synthesized)
tacgttgagtgcctgtgcatctctgagaagcagcacacccgagatccggctgggggccatccaggccttccgaagggtcccctgctctgcagacagatcggtgctctcccgtctatacca

SEQ ID NO: 695818 - DNA, 120 bp, Artificial Sequence
  ENSG00000188897_14 (sequence is synthesized)
atccctggaggaggatgctgagatccgtatcaatgcctacctggccctgatgagatgccccagtgaggaggtgtttgcccaggtgcggcgcacccaggcaggcgagctctccacccaggt

SEQ ID NO: 695819 - DNA, 120 bp, Artificial Sequence
  ENSG00000188897_15 (sequence is synthesized)
gggttcttttgtgtggagtcacatcctgcagctgctggagacgcacgaccccctgaaacgggccctccgggacaccctccccgaggacatcctcagccaggagttccacccagaaatgtg

SEQ ID NO: 695820 - DNA, 120 bp, Artificial Sequence
  ENSG00000188897_16 (sequence is synthesized)
gaaacactcgtcctattctgatgtcaccttccgatcagtgtctggcagcctgggagccaacctggaggggacccttctcttctctcctgcctcctttcttccccgttctgccacagtcaa

SEQ ID NO: 695821 - DNA, 120 bp, Artificial Sequence
  ENSG00000188897_17 (sequence is synthesized)
cctgaccatccacaccatgggccgtgccttcaaccttctggagcttgggctccggctggaaaatgctgaggaaattgctcacaggctgtttggcaggaagtcattctggggtcaggaaga

SEQ ID NO: 695822 - DNA, 120 bp, Artificial Sequence
  ENSG00000188897_18 (sequence is synthesized)
cgggagagagcctgagccagaggaacccccagggccagaaccagggcctgcaccacagccagccagccccgagtgtccaggagacagagacagaaggatgagatacctacagcagaaggt

SEQ ID NO: 695823 - DNA, 120 bp, Artificial Sequence
  ENSG00000188897_19 (sequence is synthesized)
gacccggaggcgtggggcccggcaggctctgcgatgcgagctgagcgtgaagttgctggggcaggagctgagctttgtgaactgcggggccacggggagtcacgtgaaccactggcccct

SEQ ID NO: 695824 - DNA, 120 bp, Artificial Sequence
  ENSG00000188897_20 (sequence is synthesized)
taacttggccgagctcgccatcaagctcatgaaggggcaggaggtgcagatgaaccggaggctgagcctggccgcacaggaactggtctttcccaccgtgtctggccttcctgcccggct

SEQ ID NO: 695825 - DNA, 120 bp, Artificial Sequence
  ENSG00000188897_21 (sequence is synthesized)
gaccctaaatgcctcggctgccatcagcatccgggtccgaggaaccactgacttccagcagcgctcggatttctctgtgaatggttatgtcaagcccagtgccctgctccagatctcagc

SEQ ID NO: 695826 - DNA, 120 bp, Artificial Sequence
  ENSG00000188897_22 (sequence is synthesized)
tcagatgggcacagcgggcatcctggggcaggccgggctgaggtgggtgaccagcgtccgcagcgccgccagcctggatggcgggatccaggtgcagaagggccgggtccttaaggtgca

SEQ ID NO: 695827 - DNA, 120 bp, Artificial Sequence
  ENSG00000188897_23 (sequence is synthesized)
tctgaacacgcctgaggaggccgtggagctgctcagcttcagctctcagctgtacctcatcaccagggatggcgtgaggagcctcagacatgtccctggcccttctgaggtccagtcctg

SEQ ID NO: 695828 - DNA, 120 bp, Artificial Sequence
  ENSG00000188897_24 (sequence is synthesized)
tactggtgaggaagtgtcctacacctggggctggcgactgtgcactggagtgacctggccggtgcctggccagccctacctgctctcattgcctgtgttcgcggccgtgacgctgcagaa

SEQ ID NO: 695829 - DNA, 120 bp, Artificial Sequence
  ENSG00000188897_25 (sequence is synthesized)
acgggacccggggctccgacagtacctgctggaagctgcctataccctgcagccccagaagggcagctggttcccccaagaagccacagcccacgtcttcatgggcacgcccgggtcaga

SEQ ID NO: 695830 - DNA, 120 bp, Artificial Sequence
  ENSG00000188897_26 (sequence is synthesized)
agtgctgagggacgtcggggtggacatgagctacagcttgccccagaacaagttccggctcaagcttctccatcccaagaagaaaatcgagctggacggaaagatggaggctcttgggag

SEQ ID NO: 695831 - DNA, 120 bp, Artificial Sequence
  ENSG00000188897_27 (sequence is synthesized)
tgcccacacgggtcacttggagctggtgctggatgacagggacgtctactacatcaagggctggagtgacctgcagccagccatgggtggcgaggctgagcggttccaggcgcagctgga

SEQ ID NO: 695832 - DNA, 120 bp, Artificial Sequence
  ENSG00000188897_28 (sequence is synthesized)
ggtgaaactggtgacggggggcagccccgtcgtcttcaccgggaacctcacacggcaggtgggcagcaagctggccttctccgcatcgctgagccatctgctgagtgaccaggccaacgt

SEQ ID NO: 695833 - DNA, 120 bp, Artificial Sequence
  ENSG00000188897_29 (sequence is synthesized)
gacagcactgctggagaggaaggaggagaatggacggagggtggccgccctgggtgccgagctgtttgtgccagggctggtggggcttcgtgcccttggcctgctgcagcaacggggcca

SEQ ID NO: 695834 - DNA, 120 bp, Artificial Sequence
  ENSG00000188897_30 (sequence is synthesized)
gctctggaccaactccctgaggatccagtacagcctcctgggtcaggcaaagcaggcggcacacgagtgcagcaccagccagaagctgcgggcagacagtggctcagacggtgcctacag

SEQ ID NO: 695835 - DNA, 120 bp, Artificial Sequence
  ENSG00000188897_31 (sequence is synthesized)
gctggagctgcgccacgagctccactgcacacagatcctagccttcagccacaaggtccagctctggcatgaggaggactcgggccacctgcactcacagctggaggtgagctacgggaa

SEQ ID NO: 695836 - DNA, 120 bp, Artificial Sequence
  ENSG00000188897_32 (sequence is synthesized)
gcactgggacaagaacagcaacaagaggcatctccgtgtcagccagaccttcaagaatgactcggggcccgccctgagcaatcacttcatggagtttgtgctgcaggtgcctgagaggca

SEQ ID NO: 695837 - DNA, 120 bp, Artificial Sequence
  ENSG00000188897_33 (sequence is synthesized)
ggtggattgccgcgtgcagctttaccacttgagcctccgcctgccctatgtggagagcagcagtcacctgaaggtgcagtacaatgggcggccgctgtttgtggcaggcgggcagtggaa

SEQ ID NO: 695838 - DNA, 120 bp, Artificial Sequence
  ENSG00000188897_34 (sequence is synthesized)
ggacacatctcgggccaccctgtggaagtgggaaggagccttgaacctggatagtccatggctgatggtctctgcagctcacaggctatactggccacaccgagctgtgttccaggctgt

SEQ ID NO: 695839 - DNA, 120 bp, Artificial Sequence
  ENSG00000188897_35 (sequence is synthesized)
cctggagctaacgctgggcaaggcctggaccctaaaggacctggtggtcagcgtgggctgcaggagtcagggccccaacagggaaggcaagatccaggtttacaccgcagctaccaccta

SEQ ID NO: 695840 - DNA, 120 bp, Artificial Sequence
  ENSG00000188897_36 (sequence is synthesized)
cctccgggtttccacagtgacagtcttggcacagagcctcttccacagctggagcgaactcgagtcagcctggaacgcagcagtgcagggcgagatccatgctgagaacagccgggaccg

SEQ ID NO: 695841 - DNA, 120 bp, Artificial Sequence
  ENSG00000188897_37 (sequence is synthesized)
taagatcctgaactgctggttgaaaggcccccagcaggagctgaacctaacagcggcctacaggcacctggagtggccccggaagacccaggtgtcgctcacggctgtgcggattggtgc

SEQ ID NO: 695842 - DNA, 120 bp, Artificial Sequence
  ENSG00000188897_38 (sequence is synthesized)
ccagggccagcctcggggcctgcagttggaaggagagctggaggagctgaggcaagacaggacattgtaccggaaacggggggccttgctccttaggcacccgttgcacctgcccatccc

SEQ ID NO: 695843 - DNA, 120 bp, Artificial Sequence
  ENSG00000188897_39 (sequence is synthesized)
gcagagcctcctcctgcaggagaccttcacagctgataggcgacaccagcgctattccctggagactagggttgtcctgaatggccgagaggaaaccctgcagaccatggtcctgggctg

SEQ ID NO: 695844 - DNA, 120 bp, Artificial Sequence
  ENSG00000188897_40 (sequence is synthesized)
ccaggccggacacccctacgtctgtgcaggtctgatgcatccatacgatggcaaagtcatccccaggaacacagaggggtgcctggttacttggaatcagcacacggctaagaacagaga

SEQ ID NO: 695845 - DNA, 120 bp, Artificial Sequence
  ENSG00000188897_41 (sequence is synthesized)
ggtcgaggccactttgaaagtccaccggaaagttgtcctgcacttgaagggtttgcatcatgacagatctcagcatggggaaatccggcacagcctggccctggacttggcccattccta

SEQ ID NO: 695846 - DNA, 120 bp, Artificial Sequence
  ENSG00000188897_42 (sequence is synthesized)
ccagctgagcttcccccaggccctgagcttggatgggggcatcatctttagacagagtccccaaggaacattcaactttggcatggatgcacgagctgccgtcaatcacaacgtcacatc

SEQ ID NO: 695847 - DNA, 120 bp, Artificial Sequence
  ENSG00000188897_43 (sequence is synthesized)
ccaggcctcggtccagctgaacggatctgactccgactttgcatttttcttccaactcaggcatcctcacggaccaacatttcctccaaacttccaggtgcaggcagctgccgggcgcta

SEQ ID NO: 695848 - DNA, 120 bp, Artificial Sequence
  ENSG00000188897_44 (sequence is synthesized)
tgtgcaaatgtctggccgggagctggttctgctggaggtcgacgccagccaggacactcggaggagcagccggggctggggtgtgagtgtccttctccaccaggctgtcctcagtgcccc

SEQ ID NO: 695849 - DNA, 120 bp, Artificial Sequence
  ENSG00000188897_45 (sequence is synthesized)
cagggctgttcggctgcagctgtctgcaaagatcaccccagcaaggatttggctgttttccaaggcactgctggaccagaacacagcacagttgctcctcaaggcatctgaggaatggag

SEQ ID NO: 695850 - DNA, 120 bp, Artificial Sequence
  ENSG00000188897_46 (sequence is synthesized)
gggaggccggatcctgactttccagagccaaacccggcacacggtggctggctgggcagcgatgccccgcctcctgacactcacaggaaggctgaagcagaaggagacacttcaagaggg

SEQ ID NO: 695851 - DNA, 120 bp, Artificial Sequence
  ENSG00000188897_47 (sequence is synthesized)
caccctcagtgtcactgctgactcagctgtgctgggcttcctcctgcgggaccagcatgagaaggcagggaacggcaccagcgtgcgcagcgtgacctgtgtccttgcccagaacagcag

SEQ ID NO: 695852 - DNA, 120 bp, Artificial Sequence
  ENSG00000188897_48 (sequence is synthesized)
ccaggccttgcctggagagctccagctgaagggccggctgcaggcccagacgaggaacctgagggcccaggccagcatccgggcccatgcagccagcctggctctgggtggcgcctgctc

SEQ ID NO: 695853 - DNA, 120 bp, Artificial Sequence
  ENSG00000188897_49 (sequence is synthesized)
ctggggcccccggcacggacagcttgcgggtggcccgacacacaatatcagcacgctgagtgatgcaggactcccctccgaggcagggatgctcctgtctctcacccacgtggcttccaa

SEQ ID NO: 695854 - DNA, 120 bp, Artificial Sequence
  ENSG00000188897_50 (sequence is synthesized)
ctgctcagcacgcctggcgctgtggaacgcgggggctcagctagacggtgccattggcctggaggacgtgacccccgagtcctcgggcctccagctccatgccagcctccgtcacaccca

SEQ ID NO: 695855 - DNA, 120 bp, Artificial Sequence
  ENSG00000188897_51 (sequence is synthesized)
caccatgcccagcctcaagcactggggcctccccttctccttagatggccacgggcacttccaggtcaactgcagtggagacgcctcgcccacccagctgttaggatggtgccgagggga

SEQ ID NO: 695856 - DNA, 120 bp, Artificial Sequence
  ENSG00000188897_52 (sequence is synthesized)
catcgctgggcagcctctcgaggtctctgtggacattcacaatggcagctccggcttcgagcattctggacgcatcctgatggggcccacattcctcaactactctgtgagctgctatta

SEQ ID NO: 695857 - DNA, 120 bp, Artificial Sequence
  ENSG00000188897_53 (sequence is synthesized)
ccatgatgggcacctggagctctccggccggagctggcacaacagtgaggctttgttgtgggcagggttcccaggcgaggcctgccttagtgctgagctgcagatacacgagacccagac

SEQ ID NO: 695858 - DNA, 120 bp, Artificial Sequence
  ENSG00000188897_54 (sequence is synthesized)
ccaggccagggtggccctccatggtggggacagtggagtcagcatggacctggcagccctggtggctcggccacgacgtggcccactgcagctggtggccagtgccagccacacagtgcc

SEQ ID NO: 695859 - DNA, 120 bp, Artificial Sequence
  ENSG00000188897_55 (sequence is synthesized)
tgctctccagaggctgggcctgcccttcaccaaccagctcgtgttccaaggactctgggaggcagaagagatgagctcctcactgcagctgacctgcgattctcaggccaccttggtcct

SEQ ID NO: 695860 - DNA, 120 bp, Artificial Sequence
  ENSG00000188897_56 (sequence is synthesized)
tgacgtccgtggccagaaccaggcagtcagcaaagagctgctgttctcaggccggcatcgcctccccttcctcctgggtctctgccccagctcagcctcagcctcagctaagctacacta

SEQ ID NO: 695861 - DNA, 120 bp, Artificial Sequence
  ENSG00000188897_57 (sequence is synthesized)
ctccaagggtgaggttcagagcatgttcgccttgggcgtggaggagcgtcattttcacatcagcacccggcaggtagctgctaaggccggtctcaacaatttcatcaaactggaacagac

SEQ ID NO: 695862 - DNA, 120 bp, Artificial Sequence
  ENSG00000188897_58 (sequence is synthesized)
ctttctgcagctcagcgctcttcccagggagctgttcctgcagaccgcatacgagcgagctcatgggacccgtgtcctgcgccaggtggtgctgtgggatggccaggaggtggccctcac

SEQ ID NO: 695863 - DNA, 120 bp, Artificial Sequence
  ENSG00000188897_59 (sequence is synthesized)
cgggagcctttctgggcctttccccaagcccaccaggaacctcagcctgcaggtggagctcacccacccgctgcccctccccctgccgcgacactgcagcctccgcctgtcctcagagca

SEQ ID NO: 695864 - DNA, 120 bp, Artificial Sequence
  ENSG00000188897_60 (sequence is synthesized)
tttgggaggcagccaccgggatggcctggttgtcggctgggatggcagggaccaggtgctggtctcctcctccctgtggctggggaagagtgagctggccgcccgcctggccctggctca

SEQ ID NO: 695865 - DNA, 120 bp, Artificial Sequence
  ENSG00000188897_61 (sequence is synthesized)
cccattcaacctcccttggcggcaagccgaggccagtggccttgctgagagcaggggtggcaggcagagccggcaggtgcagctcacctggaacagaggacaacctgcgacgctgcagct

SEQ ID NO: 695866 - DNA, 120 bp, Artificial Sequence
  ENSG00000188897_62 (sequence is synthesized)
cacctgggctgacgggtccttagcacacagcaccgcctgggacggctgcctggccgcctccccggggcagctccaggaaacctggggcctgaacagcctccaggcctgcggggccttcac

SEQ ID NO: 695867 - DNA, 120 bp, Artificial Sequence
  ENSG00000188897_63 (sequence is synthesized)
gcagaccccagctgtgttcgttgaacagctcaacgtgtcctggggccagcaccgcatgcggcagaacttgacctacgagaggcattggccatctcagccagacaagatcatcatggaggc

SEQ ID NO: 695868 - DNA, 120 bp, Artificial Sequence
  ENSG00000188897_64 (sequence is synthesized)
cacgctggagcacgtcctcggggcctcttgtacccgtcagagcttctggggagaagtacagactgactatgcacgctggctgcggcactccctccacctggggctctgtgacctgcccag

SEQ ID NO: 695869 - DNA, 120 bp, Artificial Sequence
  ENSG00000188897_65 (sequence is synthesized)
ggccctcttggtcgtcggggagcacaccctgggccagggtggactcctgctgcgttcccgctgccacctgggccttgcaccagacccagaccacggcctgcatctcagcctgaccctcca

SEQ ID NO: 695870 - DNA, 120 bp, Artificial Sequence
  ENSG00000188897_66 (sequence is synthesized)
aaaccacagcaggcctcgttcagctgacttctccggggcactggagcttcgtggctccaaggctcagcgggttggcctactgggccgtgtctccacctcgacttctcaaagcctggtccg

SEQ ID NO: 695871 - DNA, 120 bp, Artificial Sequence
  ENSG00000188897_67 (sequence is synthesized)
gttggagggaagcgtggacaacagagaggagaaagtgaggctgtctgtgttccgggccccaagctgtctgcaggcctctgtggcccatgaggaggggggcagagaggagagtgtggtgct

SEQ ID NO: 695872 - DNA, 120 bp, Artificial Sequence
  ENSG00000188897_68 (sequence is synthesized)
gcgggcatgtgcccatgggcggacagccgaggcggaggtcctgttccgggatggcaggcagccctcccagccgctgggacgcctgaccctgcaggctgccaaccagagtctcctgctggc

SEQ ID NO: 695873 - DNA, 120 bp, Artificial Sequence
  ENSG00000188897_69 (sequence is synthesized)
cgcgcgcggctgccaggggggcctgctgggccatgtggagtccaggattgcagcagttggctcccaggtgcaagcccggctggaagagaaggttcaaggcttgggtgcctctgtgagaag

SEQ ID NO: 695874 - DNA, 120 bp, Artificial Sequence
  ENSG00000188897_70 (sequence is synthesized)
gttccagcaattggtgcagccggcaggcaccctggacggcgtggcaggcctccttctgcagctgtcccaggcggggcgggaggccatgcaggcgagtggttgggcagtagccactttgtg

SEQ ID NO: 695875 - DNA, 120 bp, Artificial Sequence
  ENSG00000188897_71 (sequence is synthesized)
ggcccggagccaggcactgacccagcacctgcctctttacctggagtggctgcaggtggggctggagcagctgcgggaggagctggaatggcccctggccacactgaaggatgcctacct

SEQ ID NO: 695876 - DNA, 120 bp, Artificial Sequence
  ENSG00000188897_72 (sequence is synthesized)
ggaggtgacactgcggcccctggaggaggtgtggcgggagcgagcagaggaggccatgcggcggctgcaggcctgggtgcccgggatgccaggcaaagggggtccaaggcccatcagggc

SEQ ID NO: 695877 - DNA, 120 bp, Artificial Sequence
  ENSG00000188897_73 (sequence is synthesized)
ggccctgggggccatgaaaggagccctggagctggccgcccaacagatgctgtcttgggctgaggccacgttctcacgggcactgaagaggctctgcaaaccactgctggacctgtacag

SEQ ID NO: 695878 - DNA, 120 bp, Artificial Sequence
  ENSG00000188897_74 (sequence is synthesized)
cctgtcggccaggaaccgctcagtggtggtgatgctgccactgttgcctgcgggggacgagcccctggacgtggcccgggtgaccagctacctcatggaggagaagctgctgcggccgct

SEQ ID NO: 695879 - DNA, 120 bp, Artificial Sequence
  ENSG00000188897_75 (sequence is synthesized)
ccgagagctgtctggggccaacgtgctggctgagtactactggctcagacgccgcctgctggcgggcccctgggaataccatgccctggtggctggggcccagcacgtggtgaccttcga

SEQ ID NO: 695880 - DNA, 120 bp, Artificial Sequence
  ENSG00000188897_76 (sequence is synthesized)
cggccgggtatgggacctcagcacccagtgcggcagcatcctcctggcccaggactttgctcacaacacattctcgctgacgctgagtcggacaggctcggggctcacagccctgttcgt

SEQ ID NO: 695881 - DNA, 120 bp, Artificial Sequence
  ENSG00000188897_77 (sequence is synthesized)
ggaacttaaccacaagaccctcatcctctaccccagtctgcaggcctacaggctgtacaactcctccctgccgggggacagttgtccggacctcaagctgcatcctgccacgacaaggaa

SEQ ID NO: 695882 - DNA, 120 bp, Artificial Sequence
  ENSG00000188897_78 (sequence is synthesized)
ggacgtctccaggattgagctggccagcgaggacggggtgtctgtctcctgtgacgtgcccaccggcctctgcagcctgactctgggcctctggcagcacggcatatccgctggccttct

SEQ ID NO: 695883 - DNA, 120 bp, Artificial Sequence
  ENSG00000188897_79 (sequence is synthesized)
gggcaccaatgacaatgaagcaggcaatgagctgatgttgccggatggctctatggcccgcagcctggaggagctcagcctggcctggcaggtgggtggtgactgcagggccactgagaa

SEQ ID NO: 695884 - DNA, 120 bp, Artificial Sequence
  ENSG00000188897_80 (sequence is synthesized)
gcctcagcaggagcaggcctgcccgggacagctccccgcctgctgggccttcttcgagggcccccactccagcttgagggactgcttccgggtggtagaccctacaccattcctcagcct

SEQ ID NO: 695885 - DNA, 120 bp, Artificial Sequence
  ENSG00000188897_81 (sequence is synthesized)
gtgtgtgcaggtcccctgtggcacccaggagctccagcctgcctgcaacctggcggccgcctacatccacctgtgtgcccgtggattcgtacccctggcccctcctccacagtgtgtttg

SEQ ID NO: 695886 - DNA, 120 bp, Artificial Sequence
  ENSG00000188897_82 (sequence is synthesized)
agattttgtctatgccagcactaggctgccagacttcaaactccttcaccttctactgcaattccagctccctgacaatgacaagattcatggctgggacagaataaccagcatggaatg

SEQ ID NO: 695887 - DNA, 120 bp, Artificial Sequence
  ENSG00000188897_83 (sequence is synthesized)
ccgggaaactcagaaccgcacgtgctgcaaacgcacggaagcagggctcattgccactgggctcaaaatacttccgggggacatgaaactctcccactggtctgagtaattctccccctt

SEQ ID NO: 695888 - DNA, 120 bp, Artificial Sequence
  ENSG00000188897_84 (sequence is synthesized)
cctccacacttccactgcaaaccaggagacagtgcggccagcaagtaccagctctgcagagaaaactccacctggcccctgttcatgcccaagagatttattcacttattcaacagccat

SEQ ID NO: 695889 - DNA, 120 bp, Artificial Sequence
  ENSG00000188897_85 (sequence is synthesized)
ttgggaagccactgcttcagaacgctgactgcgtggtgggggacacgaagccaggtcctcagctgcttggtactggctttccctgcctgatccaggggtcttttcaggcaggagtttcct

SEQ ID NO: 695890 - DNA, 120 bp, Artificial Sequence
  ENSG00000188897_86 (sequence is synthesized)
tgaagggaagtgatggccccaagcctcttaatcagaagcccaggtaggcagcttctctctttggggtagacacactgggactgaatgcttcaggggaccctggggagggcctctgttttg

SEQ ID NO: 695891 - DNA, 120 bp, Artificial Sequence
  ENSG00000188897_87 (sequence is synthesized)
gtaggggcacctgtgaactcaggcctccaggctacatcattggaagtgttttactttcttttgggaatgtaactttttcctttgagttttcaactgaaaaataaagctggcagaatccaa

SEQ ID NO: 695892 - DNA, 120 bp, Artificial Sequence
  ENSG00000188897_88 (sequence is synthesized)
agtgcaatcttggctcgctgctgcctcaacttcccgggcacattctacgccaggggtggcatgatcccattggcatcttgggggggtgggcattctccagtttgtgctgcaggtgcctga

SEQ ID NO: 695893 - DNA, 120 bp, Artificial Sequence
  ENSG00000188897_89 (sequence is synthesized)
gtgagctggcagtggcgtcagttgagtcccctgaacccccttgggcctggagctgctgacctcagctcacgtgccctaccctttgtgtgtgtcctcacccacccagtggagctcacccac

SEQ ID NO: 695894 - DNA, 120 bp, Artificial Sequence
  ENSG00000188897_90 (sequence is synthesized)
cggggcactggaggtcagtggccaggatggggctgacagtccctgggaaagatatcccggcatccctgcggttcctccctggccagcaggcccccaactgcctgggcggccccgccatct

SEQ ID NO: 695895 - DNA, 120 bp, Artificial Sequence
  ENSG00000188897_91 (sequence is synthesized)
gcggccgcctacatccacctgtgtgcccgtggattcgtacccctggcccctcctccacagtgtgacacgattccaacccgttggatacaccttcccccagtcattcaatcgaacacgaat

SEQ ID NO: 695896 - DNA, 120 bp, Artificial Sequence
  ENSG00000188897_92 (sequence is synthesized)
ctaggtgttgctgtgcagtgattctggagaggtaaagtcccaagtcacctgaccttaaggtagggggcctgagccaatcacatgagccctctctaaacctgggcccaggaaatcagaggc

SEQ ID NO: 695897 - DNA, 120 bp, Artificial Sequence
  ENSG00000188897_93 (sequence is synthesized)
agccggcaaggaaatgggacctcagccctacaattgcaaggaactgaattctgccaacagcctgatgagcctggatgcccattcgggattcttcccagagcctcctgaagagagctcagc

SEQ ID NO: 695898 - DNA, 120 bp, Artificial Sequence
  ENSG00000188897_94 (sequence is synthesized)
tggctgacaccttgattttggcctgaagaggtcctgagcagagaacctaacaacaccctaccagaccccgacccacagaaactgtgagatattaatacatttgtttttttaagctgctaa

SEQ ID NO: 695899 - DNA, 69 bp, Artificial Sequence
  ENSG00000188897_95 (sequence is synthesized)
gccaaggctggagtgacctgcagccagccatgggtggcgaggctgagcggttccaggcgcagctggagg

SEQ ID NO: 695900 - DNA, 120 bp, Artificial Sequence
  ENSG00000188897_96 (sequence is synthesized)
ttgtctaggctggagtctggagtgcaatgacttgatctcagctcaccgcaacctccacgtcccaggctgggcgagatggctcacgcctgtaatactagcactttgggaggccgaggcagg

SEQ ID NO: 695901 - DNA, 120 bp, Artificial Sequence
  ENSG00000188906_0 (sequence is synthesized)
cccgcggggagcgctggctgcgggcggtgagctgagctcgcccccggggagctgtggccggcgcccctgccggttccctgagcagcggacgttcatgctgggagggcggcgggttggaag

SEQ ID NO: 695902 - DNA, 120 bp, Artificial Sequence
  ENSG00000188906_1 (sequence is synthesized)
gaagcaggtgccaccatggctagtggcagctgtcaggggtgcgaagaggacgaggaaactctgaagaagttgatagtcaggctgaacaatgtccaggaaggaaaacagatagaaacgctg

SEQ ID NO: 695903 - DNA, 120 bp, Artificial Sequence
  ENSG00000188906_2 (sequence is synthesized)
gtccaaatcctggaggatctgctggtgttcacgtactccgagcgcgcctccaagttatttcaaggcaaaaatatccatgtgcctctgttgatcgtcttggactcctatatgagagtcgcg

SEQ ID NO: 695904 - DNA, 120 bp, Artificial Sequence
  ENSG00000188906_3 (sequence is synthesized)
agtgtgcagcaggtgggttggtcacttctgtgcaaattaatagaagtctgtccaggtacaatgcaaagcttaatgggaccccaggatgttggaaatgattgggaagtccttggtgttcac

SEQ ID NO: 695905 - DNA, 120 bp, Artificial Sequence
  ENSG00000188906_4 (sequence is synthesized)
caattgattcttaaaatgctaacagttcataatgccagtgtaaacttgtcagtgattggactgaagaccttagatctcctcctaacttcaggtaaaatcaccttgctgatattggatgaa

SEQ ID NO: 695906 - DNA, 120 bp, Artificial Sequence
  ENSG00000188906_5 (sequence is synthesized)
gaaagtgatattttcatgttaatttttgatgccatgcactcatttccagccaatgatgaagtccagaaacttggatgcaaagctttacatgtgctgtttgagagagtctcagaggagcaa

SEQ ID NO: 695907 - DNA, 120 bp, Artificial Sequence
  ENSG00000188906_6 (sequence is synthesized)
ctgactgaatttgttgagaacaaagattatatgatattgttaagtgcgttaacaaattttaaagatgaagaggaaattgtgcttcatgtgctgcattgtttacattccctagcgattcct

SEQ ID NO: 695908 - DNA, 120 bp, Artificial Sequence
  ENSG00000188906_7 (sequence is synthesized)
tgcaataatgtggaagtcctcatgagtggcaatgtcaggtgttataatattgtggtggaagctatgaaagcattccctatgagtgaaagaattcaagaagtgagttgctgtttgctccat

SEQ ID NO: 695909 - DNA, 120 bp, Artificial Sequence
  ENSG00000188906_8 (sequence is synthesized)
aggcttacattaggtaattttttcaatatcctggtattaaacgaagtccatgagtttgtggtgaaagctgtgcagcagtacccagagaatgcagcattgcagatctcagcgctcagctgt

SEQ ID NO: 695910 - DNA, 120 bp, Artificial Sequence
  ENSG00000188906_9 (sequence is synthesized)
ttggccctcctcactgagactattttcttaaatcaagatttagaggaaaagaatgagaatcaagagaatgatgatgagggggaagaagataaattgttttggctggaagcctgttacaaa

SEQ ID NO: 695911 - DNA, 120 bp, Artificial Sequence
  ENSG00000188906_10 (sequence is synthesized)
gcattaacgtggcatagaaagaacaagcacgtgcaggaggccgcatgctgggcactaaataatctccttatgtaccaaaacagtttacatgagaagattggagatgaagatggccatttc

SEQ ID NO: 695912 - DNA, 120 bp, Artificial Sequence
  ENSG00000188906_11 (sequence is synthesized)
ccagctcatagggaagtgatgctctccatgctgatgcattcttcatcaaaggaagttttccaggcatctgcgaatgcattgtcaactctcttagaacaaaatgttaatttcagaaaaata

SEQ ID NO: 695913 - DNA, 120 bp, Artificial Sequence
  ENSG00000188906_12 (sequence is synthesized)
ctgttatcaaaaggaatacacctgaatgttttggagttaatgcagaagcatatacattctcctgaagtggctgaaagtggctgtaaaatgctaaatcatctttttgaaggaagcaacact

SEQ ID NO: 695914 - DNA, 120 bp, Artificial Sequence
  ENSG00000188906_13 (sequence is synthesized)
tccctggatataatggcagcagtggtccccaaaatactaacagttatgaaacgtcatgagacatcattaccagtgcagctggaggcgcttcgagctattttacattttatagtgcctggc

SEQ ID NO: 695915 - DNA, 120 bp, Artificial Sequence
  ENSG00000188906_14 (sequence is synthesized)
atgccagaagaatccagggaggatacagaatttcatcataagctaaatatggttaaaaaacagtgtttcaagaatgatattcacaaactggtcctagcagctttgaacaggttcattgga

SEQ ID NO: 695916 - DNA, 120 bp, Artificial Sequence
  ENSG00000188906_15 (sequence is synthesized)
aatcctgggattcagaaatgtggattaaaagtaatttcttctattgtacattttcctgatgcattagagatgttatccctggaaggtgctatggattcagtgcttcacacactgcagatg

SEQ ID NO: 695917 - DNA, 120 bp, Artificial Sequence
  ENSG00000188906_16 (sequence is synthesized)
tatccagatgaccaagaaattcagtgtctgggtttaagtcttataggatacttgattacaaagaagaatgtgttcataggaactggacatctgctggcaaaaattctggtttccagctta

SEQ ID NO: 695918 - DNA, 120 bp, Artificial Sequence
  ENSG00000188906_17 (sequence is synthesized)
taccgatttaaggatgttgctgaaatacagactaaaggatttcagacaatcttagcaatcctcaaattgtcagcatctttttctaagctgctggtgcatcattcatttgacttagtaata

SEQ ID NO: 695919 - DNA, 120 bp, Artificial Sequence
  ENSG00000188906_18 (sequence is synthesized)
ttccatcaaatgtcttccaatatcatggaacaaaaggatcaacagtttctaaacctctgttgcaagtgttttgcaaaagtagctatggatgattacttaaaaaatgtgatgctagagaga

SEQ ID NO: 695920 - DNA, 120 bp, Artificial Sequence
  ENSG00000188906_19 (sequence is synthesized)
gcgtgtgatcagaataacagcatcatggttgaatgcttgcttctattgggagcagatgccaatcaagcaaaggagggatcttctttaatttgtcaggtatgtgagaaagagagcagtccc

SEQ ID NO: 695921 - DNA, 120 bp, Artificial Sequence
  ENSG00000188906_20 (sequence is synthesized)
aaattggtggaactcttactgaatagtggatctcgtgaacaagatgtacgaaaagcgttgacgataagcattgggaaaggtgacagccagatcatcagcttgctcttaaggaggctggcc

SEQ ID NO: 695922 - DNA, 120 bp, Artificial Sequence
  ENSG00000188906_21 (sequence is synthesized)
ctggatgtggccaacaatagcatttgccttggaggattttgtataggaaaagttgaaccttcttggcttggtcctttatttccagataagacttctaatttaaggaaacaaacaaatata

SEQ ID NO: 695923 - DNA, 120 bp, Artificial Sequence
  ENSG00000188906_22 (sequence is synthesized)
gcatctacactagcaagaatggtgatcagatatcagatgaaaagtgctgtggaagaaggaacagcctcaggcagcgatggaaatttttctgaagatgtgctgtctaaatttgatgaatgg

SEQ ID NO: 695924 - DNA, 120 bp, Artificial Sequence
  ENSG00000188906_23 (sequence is synthesized)
acctttattcctgactcttctatggacagtgtgtttgctcaaagtgatgacctggatagtgaaggaagtgaaggctcatttcttgtgaaaaagaaatctaattcaattagtgtaggagaa

SEQ ID NO: 695925 - DNA, 120 bp, Artificial Sequence
  ENSG00000188906_24 (sequence is synthesized)
ttttaccgagatgccgtattacagcgttgctcaccaaatttgcaaagacattccaattccttggggcccatttttgatcatgaagatttactgaagcgaaaaagaaaaatattatcttca

SEQ ID NO: 695926 - DNA, 120 bp, Artificial Sequence
  ENSG00000188906_25 (sequence is synthesized)
gatgattcactcaggtcatcaaaacttcaatcccatatgaggcattcagacagcatttcttctctggcttctgagagagaatatattacatcactagacctttcagcaaatgaactaaga

SEQ ID NO: 695927 - DNA, 120 bp, Artificial Sequence
  ENSG00000188906_26 (sequence is synthesized)
gatattgatgccctaagccagaaatgctgtataagtgttcatttggagcatcttgaaaagctggagcttcaccagaatgcactcacgagctttccacaacagctatgtgaaactctgaag

SEQ ID NO: 695928 - DNA, 120 bp, Artificial Sequence
  ENSG00000188906_27 (sequence is synthesized)
agtttgacacatttggacttgcacagtaataaatttacatcatttccttcttatttgttgaaaatgagttgtattgctaatcttgatgtctctcgaaatgacattggaccctcagtggtt

SEQ ID NO: 695929 - DNA, 120 bp, Artificial Sequence
  ENSG00000188906_28 (sequence is synthesized)
ttagatcctacagtgaaatgtccaactctgaaacagtttaacctgtcatataaccagctgtcttttgtacctgagaacctcactgatgtggtagagaaactggagcagctcattttagaa

SEQ ID NO: 695930 - DNA, 120 bp, Artificial Sequence
  ENSG00000188906_29 (sequence is synthesized)
ggaaataaaatatcagggatatgctcccccttgagactgaaggaactgaagattttaaaccttagtaagaaccacatttcatccctatcagagaactttcttgaggcttgtcctaaagtg

SEQ ID NO: 695931 - DNA, 120 bp, Artificial Sequence
  ENSG00000188906_30 (sequence is synthesized)
gagagtttcagtgccagaatgaattttcttgctgctatgcctttcttgcctccttctatgacaatcctaaaattatctcagaacaaattttcctgtattccagaagcaattttaaatctt

SEQ ID NO: 695932 - DNA, 120 bp, Artificial Sequence
  ENSG00000188906_31 (sequence is synthesized)
ccacacttgcggtctttagatatgagcagcaatgatattcagtacctaccaggtcccgcacactggaaatctttgaacttaagggaactcttatttagccataatcagatcagcatcttg

SEQ ID NO: 695933 - DNA, 120 bp, Artificial Sequence
  ENSG00000188906_32 (sequence is synthesized)
gacttgagtgaaaaagcatatttatggtctagagtagagaaactgcatctttctcacaataaactgaaagagattcctcctgagattggctgtcttgaaaatctgacatctctggatgtc

SEQ ID NO: 695934 - DNA, 120 bp, Artificial Sequence
  ENSG00000188906_33 (sequence is synthesized)
agttacaacttggaactaagatcctttcccaatgaaatggggaaattaagcaaaatatgggatcttcctttggatgaactgcatcttaactttgattttaaacatataggatgtaaagcc

SEQ ID NO: 695935 - DNA, 120 bp, Artificial Sequence
  ENSG00000188906_34 (sequence is synthesized)
aaagacatcataaggtttcttcaacagcgattaaaaaaggctgtgccttataaccgaatgaaacttatgattgtgggaaatactgggagtggtaaaaccaccttattgcagcaattaatg

SEQ ID NO: 695936 - DNA, 120 bp, Artificial Sequence
  ENSG00000188906_35 (sequence is synthesized)
aaaaccaagaaatcagatcttggaatgcaaagtgccacagttggcatagatgtgaaagactggcctatccaaataagagacaaaagaaagagagatctcgtcctaaatgtgtgggatttt

SEQ ID NO: 695937 - DNA, 120 bp, Artificial Sequence
  ENSG00000188906_36 (sequence is synthesized)
gcaggtcgtgaggaattctatagtactcatccccattttatgacgcagcgagcattgtaccttgctgtctatgacctcagcaagggacaggctgaagttgatgccatgaagccttggctc

SEQ ID NO: 695938 - DNA, 120 bp, Artificial Sequence
  ENSG00000188906_37 (sequence is synthesized)
ttcaatataaaggctcgcgcttcttcttcccctgtgattctcgttggcacacatttggatgtttctgatgagaagcaacgcaaagcctgcatgagtaaaatcaccaaggaactcctgaat

SEQ ID NO: 695939 - DNA, 120 bp, Artificial Sequence
  ENSG00000188906_38 (sequence is synthesized)
tcagcttgttgttggacagctgattccagactgctatgtagaacttgaaaaaatcattttatcggagcgtaaaaatgtgccaattgaatttcccgtaattgaccggaaacgattattaca

SEQ ID NO: 695940 - DNA, 120 bp, Artificial Sequence
  ENSG00000188906_39 (sequence is synthesized)
actagtgagagaaaatcagctgcagttagatgaaaatgagcttcctcacgcagttcactttctaaatgaatcaggagtccttcttcattttcaagacccagcactgcagttaagtgactt

SEQ ID NO: 695941 - DNA, 120 bp, Artificial Sequence
  ENSG00000188906_40 (sequence is synthesized)
gtactttgtggaacccaagtggctttgtaaaatcatggcacagattttgacagtgaaagtggaaggttgtccaaaacaccctaagggcattatttcgcgtagagatgtggaaaaatttct

SEQ ID NO: 695942 - DNA, 120 bp, Artificial Sequence
  ENSG00000188906_41 (sequence is synthesized)
ttcaaaaaaaaggaaatttccaaagaactacatgtcacagtattttaagctcctagaaaaattccagattgctttgccaataggagaagaatatttgctggttccaagcagtttgtctga

SEQ ID NO: 695943 - DNA, 120 bp, Artificial Sequence
  ENSG00000188906_42 (sequence is synthesized)
ccacaggcctgtgatagagcttccccattgtgagaactctgaaattatcatccgactatatgaaatgccttattttccaatgggattttggtcaagattaatcaatcgattacttgagat

SEQ ID NO: 695944 - DNA, 120 bp, Artificial Sequence
  ENSG00000188906_43 (sequence is synthesized)
ttcaccttacatgctttcagggagagaacgagcacttcgcccaaacagaatgtattggcgacaaggcatttacttaaattggtctcctgaagcttattgtctggtaggatctgaagtctt

SEQ ID NO: 695945 - DNA, 120 bp, Artificial Sequence
  ENSG00000188906_44 (sequence is synthesized)
agacaatcatccagagagtttcttaaaaattacagttccttcttgtagaaaaggctgtattcttttgggccaagttgtggaccacattgattctctcatggaagaatggtttcctgggtt

SEQ ID NO: 695946 - DNA, 120 bp, Artificial Sequence
  ENSG00000188906_45 (sequence is synthesized)
gctggagattgatatttgtggtgaaggagaaactctgttgaagaaatgggcattatatagttttaatgatggtgaagaacatcaaaaaatcttacttgatgacttgatgaagaaagcaga

SEQ ID NO: 695947 - DNA, 120 bp, Artificial Sequence
  ENSG00000188906_46 (sequence is synthesized)
ggaaggagatctcttagtaaatccagatcaaccaaggctcaccattccaatatctcagattgcccctgacttgattttggctgacctgcctagaaatattatgttgaataatgatgagtt

SEQ ID NO: 695948 - DNA, 120 bp, Artificial Sequence
  ENSG00000188906_47 (sequence is synthesized)
ggaatttgaacaagctccagagtttctcctaggtgatggcagttttggatcagtttaccgagcagcctatgaaggagaagaagtggctgtgaagatttttaataaacatacatcactcag

SEQ ID NO: 695949 - DNA, 120 bp, Artificial Sequence
  ENSG00000188906_48 (sequence is synthesized)
gctgttaagacaagagcttgtggtgctttgccacctccaccaccccagtttgatatctttgctggcagctgggattcgtccccggatgttggtgatggagttagcctccaagggttcctt

SEQ ID NO: 695950 - DNA, 120 bp, Artificial Sequence
  ENSG00000188906_49 (sequence is synthesized)
ggatcgcctgcttcagcaggacaaagccagcctcactagaaccctacagcacaggattgcactccacgtagctgatggtttgagatacctccactcagccatgattatataccgagacct

SEQ ID NO: 695951 - DNA, 120 bp, Artificial Sequence
  ENSG00000188906_50 (sequence is synthesized)
gaaaccccacaatgtgctgcttttcacactgtatcccaatgctgccatcattgcaaagattgctgactacggcattgctcagtactgctgtagaatggggataaaaacatcagagggcac

SEQ ID NO: 695952 - DNA, 120 bp, Artificial Sequence
  ENSG00000188906_51 (sequence is synthesized)
accagggtttcgtgcacctgaagttgccagaggaaatgtcatttataaccaacaggctgatgtttattcatttggtttactactctatgacattttgacaactggaggtagaatagtaga

SEQ ID NO: 695953 - DNA, 120 bp, Artificial Sequence
  ENSG00000188906_52 (sequence is synthesized)
gggtttgaagtttccaaatgagtttgatgaattagaaatacaaggaaaattacctgatccagttaaagaatatggttgtgccccatggcctatggttgagaaattaattaaacagtgttt

SEQ ID NO: 695954 - DNA, 120 bp, Artificial Sequence
  ENSG00000188906_53 (sequence is synthesized)
gaaagaaaatcctcaagaaaggcctacttctgcccaggtctttgacattttgaattcagctgaattagtctgtctgacgagacgcattttattacctaaaaacgtaattgttgaatgcat

SEQ ID NO: 695955 - DNA, 120 bp, Artificial Sequence
  ENSG00000188906_54 (sequence is synthesized)
ggttgctacacatcacaacagcaggaatgcaagcatttggctgggctgtgggcacaccgacagaggacagctctcatttcttgacttaaatactgaaggatacacttctgaggaagttgc

SEQ ID NO: 695956 - DNA, 120 bp, Artificial Sequence
  ENSG00000188906_55 (sequence is synthesized)
tgatagtagaatattgtgcttagccttggtgcatcttcctgttgaaaaggaaagctggattgtgtctgggacacagtctggtactctcctggtcatcaataccgaagatgggaaaaagag

SEQ ID NO: 695957 - DNA, 120 bp, Artificial Sequence
  ENSG00000188906_56 (sequence is synthesized)
acataccctagaaaagatgactgattctgtcacttgtttgtattgcaattccttttccaagcaaagcaaacaaaaaaattttcttttggttggaaccgctgatggcaagttagcaatttt

SEQ ID NO: 695958 - DNA, 120 bp, Artificial Sequence
  ENSG00000188906_57 (sequence is synthesized)
tgaagataagactgttaagcttaaaggagctgctcctttgaagatactaaatataggaaatgtcagtactccattgatgtgtttgagtgaatccacaaattcaacggaaagaaatgtaat

SEQ ID NO: 695959 - DNA, 120 bp, Artificial Sequence
  ENSG00000188906_58 (sequence is synthesized)
gtggggaggatgtggcacaaagattttctccttttctaatgatttcaccattcagaaactcattgagacaagaacaagccaactgttttcttatgcagctttcagtgattccaacatcat

SEQ ID NO: 695960 - DNA, 120 bp, Artificial Sequence
  ENSG00000188906_59 (sequence is synthesized)
aacagtggtggtagacactgctctctatattgctaagcaaaatagccctgttgtggaagtgtgggataagaaaactgaaaaactctgtggactaatagactgcgtgcactttttaaggga

SEQ ID NO: 695961 - DNA, 120 bp, Artificial Sequence
  ENSG00000188906_60 (sequence is synthesized)
ggtaatggtaaaagaaaacaaggaatcaaaacacaaaatgtcttattctgggagagtgaaaaccctctgccttcagaagaacactgctctttggataggaactggaggaggccatatttt

SEQ ID NO: 695962 - DNA, 120 bp, Artificial Sequence
  ENSG00000188906_61 (sequence is synthesized)
actcctggatctttcaactcgtcgacttatacgtgtaatttacaacttttgtaattcggtcagagtcatgatgacagcacagctaggaagccttaaaaatgtcatgctggtattgggcta

SEQ ID NO: 695963 - DNA, 120 bp, Artificial Sequence
  ENSG00000188906_62 (sequence is synthesized)
caaccggaaaaatactgaaggtacacaaaagcagaaagagatacaatcttgcttgaccgtttgggacatcaatcttccacatgaagtgcaaaatttagaaaaacacattgaagtgagaaa

SEQ ID NO: 695964 - DNA, 120 bp, Artificial Sequence
  ENSG00000188906_63 (sequence is synthesized)
agaattagctgaaaaaatgagacgaacatctgttgagtaagagagaaataggaattgtctttggataggaaaattattctctcctcttgtaaatatttattttaaaaatgttcacatgga

SEQ ID NO: 695965 - DNA, 120 bp, Artificial Sequence
  ENSG00000188906_64 (sequence is synthesized)
aagggtactcacattttttgaaatagctcgtgtgtatgaaggaatgttattatttttaatttaaatatatgtaaaaatacttaccagtaaatgtgtattttaaagaactatttaaaacac

SEQ ID NO: 695966 - DNA, 120 bp, Artificial Sequence
  ENSG00000188906_65 (sequence is synthesized)
aatgttatatttcttataaataccagttactttcgttcattaattaatgaaaataaatctgtgaagtacctaatttaagtactcatactaaaatttataaggccgataattttttgtttt

SEQ ID NO: 695967 - DNA, 120 bp, Artificial Sequence
  ENSG00000188906_66 (sequence is synthesized)
cttgtctgtaatggaggtaaactttattttaaattctgtgcttaagacaggactattgcttgtcgatttttctagaaatctgcacggtataatgaaaatattaagacagtttcccatgta

SEQ ID NO: 695968 - DNA, 120 bp, Artificial Sequence
  ENSG00000188906_67 (sequence is synthesized)
atgtattccttcttagattgcatcgaaatgcactatcatatatgcttgtaaatattcaaatgaatttgcactaataaagtcctttgttggtatgtgaattctctttgttgctgttgcaaa

SEQ ID NO: 695969 - DNA, 120 bp, Artificial Sequence
  ENSG00000188906_68 (sequence is synthesized)
cagtgcatcttacacaacttcactcaattcaaaagaaaactccattaaaagtactaatgaaaaaacatgacatactgtcaaagtcctcatatctaggaaagacacagaaactctctttgt

SEQ ID NO: 695970 - DNA, 120 bp, Artificial Sequence
  ENSG00000188906_69 (sequence is synthesized)
cacagaaactctctgtgtctttcctagacataatagagttgtttttcaactctatgtttgaatgtggataccctgaattttgtataattagtgtaaatacagtgttcagtccttcaagtg

SEQ ID NO: 695971 - DNA, 120 bp, Artificial Sequence
  ENSG00000188906_70 (sequence is synthesized)
atatttttatttttttattcataccactagctacttgttttctaatctgcttcattctaatgcttatattcatcttttccctaaatttgtgatgctgcagatcctacatcattcagatag

SEQ ID NO: 695972 - DNA, 120 bp, Artificial Sequence
  ENSG00000188906_71 (sequence is synthesized)
aaacctttttttttttcagaattatagaattccacagctcctaccaagaccatgaggataaatatctaacacttttcagttgctgaaggagaaaggagctttagttatgatggataaaaa

SEQ ID NO: 695973 - DNA, 120 bp, Artificial Sequence
  ENSG00000188906_72 (sequence is synthesized)
tatctgccaccctaggcttccaaattatacttaaattgtttacatagcttaccacaataggagtatcagggccaaatacctatgtaataatttgaggtcatttctgctttaggaaaagta

SEQ ID NO: 695974 - DNA, 120 bp, Artificial Sequence
  ENSG00000188906_73 (sequence is synthesized)
ctttcggtaaattctttggccctgaccagtattcattatttcagataattccctgtgataggacaactagtacatttaatattctcagaacttatggcattttactatgtgaaaacttta

SEQ ID NO: 695975 - DNA, 120 bp, Artificial Sequence
  ENSG00000188906_74 (sequence is synthesized)
tatttatattaagggtaatcaaattcttaaagatgaaagattttctgtattttaaaggaagctatgctttaacttgttatgtaattaacaaaaaaatcatatataatagagctctttgtt

SEQ ID NO: 695976 - DNA, 120 bp, Artificial Sequence
  ENSG00000188906_75 (sequence is synthesized)
tgttccagtgttatctctttcattgttactttgtatttgcaattttttttaccaaagacaaattaaaaaaatgaataccatatttaaatggaataataaaggttttttaaaaactttaaa

SEQ ID NO: 695977 - DNA, 120 bp, Artificial Sequence
  ENSG00000188906_76 (sequence is synthesized)
agcaggcatctctgtgggccttgagacgtagtcccgtaaaactcatcccgtttctacttgatttgctttctttgagaactcttgtttatttttatatggaggtttcctgccttggattaa

SEQ ID NO: 695978 - DNA, 120 bp, Artificial Sequence
  ENSG00000188906_77 (sequence is synthesized)
gctttaaactcagaagtttgatttagaaagcaaacatttaaggtaacatgtcagaagttattattttaataatataatcatataattataaaactggttaagttgtagatttttgatgag

SEQ ID NO: 695979 - DNA, 120 bp, Artificial Sequence
  ENSG00000188906_78 (sequence is synthesized)
tacttttgaattcaaaccatgaagagattttggcttttaataatagaatcgatacaaaccactagttcttaaaaaaatgggaactgagaaaagttagttctgtaagtagtaatttgaaag

SEQ ID NO: 695980 - DNA, 120 bp, Artificial Sequence
  ENSG00000188906_79 (sequence is synthesized)
atttctgtgcctgtgacatttaagttgggtctggaaagaggagcatccaaaaggaccttgaagcttgtgtatggtcagtgtgtcatctcagctgaatctcacaatgatcctaatggtcat

SEQ ID NO: 695981 - DNA, 120 bp, Artificial Sequence
  ENSG00000188906_80 (sequence is synthesized)
ctaagtcttataaaatatgcctttattttacgtttacattttctctgaactttccagtgtcatatggatggtcttggagggtcacacagtgaaacataagactggtataaattgtgaata

SEQ ID NO: 695982 - DNA, 120 bp, Artificial Sequence
  ENSG00000188906_81 (sequence is synthesized)
gggtcattacagaagtggagggagtaaatgctctcagtcccacaagagaagcagattactgcagctgaacactcagtttgggtcttacttgcttttttcctttttacctaaggcaaaaat

SEQ ID NO: 695983 - DNA, 120 bp, Artificial Sequence
  ENSG00000188906_82 (sequence is synthesized)
gggaaatacatggtattgaatatattttactttttgagcaaagaaaataaagaaaatgtttgttttaatcatagtctagcctcccagcttgttaaagaatctcatttggtttttcattct

SEQ ID NO: 695984 - DNA, 120 bp, Artificial Sequence
  ENSG00000188906_83 (sequence is synthesized)
ataacaaatcttttttcttgcagcaatacatgctgaactgcacaacctacaaatattgacaaatcatattttactcaaactttgtctttttttgcttctatttttatatttaaatatgat

SEQ ID NO: 695985 - DNA, 120 bp, Artificial Sequence
  ENSG00000188906_84 (sequence is synthesized)
aaaattgtgatagcacataaaatatattttctgcataaatatatttgcgtcttcctttgataataatttgttttagaaaataacaataatagcatatatacaaaagtttacaaaaacgac

SEQ ID NO: 695986 - DNA, 120 bp, Artificial Sequence
  ENSG00000188906_85 (sequence is synthesized)
actatggggtttaattctgaaaaaaactagaatttatgtaactttagcaaataatgaatgttttgaacatggtgaagaaaatatattcattgcaagtatatgtgaaagaggaacatgtgt

SEQ ID NO: 695987 - DNA, 120 bp, Artificial Sequence
  ENSG00000188906_86 (sequence is synthesized)
ttttctagcaccttcacctatttttcatttatagactttagagttgcacaggagttacaattagatgctcttaatgactgtaaactattaagatacatgtccacacaagcagagcagtag

SEQ ID NO: 695988 - DNA, 120 bp, Artificial Sequence
  ENSG00000188906_87 (sequence is synthesized)
gtctctcaataggttgtctcagtagtcttattctaccaaagttgttgcattctctagttgaattgtatgtactttgggacccaaatagcttgcttataactgaagttatagtggaatgtc

SEQ ID NO: 695989 - DNA, 120 bp, Artificial Sequence
  ENSG00000188906_88 (sequence is synthesized)
tatgggttatagtttgattttaaaataaagatcaattggaggatagcctacaaggtgctgcatgagctggcttcactgtacctctcctgcctccatcatctaccacattcctaccagatc

SEQ ID NO: 695990 - DNA, 120 bp, Artificial Sequence
  ENSG00000188906_89 (sequence is synthesized)
ttgcttgtctagatgaacatccagttcttctcaattactatgctatattttgcctcagggatttgcacatgctgtttatttctttgcttagttaacatagctttttttcatgcttattta

SEQ ID NO: 695991 - DNA, 120 bp, Artificial Sequence
  ENSG00000188906_90 (sequence is synthesized)
actcatatgctttgaaatgttagctcctgtgtcaaaacctctgagaagccaacactgattaggtcaaagttcccgctttgggttcccataacagctttcttgcatagttttgatcatggt

SEQ ID NO: 695992 - DNA, 120 bp, Artificial Sequence
  ENSG00000188906_91 (sequence is synthesized)
catatttttttttcattaatgctagtctcttcactagaatataaactccaagacggttgggttagtgtgtttttgtttaccccttttttcccaggatctagcctagggcctacatagaag

SEQ ID NO: 695993 - DNA, 120 bp, Artificial Sequence
  ENSG00000188906_92 (sequence is synthesized)
acttttgatgcaaatttgttgaataaattagtgaatgatttgaaaagaaaatatgatattttgacatagtatcagtatatccatccatctaagtgtccatctaaatactcatatttgtac

SEQ ID NO: 695994 - DNA, 120 bp, Artificial Sequence
  ENSG00000188906_93 (sequence is synthesized)
taaatactcatatttgtaccttaccatatccaaagaacttttcacacacattacctcgtttaacattgtaactttgggaagggtaatgtataaatactgagcctattttatagaaaggtt

SEQ ID NO: 695995 - DNA, 120 bp, Artificial Sequence
  ENSG00000188906_94 (sequence is synthesized)
aagctgttttctcagactcacataattaagaattgcagcaaggagtggatcacagattttgttattttttaaaaaaatgctggtctttattcaatataattgaagggtcacctagaaaat

SEQ ID NO: 695996 - DNA, 120 bp, Artificial Sequence
  ENSG00000188906_95 (sequence is synthesized)
agaattgtgaattcagttccaaggtatttgtgtcttaaactatgaacaactttacttttttttcaggccagtttaatatatagttttaacagaaaacttacatattttgtttttgtaaag

SEQ ID NO: 695997 - DNA, 120 bp, Artificial Sequence
  ENSG00000188906_96 (sequence is synthesized)
gaagccttaaaaatgtcatgctggtattgggctacaaccggaaaaatactgaaggtacacaaaagcagaaaggtaacatttagaaggatactgttttccaaacagggcaatgatgtgaat

SEQ ID NO: 695998 - DNA, 120 bp, Artificial Sequence
  ENSG00000188906_97 (sequence is synthesized)
atgtgaatgatggtaacatattatgtgtttcataaatttgtagaaaatattacatatggtataatcaggaattttaattggtagtttatagtgtaaagaacttagacataaattttcaaa

SEQ ID NO: 695999 - DNA, 120 bp, Artificial Sequence
  ENSG00000188906_98 (sequence is synthesized)
tgatatgaagtgttaaatatttatattttcagctgaagtagaggtgtcaatcactagctcaaccttaaacgaaatgtgaatattttttacaacttatctatatctacataatgtctaatt

SEQ ID NO: 696000 - DNA, 120 bp, Artificial Sequence
  ENSG00000188906_99 (sequence is synthesized)
aaataataatttagtacattagttatagctgtgtttatatttacatttatctaagtcaactaaaaatacatgagccaaactgaaataaaataagaatgttttatgatggatctttgaaac

SEQ ID NO: 696001 - DNA, 120 bp, Artificial Sequence
  ENSG00000188906_100 (sequence is synthesized)
aagacgattattgccacttaaaaaatatactttatgatttgcatcattacaaattatcattttaagtgatatttagcttctaaataccaatttcatgaaactagaagcttcctgttaact

SEQ ID NO: 696002 - DNA, 120 bp, Artificial Sequence
  ENSG00000188906_101 (sequence is synthesized)
ataaattcctgtcaactataaatccagatttccattaaatttaaaaataagaacagctactaatgatgtgtcacttaatttaatttccattctcacaccgacaatttaaaaaaatctact

SEQ ID NO: 696003 - DNA, 120 bp, Artificial Sequence
  ENSG00000188906_102 (sequence is synthesized)
tttaaaaataaggtagtagccttaatacttccactaaacaataaaacaatatgctatacttatcagaaccttttaatctgaaagctaaacagctagatataaatttgtctacccaacatt

SEQ ID NO: 696004 - DNA, 120 bp, Artificial Sequence
  ENSG00000188906_103 (sequence is synthesized)
aaattattagaatattcatttcaaattatgtgtgatgttatcatataacatattatagattaactcaaattattcttaactgttacttaactatgacaaaacaacttagaacgctttgct

SEQ ID NO: 696005 - DNA, 120 bp, Artificial Sequence
  ENSG00000188906_104 (sequence is synthesized)
gaacgctttgctaatacacaagatagtataaggataaaaattctttatagtactagctcataaagagtgttctatggaatagtagtggatgtcatttaataactataaattcaaaataag

SEQ ID NO: 696006 - DNA, 120 bp, Artificial Sequence
  ENSG00000188906_105 (sequence is synthesized)
cattgtaaatatcaataccattcaatttttttttgttttttaaacaagttgtaagcctaccctatggtaaatggatatggtaacacagcataatttcctcaaaaaattacttttgtgata

SEQ ID NO: 696007 - DNA, 120 bp, Artificial Sequence
  ENSG00000188906_106 (sequence is synthesized)
tacttttaaaggattatatgaatatatacataattatagatgaatgtgatgctgtgtgtcattgtatcaccaaatctctgtccaatctgttaacagactcttaaataaaccatttttctc

SEQ ID NO: 696008 - DNA, 120 bp, Artificial Sequence
  ENSG00000188909_0 (sequence is synthesized)
gtcttcttgcctctccagcgcccggggtagcccaggcccgggagagagcagcggagattcgagcctcggagggtggttgccggctttcgagcaggcttggagactctgcctgcgtcctcc

SEQ ID NO: 696009 - DNA, 120 bp, Artificial Sequence
  ENSG00000188909_1 (sequence is synthesized)
acttcgtcccggcccttgtcctgtggcaggtgctccgctcaagatgaatctcaacttcacctctcctctacacccggcgtcttctcagaggcccacatccttcttcatcgaggacatcct

SEQ ID NO: 696010 - DNA, 120 bp, Artificial Sequence
  ENSG00000188909_2 (sequence is synthesized)
gctgcacaagcccaagccgctgagagaggtggccccagaccatttcgccagctctctggcctctcgggtgcctctgctagactatggctaccccctcatgcccacacccaccctcttggc

SEQ ID NO: 696011 - DNA, 120 bp, Artificial Sequence
  ENSG00000188909_3 (sequence is synthesized)
cggagctgccggggaagcactgccgccgccgcaaagcccgcacggttttctctgactcgcagctctcgggcttggagaagaggttcgagatccagcgctacctgtccacgccagaacgag

SEQ ID NO: 696012 - DNA, 120 bp, Artificial Sequence
  ENSG00000188909_4 (sequence is synthesized)
tggagctggccacggccctcagcctgtccgagacgcaggtgaaaacgtggttccagaaccggcggatgaagcataaaaagcaactgcggaaaagccaagacgaacccaaagcaccagacg

SEQ ID NO: 696013 - DNA, 120 bp, Artificial Sequence
  ENSG00000188909_5 (sequence is synthesized)
ggccagaaagccccgagggcagcccccgcggttcagaggccgccaccgccgccgaggctcggctgagcctgcccgccggtcccttcgtgctgaccgagccagaggacgaggtggacattg

SEQ ID NO: 696014 - DNA, 120 bp, Artificial Sequence
  ENSG00000188909_6 (sequence is synthesized)
gagacgagggggagctgggctcagggccgcacgtgctctgagccgccaggctggggagggtagtaggcaggggaggagactgcggggccgagcgcggttccctcctggaccggaagactc

SEQ ID NO: 696015 - DNA, 120 bp, Artificial Sequence
  ENSG00000188910_0 (sequence is synthesized)
agacagcacccaagggtagaagatgggggcccaggagggagctgcaccctggtgggcagccatgggagtgtgtcaggtggaagcagccgtcagggtccctctctgctctctgtccggaca

SEQ ID NO: 696016 - DNA, 120 bp, Artificial Sequence
  ENSG00000188910_1 (sequence is synthesized)
gacagggctccaaccttcacttcagttcttgtgaactcccaccaggtaggcacggcccccaccaggcgccatggactggaagacactccaggccctactgagcggtgtgaacaagtactc

SEQ ID NO: 696017 - DNA, 120 bp, Artificial Sequence
  ENSG00000188910_2 (sequence is synthesized)
cacagcgttcgggcgcatctggctgtccgtggtgttcgtcttccgggtgctggtatacgtggtggctgcagagcgcgtgtggggggatgagcagaaggactttgactgcaacaccaagca

SEQ ID NO: 696018 - DNA, 120 bp, Artificial Sequence
  ENSG00000188910_3 (sequence is synthesized)
gcccggctgcaccaacgtctgctacgacaactacttccccatctccaacatccgcctctgggccctgcagctcatcttcgtcacatgcccctcgctgctggtcatcctgcacgtggccta

SEQ ID NO: 696019 - DNA, 120 bp, Artificial Sequence
  ENSG00000188910_4 (sequence is synthesized)
ccgtgaggagcgggagcgccggcaccgccagaaacacggggaccagtgcgccaagctgtacgacaacgcaggcaagaagcacggaggcctgtggtggacctacctgttcagcctcatctt

SEQ ID NO: 696020 - DNA, 120 bp, Artificial Sequence
  ENSG00000188910_5 (sequence is synthesized)
caagctcatcattgagttcctcttcctctacctgctgcacactctctggcatggcttcaatatgccgcgcctggtgcagtgtgccaacgtggccccctgccccaacatcgtggactgcta

SEQ ID NO: 696021 - DNA, 120 bp, Artificial Sequence
  ENSG00000188910_6 (sequence is synthesized)
cattgcccgacctaccgagaagaaaatcttcacctacttcatggtgggcgcctccgccgtctgcatcgtactcaccatctgtgagctctgctacctcatctgccacagggtcctgcgagg

SEQ ID NO: 696022 - DNA, 120 bp, Artificial Sequence
  ENSG00000188910_7 (sequence is synthesized)
caataacaagctgcaggcttcagcacccaacctgacccccatctgaccacagggcaggggtggggcaacatgcgggctgccaatgggacatgcagggcggtgtggcaggtggagaggtcc

SEQ ID NO: 696023 - DNA, 120 bp, Artificial Sequence
  ENSG00000188910_8 (sequence is synthesized)
tacaggggctgagtgaccccactctgagttcactaagttatgcaactttcgttttggcagatattttttgacactgggaactgggctgtctagccgggtataggtaacccacaggcccag

SEQ ID NO: 696024 - DNA, 120 bp, Artificial Sequence
  ENSG00000188910_9 (sequence is synthesized)
tgccagccctcaaaggacatagactttgaaacaagcgaattaactatctacgctgcctgcaaggggccacttagggcactgctagcagggcttcaaccaggaagggatcaacccaggaag

SEQ ID NO: 696025 - DNA, 120 bp, Artificial Sequence
  ENSG00000188910_10 (sequence is synthesized)
ggatgatcaggagaggcttccctgaggacataatgtgtaagagaggtgagaagtgctcccaagcagacacaacagcagcacagaggtctggaggccacacaaaaagtgatgctcgccctg

SEQ ID NO: 696026 - DNA, 120 bp, Artificial Sequence
  ENSG00000188910_11 (sequence is synthesized)
ggctagcctcagcagacctaaggcatctctactccctccagaggagccgcccagattcctgcagtggagaggaggtcttccagcagcagcaggtctggagggctgagaatgaacctgact

SEQ ID NO: 696027 - DNA, 120 bp, Artificial Sequence
  ENSG00000188910_12 (sequence is synthesized)
agaggttctggagatacccagaggtcccccaggtcatcacttggctcagtggaagccctctttccccaaatcctactccctcagcctcaggcagtggtgctcccatcttcctccccacaa

SEQ ID NO: 696028 - DNA, 120 bp, Artificial Sequence
  ENSG00000188910_13 (sequence is synthesized)
ctgtgctcaggctggtgccagcctttcagaccctgctcccagggacttgggtggatgcgctgatagaacatcctcaagacagtttccttgaaatcaataaatactgtgttttatacaggt

SEQ ID NO: 696029 - DNA, 120 bp, Artificial Sequence
  ENSG00000188910_14 (sequence is synthesized)
actgtgccccttcccgctgtgggtacaaggtctgccccccaccccagctctccaaagcccaccggcctccctggaggccgaggtcgacggcccgtcgcaccgggagggggggctcccagg

SEQ ID NO: 696030 - DNA, 120 bp, Artificial Sequence
  ENSG00000188910_15 (sequence is synthesized)
ggtgccccacgcacggtcaaggtcccgcgccaagcggggaccgggctgggccggaagcgggcacggtactcgcggcaaactagcgtgggcgagtcctgattgcagtcggacctgccgccg

SEQ ID NO: 696031 - DNA, 120 bp, Artificial Sequence
  ENSG00000188910_16 (sequence is synthesized)
cggcacttaacagtttgcagagtgcttcccgcccctgatctcattggagccttcggacagcccagcccatggccaccgatgcccccatttcacgcctgaggaagcggaggctcagacggg

SEQ ID NO: 696032 - DNA, 120 bp, Artificial Sequence
  ENSG00000188910_17 (sequence is synthesized)
ccaccagcccctccggaggctggcccgggagcgcctggcagcgtcgggtctaggagccggctccctcctgctccctcctccgcgccgcccggggtgtgcccgccgtctgtgtgcaccact

SEQ ID NO: 696033 - DNA, 120 bp, Artificial Sequence
  ENSG00000188910_18 (sequence is synthesized)
cactgctgagcccagctccggcgccctcgcctctgctgtgggccccggggacgcggggtcaggccaccgcgttggccaggccgctgcaggtaggcacggcccccaccaggcgccatggac

SEQ ID NO: 696034 - DNA, 120 bp, Artificial Sequence
  ENSG00000188916_0 (sequence is synthesized)
ctccgcccgcctcggtgccagccgggcgcacaggcggcaggcgcgcggcttggggcgccctcgcctctggccgcccggctccgcggagtagctgggacctggagcagcggaaaggacttc

SEQ ID NO: 696035 - DNA, 120 bp, Artificial Sequence
  ENSG00000188916_1 (sequence is synthesized)
cttccctcctgctccctcctctgccccgcccccgcctcctggccctggctctgagatctcgccgaagacaattgcagtaaatgaggacatcggaggagcgcgaagccgggtggctgtggc

SEQ ID NO: 696036 - DNA, 120 bp, Artificial Sequence
  ENSG00000188916_2 (sequence is synthesized)
ggacatcggaggagcgcgaagccgggtggctgtggctggctccgccgcgtcgcgagcaagcgagcgcgcgggcgtccccggagctggcccagccgctgcctccccgcgcgcgtcgctaag

SEQ ID NO: 696037 - DNA, 120 bp, Artificial Sequence
  ENSG00000188916_3 (sequence is synthesized)
ggcagcggtggagggggcgggcagcaggcgcgcagcgggccaagtccccggagccgaggcttcctccgcgtgagcgcggcgagtctggccgcggatgccctgtccggagtgctccgtgcc

SEQ ID NO: 696038 - DNA, 120 bp, Artificial Sequence
  ENSG00000188916_4 (sequence is synthesized)
ccgcggatgccctgtccggagtgctccgtgccgccccaggcttgccagggtccgcagcgagacatgcccgagccaggcgctgcatcgacctcgacttatctgtaagcagcggaagatcct

SEQ ID NO: 696039 - DNA, 120 bp, Artificial Sequence
  ENSG00000188916_5 (sequence is synthesized)
gaaggcactaactaaggtatctccaggcaaccaaggatcttacctctcacattgagaaaaaccataacttcagagacatttcctggctccaaattcaagtcctttcagagacccctctac

SEQ ID NO: 696040 - DNA, 120 bp, Artificial Sequence
  ENSG00000188916_6 (sequence is synthesized)
taattattttccagtaccactctccatggaataaaaggagttgcaaacatggcctttgtagatgcagggaaacccacgttccttttagagctgatgttaacccatgagaagcgaccaccc

SEQ ID NO: 696041 - DNA, 120 bp, Artificial Sequence
  ENSG00000188916_7 (sequence is synthesized)
ctcgacgacttctccttcacggttcccacccaggagcacggccaactctcccccggaatccataacggctcacgcaaatagatttctttccgttcctcctcggagggctctccacattta

SEQ ID NO: 696042 - DNA, 120 bp, Artificial Sequence
  ENSG00000188916_8 (sequence is synthesized)
tctgctcgagacgtggcagctccagaaccatggtcagtaaggacaccggcaaatgcatactcacaacgtcggagagtgaagtggaacccgccgcctgcctggccctggagatgaaatacg

SEQ ID NO: 696043 - DNA, 120 bp, Artificial Sequence
  ENSG00000188916_9 (sequence is synthesized)
ccctggaccccaaccggcagattaaaaaacggaacaaagccctgcaggtgcggtttaaggatatctgcgaggcacagaatgagcagagggacacacagctgtcctcgggccagctggggg

SEQ ID NO: 696044 - DNA, 120 bp, Artificial Sequence
  ENSG00000188916_10 (sequence is synthesized)
agaagcgggaggccaagcccgtgtcctgcagagcagcctaccgcaaatacatgacagtgcccgcacgcaggtccatccccaacgtcaccaagagcacaggcgtgcagacctcgcccgacc

SEQ ID NO: 696045 - DNA, 120 bp, Artificial Sequence
  ENSG00000188916_11 (sequence is synthesized)
ttaagaagtgttaccagacgttccctctggaccgcaaaaaggggaacctcaaaagcctcccagctgcagatccctttaaaagccaaaacaatgggtttctaacagatgcgaaagagaaga

SEQ ID NO: 696046 - DNA, 120 bp, Artificial Sequence
  ENSG00000188916_12 (sequence is synthesized)
acgaggctggacccatggaggaggcccggccatgtggcgcggggcgggtgcacaagaccacagccttggttttccattccaaccaacacatgaacacagtggaccagcctttgggggtca

SEQ ID NO: 696047 - DNA, 120 bp, Artificial Sequence
  ENSG00000188916_13 (sequence is synthesized)
actgcacagagccctgtaaaagcccggagccgctcagctatggagaagctgcgctccaaaactccactcggcctccatccgaagagcccgattaccagctgctcgggagggccaagcagg

SEQ ID NO: 696048 - DNA, 120 bp, Artificial Sequence
  ENSG00000188916_14 (sequence is synthesized)
accgggggaggccaaactccgaggagcccgctccacctgccctcaggagggtgtttaaaacggaggttgccaccgtttacgcacctgccctcagtgccagggcccccgagcctggtttgt

SEQ ID NO: 696049 - DNA, 120 bp, Artificial Sequence
  ENSG00000188916_15 (sequence is synthesized)
cagactctgcagccgccagccagtggtcactctgcccggcagatgacgagcggaggagagccacacatctcaacgggctccaggcgccctcggaaactgccctggcctgctcacccccga

SEQ ID NO: 696050 - DNA, 120 bp, Artificial Sequence
  ENSG00000188916_16 (sequence is synthesized)
tgcagtgcctgtcccccgaatgtagtgagcagccgtcgcagactcacaccccgccggggctggggaaccagcctagtcccacagcggttgctgcaggtgaagaatgccaacgaatcgtgc

SEQ ID NO: 696051 - DNA, 120 bp, Artificial Sequence
  ENSG00000188916_17 (sequence is synthesized)
ctcatacggaagtggtcgacctcaaagcacaacttcagatgatggagaacttgatcagttcaagccaagaaaccatcaaagtgctcttgggggtcattcaggagttggaaaaaggagagg

SEQ ID NO: 696052 - DNA, 120 bp, Artificial Sequence
  ENSG00000188916_18 (sequence is synthesized)
cccatcgggaagggctttcatatcggacggggcaagacacagctaattgtgacacatgcaggaacagtgcatgtattatctatagtgtggagctggattttaagcagcaagaagacaaac

SEQ ID NO: 696053 - DNA, 120 bp, Artificial Sequence
  ENSG00000188916_19 (sequence is synthesized)
tccagccggttctaagaaaactccaccctattgaggaaactcaggtcataccttcgccttactctcaggagacttactcctcaactcccaagcaaaaatccaaaactgaatctaaaaagc

SEQ ID NO: 696054 - DNA, 120 bp, Artificial Sequence
  ENSG00000188916_20 (sequence is synthesized)
ggtgtctggagtctcgaggccgtctttagaacccactggagtttaagtcaatacttttccaaaatgaataggatcgagggaactgtggtgcccattcaggcacctcccacttctcgccct

SEQ ID NO: 696055 - DNA, 120 bp, Artificial Sequence
  ENSG00000188916_21 (sequence is synthesized)
gcgtaccaaaaaggcctttgtaccaatagataattaacagaagcaaggtattctgtgtcactccttgccagctgttctttgcagttcactgatgtgggatgtaaaatctgaaatgaaact

SEQ ID NO: 696056 - DNA, 120 bp, Artificial Sequence
  ENSG00000188916_22 (sequence is synthesized)
tacgtagtcaaagatgataagtaaaaattttcccccacccccgatctgcaagtaatacattatcaacctgcgagatggcaggctgtcaccctgtacacagctataactcataattatttt

SEQ ID NO: 696057 - DNA, 120 bp, Artificial Sequence
  ENSG00000188916_23 (sequence is synthesized)
caagccttgattttttttttaaataatgagaagaaaaagcaagccttatgtttgcgaaggacttcatttttatgtttcattttgcaaataagcagggggcgagtgcaattttcagcacat

SEQ ID NO: 696058 - DNA, 120 bp, Artificial Sequence
  ENSG00000188916_24 (sequence is synthesized)
caaattccggagaaagcacaattttttcaagtggtcggagaccatgaataatctctaaaatgtgactatatgtatatttgccttcatgtgctatagcgctaagccaagtgaccacatctc

SEQ ID NO: 696059 - DNA, 120 bp, Artificial Sequence
  ENSG00000188916_25 (sequence is synthesized)
agtgtcacaacgacacctcaaatttagcatcctcttcatctccagacttacgacatgtttactgctcattttccaaatggccagcagccaggagtcccccaaagtcaggatatgccttta

SEQ ID NO: 696060 - DNA, 120 bp, Artificial Sequence
  ENSG00000188916_26 (sequence is synthesized)
atcactgcaagtagacagggtcagagctattggacactaagttttcttagatctcatttttaatcttttggtacccaaaggccaaataatacattctggcaagaatctgagaacatacat

SEQ ID NO: 696061 - DNA, 120 bp, Artificial Sequence
  ENSG00000188916_27 (sequence is synthesized)
agagatacacgatggataatccacccaccaataaatcacaggcattctgtgccatggcagacagtgtttttgtggatcgatcctccgagacactgttagccatggtaagtgcagccagac

SEQ ID NO: 696062 - DNA, 120 bp, Artificial Sequence
  ENSG00000188916_28 (sequence is synthesized)
gttatgtacaattcgttatgctttgtattaatggtggaagccctgaccatctcaaagagaaacagtgcgtttagtttagctgctaccaagggacaatgtcgcctacatttaacctattag

SEQ ID NO: 696063 - DNA, 120 bp, Artificial Sequence
  ENSG00000188916_29 (sequence is synthesized)
taagttgtactaaacaacatacttaggggaaagctgtgaatcaaatgtttttaggtattttttaaatcaacagtaacacttagagttctctcttgattacacattgcaatgtaaatctta

SEQ ID NO: 696064 - DNA, 120 bp, Artificial Sequence
  ENSG00000188916_30 (sequence is synthesized)
gttcctttattttttcactcatttctttgcacctttgcaagtatctttttatagaaatcaaatcccctagtctattaatgactttgtctatcaattttttgattttcacaataggaagta

SEQ ID NO: 696065 - DNA, 120 bp, Artificial Sequence
  ENSG00000188916_31 (sequence is synthesized)
gggatcttactttgcctttttttttttttttgtacaacttaaattttgaatagtttgtgagcatacaggaaaacctagtcttgaagtttctgtccagcagtttcacatctagtggagtgc

SEQ ID NO: 696066 - DNA, 120 bp, Artificial Sequence
  ENSG00000188916_32 (sequence is synthesized)
tgacatgcacacctcattgactagatgccaaacacacagtggctaaccttggtaaaaggatctcacctgcttttgtcagattggagctgcttcttgccatgtattttcctcctgactcaa

SEQ ID NO: 696067 - DNA, 120 bp, Artificial Sequence
  ENSG00000188916_33 (sequence is synthesized)
cagcaaatctgttttagttctaagtgttttgattctacaaggacctagtgatcagtaaccagatcgggccttgaaaaaaaaatgaagagtatgtcgtgtaaacattcttcgggggccaaa

SEQ ID NO: 696068 - DNA, 120 bp, Artificial Sequence
  ENSG00000188916_34 (sequence is synthesized)
caacactgcagttgtatgctttaatttaaaacacacatgtgcacacacacatcctctgcggaaacactatatgaagttcgaatccctgaatatcaataaaaggaactgagaaatattttg

SEQ ID NO: 696069 - DNA, 120 bp, Artificial Sequence
  ENSG00000188916_35 (sequence is synthesized)
gtgcaagaacaatgaggaagttgatcctgtaacatgaaggaagtgtaactgtttcacgtagactaaatatttaaaaatgggtttcatgttttttatactgtttttaactaaagttataaa

SEQ ID NO: 696070 - DNA, 120 bp, Artificial Sequence
  ENSG00000188916_36 (sequence is synthesized)
aatgtttccaacaagttctctctccttatgttttaagaatcccaactatctcagtaaattgaaataagggtattagcagttttctaattagtaacacaaatctgtctaaacaagaggaca

SEQ ID NO: 696071 - DNA, 120 bp, Artificial Sequence
  ENSG00000188916_37 (sequence is synthesized)
tcctagtacacaaaataatgtcactgtttcacaccagtctagaccaaaaaaaaataaaattaaaatgttcagagtcaaaaaggaacttctgaagataaattaattcatccctaaaaatta

SEQ ID NO: 696072 - DNA, 120 bp, Artificial Sequence
  ENSG00000188916_38 (sequence is synthesized)
aagtgtgttcaaaatagaaaaactattgtcaaaatcatttcatagtttaattgcaacacgtcactaacagatggtgattcttctcttggaaagattcaagtaaaaacgctgatacaaaag

SEQ ID NO: 696073 - DNA, 120 bp, Artificial Sequence
  ENSG00000188916_39 (sequence is synthesized)
caaggtaaaacgcacagggttcccttatgtagatgtacacatggcattgcatatagagattaaattattatacttgtcgttaagttctttattaatttttaaataaaaaaatcaaagatg

SEQ ID NO: 696074 - DNA, 120 bp, Artificial Sequence
  ENSG00000188917_0 (sequence is synthesized)
gctatgagtgcttttaaggaaggtctccatagaaggttcccccagcaaagtagggaggggtactccccgagaggagtcgaggtgccggagcctgctgcctcgccgacgctgggaggagcc

SEQ ID NO: 696075 - DNA, 120 bp, Artificial Sequence
  ENSG00000188917_1 (sequence is synthesized)
ccgtgtcccgccgcgcttgccaagggttggctgcgcgtgcggcgggagtagaggcgccttgcgcaccaggaagtgactgtttccccgccgcagcaaaccaggccatccgctggcctttta

SEQ ID NO: 696076 - DNA, 120 bp, Artificial Sequence
  ENSG00000188917_2 (sequence is synthesized)
gtttgccgcctcagaaaactccctactatgccaaactgtccgcggggcggggaatggaggaggcaggcggggctggagacgggacccgacggtgactgcgcaaggtggatttcagtgtgt

SEQ ID NO: 696077 - DNA, 120 bp, Artificial Sequence
  ENSG00000188917_3 (sequence is synthesized)
tctttggatggcaggccttaagagaagagtcccactgcacagcctcagatacttcatctccatggtgggtctcttctccaaaccaggactgcttccctggtatgccagaaatccaccagg

SEQ ID NO: 696078 - DNA, 120 bp, Artificial Sequence
  ENSG00000188917_4 (sequence is synthesized)
atggtcacagctctttctgggcacagtatgtaagggagatttcacccgtgtgatagccacgaaatgtcagaaaggacaaaaaagtcagaagaaaccaagccatcttggaccactagatgg

SEQ ID NO: 696079 - DNA, 120 bp, Artificial Sequence
  ENSG00000188917_5 (sequence is synthesized)
ttcctggcaggaaaggctggctgatgttgtgacaccactctggaggttgagctatgaagaacagctcaaggtgaaatttgcagctcagaagaaaattttacaaagactagagtcttacat

SEQ ID NO: 696080 - DNA, 120 bp, Artificial Sequence
  ENSG00000188917_6 (sequence is synthesized)
ccaaatgctcaatggagtcagtgtgacaacggctgtacccaaatctgagaggctctcttgtcttctccatcctattataccctctcctgtcatcaatggttaccgaaataagtccacctt

SEQ ID NO: 696081 - DNA, 120 bp, Artificial Sequence
  ENSG00000188917_7 (sequence is synthesized)
ctctgtgaaccgaggtccagatggcaatccaaagactgtggggttctacctgggaacttggagagatgggaacgttgtctgtgtgcagtctaatcatctgaaaaacatccctgagaaaca

SEQ ID NO: 696082 - DNA, 120 bp, Artificial Sequence
  ENSG00000188917_8 (sequence is synthesized)
cagtcaagtggcgcagtactatgaagtattccttcgacagtctccattggagccctgccttgtatttcatgaaggtggatactggcgtgagctcacagtccgcaccaatagccaagggca

SEQ ID NO: 696083 - DNA, 120 bp, Artificial Sequence
  ENSG00000188917_9 (sequence is synthesized)
cacaatggctatcatcactttccatccccagaaattaagtcaggaggagctccatgttcagaaggagattgtaaaggaatttttcatcagaggtcctggagcagcctgtggcttgacctc

SEQ ID NO: 696084 - DNA, 120 bp, Artificial Sequence
  ENSG00000188917_10 (sequence is synthesized)
actttacttccaggaaagtaccatgacccgttgcagccatcagcagtctccctatcagcttctgtttggggaaccctacatctttgaagaacttctgagcttgaagatccgcatctctcc

SEQ ID NO: 696085 - DNA, 120 bp, Artificial Sequence
  ENSG00000188917_11 (sequence is synthesized)
agatgcctttttccagattaacacagctggtgcagagatgctgtatcggactgtgggggagctgactggagtgaactctgacaccatccttcttgacatctgctgtggaactggtgtgat

SEQ ID NO: 696086 - DNA, 120 bp, Artificial Sequence
  ENSG00000188917_12 (sequence is synthesized)
ttgaattgttggagcaggcagtggaggatgcaagatggactgcagccttcaatggcatcaccaactctgaatttcatactggtcaagcagagaagattttgccagggctgctaaagtcaa

SEQ ID NO: 696087 - DNA, 120 bp, Artificial Sequence
  ENSG00000188917_13 (sequence is synthesized)
aggaagatggacagtcaattgttgctgtggtgaacccagcccgtgccggactgcattacaaggtgattcaagccattcgaaacttcagggccatccacacgctagtttttgtttcctgca

SEQ ID NO: 696088 - DNA, 120 bp, Artificial Sequence
  ENSG00000188917_14 (sequence is synthesized)
agctccatggtgaatccactaggaatgtcattgagctgtgctgtcctccagaccctgctaagaagctcttaggcgagccctttgtcctgcagcaagctgtacctgtggatttgttccctc

SEQ ID NO: 696089 - DNA, 120 bp, Artificial Sequence
  ENSG00000188917_15 (sequence is synthesized)
acaccccacattgtgagctggtgctcctctttactcgataagcagcctcctagaagacagcaggctatttgttaaggctgaagtttcagaaactttcaggtttggcatattgctacattg

SEQ ID NO: 696090 - DNA, 120 bp, Artificial Sequence
  ENSG00000188917_16 (sequence is synthesized)
cagaccctgggagcattacagtggaaaccaatctttggtttgtgaataggaagaatctattaggcctctggtctgaggcagattttttttttgagatagagtctcactcttgcccaggct

SEQ ID NO: 696091 - DNA, 120 bp, Artificial Sequence
  ENSG00000188917_17 (sequence is synthesized)
ccacaccccgccgcggctgacttaaccttagatttcagattccctttcaatcatgcccgtttgcttgggtttgaccactccccactcctggatctggactgtttcttcctgttgctgtca

SEQ ID NO: 696092 - DNA, 120 bp, Artificial Sequence
  ENSG00000188917_18 (sequence is synthesized)
gccttggttctagtttatagtcttgtctcctccgtttctgcttatggtgtggacaaatgaccttttttaagcagctggtaataattttacattgactggagcctgtgcatttgctcagag

SEQ ID NO: 696093 - DNA, 120 bp, Artificial Sequence
  ENSG00000188917_19 (sequence is synthesized)
atgctacaatttttagatatttctaagacttctggattcttgaggtagttaaggattaaaaccagaaacagtcgaggttttttaaaagcagggtaagccatgaagtgaatacagggtgac

SEQ ID NO: 696094 - DNA, 120 bp, Artificial Sequence
  ENSG00000188917_20 (sequence is synthesized)
atacagggtgactgagtgatcatcagatgagattaattcttttgggttttcttggttttaaggcatctcgaatgccccttgaaaatgtagttttccctggtggtgggcacctgtaatccc

SEQ ID NO: 696095 - DNA, 120 bp, Artificial Sequence
  ENSG00000188917_21 (sequence is synthesized)
tagcctttcctagtgtctcctctttgttaacccttcctacagacacagtgggcagaacttgcctaaagaagaagggaatggaagggctagtggagtcttgttggggagacaaggacctga

SEQ ID NO: 696096 - DNA, 120 bp, Artificial Sequence
  ENSG00000188917_22 (sequence is synthesized)
ctgcctgtgggctgcattcgggacacgacacagcagtcaacccatttgcttgtttggtttagcaaggaatagtgtctggagccggtccagctgaaggaagggtgagcagagagtgcaagc

SEQ ID NO: 696097 - DNA, 120 bp, Artificial Sequence
  ENSG00000188917_23 (sequence is synthesized)
gacaccatctcaaaaaaaaaaaaaaaaagaaaatgtagttatccctaggagcaatagcaccaattaactctcacccgtggaggaagaattggttattggagagaccctaagggaaaggag

SEQ ID NO: 696098 - DNA, 120 bp, Artificial Sequence
  ENSG00000188917_24 (sequence is synthesized)
gagaccctaagggaaaggagattttcagagagactgaatacctataattgtgctgtgtagtgtggaggcaaaaagctccaaaatctagtataacataataaactggatattgaaaactga

SEQ ID NO: 696099 - DNA, 120 bp, Artificial Sequence
  ENSG00000188917_25 (sequence is synthesized)
ggaaacctttctaatgtggcctcagaagagtggaatttaatttatggcaggggttagcagactacagcttttaggccaattctgtcttgctgcctgattttgtaaataaagttttattgg

SEQ ID NO: 696100 - DNA, 120 bp, Artificial Sequence
  ENSG00000188917_26 (sequence is synthesized)
aacacagccaagctcacttgtttatgtattgtctatggctgcttttgcactatgatggcagagttgagtagttgcaacagggaccatatggcctgcaaagccctaaattatttactcttt

SEQ ID NO: 696101 - DNA, 120 bp, Artificial Sequence
  ENSG00000188917_27 (sequence is synthesized)
tcctgctttatggcaagattggaactccccttctatggactgtcttgatcttcttagccacagactttcacatatgccataccctccaagcaaaccttatttgtcctcatccagagaaca

SEQ ID NO: 696102 - DNA, 120 bp, Artificial Sequence
  ENSG00000188921_0 (sequence is synthesized)
ccccggtactccttcctggaccgcgctggaagccctggcggcggcggcccatggggcccttggcgctgcccgcctggctgcagcccaggtataggaagaatgcgtatcttttcatctatt

SEQ ID NO: 696103 - DNA, 120 bp, Artificial Sequence
  ENSG00000188921_1 (sequence is synthesized)
acttaatccagttctgtggccactcttggatatttacaaatatgacagtcagattcttttcatttggaaaagattcaatggttgacactttttatgctattggacttgtgatgcgacttt

SEQ ID NO: 696104 - DNA, 120 bp, Artificial Sequence
  ENSG00000188921_2 (sequence is synthesized)
gccaatccgtatctctcctggaactgctgcacatatatgttggcattgagtcaaaccatcttctcccaaggtttttgcagctcacagaaagaataatcatcctttttgtggtgatcacca

SEQ ID NO: 696105 - DNA, 120 bp, Artificial Sequence
  ENSG00000188921_3 (sequence is synthesized)
gtcaagaggaagtccaagagaaatatgtggtgtgtgttttattcgtcttttggaatctattggatatggttaggtacacttatagcatgttatcagtcataggaatatcctatgctgtct

SEQ ID NO: 696106 - DNA, 120 bp, Artificial Sequence
  ENSG00000188921_4 (sequence is synthesized)
tgacatggctcagtcaaacactatggatgccaatttatcctttgtgtgttcttgctgaagcatttgccatctatcaatcgctgccttattttgaatcatttggcacttattccaccaagc

SEQ ID NO: 696107 - DNA, 120 bp, Artificial Sequence
  ENSG00000188921_5 (sequence is synthesized)
tgccctttgacttatccatctatttcccatatgtgctgaaaatatatctcatgatgctctttataggtatgtattttacctacagtcatctatactcagaaagaagagacatcctcggaa

SEQ ID NO: 696108 - DNA, 120 bp, Artificial Sequence
  ENSG00000188921_6 (sequence is synthesized)
tctttcccattaaaaaaaagaagatgtgaagtacagcattccagtgtgacacgagaaaagacaggctgtggattcagtgcagtaaataaaacacaggaagtattctggtggaaaaatacc

SEQ ID NO: 696109 - DNA, 120 bp, Artificial Sequence
  ENSG00000188921_7 (sequence is synthesized)
ttgtatttgataaaaatccattacatgaaataactgcacatacccccaaaactctagacataacaggctatgtttttcacacattgtatttttaagacatatatattctccataccctgc

SEQ ID NO: 696110 - DNA, 120 bp, Artificial Sequence
  ENSG00000188921_8 (sequence is synthesized)
ttcaccaaaattcctgcttcatttggattttatacaagttatacttacattgtatgaagtctgattattttcctgtaagtttaatgagaaataggagattagctgcaatagattcaatta

SEQ ID NO: 696111 - DNA, 120 bp, Artificial Sequence
  ENSG00000188921_9 (sequence is synthesized)
aattaagaaaccaaacttgataacctaaattacatgtattctttttcacttccaagttcccaaatagatctgtaggagaagagggatggaaaatatattccacagttgcctagaataaca

SEQ ID NO: 696112 - DNA, 120 bp, Artificial Sequence
  ENSG00000188921_10 (sequence is synthesized)
tatttcatagacagatgtctgtcttcagatctaataatactcaccctaaacattagatatgtttagaaaattaaatatctttccaagccctatgtcttagctcaggttgctataatagaa

SEQ ID NO: 696113 - DNA, 120 bp, Artificial Sequence
  ENSG00000188921_11 (sequence is synthesized)
caccataaaccgaatggcttaaacaacagcaaacgcttctcacagttctggaggctgggaattccgctcaggatcaaggcatcagctaatgcagtttctggtgagggccctcttcccagt

SEQ ID NO: 696114 - DNA, 120 bp, Artificial Sequence
  ENSG00000188921_12 (sequence is synthesized)
ttgcagatagatgtccttctttgtcctcacatgagagagagatcaactctcttatgtctcttataatggcactaaccccattcatgagggctctaccctcatgatctaattacctcccaa

SEQ ID NO: 696115 - DNA, 120 bp, Artificial Sequence
  ENSG00000188921_13 (sequence is synthesized)
tggccccacctccaaataccatcatattggaggttagggcttaacacatgaattttgggggaacacaaagattcactccatagcattctgtacctggtcctacaaaattcatgtcctcct

SEQ ID NO: 696116 - DNA, 120 bp, Artificial Sequence
  ENSG00000188921_14 (sequence is synthesized)
cacatgcaaaatacatacattccatctcgacagcctcaaaagtcttaactcattcctgcatcaactctaaagtccaaagtctcgtctaaatcagatgtgggtgagattcaaggtagaatt

SEQ ID NO: 696117 - DNA, 120 bp, Artificial Sequence
  ENSG00000188921_15 (sequence is synthesized)
catcctgaggtaaaattcctttccagctttgaacttgtgaaatgaaacaagttatgtgcttccacagtacaatggtgggacacacaaagggtggacattcctattcccaaagcaagaaac

SEQ ID NO: 696118 - DNA, 120 bp, Artificial Sequence
  ENSG00000188921_16 (sequence is synthesized)
aggaaaaaaggaaggtgtaatgggtccccagcaagtccaaaacctagcaaggcaaacaccatgagatcttcagtcttagtaataatcctctttggcctgatactctggcttcaggaccca

SEQ ID NO: 696119 - DNA, 120 bp, Artificial Sequence
  ENSG00000188921_17 (sequence is synthesized)
gtgaggcagaggtattgcccccaggactatgttggaggaggatgacccccatatcaccaggcggaagctgtcaggcctgttgaaaccaaggcaatgactgccccttttgaaactgagaag

SEQ ID NO: 696120 - DNA, 120 bp, Artificial Sequence
  ENSG00000188921_18 (sequence is synthesized)
gtaccactgatgttctctgaatcattgttccgggtcagtttctccttttcttgaagaatagtgtacattcacagctgaatagctctatggtcccaaattcaagaagtccaacagtcttcc

SEQ ID NO: 696121 - DNA, 120 bp, Artificial Sequence
  ENSG00000188921_19 (sequence is synthesized)
ctcattctgtcccatctccattcctttcaatacaaactagcagtgttcctgctggggtggctgattaggtctgtggttcacacccacataaatctaattggatgacttgtctgctacact

SEQ ID NO: 696122 - DNA, 120 bp, Artificial Sequence
  ENSG00000188921_20 (sequence is synthesized)
cttagtgttctctaccaaacgtgttttcttatctttttgtaatgcagacagactgataatttcccacatcttttaagttctggttccgtttttgttaagaattctgtcttcattttttgt

SEQ ID NO: 696123 - DNA, 120 bp, Artificial Sequence
  ENSG00000188921_21 (sequence is synthesized)
cacattttactttaagcagtcaagataaaccgaggcactccttcaacactggttggagatctcttcagttcaatatctaatttcatggctcacaattttactttccacaaaacactagaa

SEQ ID NO: 696124 - DNA, 120 bp, Artificial Sequence
  ENSG00000188921_22 (sequence is synthesized)
catgaacacaatcatccaagttctttggcatattataacaaagatcacctttcttccagtttcccataacaggttcctcattttcatttgagacttcatcagaatggcctttattgtcca

SEQ ID NO: 696125 - DNA, 120 bp, Artificial Sequence
  ENSG00000188921_23 (sequence is synthesized)
tgtctaccaacattatcttcatggtgatttacgtgttctctatgaagatggaggctttctctcccaccctcttctctttgagccctcaccaaaatcacctctatcaatcccttcatggca

SEQ ID NO: 696126 - DNA, 120 bp, Artificial Sequence
  ENSG00000188921_24 (sequence is synthesized)
atactggctttttctagcaaaaaaactagtacctcaaaactcttccagtactcttccaggtactctagtacctcaaaactcttccagcttctatctgttacctaacgtcaaagctgcttc

SEQ ID NO: 696127 - DNA, 120 bp, Artificial Sequence
  ENSG00000188921_25 (sequence is synthesized)
cacatctttatatattggttatagcatcaccacacttcttggtactaattgctgtcttagcttggctgctataacaaaataccataaactgggtggcttagacaacaaatatatttctca

SEQ ID NO: 696128 - DNA, 120 bp, Artificial Sequence
  ENSG00000188921_26 (sequence is synthesized)
cagttctggaggcagggaagtccaagataaaggtgctagacaattaagttcctgatgaggttccaaggtgctagctgattcttcttcatggtttgcagatgaatgccttcttgctatatg

SEQ ID NO: 696129 - DNA, 120 bp, Artificial Sequence
  ENSG00000188921_27 (sequence is synthesized)
ttcacatggtggagggagaaaccatctctcccttatttcttattgtaaaggtactaatcccatttatgaaggttccagcttcaaatgccatcacactggagattagattttcaacatgtg

SEQ ID NO: 696130 - DNA, 120 bp, Artificial Sequence
  ENSG00000188921_28 (sequence is synthesized)
aatttaatgggggacaccagcattcagtccctagtgctctgatagagtattcattaatgtcatgtatttgttaacatcttgtaagttatttgggctttgatgccttaaaagaagaccctg

SEQ ID NO: 696131 - DNA, 87 bp, Artificial Sequence
  ENSG00000188921_29 (sequence is synthesized)
gtaagttatttgggctttgatgccttaaaagaagaccctggccaggcatgctggctcatacctgtaatcctagcactatgagaggct

SEQ ID NO: 696132 - DNA, 120 bp, Artificial Sequence
  ENSG00000188921_30 (sequence is synthesized)
tgacagagtgagactctatctcaaaagagaagaccctaatgaaaatagtaaacctttagcaaatacacaaatgatgccccattctgtattctttttaattttaaaaataatgacacacac

SEQ ID NO: 696133 - DNA, 120 bp, Artificial Sequence
  ENSG00000188921_31 (sequence is synthesized)
ttaaaaataatgacacacacatacaggaagataaaaggtataaaaatatactaagtactttttaaaaaggaaaattcatgttttggattattactgaattgttgctaattactgtaatgt

SEQ ID NO: 696134 - DNA, 120 bp, Artificial Sequence
  ENSG00000188921_32 (sequence is synthesized)
aagtcatatgtccttacatagttttgaaaaatgctttctttgaaaatctaaaaaaagtgtgaataactgatagtcattgctgtatcattgatgtatcactcaatttttggtaaagaatta

SEQ ID NO: 696135 - DNA, 120 bp, Artificial Sequence
  ENSG00000188921_33 (sequence is synthesized)
ggaaagaaacaattgagtattaggctacttgaaatctttataaatatatttggattttaaaaaattatccttttaaaaagctacattttttctgcttttatagttatcttctaaatttca

SEQ ID NO: 696136 - DNA, 120 bp, Artificial Sequence
  ENSG00000188921_34 (sequence is synthesized)
gaaaaattatgaaaagctttagtgtgcaaggagaacataaaccctttgcaaattttaggtgagttaatcttaatcactccaaataaagatggctccttacactgccgaagtacatgtaca

SEQ ID NO: 696137 - DNA, 120 bp, Artificial Sequence
  ENSG00000188921_35 (sequence is synthesized)
agtacatgtacaatcaatcactaaaacaaagagaaaattagagaaactacactttactgggtcattataataaattaaaatttcattattaaataatgctttaattttttaaaaccagat

SEQ ID NO: 696138 - DNA, 120 bp, Artificial Sequence
  ENSG00000188921_36 (sequence is synthesized)
ttcttaaaattgaaaaccaaaagaaacacaagtgaatttataattattttaaaacagaaatgaggattgacagtaatttgagatatctgcaacaattgtaacataaaaagatcttacatt

SEQ ID NO: 696139 - DNA, 120 bp, Artificial Sequence
  ENSG00000188921_37 (sequence is synthesized)
tcctttggtgacagacacaattgttaatactactgtggttggttgcctgtattcacaatggaaaggaatactaaatttcattatcaattagtgaaaataaaggtgtaatttctttttcta

SEQ ID NO: 696140 - DNA, 120 bp, Artificial Sequence
  ENSG00000188921_38 (sequence is synthesized)
cttaagtacatgttccccaggttaagaaacccagacatagtgaagtcaagacagtaactatctggttaatcggatgttaccaaaatcgcaaagttgatgtctttgactatctgtcttaac

SEQ ID NO: 696141 - DNA, 120 bp, Artificial Sequence
  ENSG00000188921_39 (sequence is synthesized)
tgtatgttcaccaaatccctatttcattttgtacagtgtagacaaaggcttactttctcaaatctaagtaacatagatgaaataggaaccattagatattttgaaaacatatctaagaca

SEQ ID NO: 696142 - DNA, 120 bp, Artificial Sequence
  ENSG00000188921_40 (sequence is synthesized)
acttttttcagtaatttttttattgtggtaaaatgtaaaatatactatcttattcctttttaagtgtgcagttcagtagtagtaagtaatttatattgtgcaaccatcaccactgtccat

SEQ ID NO: 696143 - DNA, 120 bp, Artificial Sequence
  ENSG00000188921_41 (sequence is synthesized)
ctccagaactttttttaccttgcaaaacttataccctatactcattaagcaatggttccctattctcccatctgccctgtccctggcaaccaccagtctactttttgtctctatgatttt

SEQ ID NO: 696144 - DNA, 120 bp, Artificial Sequence
  ENSG00000188921_42 (sequence is synthesized)
gattgctctaagtacctcatataaatgtaatcatacagtatctgtctttcgtaattggcttatttcacttagcataatgtctgcaagtttcctccattttgtatatgtcagaattttctt

SEQ ID NO: 696145 - DNA, 120 bp, Artificial Sequence
  ENSG00000188921_43 (sequence is synthesized)
cctttttgaggatgactgataaggagggacttactcctgtcattttgctatttgttttctacatagcttagcttttttgtccctcatttcctgcattacgtcttttgtgtgtagtttact

SEQ ID NO: 696146 - DNA, 120 bp, Artificial Sequence
  ENSG00000188921_44 (sequence is synthesized)
tttttatagtgaagcatttaagtatctttctcagttcttttgtgtatattctgtagctgttttctttgtggttaccatagggtgacatttaatatccggaaggtaatttggacttatgcc

SEQ ID NO: 696147 - DNA, 120 bp, Artificial Sequence
  ENSG00000188921_45 (sequence is synthesized)
agctgaacttcaaaaatatacaaaaattctgctctttatatctctgtctatcactcctttaagtttcacaaaattatatacactgtgtgtccaaaatcaatttttaaaaatgcagtagtc

SEQ ID NO: 696148 - DNA, 120 bp, Artificial Sequence
  ENSG00000188921_46 (sequence is synthesized)
tctatgtagaaaacaaaaagtggagttacaaaccattgttacaaaagtactagattttataattgcccatgtatttttctttactgagatccttatttcttcatgtggctttgagttgct

SEQ ID NO: 696149 - DNA, 120 bp, Artificial Sequence
  ENSG00000188921_47 (sequence is synthesized)
gtttagtgtctttccatttcaacttgcaggacccctattagcatttctggcaggggcaggtctagtggtaacatactttctcagcttttgtttatctggggatgtcttaatttctctctc

SEQ ID NO: 696150 - DNA, 120 bp, Artificial Sequence
  ENSG00000188921_48 (sequence is synthesized)
acgtttgaagaacagttttgtcaaatacaggaaatgtggttgatgatatatttttttcctaacactttgaatatgtgagctcactgcattctggcctccaaagtttctgatgagaaatct

SEQ ID NO: 696151 - DNA, 120 bp, Artificial Sequence
  ENSG00000188921_49 (sequence is synthesized)
gataatcttattaaggatcacttatatgtgatgaattgattttttcatgctactttcaagattctctttctgtctttggcttttgatagttgtgtggatctcttggaattcattctactt

SEQ ID NO: 696152 - DNA, 120 bp, Artificial Sequence
  ENSG00000188921_50 (sequence is synthesized)
ggagtttgttggtcattatctggctgttcttcaaatattctctctgctcctttctttctctcttttccttctgggatcctcacaatgtgtatgttggtctgcttgatgggtcccacagat

SEQ ID NO: 696153 - DNA, 120 bp, Artificial Sequence
  ENSG00000188921_51 (sequence is synthesized)
ccttataccctgttcacttttttccaatttttttctattgctcagactaataatttccattgtcctattttcatgtatactgattcttctgctgcccaaatctgcctttgaatacctcta

SEQ ID NO: 696154 - DNA, 120 bp, Artificial Sequence
  ENSG00000188921_52 (sequence is synthesized)
gtgagtttttcatttcaattatcgtactttccagctcttgaatttcttttttgtatcgtcttagattttctctatattgatattaccattttgttcatccattggttttttgactttttc

SEQ ID NO: 696155 - DNA, 120 bp, Artificial Sequence
  ENSG00000188921_53 (sequence is synthesized)
cgcatgctctttggttctttaaaaaacatccttaaggcagtcgttgtagagcctttagtggatccaccatcaagtctttttcagagatagtttttgtttttgttttcatttgaaagggac

SEQ ID NO: 696156 - DNA, 120 bp, Artificial Sequence
  ENSG00000188921_54 (sequence is synthesized)
atactttcctgtttctttgtatgccttgttatttttttgctgaaaactgaacgtttcaatctaataatatggtaactacatctcactaaggtccctaagttaatgtttttttttaaacta

SEQ ID NO: 696157 - DNA, 120 bp, Artificial Sequence
  ENSG00000188921_55 (sequence is synthesized)
ttccttactttgcctgccttgagcaagttgtcaaatgtgagaaactgtatttatttcagaagtacaaatagatacaatctcaatgtccaaaatatttccccaaagaaagaatcttacaat

SEQ ID NO: 696158 - DNA, 120 bp, Artificial Sequence
  ENSG00000188921_56 (sequence is synthesized)
tatttaagtttacttatggagaaaacattttatggtactaaagtgttaaagtgatttaaaattaaggttaaaatatgctaaaaattatcttcctttacccagtatctatcttccacttgt

SEQ ID NO: 696159 - DNA, 120 bp, Artificial Sequence
  ENSG00000188921_57 (sequence is synthesized)
ttattactgctttttaataattataatgtttcccgttggttcggataattttaatattcttctcggtctgagttatatgctaatgttgatatgacatggttctccagggtagtgttcaga

SEQ ID NO: 696160 - DNA, 120 bp, Artificial Sequence
  ENSG00000188921_58 (sequence is synthesized)
ttgtatgttcagggagcaacagccacaattaacaagttcacctgtttagaatgcagattccagggctccactaaagatagttgaatcagaagctctgggaataagctcaggatcctacct

SEQ ID NO: 696161 - DNA, 120 bp, Artificial Sequence
  ENSG00000188921_59 (sequence is synthesized)
tttgatagactcctcaaatgagcctcatgcacagaaaagtttgagaaccactgcttttgagtctaaattatttcagctttggacagaaagaaaactgctaaaaagaactacttatataaa

SEQ ID NO: 696162 - DNA, 120 bp, Artificial Sequence
  ENSG00000188921_60 (sequence is synthesized)
agccaccaatgttttcagaacagggatgattttttatggctttaaaaatccttaaatagtagttctgaacatgtttttaacatgccaagtaagaattactaactagtttatttttgctaa

SEQ ID NO: 696163 - DNA, 120 bp, Artificial Sequence
  ENSG00000188921_61 (sequence is synthesized)
gggtagctggagttttaaatctcatctaaaataaggttagttaattccatatgaaagtcaattagtaaaagtatgccttaattcatcacatacatgtaggtgtctattgttacttcatgg

SEQ ID NO: 696164 - DNA, 120 bp, Artificial Sequence
  ENSG00000188921_62 (sequence is synthesized)
tattcagctgaatgatggggttcttgtgaaagataatgtggtctggaattaagagcactaggtttgatttgagatcaagctccattatttactaactgaatgactctttgagttccagtt

SEQ ID NO: 696165 - DNA, 120 bp, Artificial Sequence
  ENSG00000188921_63 (sequence is synthesized)
tccttaaccacttaaagttattatgaagactaaatgacatatggtaaattaaacttttgcaaattataaagggctttgcagaagtaggacatttataacatgttctgttcttacttcatg

SEQ ID NO: 696166 - DNA, 120 bp, Artificial Sequence
  ENSG00000188921_64 (sequence is synthesized)
atggtttagtgatttatattctctgactgtaagttccatgagagcagggatgacacgttttgttcagattgtaccccagaaacttgtatagtggcacataatagacacccataattgtgt

SEQ ID NO: 696167 - DNA, 120 bp, Artificial Sequence
  ENSG00000188921_65 (sequence is synthesized)
gtgcaactctatctttaaagaacgccactactacatctagaaatatatttcaagaaatctatcggcttaattaggtaatgaatttcaattgtatctcaaagcgttccttatatttagaag

SEQ ID NO: 696168 - DNA, 120 bp, Artificial Sequence
  ENSG00000188921_66 (sequence is synthesized)
acacataagttttgtttttttctttcaacttatataagtatcttaacatgctacttctagaatattttaattgttaagaacaatttcttaataaacttccactgtcttcctgagtcccca

SEQ ID NO: 696169 - DNA, 120 bp, Artificial Sequence
  ENSG00000188921_67 (sequence is synthesized)
tcaaaccatcttctcccaaggtttttgcaggagattttcccctctgtcctcttcaattaagggatgacctgacatcatggatagcttacaactctggaaaccaggagacttcggatatat

SEQ ID NO: 696170 - DNA, 120 bp, Artificial Sequence
  ENSG00000188921_68 (sequence is synthesized)
atatgtttccagctcacagaaagaataatcatcctttttgtggtgatcaccagtcaagaggaagtccaagagaaatatgtggtgtgtgttttattcgtcttttggaatctattggatatg

SEQ ID NO: 696171 - DNA, 120 bp, Artificial Sequence
  ENSG00000188921_69 (sequence is synthesized)
gttaggtaagaaggcaaaataatctcttaaaacaaggctaaattgctttctgcagtgaaaccagtactagcagtaaccagaggttacttggtacgagagaggaaaacataaccccttttc

SEQ ID NO: 696172 - DNA, 120 bp, Artificial Sequence
  ENSG00000188921_70 (sequence is synthesized)
aatgggcatatcaaagataatgaaaacctaccgtggtattacaagagtaaatcagcacattcaggtttctgcagaaggcttggcataaaaccaacttggaataaccctcagctgtttcct

SEQ ID NO: 696173 - DNA, 120 bp, Artificial Sequence
  ENSG00000188921_71 (sequence is synthesized)
aacaaaggcattcctcacaattgctttagtacggttgctttaataagcaaagcaggtcttttattgtatcaccagaatttacagttagtttctgtgcattcaagaatcttttaaatatag

SEQ ID NO: 696174 - DNA, 120 bp, Artificial Sequence
  ENSG00000188921_72 (sequence is synthesized)
ggcctctcaggaagaaaatgcactctcacattcatttacaattccagtgggttcaaatgactaacttaagtccttttagtgctaattctaaaactttgcagtgagatgtgcctagtctta

SEQ ID NO: 696175 - DNA, 120 bp, Artificial Sequence
  ENSG00000188921_73 (sequence is synthesized)
cctctacaagtggtggtgtcaaacagtcccctttgctcagtgagtgcttacgcctcactctggggaggtgtcctaactgctaggtcagctttcctaaataagaaccgtccctcctacttg

SEQ ID NO: 696176 - DNA, 120 bp, Artificial Sequence
  ENSG00000188921_74 (sequence is synthesized)
agagatctggatttgaataggtaacaaaagagccctagtttgtttttcagccaagggtatgtaaattttttcattatattgtcaataacttaactgaattaaaatatgtttaaataataa

SEQ ID NO: 696177 - DNA, 120 bp, Artificial Sequence
  ENSG00000188931_0 (sequence is synthesized)
aagatcatggccactaactacagtgccaaccagtatgaaaaggctttctcatccaagtatctgcagaactggtctcccactaagccaacaaaagagagcatctcttctcatgaaggctac

SEQ ID NO: 696178 - DNA, 120 bp, Artificial Sequence
  ENSG00000188931_1 (sequence is synthesized)
actcaaattattgccaacgatcgtggtcatctactgccttctgtgccccgttccaaggcaaatccttggggttccttcatgggcacctggcaaatgcctctgaagataccccctgctcgg

SEQ ID NO: 696179 - DNA, 120 bp, Artificial Sequence
  ENSG00000188931_2 (sequence is synthesized)
gtgaccctgacctcccgtacaactgctggtgctgcctccctcaccaaatggatacagaaaaatcctgatttactcaaggcctccaatgggctgtgtcctgaaatcttaggcaagccccat

SEQ ID NO: 696180 - DNA, 120 bp, Artificial Sequence
  ENSG00000188931_3 (sequence is synthesized)
caagcacgaagtccaaccataattccaagctccccagctgccaacctcaattccccagatgaactccaaagctcacacccctctgcaggtcatactccaggtccccaaagaccagccaaa

SEQ ID NO: 696181 - DNA, 120 bp, Artificial Sequence
  ENSG00000188931_4 (sequence is synthesized)
tcctaagagcccacctggaagtccacgtatgctagaactctgggcagggcctaatctagctgaggtccagaaatacaaacctggaacttcatatggaccaagtggccacacactgaaaaa

SEQ ID NO: 696182 - DNA, 120 bp, Artificial Sequence
  ENSG00000188931_5 (sequence is synthesized)
cccgtatagcgactcagtgaaataaacaagagcccccagtcagaactgtgaaacagggaaattttggggtgggagtaaaagcaaatttggaaaataaacttttttttgttgaatctttta

SEQ ID NO: 696183 - DNA, 120 bp, Artificial Sequence
  ENSG00000188937_0 (sequence is synthesized)
tggctgcctgacttgggagatggatgggctgagggagtggagggggacctcagaggagcaggaccagggagactcccaggacggtaagcaacatttgaggaccattcactaacgcttctc

SEQ ID NO: 696184 - DNA, 120 bp, Artificial Sequence
  ENSG00000188937_1 (sequence is synthesized)
tgcaggggtttcctctccatccatttccttgctgggttgtcagtgatgccatctgagttgctgtcagggctgtagcctgacaaagggtttcctaatagatccaaactgtccatttgtggg

SEQ ID NO: 696185 - DNA, 120 bp, Artificial Sequence
  ENSG00000188937_2 (sequence is synthesized)
gagcttctgattttctgttgttactggtttcccttagcccaacaccagggtcattaagaaggaaggaatgtgaggaagaaagaaaggcagggcattcaggaagaagtgtggaggcatggg

SEQ ID NO: 696186 - DNA, 120 bp, Artificial Sequence
  ENSG00000188937_3 (sequence is synthesized)
agggttctcatggggccctcctgggcactgggtgacctgtcctttctcccctcaggtaggggtcccacggctgggtggtcctaagccactgggtggatgaaaggccgagggatgttggtc

SEQ ID NO: 696187 - DNA, 120 bp, Artificial Sequence
  ENSG00000188937_4 (sequence is synthesized)
tgttggtcctgcttctgcatgcggtggtcctcggcctgcccagcgcctgggccgtgggggcctgcgcccgcgcttgtcccgccgcctgcgcctgcagcaccgtggagcgcggctgctcgg

SEQ ID NO: 696188 - DNA, 120 bp, Artificial Sequence
  ENSG00000188937_5 (sequence is synthesized)
gaccgcgcgggcctcctgcgggtgccggccgagctcccgtgcgaggcggtctccatcgacctggaccggaacggcctgcgcttcctgggcgagcgagccttcggcacgctgccgtccttg

SEQ ID NO: 696189 - DNA, 120 bp, Artificial Sequence
  ENSG00000188937_6 (sequence is synthesized)
cgccgcctgtcgctgcgccacaacaacctgtccttcatcacgcccggcgccttcaagggcctgccgcgcctggctgagctgcgcctggcgcacaacggcgacctgcgctacctgcacgcg

SEQ ID NO: 696190 - DNA, 120 bp, Artificial Sequence
  ENSG00000188937_7 (sequence is synthesized)
cgcaccttcgcggcgctcagccgcctgcgccgcctagacctagcagcctgccgcctcttcagcgtgcccgagcgcctcctggccgaactgccggccctgcgcgaactcgccgccttcgac

SEQ ID NO: 696191 - DNA, 120 bp, Artificial Sequence
  ENSG00000188937_8 (sequence is synthesized)
cgacaacctgttccgccgcgtgccgggcgcgctgcgcggcctggccaacctgacgcacgcgcacctggagcgcggccgcatcgaggcggtggcctccagctcgctgcagggcctgcgccg

SEQ ID NO: 696192 - DNA, 120 bp, Artificial Sequence
  ENSG00000188937_9 (sequence is synthesized)
cgctcgctcagcctgcaggccaaccgcgtccgtgccgtgcacgctggcgccttcggggactgtggcgtcctggagcatctgctgctcaacgacaacctgctggccgagctcccggccgac

SEQ ID NO: 696193 - DNA, 120 bp, Artificial Sequence
  ENSG00000188937_10 (sequence is synthesized)
gccttccgcggcctgcggcgcctgcgcacgctcaacctgggtggcaacgcgctggaccgcgtggcgcgcgcctggttcgctgacctggccgagctcgagctgctctacctggaccgcaac

SEQ ID NO: 696194 - DNA, 120 bp, Artificial Sequence
  ENSG00000188937_11 (sequence is synthesized)
gcctcaccgtgctcgcctgggtcgccttccagcccggcttcttcctgggccgcctcttcctcttccgcaacccgtggtgctgcgactgccgtctggagtggctgagggactggatggagg

SEQ ID NO: 696195 - DNA, 120 bp, Artificial Sequence
  ENSG00000188937_12 (sequence is synthesized)
gctccggacgtgtcaccgacgtgccgtgcgcctccccgggctccgtggccggcctggacctcagccaggtgaccttcgggcgctcctccgatggcctctgtgtggaccccgaggagctga

SEQ ID NO: 696196 - DNA, 120 bp, Artificial Sequence
  ENSG00000188937_13 (sequence is synthesized)
acctcaccacgtccagtccaggcccgtccccagaaccagcggccaccaccgtgagcaggttcagcagcctcctctccaagctgctggccccgagggtcccggtggaggaggcggccaaca

SEQ ID NO: 696197 - DNA, 120 bp, Artificial Sequence
  ENSG00000188937_14 (sequence is synthesized)
ccactggggggctggccaacgcctccctgtccgacagcctctcctcccgtggggtgggaggcgcgggccggcagccctggtttctcctcgcctcttgtctcctgcccagcgtggcccagc

SEQ ID NO: 696198 - DNA, 120 bp, Artificial Sequence
  ENSG00000188937_15 (sequence is synthesized)
acgtggtgtttggcctgcagatggactgacctggccagaggggggaaagtttgcttaactgggcttgagtgtgtttgtggtaaggggagaggagccggaatggagggcagaggtgaaaat

SEQ ID NO: 696199 - DNA, 120 bp, Artificial Sequence
  ENSG00000188937_16 (sequence is synthesized)
cccagtggagggtggaaggaaccgtttgcctccagagatggccccagggagaacacagggacgtgccactcgagggggaggatggtatggatttctgcttttgtcacacgggcatccatt

SEQ ID NO: 696200 - DNA, 120 bp, Artificial Sequence
  ENSG00000188937_17 (sequence is synthesized)
ggaaaagagaagcaagaatgaacgtgggccctcgggtgggaagactaggaatcggaagcttctagggcttcacatcccttcccctcccctccccttcccctcatcttccaggcaacagtg

SEQ ID NO: 696201 - DNA, 120 bp, Artificial Sequence
  ENSG00000188937_18 (sequence is synthesized)
cctgcaaggcctgaattagagagacttccattggctaagtagttaagagccgtcccatttctcctggcggggtaacccattacaccgaagtcctttgttttctaccacaatcctcctcct

SEQ ID NO: 696202 - DNA, 120 bp, Artificial Sequence
  ENSG00000188937_19 (sequence is synthesized)
cctctccaggggcctggaaacactaggattcaggaaggtaggcaggacgtgagagaagggagatgggagagagatttaagacaaagggtggcggtggttcctggggtctgagatgtgtta

SEQ ID NO: 696203 - DNA, 120 bp, Artificial Sequence
  ENSG00000188937_20 (sequence is synthesized)
ggaggcgtttaaaacaaagatccagttcatttactccacagttattcccagggctggccctagccacaaaggaactttagggcagggtagggaaaaaaggggcagcagggggtgtgtttg

SEQ ID NO: 696204 - DNA, 120 bp, Artificial Sequence
  ENSG00000188937_21 (sequence is synthesized)
tggacaaataaatttgtaaagtccgaggattaaaaaaaaaaaaaggttaaaccggtttctctactgctggacttttcagagtctttcatatgctaacattcattgtgaatctcccaagag

SEQ ID NO: 696205 - DNA, 120 bp, Artificial Sequence
  ENSG00000188937_22 (sequence is synthesized)
cagagttcctggctcgggaacattgggaggcctgggatacagtggcttagcctcaagcaaaaaggtgaacaatatctttatggcttgaaggtatacgaaataatgtcactacatcggagc

SEQ ID NO: 696206 - DNA, 120 bp, Artificial Sequence
  ENSG00000188937_23 (sequence is synthesized)
agcgcctctgcttgcacacctatgggagtctgtagctgtgacacatagaagttggccacatccatgtcggtggctccaaagtgggtggccacacgcacaccctcgtgcaatgtgaagctc

SEQ ID NO: 696207 - DNA, 120 bp, Artificial Sequence
  ENSG00000188938_0 (sequence is synthesized)
aggcttaactaccaccatctcctcgcgggcagtgggggcaaccgcgaagacagaatttcacaaactttcagctccagcagtttcaaggaaatgtcaaatgacaagatggaagaccgagtg

SEQ ID NO: 696208 - DNA, 120 bp, Artificial Sequence
  ENSG00000188938_1 (sequence is synthesized)
tcaagagctaagacaacaaaaaggcccccaaaatttgttttcaagaaaaccaatgaaaaaagcaagcaatcagaacgtgaagtccaggatcatggatgtgcttatcttcacagtcactgc

SEQ ID NO: 696209 - DNA, 120 bp, Artificial Sequence
  ENSG00000188938_2 (sequence is synthesized)
tgggtcctgaagttctcctctggcccagtgccagctgcgaagccctctgccaaagggccagaggaggccggtgatatagagctctgattacccacccgtcagggcaccgctgaaggtcac

SEQ ID NO: 696210 - DNA, 120 bp, Artificial Sequence
  ENSG00000188938_3 (sequence is synthesized)
tgaatacttactgtgcacccgaaaaataaatcctgcgagttcacgcccgcgtagttcgccccctgattttgagcgactcctttcgcatgggatctacaaaaccgaactgccttaaagacc

SEQ ID NO: 696211 - DNA, 120 bp, Artificial Sequence
  ENSG00000188938_4 (sequence is synthesized)
tctttcacacggacgtgaagtcacagaactgacaaaatcccatcctgtcaaagtgcacgggtctttgaaatctaacacaaaaagccatagaaagattctctaaacaccctgtactaagag

SEQ ID NO: 696212 - DNA, 120 bp, Artificial Sequence
  ENSG00000188938_5 (sequence is synthesized)
gaacacggacagggcactgcgttctgaagtagaggccagggcactggcccttagacacgtctcgctgtcaccgggctaacaacattggcaagggcggcggcagcagcactgatatttgca

SEQ ID NO: 696213 - DNA, 120 bp, Artificial Sequence
  ENSG00000188938_6 (sequence is synthesized)
gcccccaagggctctggcgaaaccccctctattactctgtatcctgcctgcttccaagatgaacctgttgctgggaaagaacaggctaaattagaaaagggagtattttgtcaaagttga

SEQ ID NO: 696214 - DNA, 120 bp, Artificial Sequence
  ENSG00000188938_7 (sequence is synthesized)
aggtgagtgatagcctgcccgcctcaaataggatgggaaaaactaaggatattggggatgatgacactgtcgcctccgaattctggtccggggctctctcccagccctcaagtgtcccca

SEQ ID NO: 696215 - DNA, 120 bp, Artificial Sequence
  ENSG00000188938_8 (sequence is synthesized)
cgcggccgcggaccccgaacagggacagctggagacgggcttgggcagcgcgcggcctgcacccgcggccatccatcttgcagcccggcccggccaggctatcccgggcaagggctgggg

SEQ ID NO: 696216 - DNA, 120 bp, Artificial Sequence
  ENSG00000188938_9 (sequence is synthesized)
cccagcgccgccacggccgggcgacattctgcgccctgggaagggggataggggtgcggcgcggccccggtccccggcccgcccggatccccggcctcaccttgacgtggaagcggatga

SEQ ID NO: 696217 - DNA, 120 bp, Artificial Sequence
  ENSG00000188938_10 (sequence is synthesized)
ggaagcggatgagcgccaggcggatgcagtgggccatgcagacgggcggcaggaaccagacctttggcggcggggtgcccttgttctggacatggctgacgatctgctgtgccgtctggc

SEQ ID NO: 696218 - DNA, 120 bp, Artificial Sequence
  ENSG00000188938_11 (sequence is synthesized)
gctcgttgccctgccgcttgacccactcgtgcagccgggccttctcgagcgcgccgttgaagaagacgaagagctcgatgttgccgccgaagcaggccttggccagcgccgccagaaacc

SEQ ID NO: 696219 - DNA, 120 bp, Artificial Sequence
  ENSG00000188938_12 (sequence is synthesized)
tctgtagaggagcaggatgcaaccgacaggctgtggccggacagctgctgcccagcacatggagcctgcacgcgcacggtttggccaaagaagcccccatactcccggtgaaaaagattt

SEQ ID NO: 696220 - DNA, 120 bp, Artificial Sequence
  ENSG00000188938_13 (sequence is synthesized)
ccagaagctgttctgtcaataacaaagtctcaaagaaaaccacaaaaccaccaacactaagatcattcttgagtccaatttgaaaaactagggtcaagttctgcagaggcattgaaagga

SEQ ID NO: 696221 - DNA, 120 bp, Artificial Sequence
  ENSG00000188938_14 (sequence is synthesized)
caagaaaccaccctgatacccatcgtgtgagggaaaatgctctattcaccattcctcagcttctgcttctggtttcagagttctctctatattggagggtgttttaaagctagagtggtc

SEQ ID NO: 696222 - DNA, 120 bp, Artificial Sequence
  ENSG00000188938_15 (sequence is synthesized)
tttatccacttttattaacacatctgaatgtgaaggtcaagagaggaaagtgatatgtcctaagtcagagtagagtcaacaagaaaataagacaaacagcgactgagcccctggtgtata

SEQ ID NO: 696223 - DNA, 120 bp, Artificial Sequence
  ENSG00000188938_16 (sequence is synthesized)
ctgggcattggccagctactggggatatggagatgaagaaaacataacccttcttcaaggagcccaacctaccaaggtagacagacatatagacaaatagatacttgcatagaaaaaaag

SEQ ID NO: 696224 - DNA, 120 bp, Artificial Sequence
  ENSG00000188938_17 (sequence is synthesized)
aggaaaaggggatcagtgtgacctgtgtaactaagtaccctataaaccctcctgcaacagatcatattgccctttatagtggggatggtaatcccatctgaattccacaggtactttgca

SEQ ID NO: 696225 - DNA, 120 bp, Artificial Sequence
  ENSG00000188938_18 (sequence is synthesized)
gtcataccacacccatgtgtctgtcggtcctgactgtaccatttataaacagcttcactttcagcagttctcagccctcttaagctagggtcattgtcagtagggatactgcttcataag

SEQ ID NO: 696226 - DNA, 120 bp, Artificial Sequence
  ENSG00000188938_19 (sequence is synthesized)
caccagcagaacaccaaaggagaccatatgggtgaaagcaaccagcactgccctggcgcttcataggttcttagagtttttatcttttactttcagtctaacacagcactgcctgctttt

SEQ ID NO: 696227 - DNA, 120 bp, Artificial Sequence
  ENSG00000188938_20 (sequence is synthesized)
tgtttttgttgcttggtttgtttttttcttaccgtgttcaccaaacttgtgtccaaatagctttgggctgatgcaaaaatatctatgtggaagagaagagttgttctcatggagggcctt

SEQ ID NO: 696228 - DNA, 120 bp, Artificial Sequence
  ENSG00000188938_21 (sequence is synthesized)
cagatgagtgctatagactctctaggcaactccaagaggcttctcaagcagggtgggcagtgagagctgctatggaatcaatggacaaactgacagggactgctttgaaagacagtactc

SEQ ID NO: 696229 - DNA, 120 bp, Artificial Sequence
  ENSG00000188938_22 (sequence is synthesized)
agttgagtatatatattctctcttaagggctaaaagtttataatcatcccttaaacactctgtgatgggatcttcaggatcatcttttgaagtaaactatattttacaatgtgatataaa

SEQ ID NO: 696230 - DNA, 120 bp, Artificial Sequence
  ENSG00000188938_23 (sequence is synthesized)
tcaagtgagttttttttttaattaggaattcccgtaagtataaagccattttaagatgtacattttagagactagctattgttaagtggtctgttacatttgtgtaaaccataaagatct

SEQ ID NO: 696231 - DNA, 120 bp, Artificial Sequence
  ENSG00000188938_24 (sequence is synthesized)
tagccccaggcttgagtaacctagatcacatgaagctgacttcctctgaggagtctaggacctcagatataggtgggagcacacaatcacccttctggaaacagctaagacttgtggctc

SEQ ID NO: 696232 - DNA, 120 bp, Artificial Sequence
  ENSG00000188938_25 (sequence is synthesized)
aggcgtttgaccttgctgacaaaggaagaggtcagggttgacgagagctccaggaagaatgaaagtgcctctggaaggcaggaagaaagttactgtaatactttatccttagggtggaac

SEQ ID NO: 696233 - DNA, 120 bp, Artificial Sequence
  ENSG00000188938_26 (sequence is synthesized)
aagagtctgggaaagctctgccctataaagtccccttccccattcctcccaggtcccaggtgtggtggtataaggagagttggcccaatctgggagctgagggatctgagacatccatct

SEQ ID NO: 696234 - DNA, 120 bp, Artificial Sequence
  ENSG00000188938_27 (sequence is synthesized)
actgcatcagtgcactcagaagtgaggattttggcacagttattcatgagacatcagcccatcatataaaacatgcctccagtttggttaaactaggaagcactatataatattttaaaa

SEQ ID NO: 696235 - DNA, 120 bp, Artificial Sequence
  ENSG00000188938_28 (sequence is synthesized)
tcagttacatgtcactgataaaagacttagtattaccatgatgttatttttcttgaggcaacatgatgaaacccattgtctacaaaaaatccaaaaattagccaggtgaggtgtgcacct

SEQ ID NO: 696236 - DNA, 120 bp, Artificial Sequence
  ENSG00000188938_29 (sequence is synthesized)
gtgcacctgtagtcccatcttctcaggaggctgaggtgggaagactacttgagccaaggtggtggaggttggagtgagcccagattacaccacttgcactccagcctgggcaacagagtg

SEQ ID NO: 696237 - DNA, 120 bp, Artificial Sequence
  ENSG00000188938_30 (sequence is synthesized)
aaaaaaaaaaaaaaaaaaaacaacgatttttatgaaagttggagaaccaggattaagactgggtgggaactaagaatgacaggtacttttaacaatacagctgggatgctgttgatgaca

SEQ ID NO: 696238 - DNA, 120 bp, Artificial Sequence
  ENSG00000188938_31 (sequence is synthesized)
tgatgacatgaatgaaccccactcttactgtagtcatttgctcaagattcaaagtcatgaaaaagagtagaatggaccaaacttaggtactaagagtccccagcctggcagtgaaaacag

SEQ ID NO: 696239 - DNA, 120 bp, Artificial Sequence
  ENSG00000188938_32 (sequence is synthesized)
tatagttcctttgactttaatatggggaaacaggttcctggattgacgatctcaccaaaactatacacaatttttttttattttttctcagacctttcagggatgaatatatacaatttc

SEQ ID NO: 696240 - DNA, 120 bp, Artificial Sequence
  ENSG00000188938_33 (sequence is synthesized)
tgagaaagaaacctgagtacctttaggaagggaaaaggaatgctgaatatccccaaataacatgtcttacatgtttggtaagacttactgtaccctgtcctagaagatagaagatgccct

SEQ ID NO: 696241 - DNA, 120 bp, Artificial Sequence
  ENSG00000188938_34 (sequence is synthesized)
gcccttagaagacaaagagactgtagagctatgccttctaaatcttaagccactcttcagataatggatcccttcatggtcagcccaaacatctcaagaacttttaatttgtaccgtttg

SEQ ID NO: 696242 - DNA, 120 bp, Artificial Sequence
  ENSG00000188938_35 (sequence is synthesized)
tctttttttccatttatttaataccacaaattcactttattattatgaagccaatatctacatcttctcacaaagattctcttaagaaatgcagaactggccgggtgcagtggctcattc

SEQ ID NO: 696243 - DNA, 120 bp, Artificial Sequence
  ENSG00000188938_36 (sequence is synthesized)
caagagcgaaactccgtctcaggaaaaaaaaaaaaaagcagaactccttactggcctcaaaacatactgtgacatttccgtaacctacaggtctagaaatcctgtgccaaatatggttaa

SEQ ID NO: 696244 - DNA, 120 bp, Artificial Sequence
  ENSG00000188938_37 (sequence is synthesized)
cttgtttgctgagaaggatgtggaagaactggaaccctcatacacagctgatgggaaaacagtctggaactttcttaaaacattctggtaaatgggggcccggcaagctagaaagtgtgg

SEQ ID NO: 696245 - DNA, 120 bp, Artificial Sequence
  ENSG00000188938_38 (sequence is synthesized)
aagctagaaagtgtggctataatcccttgcttttttccttttttaaactttttctctctcagtcctgacctaaagatgaccctagtcaggctggacacggtggctcacgcctgtcatccc

SEQ ID NO: 696246 - DNA, 120 bp, Artificial Sequence
  ENSG00000188938_39 (sequence is synthesized)
caaaaacaaaaacaaacaaaaaaattcccctgagagaaaacctgtctttccagccagaggagcaggaaaaaatgaccctatggtctgaagaatgtggaaataatccatctttttttctct

SEQ ID NO: 696247 - DNA, 120 bp, Artificial Sequence
  ENSG00000188938_40 (sequence is synthesized)
ctctgctttctgcctgaggggcgttccttttggcaaaatgagcaggcagtgtaggcaggtaatcatcagagagaaagcccatctttctaagccagaggatgaggaaaaggggccccctgg

SEQ ID NO: 696248 - DNA, 120 bp, Artificial Sequence
  ENSG00000188938_41 (sequence is synthesized)
gtgccagggagtctggggggaaatcctgaagagcaaagacctgaaaagaggattctctaattctgtacatgagctgaattccgtgctcagcccagagctgcacatacaagagacagagcc

SEQ ID NO: 696249 - DNA, 120 bp, Artificial Sequence
  ENSG00000188938_42 (sequence is synthesized)
caggcaacacagccacactctgaactgacactcggaccaccaccaccaaacagaaggcaacgcaggacctgcagactaaggctaacgaggctgattgcctgacaaaacagaaaaaaaaga

SEQ ID NO: 696250 - DNA, 120 bp, Artificial Sequence
  ENSG00000188938_43 (sequence is synthesized)
aacattcttcagggaattttagcagaacacagagtctcccaacataaaacagacagtcctcactgcacagcagttcagaactgtaaaaatgaccttccaacctgaaactgccatgtgctg

SEQ ID NO: 696251 - DNA, 120 bp, Artificial Sequence
  ENSG00000188938_44 (sequence is synthesized)
ttcataatcattaatgggtaaaattgtgatttttttcctgtcttttgaaaattgtcaaaacattgataatcttgtactgttagaaatgtataaggaaacaataaagtaaatatttttgta

SEQ ID NO: 696252 - DNA, 120 bp, Artificial Sequence
  ENSG00000188938_45 (sequence is synthesized)
ggggctcccggaggcggcggcggaggcggaggcccggagttgggccgggacgggatccgggaggcttctgagccggagcaggcagcgcctggaggccagaggccgttcgcccgcctcagg

SEQ ID NO: 696253 - DNA, 120 bp, Artificial Sequence
  ENSG00000188938_46 (sequence is synthesized)
gcctcaggccggtcggccgccgctcccctcccctgcgccctgttcccggcagggccagagaggccgccgcctccgcccggtggttctcgggcgaagggaagccgcgaagcaggtcctggg

SEQ ID NO: 696254 - DNA, 120 bp, Artificial Sequence
  ENSG00000188938_47 (sequence is synthesized)
gaagagctcgcctgctcctgagggaagcagcgataagatggcgctttgaaggggagccgaggccgagtcactctgttcgtcgggacgccgcctttctaacgccgccgtcggctcgcacca

SEQ ID NO: 696255 - DNA, 120 bp, Artificial Sequence
  ENSG00000188938_48 (sequence is synthesized)
ctctgggcctgctgcccacactgactgcggggtccgggagagcgggatgctggccggccgcgcctggcttcttggaaagagcaggaaggagcgcgagaatgcagttccgcggcagaaacc

SEQ ID NO: 696256 - DNA, 120 bp, Artificial Sequence
  ENSG00000188938_49 (sequence is synthesized)
cgcctgctcgtcacggaagagactgtcttgagagcacaggtctgttgcagcgtgggaaagcctgcgttaccactgcgcaatggctagactgaaacgtgcgcctttgcagtggatctccca

SEQ ID NO: 696257 - DNA, 80 bp, Artificial Sequence
  ENSG00000188938_50 (sequence is synthesized)
tctgttgcccaggctggagtacaatgatgtgttctcagctcactgcaacctccctctcccaggttcaagttttccagaag

SEQ ID NO: 696258 - DNA, 120 bp, Artificial Sequence
  ENSG00000188938_51 (sequence is synthesized)
cttgcgcatctagtaatgttggatcatattctggatgttttgaataccaagtcccaagagtctgcaacttgttaaaatccctggagaagactgattgctggaatgcaatggcgcaatctc

SEQ ID NO: 696259 - DNA, 120 bp, Artificial Sequence
  ENSG00000188938_52 (sequence is synthesized)
tacaggggaggccaagcgtgatggctcatgcctgtaatcctaacacttcgggaggccaacacgggtggaccgcttgagctccggagttccagaggagcctgggcaacatggtgaaaccct

SEQ ID NO: 696260 - DNA, 120 bp, Artificial Sequence
  ENSG00000188938_53 (sequence is synthesized)
ggtggcatgcacctgtggtcccagctatttgagaagctaagaaaacctctcagagttgcagtgtatgagtctctggattgaaagggctcaatagatgcccagcataacgatgaagaggac

SEQ ID NO: 696261 - DNA, 120 bp, Artificial Sequence
  ENSG00000188938_54 (sequence is synthesized)
gatgaagaggacccacatctagacatatattggcctgaaattttcatgtatttgggatcaagagaaaatcctgaaagcttgtaaattaatgctgttcaatatggtggtcattagccacgg

SEQ ID NO: 696262 - DNA, 120 bp, Artificial Sequence
  ENSG00000188938_55 (sequence is synthesized)
ctgactgttcagcactggagatgtggccactctgaatggagatgtgctgtggctcctggaaaattttagatgacatagacggtttctgttctgtgtctgttagacggtgctctgcagaga

SEQ ID NO: 696263 - DNA, 120 bp, Artificial Sequence
  ENSG00000188938_56 (sequence is synthesized)
agcagacaggtcatgcataaggacactgaggccagaatgatatctgaccttcagcagcagctctaggaaactgaagaaaaatgatccccctattcagagagaaatagttttcaaccttag

SEQ ID NO: 696264 - DNA, 120 bp, Artificial Sequence
  ENSG00000188938_57 (sequence is synthesized)
tagtctacattctggcaaactttcagtcaactgaaagacagttagagacatgcaagcacacaaaagtttaccttctttgctgtctccttgaacgttcctgaaggaagtaccccaggaaat

SEQ ID NO: 696265 - DNA, 120 bp, Artificial Sequence
  ENSG00000188938_58 (sequence is synthesized)
aaacttgtaaaccaatggcatggaaggcatgggatttaaaagcaggatgtccagtataggactcggagcaagttgtgcagcaggtccaggaagcagacaagcccgtgcagaacaggaagt

SEQ ID NO: 696266 - DNA, 120 bp, Artificial Sequence
  ENSG00000188938_59 (sequence is synthesized)
cagggggctcagtgggaagtcatggcaccagtggatttgctgacatagggagtcttctggctcattggaagacacgtatgtagacaacaaagttattttttgagaggtgataatttaaga

SEQ ID NO: 696267 - DNA, 120 bp, Artificial Sequence
  ENSG00000188938_60 (sequence is synthesized)
aaaaagttgtactcttcctggctcatgtgaacagtatctatatgacacaaataataatgtgaactcaaagactgtgtggtatgcttacaccaggggaatgggggagggagagcaaagtgc

SEQ ID NO: 696268 - DNA, 120 bp, Artificial Sequence
  ENSG00000188938_61 (sequence is synthesized)
acttgagttagataacatctgtcaagacagggagaaaaaagataatgtctaaaataaataacagcacatgcatactccttaggaattggaaggtaaatggcagaagaaatggcttaacaa

SEQ ID NO: 696269 - DNA, 120 bp, Artificial Sequence
  ENSG00000188938_62 (sequence is synthesized)
tttgtacgtggtttcttgtgacttcttatgactgtataagaccagggagcaatagggaggggaggcacaagggatgctattttgtttctattactatttgattttgtaaaactatacaca

SEQ ID NO: 696270 - DNA, 120 bp, Artificial Sequence
  ENSG00000188938_63 (sequence is synthesized)
ggaggactttccattctagaagaaagagtggccattttcaactcttcttccttttgagacctcactaaaattagaggaacagaatttaaaaatacattacatctccatgataaagagaac

SEQ ID NO: 696271 - DNA, 120 bp, Artificial Sequence
  ENSG00000188938_64 (sequence is synthesized)
aggaaaggaaatatcaacagacaaggggatttgacagatatttttggagggaagaaacggtggagcagaggtaattaagccgattggagagaggctgtcctgcagaccgagtgagacaag

SEQ ID NO: 696272 - DNA, 120 bp, Artificial Sequence
  ENSG00000188938_65 (sequence is synthesized)
gtcctggcactggagaggctgctgcctggatccctcccccaacacaagaaatcaggaaatcaccactcctcttgccccaggccagagactaggtttctgtagacatggaaggtagaggct

SEQ ID NO: 696273 - DNA, 120 bp, Artificial Sequence
  ENSG00000188938_66 (sequence is synthesized)
gcggacctggaccccagacacaggtgagaggagaggctttgcgctaaagagagagagagagagaaaaggaggtggggaagaagaaaggaaagaaaggaggaagagagaaggccaggcgcg

SEQ ID NO: 696274 - DNA, 120 bp, Artificial Sequence
  ENSG00000188938_67 (sequence is synthesized)
accctgggtgacagagcgaaacaacgtctcagaaaaaaagaaagaaagaaaggaggaagagagaaaaggagcgtggaaagaaaagaaaatttcaggagcttctacattggttatgccagc

SEQ ID NO: 696275 - DNA, 120 bp, Artificial Sequence
  ENSG00000188938_68 (sequence is synthesized)
agaaacagttaagccatggaaactgagtcacatacacgctgtttttcttctctggtgcatgacctttgcttctgacctttgtgttgagatgttatgaattaaccacccttcctattcttc

SEQ ID NO: 696276 - DNA, 120 bp, Artificial Sequence
  ENSG00000188938_69 (sequence is synthesized)
attcaaacctcaactaaatgacattggagatagagacccttacctctttacgatggatgttaagtaactcccatagagtatagtcaatggtggccagccaacttgtgtgtgtgtgtttta

SEQ ID NO: 696277 - DNA, 120 bp, Artificial Sequence
  ENSG00000188938_70 (sequence is synthesized)
ggtggccagccaacttgtgtgtgtgtgttttatatcttatatttaaaaaatgaaaaaaatgttgtaattctggccagatacgtggctcacaactgcaatcccagcactttgggaggccaa

SEQ ID NO: 696278 - DNA, 86 bp, Artificial Sequence
  ENSG00000188938_71 (sequence is synthesized)
tggcatggtggcgcacgcctgttatcccagctgctcggatgactgaggcttgagaatcccttgaacctgggaggtggagtttgcag

SEQ ID NO: 696279 - DNA, 120 bp, Artificial Sequence
  ENSG00000188938_72 (sequence is synthesized)
ccaagatcatgccactgccctccagcctgagcaacaaagcaagactttgtctccgaaaaaaaaagagcatgttgtaattctgttcagcacccctgttttttgcttatatgaatgatcttc

SEQ ID NO: 696280 - DNA, 120 bp, Artificial Sequence
  ENSG00000188938_73 (sequence is synthesized)
acccctgttttttgcttatatgaatgatcttcacctttccccgcactgaggagtgatgatcaccattctttggtgtctgctaccctaacacttggcgcttgaataaactcttttaagtgg

SEQ ID NO: 696281 - DNA, 120 bp, Artificial Sequence
  ENSG00000188938_74 (sequence is synthesized)
tcctttagcccagcctacaccgctggaaataggccctttatgagattctcttctaaatcctagaagagtgtaccctccatttcctgaagaatcctgacaaccaaaaatcaggagcagact

SEQ ID NO: 696282 - DNA, 120 bp, Artificial Sequence
  ENSG00000188938_75 (sequence is synthesized)
ggtgctcatcccagcagcttcgggctctcggttgtggtttttacacctatgacaaatgacatggccaaacacaccataatgtctgaaggtacaggtagccctaagcgcctgctcgtcacg

SEQ ID NO: 696283 - DNA, 120 bp, Artificial Sequence
  ENSG00000188958_0 (sequence is synthesized)
aactcaaggcataaggcgatccagcacctaagatctcagcaaaaaaaagctaggtcctgaggcagctagtggaaaaacaagagaagggaagtcaaaaggctacttgctgtcagctaaagc

SEQ ID NO: 696284 - DNA, 120 bp, Artificial Sequence
  ENSG00000188958_1 (sequence is synthesized)
gtcagctaaagccagacaacctctcctgtttcatctcctggcaacagaatgcatcctccttttgggaaactgcctctttccccactcctcagagtaaatcttgctgctgctcactctttg

SEQ ID NO: 696285 - DNA, 90 bp, Artificial Sequence
  ENSG00000188958_2 (sequence is synthesized)
aagagctgtagttgaaaccagagagaccacgaacctaccgggagaaatgaacaaattccggacgcaccatctttaagaactgtaacactc

SEQ ID NO: 696286 - DNA, 120 bp, Artificial Sequence
  ENSG00000188958_3 (sequence is synthesized)
actcactgcgaggatctgcggcttcattctttaagtctgtgagaccaagaacccaccaattccggcacactaatatgctgttggaaactggctatatggaaaggctatgtggaagaaaac

SEQ ID NO: 696287 - DNA, 120 bp, Artificial Sequence
  ENSG00000188958_4 (sequence is synthesized)
aaacaccccagccaacataatggagctcccagctgacagctgacatctagctgattgccaaccactttggaaactgatcttcaaaacccacttgagctatgtcaagagaagccacctgtg

SEQ ID NO: 696288 - DNA, 120 bp, Artificial Sequence
  ENSG00000188958_5 (sequence is synthesized)
acacagaagcagaaggatccaagtcaaaggagtttatttgggaggaaatagcacgagagaatgatcattcgtaactgaggcacacttgccttttgcaactaagctctactgaattccaaa

SEQ ID NO: 696289 - DNA, 120 bp, Artificial Sequence
  ENSG00000188958_6 (sequence is synthesized)
gctatagaaatatccatcttgacctggaaagtctgtttctttgctagtccagaaggttttttttaacatgaacaagatcctctcaagcactgtttgctttggactcctaactttgttatc

SEQ ID NO: 696290 - DNA, 120 bp, Artificial Sequence
  ENSG00000188958_7 (sequence is synthesized)
cgtgttgagttttttacaatctgtgcatggacgaccatatcttacccaaggaaatgaaatatttccagataaaaaatatacaaatcgtgaggaactattgctggctctactgaataaaaa

SEQ ID NO: 696291 - DNA, 120 bp, Artificial Sequence
  ENSG00000188958_8 (sequence is synthesized)
ttttgatttccaaagacctttcaacactgacctagccttacctaacaaactggaagaacttaaccagctggaaaagctaaaagaacagctagtggaggagaaggattctgagacgtccta

SEQ ID NO: 696292 - DNA, 86 bp, Artificial Sequence
  ENSG00000188958_9 (sequence is synthesized)
ctctggatgcaaaaaaagataagaatatcaggaaaatatatgtatctactcactctgctgtaggcagaccccctgaaactattgct

SEQ ID NO: 696293 - DNA, 120 bp, Artificial Sequence
  ENSG00000188958_10 (sequence is synthesized)
catagctctgggaatggaatgcgcccctcgtggagagcctataaacggatgcatggaaggcgcctgtccatatggataagatagggttgtaaacgtcctcatcttgccatggctcttcta

SEQ ID NO: 696294 - DNA, 120 bp, Artificial Sequence
  ENSG00000188958_11 (sequence is synthesized)
ggcctctttagggttaaggcatatttccttctgagaatttctggtctaagcggttgtctagcttcatgtcctgtttccatggattgtttgtaaccagcttttgttacaattgttactgct

SEQ ID NO: 696295 - DNA, 62 bp, Artificial Sequence
  ENSG00000188958_12 (sequence is synthesized)
ggcaccattatttctcaacctgctgatccgcctgggaacaaagagccccgttgcattgcggg

SEQ ID NO: 696296 - DNA, 120 bp, Artificial Sequence
  ENSG00000188958_13 (sequence is synthesized)
ctgatccgcctgggaacaaagagccccgttgcattgcgggctactggccagatcccgcaatactctgctatttaaaattgtagctgtttcaatcataaagaaactggcatttattatgca

SEQ ID NO: 696297 - DNA, 120 bp, Artificial Sequence
  ENSG00000188958_14 (sequence is synthesized)
tatgattttttcaccttgttcttgttactaagtcaattatgataagcttaaggtttatgttgtgaataatcactaatcagttgcacttttgaaggtatgtcactatcaaaatggttttgt

SEQ ID NO: 696298 - DNA, 120 bp, Artificial Sequence
  ENSG00000188958_15 (sequence is synthesized)
agagctagagttgaaaatgctgtatctattgtatgctttccataaattcattgcttatgtaaagttttgtcctgttgtgactatgctgttgaactattaattaaaacattttgaaaagca

SEQ ID NO: 696299 - DNA, 120 bp, Artificial Sequence
  ENSG00000188958_16 (sequence is synthesized)
gtcacttctccaagtagtgaatcatgttaactacttgattgcattgcattttatagatttattttctttctttctttttccttcatctagatcattcgtaactgaggcacacttgccttt

SEQ ID NO: 696300 - DNA, 120 bp, Artificial Sequence
  ENSG00000188958_17 (sequence is synthesized)
ctggaagaacttaaccagctggaaaagctaaaagaacagctagtggaggagaaggattctgagacgtcctatgctgtagatggtctattctcttctcatcctagcaaacgagcttgcttt

SEQ ID NO: 696301 - DNA, 120 bp, Artificial Sequence
  ENSG00000188958_18 (sequence is synthesized)
ggggccccgagcgcagcagcagcgccggacgcggcgcaaagtccggccggcagggctcgcaggccggagaacggagcgggtcgggcgggcaggggctggtgaccaaagcagcgggagacg

SEQ ID NO: 696302 - DNA, 120 bp, Artificial Sequence
  ENSG00000188958_19 (sequence is synthesized)
gacggtccccgaggcaccaagctggcggcccagctgccccgccgcggccacctgctccgcgtccccggccccaatcgataccaaatatccggagcccggaaatggaccggggccgtccaa

SEQ ID NO: 696303 - DNA, 120 bp, Artificial Sequence
  ENSG00000188958_20 (sequence is synthesized)
actgagtcattcattcatcaaaatcgcatgaatgtgtctaccaagtgtgatgttagacaacctctcctgtttcatctcctggcaacagaatgcatcctccttttgggaaactgcctcttt

SEQ ID NO: 696304 - DNA, 120 bp, Artificial Sequence
  ENSG00000188958_21 (sequence is synthesized)
ccccactcctcagagatctgcctctaggagatgatgaggccaaactgaagacagaagcaaagagaagagaaagggagatgaagagggcatgttctgatgttaccacagtagcaaagcagg

SEQ ID NO: 696305 - DNA, 120 bp, Artificial Sequence
  ENSG00000188958_22 (sequence is synthesized)
atatccccagagcagctggcatttcagcaactcctggattctgggatctacaacccgcaaactctcaacttatcctcagttttgcttaagctagtaatagttgattttctgtcactcaca

SEQ ID NO: 696306 - DNA, 120 bp, Artificial Sequence
  ENSG00000188958_23 (sequence is synthesized)
gtaaccgcaattgcgagtggctggcgagcgaagatcagcgcccgctgccgcctcgctgttgtctcctttgtgctcagtgacgcgccgcctgaggctggggccccgctgtgctcccgcccc

SEQ ID NO: 696307 - DNA, 120 bp, Artificial Sequence
  ENSG00000188958_24 (sequence is synthesized)
cgggccctgcccccctcctacgggagggtcgcgtctttaggtgggggccttgtatcctaaaggcctcaacaaaaaggccacacgggtcacctaaaacatagtctttcccgtgagcggtgt

SEQ ID NO: 696308 - DNA, 120 bp, Artificial Sequence
  ENSG00000188958_25 (sequence is synthesized)
tttttgcacccggaattagaggagagatggtagatggccataaaaaccccaaatacaacgtacagaatgaagagcagctgataaaattctgggccagtttggagtagagtgtgtacacaa

SEQ ID NO: 696309 - DNA, 120 bp, Artificial Sequence
  ENSG00000188958_26 (sequence is synthesized)
tgccaaaacagaagaggataaaggatacatcccagctttcaattgcctcagttcggaagggacacacatcatttctactgaagtccattggccgggattagtcactgggactaccaccaa

SEQ ID NO: 696310 - DNA, 120 bp, Artificial Sequence
  ENSG00000188958_27 (sequence is synthesized)
ctataaaaggaattgataatataaaagctcctgagaagattggaagaatacatataagagaccctgatccttgataggatggaccttttctagaactaccatcaccctggaagctgaaga

SEQ ID NO: 696311 - DNA, 120 bp, Artificial Sequence
  ENSG00000188959_0 (sequence is synthesized)
cagagcgcgagcttagcactccccagccccagtcccagctctgccaggaaaggggagacttcaccgtggcactgggaattggattctaaactttaggatcaagcaatggaaggacctgga

SEQ ID NO: 696312 - DNA, 120 bp, Artificial Sequence
  ENSG00000188959_1 (sequence is synthesized)
ataagacaccttcttgacccccctgaagggctctgagcagctgggcttgcctttctctttgctcccccagtcctccccttacttctcggtctcccactccccatcactcctttccctgcc

SEQ ID NO: 696313 - DNA, 120 bp, Artificial Sequence
  ENSG00000188959_2 (sequence is synthesized)
tcctcctgcctgtctccatcttcctccctctctttcttctctcgccccattaatccccgcttgtcactatcacctccttcctccagtctttcccccttcgctgccccttctttcctctga

SEQ ID NO: 696314 - DNA, 120 bp, Artificial Sequence
  ENSG00000188959_3 (sequence is synthesized)
catttccttctcctcttactgccactgtctcccacctttctcctcccccacatttctccctatccctacctcctcttccccttcatctttctccttcccccttatttttctatctccttc

SEQ ID NO: 696315 - DNA, 120 bp, Artificial Sequence
  ENSG00000188959_4 (sequence is synthesized)
ctcagtcccactcctctttccaccctccttttgcccgtcacttctccttctccctcactgccccctccctctctctcccctccccaggtcctgccccacccagctgtgtttgcttttctc

SEQ ID NO: 696316 - DNA, 120 bp, Artificial Sequence
  ENSG00000188959_5 (sequence is synthesized)
ccggatccggatggaggggttgccctgcccgtgcccagccctgccccacttctggcagcttaggtctcacttaatggctgagggctccaggactcaggcccctgggaaagggcccccact

SEQ ID NO: 696317 - DNA, 120 bp, Artificial Sequence
  ENSG00000188959_6 (sequence is synthesized)
cagcatccagttcctgcgagcccagtatgaaggcttgaagaggcagcagaggacccaggcccacctcctggtgcttccaaaaggaggaaacacacctgctcctgcagaatcgatggtcaa

SEQ ID NO: 696318 - DNA, 120 bp, Artificial Sequence
  ENSG00000188959_7 (sequence is synthesized)
tgctgtttggattaacaaggagagaagaagctcactgtccctggaagaggcagattctgaggtggaggggaggctggaggaggctgcccagggctgccttcaggcccccaagtctccatg

SEQ ID NO: 696319 - DNA, 120 bp, Artificial Sequence
  ENSG00000188959_8 (sequence is synthesized)
gcacacgcacctggagatgcattgtttggtccaaacctccccccaggacaccagtcatcaagtacatcataggggcaagcttgtgggatctgatcaaaggctccctcctgaaggagacac

SEQ ID NO: 696320 - DNA, 120 bp, Artificial Sequence
  ENSG00000188959_9 (sequence is synthesized)
acacttgtttgaaaccaatcagatgactcagcaaggaaccggaatcccagaggctgcccagcttccatgccaggtgggcaatacccaaacaaaggcagtggaatctggcttaaaattcag

SEQ ID NO: 696321 - DNA, 120 bp, Artificial Sequence
  ENSG00000188959_10 (sequence is synthesized)
cactcaatgtcctctttccataaagaacccacacaggtctggcaaaccagcttactatccatttccccagaggaaaacacccaggatctcccaagctgcccggaacctgggcttatatgg

SEQ ID NO: 696322 - DNA, 120 bp, Artificial Sequence
  ENSG00000188959_11 (sequence is synthesized)
cagagccacaacgaggtctctagctatgagcaagaactggactaacctaattataggaattgtgggagacgaacttcacaatggtaacatggttttacccttccaataagaagagacttc

SEQ ID NO: 696323 - DNA, 120 bp, Artificial Sequence
  ENSG00000188959_12 (sequence is synthesized)
ccaggccaaattgcccacagtttaggatgaagaggactgtctggtcagtgcagccccattctgacattactatgaggtcctggatatccattccttggggaggaccagtaagacatctgc

SEQ ID NO: 696324 - DNA, 120 bp, Artificial Sequence
  ENSG00000188959_13 (sequence is synthesized)
tccatccctggaactggataattttggaacataaaccagggacctagccaacagaatgccttagcaatgcccaggggtcaatgggcgtggcattcttgttttcaatgtcttctgatgatt

SEQ ID NO: 696325 - DNA, 120 bp, Artificial Sequence
  ENSG00000188959_14 (sequence is synthesized)
tctcatatattctggagaagacaagctctgagaattcagatgctttttctggtggctatgtctggggggccatctcacttagaagtcacaacactcattggcagtgatcacatcatttca

SEQ ID NO: 696326 - DNA, 120 bp, Artificial Sequence
  ENSG00000188959_15 (sequence is synthesized)
atttgggcttcccaaagtatggtcacccagggtatgaaggtgagatcaatgctacctaccattttgtgtctttaaggggtctttagaaagggctaatcatctgtcactgctcactgagac

SEQ ID NO: 696327 - DNA, 87 bp, Artificial Sequence
  ENSG00000188959_16 (sequence is synthesized)
tctccctccctccctcccttcctcccttctttccttctttctttcctctcttccttcttgccttctttcctgccttcctgcctatct

SEQ ID NO: 696328 - DNA, 120 bp, Artificial Sequence
  ENSG00000188959_17 (sequence is synthesized)
ctcttccttcttgccttctttcctgccttcctgcctatcttttctctctctctctctctgcaaattaagttcttattaaaaactgccaatcattgacgatatataatgatgagatcctga

SEQ ID NO: 696329 - DNA, 120 bp, Artificial Sequence
  ENSG00000188959_18 (sequence is synthesized)
acaaaagaggcaaagaaatgctcctacttgaaaaatacacattccctatagactgcctcctgtttagtccaacttagatcactcagatccttcctgggatcaaatatatttttaaaccta

SEQ ID NO: 696330 - DNA, 120 bp, Artificial Sequence
  ENSG00000188959_19 (sequence is synthesized)
agacaaagcgaagcaggtgtcacttgggtgatagggaaaaaagcttgtatttcctggttaatgtttagcttttgtaatgctatttaaacacacctaaggtgcctttccctcatctcaggt

SEQ ID NO: 696331 - DNA, 120 bp, Artificial Sequence
  ENSG00000188959_20 (sequence is synthesized)
gctttctctgtaaagtttcactcccacctttcttttctctgcatggccgtccagtcttgcccatctacatccagagctgttaactagtagtgtcattacctgtgaaaaacatgtagaagc

SEQ ID NO: 696332 - DNA, 120 bp, Artificial Sequence
  ENSG00000188959_21 (sequence is synthesized)
ttccttgaaccacccagaaatccactcaaatttggggattgtcattccttttgtgaataattaatacaattcagttgttttttaaatattctaataaaaaaggaaattttctcaaaaaaa

SEQ ID NO: 696333 - DNA, 120 bp, Artificial Sequence
  ENSG00000188959_22 (sequence is synthesized)
gggcccccactcagcatccagttcctgcgagcccagtatgaaggcttgaagaggcagcagaggacccaggcccacctcctggtgcttccaaaaggtaggccctgccgtatccttgagaac

SEQ ID NO: 696334 - DNA, 120 bp, Artificial Sequence
  ENSG00000188959_23 (sequence is synthesized)
gtctgcctttcatcattacatagaaccagaagtgtgctgatgacttcatgtcttggagtttctctaatttcagcattattcttgagatggactggaagtcatatgaagaccagagagaat

SEQ ID NO: 696335 - DNA, 120 bp, Artificial Sequence
  ENSG00000188976_0 (sequence is synthesized)
gcttcgggttggtgtcatggcagctgcggggagccgcaagaggcgcctggcggagctgacggtggacgagttcctagcttcgggctttgactccgagtccgaatccgagtccgaaaattc

SEQ ID NO: 696336 - DNA, 120 bp, Artificial Sequence
  ENSG00000188976_1 (sequence is synthesized)
tccacaagcggagacacgggaagcacgcgaggctgcccggagtccggataagccgggcgggagcccctcggccagccggcgtaaaggccgtgcctctgagcacaaagaccagctctctcg

SEQ ID NO: 696337 - DNA, 120 bp, Artificial Sequence
  ENSG00000188976_2 (sequence is synthesized)
gctgaaggacagagaccccgagttctacaagttcctgcaggagaatgaccagagcctgctaaacttcagcgactcggacagctctgaggaggaagaggggccgttccactccctgccaga

SEQ ID NO: 696338 - DNA, 120 bp, Artificial Sequence
  ENSG00000188976_3 (sequence is synthesized)
tgtgctggaggaagccagtgaggaggaggatggagcggaggaaggagaagatggggacagagtccccagagggctgaaggggaagaagaattctgttcctgtgaccgtcgccatggttga

SEQ ID NO: 696339 - DNA, 120 bp, Artificial Sequence
  ENSG00000188976_4 (sequence is synthesized)
gagatggaagcaggcagcaaagcaacgcctcactccaaagctgttccatgaagtggtacaggcgttccgagcagctgtggccaccacccgaggggaccaggaaagtgctgaggccaacaa

SEQ ID NO: 696340 - DNA, 120 bp, Artificial Sequence
  ENSG00000188976_5 (sequence is synthesized)
attccaggtcacggacagtgctgcattcaatgctctggttaccttctgcatcagagacctcattggctgtctccagaagctgctgtttggaaaggtggcaaaggatagcagcaggatgct

SEQ ID NO: 696341 - DNA, 120 bp, Artificial Sequence
  ENSG00000188976_6 (sequence is synthesized)
gcagccgtccagcagcccgctctgggggaagcttcgtgtggacatcaaggcttacctgggctcggccatacagctggtgtcctgtctgtcggagacgacggtgttggcggccgtgctgcg

SEQ ID NO: 696342 - DNA, 120 bp, Artificial Sequence
  ENSG00000188976_7 (sequence is synthesized)
gcacatcagcgtgctggtgccctgcttcctgaccttccccaagcagtgccgcatgctgctcaagagaatggtgatcgtatggagcactggggaagagtctctgcgggtgctggctttcct

SEQ ID NO: 696343 - DNA, 120 bp, Artificial Sequence
  ENSG00000188976_8 (sequence is synthesized)
ggtcctcagcagagtctgccggcacaagaaggacactttccttggccccgtcctcaagcaaatgtacatcacgtatgtgaggaactgcaagttcacctcgcctggtgccctccccttcat

SEQ ID NO: 696344 - DNA, 120 bp, Artificial Sequence
  ENSG00000188976_9 (sequence is synthesized)
cagtttcatgcagtggaccttgacggagctgctggccctggagccgggtgtggcctaccagcacgccttcctctacatccgccagctcgccatacacctgcgcaacgccatgaccactcg

SEQ ID NO: 696345 - DNA, 120 bp, Artificial Sequence
  ENSG00000188976_10 (sequence is synthesized)
caagaaggaaacataccagtctgtgtacaactggcagtatgtgcactgcctcttcctgtggtgccgggtcctgagcactgcgggccccagcgaagccctccagcccttggtctaccccct

SEQ ID NO: 696346 - DNA, 120 bp, Artificial Sequence
  ENSG00000188976_11 (sequence is synthesized)
ggtgctgcctttcatcctggagatgttccagcaggtcgacttcaacaggaagccagggcgcatgagctccaagcccatcaacttctccgtgatcctgaagctgtccaatgtcaacctgca

SEQ ID NO: 696347 - DNA, 120 bp, Artificial Sequence
  ENSG00000188976_12 (sequence is synthesized)
ggagaaggcgtaccgggacggcctggtggagcagctgtacgacctcaccctggagtacctgcacagccaggcacactgcatcggcttcccggagctggtgctgcctgtggtcctgcagct

SEQ ID NO: 696348 - DNA, 120 bp, Artificial Sequence
  ENSG00000188976_13 (sequence is synthesized)
gaagtcgttcctccgggagtgcaaggtggccaactactgccggcaggtgcagcagctgcttgggaaggttcaggagaactcggcatacatctgcagccgccgccagagggtttccttcgg

SEQ ID NO: 696349 - DNA, 120 bp, Artificial Sequence
  ENSG00000188976_14 (sequence is synthesized)
cgtctctgagcagcaggcagtggaagcctgggagaagctgacccgggaagaggggacacccctgaccttgtactacagccactggcgcaagctgcgtgaccgggagatccagctggagat

SEQ ID NO: 696350 - DNA, 120 bp, Artificial Sequence
  ENSG00000188976_15 (sequence is synthesized)
cagtggcaaagagcggctggaagacctgaacttccctgagatcaaacgaaggaagatggctgacaggaaggatgaggacaggaagcaatttaaagacctctttgacctgaacagctctga

SEQ ID NO: 696351 - DNA, 120 bp, Artificial Sequence
  ENSG00000188976_16 (sequence is synthesized)
agaggacgacaccgagggattctcggagagagggatactgaggcccctgagcactcggcatggggtggaagacgatgaagaggacgaggaggagggcgaggaggacagcagcaactcgga

SEQ ID NO: 696352 - DNA, 120 bp, Artificial Sequence
  ENSG00000188976_17 (sequence is synthesized)
ggatggagacccagacgcagaggcggggctggcccctggggagctgcagcagctggcccaggggccggaggacgagctggaggatctgcagctctcagaggacgactgaggcagcccatc

SEQ ID NO: 696353 - DNA, 120 bp, Artificial Sequence
  ENSG00000188976_18 (sequence is synthesized)
tggggggcctgtaggggctgccgggctggtggccagtgtttccacctccctggcagtcaggcctagaggctggcgtctgtgcagttgggggaggcagtagacacgggacaggctttatta

SEQ ID NO: 696354 - DNA, 120 bp, Artificial Sequence
  ENSG00000188976_19 (sequence is synthesized)
tttatttttcagcatgaaagaccaaacgtatcgagagctgggctgggctgggctggtgtggctgctgaagccccacagctgtgggctgctgaagtcagctccgcgggggagctgaccctg

SEQ ID NO: 696355 - DNA, 120 bp, Artificial Sequence
  ENSG00000188976_20 (sequence is synthesized)
acgtcagcagaccgagaccagtcccagttccagggggaggcctgcaggcccctggccccttccaccacctctgccctccgtctgcagacctcgtccatctgcaccaggctctgccttcac

SEQ ID NO: 696356 - DNA, 120 bp, Artificial Sequence
  ENSG00000188976_21 (sequence is synthesized)
tcccccaagtctttgaaaatttgttcctttcctttgaagtcacattttcttttaaaattttttgttttgcatccgaaaccgaaagaaataaagcggtgggaggcagggccattgtgttga

SEQ ID NO: 696357 - DNA, 120 bp, Artificial Sequence
  ENSG00000188976_22 (sequence is synthesized)
caccccggttgggttgctgacctcgcctggggtctcagggccaaggcctaaggatcgccgacctctgccccccagtcctttcagcttaacttactctttcatccgatgtttactgagctc

SEQ ID NO: 696358 - DNA, 120 bp, Artificial Sequence
  ENSG00000188976_23 (sequence is synthesized)
tgttggtgagttgtgcaaaaatctcttcccgatctaggagaactctcacgttcttgggtgaaatcaccgcctgcagttcggtagaagagagataagtgctggggagggaaaggaaggaca

SEQ ID NO: 696359 - DNA, 120 bp, Artificial Sequence
  ENSG00000188976_24 (sequence is synthesized)
taagtgctggggagggaaaggaaggacagaggggctgaagagagagttgcaggggagccgagttgctctgttagaaggagcggaggctgtgctcggtggctcacgcctgtaatgccagca

SEQ ID NO: 696360 - DNA, 120 bp, Artificial Sequence
  ENSG00000188976_25 (sequence is synthesized)
tgggattacaggcgagagccaccacgcctggcataaaactttatttccagaggtgagtagtgggcagggttggcccagagggtgggctgattctgcctctgccatcccagctgcaacagc

SEQ ID NO: 696361 - DNA, 120 bp, Artificial Sequence
  ENSG00000188976_26 (sequence is synthesized)
agctgcaacagctatgcacttgagccctgagatgggatccatgtcccctcctggggtatccccgtggccaccacgcgtggttttgcacaggacctgggccagctgtgcacatggagcggt

SEQ ID NO: 696362 - DNA, 82 bp, Artificial Sequence
  ENSG00000188976_27 (sequence is synthesized)
catgaaaaagaaagaaatcaaaagatacaaaaattagcctggcgtggtgacacacacctgtcgtcccagctactcgggaggc

SEQ ID NO: 696363 - DNA, 120 bp, Artificial Sequence
  ENSG00000188976_28 (sequence is synthesized)
agattccgcctcaggagaaaaaaaaaaaaaaaaaaaagcggaggtggttgtttgagaagatgacgtctgaataaagacctcgaacaaggaggccacacagacagtaggggaaacgtgtct

SEQ ID NO: 696364 - DNA, 120 bp, Artificial Sequence
  ENSG00000188976_29 (sequence is synthesized)
taggatttcaggcagcagaaaacagcaaaagccttgcagtgggagcatttggggagagtacagaggtaaacgtggctacggcaggagtgagggggtgaataggggtagatgagcccagaa

SEQ ID NO: 696365 - DNA, 120 bp, Artificial Sequence
  ENSG00000188976_30 (sequence is synthesized)
gggtgatgaagagccaggtgccgtagaccgtcataagattgcctcgtaaaacagggagttacttctgggtttgagcggtggagtgccttgtaggtgacaagggtggaaacagagagacct

SEQ ID NO: 696366 - DNA, 120 bp, Artificial Sequence
  ENSG00000188976_31 (sequence is synthesized)
ttaggttaactgagaattgaactatgtggtggtttgagaggaggcacgaacggttttgaaggtgttgctgatgagatctgatgacaagttgcgtgctgggtattagagacagagatttgc

SEQ ID NO: 696367 - DNA, 120 bp, Artificial Sequence
  ENSG00000188976_32 (sequence is synthesized)
ctttagtctgagcctctggaagggtgaagccaccatcaggcaaaagtagcgcagggcacaggcacagcaagtccagggaagaccgcggctgggggcctgtgtagcgcagggcgcaggcac

SEQ ID NO: 696368 - DNA, 120 bp, Artificial Sequence
  ENSG00000188976_33 (sequence is synthesized)
agcaagtccagggaagaccgcggctggggggcctgtgtagtgtgtttgagggtatgttgtagaggttgttgggtaggagacgtgagtctgccaaaaacgtacctcctggcaatcctgtct

SEQ ID NO: 696369 - DNA, 120 bp, Artificial Sequence
  ENSG00000188976_34 (sequence is synthesized)
tgctagttggtaacccttgtgaagggagtagactgaccctgtaggccactccccgccccctctacttccacttcccactggggtcgctgacttctgcctcctcagccggcgtaaaggccg

SEQ ID NO: 696370 - DNA, 120 bp, Artificial Sequence
  ENSG00000188976_35 (sequence is synthesized)
gtggtctcacggtggggatgtgatcaaggggacctagaaaaggtttatgtctgagagggagttggaggctgggacttccggggactcttagggcggtggccaaccctgggcagggcagac

SEQ ID NO: 696371 - DNA, 120 bp, Artificial Sequence
  ENSG00000188976_36 (sequence is synthesized)
aggagttcaaggccactgaaggaggagctaatgcacttgagagggtcctcctaagcccctgtgtctgtccagctgtaaggggccctgagcttttttgagtggagagacggggggtctctg

SEQ ID NO: 696372 - DNA, 120 bp, Artificial Sequence
  ENSG00000188976_37 (sequence is synthesized)
ggattctcggagagagggggctcaccagtctctggcccagctggggccaacctcagtgttgccaggcttctggtgccagcgccttccctccttgaagtgaaggcctactgggattggtaa

SEQ ID NO: 696373 - DNA, 120 bp, Artificial Sequence
  ENSG00000188981_0 (sequence is synthesized)
cagagactagagctgtgttctcacagggcccaccacccttccacctccttggccattgacacctgcgtccctggcccagctgctcccaggtaacccccaaagcagctggcacatcccacc

SEQ ID NO: 696374 - DNA, 120 bp, Artificial Sequence
  ENSG00000188981_1 (sequence is synthesized)
tctggtgtggccggggctgctgtgtgtccgcagggcctgccccgtctattctagcttgtttgtcctgtctgaaccagcgcctactccaagaagcctctgctcagcccagcggggatgctt

SEQ ID NO: 696375 - DNA, 120 bp, Artificial Sequence
  ENSG00000188981_2 (sequence is synthesized)
ctaagctccggacgagcctctcggaagccttggtgattggtggtgtagtcatcttgggatgcagatgtcttaccaacctgcaagaacaaaaaccctgtggcttcctctggtgcagggtga

SEQ ID NO: 696376 - DNA, 120 bp, Artificial Sequence
  ENSG00000188981_3 (sequence is synthesized)
caccgctccagggccccccagtggcctctcctttcagagctacctaaattctggtcacttcagagaaatggagcacccccttctccctggtccaggtgtggacagcctggcacactgagc

SEQ ID NO: 696377 - DNA, 120 bp, Artificial Sequence
  ENSG00000188981_4 (sequence is synthesized)
acacctggcatggctggtaatttcagaaagaagaggggccggggtccagtgggaagcagcggtgaacccctcgtgagtgggctttgcagtccctccccatgccacggcagagctgccctc

SEQ ID NO: 696378 - DNA, 120 bp, Artificial Sequence
  ENSG00000188981_5 (sequence is synthesized)
aacacagccttcctcttcctcatcggagagcacaccctgtccccttgccgagctgtgccctgtgccttcggtggtatttgattttggctgctactggctttgttgggatctggaagtcgc

SEQ ID NO: 696379 - DNA, 120 bp, Artificial Sequence
  ENSG00000188981_6 (sequence is synthesized)
ttcccctgcgtggtgcgtggagcactgtaagtcagatgagggaagtagccagggtgaggtgctgctggttgaccagcctctggccctaggagaccccgtagcgactgagggtcccagcag

SEQ ID NO: 696380 - DNA, 120 bp, Artificial Sequence
  ENSG00000188981_7 (sequence is synthesized)
gccatgcagctttgccaaggcgcctccggcatggcggcggccgaggggcccggctacctcgtgtctccccaggcggagaagcaccggcgggcccgcaactggacggacgccgagatgcgc

SEQ ID NO: 696381 - DNA, 120 bp, Artificial Sequence
  ENSG00000188981_8 (sequence is synthesized)
ggcctcatgctggtctgggaggagttcttcgacgagctcaagcagaccaagcgcaacgccaaggtgtacgagaagatggccagcaagctcttcgagatgaccggcgagcgcaggctgggc

SEQ ID NO: 696382 - DNA, 120 bp, Artificial Sequence
  ENSG00000188981_9 (sequence is synthesized)
aagatcaagatcaccaacatgaccttccagtacaggaaattaaaatgcatgacagatagcgagtccgccccgcccgactggccctattacctagccattgatgggattctggccaaggtc

SEQ ID NO: 696383 - DNA, 120 bp, Artificial Sequence
  ENSG00000188981_10 (sequence is synthesized)
cccgagtcctgtgatggcaaactgccggacagccagccgccggggccctccacgtcccagaccgaggcgtccctgtcgccgcccgctaagtccacccctctgtacttcccgtataaccag

SEQ ID NO: 696384 - DNA, 120 bp, Artificial Sequence
  ENSG00000188981_11 (sequence is synthesized)
tgctcctacgaaggccgcttcgaggatgatcgctccgacagctcctccagcttactgtcccttaagttcaggtcggaggagcggccggtgaagaagcgcaaggtgcagagctgccacctg

SEQ ID NO: 696385 - DNA, 120 bp, Artificial Sequence
  ENSG00000188981_12 (sequence is synthesized)
cagaagaagcagctgcggctgctggaggccatggtggaggagcagcgccggctgagccgcgccgtggaggagacctgccgcgaggtgcgccgcgtgctggaccagcagcacatcctgcag

SEQ ID NO: 696386 - DNA, 120 bp, Artificial Sequence
  ENSG00000188981_13 (sequence is synthesized)
gtgcagagcctgcagctgcaggagcgcatgatgagtctgctggagaggatcatcaccaagtccagcgtctaggccagcaggcggcggcggcggcggggccgggcggctggtggtactgct

SEQ ID NO: 696387 - DNA, 120 bp, Artificial Sequence
  ENSG00000188981_14 (sequence is synthesized)
caggccacccagggcaggccactcaggccaggcgggcaagggggccgccccgcgagcggagaccgccttccacctggcctctggcaggatgtcccttctgaggggtattttgaggaaccc

SEQ ID NO: 696388 - DNA, 120 bp, Artificial Sequence
  ENSG00000188981_15 (sequence is synthesized)
ccaggccctggggaccgtgaggctccagtctccagcatgaatgcccttcctcggacacaggccagggcctctggggttcactccgagtaagaacgtcctagagccactctccagtgtcgt

SEQ ID NO: 696389 - DNA, 120 bp, Artificial Sequence
  ENSG00000188981_16 (sequence is synthesized)
tactatcaatgatacttgacgtggctttgatattaaacgtatactttttcattcttgcctggaacgcacagtttgctgttgctggcttggtgaggatgccctgattgatggatcccgaaa

SEQ ID NO: 696390 - DNA, 120 bp, Artificial Sequence
  ENSG00000188981_17 (sequence is synthesized)
atgaaagcagatggaaacgggttggggcaggctggagctgggggagctctctcctgaagggaaccctgtgtcctccctcaccaggacctctgcgtctctccttaaatggcctctgacgcc

SEQ ID NO: 696391 - DNA, 120 bp, Artificial Sequence
  ENSG00000188981_18 (sequence is synthesized)
tgatgaaaaccccagcgaccttccaggaggcttttattcagctctgtttggagcatcaggtgtttccactgcctccttagcaatgacactaataaaagtcgtaacacctgttcacatgca

SEQ ID NO: 696392 - DNA, 120 bp, Artificial Sequence
  ENSG00000188981_19 (sequence is synthesized)
agatgtaggccccattttgagcgtggagctgccttcgagcgagcgtgagcggcgcctcccgcccatggtgcgtggggccgggccggggccctcgctgagcgcgctctctcaccccacagg

SEQ ID NO: 696393 - DNA, 120 bp, Artificial Sequence
  ENSG00000188981_20 (sequence is synthesized)
agctcagcccattgcacacctgcatttcctcagcgtggacgtggggcaggcgcgccttccagttgctcgggcaggacgttgaaaagatgtggacccaggggtcaagacctcacacactcg

SEQ ID NO: 696394 - DNA, 120 bp, Artificial Sequence
  ENSG00000188981_21 (sequence is synthesized)
gtcttgccacatcagtgcgcatgtcagctccgtgaagaccccgtgaagaccccgtgatcatcagactatgatgaaagcagctgcaacctcagggacccttggtgacccacaggccgagac

SEQ ID NO: 696395 - DNA, 120 bp, Artificial Sequence
  ENSG00000188981_22 (sequence is synthesized)
ctgagaaccactgcctgaatgctggagcgggcacacaggtgacctgagcgagcctcgtctgtccttgcccggtacccagagctggctcactggcgattggtggacgcacgggcgctgtca

SEQ ID NO: 696396 - DNA, 120 bp, Artificial Sequence
  ENSG00000188981_23 (sequence is synthesized)
cacaaaggggccctccgtgtgactgggtggcgtcatcacagacagcgtgtgggaaccgtgcccccaagcgggcccagagggactccctgctgtcttgtaggcactggggatagggtcagg

SEQ ID NO: 696397 - DNA, 120 bp, Artificial Sequence
  ENSG00000188981_24 (sequence is synthesized)
tggaaagcagatacaaatctttgtctttacagggtttcgagttgagggtggggctagaccaacaataaacacgtaagtgtctagtatgttagaagagaggtgctttccagggaaataagg

SEQ ID NO: 696398 - DNA, 120 bp, Artificial Sequence
  ENSG00000188981_25 (sequence is synthesized)
ctgtagggggattggagccgtggggtgagagaaaaggccttcaaaaaatgtcatgtgagcggatggagtgggaggggcgccctcacctgagcactgggagctgcactgtctaggtgggag

SEQ ID NO: 696399 - DNA, 120 bp, Artificial Sequence
  ENSG00000188981_26 (sequence is synthesized)
ctggctctgagggcgaggtgggcctggacagggacaccctgctttctgctgggacaagagagtcccggagcagggagggtcaggtgtggcgtggagcctgggaggtgggtgaggggtgct

SEQ ID NO: 696400 - DNA, 120 bp, Artificial Sequence
  ENSG00000188981_27 (sequence is synthesized)
caggaggcatcctggcctaggggaggatagaatggttggactggcacaggccttggctgttgcccgggcatggggaaaaaccagaacctctgtgtgctggctttgcgctcgtggccatct

SEQ ID NO: 696401 - DNA, 120 bp, Artificial Sequence
  ENSG00000188981_28 (sequence is synthesized)
ccaggactcagaacatgcgagaggcacgcaaggtggagcgtgtgggagaaggtgctgcctgtggtttcagcccaagttcatctcagctgggtccggagggagagggcaccctacccctag

SEQ ID NO: 696402 - DNA, 120 bp, Artificial Sequence
  ENSG00000188981_29 (sequence is synthesized)
atggagtggctttggactctttcttgaagatggatggcctgtggatgtgtcgggcccgctctggagtctgcatcctgtccattgataatgatgtcagtcctcacgtcagtacacactttc

SEQ ID NO: 696403 - DNA, 120 bp, Artificial Sequence
  ENSG00000188981_30 (sequence is synthesized)
ctgattactcaggtgctgtgcctgagtgtccaaggccaatttctgacgctacattctggagtgttctactgacaccatctgccaggacccacacttccaagaatccccacctgtgtgctt

SEQ ID NO: 696404 - DNA, 120 bp, Artificial Sequence
  ENSG00000188981_31 (sequence is synthesized)
ctagagcagacagatggggtcagagctcagggcgggtggggtctggagtccggcctcccccaacagcccacctgctccccgcccggccgcctggcgcagaggccctagtttggagagccc

SEQ ID NO: 696405 - DNA, 120 bp, Artificial Sequence
  ENSG00000188981_32 (sequence is synthesized)
attcacgctcggaatttggattcaaccacggggctgaccccccacctccctcattttccaaaacgcctttgtcttttcctgttcaaagaactttcaagagactttccaagttttgttcgg

SEQ ID NO: 696406 - DNA, 120 bp, Artificial Sequence
  ENSG00000188981_33 (sequence is synthesized)
gaacagtgtggctccccagggtgccagctggcatcttgtgcaattatcattaaattacagggacaattttaatttcatgataattagaaatatcaactgccgctcagccttcgaaactaa

SEQ ID NO: 696407 - DNA, 120 bp, Artificial Sequence
  ENSG00000188981_34 (sequence is synthesized)
agcgctccaccgagcggctgcagcagggccctgagtgggcgccagcctccatgtgggagccgtgcccagggagccggggcacctggtgtgggctgcgggaggcaggccctgggtgaacct

SEQ ID NO: 696408 - DNA, 120 bp, Artificial Sequence
  ENSG00000188981_35 (sequence is synthesized)
tcagcagctgcctgtaagggagaaaatgggaccgtcctggtcaggtggaggagacctgtgtcctggactttggaccccgaggccagcccattacccctgcaatgcagccccaggtccacc

SEQ ID NO: 696409 - DNA, 120 bp, Artificial Sequence
  ENSG00000188981_36 (sequence is synthesized)
tgccccacagccacagcctcagggcttggagctgagcctgcgacctcagactgtgccctctggggagcccacccactctgggcctcggcagcctgggctgaccaagaccttccactctga

SEQ ID NO: 696410 - DNA, 120 bp, Artificial Sequence
  ENSG00000188981_37 (sequence is synthesized)
gcaaatctgcaagccgggggagccccaggccctcagacggaaggcgccctcactccttcctcttgtccttagaattacagtccaaggcccggaaacagtcattccccatgttctgtccag

SEQ ID NO: 696411 - DNA, 120 bp, Artificial Sequence
  ENSG00000188981_38 (sequence is synthesized)
ttttccagtcatttgaagcagggatggaggagaggtgaatccagagcttgtcactccatcctggtggaaagtggaattaatggtgtctttcaattgggcagattttgcttttgataatat

SEQ ID NO: 696412 - DNA, 120 bp, Artificial Sequence
  ENSG00000188981_39 (sequence is synthesized)
caaattttagctaattttttttatggctaaaacattttgtgtcctaagaaatcttcaccaaggccagggagatattttcccatattgtattctagaagctgtggttacatctgggtctct

SEQ ID NO: 696413 - DNA, 120 bp, Artificial Sequence
  ENSG00000188981_40 (sequence is synthesized)
gtccatctcaattgctttgtaggaaatgaaatggatatcagagccattttttccacgtgattcccctgttattccagaactgtttgttagaaagcctgccctttccctatcgcgagtgtc

SEQ ID NO: 696414 - DNA, 120 bp, Artificial Sequence
  ENSG00000188981_41 (sequence is synthesized)
tgttagaaagcctgccctttccctatcgcgagtgtctggtgcctttgtcaaaaagcaattcacagaacaggagggggtctattattattattattttttttttttttgagatggagtttc

SEQ ID NO: 696415 - DNA, 120 bp, Artificial Sequence
  ENSG00000188981_42 (sequence is synthesized)
tctcctgcctcagcctcccaagtacctgtgattacaggcatccaccatcatgcctggctaatttttttttttttgcatttttagtagaggcggggtttggctgcgttggccaggctggtc

SEQ ID NO: 696416 - DNA, 78 bp, Artificial Sequence
  ENSG00000188981_43 (sequence is synthesized)
tccaccatcatgcctggctaatttttttttttttgcatttttagtagaggcggggtttggctgtcccgcctcgcctcc

SEQ ID NO: 696417 - DNA, 120 bp, Artificial Sequence
  ENSG00000188981_44 (sequence is synthesized)
cgagcgggtctattttgagacaccattcggtcctgttggtctgtgcgtctgcattatcttggttactgtgcctttatagaaaatcttcaggtcacctagtgtaagtcttccaaacttctt

SEQ ID NO: 696418 - DNA, 120 bp, Artificial Sequence
  ENSG00000188981_45 (sequence is synthesized)
cttttccaaaactgtttttgctaatccatatattttgccattctgtataaattttaaatcaccttattgatttctatccccaaaaaagcctgctgaaatttgtattgagatggaattgaa

SEQ ID NO: 696419 - DNA, 120 bp, Artificial Sequence
  ENSG00000188981_46 (sequence is synthesized)
ttcatagtcccacttgataagaactgacatgttgaaaatattgtcttacaatttatgaacatggtgtatctcaccatttggagctgtctaatacatcctttattaaatttatttatcagt

SEQ ID NO: 696420 - DNA, 120 bp, Artificial Sequence
  ENSG00000188984_0 (sequence is synthesized)
gaaccatgtcctaaatggtttacactgcgcacagcttcctctcagcccgctctgagctggaagcagcatgtgggacctggccctgatcttcctcgcagcagcctgcgtgttctcactagg

SEQ ID NO: 696421 - DNA, 120 bp, Artificial Sequence
  ENSG00000188984_1 (sequence is synthesized)
ggtcactctgtgggtcatttgcagccattttttcactgtgcacatccctgcagcggttggccaccctgtgaaactgagagtcctccattgcatcttccagctgctgttgacttgggggat

SEQ ID NO: 696422 - DNA, 120 bp, Artificial Sequence
  ENSG00000188984_2 (sequence is synthesized)
gatatttgagaagctcagaatctgttctatgccccaatttttctgtttcatgcaagatctgcctccgctaaagtatgaccccgatgttgtggtcacggatttccgctttgggacaatccc

SEQ ID NO: 696423 - DNA, 120 bp, Artificial Sequence
  ENSG00000188984_3 (sequence is synthesized)
tgtgaagctgtaccaacccaaggcatccacctgcaccctgaagcctggcatcgtgtactaccacggtggcgggggcgtcatggggagtttgaaaacccaccatggcatatgctctcgttt

SEQ ID NO: 696424 - DNA, 120 bp, Artificial Sequence
  ENSG00000188984_4 (sequence is synthesized)
gtgcaaggagagtgactccgtggttctggcagttggttaccgcaagttacctaagcataagtttccagtgccagtaagagactgcttggtggccaccatccacttcctgaagtccctgga

SEQ ID NO: 696425 - DNA, 120 bp, Artificial Sequence
  ENSG00000188984_5 (sequence is synthesized)
tgcatatggagtggatccagcccgggttgtggtctgcggtgacagtttcggaggggcaatagccgcagtggtttgtcaacaacttgtggacaggccagatctgccccggatccgggctca

SEQ ID NO: 696426 - DNA, 120 bp, Artificial Sequence
  ENSG00000188984_6 (sequence is synthesized)
gatcctgatctatgccattctccaagccctggatttacaaaccccttcgtttcaacagaggaaaaacatcccactgctcacctggagtttcatctgctactttttttttcaaaacctgga

SEQ ID NO: 696427 - DNA, 120 bp, Artificial Sequence
  ENSG00000188984_7 (sequence is synthesized)
tttcagctcctcctggcaagaggtcatcatgaaaggtgcccatttgcctgctgaagtctgggaaaagtacagaaagtggttgggcccagaaaacatccctgagaggtttaaggagagggg

SEQ ID NO: 696428 - DNA, 120 bp, Artificial Sequence
  ENSG00000188984_8 (sequence is synthesized)
ttaccaactgaagccccatgagcccatgaatgaagctgcttacttggaagtaagtgttgtcctggatgtgatgtgctcgcccctgattgcagaagatgacatagtgtctcagctcccgga

SEQ ID NO: 696429 - DNA, 120 bp, Artificial Sequence
  ENSG00000188984_9 (sequence is synthesized)
aacctgcatcgtgagctgtgagtatgatgctctccgggacaattcactgttgtacaagaaaaggctggaagacctgggagtgcccgtgacctggcaccatatggaggatggtttccatgg

SEQ ID NO: 696430 - DNA, 120 bp, Artificial Sequence
  ENSG00000188984_10 (sequence is synthesized)
agtgctcaggaccattgacatgagcttcttgcactttccctgctccatgagaattctgagtgcattagttcaatttgtaaagggactgtgaccatctttcttctctgctggtactgcggt

SEQ ID NO: 696431 - DNA, 120 bp, Artificial Sequence
  ENSG00000188984_11 (sequence is synthesized)
gtggattccactggcatccagcctcccacagggctctctgttgctgatttaggtggtgcatagtggggctagggagggggtagaggttgctgtcacctttctggtccaggttctagaacc

SEQ ID NO: 696432 - DNA, 120 bp, Artificial Sequence
  ENSG00000188984_12 (sequence is synthesized)
acacaatgcatgctcctgatgtccagaggacgtggtagaaaagacaggtttggaggtgggagtgtggctgtctctattctctgttgggaaaacctgggctgacaatattcagtggccatt

SEQ ID NO: 696433 - DNA, 120 bp, Artificial Sequence
  ENSG00000188984_13 (sequence is synthesized)
tgtgggagtgaatcagccggtaagagctgttctcagcctccctaaggggcagttcaggctcccagattgatccagactgtgtgtgactttcgtccatttgacttgactttggaatagcac

SEQ ID NO: 696434 - DNA, 120 bp, Artificial Sequence
  ENSG00000188984_14 (sequence is synthesized)
aagggcatcatgtacttcacgaggctttcccaatgtggctcagaggcaggagctctgatgctctgggctgctgtgaggtggtggtggtggtagagaaactggcttcacccacctactctt

SEQ ID NO: 696435 - DNA, 120 bp, Artificial Sequence
  ENSG00000188984_15 (sequence is synthesized)
ctgtgaacagtagtgacttttcccgctgtttctcagcctctgggatcagagtcttcactgtctgggctggaaactttaagatagaatggatagagcttccacagtggttggcatctagtg

SEQ ID NO: 696436 - DNA, 120 bp, Artificial Sequence
  ENSG00000188984_16 (sequence is synthesized)
ctaagaatttgagaagagaagttgggagggaagtggggtcctgagttagagacccatgaaggctgagtctaaccagataaccctgtccacagtgcaaagtcaagacagccaaaggaacag

SEQ ID NO: 696437 - DNA, 120 bp, Artificial Sequence
  ENSG00000188984_17 (sequence is synthesized)
aagatgtatttgtgaaaactatttcttttttaagacatggaaccaactcaaattggcctctattagaaagacaatagattggcttaggtagggatgcatgctaggcatacatcaggcaag

SEQ ID NO: 696438 - DNA, 120 bp, Artificial Sequence
  ENSG00000188984_18 (sequence is synthesized)
gtttgatccaggaactcacacagtgccatcagctgtcctgtcttctctgctctgctcttctctcctctgtgttaatgccaccttctcctcttcatacggtggcactgagcagcttcatgc

SEQ ID NO: 696439 - DNA, 120 bp, Artificial Sequence
  ENSG00000188984_19 (sequence is synthesized)
ctaccttcctccagggtcaagttcattatcatggacttgcctcatgctcagcagtcccagaaaaaagcctaattgcaacttgatggctttgttggctttctgagcaatgtgtccagttgc

SEQ ID NO: 696440 - DNA, 120 bp, Artificial Sequence
  ENSG00000188984_20 (sequence is synthesized)
cacagtgaagggaatggaataatctaactcaccattcccaagtcctatgccatcctgagagtggggggtggagtcaattcaccttggtgcttggactaagcatgaggtggtgagtgacaa

SEQ ID NO: 696441 - DNA, 120 bp, Artificial Sequence
  ENSG00000188984_21 (sequence is synthesized)
cgttcctaattgaagggtagggtaaatggttgttgggtggacaccaacacttattctactacagaagctaaattgaaccctcaggcagggtacgtgaaagtggcaagagatgtcaagacc

SEQ ID NO: 696442 - DNA, 120 bp, Artificial Sequence
  ENSG00000188984_22 (sequence is synthesized)
actgggcaagttggccagttgttccttaggaatgaaaattcttttgaaaggaatggccagggtcctctgctggccccacttggtcttctggaggctctgatcttggttggttagtggtct

SEQ ID NO: 696443 - DNA, 120 bp, Artificial Sequence
  ENSG00000188984_23 (sequence is synthesized)
ttacaggccaaggtcaaggccattgcacaaaaaaccctgtgcatgcccttaacttgctttcagttgaatatttgggctgaactatgaggcagagaggaatcccattgggtggctccttgc

SEQ ID NO: 696444 - DNA, 120 bp, Artificial Sequence
  ENSG00000188984_24 (sequence is synthesized)
tgcattcgcagttgaccagcatggggtttgttggagaaataggaaccatcccctgaaaacacacactatggtagccactcaactgttgaaaggcactggagtccaatgggtgaggccgcc

SEQ ID NO: 696445 - DNA, 120 bp, Artificial Sequence
  ENSG00000188984_25 (sequence is synthesized)
tctgagacaagcctctgagttgaggctgggagaggctccctccttggagtgttgctttttttgtttcacccctgcctctggagatgggtagaggaacatgagctgaccttctgggaagtg

SEQ ID NO: 696446 - DNA, 120 bp, Artificial Sequence
  ENSG00000188984_26 (sequence is synthesized)
aggttggtgaggagttgctgaggcactgcagggccatgcccagtagagaggaatgtataacattttaagaggctgagagcaccccttgttgggcgcatgcccatggcagcttccttctgc

SEQ ID NO: 696447 - DNA, 120 bp, Artificial Sequence
  ENSG00000188984_27 (sequence is synthesized)
cgatcatgggagaaatcaagcactttcacctaatggctagatgattgattttgggatgaaattctccactcctctcctttaccacatcaccactatccttcctgcaatacatccacgaga

SEQ ID NO: 696448 - DNA, 120 bp, Artificial Sequence
  ENSG00000188984_28 (sequence is synthesized)
ctcactgagtggaaaagggataggaatgaatgttcacccagggccagctacatgctaggcactgtactggaccatttaaatttgccacctcttatgttcctcacattaatcttacagagt

SEQ ID NO: 696449 - DNA, 120 bp, Artificial Sequence
  ENSG00000188984_29 (sequence is synthesized)
aggtacagacatacctatggatattgcagattcagttccagaccacagcaataaagcaagtcacatgaattttttgctttccttagtgcatgtaaaagttacatttccactatattatag

SEQ ID NO: 696450 - DNA, 120 bp, Artificial Sequence
  ENSG00000188984_30 (sequence is synthesized)
acatttccactatattatagtttattaagtgtgcaatagcattatgtctttaaaaagcatgtacataccttaatttaaaaataccttgttgctgaaaaatgctaacaatcatctgagcct

SEQ ID NO: 696451 - DNA, 120 bp, Artificial Sequence
  ENSG00000188984_31 (sequence is synthesized)
ggctactattttctatgtggggtttgcacattctgcccatgtctgcgtgggttttctctgagttctccagcttcctcccacattccaaagatgtgtatgttacattcatgggaatgtcta

SEQ ID NO: 696452 - DNA, 120 bp, Artificial Sequence
  ENSG00000188984_32 (sequence is synthesized)
aattgtcgtaatctttttgctggttgatggtcttgccttgatgttgatgctgcaggtggtggttgctgaaggtgggggaggctgtggcaatttcttaaaataaaataagacaacagtgga

SEQ ID NO: 696453 - DNA, 80 bp, Artificial Sequence
  ENSG00000188986_0 (sequence is synthesized)
gggctcgggcggtccccgaggcccggcggagcgggcttctggggtgtctgcggcggcgccgggggaacgggctggggatg

SEQ ID NO: 696454 - DNA, 120 bp, Artificial Sequence
  ENSG00000188986_1 (sequence is synthesized)
cgccgggggaacgggctggggatggggcgcctagccgggcggtggccggggcctcggccatgttcgcggggctgcaggacctgggcgtggccaacggcgaggacctgaaggagaccctga

SEQ ID NO: 696455 - DNA, 120 bp, Artificial Sequence
  ENSG00000188986_2 (sequence is synthesized)
ctgaccaactgcacggagccgctcaaggccatcgagcagttccagacagagaatggtgtgctgctgccatctcttcagtcagccctccccttcttggacctgcacgggacgccgcggctg

SEQ ID NO: 696456 - DNA, 120 bp, Artificial Sequence
  ENSG00000188986_3 (sequence is synthesized)
gagttccaccagtcggtattcgatgagctgcgggacaagctgctggagcgagtgtcagccatcgcttcggaggggaaggctgaggaaaggtacaagaagctggaagaccttctggagaag

SEQ ID NO: 696457 - DNA, 120 bp, Artificial Sequence
  ENSG00000188986_4 (sequence is synthesized)
agcttttctctggtgaagatgccgtccctgcagcccgtggtgatgtgcgtcatgaagcacctgcccaaggttccggagaaaaaactgaagctggttatggctgacaaggagctgtatcga

SEQ ID NO: 696458 - DNA, 120 bp, Artificial Sequence
  ENSG00000188986_5 (sequence is synthesized)
gcctgcgccgtggaggtgaagcggcagatctggcaagacaaccaggccctcttcggggacgaggtttccccactcctgaagcagtacatcctggagaaggagagcgctctcttcagtaca

SEQ ID NO: 696459 - DNA, 120 bp, Artificial Sequence
  ENSG00000188986_6 (sequence is synthesized)
gagctctctgtcctgcacaactttttcagtccttcccccaagaccaggcgccagggcgaggtggtgcagcggctgacgcggatggtggggaagaacgtgaagctgtacgacatggtgctg

SEQ ID NO: 696460 - DNA, 120 bp, Artificial Sequence
  ENSG00000188986_7 (sequence is synthesized)
cagtttctgcgcacgctcttcctgcgcacgcggaatgtgcactactgcacgctgcgggctgagctgctcatgtccctgcacgacctggacgtgggtgaaatctgcaccgtggacccgtgc

SEQ ID NO: 696461 - DNA, 120 bp, Artificial Sequence
  ENSG00000188986_8 (sequence is synthesized)
cacaagttcacctggtgcctggacgcctgcatccgagagcggttcgtggacagcaagagggcgcgggagctgcaggggtttctcgatggcgtcaagaagggccaggagcaggtgctgggg

SEQ ID NO: 696462 - DNA, 120 bp, Artificial Sequence
  ENSG00000188986_9 (sequence is synthesized)
gacctgtccatgatcctgtgtgaccccttcgccatcaacacgctggcactgagcacagtcaggcacctgcaggagctggtcggccaggagacactgcccagggacagccccgacctcctg

SEQ ID NO: 696463 - DNA, 120 bp, Artificial Sequence
  ENSG00000188986_10 (sequence is synthesized)
gctgggccagggagcctgggacatgatcgacagccaggtcttcaaggagcccaagatggaggtagagctcatcaccaggttcctcccgatgctcatgtccttcctggtggatgactacac

SEQ ID NO: 696464 - DNA, 120 bp, Artificial Sequence
  ENSG00000188986_11 (sequence is synthesized)
tttcaatgtggatcagaaacttccggctgaggagaaagccccagtctcatatccaaacacacttcccgaaagcttcactaagtttctgcaggagcagcgcatggcctgcgaggtggggct

SEQ ID NO: 696465 - DNA, 120 bp, Artificial Sequence
  ENSG00000188986_12 (sequence is synthesized)
gtactacgtcctgcacatcaccaagcagaggaacaagaacgcgctcctccgcctgctgcccgggctggtggagacctttggcgacttggcctttggcgacatcttcctccacctgctcac

SEQ ID NO: 696466 - DNA, 120 bp, Artificial Sequence
  ENSG00000188986_13 (sequence is synthesized)
gggcaaccttgcgctgctggccgacgaatttgcccttgaggacttctgcagcagcctcttcgatggcttcttcctcaccgcctctccaaggaaggagaacgtgcaccggcacgcgctgcg

SEQ ID NO: 696467 - DNA, 120 bp, Artificial Sequence
  ENSG00000188986_14 (sequence is synthesized)
gctcctcattcacctgcaccccagggtggccccgtctaagctggaggcgttgcagaaggccctggagcctacaggccagagcggagaggcagtgaaggagctttactcccagctcggcga

SEQ ID NO: 696468 - DNA, 120 bp, Artificial Sequence
  ENSG00000188986_15 (sequence is synthesized)
gaagctggaacagctggatcaccggaagcccagcccggcacaggctgcggagacgccggccctggagctgcccctccccagcgtgcccgcccctgccccgctctgagggccctccagacc

SEQ ID NO: 696469 - DNA, 120 bp, Artificial Sequence
  ENSG00000188986_16 (sequence is synthesized)
tgctcgggtgctggggccatgccgagtcgcggccctgctcagccggaagaggctcccggacctggatgtacagggcagtctctcttcccggggctatggctgggcctgtcctgccgtcat

SEQ ID NO: 696470 - DNA, 120 bp, Artificial Sequence
  ENSG00000188986_17 (sequence is synthesized)
ggccccctgcttcctgctccttggagctggctcccggaccttgcccaccatccatgcagtggctcccagggcagagcctctccttgtactttggcagccatagaaagcgtgctcattttc

SEQ ID NO: 696471 - DNA, 120 bp, Artificial Sequence
  ENSG00000188986_18 (sequence is synthesized)
tgttttcctgtgttaggaaaaaaccacctgttttccaaggggagagggcggggcctgagggtgggggcggggcctcttcattggcccagcttggcgaaagcgaggcacactgcttactgc

SEQ ID NO: 696472 - DNA, 120 bp, Artificial Sequence
  ENSG00000188986_19 (sequence is synthesized)
cttggggttgtggagatggacccgtgacctcgtggaggccgtgtgggggcagcagcctggcctgtgccatggtgggtgtcctggggcctgtgcggagggagccacctcaccctgcagccc

SEQ ID NO: 696473 - DNA, 120 bp, Artificial Sequence
  ENSG00000188986_20 (sequence is synthesized)
agtttgcaggtgtggccttgtttctccttgcccagcagtgctgccttcagcggccgtgacggggccagctggacacacggtgagattttctcgtatgtaaataaaaggcattttggtaaa

SEQ ID NO: 696474 - DNA, 120 bp, Artificial Sequence
  ENSG00000188991_0 (sequence is synthesized)
atgtctgttacaggctttaccataactgatgagaaagtacacttatatcacagcattgagaaggagaaaactgtaagacatattggcgatttgtgttcctcacactctgtgaaaaaaatt

SEQ ID NO: 696475 - DNA, 120 bp, Artificial Sequence
  ENSG00000188991_1 (sequence is synthesized)
caggttggaatctgcttgcttctggtggagctgtgtgagaggttcacgttctttgaagtcgtctgcaacatgatccccttttgcactatcaagcttggctatcacaattgccaagcagcc

SEQ ID NO: 696476 - DNA, 120 bp, Artificial Sequence
  ENSG00000188991_2 (sequence is synthesized)
atcttaaacttgtgttttattggaacttcaatacttacccctgtgtttgtcagatggctcactgatgtctatttaggaagaaacaaactggtgtacatttgcttgtttctacattttcta

SEQ ID NO: 696477 - DNA, 120 bp, Artificial Sequence
  ENSG00000188991_3 (sequence is synthesized)
ggcactgctttgttatctgtggtggcttttcccttggaagatttctatctgggcacttaccatgcagttaacaacataccaaaaacagagcagcacaggctgttttatgtagcactgctg

SEQ ID NO: 696478 - DNA, 120 bp, Artificial Sequence
  ENSG00000188991_4 (sequence is synthesized)
accatttgccttggcattggaggcgtaagagccatcgtctgtccactgggtgcttttggccttcaggagtatggatcacaaaaaacgatgtctttttttaactggttttattggctcatg

SEQ ID NO: 696479 - DNA, 120 bp, Artificial Sequence
  ENSG00000188991_5 (sequence is synthesized)
aacctaaatgcaactattgtgtttctgggaatatcttacatccagcactcacaggcctgggcccttgttttacttattccttttatgtctatgcttatggctgtgataactcttcatatg

SEQ ID NO: 696480 - DNA, 120 bp, Artificial Sequence
  ENSG00000188991_6 (sequence is synthesized)
atatactacaacctaatttatcagtcagaaaaacgttgttctctcctgacaggcgttggggtgttggttagtgcactgaaaacatgccacccgcaatactgccatcttggcagagacgtg

SEQ ID NO: 696481 - DNA, 120 bp, Artificial Sequence
  ENSG00000188991_7 (sequence is synthesized)
acaagccagttagaccatgccaaagaaaaaaatggtggctgctacagtgagctccatgtagaagacacaacatttttcctcacccttctccctctcttcatttttcagctcctatacaga

SEQ ID NO: 696482 - DNA, 120 bp, Artificial Sequence
  ENSG00000188991_8 (sequence is synthesized)
atgtgcattatgcagattccttcaggatattatctgcaaactatgaattccaacctgaatttggatggatttcttctgccgattgcagtaatgaatgccatcagcagcctaccattacta

SEQ ID NO: 696483 - DNA, 120 bp, Artificial Sequence
  ENSG00000188991_9 (sequence is synthesized)
attctggctccttttctggagtatttcagcacctgcctgtttccctctaagagagttggatcatttctgtcaacatgcatcattgctggaaatctttttgctgcattgtctgtgatgata

SEQ ID NO: 696484 - DNA, 120 bp, Artificial Sequence
  ENSG00000188991_10 (sequence is synthesized)
gctggcttctttgaaatacaccgaaaacatttccctgcagtggagcagcccctttcaggaaaagttctcactgtttcctccatgccctgtttctacctgattcttcagtatgttttactt

SEQ ID NO: 696485 - DNA, 120 bp, Artificial Sequence
  ENSG00000188991_11 (sequence is synthesized)
ggagtggcggaaacactggtaaacccagccctctctgtaatatcatacagatttgttccaagcaatgtcagaggaacctccatgaattttctgacactgttcaatggatttggctgtttc

SEQ ID NO: 696486 - DNA, 120 bp, Artificial Sequence
  ENSG00000188991_12 (sequence is synthesized)
gcaattggtttccaaacacattaaacaaaggcaatttagaaagcttcttcttcttcctggcatcattaacattgttgaacgtcctgggattctgcagtgtttcacaaagatattgtaatc

SEQ ID NO: 696487 - DNA, 120 bp, Artificial Sequence
  ENSG00000188991_13 (sequence is synthesized)
taaatcattttaatgcccagaacatccgtggaagtaatcttgaagaaacacttctcctccacgaaaaatctctgaaattttatggcagtatacaggaattttcttcaagtattgatcttt

SEQ ID NO: 696488 - DNA, 120 bp, Artificial Sequence
  ENSG00000188991_14 (sequence is synthesized)
gggagacagccctatgaaactgtgtttgagtctacctgtcttatgagaacagtattcattgttttcttcttcagttgagcattttatgtgttttagtgtaaaagccaatatatacagagg

SEQ ID NO: 696489 - DNA, 120 bp, Artificial Sequence
  ENSG00000188991_15 (sequence is synthesized)
gaggtgattttacaaatatcatctgtatactttatttacaaagactaattatgaattttctagtaaactgtcatgcttttgcattaacatgttatagcattagaattaataaaataattt

SEQ ID NO: 696490 - DNA, 120 bp, Artificial Sequence
  ENSG00000188991_16 (sequence is synthesized)
gtctcagtgattactctatgacaaaaaaaatgacagttttctatacaccaataataccttacagctttctacaatggttcagccattgaaagcgtatgaccttttttttggagttttaat

SEQ ID NO: 696491 - DNA, 120 bp, Artificial Sequence
  ENSG00000188991_17 (sequence is synthesized)
gagtcattagaagcaaaatgacagtattttaatatactctctttcaatacacttagtgatcccttattacacgtgaccttattacattgtgaccatatactgtatataactgagtaaata

SEQ ID NO: 696492 - DNA, 120 bp, Artificial Sequence
  ENSG00000188991_18 (sequence is synthesized)
ataaacatatacatgattttctatatttgctgttaatattatgctatcaaaatatgacttcattaaggacattttctctgaatttaaaagcagtattactaaaatagatgtccttaacaa

SEQ ID NO: 696493 - DNA, 120 bp, Artificial Sequence
  ENSG00000188991_19 (sequence is synthesized)
agagaatgtccgcatactaaaaaagttgaaaaataaatgtaagttatggaattattggaattaaaagaaagaaggaaattagggaagataaaatgagggggctgagaggagggtaagtga

SEQ ID NO: 696494 - DNA, 120 bp, Artificial Sequence
  ENSG00000188991_20 (sequence is synthesized)
ccaaaccaaatagagatgcttaaaggaattatatgaataacatctttcggtctccactgccaattcagatgcattcagaaaattatcttctaagagtttcttctttcataagcaaaaata

SEQ ID NO: 696495 - DNA, 120 bp, Artificial Sequence
  ENSG00000188991_21 (sequence is synthesized)
tgtggaaactcattttttaaaaaatcaaataaaattaaagtctgtttctcagtagcagtatttgtcaacatttggttgaggacaacttgctacaggtgaatctttctggcccctatacag

SEQ ID NO: 696496 - DNA, 120 bp, Artificial Sequence
  ENSG00000188991_22 (sequence is synthesized)
actgccttaactcaaatctttttttgagattggggtccagcaattggtggttttaataagcacacccaaatcattctcatgttccctaaggtttaaaagccattgctttccaggacaatt

SEQ ID NO: 696497 - DNA, 120 bp, Artificial Sequence
  ENSG00000188991_23 (sequence is synthesized)
catgttggataggacaggtgagtttatcagctgactgcaaattattctgcaattatgcacctcccttgtgtatacataaaatattttaggtctgtagaataaaagatttactcaacttga

SEQ ID NO: 696498 - DNA, 120 bp, Artificial Sequence
  ENSG00000188992_0 (sequence is synthesized)
agtgaacttctgatagggtcttatttatgttgctcaaatgtttacataataacttgtgccaaaaatatagtgctcatgcttttcagttctcacccagaaatgtcctgtggcttctagttg

SEQ ID NO: 696499 - DNA, 120 bp, Artificial Sequence
  ENSG00000188992_1 (sequence is synthesized)
tgtgcctgagatcagataataaaagaccatgccttgaattctctcagctaagtgtaaaggattccttcagagatttatttattccgagaatagagaccattctgatgatgtatacaagga

SEQ ID NO: 696500 - DNA, 120 bp, Artificial Sequence
  ENSG00000188992_2 (sequence is synthesized)
acaacctaaactgtgctgagccactgtttgaacaaaataactcacttaatgttaatttcaacacacaaaagaaaacagtctggcttattcacggatacagaccagtaggctccatcccat

SEQ ID NO: 696501 - DNA, 120 bp, Artificial Sequence
  ENSG00000188992_3 (sequence is synthesized)
tatggcttcagaacttcgtaaggattttgctgaatgaagaagatatgaatgtaattgtagtagactggagccggggtgctacaacttttatttataatagagcagttaaaaacaccagaa

SEQ ID NO: 696502 - DNA, 120 bp, Artificial Sequence
  ENSG00000188992_4 (sequence is synthesized)
aagttgctgtgagtttgagtgtgcacattaaaaatcttttgaagcatggtgcatctcttgacaattttcatttcataggtgtgagcttaggggctcatatcagtggatttgttggaaaga

SEQ ID NO: 696503 - DNA, 120 bp, Artificial Sequence
  ENSG00000188992_5 (sequence is synthesized)
tatttcatggtcaacttggaagaataacaggtcttgaccctgctgggccaaggttctccagaaaaccaccatatagcagattagattacacggatgcaaagtttgtggatgtcatccatt

SEQ ID NO: 696504 - DNA, 120 bp, Artificial Sequence
  ENSG00000188992_6 (sequence is synthesized)
attttctcaggaattcaattcattaaatgcaaccaccagagagcagttcacttgttcatggcatctttagaaacaaactgcaattttatttcatttccttgtcgttcatacaaagattac

SEQ ID NO: 696505 - DNA, 120 bp, Artificial Sequence
  ENSG00000188992_7 (sequence is synthesized)
aagactagcttatgtgtggactgtgactgttttaaggaaaaatcatgtcctcggctgggttatcaagccaagctatttaaaggtgttttaaaagaaaggatggaaggaagacctcttagg

SEQ ID NO: 696506 - DNA, 120 bp, Artificial Sequence
  ENSG00000188992_8 (sequence is synthesized)
accactgtgtttttggatacaagtggtacatatccattctgtacctattattttgttctcagtataattgttccagataaaactatgatggatggctcgttttcatttaaattattaaat

SEQ ID NO: 696507 - DNA, 120 bp, Artificial Sequence
  ENSG00000188992_9 (sequence is synthesized)
cagcttggaatgattgaagagccaaggctttatgaaaagaacaaaccattttataaacttcaagaagtcaagattcttgctcaattttataatgactttgtaaatatttcaagcattggt

SEQ ID NO: 696508 - DNA, 120 bp, Artificial Sequence
  ENSG00000188992_10 (sequence is synthesized)
ttgacatatttccagagctcaaatctgcagtgttccacatgcacatacaagatccagagtctcatgttaaaatcacttacatacccagaaagaccaccactttgcaggtataatattgta

SEQ ID NO: 696509 - DNA, 120 bp, Artificial Sequence
  ENSG00000188992_11 (sequence is synthesized)
cttaaagacagagaggaagtgtttcttaatccaaacacatgtacaccaaagaacacataagatgccttcttccatcaaatgcacttgcttgtgaattaatggacttgtaaatgaaacaat

SEQ ID NO: 696510 - DNA, 120 bp, Artificial Sequence
  ENSG00000188992_12 (sequence is synthesized)
gcaatcagtcttttataatgcactgttcaatttgagattcaagtatttctatttcttggaaaaaattttaagaatcaaaaataaagaaaataaaaaatgcatacagttaaacattccaaa

SEQ ID NO: 696511 - DNA, 120 bp, Artificial Sequence
  ENSG00000188993_0 (sequence is synthesized)
aggcattatgaaaaacctctatttcagagtcattaccatagttataggtctttattttactggaataatgacaaatgcatcaagaaaaagcaatattttattcaattctgaatgccaatg

SEQ ID NO: 696512 - DNA, 120 bp, Artificial Sequence
  ENSG00000188993_1 (sequence is synthesized)
gaatgaatatattctgacaaattgttcttttaccggaaagtgtgatatacctgtggacatatcacagacagcagccactgtggatgtaagtttcaatttctttagagttctcttacagtc

SEQ ID NO: 696513 - DNA, 120 bp, Artificial Sequence
  ENSG00000188993_2 (sequence is synthesized)
tcacacgaaaaaagaagagtggaaaataaaacatctggacctcagtaacaatctcatatcaaaaataaccttaagcccttttgcatatttacatgctttggaagtgttaaacctcagcaa

SEQ ID NO: 696514 - DNA, 120 bp, Artificial Sequence
  ENSG00000188993_3 (sequence is synthesized)
caatgccatccactccctctcattggatctactcagtcctaagtcctcatgggtgaaacgccacagaagcagcttcagaaacaggtttccattgctgaaggtgctcattcttcaaagaaa

SEQ ID NO: 696515 - DNA, 120 bp, Artificial Sequence
  ENSG00000188993_4 (sequence is synthesized)
taaactcagtgacactcccaagggactgtggaaactgaagtcattgcagagtttggatctgtcattcaatgggatattgcaaatagggtggtctgattttcacaactgcctgcaactgga

SEQ ID NO: 696516 - DNA, 120 bp, Artificial Sequence
  ENSG00000188993_5 (sequence is synthesized)
gaatctctgtttaaagagcaacaagatattcaaaattcccccacaagccttcaaggacctcaaaaaattacaggtcatagaccttagcaacaatgctctgattaccatcctaccaatgat

SEQ ID NO: 696517 - DNA, 120 bp, Artificial Sequence
  ENSG00000188993_6 (sequence is synthesized)
gatcatagctctagaatttccccatctagtggttgacttggctgataataactggcagtgtgatgatagtgtggcagtctttcaaaattttatttctgaatcctggaggaaaaagtggaa

SEQ ID NO: 696518 - DNA, 120 bp, Artificial Sequence
  ENSG00000188993_7 (sequence is synthesized)
tgtcatttgcaacaggtctatagggagtgaggaggccaacgggggcactccccagagcaggatttccagggaaacccgccttcctcccattcatctgcatcgcatgaaaagcctcataag

SEQ ID NO: 696519 - DNA, 120 bp, Artificial Sequence
  ENSG00000188993_8 (sequence is synthesized)
gagcaaagcagagaggccccagggaggaaggcacacgggcatttctactctggggaagaaggcaaaggccggctctggtctcaggaagaagcagagacggctgccaaggagtgttagaag

SEQ ID NO: 696520 - DNA, 120 bp, Artificial Sequence
  ENSG00000188993_9 (sequence is synthesized)
cacccgcgatgtgcaggctgccggcaaaaaagaggacgctccccaggacctggctctggcggtgtgcctgtcagtgttcatcacattccttgtcgccttcagcctgggggctttcacaag

SEQ ID NO: 696521 - DNA, 120 bp, Artificial Sequence
  ENSG00000188993_10 (sequence is synthesized)
gccttatgttgacagactgtggcaaaaaaagtgccagagcaaaagccctggcctggacaacgcgtattcaaacgagggcttctacgatgacatggaagctgcggggcacacaccacaccc

SEQ ID NO: 696522 - DNA, 120 bp, Artificial Sequence
  ENSG00000188993_11 (sequence is synthesized)
agagacccatctgcgccaagtatttcctcatctaagcctctacgagaaccagacccctttctgggtgacacagccacacccacacgccaccgtaattcctgatagaactctgggaaggag

SEQ ID NO: 696523 - DNA, 120 bp, Artificial Sequence
  ENSG00000188993_12 (sequence is synthesized)
cagaaaggatcctggcagttcgcagagcccaggacagtgcggggacaacaccggggcaggaagtggaaatgatggtgcagtctattccattctccagagacatccacatgccggtaaccg

SEQ ID NO: 696524 - DNA, 120 bp, Artificial Sequence
  ENSG00000188993_13 (sequence is synthesized)
tctcagtgcacattcagtgggcgtctcttctgtagctggcacgtctcacgctgtctctggctcaagccgttatgattccaatgaattagacccttccctctccggagaaataacagcttc

SEQ ID NO: 696525 - DNA, 120 bp, Artificial Sequence
  ENSG00000188993_14 (sequence is synthesized)
cctctgtaaaatgctaacacatgcagaagcacagaggactggagatagtaaggaaagagggggcactgaacagtcactttgggactcgcagatggaattttctaaggaaaggcaagtgag

SEQ ID NO: 696526 - DNA, 120 bp, Artificial Sequence
  ENSG00000188993_15 (sequence is synthesized)
ttcatccattgatttgctgagcatacagcagccaaggctgtccggggcaagggctgaggaagcgctttcagcccactacagcgaggttccatacggtgacccaagagacacaggcccatc

SEQ ID NO: 696527 - DNA, 120 bp, Artificial Sequence
  ENSG00000188993_16 (sequence is synthesized)
agtctttcctccaagatgggacagtggcctggatgtcactcctgctaacaaggaaccagtgcagaaatccactccttctgacacttgctgtgagttggagagtgactgtgactctgatga

SEQ ID NO: 696528 - DNA, 120 bp, Artificial Sequence
  ENSG00000188993_17 (sequence is synthesized)
ggggtctctgttcactctgagctccataagttcagagagtgcaaggagcaagactgaagaggcagtgcctgatgaggagtccctgcaggacgagagctcaggggcaagcaaggacaatgt

SEQ ID NO: 696529 - DNA, 120 bp, Artificial Sequence
  ENSG00000188993_18 (sequence is synthesized)
gacggctgtagacagtcttgaggaaaatgttaccttccaaacaattccagggaaatgcaagaatcaagaagatccctttgaaaaacctctcatttctgctccagactctggcatgtacaa

SEQ ID NO: 696530 - DNA, 120 bp, Artificial Sequence
  ENSG00000188993_19 (sequence is synthesized)
gactcatctggaaaatgcctctgacactgatagatctgagggcctgtcaccctggcccaggtcaccagggaatagtcccttaggggatgagtttccgggcatgttcacttatgattatga

SEQ ID NO: 696531 - DNA, 120 bp, Artificial Sequence
  ENSG00000188993_20 (sequence is synthesized)
cacagctcttcaatccaaggcagcagaatggcattgctcacttagagacttagaattttcaaatgtggacgttttacagcaaacaccaccatgttctgctgaagttccctcagatcctga

SEQ ID NO: 696532 - DNA, 120 bp, Artificial Sequence
  ENSG00000188993_21 (sequence is synthesized)
taaggctgccttccatgaaagagactcagacattttaaaataagaatctttcattaaggaaatattcacagctctaaacaatattcttttaaagatcatggcaggggaaaactaaagcct

SEQ ID NO: 696533 - DNA, 120 bp, Artificial Sequence
  ENSG00000188993_22 (sequence is synthesized)
tcacaacaagatcctgaaggagacaacatgaattccaaccaagtggacactgatgcaaatgagggttttgtgggcccacttgagggcgatgattctagaagggttataagctaaacacac

SEQ ID NO: 696534 - DNA, 120 bp, Artificial Sequence
  ENSG00000188993_23 (sequence is synthesized)
ttgttaacatcctatggggatgaacctgctcttcagtgtgaaagagaaagaggggaatattttgagatcattccaagaaccatgcaccattattacaagagctccaaacaaaaccagttc

SEQ ID NO: 696535 - DNA, 120 bp, Artificial Sequence
  ENSG00000188993_24 (sequence is synthesized)
actgagaacacaggagcacttcatcaataggttggggtaaatattcagaagagaatctgttgcagttagacgaagtggttctaactttccttctcaaatacagacctggagcaatctgat

SEQ ID NO: 696536 - DNA, 120 bp, Artificial Sequence
  ENSG00000188993_25 (sequence is synthesized)
gggatttggctctctgaaaagaacagctttaggatgacaaagacaaggatgttcaacttgatcatcaaagagaattcaaatgacattttttcatacatattgaagcacttaagtggaaat

SEQ ID NO: 696537 - DNA, 120 bp, Artificial Sequence
  ENSG00000188993_26 (sequence is synthesized)
gctggatagattttaatgaattctgaacacacactagcacaactttttggaggctgatcgtgaaactgcaaaattggaaaagttctgagtaaatataaatgtttttaaataagttatgtt

SEQ ID NO: 696538 - DNA, 120 bp, Artificial Sequence
  ENSG00000188994_0 (sequence is synthesized)
gcgtacgcgacggagcggggtgtgaagatggcggacgaagaggccgagcaggagaggttgagttgcggcgaaggcggctgcgtcgcggagctgcagcgcctgggcgagcggctccaggag

SEQ ID NO: 696539 - DNA, 120 bp, Artificial Sequence
  ENSG00000188994_1 (sequence is synthesized)
ctggagctacagctgcgggagagccgggtaccggccgtggaagcggccaccgactactgtcagcagctgtgccagacactcctagaatatgcagagaaatggaaaacttcagaagatcct

SEQ ID NO: 696540 - DNA, 120 bp, Artificial Sequence
  ENSG00000188994_2 (sequence is synthesized)
ttacctttattggaggtatacacagtggctatccaaagttatgttaaagcccgaccttatcttacctctgaatgtgaaaatgtagccttggttctggaacgcttggcattaagctgtgtt

SEQ ID NO: 696541 - DNA, 120 bp, Artificial Sequence
  ENSG00000188994_3 (sequence is synthesized)
gaacttttactgtgtctgcctgttgagttatcagataaacagtgggaacaatttcagacactggtgcaggtagctcatgaaaagctgatggagaatggcagctgtgaattgcatttttta

SEQ ID NO: 696542 - DNA, 120 bp, Artificial Sequence
  ENSG00000188994_4 (sequence is synthesized)
gctactctagctcaagagactggggtgtggaaaaacccggtactgtgcactattctttcccaggaaccattggataaggataaagtgaatgaatttttagcttttgagggtcccatcttg

SEQ ID NO: 696543 - DNA, 120 bp, Artificial Sequence
  ENSG00000188994_5 (sequence is synthesized)
ttggatatgagaattaaacatctaatcaaaacaaatcagttaagtcaagcaactgctctagcaaagctgtgttctgaccatccagagattggcataaaaggtagttttaagcaaacttac

SEQ ID NO: 696544 - DNA, 120 bp, Artificial Sequence
  ENSG00000188994_6 (sequence is synthesized)
cttgtctgtctttgtacatcatcaccaaatggaaagttaatcgaagagatttcagaagttgattgcaaagatgcactggaaatgatctgtaacttagaatctgagggtgatgaaaaaagc

SEQ ID NO: 696545 - DNA, 120 bp, Artificial Sequence
  ENSG00000188994_7 (sequence is synthesized)
gctcttgttttatgtactgcgtttttgtcacgtcagctccaacaaggagatatgtactgcgcttgggaacttactctcttttggagtaaattacaacaaagagtagaaccatctatacaa

SEQ ID NO: 696546 - DNA, 120 bp, Artificial Sequence
  ENSG00000188994_8 (sequence is synthesized)
gtgtaccttgagaggtgtcgtcaactttctttgttaacgaaaacagtatatcacattttcttcctgattaaagttattaattcagagactgaaggggctggacttgctacctgtatagaa

SEQ ID NO: 696547 - DNA, 120 bp, Artificial Sequence
  ENSG00000188994_9 (sequence is synthesized)
ctgtgtgtaaaggctcttcgcttggagtctacagaaaatactgaagtgaaaatatctatttgcaagaccatttcatgtttgttgcctgatgatctggaagttaaacgtgcttgtcaactg

SEQ ID NO: 696548 - DNA, 120 bp, Artificial Sequence
  ENSG00000188994_10 (sequence is synthesized)
agtgaatttcttattgagcctacagtagatgcgtattatgctgtggaaatgttgtataatcagccagaccagaaatatgatgaagagaatcttccaataccaaattctttacgctgtgag

SEQ ID NO: 696549 - DNA, 120 bp, Artificial Sequence
  ENSG00000188994_11 (sequence is synthesized)
ctgttacttgtattgaaaactcaatggccctttgatccagaattctgggattggaaaaccttgaaacgacaatgtcttgcattaatgggagaagaagcatccattgtgtcttcaatagat

SEQ ID NO: 696550 - DNA, 120 bp, Artificial Sequence
  ENSG00000188994_12 (sequence is synthesized)
gaactaaatgacagtgaagtatatgaaaaagtggtagactaccaagaagagagtaaagaaacttctatgaatgggctttctggtggagttggtgctaattctggccttcttaaagacatt

SEQ ID NO: 696551 - DNA, 120 bp, Artificial Sequence
  ENSG00000188994_13 (sequence is synthesized)
ggtgatgaaaagcagaagaagagagagataaaacagttaagagagaggggatttatatctgctcggtttaggaattggcaagcctacatgcagtattgtgtgttgtgtgacaaagaattc

SEQ ID NO: 696552 - DNA, 120 bp, Artificial Sequence
  ENSG00000188994_14 (sequence is synthesized)
cttggtcacagaatagtacgacatgctcagaaacattacaaagatggaatttatagttgccccatatgtgcaaagaactttaattctaaagaaacttttgtccctcatgtcacactgcat

SEQ ID NO: 696553 - DNA, 120 bp, Artificial Sequence
  ENSG00000188994_15 (sequence is synthesized)
gttaaacaatctagtaaagagagactagcagctatgaaaccattaagaagattgggaaggcctccaaagatcacaactaccaatgaaaatcagaagactaatactgtggctaaacaggag

SEQ ID NO: 696554 - DNA, 120 bp, Artificial Sequence
  ENSG00000188994_16 (sequence is synthesized)
cagcgacctataaaaaagaatagtctctattcaacagattttatagtgtttaatgacaatgatggttcagatgatgagaatgatgacaaagataaatcctatgagccagaagtgattcca

SEQ ID NO: 696555 - DNA, 120 bp, Artificial Sequence
  ENSG00000188994_17 (sequence is synthesized)
gtccagaaaccagtacctgttaatgaatttaattgccctgtaactttttgtaaaaagggctttaagtactttaaaaatttaattgctcatgtgaaggggcataaagataatgaagacgcc

SEQ ID NO: 696556 - DNA, 120 bp, Artificial Sequence
  ENSG00000188994_18 (sequence is synthesized)
aagcgctttcttgaaatgcagagcaaaaaagttatttgccagtactgtaggcggcattttgtgagtgttactcatctcaatgatcacttacagatgcactgtggcagtaaaccatatatc

SEQ ID NO: 696557 - DNA, 120 bp, Artificial Sequence
  ENSG00000188994_19 (sequence is synthesized)
tgtatacagatgaaatgtaaagctggttttaatagttacgccgagcttttaacccaccgaaaggagcatcaagtctttagagcaaaatgtatgtttcctaaatgtggaagaattttttcg

SEQ ID NO: 696558 - DNA, 120 bp, Artificial Sequence
  ENSG00000188994_20 (sequence is synthesized)
gaagcttatttactatatgatcatgaagcacaacattataatacgtacacttgtaagttcacaggttgtggtaaagtttatcgttctcagggtgagctggaaaagcatctggatgatcac

SEQ ID NO: 696559 - DNA, 120 bp, Artificial Sequence
  ENSG00000188994_21 (sequence is synthesized)
agtactcctcctgaaaaagtgctgcctcctgaagcccaacttaattcatctggagattccattcagccttctgaagtgaatcagaacacagcagagaatattgagaaagaaagatctatg

SEQ ID NO: 696560 - DNA, 120 bp, Artificial Sequence
  ENSG00000188994_22 (sequence is synthesized)
cttccttcagaaaataacattgaaaacagcttactagcagatagaagtgatgcttgggataaaagcaaagcagaatcagctgtgaccaaacaagaccagatttctgcctctgagctcagg

SEQ ID NO: 696561 - DNA, 120 bp, Artificial Sequence
  ENSG00000188994_23 (sequence is synthesized)
caagctaatggaccattgtcaaatggtttggaaaaccctgctactactcctctacttcaatccagtgaagtagctgtgtccattaaggtgtctctcaatcaggggattgaggataacttt

SEQ ID NO: 696562 - DNA, 120 bp, Artificial Sequence
  ENSG00000188994_24 (sequence is synthesized)
ggaaagcaagaaaactcaactgtggaaggcagtggtgaagcactggtcacagacttacatacgccagttgaagatacttgtaatgatttgtgtcatccaggtttccaggagagaaaagaa

SEQ ID NO: 696563 - DNA, 120 bp, Artificial Sequence
  ENSG00000188994_25 (sequence is synthesized)
caagattgctttaatgatgcccatgttactcagaattctttagtaaattcagaaactctcaaaataggtgaccttaccccacaaaacttagaaagacaagtgaacaacttgatgaccttt

SEQ ID NO: 696564 - DNA, 120 bp, Artificial Sequence
  ENSG00000188994_26 (sequence is synthesized)
tctgtgcaaaatcaggcagcatttcaaaacaatttaccaacttccaaatttgaatgtggagataatgttaaaacatcatccaatctttataatttacctcttaagacattagaaagtatt

SEQ ID NO: 696565 - DNA, 120 bp, Artificial Sequence
  ENSG00000188994_27 (sequence is synthesized)
gcatttgttccaccgcagtccgacctaagtaattcattaggaactccatcagtgcctccaaaagctccagttcagaaattcagctgccaggtcgagggatgtactcgaacctataattct

SEQ ID NO: 696566 - DNA, 120 bp, Artificial Sequence
  ENSG00000188994_28 (sequence is synthesized)
tcacagagtattgggaaacacatgaagacagcacaccctgaccaatatgctgcatttaaaatgcagcgcaaaagtaaaaaaggtcagaaagctaacaacttaaatacaccaaataatgga

SEQ ID NO: 696567 - DNA, 120 bp, Artificial Sequence
  ENSG00000188994_29 (sequence is synthesized)
aagtttgtttattttttgccatcaccggtgaacagctcaaatccattttttacatcacagaccaaagccaatgggaatcctgcttgttcggcccagttgcagcatgtctcgccacccatt

SEQ ID NO: 696568 - DNA, 120 bp, Artificial Sequence
  ENSG00000188994_30 (sequence is synthesized)
tttccagctcatttagcaagtgtgtcaactccattgttgtcctcaatggaaagtgtcataaatccaaatataacttctcaggataaaaatgaacaaggtggtatgttatgttcccaaatg

SEQ ID NO: 696569 - DNA, 120 bp, Artificial Sequence
  ENSG00000188994_31 (sequence is synthesized)
gaaaatttacctagtactgccttgccagcacaaatggaagatctaaccaaaacagttctgcctttgaatattgacagtggctcagatcctttccttcctttacctgcagaaagtagttca

SEQ ID NO: 696570 - DNA, 120 bp, Artificial Sequence
  ENSG00000188994_32 (sequence is synthesized)
atgtctctcttcccttcaccagcagatagtgggactaattctgttttttcccaactggaaaataatacaaatcattattcctcacagattgaaggaaacactaattcctcctttctaaag

SEQ ID NO: 696571 - DNA, 120 bp, Artificial Sequence
  ENSG00000188994_33 (sequence is synthesized)
gggggtaatggtgaaaatgcagtttttccttcacaagtgaatgttgcaaataacttcagtagcaccaatgcccaacagtctgcacctgaaaaagttaaaaaagaccgtgggcggggccca

SEQ ID NO: 696572 - DNA, 120 bp, Artificial Sequence
  ENSG00000188994_34 (sequence is synthesized)
aatgggaaggaaagaaaacctaagcacaacaaaagggctaaatggcctgcaattatcagagatgggaaatttatctgtagcaggtgttacagggcttttactaatcccagatcactgggt

SEQ ID NO: 696573 - DNA, 120 bp, Artificial Sequence
  ENSG00000188994_35 (sequence is synthesized)
gggcacttatccaagcgatcttactgtaaaccactggatggagccgaaattgctcaagaacttctacagagtaatggacagccttctcttcttgccagcatgattctctccacaaatgca

SEQ ID NO: 696574 - DNA, 120 bp, Artificial Sequence
  ENSG00000188994_36 (sequence is synthesized)
gtaaatttgcagcagccacaacaatctaccttcaatccagaagcatgttttaaagatccatcatttctacagcttcttgctgaaaatcgctcgccagcatttttaccaaatacatttcct

SEQ ID NO: 696575 - DNA, 120 bp, Artificial Sequence
  ENSG00000188994_37 (sequence is synthesized)
cgatctggtgtgactaactttaataccagtgtcagtcaagaaggtagtgaaattattaaacaggctttggaaactgctggcattcccagtacatttgagggtgccgaaatgctttctcat

SEQ ID NO: 696576 - DNA, 120 bp, Artificial Sequence
  ENSG00000188994_38 (sequence is synthesized)
gtttcaacaggttgtgtctctgatgcatcacaagtaaatgcaacggtgatgccaaatccaactgtaccacccctgttgcacactgtatgccatccaaacaccttgctgaccaaccagaat

SEQ ID NO: 696577 - DNA, 120 bp, Artificial Sequence
  ENSG00000188994_39 (sequence is synthesized)
aggacgtcaaactccaaaacttcctccattgaggaatgtagcagcttgcctgtttttccaacgaatgacttactactgaagactgttgaaaatggtttgtgctctagttcatttcctaat

SEQ ID NO: 696578 - DNA, 120 bp, Artificial Sequence
  ENSG00000188994_40 (sequence is synthesized)
tctggtgggccatcacaaaattttaccagtaacagttctcgtgtttctgttataagtggtcctcagaacacaagatccagtcatttaaataaaaagggaaacagtgcttctaagagaaga

SEQ ID NO: 696579 - DNA, 120 bp, Artificial Sequence
  ENSG00000188994_41 (sequence is synthesized)
aagaaagttgctcctccactaattgcacctaacgcttcccaaaacttggtaacaagtgacttaacaacaatgggactcatagcaaagagtgttgaaatcccaactactaaccttcattca

SEQ ID NO: 696580 - DNA, 120 bp, Artificial Sequence
  ENSG00000188994_42 (sequence is synthesized)
aatgtaattccaacttgtgaacctcagagtttggtggaaaatctaacacagaaattaaataatgttaacaatcagttatttatgactgatgtaaaagagaatttcaaaaccagtcttgag

SEQ ID NO: 696581 - DNA, 120 bp, Artificial Sequence
  ENSG00000188994_43 (sequence is synthesized)
tcccatacagtgttagcccctttaacattaaaaactgaaaatggtgattcccaaatgatggctttgaattcatgcacaacttcaataaattctgatttgcagatttctgaagacaatgtt

SEQ ID NO: 696582 - DNA, 120 bp, Artificial Sequence
  ENSG00000188994_44 (sequence is synthesized)
atacaaaactttgaaaagactcttgaaattattaaaactgctatgaattctcaaatacttgaggtaaaaagtggatctcagggtgctggtgaaacttcacaaaatgctcaaataaattat

SEQ ID NO: 696583 - DNA, 120 bp, Artificial Sequence
  ENSG00000188994_45 (sequence is synthesized)
aacattcagcttccttcagtaaacactgtgcaaaataacaaattacccgattcttctccgttttcctcctttataagtgtcatgccaacaaaaagtaacattcctcagtctgaagtatca

SEQ ID NO: 696584 - DNA, 120 bp, Artificial Sequence
  ENSG00000188994_46 (sequence is synthesized)
cataaggaggatcaaatacaggaaattttagaaggcttacagaaattaaaattagaaaatgacctatccactccagcatcccaatgtgtactgataaatacatcagtgacactgactccc

SEQ ID NO: 696585 - DNA, 120 bp, Artificial Sequence
  ENSG00000188994_47 (sequence is synthesized)
acgcctgttaaatcaactgcagatatcacagttattcagccagtttctgaaatgataaacattcaatttaatgacaaagttaataaaccctttgtgtgtcaaaaccaaggctgtaactac

SEQ ID NO: 696586 - DNA, 120 bp, Artificial Sequence
  ENSG00000188994_48 (sequence is synthesized)
agtgctatgacaaaggatgcactatttaagcactatggtaaaattcatcaatacactccagaaatgattcttgaaattaagaagaatcaattgaaatttgctccctttaaatgtgtagta

SEQ ID NO: 696587 - DNA, 120 bp, Artificial Sequence
  ENSG00000188994_49 (sequence is synthesized)
cctacatgtacaaaaacatttacaagaaattctaacctccgggcacactgtcagttggtgcatcattttacaactgaagaaatggtaaagttaaaaattaaaaggccttatggaagaaaa

SEQ ID NO: 696588 - DNA, 120 bp, Artificial Sequence
  ENSG00000188994_50 (sequence is synthesized)
tctcagagtgaaaatgtgccggcctcacgaagtacacaagtgaaaaaacagctagctatgacagaggaaaataaaaaggaatctcagcctgctttagaattgagagcagagacccaaaat

SEQ ID NO: 696589 - DNA, 120 bp, Artificial Sequence
  ENSG00000188994_51 (sequence is synthesized)
acaatgtaatacaaatgcactcacaaacacacaaaccaaaggacggaagattaggaggcataaaaaagaaaaggaggagaaaaaacgaaagaagccagtttcccaatcccttgagtttcc

SEQ ID NO: 696590 - DNA, 120 bp, Artificial Sequence
  ENSG00000188994_52 (sequence is synthesized)
aacaagatacagtccttacagaccttatcgatgtgttcaccagggatgctttgctgcctttacgatacagcaaaacttgattctccattaccaggctgtacacaaatcagatctacctgc

SEQ ID NO: 696591 - DNA, 120 bp, Artificial Sequence
  ENSG00000188994_53 (sequence is synthesized)
attttcagcagaggtcgaagaggaaagtgaagctggtaaagaaagtgaagaaactgaaactaaacaaactttgaaagaatttcgatgtcaggtaagtgactgttctcgaattttccaagc

SEQ ID NO: 696592 - DNA, 120 bp, Artificial Sequence
  ENSG00000188994_54 (sequence is synthesized)
aattactggcctaatacaacactacatgaaacttcatgaaatgactcctgaagaaattgaaagtatgactgcttcagtggatgttgggaagtttccatgtgaccagttagagtgtaaatc

SEQ ID NO: 696593 - DNA, 120 bp, Artificial Sequence
  ENSG00000188994_55 (sequence is synthesized)
ttcatttactacatatttgaactatgttgttcatctagaggcagaccacgggattggactaagggcaagtaaaacagaagaagatggtgtatacaaatgtgattgtgaaggctgtgaccg

SEQ ID NO: 696594 - DNA, 120 bp, Artificial Sequence
  ENSG00000188994_56 (sequence is synthesized)
tatatatgcaacccggtcgaatctcctccgacacatttttaataagcataatgacaaacataaggctcatttgattcgtccaagaagattaacaccaggccaggaaaatatgtcaagcaa

SEQ ID NO: 696595 - DNA, 120 bp, Artificial Sequence
  ENSG00000188994_57 (sequence is synthesized)
ggcaaaccaagaaaaatcaaagtctaaacatcgggggaccaagcacagcagatgtggaaaggaaggaataaaaatgcccaagaccaaacgaaagaaaaaaaataatttagaaaacaagaa

SEQ ID NO: 696596 - DNA, 120 bp, Artificial Sequence
  ENSG00000188994_58 (sequence is synthesized)
tgcaaagattgtgcagattgaagaaaataagccttattctctgaaacgtgggaagcatgtatattctataaaggctagaaatgatgccctgtctgagtgtacaagcagatttgtaaccca

SEQ ID NO: 696597 - DNA, 120 bp, Artificial Sequence
  ENSG00000188994_59 (sequence is synthesized)
gtatccatgtatgataaagggatgtacttcagttgttacaagtgaaagcaatataattagacattataagtgccataaattatctaaggcatttacatcacaacaccgaaatcttcttat

SEQ ID NO: 696598 - DNA, 120 bp, Artificial Sequence
  ENSG00000188994_60 (sequence is synthesized)
tgtattcaaacggtgttgcaactcacaagtaaaggaaacgtctgagcaagaaggtgctaagaatgatgtgaaagattctgacacgtgtgtatcagagagcaatgataattcaagaacaac

SEQ ID NO: 696599 - DNA, 120 bp, Artificial Sequence
  ENSG00000188994_61 (sequence is synthesized)
agctacagtttcacaaaaggaagttgaaaaaaatgaaaaagatgaaatggatgaactaacagaattgtttattacaaaattaataaatgaagatagcacaagtgtagagacccaagctaa

SEQ ID NO: 696600 - DNA, 120 bp, Artificial Sequence
  ENSG00000188994_62 (sequence is synthesized)
tacttcttcaaatgtaagtaatgattttcaggaagataacctctgccagtcagaaagacaaaaagcaagtaatttgaagagagttaataaggaaaaaaatgtctcacaaaataaaaaaag

SEQ ID NO: 696601 - DNA, 120 bp, Artificial Sequence
  ENSG00000188994_63 (sequence is synthesized)
gaaagttgaaaaagctgaaccagcatcagcagctgagttaagtagcgtgcgtaaagaagaagaaactgctgttgccattcaaaccattgaggagcatcctgcatcttttgactggagctc

SEQ ID NO: 696602 - DNA, 120 bp, Artificial Sequence
  ENSG00000188994_64 (sequence is synthesized)
ttttaagccaatgggatttgaagtatcatttctgaagtttcttgaggagtctgcagtgaagcagaagaaaaatactgacaaagaccatccgaatactggaaacaaaaaaggatcccattc

SEQ ID NO: 696603 - DNA, 120 bp, Artificial Sequence
  ENSG00000188994_65 (sequence is synthesized)
aaattcaagaaaaaatattgataagactgctgtgactagtggaaatcatgtatgtccttgtaaagaaagcgaaacgtttgtacagtttgccaatccatcacagcttcagtgcagtgataa

SEQ ID NO: 696604 - DNA, 120 bp, Artificial Sequence
  ENSG00000188994_66 (sequence is synthesized)
tgtaaaaattgttttagacaagaatcttaaagattgcactgagcttgtcttaaagcaacttcaggaaatgaaacctaccgtcagtctgaaaaaacttgaagtacattcaaatgatccaga

SEQ ID NO: 696605 - DNA, 120 bp, Artificial Sequence
  ENSG00000188994_67 (sequence is synthesized)
tatgtctgttatgaaagatatcagtataggtaaagccacaggcagaggtcagtactgataattaatgtagtataaatacatcatttaccattttattttaaataggaagccatcaagcat

SEQ ID NO: 696606 - DNA, 120 bp, Artificial Sequence
  ENSG00000188994_68 (sequence is synthesized)
gctagaattgtgaaactttcattatatttttttgttgttgacatgaattaacctggccaaaaacaaaaaagaaaaaaaaaacatgacatttgtcatgtaaaacttttttttatccctatg

SEQ ID NO: 696607 - DNA, 120 bp, Artificial Sequence
  ENSG00000188994_69 (sequence is synthesized)
ggacttgaggaacagaatcagtacttcagttattgtaaatagtgagctaaacctcaaatttctatcacccagttgcccttttcatgaactaaacaattatctgtgtgattggtatgtttc

SEQ ID NO: 696608 - DNA, 120 bp, Artificial Sequence
  ENSG00000188994_70 (sequence is synthesized)
accaggtcactgctcatgtataacagtactctttatttgtagataccttttttgtatatatttattattgtaaatcatgtgctgccaccagcagtctgtaagtctaaactattaaatgac

SEQ ID NO: 696609 - DNA, 120 bp, Artificial Sequence
  ENSG00000188994_71 (sequence is synthesized)
acatttatatttggaattttaatttttaactaagcgatcaagttttttaaattgttcttttattgttttaaattaagaactttttgaactaaaaccagaaactctgccatagttcattga

SEQ ID NO: 696610 - DNA, 120 bp, Artificial Sequence
  ENSG00000188994_72 (sequence is synthesized)
tttttacatgaaacatttatttacaagatgatatcaagattacttttcacaaaataggcacattatatcaacactttgctctgctttgtaaatttgccatccaggattttggggtggtat

SEQ ID NO: 696611 - DNA, 120 bp, Artificial Sequence
  ENSG00000188994_73 (sequence is synthesized)
tcatgtgaaattaaagcagattctctagcagtttcctatagctacagtttttttttttcattgcttctaattggatatagttactatgagtccatgaaatacaatggaaatgtgaataaa

SEQ ID NO: 696612 - DNA, 120 bp, Artificial Sequence
  ENSG00000188994_74 (sequence is synthesized)
gaatttactacattgaagattttaaacatttggtattaaaaaaaaatcctttgtgaatgtgatagaaaactagtagtgtggagcagtgtaaatatttgaggtggtgatttgtgaagtagc

SEQ ID NO: 696613 - DNA, 120 bp, Artificial Sequence
  ENSG00000188994_75 (sequence is synthesized)
ccagtattgccttaaataaaatcacatttcatttcttgttttatacatgtgatcttataaagattttttgttttgttttgttttccattttctgagatttatagattggtgtatagcttt

SEQ ID NO: 696614 - DNA, 120 bp, Artificial Sequence
  ENSG00000188994_76 (sequence is synthesized)
aaactgtataaagttttgtggaaagatttttttaaacatttttataaatcttaaaattgatatcatcaaagtgagcccatcttgtgtttataaaatacaagagtccttaacatttataat

SEQ ID NO: 696615 - DNA, 120 bp, Artificial Sequence
  ENSG00000188994_77 (sequence is synthesized)
tacatagataaaacactttctataaggaagttggatgttttgattttactgtttatagatgttagattgtacagatttgtctgtatttctcaccatatctaatgatacttttttcattag

SEQ ID NO: 696616 - DNA, 120 bp, Artificial Sequence
  ENSG00000188994_78 (sequence is synthesized)
attggtcttcaagaacagtattagttataattattttggttattcagtatatagttagctcttacagtttagctttattcaccatatttatactgtggattcacagcgagaggtagaggt

SEQ ID NO: 696617 - DNA, 120 bp, Artificial Sequence
  ENSG00000188994_79 (sequence is synthesized)
tattccaggagagttgatgaccttcatttaaagtccaactaaaatcagtagtagaaacataagaaaacatctttgcaatatttacttttgtttctgtttgccgtaaatagtaacattgtt

SEQ ID NO: 696618 - DNA, 120 bp, Artificial Sequence
  ENSG00000188994_80 (sequence is synthesized)
tttttttattttgtgtttgttataaaacagttgcattcacaatattattggcctgagatattgatgatattgtgatggtatgaaaatgtgtacattccctgtgcaacatcagatttgcag

SEQ ID NO: 696619 - DNA, 120 bp, Artificial Sequence
  ENSG00000188994_81 (sequence is synthesized)
gaaaaatgaagcacttactgaaatcgctggtactctgaataaataagcatggtcaaggagtgaactattttcttttggaaatttctttttaatttttattattaaagtattttattttta

SEQ ID NO: 696620 - DNA, 120 bp, Artificial Sequence
  ENSG00000188994_82 (sequence is synthesized)
gggccttttgggttttattgaatagttcatttcacctgtttaagacttactaccaataagcataaaacctgacacgttaaaatccctgccctttggtgagcccactgttatttattaaaa

SEQ ID NO: 696621 - DNA, 120 bp, Artificial Sequence
  ENSG00000188994_83 (sequence is synthesized)
agttattttatgggtgattaatacatgggttttctttttcctaaattaacaataatttaaataactgagtaattttaatattaaatttttgttaacaactgaatgtttccatacagtttt

SEQ ID NO: 696622 - DNA, 120 bp, Artificial Sequence
  ENSG00000188994_84 (sequence is synthesized)
ttttcttagaaattgacctagctcttaaaggtgggcacttggcaaaactgccctatatagcacagtagcaagtaggtttatttctgatcattgtaactatgagccactgttaagtgaaaa

SEQ ID NO: 696623 - DNA, 120 bp, Artificial Sequence
  ENSG00000188994_85 (sequence is synthesized)
tgccaatgtattggggcttttcttttgctcattagcttaagaaaatttataactagacatttctaattgttttacatgtcatggggaagagtttgccaacatttaatgaaatttttatat

SEQ ID NO: 696624 - DNA, 120 bp, Artificial Sequence
  ENSG00000188994_86 (sequence is synthesized)
tccaggtaatgtatactaaaggtaattatgagagtgggctttttagcatgaaacaaaaaaaatcaaactatggtaaaaagacatgaatttatagaatagcatgttggtaaattttgatac

SEQ ID NO: 696625 - DNA, 120 bp, Artificial Sequence
  ENSG00000188994_87 (sequence is synthesized)
ggaatgtaatgtctaagtattaaaaaatcataaaatatatttttttcatggtatacttttccccagcctattgtcttgagatatcttctacagcctaaatttgctaaagtttcatcacta

SEQ ID NO: 696626 - DNA, 120 bp, Artificial Sequence
  ENSG00000188994_88 (sequence is synthesized)
aaaagtaggagtttttcctcttctgaacccgcaaagtttgcatattacaggtcagaattgtattattcaaaatacatcaccttaagtgaaatgtaacagtttttgaaattttcaacggtg

SEQ ID NO: 696627 - DNA, 120 bp, Artificial Sequence
  ENSG00000188994_89 (sequence is synthesized)
ttaaatttaacataggtacattattattttaaagggctagacatatttttaaggcaaatttttatcaagtgagcagtcacagttgctgtagataatatgaaagtacaataatactatacc

SEQ ID NO: 696628 - DNA, 120 bp, Artificial Sequence
  ENSG00000188994_90 (sequence is synthesized)
tagggacatcagaaagaatgccctatttttctggaaaaggaggtaggtagttgggaaagtctttgtagaaaatatgagttttgaaagatgaatgaatgctcattggttcagggggacaag

SEQ ID NO: 696629 - DNA, 120 bp, Artificial Sequence
  ENSG00000188994_91 (sequence is synthesized)
ggaattccagacttgggggtagagcgtaattgcggtattgccagtgggccacttggaaagataggaagttgaagaaggtgaagctgaagaagcagatgggtggtgggatcaggagtgttc

SEQ ID NO: 696630 - DNA, 120 bp, Artificial Sequence
  ENSG00000188994_92 (sequence is synthesized)
ttgtatgctgtattaagtctttattttggtttttgaaaattgttattggatgcatgtatattgaacaatttaatcagtatcagttttagaaagataattgtcatggtatagtggataaat

SEQ ID NO: 696631 - DNA, 120 bp, Artificial Sequence
  ENSG00000188994_93 (sequence is synthesized)
tgagtaagttggagattaattagggggacctaaaatagtccaggcaaaaaatgatgggagccagaagaaaggctaacgaagttggggaagagactaatggataagagagataataaaaag

SEQ ID NO: 696632 - DNA, 120 bp, Artificial Sequence
  ENSG00000188994_94 (sequence is synthesized)
taatgtctaaggcagcctgtttcagcatgtttattgtagtgagatactaggcaggtggaaggttattgctgtgatgaaataagttttctaaattgtgtgctgtagttctctctctctctc

SEQ ID NO: 696633 - DNA, 68 bp, Artificial Sequence
  ENSG00000188994_95 (sequence is synthesized)
aagttttctaaattgtgtgctgtagttctctctctctctctctctttttttttcttttgcacgatctc

SEQ ID NO: 696634 - DNA, 90 bp, Artificial Sequence
  ENSG00000188994_96 (sequence is synthesized)
atgctatcacacccagctaattttgtagttttggcacaatctcagctcagtgcaacttccatctcccaggttcaagtgattctcctacct

SEQ ID NO: 696635 - DNA, 87 bp, Artificial Sequence
  ENSG00000188994_97 (sequence is synthesized)
cagctcagtgcaacttccatacccaagtaggtgcacaccaccacacctggctgattttatatttttagtagagacggtttcaccatg

SEQ ID NO: 696636 - DNA, 120 bp, Artificial Sequence
  ENSG00000188994_98 (sequence is synthesized)
cccacctccacctcccaaagtgcaggtattacaagcatgagccaccacacccagcctctcttaaataatttaatgcatgtttgcatattaaagacaaaagttctactgtaaatatgtaaa

SEQ ID NO: 696637 - DNA, 120 bp, Artificial Sequence
  ENSG00000188994_99 (sequence is synthesized)
aagttgaaagggaattttccagacttaattgaccctgagaacatttttcttcttttaatgttaatacttagttatatcccactgaactagcattctaaagaacacactttgggaaatgct

SEQ ID NO: 696638 - DNA, 120 bp, Artificial Sequence
  ENSG00000188994_100 (sequence is synthesized)
gatctcaaatggcatttattcaaccaggactgataatcaacgtgtacaccaattcaattgtatcagctgtttgcaaatggtgattattctgattgatcaatttatatatcccaatgggtt

SEQ ID NO: 696639 - DNA, 120 bp, Artificial Sequence
  ENSG00000188994_101 (sequence is synthesized)
gattcctttgctgtattggttgttaatgttttgaatattacccggtattcaagtaatgctcattgaatttcaagtaattgtgattaaacgttgattaaaatccagtcatacttgccagaa

SEQ ID NO: 696640 - DNA, 120 bp, Artificial Sequence
  ENSG00000188994_102 (sequence is synthesized)
atggaacaggtcttcgaatctccccaggaacatctcagaggatatgtccgtagaagacttcgtggactggggaaagccacgccgggatcgggacgccggagagggtcgcccctccctagg

SEQ ID NO: 696641 - DNA, 120 bp, Artificial Sequence
  ENSG00000188994_103 (sequence is synthesized)
ccggccgtggaagcggccaccgactactgtcagcagctgtgccagggtctcactgtcacccaggctggaatgcagtgacgccatcagagctcacttcagcgtccacctcccgggctcaag

SEQ ID NO: 696642 - DNA, 80 bp, Artificial Sequence
  ENSG00000188994_104 (sequence is synthesized)
gatagctgggactacagatgtgcgctaccatgcccagctgatttttggaaattttagtggagacagggttttgccatgtt

SEQ ID NO: 696643 - DNA, 120 bp, Artificial Sequence
  ENSG00000188994_105 (sequence is synthesized)
ggcgtgagccaccgtgcccagcctagaatttgtatatactcaaaatagtttacattttgcatttttctacatgaacatatgcatgtattgctgatctttccctactttttgcaaatatga

SEQ ID NO: 696644 - DNA, 120 bp, Artificial Sequence
  ENSG00000188994_106 (sequence is synthesized)
gcatgtattgctgatctttccctactttttgcaaatatgatagatttcactatatacaaaacttaaaacattatacattaactcaaaagcattgtcaatttatattctgaaataatgcaa

SEQ ID NO: 696645 - DNA, 120 bp, Artificial Sequence
  ENSG00000188994_107 (sequence is synthesized)
attttaatttttttaaaaacaaaacttctacaagattattatattattttaggagactaaaacataaaagcctgatacttaagtagtttgaatctggtgatttattccatgacttaacct

SEQ ID NO: 696646 - DNA, 120 bp, Artificial Sequence
  ENSG00000188994_108 (sequence is synthesized)
attcatatttgtataatcttattttaagccttggcttgggattttttttaattgcctccctaaaataggatagtgcacattgcataaaatgacattgtcaataaaatttatatcctcaaa

SEQ ID NO: 696647 - DNA, 120 bp, Artificial Sequence
  ENSG00000188994_109 (sequence is synthesized)
cttggggttcactatatttaacaggatcaaaggaaaagaaacctgaatttccatatgtttgattaaatgagtcttaaaccctgaagtgtggagaggaccaattgtggcagtcttctgtgt

SEQ ID NO: 696648 - DNA, 120 bp, Artificial Sequence
  ENSG00000188994_110 (sequence is synthesized)
accacattacatttagtcgtcatgtcttcttaggctcctcttggctgtgacagtttttcagactttccttgtttttgatgaccttgacagttttgaggagtactggtcaggtattttgta

SEQ ID NO: 696649 - DNA, 120 bp, Artificial Sequence
  ENSG00000188994_111 (sequence is synthesized)
accgactactgtcagcagctgtgccagatttcagaagttgattgcaaagatgcactggaaatgatctgtaacttagaatctgagggtgatgaaaaaagcgctcttgttttatgtactgcg

SEQ ID NO: 696650 - DNA, 120 bp, Artificial Sequence
  ENSG00000188994_112 (sequence is synthesized)
ttgtctgatgttgttctcatgattagactggggttatgggttttgaggaggaagaccagaaaggtaaagtaccattgccatcacattatataaagggtatctgttgtcaacatgacttat

SEQ ID NO: 696651 - DNA, 85 bp, Artificial Sequence
  ENSG00000188994_113 (sequence is synthesized)
gttttttgaaagggtctctcactccatcactcaggctggagtgcagtggcataatcccagctcactgcaacctccaactcctggg

SEQ ID NO: 696652 - DNA, 120 bp, Artificial Sequence
  ENSG00000188994_114 (sequence is synthesized)
accgcaggcatgtaccaccatgcttggctaaacttctttgtattttttggtagagatggggtttcaccttgttggccaagctggtctcgagtccctgacctcaagtgatccacctgcctt

SEQ ID NO: 696653 - DNA, 120 bp, Artificial Sequence
  ENSG00000188994_115 (sequence is synthesized)
ttacaggcatgagccactacacccagccgacttatcactgttgatgtgaacctagaccacctagctgtggcagcatgtgtcaggtttctccactgtgaagttactcttttctccctttcc

SEQ ID NO: 696654 - DNA, 120 bp, Artificial Sequence
  ENSG00000188994_116 (sequence is synthesized)
ttactcttttctccctttccatgttatattctttagaatgaaattacaatgtgcagcccatcttcaagtgggaagttatgctccacctccttgaggaagcagtatctacatgttatctgg

SEQ ID NO: 696655 - DNA, 120 bp, Artificial Sequence
  ENSG00000188994_117 (sequence is synthesized)
aattctacacaggagatttgtctcctccctatttattttttcaatcagtcatttatattagtatggccttatatatatttattttattctttggtcataatctgatactactttattttg

SEQ ID NO: 696656 - DNA, 120 bp, Artificial Sequence
  ENSG00000188994_118 (sequence is synthesized)
ttgctcagtttcttccagtgttggcagctctttcctttgactcttgtgtccctcatcaatgggttttgttttttgtgtgattacttccttgctttctggcactgtaatatgctccaggct

SEQ ID NO: 696657 - DNA, 120 bp, Artificial Sequence
  ENSG00000188994_119 (sequence is synthesized)
catctggcgtatttcctgcctgagtcctggaatcaaccgtttctctagggaggacttgctccttttattggagaatggtattagaaaccaagatctatattaaactaaatatgaattctt

SEQ ID NO: 696658 - DNA, 120 bp, Artificial Sequence
  ENSG00000188996_0 (sequence is synthesized)
ctgccttccctgtggcatcatgaagtttcgcgccaagatcaccggcaaaggctgtctagagctgttcattcacgtcagcggcaccgtcgcgaggctagcgaaggtctgcgtgctccgcgt

SEQ ID NO: 696659 - DNA, 120 bp, Artificial Sequence
  ENSG00000188996_1 (sequence is synthesized)
gcgccctgacagcctgtgcttcggccccgcgggttccggcggcctccacgaggccaggctgtggtgcgaggtgcggcagggggccttccagcagtttcgcatggaaggtgtctcggaaga

SEQ ID NO: 696660 - DNA, 120 bp, Artificial Sequence
  ENSG00000188996_2 (sequence is synthesized)
tctcgatgagatccacctggagctgacggcggagcacctgtcccgggcggcgagaagcgcagcgggcgcgtcctccctgaagctgcagctgacccacaagcgccgcccctccctcacggt

SEQ ID NO: 696661 - DNA, 120 bp, Artificial Sequence
  ENSG00000188996_3 (sequence is synthesized)
ggcggtggagctggtctcgtccctgggccgcgctcgcagcgtggtgcacgatctgcccgtgcgggtgcttcccaggagagtgtggcgggactgcctgccgcccagcctgcgcgcctccga

SEQ ID NO: 696662 - DNA, 120 bp, Artificial Sequence
  ENSG00000188996_4 (sequence is synthesized)
gcagtcacgtgctggtggaagcaaacctcagtggcaggatgaccctgagtatagagacggaggtggtgtccattcaaagttattttaaaaatcttggaaaccctccccagtcggctgtgg

SEQ ID NO: 696663 - DNA, 120 bp, Artificial Sequence
  ENSG00000188996_5 (sequence is synthesized)
gtgtgcctgaaaacagagacctggagagcatggtgcaagtgcgggtggacaatcggaagcttctgcagtttttggagggacagcaaatacatcctacgacggccctgtgcaatatttggg

SEQ ID NO: 696664 - DNA, 120 bp, Artificial Sequence
  ENSG00000188996_6 (sequence is synthesized)
acaatactcttcttcagcttgttttggttcaagaagatgtctctcttcagtatttcattcctgccttgtaaaaattcagccagcttagattttttttttaaggttttgatcttttcaaaa

SEQ ID NO: 696665 - DNA, 120 bp, Artificial Sequence
  ENSG00000188996_7 (sequence is synthesized)
ctaaaacagaccctgagttaattgggttgaaaatttggaccttcactgacttatgcagggcgtatattttgttgagcccttcctcctttgcaaaatttatattaaagcattggtaaaaca

SEQ ID NO: 696666 - DNA, 120 bp, Artificial Sequence
  ENSG00000188997_0 (sequence is synthesized)
gcaaagctgcgctggccgctcgcggagggagaggctgcagagcgagggcaggaggactacttccagcaacccagtctcctgccatgtccgaccccatcacgctgaacgtcggggggaagc

SEQ ID NO: 696667 - DNA, 120 bp, Artificial Sequence
  ENSG00000188997_1 (sequence is synthesized)
tctatacaacctcactggcgaccctgaccagcttccctgactccatgctaggcgccatgttcagcgggaagatgcccaccaagagggacagccagggcaactgcttcattgaccgtgacg

SEQ ID NO: 696668 - DNA, 120 bp, Artificial Sequence
  ENSG00000188997_2 (sequence is synthesized)
gcaaagtgttccgctatatcctcaacttcctgcggacctcccaccttgacctgcctgaggacttccaggagatggggctgctccgcagggaggccgacttctaccaggtgcagcccctga

SEQ ID NO: 696669 - DNA, 120 bp, Artificial Sequence
  ENSG00000188997_3 (sequence is synthesized)
ttgaggccctgcaggagaaggaagtggagctctccaaggccgagaagaatgccatgctcaacatcacactgaaccagcgtgtgcagacggtccacttcactgtgcgcgaggcaccccaga

SEQ ID NO: 696670 - DNA, 120 bp, Artificial Sequence
  ENSG00000188997_4 (sequence is synthesized)
tctacagcctctcctcttccagcatggaggtcttcaacgccaacatcttcagcacctcctgcctcttcctcaagctccttggctctaagctcttctactgctccaatggcaatctctcct

SEQ ID NO: 696671 - DNA, 120 bp, Artificial Sequence
  ENSG00000188997_5 (sequence is synthesized)
ccatcaccagccacttgcaggaccccaaccacctgactctggactgggtggccaatgtggagggcctgccagaggaggagtacaccaagcagaacctcaagaggctctgggtggtgcccg

SEQ ID NO: 696672 - DNA, 120 bp, Artificial Sequence
  ENSG00000188997_6 (sequence is synthesized)
ccaacaagcagatcaacagcttccaggtcttcgtggaagaggtactgaaaatcgctctgagcgatggcttctgcatcgattcttctcacccacatgctctggattttatgaacaataaga

SEQ ID NO: 696673 - DNA, 120 bp, Artificial Sequence
  ENSG00000188997_7 (sequence is synthesized)
ttattcgattaatacggtacaggtaaaaggaccccaacaacactggagatggggagtcccaggaagctcatgtcagccaggtcttggagggcatctcgccagtggtgcgaggcaggggac

SEQ ID NO: 696674 - DNA, 120 bp, Artificial Sequence
  ENSG00000188997_8 (sequence is synthesized)
tatactaatctgtattaattgtgtagcaggacttgattccccccatgatgaagtccaccttttggaatccagtgtcctctgaacagaaccaccttttttcttgccattttgagctgcaga

SEQ ID NO: 696675 - DNA, 120 bp, Artificial Sequence
  ENSG00000188997_9 (sequence is synthesized)
caggcggtttattatgacaagtgaagagtcagctgatgtgtactaaaggaggccataggaggattttccagccaggacaaaagagcagcagttttctcctgggctccatctctctgtacc

SEQ ID NO: 696676 - DNA, 120 bp, Artificial Sequence
  ENSG00000188997_10 (sequence is synthesized)
gctagccagtgccgcatttatccatctgtaagaaggccctggtggagaggatgggatgagaacaagaggctacctccagttaaccaggacataaagtccccagcggttcctgtcacacct

SEQ ID NO: 696677 - DNA, 120 bp, Artificial Sequence
  ENSG00000188997_11 (sequence is synthesized)
gctcctccctccccagggtgcatccatgatcgtggatgtttgcccaggggtgaccatgtttggctggcttggaatgctgtgcattctcagagctctgttagtgtcccctcttgggggtca

SEQ ID NO: 696678 - DNA, 120 bp, Artificial Sequence
  ENSG00000188997_12 (sequence is synthesized)
gagatgaggtgtggcagggtctagaggaatgagtgtccaggcagagttcagaaggtaggaatgtccctcttgatagggctgaatcaagggattcctggctttagaaagggtctgctatct

SEQ ID NO: 696679 - DNA, 120 bp, Artificial Sequence
  ENSG00000188997_13 (sequence is synthesized)
ttgcaaaaatgtgcaagtatctgtagccagtgtaatgaaatcacttccaaatccagcctgttacctgacttttgtcattgttttcccaaaaatttgaggtatcattgaaacaggtcattt

SEQ ID NO: 696680 - DNA, 120 bp, Artificial Sequence
  ENSG00000188997_14 (sequence is synthesized)
tggaaataattcgatgattgcttagtcctcccccacccctagaacaccccagcacatctgaagatgagcgcctctccctgggtacctgcaagtgatcaccttggcctgcttgcatacctt

SEQ ID NO: 696681 - DNA, 120 bp, Artificial Sequence
  ENSG00000188997_15 (sequence is synthesized)
ggctgataggaagcgcgccatccccaaggcagctcctgctgtggttggacagtgctgactgttagacagttcttccctatattgagccaaaatctgtcctgccacttgctggatcttggt

SEQ ID NO: 696682 - DNA, 120 bp, Artificial Sequence
  ENSG00000188997_16 (sequence is synthesized)
tgcagaccttcccattcacccagttatatatctttgctttcaaaatagtcaccttgagagaccagacatttttctgaaaacatcattactcagaattcagattcccctctgggatctgtc

SEQ ID NO: 696683 - DNA, 120 bp, Artificial Sequence
  ENSG00000188997_17 (sequence is synthesized)
ttcagaatcaaagttagctcttttctatcccctgtaagtcagtccccttttgttgtagcttcacctcgtttgtgacccccacttcacccaccttccccaccatctgtggctccatatacc

SEQ ID NO: 696684 - DNA, 120 bp, Artificial Sequence
  ENSG00000188997_18 (sequence is synthesized)
tttcgaccattttctgctggaagaggaagattcacggcccctgaggagatccagaggaaagagacggtctccaagggtgctgtgcagcaaggagcccaggagtggtatgaaccgtaacag

SEQ ID NO: 696685 - DNA, 120 bp, Artificial Sequence
  ENSG00000188997_19 (sequence is synthesized)
tgcccttagagtaaatgtgcggcccctaagaccctgccctcaggaaggcggccttcccctgcagtcctgtgtcccacccctgggtctctgtagggtgccatccagggcaagcaacccaag

SEQ ID NO: 696686 - DNA, 120 bp, Artificial Sequence
  ENSG00000188997_20 (sequence is synthesized)
cactgcttcccaccgggtgatgagccatgcaggcctccaaactgcacgtcatgattcatccctaaagtgagtttggccttgagagtccccagggtcctcccccactgggcaggggtcctc

SEQ ID NO: 696687 - DNA, 120 bp, Artificial Sequence
  ENSG00000188997_21 (sequence is synthesized)
aaagccaaggaagcctggtgacacaggcacccatgggaggtgggcccagaaaggggcttcccatagataggccctgtgagtagggagcttgtacactgggccatgggcagcgccagttcc

SEQ ID NO: 696688 - DNA, 120 bp, Artificial Sequence
  ENSG00000188997_22 (sequence is synthesized)
acactgggccatgggcagcgccagttcccttgagcagtaaaggcccttttccccctacggtgggacccaggagtctctctgacagcttttctgccaggcacagtggctcatgcctgtaat

SEQ ID NO: 696689 - DNA, 120 bp, Artificial Sequence
  ENSG00000188997_23 (sequence is synthesized)
ctgaggcagtagaatcgcttgaacccagatagcagaggttgcagtgagctgagagtgtgccattgcagagagactccatcccaaaaaaagacagctgtcccaggccaagggtacttggga

SEQ ID NO: 696690 - DNA, 120 bp, Artificial Sequence
  ENSG00000188997_24 (sequence is synthesized)
gggagagcccctcatggagaacctagtttagaccaagtagcagaagctgtggtcataacaaaacaatttgaggaagaaatcttacaaatcaccactgccctttctccttttccataaaac

SEQ ID NO: 696691 - DNA, 120 bp, Artificial Sequence
  ENSG00000188997_25 (sequence is synthesized)
tgtccatcttttcggtgctccctaatccaagcagcttgactttagagaagttgcagaagcagtgaagccactaacatgctgtgtgactttatgcaagtcactcacctcactgagccacct

SEQ ID NO: 696692 - DNA, 120 bp, Artificial Sequence
  ENSG00000188997_26 (sequence is synthesized)
ccatttcttcatctgtgaaataggcataacagtaatacataaccctacctacctcacagggctgttgtgaggatcaaatgaaataatgtaacgtgagaatacagtataaatgataaagga

SEQ ID NO: 696693 - DNA, 120 bp, Artificial Sequence
  ENSG00000188997_27 (sequence is synthesized)
agagcgagggcaggaggtgggtgcggcacggccggggtcgcggggctcggggactaccggcgaggatgcagaggagaaggaatgaattccagctgagagacctggccgatgcatgggatt

SEQ ID NO: 696694 - DNA, 120 bp, Artificial Sequence
  ENSG00000188997_28 (sequence is synthesized)
tgtcttcaaggtccaggcagaggggatggcagatgccaaattgcagaagtcgaagagggcccagtatggttggtctgtaaagactacttccagcaacccagtctcctgccatgtccgacc

SEQ ID NO: 696695 - DNA, 120 bp, Artificial Sequence
  ENSG00000188997_29 (sequence is synthesized)
aaagctgcgctggccgctcgcggagggagaggctgcagagcgagggcaggagacaaatgaccgggagccatgacgtcatcgggggcgcaggaaagcaggtgctctgctgcttttgcaagc

SEQ ID NO: 696696 - DNA, 120 bp, Artificial Sequence
  ENSG00000188997_30 (sequence is synthesized)
agagaaataagagtttgggcacctacccaggggtcccagggaatgccctgtggctcctgacctcccccgcctgtaatgctctgagcacttcagcagtaatgcatggaagagataagggtc

SEQ ID NO: 696697 - DNA, 60 bp, Artificial Sequence
  ENSG00000188997_31 (sequence is synthesized)
ccaagtcctctctgacacccgcttcttttcctgccgtgaaggctggagttctgtggcgta

SEQ ID NO: 696698 - DNA, 120 bp, Artificial Sequence
  ENSG00000189001_0 (sequence is synthesized)
gggagagaggataaatagcagcgtggcttccctggctcctctctgcatccttcccgaccttcccagcaatatgcatcttgcacgtctggtcggctcctgctccctccttctgctactggg

SEQ ID NO: 696699 - DNA, 120 bp, Artificial Sequence
  ENSG00000189001_1 (sequence is synthesized)
ggccctgtctggatgggcggccagcgatgaccccattgagaaggtcattgaagggatcaaccgagggctgagcaatgcagagagagaggtgggcaaggccctggatggcatcaacagtgg

SEQ ID NO: 696700 - DNA, 120 bp, Artificial Sequence
  ENSG00000189001_2 (sequence is synthesized)
aatcacgcatgccggaagggaagtggagaaggttttcaacggacttagcaacatggggagccacaccggcaaggagttggacaaaggcgtccaggggctcaaccacggcatggacaaggt

SEQ ID NO: 696701 - DNA, 120 bp, Artificial Sequence
  ENSG00000189001_3 (sequence is synthesized)
gttccacactggggtccaccaggctgggaaggaagcagagaaacttggccaaggggtcaaccatgctgctgaccaggctggaaaggaagtggagaagcttggccaaggtgcccaccatgc

SEQ ID NO: 696702 - DNA, 120 bp, Artificial Sequence
  ENSG00000189001_4 (sequence is synthesized)
tgctggccaggccgggaaggagctgcagaatgctcataatggggtcaaccaagccagcaaggaggccaaccagctgctgaatggcaaccatcaaagcggatcttccagccatcaaggagg

SEQ ID NO: 696703 - DNA, 120 bp, Artificial Sequence
  ENSG00000189001_5 (sequence is synthesized)
ggccacaaccacgccgttagcctctggggcctcggtcaacacgcctttcatcaaccttcccgccctgtggaggagcgtcgccaacatcatgccctaaactggcatccggccttgctggga

SEQ ID NO: 696704 - DNA, 120 bp, Artificial Sequence
  ENSG00000189001_6 (sequence is synthesized)
gaataatgtcgccgttgtcacatcagctgacatgacctggaggggttgggggtgggggacaggtttctgaaatccctgaagggggttgtactgggatttgtgaataaacttgatacacta

SEQ ID NO: 696705 - DNA, 120 bp, Artificial Sequence
  ENSG00000189001_7 (sequence is synthesized)
gaagcagagaagcttggccatggggtcaacaacgctgctggacaggttgggaaggaggcagacaaactgatccatcatggggtccatcacggggccaaccaggcgggaagtgaggcaggg

SEQ ID NO: 696706 - DNA, 120 bp, Artificial Sequence
  ENSG00000189001_8 (sequence is synthesized)
aagtttggccagggagtcgacaatgctgcagggcaggctggaaatgaggctgggaggtttggccagggagtccaccatgctgcagggcaggccggaaatgaggctgggaggtttggccag

SEQ ID NO: 696707 - DNA, 120 bp, Artificial Sequence
  ENSG00000189001_9 (sequence is synthesized)
ggagtccaccatgctgcagggcaggccggaaatgaggctgggagatttggccagggggcccaccatggtctcagtgagggctggaaggagacagagaagtttggccaggggatccaccat

SEQ ID NO: 696708 - DNA, 120 bp, Artificial Sequence
  ENSG00000189001_10 (sequence is synthesized)
gctgccggtcaggttgggaaggaggcagagaagtttggccagggggcccaccatgctgcggggcaggccggaaatgaggcagggagatttggccagggggtccaccatggtctcagtgag

SEQ ID NO: 696709 - DNA, 120 bp, Artificial Sequence
  ENSG00000189001_11 (sequence is synthesized)
ggctggaaggagacagagaagtttggccagggggtccaccatactgctggtcaggttgggaaggaggcagagaagtttggccagggggcccaccatgctgcggggcaggccggaaatgag

SEQ ID NO: 696710 - DNA, 120 bp, Artificial Sequence
  ENSG00000189001_12 (sequence is synthesized)
ccatgctgcggggcaggccggaaatgaggctgggaggtttggccagggggtccaccatggtctcagtgagggctggaaggagacagagaagtttggccagggggtccaccatgctgccag

SEQ ID NO: 696711 - DNA, 120 bp, Artificial Sequence
  ENSG00000189001_13 (sequence is synthesized)
tcagtttgggaaggaaacagagaagctcggccatggggtccaccatggggttaatgaggcctggaaggaagcagagaagtttggccagggtgtccaccatgctgcctcgcaggtggggaa

SEQ ID NO: 696712 - DNA, 120 bp, Artificial Sequence
  ENSG00000189001_14 (sequence is synthesized)
ggaggaagacagagtggtccaaggcctccatcatggcgttagtcaggctggaagggaggcggggcagtttggccacgacattcaccacacagcagggcaggctgggaaagagggagacat

SEQ ID NO: 696713 - DNA, 120 bp, Artificial Sequence
  ENSG00000189001_15 (sequence is synthesized)
agcagttcatggtgtccaacctggggtccacgaggccgggaaggaggcagggcagtttggccagggagttcaccatacccttgaacaggccgggaaggaagcagacaaagcggtccaagg

SEQ ID NO: 696714 - DNA, 120 bp, Artificial Sequence
  ENSG00000189007_0 (sequence is synthesized)
ctctgccgcgggctctgtagctgagtggtggctgggtatggaggcgaaggcggcacccaagccagctgcaagcggcgcgtgctcggtgtcggcagaggagaccgaaaagtggatggagga

SEQ ID NO: 696715 - DNA, 120 bp, Artificial Sequence
  ENSG00000189007_1 (sequence is synthesized)
ggcgatgcacatggccaaagaagccctcgaaaatactgaagttcctgttggctgtcttatggtctacaacaatgaagttgtagggaaggggagaaatgaagttaaccaaaccaaaaatgc

SEQ ID NO: 696716 - DNA, 120 bp, Artificial Sequence
  ENSG00000189007_2 (sequence is synthesized)
tactcgacatgcagaaatggtggccatcgatcaggtcctcgattggtgtcgtcaaagtggcaagagtccctctgaagtatttgaacacactgtgttgtatgtcactgtggagccgtgcat

SEQ ID NO: 696717 - DNA, 120 bp, Artificial Sequence
  ENSG00000189007_3 (sequence is synthesized)
tatgtgtgcagctgctctccgcctgatgaaaatcccgctggttgtatatggctgtcagaatgaacgatttggtggttgtggctctgttctaaatattgcctctgctgacctaccaaacac

SEQ ID NO: 696718 - DNA, 120 bp, Artificial Sequence
  ENSG00000189007_4 (sequence is synthesized)
tgggagaccatttcagtgtatccctggatatcgggctgaggaagcagtggaaatgttaaagaccttctacaaacaagaaaatccaaatgcaccaaaatcgaaagttcggaaaaaggaatg

SEQ ID NO: 696719 - DNA, 120 bp, Artificial Sequence
  ENSG00000189007_5 (sequence is synthesized)
tcagaaatcttgaacatgttctgatgaaagaaccaagtgacccaaagtgacctggacaagattcatagactgaaagctgttgacatcgttgaatcatatgtttatatattgtttttaatc

SEQ ID NO: 696720 - DNA, 120 bp, Artificial Sequence
  ENSG00000189007_6 (sequence is synthesized)
tgcaggaaaatggtgtctctcatcatttgctctgttaagggaacaaattagcactttttagaagtctgacaattgtaaacagttattagcttttccagaagctgattcccattttaagat

SEQ ID NO: 696721 - DNA, 120 bp, Artificial Sequence
  ENSG00000189007_7 (sequence is synthesized)
gggggaaaattaaggtttgaggttttagaaattagcaagtagtgcatacccttctagccacaagtgcccagtccaggcaagtgctgacttcttagagaatgtgtggccagacccagggac

SEQ ID NO: 696722 - DNA, 120 bp, Artificial Sequence
  ENSG00000189007_8 (sequence is synthesized)
ctggagtgtgtttggactgcagtttgccaccctgagaacaccttctccaggactggcatttcagaatcagattcttcattttttgcagctacgatgttcttccagggcactgggggctgt

SEQ ID NO: 696723 - DNA, 120 bp, Artificial Sequence
  ENSG00000189007_9 (sequence is synthesized)
gacttctctctaaattgtatataagttgtgtatatagagaccataattatatggtccttagaaaagactttgcttttataaagcatttagaaaaaatgcatacttttaaaacaagtgctt

SEQ ID NO: 696724 - DNA, 120 bp, Artificial Sequence
  ENSG00000189007_10 (sequence is synthesized)
gagttgtcacttaaaaattatagcatattgctataataaaaccttatttatgtcttatttgaagatgaatagtcttaaaagataaagacataaatgggacaattgttattgagcaaaaaa

SEQ ID NO: 696725 - DNA, 120 bp, Artificial Sequence
  ENSG00000189007_11 (sequence is synthesized)
ccaaattatcccaccctcatggagcttatattctagcaaggggagatggatatgatagattacacagtttattggaggacaataagagttatggcaaaaagcaaaaggaacacagggtaa

SEQ ID NO: 696726 - DNA, 120 bp, Artificial Sequence
  ENSG00000189007_12 (sequence is synthesized)
aggggataggtgccatttggtggtgagaatgctgactgaaaaatagaatgatcaatttaatctgaaacaaatggttatttcttttataatccatataataaatttaaaatctaaaatgta

SEQ ID NO: 696727 - DNA, 120 bp, Artificial Sequence
  ENSG00000189007_13 (sequence is synthesized)
aaattttgaacacaacactggaaagggtatccacagcaggaagtccccagttcacctccatgactacagggcagctttgcacagccctctgggcgcactgtgtgcctctgcccagaaggg

SEQ ID NO: 696728 - DNA, 120 bp, Artificial Sequence
  ENSG00000189007_14 (sequence is synthesized)
ggcctcgccgttccaccagaagctcagctccaggccctggaggggctgctgctcctcagttgcatttcttcagtagattcatttccttgatgcaaagcatctgtatttgttggttctgtc

SEQ ID NO: 696729 - DNA, 120 bp, Artificial Sequence
  ENSG00000189007_15 (sequence is synthesized)
atttgagcgatgtctctgacttgtttgttttgaattacattacaggctggaatgtaattgtggtgaaagtatttttatattgctgagagtagcagctaatcacagttacatgcttcagag

SEQ ID NO: 696730 - DNA, 120 bp, Artificial Sequence
  ENSG00000189007_16 (sequence is synthesized)
tgtgtgtgtgtgtgtgtgtgtgtttaactgcatttgaaaagttttatggagaatatgcatgattttaaatctgtgataatgttacatgcaccttcaatttcatccactttaaaaattatc

SEQ ID NO: 696731 - DNA, 120 bp, Artificial Sequence
  ENSG00000189007_17 (sequence is synthesized)
catgcaccttcaatttcatccactttaaaaattatcttctcattgaattttagtgcttctactagtttgttcctttttgcagttggtcgtaattcatttctggcttcttatgctttcctg

SEQ ID NO: 696732 - DNA, 120 bp, Artificial Sequence
  ENSG00000189007_18 (sequence is synthesized)
caagcagatttcattgcatttattgtgttcatatcattttcttggggattatttgtaggacaaccaacctggagttttgcctctctagagtaccacccagtaagtctggctgagcatctt

SEQ ID NO: 696733 - DNA, 120 bp, Artificial Sequence
  ENSG00000189007_19 (sequence is synthesized)
atgtccagtaggttcttggtaaacatttgctaaatgaaattactgattgaaatttggggaaaagtgaataagaagactatctaggacaaaaagccaaagccgaaaatagtatatgagcat

SEQ ID NO: 696734 - DNA, 120 bp, Artificial Sequence
  ENSG00000189007_20 (sequence is synthesized)
tctagcccagagactgtcgctactaaaagaatgaaggaaataataaagtgatagacagggaaggatagaaaagacttaacaatatacatatgttccgtctttgctgttttggagaatgat

SEQ ID NO: 696735 - DNA, 120 bp, Artificial Sequence
  ENSG00000189007_21 (sequence is synthesized)
ggataagtagtgtttcctgattctgaagcatagctgaacaatttaattgtggtttaccatctttttggttccctcttcagtaattaacctatcgaaaatctgtcctaaatgtttggactg

SEQ ID NO: 696736 - DNA, 120 bp, Artificial Sequence
  ENSG00000189007_22 (sequence is synthesized)
gggcacagttccctccatcgctttgggagaaaatcattaatatggcatactgcagattggagggcaggaccactgagggtgtcatagacattagctctatggaattctgctagcaatttc

SEQ ID NO: 696737 - DNA, 120 bp, Artificial Sequence
  ENSG00000189007_23 (sequence is synthesized)
caagtgacagtgaggaattatggatatatgttgaggtcattcagcttcctgagtaccacattccccagctacttagacacgggttaaaatattaagatgtcctagttcaacagcttgaat

SEQ ID NO: 696738 - DNA, 120 bp, Artificial Sequence
  ENSG00000189007_24 (sequence is synthesized)
tccattgattgatactgatagtgcctgtccaagacaccagctgaaagacttgttttgtgtacaaaatagttctgaaagtggtgagatacaaaaaggttttagaatcactgccctgttgag

SEQ ID NO: 696739 - DNA, 120 bp, Artificial Sequence
  ENSG00000189007_25 (sequence is synthesized)
agaaattagggggaaatgattacatttagaagctgctagagttatccagtgtttgctggtctttgcaacaaactgtggagaatgggtggtatgtaatgctttggtaggcttcaatcactg

SEQ ID NO: 696740 - DNA, 120 bp, Artificial Sequence
  ENSG00000189007_26 (sequence is synthesized)
aagatcatgttaaaatatctttgtgctttcttgttacttggcacaaccatctcttcctgtgttgtatttggagtatcatggagagaaaatagatggccaagagcttcagtgtaggcaaga

SEQ ID NO: 696741 - DNA, 85 bp, Artificial Sequence
  ENSG00000189007_27 (sequence is synthesized)
gagagaaaatagatggccaagagcttcagtgtaggcaagaactcttaatttttctttaaactttttactgggaaaagtatatata

SEQ ID NO: 696742 - DNA, 120 bp, Artificial Sequence
  ENSG00000189007_28 (sequence is synthesized)
taccccgaaatgcttcagtatagttattgacttaagtaaatttaacattgatatacttgaatctatcatttgtattacagttttgtcagctgacccaataatgtcctgtaaagaagttct

SEQ ID NO: 696743 - DNA, 120 bp, Artificial Sequence
  ENSG00000189007_29 (sequence is synthesized)
acccaataatgtcctgtaaagaagttctcccactaccctataatcccaggtccagtctagggtccagcattacatttacttgtcttgaatccagctttttcttttttttttttttttttg

SEQ ID NO: 696744 - DNA, 89 bp, Artificial Sequence
  ENSG00000189007_30 (sequence is synthesized)
atcacagctcactgcagcctcaacctggctcaagcaatccttcctctcatgtcaccacacctaatttttttttttttttttttttgtag

SEQ ID NO: 696745 - DNA, 90 bp, Artificial Sequence
  ENSG00000189007_31 (sequence is synthesized)
aactcctaggctgaagcaatcctccttacgtgagccactgcaccggtctgcctttagcttcttttagtctagaacattttcactggcttt

SEQ ID NO: 696746 - DNA, 120 bp, Artificial Sequence
  ENSG00000189007_32 (sequence is synthesized)
cctttagcttcttttagtctagaacattttcactggctttctttgtcttttatgacattgacatttttaaataatacagtcattttgcctcctttctgttttcttcttctttttttaaat

SEQ ID NO: 696747 - DNA, 120 bp, Artificial Sequence
  ENSG00000189007_33 (sequence is synthesized)
aatagaatggtccttgttttaaatttatttgatattttcttgtgattagattcaggtgctggttgatgttaagttcctcacaggatatcacatctggaggcacacaaaggccgtcacacc

SEQ ID NO: 696748 - DNA, 120 bp, Artificial Sequence
  ENSG00000189007_34 (sequence is synthesized)
aaggtgatgtcaattttggtcatctggtcaaggtgttgtcctattccttcactatatagttaccttttttctctgttgcaatgaataagcagtctgtgggaagaggagctgttacatttt

SEQ ID NO: 696749 - DNA, 120 bp, Artificial Sequence
  ENSG00000189007_35 (sequence is synthesized)
aaacagaaaatgtatttgacactgatggaaaggagaggaggaaaattaatgacataaatttcaaagcaactattaaattatttgattgcattcttcctcttttactgtctgccaaaattg

SEQ ID NO: 696750 - DNA, 120 bp, Artificial Sequence
  ENSG00000189007_36 (sequence is synthesized)
ataaaaaaaatttttctaataagaatgttttaaatagtgatatcttaataagcatcaaaattaagcctgagaaataaattctttccttcctaatttcctcctcagcaaaagtaataatta

SEQ ID NO: 696751 - DNA, 120 bp, Artificial Sequence
  ENSG00000189007_37 (sequence is synthesized)
tataaatttcattatgcctgataagatagggttttggaaaatagacctaagatgtttctgatactgcagatgacctatggtgatccaatgggataaacactctaggtaggttgtcatttg

SEQ ID NO: 696752 - DNA, 120 bp, Artificial Sequence
  ENSG00000189007_38 (sequence is synthesized)
gtcataaaatatgagttatcttgggtttccatagagacatctagacttaaaatgttgtaagcactgctactttcaaaatgtcagtaaaaatagcaaaagccaaagctcttgaaaaaatta

SEQ ID NO: 696753 - DNA, 120 bp, Artificial Sequence
  ENSG00000189007_39 (sequence is synthesized)
cttaaatcttttttaaaagtagtatagcgccttgttaaaaatctgtggtgatgccaaagcttgtctttcccagtggtcctacgtgaactggccttatagccccagggaaaccagacacca

SEQ ID NO: 696754 - DNA, 120 bp, Artificial Sequence
  ENSG00000189007_40 (sequence is synthesized)
ggaattggtttctctgccttttggcaaaggaataagactacattgacttcatctatgaagacaactgccaactatttcctttgtaaattgctaattttgtgtagtgaggaaaggagcgat

SEQ ID NO: 696755 - DNA, 120 bp, Artificial Sequence
  ENSG00000189007_41 (sequence is synthesized)
gggcgacgtgatttttatggattagactggtgagttctgctgaaagtttgacatctttaggatcttacattttcttcaagttgagctaatgaaaacaggctcgtgactatttatcacctg

SEQ ID NO: 696756 - DNA, 120 bp, Artificial Sequence
  ENSG00000189007_42 (sequence is synthesized)
atttctaagtggatattgggttgaacaccacatatccatgactattaaggaggcttcatggtgtagtttgacaaaggctctctccttgaccaaacttcagtcaggccctaagtcctcttt

SEQ ID NO: 696757 - DNA, 120 bp, Artificial Sequence
  ENSG00000189007_43 (sequence is synthesized)
ttaaccaggcctccaccttggcccccattcttgatgggcctatacagcccagctttagcaagaatcctgctaagctagtttagagagaatcccacatccccaatatctatgaaatttctc

SEQ ID NO: 696758 - DNA, 120 bp, Artificial Sequence
  ENSG00000189007_44 (sequence is synthesized)
atcccctacttttgatgtgtaagtccttggcctcccttcaacgagaagcctgttaagttcattttgcaagaactctactcttgatatctcctcttagtaatttcctaatcactgaccccc

SEQ ID NO: 696759 - DNA, 120 bp, Artificial Sequence
  ENSG00000189007_45 (sequence is synthesized)
tcactctgcccattagttataaacccccacatgttctggttgtattcagagctgagcctgatctcttcctcttgttgggatagttttaaaacctgcgatagttttaaaacctatcactgt

SEQ ID NO: 696760 - DNA, 120 bp, Artificial Sequence
  ENSG00000189007_46 (sequence is synthesized)
agtcctgaattaagtcttccttaccttaacaagtgtcaaaataaatttttctttaacatgttgaagcatgaacttgagaatctagagcaggagtccacaaagtatggcccatgggccata

SEQ ID NO: 696761 - DNA, 120 bp, Artificial Sequence
  ENSG00000189007_47 (sequence is synthesized)
tccagcccgctgccggtttcggtaccactcatgacttaaaaatgggtcttacaattctgagtgattgaaaaaaaatcaaaagaaggataatatttagtgacccatgaaccttatatggca

SEQ ID NO: 696762 - DNA, 120 bp, Artificial Sequence
  ENSG00000189007_48 (sequence is synthesized)
atcaaatttcagtgtccataaataaagttacattggatgacagccatgcccatttgtttctgtgttgtctgtggctgctcgtgtgctacaatggcagagttgagcagtggtgacaaacca

SEQ ID NO: 696763 - DNA, 120 bp, Artificial Sequence
  ENSG00000189007_49 (sequence is synthesized)
tgcgactcacaaaggcctaaaatatttagcgtctggcccttcgagaaaatgttagctgcccctggtctagagtaggtaaaaggctgagattggaagctgcttgttcaaattctgtgattg

SEQ ID NO: 696764 - DNA, 120 bp, Artificial Sequence
  ENSG00000189007_50 (sequence is synthesized)
gaaccgaatgatgtggctcattgtacagctcatggtgaattgcttcagtaccatggttttgttttttccttttgaaaagttggtctataaatgtaaaggaaaaatctaagataccaaaat

SEQ ID NO: 696765 - DNA, 120 bp, Artificial Sequence
  ENSG00000189007_51 (sequence is synthesized)
atgttttctggcttagaatgttttatttccttgtatacattttaagagagtggcaaggagaaaagataatgtatcattttatttgggtttagaataaataatacattttatttatgatca

SEQ ID NO: 696766 - DNA, 120 bp, Artificial Sequence
  ENSG00000189007_52 (sequence is synthesized)
gagtggtggctgggtatggaggcgaaggcggcacccaagccagctgcaagcggcgcgtgctcggtgtcggcagaggagaccgaaaagtggatggaggaggcgatgcacatggaaatattt

SEQ ID NO: 696767 - DNA, 120 bp, Artificial Sequence
  ENSG00000189007_53 (sequence is synthesized)
ctttaaggactcatcaaactgtgtgcaaacaaggtctgtttccatctctcccccttttatcatgacatcactagaaagcagtttatagtagtaatgtctttggagaaaataataaactac

SEQ ID NO: 696768 - DNA, 120 bp, Artificial Sequence
  ENSG00000189007_54 (sequence is synthesized)
ggccctgactagagaaaaaaaagaaattatattcaaggacaaaatagagaccagtgtttgggctgggaagaacagagattttattctttaattttgaaggttgatcatttgttactttat

SEQ ID NO: 696769 - DNA, 120 bp, Artificial Sequence
  ENSG00000189007_55 (sequence is synthesized)
gaaaaaccttgtagccatttttaaatagtatctgatcttggtctttccccctaaaaaaggcaagaaaggttaaattcaaagctacctgcacaaatttcagacccattttgcctgagcttt

SEQ ID NO: 696770 - DNA, 120 bp, Artificial Sequence
  ENSG00000189007_56 (sequence is synthesized)
agtgtggctgtaccattttatattccgaccagcagtatatgagtaatatcacttctccacagccttgccagcatttgatgttgtttttacgtttcactttagtcatgctgatgggtgtgt

SEQ ID NO: 696771 - DNA, 120 bp, Artificial Sequence
  ENSG00000189007_57 (sequence is synthesized)
agtgatacctcattgtggttttagttgacatttctctaccggctaatgatgtgaaaacatcttttcgtgtacttatttgctatgtgtgttatcttctttggtgaaatgtctgtcttttgc

SEQ ID NO: 696772 - DNA, 120 bp, Artificial Sequence
  ENSG00000189007_58 (sequence is synthesized)
cttctcatatagtttggatatttgtcgcctccaaatttcatgttgaaattgaatccctggtattagtagcagggcctggtgggaagtttggatcatggggaggatacctcataaatcatt

SEQ ID NO: 696773 - DNA, 120 bp, Artificial Sequence
  ENSG00000189007_59 (sequence is synthesized)
tttatagtggcaagttctcactatattattatcatgagaatataccatcccctcctttctttcttcttctcttaccatgtgatgcctgctcccattgccttctgccatgagtggaagctt

SEQ ID NO: 696774 - DNA, 120 bp, Artificial Sequence
  ENSG00000189013_0 (sequence is synthesized)
agaagctgcaccatgtccatgtcacccacggtcatcatcctggcatgtcttgggttcttcttggaccagagtgtgtgggcacacgtgggtggtcaggacaagcccttctgctctgcctgg

SEQ ID NO: 696775 - DNA, 120 bp, Artificial Sequence
  ENSG00000189013_1 (sequence is synthesized)
cccagcgctgtggtgcctcaaggaggacacgtgactcttcggtgtcactatcgtcgtgggtttaacatcttcacgctgtacaagaaagatggggtccctgtccctgagctctacaacaga

SEQ ID NO: 696776 - DNA, 120 bp, Artificial Sequence
  ENSG00000189013_2 (sequence is synthesized)
atattctggaacagtttcctcattagccctgtgaccccagcacacgcagggacctacagatgtcgaggttttcacccgcactcccccactgagtggtcggcacccagcaaccccctggtg

SEQ ID NO: 696777 - DNA, 120 bp, Artificial Sequence
  ENSG00000189013_3 (sequence is synthesized)
atcatggtcacaggtctatatgagaaaccttcgcttacagcccggccgggccccacggttcgcgcaggagagaacgtgaccttgtcctgcagctcccagagctcctttgacatctaccat

SEQ ID NO: 696778 - DNA, 120 bp, Artificial Sequence
  ENSG00000189013_4 (sequence is synthesized)
ctatccagggagggggaagcccatgaacttaggctccctgcagtgcccagcatcaatggaacattccaggccgacttccctctgggtcctgccacccacggagagacctacagatgcttc

SEQ ID NO: 696779 - DNA, 120 bp, Artificial Sequence
  ENSG00000189013_5 (sequence is synthesized)
ggctctttccatggatctccctacgagtggtcagacccgagtgacccactgcctgtttctgtcacaggaaacccttctagtagttggccttcacccactgaaccaagcttcaaaactgat

SEQ ID NO: 696780 - DNA, 120 bp, Artificial Sequence
  ENSG00000189013_6 (sequence is synthesized)
taatgaaccaagagcctgcgggacacagaacagtgaacagggaggactctgatgaacaagaccctcaggaggtgacatacgcacagttggatcactgcattttcacacagagaaaaatca

SEQ ID NO: 696781 - DNA, 120 bp, Artificial Sequence
  ENSG00000189013_7 (sequence is synthesized)
ctggcccttctcagaggagcaagagaccctcaacagataccagcgtgtgtatagaacttccaaatgctgagcccagagcgttgtctcctgcccatgagcaccacagtcaggccttgatgg

SEQ ID NO: 696782 - DNA, 120 bp, Artificial Sequence
  ENSG00000189013_8 (sequence is synthesized)
gatcttctagggagacaacagccctgtctcaaacccagcttgccagctctaatgtaccagcagctggaatctgaaggcgtgagtctccatcttagagcatcactcttcctcacaccacaa

SEQ ID NO: 696783 - DNA, 120 bp, Artificial Sequence
  ENSG00000189013_9 (sequence is synthesized)
atctggtgcctgtctcttgcttaccaatgtctaaggtccccactgcctgctgcagagaaaacacactcctttgcttagcccacaattctctatttcacttgacccctgcccacctctcca

SEQ ID NO: 696784 - DNA, 120 bp, Artificial Sequence
  ENSG00000189013_10 (sequence is synthesized)
acctaactggcttacttcctagtctacttgaggctgcaatcacactgaggaactcacaattccaaacatacaagaggctctctcttaacacggcacttagacacgtgctgttccaccttc

SEQ ID NO: 696785 - DNA, 120 bp, Artificial Sequence
  ENSG00000189013_11 (sequence is synthesized)
cctcgtgctgttccacctttcctcagactatttttcagccttctggcatcagcaaaccttataaaatttttttgatttcagtgtagttctctcctcttcaaataaacatgtctgccttca

SEQ ID NO: 696786 - DNA, 120 bp, Artificial Sequence
  ENSG00000189013_12 (sequence is synthesized)
tccttcccttctttctccttcatcgctggtgctccaaaaaaaaagtaagcctcacgaagcagaggccagagaactcagggccctgtgcggaagcaggatgggagcacgcagatgctgctg

SEQ ID NO: 696787 - DNA, 120 bp, Artificial Sequence
  ENSG00000189023_0 (sequence is synthesized)
agtctgatataggcagtgtcgtgtcggcagaggaaggcatctcaggccctgcaggagtccaggcagtgattcttcattgcctgccctcctgtccacactcctgcctactgccacccacaa

SEQ ID NO: 696788 - DNA, 120 bp, Artificial Sequence
  ENSG00000189023_1 (sequence is synthesized)
gggtcatcatgtctcaggatcaggagagtccacgatgcacacatgatcagcaccttcagaccttcagtgagacccagagcctggaggttgcacaggtctccaaggctctggagaagaccc

SEQ ID NO: 696789 - DNA, 120 bp, Artificial Sequence
  ENSG00000189023_2 (sequence is synthesized)
tcctctcctcctcccatcctctagtgcctggcaaactgaaggaagctcctgctgctaaggcagagagtcctcttgaggttcctcagagtttctgctcctcttccattgccgtcacaacca

SEQ ID NO: 696790 - DNA, 120 bp, Artificial Sequence
  ENSG00000189023_3 (sequence is synthesized)
cctcatcaagtgaatctgatgaggcttccagcaatcaagaagaggaagatagtccaagctcctcagaggatacatcagaccccaggaatgtgcccgcagatgctctcgaccagaaagtgg

SEQ ID NO: 696791 - DNA, 120 bp, Artificial Sequence
  ENSG00000189023_4 (sequence is synthesized)
cttttttggtgaatttcatgctgcacaagtgtcagatgaaaaagccaataacaaaggcagatatgttgaagattatcatcaaagatgatgagagccacttctctgagatcctcctgagag

SEQ ID NO: 696792 - DNA, 120 bp, Artificial Sequence
  ENSG00000189023_5 (sequence is synthesized)
cttctgagcacctagagatgatatttggccttgatgtggtggaggtggaccccaccacccattgctatggcctcttcatcaaactgggcctcacctatgatgggatgctgagtggtgaaa

SEQ ID NO: 696793 - DNA, 120 bp, Artificial Sequence
  ENSG00000189023_6 (sequence is synthesized)
gtatattctgggaagaagcacttcatctttggagagcccagaatgctcatcaccaaagattttgtgaaggagaagtacctggagtaccagcaggtggccaacagtgatcctgcacgatat

SEQ ID NO: 696794 - DNA, 120 bp, Artificial Sequence
  ENSG00000189023_7 (sequence is synthesized)
gaattcctgtggggcccaagagccaaagctgaaaccagcaagatgaaagtcctggagtttgtggccaaagttcatgggtcttacccacattctttcccatctcagtatgcggaagctctg

SEQ ID NO: 696795 - DNA, 120 bp, Artificial Sequence
  ENSG00000189023_8 (sequence is synthesized)
aaagaggaagaagagagagctagagccagaatttgagtcagggctgactccatttccacagccactgtgagttccagtgctatgtctggtagcttctcccatacctagtgaagacaagga

SEQ ID NO: 696796 - DNA, 120 bp, Artificial Sequence
  ENSG00000189023_9 (sequence is synthesized)
tagatgttttatgtaacatttgcagaaggcagttagtgttcaaggatgcaggtccagggtggggctggaggaaaaatagtatatatcatctatatccctattttgtatgtgtaacttgac

SEQ ID NO: 696797 - DNA, 120 bp, Artificial Sequence
  ENSG00000189023_10 (sequence is synthesized)
agtttattcttttattttttaatggctatattattcagatgatgtttcttttaatagaagtttaggtagtttccagatctcttaagttttgaataatattggtcatccatttaatgtttt

SEQ ID NO: 696798 - DNA, 120 bp, Artificial Sequence
  ENSG00000189023_11 (sequence is synthesized)
tcatgaggtttagtggcatatgttttgctgattttgtaaaacagattgggaaaccatctatattgtgttctgatataggatgacatgacattactaagaactctgcttttaaatatccgt

SEQ ID NO: 696799 - DNA, 120 bp, Artificial Sequence
  ENSG00000189023_12 (sequence is synthesized)
ttaatgttttgcatgcagtttagtagcaaaggttttgttaattttgtaaaacagattagaaaaccatccatctatattgtgttctagtatagcatgacatgacattgctaagaactttgc

SEQ ID NO: 696800 - DNA, 120 bp, Artificial Sequence
  ENSG00000189023_13 (sequence is synthesized)
tgtgacgaccttatctgaggaaggtgcaccctagtcatcagaggaacgagtcgctgcaggcactgtcaggtgtcgaggtgactcaggaggatgaggtattcttgaaggtggagagtggca

SEQ ID NO: 696801 - DNA, 120 bp, Artificial Sequence
  ENSG00000189023_14 (sequence is synthesized)
tgtgacgaccttatctgaggaaggtgcaccctagtcatcagaggaacgagtcgctgcaggcactgtcaggtgtcgaggcagtgattcttcattgcctgccctcctgtccacactcctgcc

SEQ ID NO: 696802 - DNA, 120 bp, Artificial Sequence
  ENSG00000189023_15 (sequence is synthesized)
tgtgacgaccttatctgaggaaggtgcaccctagtcatcagaggaacgagtcgctgcaggcactgtcaggtgtcgaggtaaaactctgagactgagggaaatagagcgccctgcagataa

SEQ ID NO: 696803 - DNA, 120 bp, Artificial Sequence
  ENSG00000189023_16 (sequence is synthesized)
gagccccaggccctgcagtcaactctgggaggccgtgggctggactttcaggctgaacccaccccacatttctccctcgggaatctgattaaggcagtgattcttcattgcctgccctcc

SEQ ID NO: 696804 - DNA, 120 bp, Artificial Sequence
  ENSG00000189023_17 (sequence is synthesized)
tgtgacgaccttatctgaggaaggtgcaccctagtcatcagaggaacgagtcgctgcaggcactgtcaggtgtcgaggagtggcattagctatcagaagatggggactgaagcccaacca

SEQ ID NO: 696805 - DNA, 120 bp, Artificial Sequence
  ENSG00000189030_0 (sequence is synthesized)
ctcccagcctttctgattccattgtaactcttgccgaaatccgggtgaacggaagtagtctctttaagaactggtatgggcaggcccaagttgtcaaggcttcggaggtaatgccctgga

SEQ ID NO: 696806 - DNA, 120 bp, Artificial Sequence
  ENSG00000189030_1 (sequence is synthesized)
gagcggggaacggggtgggtttagaggcccaggcgggcacccaggaggcaggcccagaagagtactgccaggaagagttgggcgccgaggaggagatggcagccagagcagcatggcctg

SEQ ID NO: 696807 - DNA, 120 bp, Artificial Sequence
  ENSG00000189030_2 (sequence is synthesized)
gtggctcaactactatggcaagctgctgccctacctgacgctgctgcccggcagggacttccgcatccacaacttccgaagccacccttggctcttcagagatgcaaggacacatgataa

SEQ ID NO: 696808 - DNA, 120 bp, Artificial Sequence
  ENSG00000189030_3 (sequence is synthesized)
gcttctggttaaccaaactgaattgtttgtgccatcttccaatgttaatggacagcctgtttttgccaacatcacactgcagtgtataccctgaaagagcaatgcctccaggttgtcgga

SEQ ID NO: 696809 - DNA, 120 bp, Artificial Sequence
  ENSG00000189030_4 (sequence is synthesized)
agcctagtcaagcccaagaattacaggagactggacatcgtcagatcactctatgacgatctggaagatcatccaaatgtgattgaaagacctggagcggctgacgcaggagcacagtga

SEQ ID NO: 696810 - DNA, 120 bp, Artificial Sequence
  ENSG00000189037_0 (sequence is synthesized)
ctctttctccaacacctagcctgagacttggcggcgcggctgctatcctgaactagcttggtaagtgttgtgtcccgaaccagcgtagagagacctcggaccagccgccttgatgacagc

SEQ ID NO: 696811 - DNA, 120 bp, Artificial Sequence
  ENSG00000189037_1 (sequence is synthesized)
atccgcgtcctccttttcatcatctcagggtgtccagcagccctccatctacagcttctcccaaataaccagaagcttgtttctcagcaatggtgtggccgccaacgacaaactccttct

SEQ ID NO: 696812 - DNA, 120 bp, Artificial Sequence
  ENSG00000189037_2 (sequence is synthesized)
gtccagcaatcgcatcaccgccattgtcaatgcctcggtggaagtggtcaacgtattcttcgagggcattcagtacataaaggtgcctgttaccgatgctcgtgactcgcgtctctacga

SEQ ID NO: 696813 - DNA, 120 bp, Artificial Sequence
  ENSG00000189037_3 (sequence is synthesized)
cacaccatcgatatgaggcagggccgtacgctgctgcactgcatggctggagtgagccgttccgcctcactgtgccttgcgtacctcatgaaataccactccatgtcgctgctggacgcc

SEQ ID NO: 696814 - DNA, 120 bp, Artificial Sequence
  ENSG00000189037_4 (sequence is synthesized)
catacatggaccaagtcgcgccgccccatcatccggcccaacaacggcttttgggaacagctcatcaattacgaattcaagctgtttaataacaacaccgtgcgcatgatcaactcgccg

SEQ ID NO: 696815 - DNA, 120 bp, Artificial Sequence
  ENSG00000189037_5 (sequence is synthesized)
gtaggtaacatccctgacatctatgagaaggacctacgtatgatgatatcaatgtaagccatcccggccagcccctgacatctgccatcgatcttgcaccaagactgaacttgaacactg

SEQ ID NO: 696816 - DNA, 120 bp, Artificial Sequence
  ENSG00000189037_6 (sequence is synthesized)
acattttgttagtaaagaaaaccggatggtgccttgttaaagggcaagaaaaaagggagggggttggagttttgaacgtagtaagccttaccttaatagaattaaattcatgaaacataa

SEQ ID NO: 696817 - DNA, 120 bp, Artificial Sequence
  ENSG00000189042_0 (sequence is synthesized)
accgaaggtgaggctggtgggtcccgcgggcgcggagaaggcgggtgacggtgtgaccctctttagctctcatggattgggagctgggaaaggaatgagaagacagaagtcagagacaag

SEQ ID NO: 696818 - DNA, 120 bp, Artificial Sequence
  ENSG00000189042_1 (sequence is synthesized)
aagaggctaacatgactgataccactataatttagtgaactgcctcttttctaaagaggactccaaaggaaggactggtcatctctttcatatctcaaaaccatggctcagggatcagtg

SEQ ID NO: 696819 - DNA, 120 bp, Artificial Sequence
  ENSG00000189042_2 (sequence is synthesized)
tctttcaatgatgtgactgtggacttcactcaggaggagtggcagcacctggatcatgctcagaagactctatatatggatgtgatgttggaaaactattgccacctcatctctgtgggg

SEQ ID NO: 696820 - DNA, 120 bp, Artificial Sequence
  ENSG00000189042_3 (sequence is synthesized)
tgtcacatgaccaaacctgatgtgatcctcaagttggaacgaggagaagagccatggacatcatttgcaggtcatacctgcttggaagaaaactggaaagctgaagactttttagtgaaa

SEQ ID NO: 696821 - DNA, 120 bp, Artificial Sequence
  ENSG00000189042_4 (sequence is synthesized)
ttcaaggaacaccaagagaagtattctagatcagttgtaagcatcaaccacaaaaaactggtgaaggagaagagtaaaatatatgaaaagacatttactctaggcaaaaaccctgtgaat

SEQ ID NO: 696822 - DNA, 120 bp, Artificial Sequence
  ENSG00000189042_5 (sequence is synthesized)
tcaaaaaatctacctcctgaatatgatactcatggaaggattttgaaaaatgtttcagaattaatcatcagtaatctaaatcctgcaagaaagagacttagtgagtataatggatatggg

SEQ ID NO: 696823 - DNA, 120 bp, Artificial Sequence
  ENSG00000189042_6 (sequence is synthesized)
aaatcactcctgagtactaaacaagagactactcatcctgaagtcaaatcccataatcaaagtgccagagctttcagtcataatgaagttcttatgcagtatcagaaaacggaaactcca

SEQ ID NO: 696824 - DNA, 120 bp, Artificial Sequence
  ENSG00000189042_7 (sequence is synthesized)
gcacagtcatttggatataatgactgtgagaaatcattccttcaaaggggaggcctgattacacatagtagaccttacaaaggagaaaacccatctgtatataataaaaaaagaagagca

SEQ ID NO: 696825 - DNA, 120 bp, Artificial Sequence
  ENSG00000189042_8 (sequence is synthesized)
accaatattgaaaaaaaacatacatgcaatgaatgtgggaaatctttctgcaggaaatcagtattgattctgcatcagggaattcactcagaagaaaaaccctatcaatgtcatcaatgt

SEQ ID NO: 696826 - DNA, 120 bp, Artificial Sequence
  ENSG00000189042_9 (sequence is synthesized)
ggaaatgcatttagaaggaaatcatatctcattgatcatcagagaactcacacaggagagaaaccctttgtttgcaatgaatgtggtaagtccttccgcctcaagacagccctcactgat

SEQ ID NO: 696827 - DNA, 120 bp, Artificial Sequence
  ENSG00000189042_10 (sequence is synthesized)
catcagagaacacacacaggggagaaatcgtatgaatgtctgcaatgtaggaatgccttcagattgaagtcacacctcattcgtcatcagagaactcacacgggagagaaaccatatgag

SEQ ID NO: 696828 - DNA, 120 bp, Artificial Sequence
  ENSG00000189042_11 (sequence is synthesized)
aggtgagaaaccctacatttgtaaagaatgtgggaagtcctttcaccagaaggcaaatcttactgtacatcagagaactcatacaggggaaaagccctatatttgtaatgaatgtgggaa

SEQ ID NO: 696829 - DNA, 120 bp, Artificial Sequence
  ENSG00000189042_12 (sequence is synthesized)
atccttctcccagaagacaacccttgctcttcatgagaaaactcataatgaggagaaaccctatatttgtagtgaatgtggaaagtccttccgccagaagacaacccttgtagcacatca

SEQ ID NO: 696830 - DNA, 120 bp, Artificial Sequence
  ENSG00000189042_13 (sequence is synthesized)
gagaacacatacaggggagaaatcttatgaatgtcctcactgtgggaaggcctttagaatgaagtcatacctcattgatcatcaccgaactcacacaggagagaaaccatatgaatgtaa

SEQ ID NO: 696831 - DNA, 120 bp, Artificial Sequence
  ENSG00000189042_14 (sequence is synthesized)
tgaatgtggtaaatcattcagtcaaaagacaaatctcaatctacatcagagaattcatacaggggagaaaccctatgtttgtaatgaatgtgggaagtcctttcgccagaaagcaaccct

SEQ ID NO: 696832 - DNA, 120 bp, Artificial Sequence
  ENSG00000189042_15 (sequence is synthesized)
cactgtacatcagaaaatacataccggccagaaatcctatgaatgtcctcagtgtgggaaagcctttagcaggaagtcatatctcattcatcatcaaagaactcatacgggagagaaacc

SEQ ID NO: 696833 - DNA, 120 bp, Artificial Sequence
  ENSG00000189042_16 (sequence is synthesized)
atataaatgtagtgaatgtggaaagtgcttccgccagaagacaaatcttattgtacatcagagaactcacacaggtgagaaaccctatgtttgtaatgagtgtggtaagtctttcagtta

SEQ ID NO: 696834 - DNA, 120 bp, Artificial Sequence
  ENSG00000189042_17 (sequence is synthesized)
taagagaaacctcattgtccatcaaagaactcacaagggagaaaacattgaaatgcaataaatgatgtggtttcttatatgaattctttacaagctgttgtaaacatttagttttaaaaa

SEQ ID NO: 696835 - DNA, 120 bp, Artificial Sequence
  ENSG00000189042_18 (sequence is synthesized)
gaaaagcatgctgaaacatgttaatgtaattttaaatcacaagtctaataattattaaagtaccatacggaataactgtctactgtttactagcatataaaataagtatgatcattatta

SEQ ID NO: 696836 - DNA, 120 bp, Artificial Sequence
  ENSG00000189042_19 (sequence is synthesized)
ttgaactctatcagctatgaagctaaattttaaagtcaactgctcttcctactgactcaaatagtttattttttaaaaatacttatataatacatgcagagacaagatacacaatgatta

SEQ ID NO: 696837 - DNA, 120 bp, Artificial Sequence
  ENSG00000189042_20 (sequence is synthesized)
taagtattaatctccataagagaaaatatttatgaactatatttctcattgcactctgtaataaaaagcagttagttgttacttacctaagagttaccacttccgtagcctataacatca

SEQ ID NO: 696838 - DNA, 120 bp, Artificial Sequence
  ENSG00000189042_21 (sequence is synthesized)
aaacgtagtttttgcatgttttcaattttataaatatatattttatcagacatcatgaattattttgtgtcttgcttatttcactcaattttttaagatctgtacattattgcatgtggc

SEQ ID NO: 696839 - DNA, 120 bp, Artificial Sequence
  ENSG00000189042_22 (sequence is synthesized)
agtagtgtattttcattttgcatactattccattttaagaatatattgctgtttatcctattgatggatatttgtattttttatacttttgtgtaataataaaaatactgctgtaaatat

SEQ ID NO: 696840 - DNA, 120 bp, Artificial Sequence
  ENSG00000189042_23 (sequence is synthesized)
aacccaccaaagatttggggaacatgtgagtcacattctctgggacattctactcccctttgattttgcatttccagacatttcagtggctaccacaaaaaataaaaagtatctgtggca

SEQ ID NO: 696841 - DNA, 120 bp, Artificial Sequence
  ENSG00000189042_24 (sequence is synthesized)
tcatacctgcttgggtggagaggatggcctaactggatgtttatcctagcgtcaacccaccaaagatttggggaacatatggagtctcacttcttcacccaggctggagtacaatggtgc

SEQ ID NO: 696842 - DNA, 120 bp, Artificial Sequence
  ENSG00000189042_25 (sequence is synthesized)
cttttcgttagcagaatgaatgattgtgtcttcacttacccagtgcaaggtgctacctatattgttacacaaatgggtgtcttaatttgcagtactgaacatgcccctttcctcattttt

SEQ ID NO: 696843 - DNA, 120 bp, Artificial Sequence
  ENSG00000189042_26 (sequence is synthesized)
tttagtagagacagggtcttgccatgttagctgggctggttttgaactcctgacctcagatgagccaccacgcccagcctcaagctctcgtttctgtcctcccgtcacctttgaggaagt

SEQ ID NO: 696844 - DNA, 120 bp, Artificial Sequence
  ENSG00000189042_27 (sequence is synthesized)
gaggaagtaagtggtggttttatgccatgagagctgtggggtttcaggtaccatgatgcaaaaacagccacaaaattagcagttcttgtacattgcagttgctatccttcaaggataagc

SEQ ID NO: 696845 - DNA, 120 bp, Artificial Sequence
  ENSG00000189042_28 (sequence is synthesized)
tcttttccagtttccgcctgctttggttgctttccagtgctattagttgtttattgtatggcatgtgcacattttataattattatctgagggaaagtgtccctgactgttttactctgt

SEQ ID NO: 696846 - DNA, 120 bp, Artificial Sequence
  ENSG00000189042_29 (sequence is synthesized)
taatgctgcatgctgaaaaatctcaccatgcacatacaatattcctccttagtgaagcctgagaaattgttctacctttgtgatacatgctgtatcttgtacatacttctttgttgtacc

SEQ ID NO: 696847 - DNA, 120 bp, Artificial Sequence
  ENSG00000189042_30 (sequence is synthesized)
tgtgacaccttcttgcaggtttgtgtttacttacattttcttgcaagtatgtgttacatgcctctggtaacttctgagcagaaacagtgtttgtcttggcacttccataaataaatacag

SEQ ID NO: 696848 - DNA, 120 bp, Artificial Sequence
  ENSG00000189042_31 (sequence is synthesized)
tttttggcattaagtggcttcacagtaaatattcttagaatgtgttatttaaaaactaactgatggatatttttaccttgatttttgttttccctacaatataaatcataaaacagggaa

SEQ ID NO: 696849 - DNA, 120 bp, Artificial Sequence
  ENSG00000189042_32 (sequence is synthesized)
aattgtagtctttctatattaggattcgtatgactgccacaaggaagcagggtcaaaagtagttcccaatatccagtccacctgttctttttcttttccttttttttgacagagtcctgc

SEQ ID NO: 696850 - DNA, 88 bp, Artificial Sequence
  ENSG00000189042_33 (sequence is synthesized)
gcagtggcatgatctgggctcactgcatcctccgcctcctgtgtaactgggattacaggcgcacaccactatgcccagctaatttttt

SEQ ID NO: 696851 - DNA, 120 bp, Artificial Sequence
  ENSG00000189043_0 (sequence is synthesized)
ggaagtccgtagtgtctcattgcagataatttttagcttagggcctggtggctaggtcggttctctcctttccagtcggagacctctgccgcaaacatgctccgccagatcatcggtcag

SEQ ID NO: 696852 - DNA, 120 bp, Artificial Sequence
  ENSG00000189043_1 (sequence is synthesized)
gccaagaagcatccgagcttgatccccctctttgtatttattggaactggagctactggagcaacactgtatctcttgcgtctggcattgttcaatccagatgtttgttgggacagaaat

SEQ ID NO: 696853 - DNA, 120 bp, Artificial Sequence
  ENSG00000189043_2 (sequence is synthesized)
aacccagagccctggaacaaactgggtcccaatgatcaatacaagttctactcagtgaatgtggattacagcaagctgaagaaggaacgtccagatttctaaatgaaatgtttcactata

SEQ ID NO: 696854 - DNA, 120 bp, Artificial Sequence
  ENSG00000189043_3 (sequence is synthesized)
acgctgctttagaatgaaggtcttccagaagccacatccgcacaattttccacttaaccaggaaatatttctcctctaaatgcatgaaatcatgttggagatctctattgtaatctctat

SEQ ID NO: 696855 - DNA, 120 bp, Artificial Sequence
  ENSG00000189043_4 (sequence is synthesized)
tggagattacaatgattaaatcaataaataactgaaacttgatatgtgtcacttttttatgctgaaagtatgctctgaactttagagtataggaaattaactattagaatttaaagaatt

SEQ ID NO: 696856 - DNA, 120 bp, Artificial Sequence
  ENSG00000189043_5 (sequence is synthesized)
tcttgaatttctgtagtttgaaaatacgactttaagctgctttagtaaaacacttccattttgtgtatagactgttggtaacttcactagagcatacataacaactggaactggaaatta

SEQ ID NO: 696857 - DNA, 120 bp, Artificial Sequence
  ENSG00000189043_6 (sequence is synthesized)
tacaaaagtaaattgggaaggatactccagcatctgacactggcaaaatggaaacctttgagtttctcttactggctgttgaagtgtgtgcagtttttaacaatggtttttacttggcat

SEQ ID NO: 696858 - DNA, 120 bp, Artificial Sequence
  ENSG00000189043_7 (sequence is synthesized)
ctctttgttgtgattttcaaggttataagttgctttggtcctaggattgaagttgaaatctgagtttatcagtgctaaccatggtgctagtagtcaagagatcttgagaattttggctgc

SEQ ID NO: 696859 - DNA, 90 bp, Artificial Sequence
  ENSG00000189043_8 (sequence is synthesized)
gctggagtgcagtggtacaaacatggatcactgcagcctctacctcccgggcttaagtgatcctcctgcctcagcccctaagtagcctta

SEQ ID NO: 696860 - DNA, 78 bp, Artificial Sequence
  ENSG00000189043_9 (sequence is synthesized)
tctcctcatagccatggtgcaggttttcaaaggccaggaagtatattcataattttaagatggggaatatagcaagtt

SEQ ID NO: 696861 - DNA, 120 bp, Artificial Sequence
  ENSG00000189043_10 (sequence is synthesized)
aagtatattcataattttaagatggggaatatagcaagttttcacataggtgtgtgtaagtcatcacatcatagaaacttgaggaattcagtgacattaattttggattttcatacgtaa

SEQ ID NO: 696862 - DNA, 120 bp, Artificial Sequence
  ENSG00000189043_11 (sequence is synthesized)
gtatacaattaaatgtttacagggtagtagaagcacattttaaatgtcaggaactgaactaagtatttgaattacgtggattatctcaaaaattttgaaattgttaaacgagttgaatta

SEQ ID NO: 696863 - DNA, 120 bp, Artificial Sequence
  ENSG00000189043_12 (sequence is synthesized)
cttgaattcattctgttagtcaaatggtggatatttacacccatgtagttttgaatttagagtgtgtagagtgttttcagttaccagactccatgcttttacctcctatgtgtcaggtat

SEQ ID NO: 696864 - DNA, 120 bp, Artificial Sequence
  ENSG00000189043_13 (sequence is synthesized)
aatttgaacctctaagaacagggtttctcaaccttgccactgttgactatttctgaaagacagtttggtttagcagaccatcccatgcgctttagcttgtttagtagctaacttgggctc

SEQ ID NO: 696865 - DNA, 120 bp, Artificial Sequence
  ENSG00000189043_14 (sequence is synthesized)
tgccactacagacaaaaagcactctttccctccaattcccacaggctatgagaagaatggagacattaccaaatgtccattggtgggcaaaattgcttcattcctacctctgttgagaat

SEQ ID NO: 696866 - DNA, 120 bp, Artificial Sequence
  ENSG00000189043_15 (sequence is synthesized)
tactctagatcctttggcacaaattacctcaaagtttaaaattgtgtaaacaaacagtgtgtcatgtaattgaaaaacattaagcaactccaaataaatgctacattaagaaattagtaa

SEQ ID NO: 696867 - DNA, 120 bp, Artificial Sequence
  ENSG00000189043_16 (sequence is synthesized)
cctcaatgtaagatctactttatttaaattttaagacaaaacagtccaataacagtttgagacttggaaatcaatgtgcagaaactactgtaatctctcgttggccagtgttttaagtat

SEQ ID NO: 696868 - DNA, 120 bp, Artificial Sequence
  ENSG00000189043_17 (sequence is synthesized)
ctcggcacatgtaaatgttttttgccttcacttgcacatttgcagttgaaaaacaatagacaatcaaaagattgattcatcattattctatgcacttttctgtatatcactttattaatt

SEQ ID NO: 696869 - DNA, 120 bp, Artificial Sequence
  ENSG00000189043_18 (sequence is synthesized)
aaatggaaaggttttgtgaaagccagataaaaagtatcttgtgatagggattctgtgttctaccttttttctaattgattacatgagattgcttattatagatcctctacctgtttcaac

SEQ ID NO: 696870 - DNA, 120 bp, Artificial Sequence
  ENSG00000189043_19 (sequence is synthesized)
atgaaataacaccatacctcatctaatagaaaataagattgatctgttcaaaaatgtattcttagtacaaaacactaaatagtgctttattattataacagtcgtaatgttttatttctt

SEQ ID NO: 696871 - DNA, 120 bp, Artificial Sequence
  ENSG00000189043_20 (sequence is synthesized)
ccaatgatcaatacaaggtaaactacaaaattgttttaaagttgttagaaattgtgttgtaataagttttgtcatggggtgggttttcttgaaactggatatacgagtaaaattccatta

SEQ ID NO: 696872 - DNA, 120 bp, Artificial Sequence
  ENSG00000189043_21 (sequence is synthesized)
tattgaactttaaagagctgttaggtagttctgtgaaatgaaaatggtatattgctctaataaatattttttgctaggtatttaattgctagtataagaaaagaaggaaaaatagtatag

SEQ ID NO: 696873 - DNA, 120 bp, Artificial Sequence
  ENSG00000189043_22 (sequence is synthesized)
attgtggggttttgtctgacaggaggaaggagacggacactgctcggaaaaaaaacctagttttttctagttagtgaatattggaacagtctggtggccgctctcttttgcaggttgtgc

SEQ ID NO: 696874 - DNA, 120 bp, Artificial Sequence
  ENSG00000189043_23 (sequence is synthesized)
ggtccaggagggatagatgtgcgctgtgtgggtcagagactagcataggtcaggttccctatgtgttataccatctctggaggttcttgtattcgccgcattgcaccaccaggccttttg

SEQ ID NO: 696875 - DNA, 120 bp, Artificial Sequence
  ENSG00000189043_24 (sequence is synthesized)
gtaagttcgtgaccgctctcctaatgttttcccttgtccttcttgcgtcggggtgcgccttttggtaaataagaggggtccgtgatcttggaatcctcactttgtctggacgtcgttgct

SEQ ID NO: 696876 - DNA, 120 bp, Artificial Sequence
  ENSG00000189043_25 (sequence is synthesized)
aaagtctatgcaatctttaatctgtcttaaatccggttccctaaatacgcagcaagcattggtagcattacgttttcagagataatgcttaaagccagtatttgtaatagatacgtttac

SEQ ID NO: 696877 - DNA, 120 bp, Artificial Sequence
  ENSG00000189043_26 (sequence is synthesized)
ttattcagattctatttttcatacatctttatagaggcacccttaaataatttgcaaagaatttgtttttcaagccccaggataaaggaagccagaaaatttaatgggaatgacatgtaa

SEQ ID NO: 696878 - DNA, 120 bp, Artificial Sequence
  ENSG00000189045_0 (sequence is synthesized)
ctaggggcttgttgcccagcgaaccgccacaacagagagcggactcgatcctgcgctccggccgggctgacctgcctgcgtccagcccccgcgccctgggcctgcctgggtctggatctg

SEQ ID NO: 696879 - DNA, 120 bp, Artificial Sequence
  ENSG00000189045_1 (sequence is synthesized)
tgtccgagtctgggtctggatctgggtccgagtctgggtctggccctgcgctcagggcccgcggaggagactatggaccccgccgggcgcgcccggggccaaggggccacggcagggggg

SEQ ID NO: 696880 - DNA, 120 bp, Artificial Sequence
  ENSG00000189045_2 (sequence is synthesized)
ctgctgctccgggctgctgcggccgccaagggtctcagggaagacctgtggggcgcggccgccctgccttggaggagcctgtcccggatcccgaagcgggagggtcttggagaggaggac

SEQ ID NO: 696881 - DNA, 120 bp, Artificial Sequence
  ENSG00000189045_3 (sequence is synthesized)
acagcagttgccggacacgagctcctactcccaaatgagagaagctttcagaatgctgctaaaagcaataatttggatcttatggagaagctgtttgaaaagaaggttaacattaatgtt

SEQ ID NO: 696882 - DNA, 120 bp, Artificial Sequence
  ENSG00000189045_4 (sequence is synthesized)
gtgaacaatatgaaccgcacagccctgcattttgcagtggggagaaatcatttatctgcagtggatttcttgcttaaacacaaggccagggtggatgttgctgataagcacggcttgaca

SEQ ID NO: 696883 - DNA, 120 bp, Artificial Sequence
  ENSG00000189045_5 (sequence is synthesized)
gtaattcaccttgcagcctggtctgggagccttgaggtcatgctcatgctggttaaagctggagcagaccagagagccaagaatcaggatggaatgagcgccctccactttgccactcag

SEQ ID NO: 696884 - DNA, 120 bp, Artificial Sequence
  ENSG00000189045_6 (sequence is synthesized)
agcaatcatgtgcgcatcgtggagtatcttattcaagatctgcacctcaaggacctgaaccagcctgatgagaaaggaagaaaaccatttcttttggcagctgagaggggccatgttgaa

SEQ ID NO: 696885 - DNA, 120 bp, Artificial Sequence
  ENSG00000189045_7 (sequence is synthesized)
atgatagaaaaacttaccttcctaaacctgcatacttcagaaaaggacaaggggggaaacactgccttgcacctcgctgcgaagcatggtcacagtcctgcagtgcaggtgctgctagcc

SEQ ID NO: 696886 - DNA, 120 bp, Artificial Sequence
  ENSG00000189045_8 (sequence is synthesized)
cagtggcaagacataaatgagatgaatgagctcaatatcagtagtttgcagatagcaaccaggaacggccatgcatcccttgtcaactttcttctcagtgagaacgttgatctgcaccag

SEQ ID NO: 696887 - DNA, 120 bp, Artificial Sequence
  ENSG00000189045_9 (sequence is synthesized)
aaagtggaacctaaggagtcccctcttcatttagttgttatcaacaaccacatcacggttgtaaacagtttattaagtgcacagcatgatattgacatcttaaatcagaagcagcaaacc

SEQ ID NO: 696888 - DNA, 120 bp, Artificial Sequence
  ENSG00000189045_10 (sequence is synthesized)
cctctgcatgtagctgctgatcgtggaaatgtggaactggtggaaaccctgctgaaggcaggctgtgacttgaaggctgttgacaagcaaggaaagactgccctggctgtggcctccagg

SEQ ID NO: 696889 - DNA, 120 bp, Artificial Sequence
  ENSG00000189045_11 (sequence is synthesized)
agcaaccatagccttgtcgtgggcatgctcattaaagcagagagatactacgcctggagagaggagcatcatgagagcatcagggacccgtcaacaggctttactctgacattcaagcaa

SEQ ID NO: 696890 - DNA, 120 bp, Artificial Sequence
  ENSG00000189045_12 (sequence is synthesized)
ccaatgagtggcagaggctggcccgttcgtggaactttacagatgaccagattagagccattgaggagcagtggtcgggaaatgaaagcttccgtgaacatggccacagggctctgctta

SEQ ID NO: 696891 - DNA, 120 bp, Artificial Sequence
  ENSG00000189045_13 (sequence is synthesized)
tctggctacacgggaccctgatgactcagggtgacccggccaagcaactgtatgaagagctggtacacgcaggtttcccaaaactagctgaaaagactcgtcatttcaaaagcaaaactg

SEQ ID NO: 696892 - DNA, 120 bp, Artificial Sequence
  ENSG00000189045_14 (sequence is synthesized)
actcaaactccaagaaatgtgtagtttcataaatgcctaaagaaattgtatttacatgattttccactcagcattcagttcttttaatgccataaatttcttctagcagtagcactgatt

SEQ ID NO: 696893 - DNA, 120 bp, Artificial Sequence
  ENSG00000189045_15 (sequence is synthesized)
ttcaactatgatgatggtggtgacagggaactctaacagatgaaagaagagtaataccatgatacttttcaaccactaaaaagtcaaatatagttttttttgctgagggcaagttgtatg

SEQ ID NO: 696894 - DNA, 120 bp, Artificial Sequence
  ENSG00000189045_16 (sequence is synthesized)
tgattttcccatttctatcaatcatttgatgtaatccatgtaataagataatctaggacggttttgtatgtcatgtttttttaaaaaactcatgggagcagcatcatggtacagtaaaaa

SEQ ID NO: 696895 - DNA, 120 bp, Artificial Sequence
  ENSG00000189045_17 (sequence is synthesized)
aacaagggtttttataatagacaaatatggttttgaacttggttttgccacttattagatgtgaacctttgggcatgttaatgttgtttacgttcttagatcttcagtttccttctctat

SEQ ID NO: 696896 - DNA, 120 bp, Artificial Sequence
  ENSG00000189045_18 (sequence is synthesized)
aaactgggagagatgtctatttaatccatagggttggaatgaagatgaagggaaaatgcctgtgtagcctcacgcccatagtacggaaatcaactgctatttctctttcagtaagagaaa

SEQ ID NO: 696897 - DNA, 120 bp, Artificial Sequence
  ENSG00000189045_19 (sequence is synthesized)
ctgggtttggaatttatagtcattgttgactttaaatcacacattttgtgtaatatattacttaggaaagaccagaagtatgtacaccatttttttttttttttaaatctcttggtgatg

SEQ ID NO: 696898 - DNA, 120 bp, Artificial Sequence
  ENSG00000189045_20 (sequence is synthesized)
taattacagatgattattttctttgtacttttgggtacattccattctttttttcacaaagaacatgcattatttttgtaatctaagagttatgaaataaatgtaaaattgagtgtcagt

SEQ ID NO: 696899 - DNA, 120 bp, Artificial Sequence
  ENSG00000189045_21 (sequence is synthesized)
ttatgtgcacctattcattggaatttaagactctccattctcagattctgactctaaatttacaaggcacatactaaaaccataagcaatttcaatccagttattctatcatgaatttat

SEQ ID NO: 696900 - DNA, 120 bp, Artificial Sequence
  ENSG00000189045_22 (sequence is synthesized)
agttttatgtctttgtctcatactgattataaatggcccacttaatcttatgaatgtttaaaacaggtaatagattcacatgattccaaaacgtttttcaaaaacatattgagaagaagt

SEQ ID NO: 696901 - DNA, 120 bp, Artificial Sequence
  ENSG00000189045_23 (sequence is synthesized)
attgtcccatctgttcttcagtatggccagtttccactgacctctctttctctattactgctccccaccagattggggtaacctctttatgcaaaaataaacaaatatgaatatatacta

SEQ ID NO: 696902 - DNA, 120 bp, Artificial Sequence
  ENSG00000189045_24 (sequence is synthesized)
ggggaggggaaaaccctggggtagacgtccatatctatatgtacacctttgatgactttcttaggagaaattcctagatatggaattgtgggtcaaaggcttctgcacattttaaaatct

SEQ ID NO: 696903 - DNA, 120 bp, Artificial Sequence
  ENSG00000189045_25 (sequence is synthesized)
ttgagtatacaatattgctaaaatgatctcccagaaatctttcaccattttaccctcacagaggtcaaatggaattgcttttgttgctccatgttttgctagcaattggtagcaaagtta

SEQ ID NO: 696904 - DNA, 120 bp, Artificial Sequence
  ENSG00000189045_26 (sequence is synthesized)
gaacaaggagcatggatgatttttttcctactggttcaaaaaactatacctttttatttaaaacttaaaaatgtataaatttcacttaaaactgcagatacagtggtccacactctggac

SEQ ID NO: 696905 - DNA, 120 bp, Artificial Sequence
  ENSG00000189045_27 (sequence is synthesized)
taaatgctgaacacttactaagggtcaccactgggatgggcagtttcggtacttgggagatcatcaggaaatagctgctgaaatgagttgctttttgatttgaatgttgaagccagaacc

SEQ ID NO: 696906 - DNA, 120 bp, Artificial Sequence
  ENSG00000189045_28 (sequence is synthesized)
accttttctgaacagtatttgtgtgccaccatgaaacagatttcatgctgatgtggagtctcccacagttttgagtgaaaacccagaacctgatctgatttggagtcagagatagcatca

SEQ ID NO: 696907 - DNA, 120 bp, Artificial Sequence
  ENSG00000189045_29 (sequence is synthesized)
tcttcctccctgaagaagggccatcttggactccccatcatccttgaaatgtcgctagctttgtccattgtcttgcttgttcactaagactgtaataaatgcttgaggtttgtgattgat

SEQ ID NO: 696908 - DNA, 120 bp, Artificial Sequence
  ENSG00000189045_30 (sequence is synthesized)
agaacaatatggagtctcctatttctacttctttctacacagacacgaaaggaagaaaaccatttcttttggcagctgagaggggccatgttgaaatgatagaaaaacttaccttcctaa

SEQ ID NO: 696909 - DNA, 120 bp, Artificial Sequence
  ENSG00000189045_31 (sequence is synthesized)
catatcaaaaagtattatcagcttttatagcttttgctgcttatcgctggataatactccagaaaaatatttacagcaggaataacacctactggaaataccaagaaaaactgaaaaaaa

SEQ ID NO: 696910 - DNA, 120 bp, Artificial Sequence
  ENSG00000189046_0 (sequence is synthesized)
gtctttcccaccacgaggccaccagggtgactgcgggattccgatctgcgccggagctgcgatgctagagcactcttgccacccccaccccacggacgtgttgcagtgatatcagaattt

SEQ ID NO: 696911 - DNA, 120 bp, Artificial Sequence
  ENSG00000189046_1 (sequence is synthesized)
tgcgtgcggtttacccgtgtttaacctctttgcgtctcgcttctgaatcgtatccacttgagcatcactagactgatctattttaacactggtggggggcagcgaggatggacagattcc

SEQ ID NO: 696912 - DNA, 120 bp, Artificial Sequence
  ENSG00000189046_2 (sequence is synthesized)
tggtgaaaggggctcaagggggccttttgaggaagcaggaggagcaagagccaactggagaagagccagctgtgttgggaggagacaaagaaagcacaaggaagaggcccaggagagagg

SEQ ID NO: 696913 - DNA, 120 bp, Artificial Sequence
  ENSG00000189046_3 (sequence is synthesized)
ccccagggaatggaggccactcagcaggccctagctggcggcacattcgggctgagggcctggactgcagttacacagtcctgtttggcaaagctgaggcagatgagattttccaagagt

SEQ ID NO: 696914 - DNA, 120 bp, Artificial Sequence
  ENSG00000189046_4 (sequence is synthesized)
gcccaggaagcaggcaacgtatggcgacgctgggctgacctacacattttcaggcctcacgctgtctccaaagccctggatcccagttctagagcgcatccgggatcacgtctctggggt

SEQ ID NO: 696915 - DNA, 120 bp, Artificial Sequence
  ENSG00000189046_5 (sequence is synthesized)
gactggacagaccttcaactttgtgctcatcaacaggtataaagatggctgtgaccacatcggggagcaccgagatgatgaaagagaactggcccctgggagccccattgcctctgtctc

SEQ ID NO: 696916 - DNA, 120 bp, Artificial Sequence
  ENSG00000189046_6 (sequence is synthesized)
cttcggtgcctgcagagactttgtcttccggcataaggattcccgtgggaaaagcccctccaggagggtggcggtggtcaggctgccgctggcccacgggagcttactaatgatgaacca

SEQ ID NO: 696917 - DNA, 120 bp, Artificial Sequence
  ENSG00000189046_7 (sequence is synthesized)
cccgaccaacacgcactggtaccacagtcttcccgtgagaaagaaggttctggctccacgggtgaatctgacttttcgtaaaattttgcttactaaaaaataaaaacatttttaacagtt

SEQ ID NO: 696918 - DNA, 120 bp, Artificial Sequence
  ENSG00000189046_8 (sequence is synthesized)
ctttaaaatgaaaatgtgaaactaggaatgttgctgtgagaccccttggacaaacagatttttgcactggggatagaacttgagcaatttctgtcttggcctcgccactgacgtcccttc

SEQ ID NO: 696919 - DNA, 120 bp, Artificial Sequence
  ENSG00000189046_9 (sequence is synthesized)
agtggcccaacaggtgatcaacgggaaagcggcagtgcttgccacacacgggaggccagcaggtggcaccagggggccgcccggctgctctctttgcgccctagcctgccgtagttccca

SEQ ID NO: 696920 - DNA, 120 bp, Artificial Sequence
  ENSG00000189046_10 (sequence is synthesized)
gtgtgtgtgtgtgtgtgtgtgcattgagggcttgtttggtgcaattaatgatcgtatgtttggagaaatctgaactcaggatccattatttactgatgggttcactaatggattcatcca

SEQ ID NO: 696921 - DNA, 120 bp, Artificial Sequence
  ENSG00000189046_11 (sequence is synthesized)
atattctctgagcacctctgggctaagccccttaggtgcttgggacataaacttgaaagaaactggattgcctgtctactaggagctgacagatgactcgagtgaatctctccttggcta

SEQ ID NO: 696922 - DNA, 120 bp, Artificial Sequence
  ENSG00000189046_12 (sequence is synthesized)
cttcctccttaaaggggtggacagttgactttgggcaaacctcttcgcctctgtgggcaacagtttccccttctgcaaaatgagggtttggattgtagtttctaagtttagctgtggcgt

SEQ ID NO: 696923 - DNA, 120 bp, Artificial Sequence
  ENSG00000189046_13 (sequence is synthesized)
gcgaattcccaggaggtagttctttaaaaattcaggtgctcaggcgtggagtgcagacctctgggtttttgcaagctagccagctgattctgatgcacaggtggacgtgggagaccctgg

SEQ ID NO: 696924 - DNA, 120 bp, Artificial Sequence
  ENSG00000189046_14 (sequence is synthesized)
acaagtcttctgtctcctccaaaaggaagtgtttagggttccaccctatttggttcattggtacaaatcatttcttagtacactggggctctaagagtggaatagcgccagcactcggtc

SEQ ID NO: 696925 - DNA, 120 bp, Artificial Sequence
  ENSG00000189046_15 (sequence is synthesized)
cagcactcggtcttcctggatcctggagctcatcccggagtaggaagtgagaggtgattaactcctgaacaaacagctgaatgagataatttcttcttctctttttctttcttttttttt

SEQ ID NO: 696926 - DNA, 70 bp, Artificial Sequence
  ENSG00000189046_16 (sequence is synthesized)
ttctctttttctttcttttttttttttgagacagggtttttctatgttgcccaggcttggtctcaaactg

SEQ ID NO: 696927 - DNA, 120 bp, Artificial Sequence
  ENSG00000189050_0 (sequence is synthesized)
gccgttgccgccgggctgagagaagagcttgcggggtttgcggttgatggccccgactgaagggctggaggcggtgtatgccgctgttcttgctgtcgctcccgacacctccgtccgctt

SEQ ID NO: 696928 - DNA, 120 bp, Artificial Sequence
  ENSG00000189050_1 (sequence is synthesized)
ctggtcatgagaggagacagaggcctgaagcaaagacatctgggtcagagaaaaagtatttaagggccatgcaagccaatcgtagccaactgcacagtcctccaggaactggaagcagtg

SEQ ID NO: 696929 - DNA, 120 bp, Artificial Sequence
  ENSG00000189050_2 (sequence is synthesized)
aggatgcctcaacccctcagtgtgtccacacaagattgacaggagagggttcttgccctcattctggagatgttcatatccagataaactccatacctaaagaatgtgcagaaaatgcaa

SEQ ID NO: 696930 - DNA, 120 bp, Artificial Sequence
  ENSG00000189050_3 (sequence is synthesized)
gctccagaaatataaggtcaggtgtccatagctgtgcccatggatgtgtacacagtcgcttacggggtcactcccacagtgaagcaaggctgactgatgatactgccgcagaatctggag

SEQ ID NO: 696931 - DNA, 120 bp, Artificial Sequence
  ENSG00000189050_4 (sequence is synthesized)
atcatggtagtagctccttctcagaattccgctatctcttcaagtggctgcaaaaaagtcttccatatattttgattctgagcgtcaaacttgttatgcagcatataacaggaatttctc

SEQ ID NO: 696932 - DNA, 120 bp, Artificial Sequence
  ENSG00000189050_5 (sequence is synthesized)
ttggaattgggctgctaacaacttttatgtatgcaaacaaaagcattgtaaatcaggtttttctaagagaaaggtcctcaaagattcagtgtgcttggttactggtattcttagcaggat

SEQ ID NO: 696933 - DNA, 120 bp, Artificial Sequence
  ENSG00000189050_6 (sequence is synthesized)
cttctgttcttttatattacacctttcattctcagtcactttattacagcttaatttttttaaatcctactttggaccatttgagcttctgggaagtattttggattgttggaattacag

SEQ ID NO: 696934 - DNA, 120 bp, Artificial Sequence
  ENSG00000189050_7 (sequence is synthesized)
acttcattctgaaattctttttcatgggcttaaaatgccttattttattggtgccttctttcatcatgccttttaaatctaagggttactggtatatgcttttagaagaattgtgtcaat

SEQ ID NO: 696935 - DNA, 120 bp, Artificial Sequence
  ENSG00000189050_8 (sequence is synthesized)
tcttgggatactgctggctttactctacctcatattaaaacttttggaattttttgggcatctgagaactttcagacaggttttacgaatattttttacacaaccaagttatggagtggc

SEQ ID NO: 696936 - DNA, 120 bp, Artificial Sequence
  ENSG00000189050_9 (sequence is synthesized)
tgccagcaagagacagtgttcagatgtggatgatatttgttcaatatgtcaagctgaatttcagaagccaattcttctcatttgtcagcatatattttgtgaagagtgcatgaccttatg

SEQ ID NO: 696937 - DNA, 120 bp, Artificial Sequence
  ENSG00000189050_10 (sequence is synthesized)
gtttaacagagagaaaacatgtccactctgcagaactgtgatttcagaccatataaacaaatggaaggatggagccacttcatcacaccttcaaatatattaagttgtataaactatcaa

SEQ ID NO: 696938 - DNA, 120 bp, Artificial Sequence
  ENSG00000189050_11 (sequence is synthesized)
ggccacaaaatactaatgtcatttggtcataatgactactgataaggcatcagaatggattttcagggctaccagaaaaatgtttccagatggttttagaatgtaggacttatgatccaa

SEQ ID NO: 696939 - DNA, 120 bp, Artificial Sequence
  ENSG00000189050_12 (sequence is synthesized)
ttcaccaaaagattaaatgaaaccaccctgtgttttaaaatatatataatgttcaacctaatgtatatgcaacatttattctattctaattatttgacaggtaactgcagtgttaaattg

SEQ ID NO: 696940 - DNA, 120 bp, Artificial Sequence
  ENSG00000189050_13 (sequence is synthesized)
taaatgtgttttctttatgttaccaaaacagcaatttgaaattagaactagtggttttagagaactcaggtattctttcctgacattgttttcagaataaagaatatttttcataatatt

SEQ ID NO: 696941 - DNA, 120 bp, Artificial Sequence
  ENSG00000189050_14 (sequence is synthesized)
ttttgttcagcattgacttttataattcccatcctaaaaattcttaatattttcataaaatttgtatttttaaatgaaaattctaaatgttgtattttatcagtaacattttctaagtga

SEQ ID NO: 696942 - DNA, 120 bp, Artificial Sequence
  ENSG00000189050_15 (sequence is synthesized)
aacattttctaagtgaagattaatttactgaggatgatacattatagtattgtattattctctgtagtaagattagtaataagtgaaaataaatgatttaaattcattttgtctctggac

SEQ ID NO: 696943 - DNA, 120 bp, Artificial Sequence
  ENSG00000189050_16 (sequence is synthesized)
ttgtctctggacgtcataaattcttcctgccatcagctttaatgttcatgatcatgctttttgtatagtaccatggagtatctcgaagtaactattaaaataattcatgtggattataaa

SEQ ID NO: 696944 - DNA, 120 bp, Artificial Sequence
  ENSG00000189050_17 (sequence is synthesized)
gtaaatcaggtttttctaagagtaagtataacaagcaactaaaaaattattaactgtttctctccatagattttagagaaataattttgagagaaataggaaataacttgaaagaaatag

SEQ ID NO: 696945 - DNA, 120 bp, Artificial Sequence
  ENSG00000189050_18 (sequence is synthesized)
gaagtaataggatatattgtaacatccacgttatgttaaatttgttatctaaatcctggaataaattatctctcctaatgctgaattccttcaccttaccttctttgtaagaaaaaaaaa

SEQ ID NO: 696946 - DNA, 120 bp, Artificial Sequence
  ENSG00000189050_19 (sequence is synthesized)
cttttatattacacctttcattctcagtcactttattacaggctagaaaggtgtcaactatgacaaaccgtgaagactttttccttattctatgaagggaagatctaaaatccaaacagc

SEQ ID NO: 696947 - DNA, 120 bp, Artificial Sequence
  ENSG00000189050_20 (sequence is synthesized)
aagccaattcttctcatttgtcaggtaattacatttttaaatttaaaaacctaaatacaacagttctctgtgacttgcaaaagtcaaatttatgtttgctgtaaggcaaaaaaaaaaaaa

SEQ ID NO: 696948 - DNA, 120 bp, Artificial Sequence
  ENSG00000189050_21 (sequence is synthesized)
aactcatattttttacatatcaaaataaaatatttgtagcaaattaaaaccctttattaatactttatctttgtatgttgctctgataaattttgatgtttttcttttggtagcttaatt

SEQ ID NO: 696949 - DNA, 120 bp, Artificial Sequence
  ENSG00000189050_22 (sequence is synthesized)
atattacacctttcattctcagtcactttattacaggtaattagaggtccaaatacacaattacatttttaatgtaatcatatatttcatagcactttgtatcttacttcacatagtact

SEQ ID NO: 696950 - DNA, 120 bp, Artificial Sequence
  ENSG00000189050_23 (sequence is synthesized)
tatatttcatagcactttgtatcttacttcacatagtacttattgtattcagttcagttcagtttttaactttctcctttcataagcgagagctttttttttttttttctttttgagacg

SEQ ID NO: 696951 - DNA, 90 bp, Artificial Sequence
  ENSG00000189050_24 (sequence is synthesized)
gagtctcactctctcgcccagcctggagtgcagtgtcttgatcttggctcactgcaacctttgcctctcaggttcaagcaattctcccgt

SEQ ID NO: 696952 - DNA, 69 bp, Artificial Sequence
  ENSG00000189050_25 (sequence is synthesized)
gagacggagtttcaccatgttggtcagacctcctgacctcgtgatctgcctgcctccaagtgagagctt

SEQ ID NO: 696953 - DNA, 120 bp, Artificial Sequence
  ENSG00000189050_26 (sequence is synthesized)
taagtgacttactcagattttgtatccccagtgccttggcacataacagatgctcaataaatatttaattttttgatacctgagtttttgtttacatatttcgtatttttaaagtaccat

SEQ ID NO: 696954 - DNA, 120 bp, Artificial Sequence
  ENSG00000189050_27 (sequence is synthesized)
taggttgttattattggtcgttgtttctgaaagtaagaacacttactaaatgacagtagctgataagtctccatgtcaaatgggagtattctgaattttcagcttttattagaatattag

SEQ ID NO: 696955 - DNA, 120 bp, Artificial Sequence
  ENSG00000189051_0 (sequence is synthesized)
cagctgagcgtgccatctcccagtggccatgtcagaaggggagagcaaggacagctcgggcagtgagtgccccgtgtgctatgagaagttccgggacctggagggcgccagccggacgct

SEQ ID NO: 696956 - DNA, 120 bp, Artificial Sequence
  ENSG00000189051_1 (sequence is synthesized)
gagctgtggccatgtgttctgccatgactgcctggtcaagtacctgctgtccacccgcgtggatgggcaggtccagaggaccctggtctgccccatctgccgctacgtcacattcctcag

SEQ ID NO: 696957 - DNA, 120 bp, Artificial Sequence
  ENSG00000189051_2 (sequence is synthesized)
caagaagagctcccgctggccctccatgctggacaagagctcccagacgctggctgtgcccgtgggcctgccctccgtgcccccactggacagcctgggccacacaaaccccctggccgc

SEQ ID NO: 696958 - DNA, 120 bp, Artificial Sequence
  ENSG00000189051_3 (sequence is synthesized)
ctcctcccctgcctggaggccacctccaggccaggccaggccgccaggcagcccgggccagagcgcccagctccccctggacctgctgcccagcctgccccgggagtcacagatctttgt

SEQ ID NO: 696959 - DNA, 120 bp, Artificial Sequence
  ENSG00000189051_4 (sequence is synthesized)
catcagccgccacgggatgcccctgggggagcaggacagcgtgctgccccgccgcagcctggcagagctctcggaggcctccctggcgccccgctccgcccgcgccttctgctgccgatc

SEQ ID NO: 696960 - DNA, 120 bp, Artificial Sequence
  ENSG00000189051_5 (sequence is synthesized)
gcgggccctgctgctcatcacgctcatcgctgtggtggccgtggtggccgccatcctgccctgggtgctgctggtgaggaagcaggcgtgagccgcacctcagggaggccgccgggctag

SEQ ID NO: 696961 - DNA, 120 bp, Artificial Sequence
  ENSG00000189051_6 (sequence is synthesized)
ccgtggcctggggtgggacaggaggcccacggcagccctggtgccaccaagctccgaggggcacgcgggcaggcagaggggaggacctgggcacagagagggccttgggcttccccgacc

SEQ ID NO: 696962 - DNA, 120 bp, Artificial Sequence
  ENSG00000189051_7 (sequence is synthesized)
cccgcaggggcttccgctcgacagagaggctggagctgactccatgcgcgcggcgcgtgttccccacgtgaatcctcagcagatgcgttccccttcctctaggctgggaagatgggtggt

SEQ ID NO: 696963 - DNA, 120 bp, Artificial Sequence
  ENSG00000189051_8 (sequence is synthesized)
cactgccctcctgcaggctcaccagccctgagcggcagaccttacctgccaggtgacctgcccaaagccaggtgggcccctccagggacaagaaagtcctgcaggcagacgtcctgctgg

SEQ ID NO: 696964 - DNA, 120 bp, Artificial Sequence
  ENSG00000189051_9 (sequence is synthesized)
gctggccgatggcaggatcctccaggccagaattcccacccaggatttgcggcttgccctcgggaacagacagaaggggcgcccagaatctcagcactcacccccgacctccaccacagc

SEQ ID NO: 696965 - DNA, 120 bp, Artificial Sequence
  ENSG00000189051_10 (sequence is synthesized)
accccatcccctaaccctccctgtccccaacctgccagcttagaagggcttccctgaaggagaagctgatctcagaggctgccccagaatttctgggagaatgaacagaaactgttcttc

SEQ ID NO: 696966 - DNA, 120 bp, Artificial Sequence
  ENSG00000189051_11 (sequence is synthesized)
acaggggttggttgatagaggccaccccagcagagtgccccacgaacggagccagaggtctccctgagccctccaggccaaaggagggatccaaactttgagtcctggggttctcaaggg

SEQ ID NO: 696967 - DNA, 120 bp, Artificial Sequence
  ENSG00000189051_12 (sequence is synthesized)
tggcagggagtggaggggaagcctgacaggcgagccttgagtcagctgagaactatgtgggcaaacgaacccctgggggctcccgcctccctcccagctagtcctcctcctcatgaccca

SEQ ID NO: 696968 - DNA, 120 bp, Artificial Sequence
  ENSG00000189051_13 (sequence is synthesized)
gccactcatttagaggccacaccagctgggccagtttcctaggtggattgccaggctgggctgggtgaggaagggtggggaggaaaacagctgtgcttgtcagggacgccgccatctcaa

SEQ ID NO: 696969 - DNA, 120 bp, Artificial Sequence
  ENSG00000189051_14 (sequence is synthesized)
ccgagaaatgctgaggcccaggtgccctcagctgctcctcaaggtctctttgcctggggcccccacgttggactgtgaagagcctcaggttgggtctagcctgagtcattcggggatagc

SEQ ID NO: 696970 - DNA, 120 bp, Artificial Sequence
  ENSG00000189051_15 (sequence is synthesized)
tattggctgtttattgaggtccgtaagtcaaccaacacctttcaatggaaaacaacaaaaacctccagcaattatctcaactaagtggtggtctgcacccagctgtgcccacagctgagc

SEQ ID NO: 696971 - DNA, 120 bp, Artificial Sequence
  ENSG00000189051_16 (sequence is synthesized)
ccccaacctccctcaacctatacccctctgggcaatttgctgtcttggtggggagggaagaaatagcagtctacgttttatctagttcctaaatgcctgcagtgctggtcatttggggac

SEQ ID NO: 696972 - DNA, 120 bp, Artificial Sequence
  ENSG00000189051_17 (sequence is synthesized)
cgctggggaattgggccccactacaggggatatttgggacatagagagggctgctttaaaagcacttgtgggcttctctgtgctcatttcaagattacagaagtggccaggcacggtggc

SEQ ID NO: 696973 - DNA, 120 bp, Artificial Sequence
  ENSG00000189051_18 (sequence is synthesized)
agactctgtctaaaaaaaaaaaaaaattacagaagagcacaggtgctattggaggggagggatacagatggattccatggggaaaatatttattataggaataaaaataatgttaaattt

SEQ ID NO: 696974 - DNA, 120 bp, Artificial Sequence
  ENSG00000189051_19 (sequence is synthesized)
ttaaatttgcaaagactccaatgagtctcttttaacctcagccaggctgttttaaacagtgtcatgaatttctgggaacctggttctagtcttttcagattctgtcgtatttgccaaaag

SEQ ID NO: 696975 - DNA, 120 bp, Artificial Sequence
  ENSG00000189051_20 (sequence is synthesized)
tttctttcaacatactctcagtgtttttgtatgttcaatggtgacctgtagctgcaactccttttattgtcagagaatgccaaaagctatttttaaaataaaggtatatattttctcaaa

SEQ ID NO: 696976 - DNA, 120 bp, Artificial Sequence
  ENSG00000189051_21 (sequence is synthesized)
tcattaggaattgcctcggcggtggcggtcacactaacagcaacaggaggagatcgtgctgctgctcagcacctcggggtggctcagatctgctggaggccccaggagggaaggtggatg

SEQ ID NO: 696977 - DNA, 120 bp, Artificial Sequence
  ENSG00000189051_22 (sequence is synthesized)
ctgctctctccgacttggctaccagtgacttctgggcatttccaaagtatcagacatattctcaaaggatgaaattctgtctccatcacggttaatcagatgcttctctcactgcctcag

SEQ ID NO: 696978 - DNA, 120 bp, Artificial Sequence
  ENSG00000189052_0 (sequence is synthesized)
agcactttgctcgggtcacggcctcctcctggctcccaggaccccaccataggcagaggcaggccttcctacaccctactccctgtgcctccaggctcgactagtccctagcactcgacg

SEQ ID NO: 696979 - DNA, 120 bp, Artificial Sequence
  ENSG00000189052_1 (sequence is synthesized)
actgagtctctgagatcacttcaccgtggtctccgcctcacccttggcgctggaccagtgagaggagagggctggggcgctccgctgagccactcctgcgcccccctggccttgtctacc

SEQ ID NO: 696980 - DNA, 120 bp, Artificial Sequence
  ENSG00000189052_2 (sequence is synthesized)
tcttgccccccgaagggttagtgtcgagctcaccccagcatcctacaacctcctggtggccttgccgcccccacaaccccgaggtataaagccaggtacacgaggcaggggacgcaccaa

SEQ ID NO: 696981 - DNA, 120 bp, Artificial Sequence; identical to SEQ ID NO: 144598
  ENSG00000189052_3 (sequence is synthesized)

SEQ ID NO: 696982 - DNA, 120 bp, Artificial Sequence; identical to SEQ ID NO: 144494
  ENSG00000189052_4 (sequence is synthesized)

SEQ ID NO: 696983 - DNA, 120 bp, Artificial Sequence; identical to SEQ ID NO: 144495
  ENSG00000189052_5 (sequence is synthesized)

SEQ ID NO: 696984 - DNA, 120 bp, Artificial Sequence
  ENSG00000189052_6 (sequence is synthesized)
cccccgcttccaggactcctcttcctcaaaggcccctccccccagccttccaagtccatcccgactcccggggccctcggacaccccgatcctcccacaataaaggcttctcaatccgca

SEQ ID NO: 696985 - DNA, 120 bp, Artificial Sequence
  ENSG00000189056_0 (sequence is synthesized)
ctcggcgggggcccgctcccaggcccgctcccgagcccgttccgctcccgtccgccttcttctcgccttctctccgcgtggctcctccgtcccggcgtctccaaaactgaatgagcgagc

SEQ ID NO: 696986 - DNA, 120 bp, Artificial Sequence
  ENSG00000189056_1 (sequence is synthesized)
gaatgagcgagcggcgcgtagggcgcgcggcggcggcggcggcggcggcggcatggagcgcagtggctgggcccggcagactttcctcctagcgctgttgctgggggcgacgctgagggc

SEQ ID NO: 696987 - DNA, 120 bp, Artificial Sequence
  ENSG00000189056_2 (sequence is synthesized)
tggctattacccccgcttttcgcccttctttttcctgtgcacccaccacggggagctggaaggggatggggagcagggcgaggtgctcatttccctgcatattgcgggcaaccccaccta

SEQ ID NO: 696988 - DNA, 120 bp, Artificial Sequence
  ENSG00000189056_3 (sequence is synthesized)
ctacgttccgggacaagaataccatgtgacaatttcaacaagcaccttttttgacggcttgctggtgacaggactatacacatctacaagtgttcaggcatcacagagcattggaggttc

SEQ ID NO: 696989 - DNA, 120 bp, Artificial Sequence
  ENSG00000189056_4 (sequence is synthesized)
cagtgctttcggatttgggatcatgtctgaccaccagtttggtaaccagtttatgtgcagtgtggtagcctctcacgtgagtcacctgcccacaaccaacctcagtttcatctggattgc

SEQ ID NO: 696990 - DNA, 120 bp, Artificial Sequence
  ENSG00000189056_5 (sequence is synthesized)
tccacctgcgggcacaggctgtgtgaatttcatggctacagcaacacaccggggccaggttattttcaaagatgctttagcccagcagttgtgtgaacaaggagctccaacagatgtcac

SEQ ID NO: 696991 - DNA, 120 bp, Artificial Sequence
  ENSG00000189056_6 (sequence is synthesized)
tgtgcacccacatctagctgaaatacatagtgacagcattatcctgagagatgactttgactcctaccaccaactgcaattaaatccaaatatatgggttgaatgtaacaactgtgagac

SEQ ID NO: 696992 - DNA, 120 bp, Artificial Sequence
  ENSG00000189056_7 (sequence is synthesized)
tggagaacagtgtggcgcgattatgcatggcaatgccgtcaccttctgtgaaccatatggcccacgagaactgattaccacaggccttaatacaacaacagcttctgtcctccaattttc

SEQ ID NO: 696993 - DNA, 120 bp, Artificial Sequence
  ENSG00000189056_8 (sequence is synthesized)
cattgggtcaggttcatgtcgctttagttattcagaccccagcatcatcgtgttatatgccaagaataactctgcggactggattcagctagagaaaattagagccccttccaatgtcag

SEQ ID NO: 696994 - DNA, 120 bp, Artificial Sequence
  ENSG00000189056_9 (sequence is synthesized)
cacaatcatccatatcctctaccttcctgaggacgccaaaggggagaatgtccaatttcagtggaagcaggaaaatcttcgtgtaggtgaagtgtatgaagcctgctgggccttagataa

SEQ ID NO: 696995 - DNA, 120 bp, Artificial Sequence
  ENSG00000189056_10 (sequence is synthesized)
catcttgatcatcaattcagctcacagacaagtcgttttagaagatagtctcgacccagtggacacaggcaactggcttttcttcccaggagctacagttaagcatagctgtcagtcaga

SEQ ID NO: 696996 - DNA, 120 bp, Artificial Sequence
  ENSG00000189056_11 (sequence is synthesized)
tgggaactccatttatttccatggaaatgaaggcagcgagttcaattttgccaccaccagggatgtagatctttccacagaagatattcaagagcaatggtcagaagaatttgagagcca

SEQ ID NO: 696997 - DNA, 120 bp, Artificial Sequence
  ENSG00000189056_12 (sequence is synthesized)
gcctacaggatgggatgtcttgggagctgtcattggtacagaatgtggaacgatagaatcaggcttatcaatggtcttcctcaaagatggagagaggaaattatgcactccatccatgga

SEQ ID NO: 696998 - DNA, 120 bp, Artificial Sequence
  ENSG00000189056_13 (sequence is synthesized)
cactaccggttatgggaacctgaggttttactttgtgatgggaggaatttgtgaccctggaaattctcatgaaaatgacataatcctgtatgcaaaaattgaaggaagaaaagagcatat

SEQ ID NO: 696999 - DNA, 120 bp, Artificial Sequence
  ENSG00000189056_14 (sequence is synthesized)
aacactggataccctttcctattcctcatataaggttccgtctttggtttctgtggtcatcaatcctgaacttcagactcctgctaccaaattttgtctcaggcaaaagaaccatcaagg

SEQ ID NO: 697000 - DNA, 120 bp, Artificial Sequence
  ENSG00000189056_15 (sequence is synthesized)
acataataggaatgtctgggctgtagactttttccatgtcttgcctgttctcccttctacaatgtctcacatgatacagttttccatcaatctgggatgtggaacgcatcagcctggtaa

SEQ ID NO: 697001 - DNA, 120 bp, Artificial Sequence
  ENSG00000189056_16 (sequence is synthesized)
cagtgtcagcttggaattttctaccaaccatgggcgctcctggtccctccttcacactgaatgcttacctgagatctgtgctggaccccacctcccccacagcactgtctactcctctga

SEQ ID NO: 697002 - DNA, 120 bp, Artificial Sequence
  ENSG00000189056_17 (sequence is synthesized)
aaactacagtgggtggaaccgaataacaattccccttcctaacgcagcactaacccggaacaccaggattcgctggagacaaacaggaccaatccttggaaacatgtgggcaattgataa

SEQ ID NO: 697003 - DNA, 120 bp, Artificial Sequence
  ENSG00000189056_18 (sequence is synthesized)
tgtttatattggcccgtcatgtctcaaattctgttctggcagaggacagtgcactagacatggttgcaagtgtgaccctggattttctggcccagcttgtgagatggcatcccagacatt

SEQ ID NO: 697004 - DNA, 120 bp, Artificial Sequence
  ENSG00000189056_19 (sequence is synthesized)
cccaatgtttatttctgaaagctttggcagttccaggctctcctcttaccataacttttactctatccgtggtgctgaagtcagctttggttgtggtgtcttggccagtggtaaggccct

SEQ ID NO: 697005 - DNA, 120 bp, Artificial Sequence
  ENSG00000189056_20 (sequence is synthesized)
ggttttcaacaaagatgggcggcgtcagctaattacatctttccttgacagctcacaatccaggtttctccagttcacactgagactggggagcaaatctgttctgagcacgtgcagagc

SEQ ID NO: 697006 - DNA, 120 bp, Artificial Sequence
  ENSG00000189056_21 (sequence is synthesized)
ccctgatcagcctggtgaaggagttttgttgcattattcttatgataatgggataacttggaaactcctggagcattattcatatctcagctatcatgagcccagaataatctccgtaga

SEQ ID NO: 697007 - DNA, 120 bp, Artificial Sequence
  ENSG00000189056_22 (sequence is synthesized)
actaccaggtgatgcaaagcagtttggaattcagttcagatggtggcaaccgtatcattcttcccagagagaagatgtatgggctattgatgagattatcatgacatctgtgcttttcaa

SEQ ID NO: 697008 - DNA, 120 bp, Artificial Sequence
  ENSG00000189056_23 (sequence is synthesized)
cagcattagtcttgactttaccaatcttgtggaggtcactcagtctctgggattctaccttggaaatgttcagccatactgtggccacgactggaccctttgttttacaggagattctaa

SEQ ID NO: 697009 - DNA, 120 bp, Artificial Sequence
  ENSG00000189056_24 (sequence is synthesized)
acttgcctcaagtatgcgctatgtggaaacacaatcaatgcagataggagcatcctatatgattcagttcagtttggtgatgggatgtggccagaaatacaccccacacatggacaacca

SEQ ID NO: 697010 - DNA, 120 bp, Artificial Sequence
  ENSG00000189056_25 (sequence is synthesized)
ggtgaagctggagtactcaaccaaccacggccttacctggcacctcgtccaagaagaatgccttccaagtatgccaagttgtcaggaatttacatcagcaagtatttaccatgccagtga

SEQ ID NO: 697011 - DNA, 120 bp, Artificial Sequence
  ENSG00000189056_26 (sequence is synthesized)
gtttacacagtggaggagagtcatagtgcttcttccccagaaaacttggtccagtgctacccgtttccgctggagccagagctattacacagctcaagacgagtgggctttggacagcat

SEQ ID NO: 697012 - DNA, 120 bp, Artificial Sequence
  ENSG00000189056_27 (sequence is synthesized)
ttacattgggcagcagtgccccaacatgtgcagtgggcatggctcatgcgatcatggcatatgcaggtgtgaccaggggtaccaaggcactgaatgccacccagaagctgcccttccgtc

SEQ ID NO: 697013 - DNA, 120 bp, Artificial Sequence
  ENSG00000189056_28 (sequence is synthesized)
cacaattatgtcagattttgagaaccagaatggctgggagtctgactggcaagaagttattgggggagaaattgtaaaaccagaacaagggtgtggtgtcatctcttctggatcatctct

SEQ ID NO: 697014 - DNA, 120 bp, Artificial Sequence
  ENSG00000189056_29 (sequence is synthesized)
gtacttcagcaaggctgggaaaagacagctggtgagttgggacctggatacttcttgggtggactttgtccagttctacatccagataggcggagagagtgcttcatgcaacaagcctga

SEQ ID NO: 697015 - DNA, 120 bp, Artificial Sequence
  ENSG00000189056_30 (sequence is synthesized)
cagcagagaggagggcgtcctccttcagtacagcaacaatgggggcatccagtggcacctgctagcagagatgtacttttcagacttcagcaaacccagatttgtctatctggagcttcc

SEQ ID NO: 697016 - DNA, 120 bp, Artificial Sequence
  ENSG00000189056_31 (sequence is synthesized)
agctgctgccaagaccccttgcaccaggttccgctggtggcagcccgtgttctcaggggaggactatgaccagtgggcagtcgatgacatcatcattctgtccgagaagcagaagcagat

SEQ ID NO: 697017 - DNA, 120 bp, Artificial Sequence
  ENSG00000189056_32 (sequence is synthesized)
catcccagttatcaatccaactttacctcagaacttttatgagaagccagcttttgattaccctatgaatcagatgagtgtgtggttgatgttggctaatgaaggaatggttaaaaatga

SEQ ID NO: 697018 - DNA, 120 bp, Artificial Sequence
  ENSG00000189056_33 (sequence is synthesized)
aaccttctgtgctgccacaccatcagcaatgatatttggaaaatcagatggagatcgatttgcagtaactcgagatttgaccctgaaacctggatatgtgctacagttcaagctaaacat

SEQ ID NO: 697019 - DNA, 120 bp, Artificial Sequence
  ENSG00000189056_34 (sequence is synthesized)
aggttgtgccaatcaattcagcagtactgctccagttcttcttcagtactctcatgatgctggtatgtcctggtttctggtgaaagaaggctgttacccggcttctgcaggcaaaggatg

SEQ ID NO: 697020 - DNA, 120 bp, Artificial Sequence
  ENSG00000189056_35 (sequence is synthesized)
cgaaggaaactccagagaactaagtgagcccaccatgtatcacacaggggactttgaagaatggacaagaatcaccattgttattccaaggtctcttgcatccagcaagaccagattccg

SEQ ID NO: 697021 - DNA, 120 bp, Artificial Sequence
  ENSG00000189056_36 (sequence is synthesized)
atggatccaggagagcagctcacagaaaaacgtgcctccatttggtttagatggagtgtacatatccgagccttgtcccagttactgcagtggccatggggactgcatttcaggagtgtg

SEQ ID NO: 697022 - DNA, 120 bp, Artificial Sequence
  ENSG00000189056_37 (sequence is synthesized)
tttctgtgacctgggatatactgctgcacaaggaacctgtgtgtcaaatgtccccaatcacaatgagatgttcgataggtttgaggggaagctcagccctctgtggtacaagataacagg

SEQ ID NO: 697023 - DNA, 120 bp, Artificial Sequence
  ENSG00000189056_38 (sequence is synthesized)
tgcccaggttggaactggctgtggaacacttaacgatggcaaatctctctacttcaatggccctgggaaaagggaagcccggacggtccctctggacaccaggaatatcagacttgttca

SEQ ID NO: 697024 - DNA, 120 bp, Artificial Sequence
  ENSG00000189056_39 (sequence is synthesized)
attttatatacaaattggaagcaaaacttcaggcattacctgcatcaaaccaagaactagaaatgaagggcttattgttcagtattcaaatgacaatgggatactctggcatttgcttcg

SEQ ID NO: 697025 - DNA, 120 bp, Artificial Sequence
  ENSG00000189056_40 (sequence is synthesized)
agagttggacttcatgtccttcctggaaccacagatcatttccattgacctgccacaggacgcgaagacacctgcaacggcatttcgatggtggcaaccgcaacatgggaagcattcagc

SEQ ID NO: 697026 - DNA, 120 bp, Artificial Sequence
  ENSG00000189056_41 (sequence is synthesized)
ccagtgggctttggatgatgttcttataggaatgaatgacagctctcaaactggatttcaagacaaatttgatggctctatagatttgcaagccaactggtatcgaatccaaggaggtca

SEQ ID NO: 697027 - DNA, 120 bp, Artificial Sequence
  ENSG00000189056_42 (sequence is synthesized)
agttgatattgactgtctctctatggatactgctctgatattcactgaaaacataggaaaacctcgttatgctgagacctgggattttcatgtgtcagcatctacctttttgcagtttga

SEQ ID NO: 697028 - DNA, 120 bp, Artificial Sequence
  ENSG00000189056_43 (sequence is synthesized)
aatgagcatgggctgtagcaagcccttcagcaactcccacagtgtacagctccagtattctctgaacaatggcaaggactggcatcttgtcaccgaagagtgtgttcctccaaccattgg

SEQ ID NO: 697029 - DNA, 120 bp, Artificial Sequence
  ENSG00000189056_44 (sequence is synthesized)
ctgtctgcattacacggaaagttcaatttacacctcggaaagattccagaattggaagcggatcactgtctaccttccactctccaccatttctcccaggacccggttcagatggattca

SEQ ID NO: 697030 - DNA, 120 bp, Artificial Sequence
  ENSG00000189056_45 (sequence is synthesized)
ggccaactacactgtgggggctgattcctgggcgattgataatgttgtactggcctcagggtgcccttggatgtgctcaggacgagggatttgtgatgctggacgctgtgtgtgtgaccg

SEQ ID NO: 697031 - DNA, 120 bp, Artificial Sequence
  ENSG00000189056_46 (sequence is synthesized)
gggctttggtggaccctattgtgttcctgttgttcctctgccctcgattcttaaagacgatttcaatgggaatttacatcctgacctttggcctgaagtgtatggtgcagagagggggaa

SEQ ID NO: 697032 - DNA, 120 bp, Artificial Sequence
  ENSG00000189056_47 (sequence is synthesized)
tctgaatggtgaaaccatcaaatctggaacatctctaatttttaaaggggaaggactaaggatgcttatttcaagagatctagattgtacaaatacaatgtatgtccagttttcacttag

SEQ ID NO: 697033 - DNA, 120 bp, Artificial Sequence
  ENSG00000189056_48 (sequence is synthesized)
acaattctccatcagtggaggaatcacttggcacctgatggatgaattttactttcctcaaacaacgaatatacttttcatcaatgttcccttgccatacactgcccaaaccaatgctac

SEQ ID NO: 697034 - DNA, 120 bp, Artificial Sequence
  ENSG00000189056_49 (sequence is synthesized)
aagattcagactctggcaaccttataataacggtaagaaagaagaaatctggattgttgatgacttcattatcgatggaaataatgtaaacaaccctgtgatgctcttggatacatttga

SEQ ID NO: 697035 - DNA, 120 bp, Artificial Sequence
  ENSG00000189056_50 (sequence is synthesized)
ttttgggcccagagaagacaattggtttttctatcctggtggtaacatcggtctttattgtccatattcttcaaagggggcacctgaagaagattcagctatggtgtttgtttcaaatga

SEQ ID NO: 697036 - DNA, 120 bp, Artificial Sequence
  ENSG00000189056_51 (sequence is synthesized)
agttggtgagcattccattaccacccgtgacctaaatgtgaatgagaacaccatcatacaatttgagatcaacgttggctgttcgactgatagctcatccgcggatccagtgagactgga

SEQ ID NO: 697037 - DNA, 120 bp, Artificial Sequence
  ENSG00000189056_52 (sequence is synthesized)
attttcaagggacttcggggcgacctggcaccttctgctgcccctctgctaccacagcagcagccacgtcagctctttatgctccaccgagcaccaccccagcagcacctactacgcagg

SEQ ID NO: 697038 - DNA, 120 bp, Artificial Sequence
  ENSG00000189056_53 (sequence is synthesized)
aaccatgcagggctggaggagggaggtcgtgcactttgggaagctgcacctttgtggatctgtccgtttcagatggtaccagggattttaccctgccggctctcagccagtgacatgggc

SEQ ID NO: 697039 - DNA, 120 bp, Artificial Sequence
  ENSG00000189056_54 (sequence is synthesized)
cattgataatgtctacatcggtccccagtgtgaggagatgtgtaatggacaggggagctgtatcaatggaaccaaatgtatatgtgaccctggctactcaggtccaacctgtaaaataag

SEQ ID NO: 697040 - DNA, 120 bp, Artificial Sequence
  ENSG00000189056_55 (sequence is synthesized)
caccaaaaatcctgattttctcaaagatgatttcgaaggtcagctagaatctgatagattcttattaatgagtggtgggaaaccatctcgaaagtgtggaatcctttctagtggaaacaa

SEQ ID NO: 697041 - DNA, 120 bp, Artificial Sequence
  ENSG00000189056_56 (sequence is synthesized)
cctctttttcaatgaagatggcttgcgcatgttgatgacacgagacctggatttatcacatgctagatttgtgcagttcttcatgagactgggatgtggtaaaggcgttcctgaccccag

SEQ ID NO: 697042 - DNA, 120 bp, Artificial Sequence
  ENSG00000189056_57 (sequence is synthesized)
gagtcaacccgtgctcctacagtattctctcaacggtggcctctcgtggagtcttcttcaggagttccttttcagcaattccagcaatgtgggcaggtacattgccctggagataccctt

SEQ ID NO: 697043 - DNA, 120 bp, Artificial Sequence
  ENSG00000189056_58 (sequence is synthesized)
gaaagcccgttctggttctactcgccttcgctggtggcaaccgtctgagaatgggcacttctacagcccctgggttatcgatcagattcttattggaggaaatatttctggtaatacggt

SEQ ID NO: 697044 - DNA, 120 bp, Artificial Sequence
  ENSG00000189056_59 (sequence is synthesized)
cttggaagatgatttcacaacccttgatagtaggaaatggctgcttcacccaggaggcaccaagatgcccgtgtgtggctctactggtgatgccctggtcttcattgaaaaggccagcac

SEQ ID NO: 697045 - DNA, 120 bp, Artificial Sequence
  ENSG00000189056_60 (sequence is synthesized)
ccgttacgtggtcagcacagacgttgccgtgaatgaggattccttcctacagatagacttcgctgcctcctgctcagtcacagactcttgttatgcgattgaattggaatactcagtaga

SEQ ID NO: 697046 - DNA, 120 bp, Artificial Sequence
  ENSG00000189056_61 (sequence is synthesized)
tcttggattgtcatggcacccattggtaagggactgtctgcctaccaatgtggaatgcagtcgctatcatctgcaacggatcctggtgtcagacactttcaacaagtggactagaatcac

SEQ ID NO: 697047 - DNA, 120 bp, Artificial Sequence
  ENSG00000189056_62 (sequence is synthesized)
tctgcctctccctccttataccaggtcccaagccactcgtttccgttggcatcaaccagctccttttgacaagcagcagacatgggcaatagataatgtctatatcggggatggctgcat

SEQ ID NO: 697048 - DNA, 120 bp, Artificial Sequence
  ENSG00000189056_63 (sequence is synthesized)
agacatgtgcagtggccatgggagatgcatccagggaaactgcgtctgtgatgaacagtggggtggcctgtactgtgatgaccccgagacctctcttccaacccaactcaaagacaactt

SEQ ID NO: 697049 - DNA, 120 bp, Artificial Sequence
  ENSG00000189056_64 (sequence is synthesized)
caatcgagctccatccagtcagaactggctgactgtgaacggagggaaattgagtacagtgtgtggagccgtggcgtcgggaatggctctccatttcagtgggggttgtagtcgattatt

SEQ ID NO: 697050 - DNA, 120 bp, Artificial Sequence
  ENSG00000189056_65 (sequence is synthesized)
agtcactgtggatctaaacctcactaatgctgagttcatccaattttacttcatgtatgggtgcctgattacaccaaacaaccgtaaccaaggtgttctcttggaatattctgtcaatgg

SEQ ID NO: 697051 - DNA, 120 bp, Artificial Sequence
  ENSG00000189056_66 (sequence is synthesized)
aggcattacctggaacctgctcatggagattttctatgaccagtacagtaagcccggatttgtgaatatccttctccctcctgatgctaaagagattgccactcgcttccgctggtggca

SEQ ID NO: 697052 - DNA, 120 bp, Artificial Sequence
  ENSG00000189056_67 (sequence is synthesized)
gccaagacatgacggcctggatcagaacgactgggccattgacaatgtcctcatctcaggctctgctgaccaaaggaccgttatgctggacaccttcagcagcgccccagtaccccagca

SEQ ID NO: 697053 - DNA, 120 bp, Artificial Sequence
  ENSG00000189056_68 (sequence is synthesized)
tgagcgctcccctgcagatgccggccctgtcgggaggatcgcctttgacatgtttatggaagacaaaacttcagtgaatgagcactggctattccatgatgattgtacagtagaaagatt

SEQ ID NO: 697054 - DNA, 120 bp, Artificial Sequence
  ENSG00000189056_69 (sequence is synthesized)
ctgtgactcccctgatggtgtgatgctctgtggcagtcatgatggacgggaggtgtatgcagtgacccatgacctgactcccactgaaggctggattatgcaattcaagatctcagttgg

SEQ ID NO: 697055 - DNA, 120 bp, Artificial Sequence
  ENSG00000189056_70 (sequence is synthesized)
atgtaaggtgtctgaaaaaattgcccagaatcaaattcatgtgcagtattctactgacttcggtgtgagttggaattatctggtccctcagtgcttgcctgctgacccaaaatgctctgg

SEQ ID NO: 697056 - DNA, 120 bp, Artificial Sequence
  ENSG00000189056_71 (sequence is synthesized)
aagtgtttctcagccatctgtattctttccaactaaagggtggaaaaggatcacctacccacttcctgaaagcttagtgggaaatccggtaaggtttaggttctatcagaagtactcaga

SEQ ID NO: 697057 - DNA, 120 bp, Artificial Sequence
  ENSG00000189056_72 (sequence is synthesized)
catgcagtgggcaatcgataatttctacctgggccctggatgcttggacaactgcaggggccatggagattgcttaagggaacagtgcatctgtgatccgggatactcagggccaaactg

SEQ ID NO: 697058 - DNA, 120 bp, Artificial Sequence
  ENSG00000189056_73 (sequence is synthesized)
ctacttgacccacactctgaagactttcctgaaggaacgctttgacagtgaagaaatcaaacctgacttatggatgtccttagaaggtggaagtacttgcactgagtgtggaattcttgc

SEQ ID NO: 697059 - DNA, 120 bp, Artificial Sequence
  ENSG00000189056_74 (sequence is synthesized)
cgaggacactgcactctattttgggggatccactgtgagacaagcggttacacaagatttggatcttcgaggtgcaaagttcctgcaatactgggggcgcatcggtagtgagaacaacat

SEQ ID NO: 697060 - DNA, 120 bp, Artificial Sequence
  ENSG00000189056_75 (sequence is synthesized)
gacctcttgccatcgtcccatctgccggaaggaaggcgtgctgttggactactctaccgatggaggaattacctggactttgctccatgagatggattaccagaaatacatttctgttag

SEQ ID NO: 697061 - DNA, 120 bp, Artificial Sequence
  ENSG00000189056_76 (sequence is synthesized)
acacgactacatacttcttcctgaagatgccctcaccaacacaactcgacttcgctggtggcagccttttgtgatcagcaatggaattgtggtctctggggtggagcgtgctcagtgggc

SEQ ID NO: 697062 - DNA, 120 bp, Artificial Sequence
  ENSG00000189056_77 (sequence is synthesized)
actggacaacattttgattggtggagcagaaatcaatcccagccaattggtggacacttttgatgatgaaggcacttcccatgaagaaaactggagtttttaccctaatgctgtaaggac

SEQ ID NO: 697063 - DNA, 120 bp, Artificial Sequence
  ENSG00000189056_78 (sequence is synthesized)
agcaggattttgtggcaatccatcctttcacctctattggccaaataaaaagaaggacaagactcacaatgctctctcctcccgagaactcattatacagccaggatacatgatgcagtt

SEQ ID NO: 697064 - DNA, 120 bp, Artificial Sequence
  ENSG00000189056_79 (sequence is synthesized)
taaaattgtggtgggttgtgaagccacttcttgtggtgaccttcattccgtaatgctggaatacactaaggatgcaagatcggattcctggcagctcgtacagacccagtgccttccttc

SEQ ID NO: 697065 - DNA, 120 bp, Artificial Sequence
  ENSG00000189056_80 (sequence is synthesized)
ctcttctaacagcattggctgctcccctttccagttccatgaagccaccatctacaactctgtcaacagctcaagctggaaaagaatcaccatccagctgcctgaccatgtctcctctag

SEQ ID NO: 697066 - DNA, 120 bp, Artificial Sequence
  ENSG00000189056_81 (sequence is synthesized)
tgcaacacagttccgctggatccagaagggagaagaaactgagaagcaaagctgggcaattgaccacgtgtacattggagaggcttgccccaagctctgcagcgggcacggatactgcac

SEQ ID NO: 697067 - DNA, 120 bp, Artificial Sequence
  ENSG00000189056_82 (sequence is synthesized)
gaccggtgccatctgcatctgcgacgagagcttccaaggtgatgactgctctgttttcagtcacgaccttcccagttatattaaagataattttgagtccgcaagagtcaccgaggcaaa

SEQ ID NO: 697068 - DNA, 120 bp, Artificial Sequence
  ENSG00000189056_83 (sequence is synthesized)
ctgggagaccattcaaggtggagtcataggaagtggctgtgggcagctggccccctacgcccatggagactcactgtactttaatggctgtcagatcaggcaagcagctaccaagcctct

SEQ ID NO: 697069 - DNA, 120 bp, Artificial Sequence
  ENSG00000189056_84 (sequence is synthesized)
ggatctcactcgagcaagcaaaatcatgtttgttttgcaaattgggagcatgtcgcagacggacagctgcaacagtgacctgagtggcccccacgctgtggacaaggcagtgctgctgca

SEQ ID NO: 697070 - DNA, 120 bp, Artificial Sequence
  ENSG00000189056_85 (sequence is synthesized)
atacagcgtcaacaacgggatcacctggcatgtcatcgcccagcaccagccaaaggacttcacacaagctcagagagtgtcttacaatgtccccctggaggcacggatgaaaggagtctt

SEQ ID NO: 697071 - DNA, 120 bp, Artificial Sequence
  ENSG00000189056_86 (sequence is synthesized)
actgcgctggtggcaaccacgccacaatggaacaggtcatgatcaatgggctttggaccatgtggaggtcgtcctcactcgcaaacaaaattacatgatgaatttttcacgacaacatgg

SEQ ID NO: 697072 - DNA, 120 bp, Artificial Sequence
  ENSG00000189056_87 (sequence is synthesized)
gctcagacatttctacaacagaagacgaaggtcacttaggcgatacccatgaagaatcaaaaagtttattttttttcttccaacatgtgatgtgttgctctccattcttttaaatctcgc

SEQ ID NO: 697073 - DNA, 120 bp, Artificial Sequence
  ENSG00000189056_88 (sequence is synthesized)
actacatctgatatcaggaaatatctgtgaaggacttggtgattacctgaaagcccttctcaagaccgagtgtacaccactttcccacactgtgaactaatgacaagtgacttatttgct

SEQ ID NO: 697074 - DNA, 120 bp, Artificial Sequence
  ENSG00000189056_89 (sequence is synthesized)
cataagtaaatgtcttcatgttgatgtgtccgtgaaagttgtgatctgttgtaatatcagttacagtggcagtattgacaataagaaacagtttaacagaaaaatgaaatttaagcacaa

SEQ ID NO: 697075 - DNA, 120 bp, Artificial Sequence
  ENSG00000189056_90 (sequence is synthesized)
aaaatttaagagattttatgtttaaaatggcatttagcacagtatttaacattcttggtcacaaagctatttaagtggactgtatttcggctatgtctcatgttttatatgattaaatta

SEQ ID NO: 697076 - DNA, 120 bp, Artificial Sequence
  ENSG00000189056_91 (sequence is synthesized)
tcattgtttgtcctttatgtattctcttctacaatacaacacattgaaactgtatttacttgttatgttgtaatattttgctgctgaatttggggctacttatattctgcagaaaattaa

SEQ ID NO: 697077 - DNA, 120 bp, Artificial Sequence
  ENSG00000189056_92 (sequence is synthesized)
ttgaaatacctattcaagaagatagttgtaaagatattgtatctcctttaatatactccttaaaaatgtatgttggtttagcgttgttttgtggataagaaaaatgcttgaccctgaaat

SEQ ID NO: 697078 - DNA, 120 bp, Artificial Sequence
  ENSG00000189056_93 (sequence is synthesized)
attttctactttaaattgtggatgaagaccctatctcccacaaataagttcccatttccttgtctaaagatctttttttaagtgttctgtggctgatttactaacagtaactgccatttt

SEQ ID NO: 697079 - DNA, 120 bp, Artificial Sequence
  ENSG00000189056_94 (sequence is synthesized)
ttgtctgtgataacagagtgatttgtaaaacagtggttgttttttcattgtgttttcttcgtggattgttttttctgcgggtcatattcataccttctgatgaagttgtacaacaccagc

SEQ ID NO: 697080 - DNA, 120 bp, Artificial Sequence
  ENSG00000189056_95 (sequence is synthesized)
aacattataatggccctgtagctctgaatgctatttgtgtaactgaaaggttgcactctagggtgaaccaagctataaaagcccatgcttaaataaaaattatgtccaaaagccattgaa

SEQ ID NO: 697081 - DNA, 120 bp, Artificial Sequence
  ENSG00000189056_96 (sequence is synthesized)
gaggggcgtcgcgcagaggcggcggcggcgcacggaggcggcagacgacgcgctctcggcgcccgcagccccggtcccgcgctcccgcggcccaaagtaactttgggagccgccgtctcc

SEQ ID NO: 697082 - DNA, 120 bp, Artificial Sequence
  ENSG00000189056_97 (sequence is synthesized)
aagagcattctgaaaggcccctcacattctgctggccgtccagtgccagttctgagcaggccaacagatcaaaacaaacaaacaaacaaacgaaaaaggcagaactttccatttcttaaa

SEQ ID NO: 697083 - DNA, 120 bp, Artificial Sequence
  ENSG00000189056_98 (sequence is synthesized)
tactgcgctggtggcaaccacgccacaatggaacaggtcatgatcaatgggctttggaccatgtggaggtcgtcctagatgaaaaatcctatattgcgtctaaacctgatcagactttta

SEQ ID NO: 697084 - DNA, 120 bp, Artificial Sequence
  ENSG00000189056_99 (sequence is synthesized)
tgactaatcacagtgctgcatgcattgaaaggcattttttaacttgtgttatatttcattatttgctgtcattggttttccactagagtaagcactcgcaaacaaaattacatgatgaat

SEQ ID NO: 697085 - DNA, 120 bp, Artificial Sequence
  ENSG00000189056_100 (sequence is synthesized)
atgggctttggaccatgtggaggtcgtcctttcctgtagaactggaatgcttatgtctcgacgggttcggactgatggctccaagtggttggcaaggagaggtgaatcttctcggtagat

SEQ ID NO: 697086 - DNA, 120 bp, Artificial Sequence
  ENSG00000189056_101 (sequence is synthesized)
aggttcaaatgttcattctgtttaccaaatccaaaatgaaatcagtcccttggctgatttcagtcaatttgcaagcaaatttaagtgattaattggtaggaaaactaccagatttgtttt

SEQ ID NO: 697087 - DNA, 120 bp, Artificial Sequence
  ENSG00000189056_102 (sequence is synthesized)
ggttcagtcatagccatgagctgaattttccagtcttgagctagccctcgtcttagttttcactgaggcacctgcttgcatggcatccatatcaacccccaaatccaagagcaacctggt

SEQ ID NO: 697088 - DNA, 120 bp, Artificial Sequence
  ENSG00000189056_103 (sequence is synthesized)
gatgcttgtttttacagatgttctttcttagtcctggagactttaaagaagataaacgattaaagcaaagaaggtgtaaagatgtagaacaaaatgagatttcttagaattttatgcttc

SEQ ID NO: 697089 - DNA, 120 bp, Artificial Sequence
  ENSG00000189056_104 (sequence is synthesized)
tgaacatttaaattgacctgaattgacagtaattcaaactgatcatgtaccgtaaactatatccttcaagtttgtatagaagagttttttcctaacacttctaatataacaaagaatcat

SEQ ID NO: 697090 - DNA, 120 bp, Artificial Sequence
  ENSG00000189056_105 (sequence is synthesized)
atcatgaatgcaagtcctgtatcatgtttattttcataaatagttagcatctgctcagataaatgcaaaagttgctgagcattttaatttaacacttgcattgaatgcatgataacagca

SEQ ID NO: 697091 - DNA, 120 bp, Artificial Sequence
  ENSG00000189057_0 (sequence is synthesized)
aaatccagagcggcgggcactgacgggcacttgcaccgtgtggacagactctccggttctggggaaatccagtccctgttactccattttggccagaaattcaagacatttcaggtggca

SEQ ID NO: 697092 - DNA, 120 bp, Artificial Sequence
  ENSG00000189057_1 (sequence is synthesized)
gaataaattcaatccttgtttctccatcttatcgagtagtagaagttagttacattctctttgaactcatcatgaattccatgaagactgaagaaaacaagtcatttagcgctatggaag

SEQ ID NO: 697093 - DNA, 120 bp, Artificial Sequence
  ENSG00000189057_2 (sequence is synthesized)
atgaccagaggactagacctgaagtttcaaaggatactgtcatgaagcagacacatgctgacacacctgttgatcattgtctatctggcataagaaagtgtagcagcacctttaagctta

SEQ ID NO: 697094 - DNA, 120 bp, Artificial Sequence
  ENSG00000189057_3 (sequence is synthesized)
aaagtgaagtcaacaagcatgaaacagcccttgaaatgcagaatccaaatttgaacaataaagaatgttgtttcacctttacgttgaatggaaactccagaaaattagaccgtagtgtgt

SEQ ID NO: 697095 - DNA, 120 bp, Artificial Sequence
  ENSG00000189057_4 (sequence is synthesized)
ttacagcatatggtaaacccagcgagagtatctactcagccctgagtgctaatgactatttcagtgaaaggataaagaatcagtttaataagaacattattgtttatgaagaaaagacaa

SEQ ID NO: 697096 - DNA, 120 bp, Artificial Sequence
  ENSG00000189057_5 (sequence is synthesized)
tagatggacatataaatttaggaatgcctctcaagtgcctgcctagtgattctcattttaaaattacatttggtcaaagaaagagtagcaaagaagatggacacatattacgccaatgtg

SEQ ID NO: 697097 - DNA, 120 bp, Artificial Sequence
  ENSG00000189057_6 (sequence is synthesized)
aaaatccaaacatggaatgcattctttttcatgttgttgctataggaaggacaagaaagaagattgttaagatcaacgaacttcatgaaaaaggaagtaaactttgtatttatgccttga

SEQ ID NO: 697098 - DNA, 120 bp, Artificial Sequence
  ENSG00000189057_7 (sequence is synthesized)
agggtgagactattgaaggagccttatgcaaggatggccgttttcggtctgacataggtgaatttgaatggaaactaaaggaaggtcataagaaaatttatggaaaacagtccatggtgg

SEQ ID NO: 697099 - DNA, 120 bp, Artificial Sequence
  ENSG00000189057_8 (sequence is synthesized)
atgaagtatctggaaaagtcttagaaatggacatttcaaaaaaaaaagcattacaacagaaagatatccataaaaaaattaaacagaatgaaagtgccactgatgaaattaatcaccaga

SEQ ID NO: 697100 - DNA, 120 bp, Artificial Sequence
  ENSG00000189057_9 (sequence is synthesized)
gtctgatacagtctaagaaaaaagtccacaaaccaaagaaagatggagagaccaaagatgtagaacacagcagagagcaaattctcccacctcaggatctaagccattatattaaagata

SEQ ID NO: 697101 - DNA, 120 bp, Artificial Sequence
  ENSG00000189057_10 (sequence is synthesized)
aaactcgccagacaattcccaggattagaaattattacttttgtagtttgccccgaaaatataggcaaataaactcacaagttagacggaggccgcatctgggtaggcggtatgctatta

SEQ ID NO: 697102 - DNA, 120 bp, Artificial Sequence
  ENSG00000189057_11 (sequence is synthesized)
atctggatgtccaaaaggaggcaattaatctcttaaagaattatcaaacgttgaatgaagccataatgcatcagtatccgaattttaaagaggaggcacagtgggtaagaaaatattttc

SEQ ID NO: 697103 - DNA, 120 bp, Artificial Sequence
  ENSG00000189057_12 (sequence is synthesized)
gggaagaacaaaagagaatgaatctttcaccagctaagcaattcaacatatataaaaaggacttcggaaaaatgactgcaaattctgtttcagttgcaacctgcgaacagcttacatatt

SEQ ID NO: 697104 - DNA, 120 bp, Artificial Sequence
  ENSG00000189057_13 (sequence is synthesized)
atagcaagtcagttgggttcatgcaatgggacaataatggaaacacaggtaatgctacttgctttgtcttcaatggtggttatattttcacctgtcgacatgttgtacatcttatggtgg

SEQ ID NO: 697105 - DNA, 120 bp, Artificial Sequence
  ENSG00000189057_14 (sequence is synthesized)
ccagatataattagcaaatgtgcgaaggtaaccttcacttatacagagttctgccctactcctgacaattggttttccattgagccatggcttaaagtgtccaatgaaaatctagattat

SEQ ID NO: 697106 - DNA, 120 bp, Artificial Sequence
  ENSG00000189057_15 (sequence is synthesized)
gccattttaaaactaaaagaaaatggaaatgcgtttcctccaggactatggcgacagatttctcctcaaccatctactggtttgatttatttaattggtcatcctgaaggccagatcaag

SEQ ID NO: 697107 - DNA, 120 bp, Artificial Sequence
  ENSG00000189057_16 (sequence is synthesized)
aaaatagatggttgtactgtgattcctctaaacgaacgattgaaaaaatatccaaacgattgtcaagatgggttggtagatctctatgataccaccagtaatgtatactgtatgtttacc

SEQ ID NO: 697108 - DNA, 120 bp, Artificial Sequence
  ENSG00000189057_17 (sequence is synthesized)
caaagaagtttcctatcagaggtttggaacacacacacgcttagttatgatacttgtttctctgatgggtcctcaggctccccagtgtttaatgcatctggcaaattggttgctttgcat

SEQ ID NO: 697109 - DNA, 120 bp, Artificial Sequence
  ENSG00000189057_18 (sequence is synthesized)
acctttgggcttttttatcaacgaggatttaatgtgcatgcccttattgaatttggttattctatggattctattctttgtgatattaaaaagacaaatgagagcttgtataaatcatta

SEQ ID NO: 697110 - DNA, 120 bp, Artificial Sequence
  ENSG00000189057_19 (sequence is synthesized)
aatgatgagaaacttgagacctacgatgaagagaaaggtaaacaagagtcatcacttcaagatcatcagattgaacccatggaatgttagaaaagagatgctgtcttcaagaaaatatgc

SEQ ID NO: 697111 - DNA, 120 bp, Artificial Sequence
  ENSG00000189057_20 (sequence is synthesized)
atgccaataattcctggcaaagatttcatgacaaagacacttaaagcaattgcaacaaaagtgaaaattggcaaatgagacctaattaaatcttctgcacagcaaaagaaactatcaaca

SEQ ID NO: 697112 - DNA, 120 bp, Artificial Sequence
  ENSG00000189057_21 (sequence is synthesized)
aaacacacaacctacggaatgggagaaaatatttgcaaactatgcatacagcaaagatctaatattcagaatccattaggaacttaaacagattaacaagcaaaaaaaacaagcaacccc

SEQ ID NO: 697113 - DNA, 88 bp, Artificial Sequence
  ENSG00000189057_22 (sequence is synthesized)
aggacatgaacaaacacttttcaaaagaagatatacacatggccaacaaggatatgaaaaaatacctgataaatgccatcacactaat

SEQ ID NO: 697114 - DNA, 120 bp, Artificial Sequence
  ENSG00000189057_23 (sequence is synthesized)
atgccatcacactaatcagaatggctgttattaaaatgccaaaaaattacagatgctggcgaggttgcagagaaaggggaatgcttatacactgctagtgggaaaataaattagttcagc

SEQ ID NO: 697115 - DNA, 120 bp, Artificial Sequence
  ENSG00000189057_24 (sequence is synthesized)
agttcagccattgtggaaagcagttgggtgatttctaaaagaacttaaaacagctaccattcaagccagcaatctcatgactgggtatatgtccaaaggaatataaattgttctaccata

SEQ ID NO: 697116 - DNA, 72 bp, Artificial Sequence
  ENSG00000189057_25 (sequence is synthesized)
catgacacatatacaccatagcatactacacagccataaaaaagtacaagatcatgtgctttgcagcaacat

SEQ ID NO: 697117 - DNA, 120 bp, Artificial Sequence
  ENSG00000189057_26 (sequence is synthesized)
gccataaaaaagtacaagatcatgtgctttgcagcaacatggatggaactgaaggtcattatcctaagcgaactaatgcaggaacagaaagccaagtaccacatgttctctcataagtgg

SEQ ID NO: 697118 - DNA, 88 bp, Artificial Sequence
  ENSG00000189057_27 (sequence is synthesized)
ggaacagaaagccaagtaccacatgttctctcataagtggaagctaaatattgagtacacatggacacaaagaagaaaacaacagata

SEQ ID NO: 697119 - DNA, 120 bp, Artificial Sequence
  ENSG00000189057_28 (sequence is synthesized)
ttacctgggtgatgaaataatctgaacacaaaaccctggtgacatgcagtttacctatataacaaaactgcacatggactcttaaacctaaataaaagtttaaaatatatataatgccaa

SEQ ID NO: 697120 - DNA, 120 bp, Artificial Sequence
  ENSG00000189057_29 (sequence is synthesized)
gcgggaaaagttcagctgagagatataaaagagcagtctttccagcacctgcaaatccagagcggcgggcactgacgggcacttgcaccgtgtggacagactctccggttctgatactgt

SEQ ID NO: 697121 - DNA, 120 bp, Artificial Sequence
  ENSG00000189057_30 (sequence is synthesized)
caaatccagagcggcgggcactgacgggcacttgcaccgtgtggacagactctccggttctggggaaatccagtccctgttactccattttggccagaaattcaaggatactgtcatgaa

SEQ ID NO: 697122 - DNA, 120 bp, Artificial Sequence
  ENSG00000189057_31 (sequence is synthesized)
gatcttggagataagttcttaaacaatggtcgttataagcccttctcttaggtagtttaaaatatatttggggagctcatacacataagtgcttgtggaaagcaaaatgatagagttaac

SEQ ID NO: 697123 - DNA, 120 bp, Artificial Sequence
  ENSG00000189057_32 (sequence is synthesized)
aatgctaaacgtatgttaagacaacaagatgactaacaaacaatatagacacttaaagtcttggaaagtgtagacaggcaaaaataattagctaatgttttctgaggaaacactgtgtgc

SEQ ID NO: 697124 - DNA, 120 bp, Artificial Sequence
  ENSG00000189058_0 (sequence is synthesized)
aagacaggcatctcaaatcggctgattctgcatctggaaactgccttcatcttgaaagaaaagctccaggtcccttctccagccacccagccccaagatggtgatgctgctgctgctgct

SEQ ID NO: 697125 - DNA, 120 bp, Artificial Sequence
  ENSG00000189058_1 (sequence is synthesized)
ttccgcactggctggcctcttcggtgcggcagagggacaagcatttcatcttgggaagtgccccaatcctccggtgcaggagaattttgacgtgaataagtatctcggaagatggtacga

SEQ ID NO: 697126 - DNA, 120 bp, Artificial Sequence
  ENSG00000189058_2 (sequence is synthesized)
aattgagaagatcccaacaacctttgagaatggacgctgcatccaggccaactactcactaatggaaaacggaaagatcaaagtgttaaaccaggagttgagagctgatggaactgtgaa

SEQ ID NO: 697127 - DNA, 120 bp, Artificial Sequence
  ENSG00000189058_3 (sequence is synthesized)
ccagttaacctcacagagcctgccaagctggaagttaagttttcctggtttatgccatcggcaccgtactggatcctggccaccgactatgagaactatgccctcgtgtattcctgtacc

SEQ ID NO: 697128 - DNA, 120 bp, Artificial Sequence
  ENSG00000189058_4 (sequence is synthesized)
tgcatcatccaactttttcacgtggattttgcttggatcttggcaagaaaccctaatctccctccagaaacagtggactctctaaaaaatatcctgacttctaataacattgatgtcaag

SEQ ID NO: 697129 - DNA, 120 bp, Artificial Sequence
  ENSG00000189058_5 (sequence is synthesized)
aaaatgacggtcacagaccaggtgaactgccccaagctctcgtaaccaggttctacagggaggctgcacccactccatgttacttctgcttcgctttcccctaccccccccccataaaga

SEQ ID NO: 697130 - DNA, 120 bp, Artificial Sequence
  ENSG00000189058_6 (sequence is synthesized)
caaaccaatcaaccacgacaaaggaagttgacctgaacatgtaaccatgccctaccctgttaccttgctagctgcaaaataaacttgttgctgacctgctgtgctcgcagtagattccaa

SEQ ID NO: 697131 - DNA, 120 bp, Artificial Sequence
  ENSG00000189058_7 (sequence is synthesized)
taacctcacagagcctgccaagctggaagttaagttttcctggtgtaagtatccacttttcccaggaggattcagggacaggaaatatgcaaactgaaggctagcgccccggcttggaga

SEQ ID NO: 697132 - DNA, 120 bp, Artificial Sequence
  ENSG00000189058_8 (sequence is synthesized)
cacctgagtgtcatctataatcactcagcacataattatctgtcaaacacttactacatgtcacgcactagggttgccatgatgagccggacagagctggccttggtacttatggagctc

SEQ ID NO: 697133 - DNA, 120 bp, Artificial Sequence
  ENSG00000189058_9 (sequence is synthesized)
acatcccagtgtggatactgacacgtgaccccgcaatttactataactagctagcgtttcaacaggtgaaacacaagtaggtgcacaccgggtgtgggctgcagaagacacaacccagtc

SEQ ID NO: 697134 - DNA, 120 bp, Artificial Sequence
  ENSG00000189058_10 (sequence is synthesized)
ttgtttcccaaaggaaactggggcccgaaacattagcagatattagcagaacaacctgcacggcgcagaaactaggaagcaagagatgacaagagtgacggcaagtttgaatcctgcttc

SEQ ID NO: 697135 - DNA, 120 bp, Artificial Sequence
  ENSG00000189058_11 (sequence is synthesized)
tgccactttccagtcacattgttggggatcctgtgagatacctaatgacaggcatttgcctctgggttctgagctaactgaggaagggacacaggcaatagagaaagcaccaaatattag

SEQ ID NO: 697136 - DNA, 120 bp, Artificial Sequence
  ENSG00000189058_12 (sequence is synthesized)
ttttatttccgacgaagatacactagagagttcaacccagaactgtgaggctttctaacacgaagagtgcttgaaagcccctttcccacctgcagggtagacactgaagtcatcagctac

SEQ ID NO: 697137 - DNA, 120 bp, Artificial Sequence
  ENSG00000189058_13 (sequence is synthesized)
aagacaggcatctcaaatcggctgattctgcatctggaaactgccttcatcttgaaagaaaagtttaccaggaagtaacccgggcaaattcacctcgttggtatgaagagagtgtcagca

SEQ ID NO: 697138 - DNA, 120 bp, Artificial Sequence
  ENSG00000189058_14 (sequence is synthesized)
gaggtcgcctccagaggaggtgctgtggagactgagcgcatagcacccttaaaatcctgggaccagggcttctccacggctccaggtcccttctccagccacccagccccaagatggtga

SEQ ID NO: 697139 - DNA, 72 bp, Artificial Sequence
  ENSG00000189058_15 (sequence is synthesized)
tcctccggtgcaggagaattttgacgtgaataagacggagtctcactttgtcacccagggtggagtgcagca

SEQ ID NO: 697140 - DNA, 120 bp, Artificial Sequence
  ENSG00000189058_16 (sequence is synthesized)
aagacaggcatctcaaatcggctgattctgcatctggaaactgccttcatcttgaaagaaaagatggagtttttgctctgttgcccaagctagagtgcaatggtgtgatcttggcttact

SEQ ID NO: 697141 - DNA, 120 bp, Artificial Sequence
  ENSG00000189058_17 (sequence is synthesized)
gcaacctctgcctcccatgttcaagcaattatcctgcatcagcctcccgagtagctgtgattacagctccaggtcccttctccagccacccagccccaagatggtgatgctgctgctgct

SEQ ID NO: 697142 - DNA, 120 bp, Artificial Sequence
  ENSG00000189060_0 (sequence is synthesized)
cggatttgctcggcggaagaaacacagatggcggcggcgcagcgccattccgggccgggagcaggcagccagcagccctgtcctcaccgcggtccgcccgccgccgctaaatacccggat

SEQ ID NO: 697143 - DNA, 120 bp, Artificial Sequence
  ENSG00000189060_1 (sequence is synthesized)
gcgccgcccaagcgccagacgcggagctgggaaaagggaggcagaggaggcggaggcagaggcagaggcagaggcagagcccgagcccggtgccgagaccaagcgacagaccggcggggc

SEQ ID NO: 697144 - DNA, 120 bp, Artificial Sequence
  ENSG00000189060_2 (sequence is synthesized)
tgggcctcgcaaagccggctcggcgagctctcccgacacccgagccggggaggaaaagcagcgactcctcgctcgcatccccgggagccgcactccagactggcccggtagtcaggggct

SEQ ID NO: 697145 - DNA, 120 bp, Artificial Sequence
  ENSG00000189060_3 (sequence is synthesized)
caggagcagatcccgaggcaggctttgctcagcctccgacgagggctggccctttggaaggcgccttcaacagccggaccagacaggccaccatgaccgagaattccacgtccgcccctg

SEQ ID NO: 697146 - DNA, 120 bp, Artificial Sequence
  ENSG00000189060_4 (sequence is synthesized)
cggccaagcccaagcgggccaaggcctccaagaagtccacagaccaccccaagtattcagacatgatcgtggctgccatccaggccgagaagaaccgcgctggctcctcgcgccagtcca

SEQ ID NO: 697147 - DNA, 120 bp, Artificial Sequence
  ENSG00000189060_5 (sequence is synthesized)
ttcagaagtatatcaagagccactacaaggtgggtgagaacgctgactcgcagatcaagttgtccatcaagcgcctggtcaccaccggtgtcctcaagcagaccaaaggggtgggggcct

SEQ ID NO: 697148 - DNA, 120 bp, Artificial Sequence
  ENSG00000189060_6 (sequence is synthesized)
cggggtccttccggctagccaagagcgacgaacccaagaagtcagtggccttcaagaagaccaagaaggaaatcaagaaggtagccacgccaaagaaggcatccaagcccaagaaggctg

SEQ ID NO: 697149 - DNA, 120 bp, Artificial Sequence
  ENSG00000189060_7 (sequence is synthesized)
cctccaaagccccaaccaagaaacccaaagccaccccggtcaagaaggccaagaagaagctggctgccacgcccaagaaagccaaaaaacccaagactgtcaaagccaagccggtcaagg

SEQ ID NO: 697150 - DNA, 120 bp, Artificial Sequence
  ENSG00000189060_8 (sequence is synthesized)
catccaagcccaaaaaggccaaaccagtgaaacccaaagcaaagtccagtgccaagagggccggcaagaagaagtgacaatgaagtcttttcttgcggacactccctcctgtctcctatt

SEQ ID NO: 697151 - DNA, 120 bp, Artificial Sequence
  ENSG00000189060_9 (sequence is synthesized)
ttctgactttataagagacaggatttggattcttcagaaattacagaataattcatttttccttaaccagttgtgcaaggacagcaacaaccaatctaatgatgagaatgtacttatatt

SEQ ID NO: 697152 - DNA, 120 bp, Artificial Sequence
  ENSG00000189060_10 (sequence is synthesized)
ttgttttgctattaacctacttacggggttagggatttgcggggggggcttgtgtgttttgttggcttgtttgccatgaaggtagatgtgggtggggagaagacacaaggcagtttgttc

SEQ ID NO: 697153 - DNA, 120 bp, Artificial Sequence
  ENSG00000189060_11 (sequence is synthesized)
tggctagatgagagggaacccaggaattgtgaggttagcaggaatatctttagggtgagtgagttttctttgagttgggcacccgttgtgagagtttcagaacctttggccagcaggaga

SEQ ID NO: 697154 - DNA, 120 bp, Artificial Sequence
  ENSG00000189060_12 (sequence is synthesized)
gaggtggtagggagcagccagccggcaaaggaaggagggggaaaaaaaccgccaccgggctgacttccacctcccagtggtgagcagtgggggcccaaacccagtttccttctcattttt

SEQ ID NO: 697155 - DNA, 120 bp, Artificial Sequence
  ENSG00000189060_13 (sequence is synthesized)
gttagtttgcgctttcggcctccctattttcttagggaaggggagtggggtccaagtgacagctggatgggagaagccatagtttctcccagtcagctaggatgtagccattgggggatc

SEQ ID NO: 697156 - DNA, 120 bp, Artificial Sequence
  ENSG00000189060_14 (sequence is synthesized)
tttgtggcttcagcaaattctcttgttaaaccggagtgaaaacttcaggggaagggtggggagtcagccaagtgcctcagtgtgccctgttgaaacttaggtttttccacgcaatcgatg

SEQ ID NO: 697157 - DNA, 120 bp, Artificial Sequence
  ENSG00000189060_15 (sequence is synthesized)
gattgtgtcctaggaagacttttcttttcctctggatttttgttcctcctgtacaagaggtgtctttgcttggtttggtggggctgcggccacttaaaacctcccgatctctttttgagt

SEQ ID NO: 697158 - DNA, 120 bp, Artificial Sequence
  ENSG00000189060_16 (sequence is synthesized)
cctttattataagtagttgtagctgcgggagggggagggggagtgggcgggcagtggatagtaagacttactgcagtcgatttgggatttgctaagtagttttacagagctagatctgtg

SEQ ID NO: 697159 - DNA, 120 bp, Artificial Sequence
  ENSG00000189060_17 (sequence is synthesized)
tgcatgtgtgtgtttgtgtatatatacatatctagggctagtacttagtttcacacccgggagctgggagaaaaaacctgtacagttgtctttctcttatttttaataaaatagaaaaat

SEQ ID NO: 697160 - DNA, 120 bp, Artificial Sequence
  ENSG00000189060_18 (sequence is synthesized)
cgcgcacttgcgcgtcccccccccacccccttttttaaacaagtgttacttgtgccgggaaaattttgctgtctttgtaattttaaaactttaaaataaattggaaaagggagaaactga

SEQ ID NO: 697161 - DNA, 120 bp, Artificial Sequence
  ENSG00000189067_0 (sequence is synthesized)
gtttctctccctgcccccgcgacttcgcgcaagatccgggaaggacacccgaggcccctgggagaccctggggaggtgaaaatcagagagcgaagcgggccgtggcccctaggcctgacc

SEQ ID NO: 697162 - DNA, 120 bp, Artificial Sequence
  ENSG00000189067_1 (sequence is synthesized)
cctccccgcggggtaaggcgggcaccccgcgagcgcaggggtcctcttactgctgatggcacccagctctgggcccagacgccgctcaccgtccaccgccggtgctgggtaaaatgtcgg

SEQ ID NO: 697163 - DNA, 120 bp, Artificial Sequence
  ENSG00000189067_2 (sequence is synthesized)
ttccaggaccttaccaggcggccactgggccttcctcagcaccatccgcacctccatcctatgaagagacagtggctgttaacagttattaccccacacctccagctcccatgcctgggc

SEQ ID NO: 697164 - DNA, 120 bp, Artificial Sequence
  ENSG00000189067_3 (sequence is synthesized)
caactacggggcttgtgacggggcctgatgggaagggcatgaatcctccttcgtattatacccagccagcgcccatccccaataacaatccaattaccgtgcagacggtctacgtgcagc

SEQ ID NO: 697165 - DNA, 120 bp, Artificial Sequence
  ENSG00000189067_4 (sequence is synthesized)
accccatcacctttttggaccgccctatccaaatgtgttgtccttcctgcaacaagatgatcgtgagtcagctgtcctataacgccggtgctctgacctggctgtcctgcgggagcctgt

SEQ ID NO: 697166 - DNA, 120 bp, Artificial Sequence
  ENSG00000189067_5 (sequence is synthesized)
gcctgctggggtgcatagcgggctgctgcttcatccccttctgcgtggatgccctgcaggacgtggaccattactgtcccaactgcagagctctcctgggcacctacaagcgtttgtagg

SEQ ID NO: 697167 - DNA, 120 bp, Artificial Sequence
  ENSG00000189067_6 (sequence is synthesized)
actcagccagacgtggagggagccgggtgccgcaggaagtcctttccacctctcatccagcttcacgcctggtggaggttctgccctggtggtctcacctctccagggggcccaccttca

SEQ ID NO: 697168 - DNA, 120 bp, Artificial Sequence
  ENSG00000189067_7 (sequence is synthesized)
tgtcttcttttggggggaatacgtcgcaaaactaacaaatctccaaaccccagaaattgctgcttggagtcgtgcataggacttgcaaagacattccccttgagtgtcagttccacggtt

SEQ ID NO: 697169 - DNA, 120 bp, Artificial Sequence
  ENSG00000189067_8 (sequence is synthesized)
tcctgcctccctgagaccctgagtcctgccatctaactgtgatcattgccctatccgaatatcttcctgtgatctgccatcagtggctcttttttcctgcttccatgggcctttctggtg

SEQ ID NO: 697170 - DNA, 120 bp, Artificial Sequence
  ENSG00000189067_9 (sequence is synthesized)
agtgcctaccattatcttatccgtctcttcccgtccctgatgacaaagatcttgccttacagactttacaggcttggctttgagattctgtaactgcagacttcattagcacacagattc

SEQ ID NO: 697171 - DNA, 120 bp, Artificial Sequence
  ENSG00000189067_10 (sequence is synthesized)
actttaatttcttaattttttttttaaatacaaggagggggctattaacacccagtacagacatatccacaaggtcgtaaatgcatgctagaaaaatagggctggatcttatcactgccc

SEQ ID NO: 697172 - DNA, 120 bp, Artificial Sequence
  ENSG00000189067_11 (sequence is synthesized)
tgtctccccttgtttctctgtgccagatcttcagtgcccctttccatacagggatttttttctcatagagtaattatatgaacagtttttatgacctccttttggtctgaaatacttttg

SEQ ID NO: 697173 - DNA, 86 bp, Artificial Sequence
  ENSG00000189067_12 (sequence is synthesized)
aacagtttttatgacctccttttggtctgaaatacttttgaacagaatttcttttttttaaaaaaaaacgtcgaactcctgggctc

SEQ ID NO: 697174 - DNA, 120 bp, Artificial Sequence
  ENSG00000189067_13 (sequence is synthesized)
gcaggcataagctaccatgctgggcctgaacataatttcaagaggaggatttataaaaccattttctgtaatcaaatgattggtgtcattttcccatttgccaatgtagtctcacttaaa

SEQ ID NO: 697175 - DNA, 120 bp, Artificial Sequence
  ENSG00000189067_14 (sequence is synthesized)
aaaaaaaaaaagaaaaagaaatggataatttcatctactgcctttacttggggttaatgtgattcttaaacaccttcatcatggaactctcagagtggggtccgttttggtttcctggtg

SEQ ID NO: 697176 - DNA, 120 bp, Artificial Sequence
  ENSG00000189067_15 (sequence is synthesized)
gtgggttttgaaagataagggaaagcacattttgagcatgtctgggtaccatggtgcggatgcttgggaaccagaactgtttcagaggaatctaaagtctgattttagttttcagagaca

SEQ ID NO: 697177 - DNA, 120 bp, Artificial Sequence
  ENSG00000189067_16 (sequence is synthesized)
cagcttgttgtaaaacatgagaagacatgatttctaggactcaagcagcaagccaggattctaggttggctgctgtgtcatctttgaagtcaagacaaagctgggctcgaccttcaaggg

SEQ ID NO: 697178 - DNA, 120 bp, Artificial Sequence
  ENSG00000189067_17 (sequence is synthesized)
tcctcgttttgataatacttcagaatagggaactcatgtgaatactactatgtagaaataaaacctagaccttgagcgaacatctgtatattggttgaaaacgatagtggtaaccattga

SEQ ID NO: 697179 - DNA, 120 bp, Artificial Sequence
  ENSG00000189067_18 (sequence is synthesized)
tcccccttcatttgatgtttggaaaattccagtaattatcatttttgcaacgaatatggataccacatagtactttggtgttacctgcttttgaaaaataaagtctttggttcacccggt

SEQ ID NO: 697180 - DNA, 120 bp, Artificial Sequence
  ENSG00000189067_19 (sequence is synthesized)
gctaaaaactttaccatcttcccagttcactcccagtcggtcttaggagacaggaccgctattgtgcccattttgcagacaggaagccgagctcagagaggatgggtaacatgcccgaag

SEQ ID NO: 697181 - DNA, 120 bp, Artificial Sequence
  ENSG00000189067_20 (sequence is synthesized)
catgttgcatttccagccattgctacaaagaacctttatttgttcagtaacggtagaaaatccttcccgattaaaaacttcagacttgctgaatatcctgcaatgtcaagatgaccgatg

SEQ ID NO: 697182 - DNA, 120 bp, Artificial Sequence
  ENSG00000189067_21 (sequence is synthesized)
ttgagttgggtggatttgctaacgagtcagatttgaacatgaggctattggaacccaataggcgtcattgatggcggcaagccatagctttcaagttttaataaaatgcacaaaagagaa

SEQ ID NO: 697183 - DNA, 120 bp, Artificial Sequence
  ENSG00000189067_22 (sequence is synthesized)
agacctcccggctcgacaggcggcgcgggcggcggagttgaatccccctgggggttttcaagttgttcttggactgctggtttttgaaatagaagcccctttggtggggtcccccataaa

SEQ ID NO: 697184 - DNA, 120 bp, Artificial Sequence
  ENSG00000189067_23 (sequence is synthesized)
agacctcccggctcgacaggcggcgcgggcggcgaattataaatgtgtttgtgtggctgtttgatctcaaagcaatgctcagaagatgcagtgtctcgaaatcccagaagataagatgtt

SEQ ID NO: 697185 - DNA, 120 bp, Artificial Sequence
  ENSG00000189067_24 (sequence is synthesized)
accacatgaaagatggtctcaataaagggggagaggcggtggccgaggccttaatttccaaaacgagaaactggggcccacccatcttttaaaggtcgtcaaaagaaagctcccatcctc

SEQ ID NO: 697186 - DNA, 120 bp, Artificial Sequence
  ENSG00000189067_25 (sequence is synthesized)
gcctcttggaggtttaggatgccccaggccttgttttccctcaaagcattccattggcaatcacgaccaaccatgctccttgaggatttctgtacacactggcttttcctggtcttgtaa

SEQ ID NO: 697187 - DNA, 120 bp, Artificial Sequence
  ENSG00000189067_26 (sequence is synthesized)
aataacaatccaagtacgtgtggcctcccaggccccccttaccattccttggccctccaccctgggaatcaggagagtgaccgaagtgactctgccaaagagtctaagtgaagtgccagt

SEQ ID NO: 697188 - DNA, 120 bp, Artificial Sequence
  ENSG00000189067_27 (sequence is synthesized)
acgttccagttttacccccttaccttgaaattccacacgcagtcttttagattccatgttggtgaggctcacagcttttccgtaataaagtatggtttaggatctttcccatggtcatca

SEQ ID NO: 697189 - DNA, 120 bp, Artificial Sequence
  ENSG00000189067_28 (sequence is synthesized)
aagcagtaacccattttctctgggacccctttcttcgcagagagcgcttctctttctttcgcctattacacttctgctcttaacttcagtctggtgtgtccgcatcctagttttgcatgg

SEQ ID NO: 697190 - DNA, 120 bp, Artificial Sequence
  ENSG00000189067_29 (sequence is synthesized)
ctgtcagacaacaaatctcggaccctccagccacatctcctgtaaataccccgtgtctttgtgctacccagagcccgagtctggccccatgtgcccgtgtaggtgtggaaccctgccacc

SEQ ID NO: 697191 - DNA, 120 bp, Artificial Sequence
  ENSG00000189067_30 (sequence is synthesized)
gaaagtggggagagccgcgagcggcaaatcaggagggagggccaggctgtcgggggcggacgggtggggctggcaccgagaggcaggggcaggataggagagtgggggagacaccaggtc

SEQ ID NO: 697192 - DNA, 120 bp, Artificial Sequence
  ENSG00000189067_31 (sequence is synthesized)
cccaggcgctggtgcccaccttgtgatgtgaaggctcctgtaacacgacctcactttcctggccccgcactactcacctgccccacgggacacagttaccgtgcagacggtctacgtgca

SEQ ID NO: 697193 - DNA, 120 bp, Artificial Sequence
  ENSG00000189067_32 (sequence is synthesized)
cagacaacaaatctcgggtatttaccccagacaacgacgctgcttcactagcacccattccatctggagcaagcacacctgattgccccagcccggctccgaggaggctggagaattgca

SEQ ID NO: 697194 - DNA, 120 bp, Artificial Sequence
  ENSG00000189067_33 (sequence is synthesized)
aggaaaagaaacccgccttgagccaccgcagctcgtgccaggggtctcagatgatggacagacactgatatggaggttcaaatttcgggaaacacagcaacagcccagccatggtaaaat

SEQ ID NO: 697195 - DNA, 120 bp, Artificial Sequence
  ENSG00000189067_34 (sequence is synthesized)
gacctcccggctcgacaggcggcgcgggcggcggaatttccccagagctacagtgagggtggaaaaaagaggatctgcaagaggaagtcctgtattcttggcactgtgacttgtcctcta

SEQ ID NO: 697196 - DNA, 120 bp, Artificial Sequence
  ENSG00000189067_35 (sequence is synthesized)
gcctgctggggtgagtctgcctcccacttggccccaagccatcctgcccttctctctgggtgctggcgggggtgggttctcaactgcaccatgcttgacattcagggccagacatttgtg

SEQ ID NO: 697197 - DNA, 120 bp, Artificial Sequence
  ENSG00000189068_0 (sequence is synthesized)
ctctatctgcacatcctggggacgaaccgggcagccggagagctgcggccggcccagtcccgctccgcctttgaagggtaaaacccaaggcggggccttggttctggcagaagggacgct

SEQ ID NO: 697198 - DNA, 120 bp, Artificial Sequence
  ENSG00000189068_1 (sequence is synthesized)
atgaccgcagaattcctctccctgctttgcctcgggctgtgtctgggctacgaagatgagaaaaagaatgagaaaccgcccaagccctccctccacgcctggcccagctcggtggttgaa

SEQ ID NO: 697199 - DNA, 120 bp, Artificial Sequence
  ENSG00000189068_2 (sequence is synthesized)
gccgagagcaatgtgaccctgaagtgtcaggctcattcccagaatgtgacatttgtgctgcgcaaggtgaacgactctgggtacaagcaggaacagagctcggcagaaaacgaagctgaa

SEQ ID NO: 697200 - DNA, 120 bp, Artificial Sequence
  ENSG00000189068_3 (sequence is synthesized)
ttccccttcacggacctgaagcctaaggatgctgggaggtacttttgtgcctacaagacaacagcctcccatgagtggtcagaaagcagtgaacacttgcagctggtggtcacagataaa

SEQ ID NO: 697201 - DNA, 120 bp, Artificial Sequence
  ENSG00000189068_4 (sequence is synthesized)
aacttgaagctccctcaatgaaaacagacaccagaaccatctttgtcgccatcttcagctgcatctccatccttctcctcttcctctcagtcttcatcatctacagatgcagccagcaca

SEQ ID NO: 697202 - DNA, 120 bp, Artificial Sequence
  ENSG00000189068_5 (sequence is synthesized)
gttcatcatctgaggaatccaccaagagaaccagccattccaaacttccggagcaggaggctgccgaggcagatttatccaatatggaaagggtatctctctcgacggcagacccccaag

SEQ ID NO: 697203 - DNA, 120 bp, Artificial Sequence
  ENSG00000189068_6 (sequence is synthesized)
gagtgacctatgctgagctaagcaccagcgccctgtctgaggcagcttcagacaccacccaggagcccccaggatctcatgaatatgcggcactgaaagtgtagcaagaagacagccctg

SEQ ID NO: 697204 - DNA, 120 bp, Artificial Sequence
  ENSG00000189068_7 (sequence is synthesized)
gccactaaaggaggggggatcgtgctggccaaggttatcggaaatctggagatgcagatactgtgtttccttgctcttcgtccatatcaataaaattaagtttctcgtcttaaaaagaaa

SEQ ID NO: 697205 - DNA, 120 bp, Artificial Sequence
  ENSG00000189068_8 (sequence is synthesized)
ccgaatgtattgtaattgctctgttgaaaatggggatcccagaaccattacaagtcaggcaagtaagaaaaaaccagactgatttcatgctctggaacgtgacaagtaatgacagtggaa

SEQ ID NO: 697206 - DNA, 120 bp, Artificial Sequence
  ENSG00000189068_9 (sequence is synthesized)
actacagctgtgtgtattacctgagcaactcatcacacttggcctccttccccagcaacaagctggagatctgggtgacagataaacacgatgaacttgaagctccctcaatgaaaacag

SEQ ID NO: 697207 - DNA, 120 bp, Artificial Sequence
  ENSG00000189077_0 (sequence is synthesized)
actactggctactggcgctgcagccatgcagcccccgcccccgggcccgctgggcgactgcctgcgggactgggaggatctacagcaggacttccagaacatccaggagacccatcggct

SEQ ID NO: 697208 - DNA, 120 bp, Artificial Sequence
  ENSG00000189077_1 (sequence is synthesized)
ctaccgcctgaagctggaggagctgaccaaacttcagaacaattgcaccagctccatcacgcggcagaagaagcggctccaggagctggccctcgccctgaagaaatgcaaaccctccct

SEQ ID NO: 697209 - DNA, 120 bp, Artificial Sequence
  ENSG00000189077_2 (sequence is synthesized)
cccagcagaggccgagggggccgcacaggagctggagaaccagatgaaagagcgccaaggcctcttctttgacatggaggcctatttgcctaagaagaatggattgtacctgagcctggt

SEQ ID NO: 697210 - DNA, 120 bp, Artificial Sequence
  ENSG00000189077_3 (sequence is synthesized)
tctggggaacgtcaacgtcacgctcctgagcaagcaggctaagtttgcctacaaggacgagtatgagaagttcaagctctacctcaccatcatcctcatcctcatctccttcacttgccg

SEQ ID NO: 697211 - DNA, 120 bp, Artificial Sequence
  ENSG00000189077_4 (sequence is synthesized)
cttcctgctcaactccagggtgacagatgctgccttcaacttcctgctggtctggtactactgcaccctgaccatccgggagagcatcctcatcaacaacggctcccggatcaaaggctg

SEQ ID NO: 697212 - DNA, 120 bp, Artificial Sequence
  ENSG00000189077_5 (sequence is synthesized)
attccggaaccaattcctctccttttccatgtaccagagcttcgtgcagtttctccagtactactaccagagcggctgcctctaccgcctgcgggcgctgggcgagcggcacaccatgga

SEQ ID NO: 697213 - DNA, 120 bp, Artificial Sequence
  ENSG00000189077_6 (sequence is synthesized)
cctcactgtggagggcttccagtcctggatgtggcggggcctcaccttcctgctgccttttcttttctttggacacttctggcagctttttaacgcgctgacgttgttcaacctggccca

SEQ ID NO: 697214 - DNA, 120 bp, Artificial Sequence
  ENSG00000189077_7 (sequence is synthesized)
ggaccctcagtgcaaggagtggcaggtgcttatgtgcggctttcccttcctcctccttttcctcggcaatttcttcaccaccctgagggttgtgcaccacaagtttcacagtcagcggca

SEQ ID NO: 697215 - DNA, 120 bp, Artificial Sequence
  ENSG00000189077_8 (sequence is synthesized)
cgggagcaagaaggattgaggctgggccttcccctgccggcccagaggggcttctgtcctgtgtgttgtgggaggggatgggaggcgcccctcgagtgtgcgtgtatcagggggtctctt

SEQ ID NO: 697216 - DNA, 120 bp, Artificial Sequence
  ENSG00000189077_9 (sequence is synthesized)
ctattctcccttgggttttatgggcgctgtgggccctgaaggaagacctgggcccagtgccctcaataaagagaggcccagaggtggcctgagcgtgtgtgttctcctgggggaggggag

SEQ ID NO: 697217 - DNA, 120 bp, Artificial Sequence
  ENSG00000189077_10 (sequence is synthesized)
ggctgggtggccccaccacatgggttcctggggtctgagttagttaagttgatgcaggtggaggtcccagatctactcacacaataccaggcaaatacagaaaacagaactttattccaa

SEQ ID NO: 697218 - DNA, 120 bp, Artificial Sequence
  ENSG00000189077_11 (sequence is synthesized)
ccgggtctgagtggtagcgtcccctctgtccctggccgtcctgtgccctgaccttcctccccgcagagggcttccagtcctggatgtggcggggcctcaccttcctgctgccttttcttt

SEQ ID NO: 697219 - DNA, 120 bp, Artificial Sequence
  ENSG00000189077_12 (sequence is synthesized)
tctttggacacgtaagtcgtgcctctgtgtccctgcctgtctgtctgtccgtcctctgcgccggtttcgggctccagcagggactgggtcttctgagtaaaatgcctcctccctgcttag

SEQ ID NO: 697220 - DNA, 120 bp, Artificial Sequence
  ENSG00000189077_13 (sequence is synthesized)
gctccaggatcaaaggctggtgggtgttccatcactacgtgtccaccttcctgtcgggagtcatgctgacgtggtgagtggctgggccccggcaggggcaggagctgggacaaggagggg

SEQ ID NO: 697221 - DNA, 120 bp, Artificial Sequence
  ENSG00000189079_0 (sequence is synthesized)
gccggcccatgactgagccccgccgccgccggccgaggaatgggctccgggctctggtaggaagcgctgggagcggggggcgcttttaaaacaccgatctgggttttttaaaaacctcct

SEQ ID NO: 697222 - DNA, 120 bp, Artificial Sequence
  ENSG00000189079_1 (sequence is synthesized)
ttgaaaaaataatggcaaactcgacggggaaggcgcctccggacgagcggagaaagggactcgctttcctggacgagctgcggcagttccaccacagcagagggtcgccttttaaaaaaa

SEQ ID NO: 697223 - DNA, 120 bp, Artificial Sequence
  ENSG00000189079_2 (sequence is synthesized)
tccctgcggtgggtgggaaggagctggatcttcacggtctctacaccagagtcactactttaggcggattcgcgaaggtttctgagaagaatcagtggggagaaattgttgaagagttca

SEQ ID NO: 697224 - DNA, 120 bp, Artificial Sequence
  ENSG00000189079_3 (sequence is synthesized)
actttcccagaagttgttctaacgctgcctttgctttaaaacagtattacttgcgttacctagaaaagtacgagaaagttcatcattttggggaggatgatgatgaggtaccaccaggca

SEQ ID NO: 697225 - DNA, 120 bp, Artificial Sequence
  ENSG00000189079_4 (sequence is synthesized)
atccaaagccacagcttcctattggtgcaattccatcttcctacaattaccagcaacacagtgtgtcggattatctgcgtcaaagttatgggctgtccatggactttaattcgccaaatg

SEQ ID NO: 697226 - DNA, 120 bp, Artificial Sequence
  ENSG00000189079_5 (sequence is synthesized)
attataataaattggtgctttcactgttatctggactcccaaatgaagtggactttgctattaacgtatgcactctcctatcaaatgaaagcaagcacgtcatgcaacttgaaaaagatc

SEQ ID NO: 697227 - DNA, 120 bp, Artificial Sequence
  ENSG00000189079_6 (sequence is synthesized)
ctaaaatcatcactttactacttgctaatgccggggtgtttgacgacactttaggatccttttccactgtatttggagaagaatggaaagagaagactgatagagacttcgttaagtttt

SEQ ID NO: 697228 - DNA, 120 bp, Artificial Sequence
  ENSG00000189079_7 (sequence is synthesized)
ggaaagacatcgttgatgataatgaagttcgtgacctcatttctgacagaaacaagtctcatgaaggtacatcaggagaatggatttgggagtctttatttcatccacctcgaaagctgg

SEQ ID NO: 697229 - DNA, 120 bp, Artificial Sequence
  ENSG00000189079_8 (sequence is synthesized)
gcattaacgatattgaaggacagcgggtacttcagattgcagtgattttgagaaatctttcctttgaggagggcaatgttaagctcttggcagctaatcgtacctgtcttcgtttcctat

SEQ ID NO: 697230 - DNA, 120 bp, Artificial Sequence
  ENSG00000189079_9 (sequence is synthesized)
tactttctgcacatagtcattttatttctttaaggcaattaggccttgacacattaggaaatattgcagctgagcttttactggaccctgttgatttcaaaactactcatctgatgtttc

SEQ ID NO: 697231 - DNA, 120 bp, Artificial Sequence
  ENSG00000189079_10 (sequence is synthesized)
atactgttacaaaatgtctaatgtcaagggatagatttttaaagatgagaggcatggaaattttgggaaatctttgcaaagcagaagataatggtgttttaatttgtgaatatgtggatc

SEQ ID NO: 697232 - DNA, 120 bp, Artificial Sequence
  ENSG00000189079_11 (sequence is synthesized)
aggattcctacagagagatcatttgtcatctcactttacctgatgtgctgcttgtaatctcaacactcgaggtgctatacatgctcacggaaatgggagatgttgcttgcacaaaaattg

SEQ ID NO: 697233 - DNA, 120 bp, Artificial Sequence
  ENSG00000189079_12 (sequence is synthesized)
caaaagtagaaaagagcatagacatgttagtgtgtctggtttctatggatattcagatgtttggccctgatgcactagctgcggtaaaactcattgaacacccaagttccagtcatcaaa

SEQ ID NO: 697234 - DNA, 120 bp, Artificial Sequence
  ENSG00000189079_13 (sequence is synthesized)
tgttatctgaaattaggccacaagctatagagcaagtccaaacccagactcatgtagcatctgccccagcttccagagcagttgtagcgcagcatgttgctccacctccaggaatagtgg

SEQ ID NO: 697235 - DNA, 120 bp, Artificial Sequence
  ENSG00000189079_14 (sequence is synthesized)
aaatagatagtgagaagtttgcttgtcagtggctaaatgctcattttgaagtaaatccagattgttctgtttctcgagcagaaatgtattctgaatacctctcgacttgcagtaaattag

SEQ ID NO: 697236 - DNA, 120 bp, Artificial Sequence
  ENSG00000189079_15 (sequence is synthesized)
ctcgtggtggaatcctaacatcaactggattttataaatgtcttagaacggtctttccaaatcatacagtgaagagagtggaggattccagtagcaatgggcaggcacatattcatgtgg

SEQ ID NO: 697237 - DNA, 120 bp, Artificial Sequence
  ENSG00000189079_16 (sequence is synthesized)
taggagtaaaacggagggctataccacttcccattcagatgtactatcagcagcaaccagtttctacttctgttgttcgtgttgattctgttcctgatgtatctcctgctccttcacctg

SEQ ID NO: 697238 - DNA, 120 bp, Artificial Sequence
  ENSG00000189079_17 (sequence is synthesized)
caggaatccctcatggatcacaaaccataggaaaccattttcagaggactcctgttgccaaccaatcttcaaatctgactgcaacacaaatgtcttttcctgtacaaggtgttcatactg

SEQ ID NO: 697239 - DNA, 120 bp, Artificial Sequence
  ENSG00000189079_18 (sequence is synthesized)
tggcacaaactgtttcaagaattccacaaaatccttcacctcatacccaccagcaacaaaatgctccagtgactgtcattcaaagtaaagctccaattccttgtgaagttgttaaggcta

SEQ ID NO: 697240 - DNA, 120 bp, Artificial Sequence
  ENSG00000189079_19 (sequence is synthesized)
cagttatccagaattccataccccagacaggagttcctgttagtattgctgttggaggaggacctccacagagttctgttgttcagaatcatagtacagggccacaacctgttacagttg

SEQ ID NO: 697241 - DNA, 120 bp, Artificial Sequence
  ENSG00000189079_20 (sequence is synthesized)
tgaattctcagacattgcttcaccatccatctgtaattccacagcagtctccattacacacagtggtaccaggacagatcccttcaggcactcctgttacagtaattcaacaagctgtcc

SEQ ID NO: 697242 - DNA, 120 bp, Artificial Sequence
  ENSG00000189079_21 (sequence is synthesized)
cacagagtcatatgtttggcagagtacagaacataccagcatgtacttctacagtttcacagggtcaacagttaatcaccacatcaccccaacctgtgcaaacttcatctcaacagacat

SEQ ID NO: 697243 - DNA, 120 bp, Artificial Sequence
  ENSG00000189079_22 (sequence is synthesized)
cagctggtagccagtcacaagatactgttatcatagcacccccacagtatgtaacaacttctgcatccaatattgtctcagcaacttcagtacagaattttcaggtagctacaggacaaa

SEQ ID NO: 697244 - DNA, 120 bp, Artificial Sequence
  ENSG00000189079_23 (sequence is synthesized)
tggttactattgctggtgtcccaagtccacaagcctcaagggtagggtttcagaacattgcaccaaaacctctcccttctcagcaagtttcatctacagtggtacagcagcctattcaac

SEQ ID NO: 697245 - DNA, 120 bp, Artificial Sequence
  ENSG00000189079_24 (sequence is synthesized)
aaccacagcagccaacccaacaaagcgtagtgattgtaagccagccagctcaacaaggtcaaacttatgcaccagccattcaccaaattgttcttgctaatccagcagctcttccagctg

SEQ ID NO: 697246 - DNA, 120 bp, Artificial Sequence
  ENSG00000189079_25 (sequence is synthesized)
gtcagacagttcagctaactggacaacctaacataactccatcttcttcaccatcacctgtcccagctactaataaccaagtccctactgccatgtcgtcgtcctctacccctcaatcac

SEQ ID NO: 697247 - DNA, 120 bp, Artificial Sequence
  ENSG00000189079_26 (sequence is synthesized)
agggaccacctcctactgtcagtcaaatgttatctgtgaaaaggcagcaacagcagcaacattcaccagcacccccaccacagcaggtacaagtacaagttcagcagccccaacaagtac

SEQ ID NO: 697248 - DNA, 120 bp, Artificial Sequence
  ENSG00000189079_27 (sequence is synthesized)
agatgcaagttcaacctcaacagtcgaatgcaggagttggtcagcctgcctctggtgagtcgagtctgattaaacagcttctgcttccgaaacgtggtccttcaacaccaggtggtaagc

SEQ ID NO: 697249 - DNA, 120 bp, Artificial Sequence
  ENSG00000189079_28 (sequence is synthesized)
ttattctcccagctccacagattcctccccctaataatgcaagagctcctagccctcaggtggtctatcaggtggccagtaaccaagccgcaggttttggagtgcaggggcaaactccag

SEQ ID NO: 697250 - DNA, 120 bp, Artificial Sequence
  ENSG00000189079_29 (sequence is synthesized)
ctcagcagctattggttgggcagcaaaatgttcagttggtcccaagtgcaatgccaccctcagggggagtacaaactgtgcccatttcgaacttacaaatattgccaggtccactgatct

SEQ ID NO: 697251 - DNA, 120 bp, Artificial Sequence
  ENSG00000189079_30 (sequence is synthesized)
caaatagcccagcaaccattttccaagggacttctggcaaccaggtaaccataacagttgtgccaaatacgagttttgcacctgcaactgtgagtcagggaaatgcaactcagctcattg

SEQ ID NO: 697252 - DNA, 120 bp, Artificial Sequence
  ENSG00000189079_31 (sequence is synthesized)
ctccagcaggaattaccatgagcggaacgcagacaggagttggacttccagtacaaacgcttccagccactcaagcatctcctgctggacaatcatcatgtactactgctactcccccat

SEQ ID NO: 697253 - DNA, 120 bp, Artificial Sequence
  ENSG00000189079_32 (sequence is synthesized)
tcaaaggtgataaaataatttgccaaaaggaggaggaagcaaaggaagcaacaggtttacatgttcatgaacgtaaaattgaagtcatggagaacccgtcctgccgacgaggagccacaa

SEQ ID NO: 697254 - DNA, 120 bp, Artificial Sequence
  ENSG00000189079_33 (sequence is synthesized)
acaccagcaatggggatacaaaggaaaatgaaatgcatgtgggaagtcttttaaatgggagaaagtacagtgactcaagtctacctccttcaaactcagggaaaattcaaagtgagacta

SEQ ID NO: 697255 - DNA, 120 bp, Artificial Sequence
  ENSG00000189079_34 (sequence is synthesized)
atcagtgctcactaatcagtaatgggccatcattggaattaggtgagaatggagcatctgggaaacagaactcagaacaaatagacatgcaagatatcaaaagtgatttgagaaaaccgc

SEQ ID NO: 697256 - DNA, 120 bp, Artificial Sequence
  ENSG00000189079_35 (sequence is synthesized)
atcatgtaggaaatggtgagatatctccaatggaaccacaagggactttagatatcactcagcaagatactgccaaaggtgatcaactagaaagaatttctaatggacctgtattaactt

SEQ ID NO: 697257 - DNA, 120 bp, Artificial Sequence
  ENSG00000189079_36 (sequence is synthesized)
tgggtggttcatctgtgagcagtatacaggaggcttcaaatgcggcaacacagcaatttagtggtactgatttgcttaatggacctctagcttcaagtttgaattcagatgtgcctcagc

SEQ ID NO: 697258 - DNA, 120 bp, Artificial Sequence
  ENSG00000189079_37 (sequence is synthesized)
aacgcccaagtgtagttgtctcaccacattctacaacctctgttatacagggacatcaaatcatagcagttcccgactcaggatcaaaagtatcccattctcctgccctatcatctgacg

SEQ ID NO: 697259 - DNA, 120 bp, Artificial Sequence
  ENSG00000189079_38 (sequence is synthesized)
ttcggtctacaaatggcacagcagaatgcaaaactgtaaagaggccagcagaggatactgatagggaaacagtcgcaggaattccaaataaagtaggagttagaattgttacaatcagtg

SEQ ID NO: 697260 - DNA, 120 bp, Artificial Sequence
  ENSG00000189079_39 (sequence is synthesized)
accccaacaatgctggctgcagcgcaacaatggttgctgtgccagcaggagcagatccaagcactgtagctaaagtagcaatagaaagtgctgttcagcaaaagcaacagcatccaccaa

SEQ ID NO: 697261 - DNA, 120 bp, Artificial Sequence
  ENSG00000189079_40 (sequence is synthesized)
catatgtacagaatgtggtcccgcagaacactcctatgccaccttcaccagctgtacaagtgcagggccagcctaacagttctcagccttctccattcagtggatccagtcagcctggag

SEQ ID NO: 697262 - DNA, 120 bp, Artificial Sequence
  ENSG00000189079_41 (sequence is synthesized)
atccaatgagaaaacctggacagaacttcatgtgtctgtggcagtcttgtaaaaagtggtttcagacaccctcacaggttttctaccatgcagcaactgaacatggaggaaaagatgtat

SEQ ID NO: 697263 - DNA, 120 bp, Artificial Sequence
  ENSG00000189079_42 (sequence is synthesized)
atccagggcagtgtctttgggaaggttgtgagccttttcagcgacagcggttttcttttattacccacttgcaggataagcactgttcaaaggatgccctacttgcaggattaaaacaag

SEQ ID NO: 697264 - DNA, 120 bp, Artificial Sequence
  ENSG00000189079_43 (sequence is synthesized)
atgaaccaggacaagcaggaagtcagaagtcttctaccaagcagccaactgtagggggcacaagctcaactcctagagcacaaaaggccattgtgaatcatcccagtgctgcacttatgg

SEQ ID NO: 697265 - DNA, 120 bp, Artificial Sequence
  ENSG00000189079_44 (sequence is synthesized)
ctctgaggagaggatcaagaaaccttgtctttcgagattttacagatgaaaaagagggaccaataactaaacacatccgactaacagctgccttaatattaaaaaatattggtaaatatt

SEQ ID NO: 697266 - DNA, 120 bp, Artificial Sequence
  ENSG00000189079_45 (sequence is synthesized)
cagaatgtggtcgcagattgttaaagagacatgaaaataacttatcagtgctagccattagtaacatggaagcttcctccacccttgccaaatgcctttatgaacttaattttacagttc

SEQ ID NO: 697267 - DNA, 120 bp, Artificial Sequence
  ENSG00000189079_46 (sequence is synthesized)
agagtaaggaacaagaaaaagactcagaaatgctgcagtgaaaaataattccacttacacagtgggggactcaaagtcagccacatttcacatactgttactgaagaaagcaccaagtct

SEQ ID NO: 697268 - DNA, 120 bp, Artificial Sequence
  ENSG00000189079_47 (sequence is synthesized)
taatggaacaaagaccatagaatgaattattttatctcctcccatgatgctgagaggaagcttcgtattctgatctctgagtgaatccctttgttctctgtttaaaaaaatctaaaaaga

SEQ ID NO: 697269 - DNA, 120 bp, Artificial Sequence
  ENSG00000189079_48 (sequence is synthesized)
aaaaggaaaaaaaaaaaagaactgctgtgggattgtcaaccagcttatctgcaggatgtttcagatctgataaatcctgatggaaactggtatgatcagaattcagtaccatccacattg

SEQ ID NO: 697270 - DNA, 120 bp, Artificial Sequence
  ENSG00000189079_49 (sequence is synthesized)
gaatatacatggaatattgtaaaacctacatgagcagatgaaatagaagcattaaatatttttatctatatccaaaaaggagcacatttttatatttacaaaaccgtttaagctggtttg

SEQ ID NO: 697271 - DNA, 120 bp, Artificial Sequence
  ENSG00000189079_50 (sequence is synthesized)
aataatttaaaaaagtttcagcacacctatacccccgatctcagagggggccaccaatatctagctatggatcgtgtgttttgtttagaaatcagtagcttggttttcttacttgagcca

SEQ ID NO: 697272 - DNA, 120 bp, Artificial Sequence
  ENSG00000189079_51 (sequence is synthesized)
atatattttcacttatttattatcataaaaatttaccagtctgaatagatcttgtaaatatttgtgaatagaatgaatacctttcatgccactgcagccactggaaatacattctgtggt

SEQ ID NO: 697273 - DNA, 120 bp, Artificial Sequence
  ENSG00000189079_52 (sequence is synthesized)
gtcctagaagcattattggtaggttctaaagttttctagactttcctgtcaattgtaagtaattgtgatatattctatgcagtggatgaatgttctttaaatttgtgtaaatacttctgc

SEQ ID NO: 697274 - DNA, 81 bp, Artificial Sequence
  ENSG00000189079_53 (sequence is synthesized)
agtggatgaatgttctttaaatttgtgtaaatacttctgcaaaggtactgatgctgtaaagtcaaaacagttttgtggaac

SEQ ID NO: 697275 - DNA, 120 bp, Artificial Sequence
  ENSG00000189079_54 (sequence is synthesized)
tgaaagagtatggaataatatatctcatgtcattttttagaagaaaaactatttgaaggtattttttggttttccttaacatgtatccactgtaaacgtttgtcgtgtacaagctcagag

SEQ ID NO: 697276 - DNA, 120 bp, Artificial Sequence
  ENSG00000189079_55 (sequence is synthesized)
cttggacagaattttttgtatttgtaaattggtttaaatacatggaattttatacaggttttctcctgtgttatatatgcattatgtgcaggtatgatattttcttcactactttttcta

SEQ ID NO: 697277 - DNA, 120 bp, Artificial Sequence
  ENSG00000189079_56 (sequence is synthesized)
tcttaatatagtgtggaattttattgtattattcttccattcttaatactgtaccacattcctgctcagaaactgctcacttccttaaattgtcttttttcccccagcgtgaaatgtatc

SEQ ID NO: 697278 - DNA, 120 bp, Artificial Sequence
  ENSG00000189079_57 (sequence is synthesized)
catttataactgcctattgcctgttctattagcatccaaaaatgtggaaggcctcccaaccaccatttctgctgtgtccttaggatgtgcagtaaaaaatatagacctaacagtttatgt

SEQ ID NO: 697279 - DNA, 120 bp, Artificial Sequence
  ENSG00000189079_58 (sequence is synthesized)
tatagaatggctttatttactttggtgactgtttatagtttttaaataaaagactgaacattttcttgagtccttcatttctgagtatgcttaagacatcttaaaaatatagagagaatt

SEQ ID NO: 697280 - DNA, 120 bp, Artificial Sequence
  ENSG00000189079_59 (sequence is synthesized)
ctaaattcagctgaaggcaaggtataacggtcacctacctatttgattatatgttgattgataacatattaaatagagaacaaataagagaggtcctttacatgacaaatttgcatgaaa

SEQ ID NO: 697281 - DNA, 120 bp, Artificial Sequence
  ENSG00000189079_60 (sequence is synthesized)
taagcagattaaccaagtatttatttttcatcttgttataatgcagagcaaatgtagagaacagcaaatgattgatgcagttaaagctcaatatgcctttttttactggatactgtacat

SEQ ID NO: 697282 - DNA, 120 bp, Artificial Sequence
  ENSG00000189079_61 (sequence is synthesized)
ttggctaaaagcttttattgtttgatgttgtgtttcttgactgtttattcagaatcacagtgtatccaaatcttcagcttgaatttggaggcagattcttagagtgaaaaagcctcagtt

SEQ ID NO: 697283 - DNA, 120 bp, Artificial Sequence
  ENSG00000189079_62 (sequence is synthesized)
tccatattaaaaatgttttaaatattttgattgaattagtaccaatgtaaaatctagtttcttcctgaaggaggatccctggcgctgtcctgccatgtctcaaaggaatgtttgagaaac

SEQ ID NO: 697284 - DNA, 120 bp, Artificial Sequence
  ENSG00000189079_63 (sequence is synthesized)
ttcatctaatattagttataaggttgtggaatttatgcttggcccaccttccaagactggcactgcccaacagacaccgctgaaatcatgtgggtatccctaggatggccttcagagccc

SEQ ID NO: 697285 - DNA, 120 bp, Artificial Sequence
  ENSG00000189079_64 (sequence is synthesized)
tcaaacttacaagcacctggtagttgacatcatatggggaattttctattcaccgtacttatccaaaaatctcttttaaaaagtaaatttgtgcaacaacgtttatttgaaagataatgt

SEQ ID NO: 697286 - DNA, 120 bp, Artificial Sequence
  ENSG00000189079_65 (sequence is synthesized)
cttctcaaaatcagaaactgcagtggtaattaaattaatagaaaagagaacaaactgcaggtttagaaaaatggttttcatattcaccattcttccacctcattgaattgcatgctgtag

SEQ ID NO: 697287 - DNA, 120 bp, Artificial Sequence
  ENSG00000189079_66 (sequence is synthesized)
ttctagcttttctgctataatatgtaaatatgactgtagccttttaagcttcagtctcagcagagaatttcctaaatgcgtttgacctaatgaaactgatcatggcttcccacttaggtt

SEQ ID NO: 697288 - DNA, 120 bp, Artificial Sequence
  ENSG00000189079_67 (sequence is synthesized)
tttcttcttatagctttatagaactatataataatatggacttgctgtgtaatggaattaaagtgcttttgcacaataagttctgcaaaaccctctcattcatgaaaaggtgctccttgc

SEQ ID NO: 697289 - DNA, 120 bp, Artificial Sequence
  ENSG00000189079_68 (sequence is synthesized)
tagacagaaacttgctgatttacagtattgttatttttgtctaaagttctgtaaatacatgctttaatgttatctttgagaaatctatgtaaataatatagtctacaacatagagactgt

SEQ ID NO: 697290 - DNA, 120 bp, Artificial Sequence
  ENSG00000189079_69 (sequence is synthesized)
ataattctgtgttatatatgtgcctagtgctctgttggcactcaataaattttaagtaacaaaattgataatcatatagcgaaggcatatttttcttccaagctcaagtcaggattgtga

SEQ ID NO: 697291 - DNA, 120 bp, Artificial Sequence
  ENSG00000189079_70 (sequence is synthesized)
ctatatattaatgagactcagtaatccaacccacacctgagaactcgtctcattactttatagtcatgtcatgtatgtttttttaaccatgaaatgacaataaaatgatttttaaaatga

SEQ ID NO: 697292 - DNA, 120 bp, Artificial Sequence
  ENSG00000189079_71 (sequence is synthesized)
ttcatgagactctacagcagtgattctctaactgaggttccccagaccagccggatcggcatcatctgggagcttgttagaaatgcaaatattcagacctactcagtcagaaactctggg

SEQ ID NO: 697293 - DNA, 120 bp, Artificial Sequence
  ENSG00000189079_72 (sequence is synthesized)
gttagggccaagcagtctgtttttaacaggtcctccaggtgattctgaaccttgctaaagtttaggaactgctctacagagagtgacttgttgaaataagttcacttgattttaatccag

SEQ ID NO: 697294 - DNA, 81 bp, Artificial Sequence
  ENSG00000189079_73 (sequence is synthesized)
atcagtggggagaaattgttgaagagttcaactttcccagaagttgttctaacgctgcctttgctttaaaacagtattact

SEQ ID NO: 697295 - DNA, 120 bp, Artificial Sequence
  ENSG00000189079_74 (sequence is synthesized)
ttttacatataagttaataaaattagataactgtattttcttcattgtttttctcatcaattttgcaaatacatccaaaagtttatgcctaggtcaggccatgatgagctcttaaaagtc

SEQ ID NO: 697296 - DNA, 120 bp, Artificial Sequence
  ENSG00000189079_75 (sequence is synthesized)
ataggggagaagaaaaggtaacatacatcatttttctacagatctcttcaacatgttagaaaataatagcttccagagcagttgtagcgcagcatgttgctccacctccaggaatagtgg

SEQ ID NO: 697297 - DNA, 120 bp, Artificial Sequence
  ENSG00000189079_76 (sequence is synthesized)
tagagcaagtccaaacccagactcatgtagcatctgccccaggttagtgttttcacatattctttttcagtgtggttacgagtgtataagatttgatcctaagaataaatttcaatgtgc

SEQ ID NO: 697298 - DNA, 120 bp, Artificial Sequence
  ENSG00000189079_77 (sequence is synthesized)
agtatagagaactgatattttacagtatagtaggccaaagtggaatttggatatgtactctaatttcttagatattatacattccaggagtagcaggatcaaggtgagctcataggaaga

SEQ ID NO: 697299 - DNA, 120 bp, Artificial Sequence
  ENSG00000189079_78 (sequence is synthesized)
atagtataataggaaaattaagttcggcaggatttagagtaatgtgatgaattagatattcataattacgatagctataagtgccccaataggcatattatttgtgattttggtcatggg

SEQ ID NO: 697300 - DNA, 120 bp, Artificial Sequence
  ENSG00000189079_79 (sequence is synthesized)
aaattgacatgccaggaatagattattcatatattaccttatgattttctcaggtgatcatcaggacgcgtaagtataatacttctaatgtccttaagtgttggaaccaacaccacagaa

SEQ ID NO: 697301 - DNA, 120 bp, Artificial Sequence
  ENSG00000189079_80 (sequence is synthesized)
tcaacagcctaggagaagacacatgcacatatgtatacacacacttacaagcatgtatacctgcatttatgcacctttcctagtgtctcttagctcaattctgtttagctcaactgtaat

SEQ ID NO: 697302 - DNA, 120 bp, Artificial Sequence
  ENSG00000189079_81 (sequence is synthesized)
tatagtacagacatgtctaataaccagacttcagtccttgaactccttccactggctcattatgagtcatcattttttatattttaccacccttaacctttttttggagtgctttctcta

SEQ ID NO: 697303 - DNA, 120 bp, Artificial Sequence
  ENSG00000189079_82 (sequence is synthesized)
ccttggtttatactaaaaatacatatttcatctcacctacccttccatttcctatcctctcacctcctgctgtccccaagacacttaatctttctttatattttttgaatggaggatgct

SEQ ID NO: 697304 - DNA, 120 bp, Artificial Sequence
  ENSG00000189079_83 (sequence is synthesized)
cgtgttctcaattgatcttaattctcactttgcaattaatacagaggctgtgtagaatgaatttcttcaattttttactccttcagttacaaacttattagcatctggactcattttcct

SEQ ID NO: 697305 - DNA, 120 bp, Artificial Sequence
  ENSG00000189079_84 (sequence is synthesized)
ttagcttctgctcatttcagaaagagatgctaatttcttctgaaacttactctgaatatcagtctttcccatctccatgttcccatatcttaaatctctttttatttactcactttttcc

SEQ ID NO: 697306 - DNA, 120 bp, Artificial Sequence
  ENSG00000189079_85 (sequence is synthesized)
aggtctcttatcctccctcgctagccccaaaccaaaaatttcattatccttaatctttagccatcacatccattcatcagatcttgttgagtcttcctaaatacctggccttttcaattg

SEQ ID NO: 697307 - DNA, 120 bp, Artificial Sequence
  ENSG00000189079_86 (sequence is synthesized)
ccaatgcttatgaatgagattgaactctcatcatctctagctatctgttctcacgttcattcatggtcccaatttgtcttctactccaacttgtagtatgaaaattatgtactctatgca

SEQ ID NO: 697308 - DNA, 120 bp, Artificial Sequence
  ENSG00000189079_87 (sequence is synthesized)
aagtatgtaataagtatcacatatttcattgatttccattatgtccttctgaagtgtatagatttgtgtcatatgttcactcaactaacttggatccacctaacaaaagtggacaaataa

SEQ ID NO: 697309 - DNA, 120 bp, Artificial Sequence
  ENSG00000189079_88 (sequence is synthesized)
cagaaggcacaaaatagataattttgactgccagtctattcaatgagctttcaactacaggtaatagatgttaaacagccgatttatattggggaatctttggtcagaatattaatggtt

SEQ ID NO: 697310 - DNA, 120 bp, Artificial Sequence
  ENSG00000189079_89 (sequence is synthesized)
tctcaaccttgagaaagaaatgaaactgttcatattgctagttaagtgggaggtgggaatgttttttaccatcaaagaagaaactaaagattaaattaattgagggacataaaggagcag

SEQ ID NO: 697311 - DNA, 120 bp, Artificial Sequence
  ENSG00000189079_90 (sequence is synthesized)
tgttagagaaattgataaaatgtcagtgaatactcaagggtgatttgatgaagactattttttgctgcatggttagcctttgaccttcacagttcttttgacctcagcaaatgaacctac

SEQ ID NO: 697312 - DNA, 120 bp, Artificial Sequence
  ENSG00000189079_91 (sequence is synthesized)
ttctcaatctaaaatttggtcctcatttggcaaatgaatgaatttaaacattgagaatttgtggcttattcatttatgtagtaattaattcattcatagagatgggactagactgctcag

SEQ ID NO: 697313 - DNA, 120 bp, Artificial Sequence
  ENSG00000189079_92 (sequence is synthesized)
gattgaaaagagttaattttcagctggagagcactttattacttgtgctctccctgaatgacaactttaaattgtttgattggttatcctttgtggtttagctattgcctgcatagttta

SEQ ID NO: 697314 - DNA, 120 bp, Artificial Sequence
  ENSG00000189079_93 (sequence is synthesized)
atgctgctttttttggaattaccatctttaaactttttgctcacttccctcaatccctctgaaaacttttataaccttttacccatttttaggttaacatctaaatctctatcataattt

SEQ ID NO: 697315 - DNA, 120 bp, Artificial Sequence
  ENSG00000189079_94 (sequence is synthesized)
aaatagttgcaaagtatgtattgtcttgatgtatattaaactacatttttaaaagaaaataattacagtgctttttgtatgcagtggaatcttgataccatcattcattttttaaaatac

SEQ ID NO: 697316 - DNA, 120 bp, Artificial Sequence
  ENSG00000189079_95 (sequence is synthesized)
acaaactctttaacatcagaaattttataatattcctctttcaccttgaacttgtattccagtatcctcacaagagttttatcctaatataatacattttatgtttgagattctttttta

SEQ ID NO: 697317 - DNA, 120 bp, Artificial Sequence
  ENSG00000189079_96 (sequence is synthesized)
ttcatcaccctgtcaatactttttagttacaaaatagacatttttaaagtttttcaattccttgttattctttaaagctctaaattttaaaaatttcatttggccaggcactgtggctta

SEQ ID NO: 697318 - DNA, 86 bp, Artificial Sequence
  ENSG00000189079_97 (sequence is synthesized)
caacatagtgagattccatctctacaaaatcaggaaaaaaattagctgagcatggtgatgcatgcgtgtagtcccagcttgggccc

SEQ ID NO: 697319 - DNA, 120 bp, Artificial Sequence
  ENSG00000189079_98 (sequence is synthesized)
tgagcatggtgatgcatgcgtgtagtcccagcttgggcccagggagtcaaaggctgtagtgagctatgaatgtgtcactggatccaccttaggcagtagagcaagaacctggtctatctc

SEQ ID NO: 697320 - DNA, 120 bp, Artificial Sequence
  ENSG00000189090_0 (sequence is synthesized)
cactgtctgctgccacacgatgctgggaggcctggggaagctggctgccgagggcctggcccaccgcaccgagaaggccaccgagggagccattcatgccgtggaggaagtggtgaagga

SEQ ID NO: 697321 - DNA, 120 bp, Artificial Sequence
  ENSG00000189090_1 (sequence is synthesized)
gaccaacacagtcacaaatgccatcacccatgcagcagaaagtctggacaaacttggacagtgagtgcacctgctaccacggcccttccccagtctcaataaaaagccatgacatgtgta

SEQ ID NO: 697322 - DNA, 120 bp, Artificial Sequence
  ENSG00000189090_2 (sequence is synthesized)
tcgaactgtctctttgtcattcctttgactccgctggacttgccgcccccgtgacctggtgttgggtctcatcatcccaacagattcccattctaaagatgagggaaccaagaggtggaa

SEQ ID NO: 697323 - DNA, 120 bp, Artificial Sequence
  ENSG00000189091_0 (sequence is synthesized)
gtccctgtcttgaggtctaatggcggacgccagtatgttggagttggtggtggcttaagttttgaagggaggtagcatccgttggatatccacaccatccttctcgctgcaggctttctt

SEQ ID NO: 697324 - DNA, 120 bp, Artificial Sequence
  ENSG00000189091_1 (sequence is synthesized)
ggactccgtactgttggtgtaaccaaggcctggaggtctgggtggctcaggtttcctgcagccatgtttctgtacaacttaaccttgcagagagccactggcatcagctttgccattcat

SEQ ID NO: 697325 - DNA, 120 bp, Artificial Sequence
  ENSG00000189091_2 (sequence is synthesized)
ggaaacttttctggaaccaaacaacaagaaattgttgtttcccgtgggaagatcttggagctgcttcgcccagaccccaacactggcaaagtacataccctactcactgtggaagtattc

SEQ ID NO: 697326 - DNA, 120 bp, Artificial Sequence
  ENSG00000189091_3 (sequence is synthesized)
ggtgttatccggtcactcatggcctttaggctgacaggtggcaccaaagactacattgtagttggcagtgactctggtcgaattgttattttggaataccagccatctaagaatatgttt

SEQ ID NO: 697327 - DNA, 120 bp, Artificial Sequence
  ENSG00000189091_4 (sequence is synthesized)
gagaagattcaccaagaaacctttggcaagagtggatgccgtcgcatcgttcctggccagttcttagctgtggatcccaaagggcgagccgttatgattagtgccattgagaaacagaaa

SEQ ID NO: 697328 - DNA, 120 bp, Artificial Sequence
  ENSG00000189091_5 (sequence is synthesized)
ttggtgtatattttgaacagagatgctgcagcccgacttaccatttcatctcccctggaagcccacaaagcaaacactttagtgtatcatgtagttggagtagatgtcggatttgaaaat

SEQ ID NO: 697329 - DNA, 120 bp, Artificial Sequence
  ENSG00000189091_6 (sequence is synthesized)
ccaatgtttgcttgtctggaaatggattatgaggaagcagacaatgatccaacaggggaagcagcagctaatacccagcagacacttactttctatgagctagaccttggtttaaatcat

SEQ ID NO: 697330 - DNA, 120 bp, Artificial Sequence
  ENSG00000189091_7 (sequence is synthesized)
gtggtccgaaaatacagtgaacctttggaggaacacggcaacttccttattacagttccaggagggtcagatggtccaagtggagtactgatctgctctgaaaactatattacttacaag

SEQ ID NO: 697331 - DNA, 120 bp, Artificial Sequence
  ENSG00000189091_8 (sequence is synthesized)
aactttggtgaccagccagatatccgctgtccaattcccaggaggcggaatgacctggatgaccctgaaagaggaatgatttttgtctgctctgcaacccataaaaccaaatcgatgttc

SEQ ID NO: 697332 - DNA, 120 bp, Artificial Sequence
  ENSG00000189091_9 (sequence is synthesized)
ttctttttggctcaaactgagcagggagatatctttaagatcactttggagacagatgaagatatggttactgagatccggctcaaatattttgatactgtacccgttgctgctgccatg

SEQ ID NO: 697333 - DNA, 120 bp, Artificial Sequence
  ENSG00000189091_10 (sequence is synthesized)
tgtgtgcttaaaacagggttcctttttgtagcatcagaatttggaaaccattacttatatcaaattgcacatcttggagatgatgatgaagaacctgagttttcatcagccatgcctctg

SEQ ID NO: 697334 - DNA, 120 bp, Artificial Sequence
  ENSG00000189091_11 (sequence is synthesized)
gaagaaggagacacattcttttttcagccaagaccacttaaaaaccttgtgctggttgatgagttggacagcctctctcccattctgttttgccagatagctgatctggccaatgaagat

SEQ ID NO: 697335 - DNA, 120 bp, Artificial Sequence
  ENSG00000189091_12 (sequence is synthesized)
actccacagttgtatgtggcctgtggtaggggaccccgatcatctctgagagtcctaagacatggacttgaggtgtcagaaatggctgtttctgagctacctggtaaccccaacgctgtc

SEQ ID NO: 697336 - DNA, 120 bp, Artificial Sequence
  ENSG00000189091_13 (sequence is synthesized)
tggacagtgcgtcgacacattgaagatgagtttgatgcctacatcattgtgtctttcgtgaatgccaccctagtgttgtccattggagaaactgtagaagaagtgactgactctgggttc

SEQ ID NO: 697337 - DNA, 120 bp, Artificial Sequence
  ENSG00000189091_14 (sequence is synthesized)
ctggggaccaccccgaccttgtcctgctccttattaggagatgatgccttggtgcaggtctatccagatggcattcggcacatacgagcagacaagagagtcaatgagtggaagacccct

SEQ ID NO: 697338 - DNA, 120 bp, Artificial Sequence
  ENSG00000189091_15 (sequence is synthesized)
ggaaagaaaacaattgtgaagtgtgcagtgaaccagcgacaagtggtgattgccctgacaggaggagagctggtctatttcgagatggatccttcaggacagctgaatgagtacacagaa

SEQ ID NO: 697339 - DNA, 120 bp, Artificial Sequence
  ENSG00000189091_16 (sequence is synthesized)
cggaaggagatgtcagcagatgtggtgtgcatgagtctggccaatgtaccccctggagagcagcggtctcgcttcctggctgtggggcttgtggacaacactgtcagaatcatctccctg

SEQ ID NO: 697340 - DNA, 120 bp, Artificial Sequence
  ENSG00000189091_17 (sequence is synthesized)
gatccctcagactgtttgcaacctctaagcatgcaggctctcccagcccagcctgagtccttgtgtatcgtggaaatgggtgggactgagaagcaggatgagctgggtgagaggggctcg

SEQ ID NO: 697341 - DNA, 120 bp, Artificial Sequence
  ENSG00000189091_18 (sequence is synthesized)
attggcttcctatacctgaatattgggctacagaacggtgtgctgctgaggactgtcttggaccctgtcactggggatttgtctgatactcgcactcggtacctggggtcccgtcctgtg

SEQ ID NO: 697342 - DNA, 120 bp, Artificial Sequence
  ENSG00000189091_19 (sequence is synthesized)
aagctcttccgagtccgaatgcaaggccaggaggcagtattggccatgtcaagccgctcatggttgagctattcttaccaatctcgcttccatctcaccccactgtcttacgagacactg

SEQ ID NO: 697343 - DNA, 120 bp, Artificial Sequence
  ENSG00000189091_20 (sequence is synthesized)
gaatttgcatcgggttttgcctcggaacagtgtcccgagggcattgtggccatctccaccaacaccctacggattttggcattagagaagctcggtgctgtcttcaatcaagtagccttc

SEQ ID NO: 697344 - DNA, 120 bp, Artificial Sequence
  ENSG00000189091_21 (sequence is synthesized)
ccactgcagtacacacccaggaaatttgtcatccaccctgagagtaacaaccttattatcattgaaacggaccacaatgcctacactgaggccacgaaagctcagagaaagcagcagatg

SEQ ID NO: 697345 - DNA, 120 bp, Artificial Sequence
  ENSG00000189091_22 (sequence is synthesized)
gcagaggaaatggtggaagcagcaggggaggatgagcgggagctggccgcagagatggcagcagcattcctcaatgaaaacctccctgaatccatctttggagctcccaaggctggcaat

SEQ ID NO: 697346 - DNA, 120 bp, Artificial Sequence
  ENSG00000189091_23 (sequence is synthesized)
gggcagtgggcctctgtgatccgagtgatgaatcccattcaagggaacacactggaccttgtccagctggaacagaatgaggcagcttttagtgtggctgtgtgcaggttttccaacact

SEQ ID NO: 697347 - DNA, 120 bp, Artificial Sequence
  ENSG00000189091_24 (sequence is synthesized)
ggtgaagactggtatgtgctggtgggtgtggccaaggacctgatactaaacccccgatctgtggcagggggcttcgtctatacttacaagcttgtgaacaatggggaaaaactggagttt

SEQ ID NO: 697348 - DNA, 120 bp, Artificial Sequence
  ENSG00000189091_25 (sequence is synthesized)
ttgcacaagactcctgtggaagaggtccctgctgctattgccccattccaggggagggtgttgattggtgtggggaagctgttgcgtgtctatgacctgggaaagaagaagttactccga

SEQ ID NO: 697349 - DNA, 120 bp, Artificial Sequence
  ENSG00000189091_26 (sequence is synthesized)
aaatgtgagaataagcatattgccaattatatctctgggatccagactatcggacatagggtaattgtatctgatgtccaagaaagtttcatctgggttcgctacaagcgtaatgaaaac

SEQ ID NO: 697350 - DNA, 120 bp, Artificial Sequence
  ENSG00000189091_27 (sequence is synthesized)
cagcttatcatctttgctgatgatacctacccccgatgggtcactacagccagcctcctggactatgacactgtggctggggcagacaagtttggcaacatatgtgtggtgaggctccca

SEQ ID NO: 697351 - DNA, 120 bp, Artificial Sequence
  ENSG00000189091_28 (sequence is synthesized)
cctaacaccaatgatgaagtagatgaggatcctacaggaaacaaagccctgtgggaccgtggcttgctcaatggggcctcccagaaggcagaggtgatcatgaactaccatgtcggggag

SEQ ID NO: 697352 - DNA, 120 bp, Artificial Sequence
  ENSG00000189091_29 (sequence is synthesized)
acggtgctgtccttgcagaagaccacgctgatccctggaggctcagaatcacttgtctataccaccttgtctggaggaattggcatccttgtgccattcacgtcccatgaggaccatgac

SEQ ID NO: 697353 - DNA, 120 bp, Artificial Sequence
  ENSG00000189091_30 (sequence is synthesized)
ttcttccagcatgtggaaatgcacctgcggtctgaacatccccctctctgtgggcgggaccacctcagctttcgctcctactacttccctgtgaagaatgtgattgatggagacctctgt

SEQ ID NO: 697354 - DNA, 120 bp, Artificial Sequence
  ENSG00000189091_31 (sequence is synthesized)
gagcagttcaattccatggaacccaacaaacaaaagaacgtctctgaagaactggaccgaaccccacccgaagtgtccaagaaactcgaggatatccggacccgctacgccttctgagcc

SEQ ID NO: 697355 - DNA, 120 bp, Artificial Sequence
  ENSG00000189091_32 (sequence is synthesized)
ctcctttcccggtggggcttgccagagactgtgtgttttgtttcccccaccaccatcactgccacctggcttctgccatgtggcaggagggtgactggataattaagactgcattatgaa

SEQ ID NO: 697356 - DNA, 120 bp, Artificial Sequence
  ENSG00000189091_33 (sequence is synthesized)
agtcaacagctctttcccctcagctcttctcctggaatgactggcttcccctcaaattggcactgagatttgctacacttctccccacctggtacatgatacatgaccccaggttccagt

SEQ ID NO: 697357 - DNA, 120 bp, Artificial Sequence
  ENSG00000189091_34 (sequence is synthesized)
gtagaacctgagtcccccattccccaaagccatccctgcattgatatgtcttgactctcctgtctacttttgcacacacccttaatttttaattggttttcttgtaaatacagttttgta

SEQ ID NO: 697358 - DNA, 120 bp, Artificial Sequence
  ENSG00000189091_35 (sequence is synthesized)
caatgttatctctgtgggaggaaggaggcaggctgtggtgggactgggtagggtatagtatcactcctgagttccactgctctagaatctaaccagaaatagaaacctagtttttaaggt

SEQ ID NO: 697359 - DNA, 120 bp, Artificial Sequence
  ENSG00000189091_36 (sequence is synthesized)
gactggcatccatgtgtcttgttctggagatgaggatgtaggtgggaggtttgaacccaagttagagcaggaagaactgagtagactccttccttccagataccgacttggacttgcggc

SEQ ID NO: 697360 - DNA, 120 bp, Artificial Sequence
  ENSG00000189091_37 (sequence is synthesized)
actctgtggctccccacccccaggtctgtggtggtttctttgttttttcctggttctttttgctgtgctgatgaaacatgacctcaataaccatgtgtatacccacccctcttcccactg

SEQ ID NO: 697361 - DNA, 120 bp, Artificial Sequence
  ENSG00000189091_38 (sequence is synthesized)
ggtattgaggaagggtggctgattcttcctcctcttctactctgaggatgttagtatggggattttagcatgaattctagctggggagtcttaacagatgccccttttactgatacagca

SEQ ID NO: 697362 - DNA, 120 bp, Artificial Sequence
  ENSG00000189091_39 (sequence is synthesized)
cctaaagcgatctttggctccataggaccataggaagggtcagtacagaagaacctagatactgccctgcccctgagaactgtgtatatgtggggcctgtctgcagcacccatctcaggt

SEQ ID NO: 697363 - DNA, 120 bp, Artificial Sequence
  ENSG00000189091_40 (sequence is synthesized)
cctgtttagttgtgtgggaagccctcgtcttccaggctgtccttgcgccttgaacctggagaagtgagctcactgttctcaatacttcacaaatgtaaaactttctttcgtctgcatgtg

SEQ ID NO: 697364 - DNA, 120 bp, Artificial Sequence
  ENSG00000189091_41 (sequence is synthesized)
ctcagccatctaaattgagcaaatgatctggtgagcactgggttagaatcaggaatggtggaatacaatctgaacctctcagagcccagaacagagggttcctgacactgtgacactgtc

SEQ ID NO: 697365 - DNA, 120 bp, Artificial Sequence
  ENSG00000189091_42 (sequence is synthesized)
tcctggaactaagtatctcttgaatcatgacttggttttagatcagtcaagagagacccaggttttgccaggaatcgaatccctaaataacatgtttttttctcacttagctcatgaatt

SEQ ID NO: 697366 - DNA, 120 bp, Artificial Sequence
  ENSG00000189091_43 (sequence is synthesized)
tgcatagtagacagtagttctgaattagattttgaaaacctaatttcagggctcattttttcctgtggccctaaatccattctatcaaattgtgtgatactgacatgcagtcatctgagg

SEQ ID NO: 697367 - DNA, 120 bp, Artificial Sequence
  ENSG00000189091_44 (sequence is synthesized)
aactcagcgtagatacttgagcagctcctcgcctcttttctaactcaagtttgactaaaatacatacactccgtacagaaggtagggggttatgtaagaaaggaaaacctaatctatgga

SEQ ID NO: 697368 - DNA, 120 bp, Artificial Sequence
  ENSG00000189091_45 (sequence is synthesized)
atcaggagttgtcaccaccgagcttcctctggaagtctgcccatcagcttgcttgttctctgttaagaggaagggctaggacaaggatttgggcttgaatatgtggaaaggaattttcat

SEQ ID NO: 697369 - DNA, 120 bp, Artificial Sequence
  ENSG00000189091_46 (sequence is synthesized)
agttgttgctgcaggacctacaaaagtttaaaattagattggatgtgactcaatgacaagtcccatctgtgtaattgttaaggggacctgattgactcctgtggtttgattgagcaacca

SEQ ID NO: 697370 - DNA, 120 bp, Artificial Sequence
  ENSG00000189091_47 (sequence is synthesized)
ggtaaatagagacctctctccagctttggcaaaacccatcagaggctgctgcagaactcagacagagggatctgcccttgggtttgcttccatcctgttccattgctaagcccttgtgac

SEQ ID NO: 697371 - DNA, 120 bp, Artificial Sequence
  ENSG00000189091_48 (sequence is synthesized)
ttggatcctaggactgaaaagtttttagctgcctcagctttcccctgaccttactggcagaggttctgcagatgtttcctttggaagatctcttgccaagaatagcattcctttggagga

SEQ ID NO: 697372 - DNA, 120 bp, Artificial Sequence
  ENSG00000189091_49 (sequence is synthesized)
ggggggttctagttggaatgttgcttttcttggttagtgtaaatgtattgctagtgagacagctgccggcgctggaaaaggctcgtctcacagggagagtgctggtccccagaatgtgtg

SEQ ID NO: 697373 - DNA, 120 bp, Artificial Sequence
  ENSG00000189091_50 (sequence is synthesized)
ctgttcccacgctgctgcctttcttgagcttgttagaggaaagccagaaaggcattcagatgggatcagtctggctttcaaattttttttaattcctaagttctgttttattttttaatt

SEQ ID NO: 697374 - DNA, 120 bp, Artificial Sequence
  ENSG00000189091_51 (sequence is synthesized)
ttttaaaaaaaattttattagagacagtctctctctcttgcctagctgggagtgcagtggagtgatcatagctcactgaggcttgaactcctgggctcgagcaatccacctcagcctcca

SEQ ID NO: 697375 - DNA, 90 bp, Artificial Sequence
  ENSG00000189091_52 (sequence is synthesized)
gcttgaactcctgggctcgagcaatccacctcagcctccagagtaggggagactacagatgtgtgccaccatactcagctaatttttaaa

SEQ ID NO: 697376 - DNA, 120 bp, Artificial Sequence
  ENSG00000189091_53 (sequence is synthesized)
agcactgggattataggtgtgagccattgcgcctggtcataaattcttgtttttttgtttgtttgtttattagagatggaatctctctctcttgaccaggctagagggctgtggtgcgat

SEQ ID NO: 697377 - DNA, 120 bp, Artificial Sequence
  ENSG00000189091_54 (sequence is synthesized)
ggtgcgatctcagcccactgcaacctctatctcctgagctcaagcgatcctccttagcttcccaaatagctggaactacaggcatgtgccatcacgtccagctaatttttgtatttttag

SEQ ID NO: 697378 - DNA, 120 bp, Artificial Sequence
  ENSG00000189091_55 (sequence is synthesized)
gctaatttttgtatttttagtagagaaggttttaccatgttggacagggtggtctcgaactcctggcctaaagtggtccacctagctcagcctaccaaagtgctgtgattacaggcgtga

SEQ ID NO: 697379 - DNA, 120 bp, Artificial Sequence
  ENSG00000189091_56 (sequence is synthesized)
agcctctaaattctgttttctattcaaagtaaaaatgacatgtgtttgagtcatccacttgctcatttgcatatggaatattgtatgtgaatattttattacacccttaaaattaatttt

SEQ ID NO: 697380 - DNA, 120 bp, Artificial Sequence
  ENSG00000189091_57 (sequence is synthesized)
caagggctatatgtagagctcagaagaaacatctctgctgctgaaatcaaacctggtccaaaaaacgtcacaacggaggaaaggaatagatggctctcgaggacaagatagggactctta

SEQ ID NO: 697381 - DNA, 120 bp, Artificial Sequence
  ENSG00000189091_58 (sequence is synthesized)
aaacacctgcttggccatggttgattgacatttgagtgatctggtagcccaacacaccctgtgaagttcaggtgaactgaaatgggcaggtgtaggctacacaccagtctgaaccagcac

SEQ ID NO: 697382 - DNA, 68 bp, Artificial Sequence
  ENSG00000189091_59 (sequence is synthesized)
tgcccaggctagagtacagaggcacaatctcggctcaccacagcctccgcctcctgggttcaagcaat

SEQ ID NO: 697383 - DNA, 120 bp, Artificial Sequence
  ENSG00000189091_60 (sequence is synthesized)
taagccatcaggagacatgctgacccactagaagaggctgctacgctcatttcttccacaaacgtttactgggcacctaccatgaaccaccacctcccagctctgttctgcacccagagg

SEQ ID NO: 697384 - DNA, 120 bp, Artificial Sequence
  ENSG00000189091_61 (sequence is synthesized)
ttggaggagagtttataaccaggcagtctctgtcgctgtgaggttggtggtgaggtgagtctgccagagggcctgccaccagtttcagaagagcctgcagcctgcatctgatttcctcag

SEQ ID NO: 697385 - DNA, 120 bp, Artificial Sequence
  ENSG00000189091_62 (sequence is synthesized)
ccacaaccttgggacttcaggaaaaatcagaaggtcccaagtctgaaaaatgaagaggtggggagtgggcagcaggggttttaggtcaggaaatggtaggaaacctgtagttgtggctca

SEQ ID NO: 697386 - DNA, 120 bp, Artificial Sequence
  ENSG00000189091_63 (sequence is synthesized)
taatcctagtgggatattagaaccctcttcatttgtcagaacagattcctggggtctgctcccaattattcacacggtggttcatgcctggtaatcccagcactttgggcggccagaggc

SEQ ID NO: 697387 - DNA, 120 bp, Artificial Sequence
  ENSG00000189091_64 (sequence is synthesized)
aggcagattgcttgagcccagaagtttaagaccagcctaggaaacagaccccatctctacaaaaaattcaaaaagccgggcgtgaagccctgtttttttttttttaaaaaaagagtctgc

SEQ ID NO: 697388 - DNA, 120 bp, Artificial Sequence
  ENSG00000189091_65 (sequence is synthesized)
tggtgatgtctgggcatgtgtctgcttcacagtccagtgttatgatcagtagctgtgatggacaatgaacattgctgcttgttcaaaatgaagaaaaaaaatatcaaagaaaaccaggtt

SEQ ID NO: 697389 - DNA, 120 bp, Artificial Sequence
  ENSG00000189091_66 (sequence is synthesized)
tggaagtttcagatttggaaaaggagctgggccagcccatctggaatagctgaggggccctgttagccccaccctaccccaccccacccccgtatgcagcatctctggcggtgcccagag

SEQ ID NO: 697390 - DNA, 120 bp, Artificial Sequence
  ENSG00000189091_67 (sequence is synthesized)
gcaagcccccttcagtttcccacctctcactctgccttccagagcctagtcaagttttaaattcccaggtccactcagcagaacttgctcccttctctgactgcagtctcataatgaaag

SEQ ID NO: 697391 - DNA, 120 bp, Artificial Sequence
  ENSG00000189091_68 (sequence is synthesized)
gagaggtgctttcagttgggtcatttggtagcgtttaggcttagaagttactaatttggagccgtgagtatatgtgtataagctagtaacacgtgatggtcaagggaagtactaccattt

SEQ ID NO: 697392 - DNA, 120 bp, Artificial Sequence
  ENSG00000189091_69 (sequence is synthesized)
cctgtgggttattagggcctccagctgttatgaggacacactggggaatctcagctttagggagtcgatgatgtaactggagaaaggcaatgctgccctcataaagcaatcagaaacgag

SEQ ID NO: 697393 - DNA, 120 bp, Artificial Sequence
  ENSG00000189091_70 (sequence is synthesized)
attccacctgccaaatgccaagaggcagcaaagtccatgaagagagcactgtatacagtcagatgacctgggctcactagcctctaagcatagtcttggtttcctgcctgtaaattggta

SEQ ID NO: 697394 - DNA, 84 bp, Artificial Sequence
  ENSG00000189091_71 (sequence is synthesized)
tagccaggcatggtggtgcacacttgtagtcccagtaattagggggctgagacaggaggatcacttcagcctatacactccagc

SEQ ID NO: 697395 - DNA, 120 bp, Artificial Sequence
  ENSG00000189091_72 (sequence is synthesized)
agtgagctgtgattgcgccactacactccagcctggatgacaggacgaaacctgtctcaaaaacaccaaaaaacaaaaaccggtctcctggggtcatggtagcacaaacgcacatgactg

SEQ ID NO: 697396 - DNA, 120 bp, Artificial Sequence
  ENSG00000189091_73 (sequence is synthesized)
agtgctcaggggttctgaggcttgtccgctgacctggggctctggccctgggagatctgggggacctgctgtcctatatgtgatgctttgaaagaaaggggcatcattccaagccaagag

SEQ ID NO: 697397 - DNA, 120 bp, Artificial Sequence
  ENSG00000189091_74 (sequence is synthesized)
gccccagagagggcaccgtgcggtgttcaggcttctgtgaggccccagtgagatcctgtggctgtgcccccatcacctccacccactctgccctcccactagctgcccaacggatgaatc

SEQ ID NO: 697398 - DNA, 120 bp, Artificial Sequence
  ENSG00000189091_75 (sequence is synthesized)
aacgccttggcagagttttccagcagggccttgcagagagtgtgtgtgacctgtgtggccactgccttggggacgggtgaggagttagcctggaacattccagcgtgggcattattgtcc

SEQ ID NO: 697399 - DNA, 120 bp, Artificial Sequence
  ENSG00000189091_76 (sequence is synthesized)
tgttgcaagttcagggcaaaaccaggaatccagttttgtcgatccaattgagaaaacatttcatgaacaactacttgtggcatgcattggcactcggaataaagcgcactattgtcacta

SEQ ID NO: 697400 - DNA, 120 bp, Artificial Sequence
  ENSG00000189091_77 (sequence is synthesized)
agcagtggcgcgatctcggctcactgccatctctgcctcccgggttccagcgattctcttacctcagcctcccgagtagactagctgggattacgggcgcgtgccaccacgcccggctaa

SEQ ID NO: 697401 - DNA, 70 bp, Artificial Sequence
  ENSG00000189091_78 (sequence is synthesized)
cgatctcctgacacaccgcgcccggcccagacgtgggggaagttttaaagcttaccaaatttatctgctt

SEQ ID NO: 697402 - DNA, 120 bp, Artificial Sequence
  ENSG00000189091_79 (sequence is synthesized)
gaaatgtgccttagggagcactgcttgcccttgggagtccagggaggctcctgagggtgcacacagtcactagtctgtttgtgactcacaggcagaggtgatcatgaactaccatgtcgg

SEQ ID NO: 697403 - DNA, 120 bp, Artificial Sequence
  ENSG00000189091_80 (sequence is synthesized)
agatgcatttcctagttcacaaattgtgtaatgattcttgtcagggcacacttttcttggctgcttacctagtgccaagtcgtgtgcctattgctgtaagacatactgagatgtgaacca

SEQ ID NO: 697404 - DNA, 120 bp, Artificial Sequence
  ENSG00000189091_81 (sequence is synthesized)
cagccttgtggtactgttttcattttacacacgtggaagcaggcttagagagatgaaatggtgagtctagatcatatggctcgtagcccatgcttttcacatatgctaagccatagtgcc

SEQ ID NO: 697405 - DNA, 120 bp, Artificial Sequence
  ENSG00000189091_82 (sequence is synthesized)
tctctctagccctctttttcttaagatagcctgttatatttctagaatatcttaggatactctgcagactgaaatttggggatagggcttttggtcagcttataccatatttgtattttt

SEQ ID NO: 697406 - DNA, 120 bp, Artificial Sequence
  ENSG00000189091_83 (sequence is synthesized)
cccaagtcatttctttctatctgctctaatttcttatgtgaagtacccaagggagaggttttcccatcatagctgataagcttccatcaggcttcacctgctcctctccttttgattaga

SEQ ID NO: 697407 - DNA, 120 bp, Artificial Sequence
  ENSG00000189091_84 (sequence is synthesized)
tttttccgccgcgcgccaccagaatgtccctgtcttgaggtctaatggcggacgccagtatgttggagttggtggtggcttaagttttgaagggaggtagcatccgttggatatccacac

SEQ ID NO: 697408 - DNA, 120 bp, Artificial Sequence
  ENSG00000189091_85 (sequence is synthesized)
agagtaggaggctgttgtttaatgttgcctaatgccaacgttagagctccagggattgacgtgtttgctgactgctcaaagtctatttcaacaccagtttctgggtccgagtgagtatta

SEQ ID NO: 697409 - DNA, 120 bp, Artificial Sequence
  ENSG00000189091_86 (sequence is synthesized)
gtcttttggggaccagctccttgattccaatctctctcttaccagcacatggaaaatgctggggccttctagctgcagtgatgttcttgtgcctgtgcattccacaggaaggctttgtgc

SEQ ID NO: 697410 - DNA, 120 bp, Artificial Sequence
  ENSG00000189091_87 (sequence is synthesized)
ggcacaaataaatgaagctctagctcagtatgttcatgtatcaatattgtagtatttaaaatgtcctcatgtctccgattctcttgctttgtcctctcacttctttagcagatgtctcaa

SEQ ID NO: 697411 - DNA, 120 bp, Artificial Sequence
  ENSG00000189091_88 (sequence is synthesized)
gaaaatattgaggaagcagagtatatctgtaggctcttctgacccctagttttcttctggatcattttgctctgtgtgcatgtgtatgtgtgtatgtgtgtaataactacacatagaaga

SEQ ID NO: 697412 - DNA, 120 bp, Artificial Sequence
  ENSG00000189091_89 (sequence is synthesized)
actgccttggaaggtttctgaagagaactcttagtgtttcatttggctttgtaattctaatgagttcttatctaaccaactcccttcttttctttttcagatgagtttgatgcctacatc

SEQ ID NO: 697413 - DNA, 120 bp, Artificial Sequence
  ENSG00000189091_90 (sequence is synthesized)
ggatcatctggttggaacctgagcatctggctcctgatgtctatctctgagatccactcctgatgtctatctctgagatcagctgggttagaacccagaatccatacctgctgcttctct

SEQ ID NO: 697414 - DNA, 120 bp, Artificial Sequence
  ENSG00000189091_91 (sequence is synthesized)
tgtcattgcagtgtgtttcaggagtttcctgctgtggtttaaggatatgatctgagactacagaaatgtttctttggcttaagcctcaactcctttttttaagttaacaaccaagactgc

SEQ ID NO: 697415 - DNA, 120 bp, Artificial Sequence
  ENSG00000189091_92 (sequence is synthesized)
aatgtccctgtcttgaggtctaatggcggacgccagtatgttggagttggtggtggcttaagttttgaagggaggtagcatccgttggatatccacaccatccttctcgctgcagggtaa

SEQ ID NO: 697416 - DNA, 120 bp, Artificial Sequence
  ENSG00000189091_93 (sequence is synthesized)
aaaaacagcctggagacttccccgggcccggggaggcggagaccggccatatggaagggggacccgagactttggcgggggtcacgggcagtctaggcccgagaggctggggaccaggag

SEQ ID NO: 697417 - DNA, 120 bp, Artificial Sequence
  ENSG00000189091_94 (sequence is synthesized)
aaaaaaagaagacaagtatacaaaagtgttgtgtgttgtgatgtggtgaaaggcacaggtacattgctgggaggggttaaaggagagggcatgtgtttgaaggtcagggcaggctcttta

SEQ ID NO: 697418 - DNA, 120 bp, Artificial Sequence
  ENSG00000189091_95 (sequence is synthesized)
gagggacagcatttgctaacttagtgataggccgtttgttgcattatggaacttgtagttgaacatttttctcctttattaaatgttagaagtcttggaaaggactatatcctgctaaat

SEQ ID NO: 697419 - DNA, 120 bp, Artificial Sequence
  ENSG00000189091_96 (sequence is synthesized)
tttactctttaggtactgtaatttgggagtcacctataaatacaggtcgggttctgttggttcactcactttccagatacccgaagttactattgagtgaacattccttctgcctgcaca

SEQ ID NO: 697420 - DNA, 120 bp, Artificial Sequence
  ENSG00000189091_97 (sequence is synthesized)
tgcagcagtcttccaggcaaatactaaccttggctggtacttggtgatgcacactaccaataccaagcctttttttctcttccacaggtggctggtgaaggtgctgatcaccacagatga

SEQ ID NO: 697421 - DNA, 120 bp, Artificial Sequence
  ENSG00000189099_0 (sequence is synthesized)
acatgggccctgctggctgtgccttcacgctgctccttctgctggggatctcagtgtgtgggcaacctgtatactccagccgcgttgtaggtggccaggatgctgctgcagggcgctggc

SEQ ID NO: 697422 - DNA, 120 bp, Artificial Sequence
  ENSG00000189099_1 (sequence is synthesized)
cttggcaggtcagcctacactttgaccacaactttatctgtggaggttccctcgtcagtgagaggttgatactgacagcagcacactgcatacaaccgacctggactactttttcatata

SEQ ID NO: 697423 - DNA, 120 bp, Artificial Sequence
  ENSG00000189099_2 (sequence is synthesized)
ctgtgtggctaggatcgattacagtaggtgactcaaggaaacgtgtgaagtactacgtgtccaaaatcgtcatccatcccaagtaccaagatacaacggcagacgtcgccttgttgaaac

SEQ ID NO: 697424 - DNA, 120 bp, Artificial Sequence
  ENSG00000189099_3 (sequence is synthesized)
tgtcctctcaagtcaccttcacttctgccatcctgcctatttgcttgcccagtgtcacaaagcagttggcaattccacccttttgttgggtgaccggatggggaaaagttaaggaaagtt

SEQ ID NO: 697425 - DNA, 120 bp, Artificial Sequence
  ENSG00000189099_4 (sequence is synthesized)
gaagcagaagtacccattattgaccgccaggcttgtgaacagctctacaatcccatcggtatcttcttgccagcactggagccagtcatcaaggaagacaagatttgtgctggtgatact

SEQ ID NO: 697426 - DNA, 120 bp, Artificial Sequence
  ENSG00000189099_5 (sequence is synthesized)
caaaacatgaaggatagttgcaagggtgattctggagggcctctgtcgtgtcacattgatggtgtatggatccagacaggagtagtaagctggggattagaatgtggtaaatctcttcct

SEQ ID NO: 697427 - DNA, 120 bp, Artificial Sequence
  ENSG00000189099_6 (sequence is synthesized)
ggagtctacaccaatgtaatctactaccaaaaatggattaatgccactatttcaagagccaacaatctagacttctctgacttcttgttccctattgtcctactctctctggctctcctg

SEQ ID NO: 697428 - DNA, 120 bp, Artificial Sequence
  ENSG00000189099_7 (sequence is synthesized)
cgtccctcctgtgcctttggacctaacactatacacagagtaggcactgtagctgaagctgttgcttgcatacagggctgggaagagaatgcatggagatttagtcccaggggcagataa

SEQ ID NO: 697429 - DNA, 120 bp, Artificial Sequence
  ENSG00000189108_0 (sequence is synthesized)
agtcagccaggaggctccaaactgttagcgacaaaaacgcagctctcggtcactcccactaccctcccacccgcactccaggcatattttggaggcggcagcagcggtggcaggatgtga

SEQ ID NO: 697430 - DNA, 120 bp, Artificial Sequence
  ENSG00000189108_1 (sequence is synthesized)
ggcgagcctggagctcatttccaggcgcccttccctcttcggaactaagggagacttgtgggcttttgcacactggctgtagggttcccgggaaagactggagcagcgaacaggagggag

SEQ ID NO: 697431 - DNA, 120 bp, Artificial Sequence
  ENSG00000189108_2 (sequence is synthesized)
agaggtggacaggcagagtctgcacctgccgcctgcacctccgttagggcgacagggcagctggtgtttcgctcctggagtgtgcctacctcgcaaggggggcgagggccacaggctgag

SEQ ID NO: 697432 - DNA, 120 bp, Artificial Sequence
  ENSG00000189108_3 (sequence is synthesized)
gcgcccgcgtcccggagtgcaccgcttggccgaggcaaggtgttgctggggcaaggctgctccgaagcgaagtcgcgcaaaaggaagagtctgggaggcaggcgacttaggagagtctag

SEQ ID NO: 697433 - DNA, 120 bp, Artificial Sequence
  ENSG00000189108_4 (sequence is synthesized)
tcactgagagacagaggcagcatctgccattctaactacggagctgagtaatttagaaaccctccttaactctccctttccagctctccccaaagtccacagaagctctgctgaactcta

SEQ ID NO: 697434 - DNA, 120 bp, Artificial Sequence
  ENSG00000189108_5 (sequence is synthesized)
gaaatcttccctggctggggggaagtttactagtatcctctttggctaagacagggagtggaaaaaacaggcggggctgtactgtccgctgtttggggagacgcggtcttcctcgcgccc

SEQ ID NO: 697435 - DNA, 120 bp, Artificial Sequence
  ENSG00000189108_6 (sequence is synthesized)
ccttcagccactccgactgcctgggaagtcccagcccgcgctctccggaacccggctcgccgtctcgccctggacatggaactacgcatctgagacctgctggacgttttgctggccgtt

SEQ ID NO: 697436 - DNA, 120 bp, Artificial Sequence
  ENSG00000189108_7 (sequence is synthesized)
ttgcaagactcagctgtcaagaaaagtgaaggatgaagccaccatttcttttggcccttgtggtctgttctgtagtcagcacaaatctgaagatggtgtcaaagagaaattctgtggatg

SEQ ID NO: 697437 - DNA, 120 bp, Artificial Sequence
  ENSG00000189108_8 (sequence is synthesized)
gctgcattgactggtcagtggatctcaagacatacatggctttggcaggtgaaccagtccgagtgaaatgtgcccttttctacagttatattcgtaccaactatagcacggcccagagca

SEQ ID NO: 697438 - DNA, 120 bp, Artificial Sequence
  ENSG00000189108_9 (sequence is synthesized)
ctgggctcaggcttatgtggtacaaaaacaaaggtgatttggaagagcccatcatcttttcagaggtcaggatgagcaaagaggaagattcaatatggtttcactcagctgaggcacaag

SEQ ID NO: 697439 - DNA, 120 bp, Artificial Sequence
  ENSG00000189108_10 (sequence is synthesized)
acagtggattctacacttgtgttttaagaaactcaacatattgcatgaaggtgtcaatgtccttgactgttgcagagaatgaatcaggcctgtgctacaacagcaggatccgctatttag

SEQ ID NO: 697440 - DNA, 120 bp, Artificial Sequence
  ENSG00000189108_11 (sequence is synthesized)
aaaaatctgaagtcactaaaagaaaggagatctcctgtccagacatggatgactttaaaaagtccgatcaggagcctgatgttgtgtggtataaggaatgcaagccaaaaatgtggagaa

SEQ ID NO: 697441 - DNA, 120 bp, Artificial Sequence
  ENSG00000189108_12 (sequence is synthesized)
agacgaacaactgaattgaaagttacagctttactcacagacaagcctcccaagccattgttccccatggagaatcagccaagtgttatagatgtccagctgggtaagcctctgaacatc

SEQ ID NO: 697442 - DNA, 120 bp, Artificial Sequence
  ENSG00000189108_13 (sequence is synthesized)
ccctgcaaagcattcttcggattcagtggagagtctgggccaatgatctactggatgaaaggagaaaagtttattgaagaactggcaggtcacattagagaaggtgaaataaggcttctc

SEQ ID NO: 697443 - DNA, 120 bp, Artificial Sequence
  ENSG00000189108_14 (sequence is synthesized)
aaagagcatcttggagaaaaagaagttgaattggcactcatctttgactcagttgtggaagctgacctggcgaattatacctgccatgttgaaaaccgaaatggacggaaacatgccagt

SEQ ID NO: 697444 - DNA, 120 bp, Artificial Sequence
  ENSG00000189108_15 (sequence is synthesized)
gttttgctgcgtaaaaaggatttaatctataaaattgagcttgcagggggcctgggagcaatcttcctcctccttgtactgctggtggtcatttacaaatgctacaacattgaattgatg

SEQ ID NO: 697445 - DNA, 120 bp, Artificial Sequence
  ENSG00000189108_16 (sequence is synthesized)
ctcttctacaggcagcactttggagctgatgaaactaatgatgacaacaaggaatatgatgcctatctctcttacacaaaagtggaccaagatactttagactgtgacaatcctgaagaa

SEQ ID NO: 697446 - DNA, 120 bp, Artificial Sequence
  ENSG00000189108_17 (sequence is synthesized)
gagcagtttgctcttgaagtactgccagatgtcctggaaaaacactatggatataaactcttcatcccagaaagagacctgattccaagtggaacatacatggaagatctcacaagatat

SEQ ID NO: 697447 - DNA, 120 bp, Artificial Sequence
  ENSG00000189108_18 (sequence is synthesized)
gttgaacaaagcagaagacttattatcgtgctaactccagactatattctcagacggggatggagtattttcgaactggaaagcagactccataacatgctagtcagtggagaaatcaaa

SEQ ID NO: 697448 - DNA, 120 bp, Artificial Sequence
  ENSG00000189108_19 (sequence is synthesized)
gtgattttgattgagtgtacagaattaaaagggaaagtgaattgccaggaagtggaatcactaaagcgtagcatcaaacttctgtccctgatcaagtggaagggatccaaaagcagcaaa

SEQ ID NO: 697449 - DNA, 120 bp, Artificial Sequence
  ENSG00000189108_20 (sequence is synthesized)
ttaaattctaagttttggaagcacttagtatatgaaatgcccatcaagaaaaaagaaatgctacctcggtgccatgttctggactccgcagaacaaggactttttggagaactccagcct

SEQ ID NO: 697450 - DNA, 120 bp, Artificial Sequence
  ENSG00000189108_21 (sequence is synthesized)
ataccctctattgccatgaccagtacttcagccactctggtgtcatctcaggctgatctccctgaattccacccttcagattcaatgcaaatcaggcactgttgcagaggttataaacat

SEQ ID NO: 697451 - DNA, 120 bp, Artificial Sequence
  ENSG00000189108_22 (sequence is synthesized)
gagataccagccacgaccttgccagtaccttccttaggcaaccaccatacttattgtaacctgcctctgacgctactcaacggacagctaccccttaataacaccctgaaagatacccag

SEQ ID NO: 697452 - DNA, 120 bp, Artificial Sequence
  ENSG00000189108_23 (sequence is synthesized)
gaatttcacaggaacagttctttgctgcctttatcctccaaagagcttagctttaccagtgatatttggtagtgaaaaatctgaattcctctgaacagctagataagcatagagaatttc

SEQ ID NO: 697453 - DNA, 120 bp, Artificial Sequence
  ENSG00000189108_24 (sequence is synthesized)
tgttataccaagcataaagtacacctaataacgttgtgttaaaaaagtgtttgaagaaaaaggtacaaaaatggcttttatacttaaatatttttgtttacatttccagaatagtggggg

SEQ ID NO: 697454 - DNA, 120 bp, Artificial Sequence
  ENSG00000189108_25 (sequence is synthesized)
tttttgggagcagaaagaaaggaagaaaatgaagagtcagagctgttgatacattgggaaaatatttttccactctattgaaacttcctacctttccttcccttctgtttcaccagttct

SEQ ID NO: 697455 - DNA, 120 bp, Artificial Sequence
  ENSG00000189114_0 (sequence is synthesized)
gaaatcacagcccttcagctgccacggtgagaacgcagcactcgggttaggaagcggatctcgcaagctccgagcgtcagctgccggttcggtgccatggcgtcccagggtcgtcggcgg

SEQ ID NO: 697456 - DNA, 120 bp, Artificial Sequence
  ENSG00000189114_1 (sequence is synthesized)
aggcccctgcggaggccggagacggtggtgccgggggaggcgaccgagacggattccgagcgctctgcgtcctcgtcggaggaggaggagctgtacctgggtccttcgggcccgacgcgc

SEQ ID NO: 697457 - DNA, 120 bp, Artificial Sequence
  ENSG00000189114_2 (sequence is synthesized)
ggccgccccacggggctgcgggtggctggggaagccgcggagaccgactcggagccggagccggagccggaaccgacggccgcgccgagggacctgcctccactcgtggtgcagcgggaa

SEQ ID NO: 697458 - DNA, 120 bp, Artificial Sequence
  ENSG00000189114_3 (sequence is synthesized)
gtgcagcgggaatcggcggaggaggcctggggcacggaggaggccccggcgcccgcccccgcgcgctcgctcctgcaacttcggctggcggagagccaggcgcggctggaccacgacgtg

SEQ ID NO: 697459 - DNA, 120 bp, Artificial Sequence
  ENSG00000189114_4 (sequence is synthesized)
cgcgacgtggccgccctggctagtaggctggcggcagcccaggcggcggggctggcggcggcccacagcgtgcgcctggcgcgcggggacctttgtgcgctggccgagcgtctggacatc

SEQ ID NO: 697460 - DNA, 120 bp, Artificial Sequence
  ENSG00000189114_5 (sequence is synthesized)
gcgctggccgagcgtctggacatcgtggctggctgccgcctgctgccggacatccgcggcgtgccagggaccgagcctgagaaagacccggggccgcgggcctagccatgattctacttc

SEQ ID NO: 697461 - DNA, 120 bp, Artificial Sequence
  ENSG00000189114_6 (sequence is synthesized)
ccaacctgactgcaatttgggggtaggccttgctgcctctgggacctgactctgtctcctgtgtctcttatcaccccccacccccgctcccatcttggtgtcacccatgggggctaatcc

SEQ ID NO: 697462 - DNA, 120 bp, Artificial Sequence
  ENSG00000189114_7 (sequence is synthesized)
ggtccccttggataatgctttatattggatatagttcaacccctactgcggagaccagggccccactatccttagatctggttcctctcccgatcctgaccctgccgcctggttctgagc

SEQ ID NO: 697463 - DNA, 120 bp, Artificial Sequence
  ENSG00000189114_8 (sequence is synthesized)
ccgcctggttctgagccttcccctggggcttggctccagcctttgttacatagttgctccttaatctgtttccaccctgggggctcaccaattttttttttttttttttttttttggaga

SEQ ID NO: 697464 - DNA, 85 bp, Artificial Sequence
  ENSG00000189114_9 (sequence is synthesized)
gctcagccttcaagagtagctgggactgcagacctgcaccaccacgtccagctgcccggttaatttttttctgtcggtttgaaga

SEQ ID NO: 697465 - DNA, 90 bp, Artificial Sequence
  ENSG00000189114_10 (sequence is synthesized)
actgggctctgctctgcctttctgagtttggtttctgcttatggtggggagcttgttcccgttcttcccacaagaacccaggatgtggca

SEQ ID NO: 697466 - DNA, 120 bp, Artificial Sequence
  ENSG00000189114_11 (sequence is synthesized)
gcttgttcccgttcttcccacaagaacccaggatgtggcacagcttccctgccgtcttccttcactcagttggctacgcctcccatcctagctccacttccagaactgccttcaccctag

SEQ ID NO: 697467 - DNA, 85 bp, Artificial Sequence
  ENSG00000189114_12 (sequence is synthesized)
tcccatcctagctccacttccagaactgccttcaccctaggctgggtccttgttttgtttttagagacagggtctcactgtgtct

SEQ ID NO: 697468 - DNA, 120 bp, Artificial Sequence
  ENSG00000189114_13 (sequence is synthesized)
gggattacaggcgtgggccactgcgcctagccagctgggtccttgttctgctgcccaagcttggccctggttccgtgtgctggttctactttttgttctcccatctgcctcctgcctcct

SEQ ID NO: 697469 - DNA, 120 bp, Artificial Sequence
  ENSG00000189114_14 (sequence is synthesized)
ctttttgttctcccatctgcctcctgcctcctcccctttgagcttagccccgccctctcagcctgatttctgtttcccaagtccagcagtgtcgtgggataggttttgctttcttttact

SEQ ID NO: 697470 - DNA, 120 bp, Artificial Sequence
  ENSG00000189114_15 (sequence is synthesized)
gtctccatcctacttacacctccctgatcctggggtctggggactccccatggtttccttccttctgcaggcccaaaatgatggcccctcttaacccaaggcaggggatcttcctcccaa

SEQ ID NO: 697471 - DNA, 120 bp, Artificial Sequence
  ENSG00000189114_16 (sequence is synthesized)
ctccctggaccaaggtggcatttcctgcacacccctccaggccaagatgatgctcgctctcaactctgtaggccaaggtggcgtctcctcttgactctccagacctaaagtgacaccctt

SEQ ID NO: 697472 - DNA, 120 bp, Artificial Sequence
  ENSG00000189114_17 (sequence is synthesized)
caggcacttcgggcccaattcagcccagtcctggtgctttcagcgccagatgacagcactttgcagataagaacgatatgatgtgtggatttcactacatttggctcctggatgctataa

SEQ ID NO: 697473 - DNA, 120 bp, Artificial Sequence
  ENSG00000189114_18 (sequence is synthesized)
aaggacttggatttctgacttggctcagggactggggttagcagtctctttctgctccttttcacctgtgttttcttccgatcccagctctggtccctcagccgcattcatatttactct

SEQ ID NO: 697474 - DNA, 120 bp, Artificial Sequence
  ENSG00000189114_19 (sequence is synthesized)
cctctcccagcctgatatccctgtccctcatctcaacccgaagccaagatctgagcccccaagatggagaatggggaggagctttttatggcggactgattaaaactcttaagcatttac

SEQ ID NO: 697475 - DNA, 120 bp, Artificial Sequence
  ENSG00000189114_20 (sequence is synthesized)
gagcggcttcacagcaggaccacaggagtcattgtggccaacttcgctggaggcttggagatctttggggccattaaggcagagctgcagggcctagagattgagatgctggtgaacaat

SEQ ID NO: 697476 - DNA, 120 bp, Artificial Sequence
  ENSG00000189114_21 (sequence is synthesized)
gagtcctagcccacctggcacctcttcctccaactctttactgccctctgttggaaaactcgcgtaatatacaaagtcgagacgggatttcaccatgttgcccagactggtctgtaactc

SEQ ID NO: 697477 - DNA, 120 bp, Artificial Sequence
  ENSG00000189114_22 (sequence is synthesized)
ctggcctcaagtgattcacccgcctcagcctccctaaatgctggggattacagacgtgaaccactgcacacggcctccattgagtctctctctgtggccaccactgctccaggcccatgg

SEQ ID NO: 697478 - DNA, 120 bp, Artificial Sequence
  ENSG00000189114_23 (sequence is synthesized)
actctgggaaacatctccaaacctcttccacgtctgcaaaatcttgcctttgcggggatggagactggacaaagtgtacaaggaagctccctgcattctttcttacatctgcatgtgaat

SEQ ID NO: 697479 - DNA, 120 bp, Artificial Sequence
  ENSG00000189114_24 (sequence is synthesized)
ctacaattatctcaaaaattttccaaagaaaacattccaaggactccgggcttggaactccaagaagagcgactgaatgaggcccttccagcccagctgaatacaactgggtacaaataa

SEQ ID NO: 697480 - DNA, 120 bp, Artificial Sequence
  ENSG00000189120_0 (sequence is synthesized)
gactcagatctcacctcctaccactcccctaggagagctgggggccactgtttcctggattatcctaaaagcttctgaggccgtgaggacttggcagcatccctgctccctccttcacct

SEQ ID NO: 697481 - DNA, 120 bp, Artificial Sequence
  ENSG00000189120_1 (sequence is synthesized)
ccccctttggcactgcctgtcacctcctttataaagcctggctcttttatcaccgccacttggccctcactgccgccgccagctctgggctccatggactggtcccgtctgaggtgcccc

SEQ ID NO: 697482 - DNA, 120 bp, Artificial Sequence
  ENSG00000189120_2 (sequence is synthesized)
tgaccgtccctgccctcaccccaccccggatcccggcaatgctaaccgctgtctgcggctctctgggcagccagcacacggaagcgccgcacgcctccccgccgcgcctcgacctgcagc

SEQ ID NO: 697483 - DNA, 120 bp, Artificial Sequence
  ENSG00000189120_3 (sequence is synthesized)
ctctccaaacttaccagggccacacgagccctgaggccggggactacccctccccgctgcagcctggagagctgcagagcctcccgctgggcccggaggtggacttctcgcagggctatg

SEQ ID NO: 697484 - DNA, 120 bp, Artificial Sequence
  ENSG00000189120_4 (sequence is synthesized)
agctgccaggggcctcctcgcgggtaacctgcgaggacctggaaagcgacagtcccttggccccgggccccttttccaagctcctgcagccggacatgtcacaccattatgaatcgtggt

SEQ ID NO: 697485 - DNA, 120 bp, Artificial Sequence
  ENSG00000189120_5 (sequence is synthesized)
tcaggccgactcacccaggcgcggaggatggctcgtggtgggaccttcatccgggcaccagctggatggacctcccccacactcagggcgcgctgacctcacctggccacccgggggcgc

SEQ ID NO: 697486 - DNA, 120 bp, Artificial Sequence
  ENSG00000189120_6 (sequence is synthesized)
ttcaggcgggcttggggggctacgtcggagaccaccagctttgtgccccgccaccccacccgcatgcgcaccacctccttccagctgccggagggcagcatctcctagggccgcccgacg

SEQ ID NO: 697487 - DNA, 120 bp, Artificial Sequence
  ENSG00000189120_7 (sequence is synthesized)
gggctaaggccttggaagtagccgccccggagtctcaagggctggattccagcctggacggggcggcgcgtcccaaaggctcccggcggtcggtgccccgcagctcaggccagaccgtct

SEQ ID NO: 697488 - DNA, 120 bp, Artificial Sequence
  ENSG00000189120_8 (sequence is synthesized)
gtcgctgccccaactgtctggaggcggagcgactgggggctccatgtgggcccgatgggggcaagaagaagcatttgcacaactgccacatcccgggctgcgggaaagcctacgccaaga

SEQ ID NO: 697489 - DNA, 120 bp, Artificial Sequence
  ENSG00000189120_9 (sequence is synthesized)
cgtcgcacctgaaggcgcacctgcgctggcacagcggcgaccgtcccttcgtgtgcaactggctcttctgcggcaagcgcttcacgcgctcggacgagctgcagcgccacctccagaccc

SEQ ID NO: 697490 - DNA, 120 bp, Artificial Sequence
  ENSG00000189120_10 (sequence is synthesized)
acaccggcaccaagaagttcccctgtgcagtctgcagccgcgtcttcatgcgcagcgaccacctggccaagcacatgaaaacccacgagggcgccaaggaggaggcggctggggcggcct

SEQ ID NO: 697491 - DNA, 120 bp, Artificial Sequence
  ENSG00000189120_11 (sequence is synthesized)
cgggagagggcaaggccggcggcgcagtggagccccccgggggcaaaggcaaacgcgaggccgagggcagcgtggctccctccaactgagctcctcagtgccgcctccctgcgggtatcc

SEQ ID NO: 697492 - DNA, 120 bp, Artificial Sequence
  ENSG00000189120_12 (sequence is synthesized)
cggggggcactggatgcgagcccccaggtctgacgtccttgggggtggcttgaggaagaggggaaggtgcgtatttattcagggaggaggaaaagtggtgcagggacagggagatggggc

SEQ ID NO: 697493 - DNA, 120 bp, Artificial Sequence
  ENSG00000189120_13 (sequence is synthesized)
gctaggggttcttagtctctggggctactaggcaggatgaatttgactgggtcggtaggagctgcgcaatgcccctctgttctcccctgcctcacagtttccctcgcccctgggctgggg

SEQ ID NO: 697494 - DNA, 120 bp, Artificial Sequence
  ENSG00000189120_14 (sequence is synthesized)
ggttggggtgggacacccgtaccgcggctggctggcggggacaggctagaggagacagcaagtcccagtccccggagcagagagaagtggggccggcccggggcgctggtggtggctgtc

SEQ ID NO: 697495 - DNA, 120 bp, Artificial Sequence
  ENSG00000189120_15 (sequence is synthesized)
cttaaagtgcttctgcccctagggtttccggagggagagccgagatgggatgggggagcctgggggtcccccttggcaggggtgtctctttctggtttggagggttgttgctgtaaaaat

SEQ ID NO: 697496 - DNA, 120 bp, Artificial Sequence
  ENSG00000189120_16 (sequence is synthesized)
aactcctttgatgagcttccttattaaccctttcagacccagtctgttggagccatgaaggaagagggaaagagggctgccattcctgacagcctcccagccagggctggcgataaagga

SEQ ID NO: 697497 - DNA, 120 bp, Artificial Sequence
  ENSG00000189120_17 (sequence is synthesized)
ccgagatagatggagggggcgagtagggaagtcctcttctaaaatgagagatagggatttggtggggtatggaaggaactaaccccttccctctccacctctgattcagcccttaattct

SEQ ID NO: 697498 - DNA, 120 bp, Artificial Sequence
  ENSG00000189120_18 (sequence is synthesized)
tggtctatgataaataaagttcagtagtctcacattccccatctattaccctaggtgtgttttcaaggcagccagcggtagaatccatgtagttcccaccagttgccttcccctcaggga

SEQ ID NO: 697499 - DNA, 120 bp, Artificial Sequence
  ENSG00000189120_19 (sequence is synthesized)
tggaaggaagagggtttcttgggctggttgagggcagattgggggtgtctcatcagagggacctccactggttcccactcagagtggaggcctgcagcctacctgaccatctctttagct

SEQ ID NO: 697500 - DNA, 120 bp, Artificial Sequence
  ENSG00000189120_20 (sequence is synthesized)
gtcaccaagaaaataaaccccactgtctctctagcttggcccttgtctttcccttgcccctgccatagcatgttcattaggggattccttcctccccctcatctcacaggggaagggaga

SEQ ID NO: 697501 - DNA, 120 bp, Artificial Sequence
  ENSG00000189120_21 (sequence is synthesized)
ggaaagagttgttctcccactggaaggggttctgccttctgaggtgacatccaggaagctgtccccattcccttctcctttagatgctagaaacacattttgattctgatcatggggtgg

SEQ ID NO: 697502 - DNA, 120 bp, Artificial Sequence
  ENSG00000189120_22 (sequence is synthesized)
gggagagaggaaaggagggaggggagaagcccagcagaagctgagccaggcagaggggaaagaagctgatatgaggaagggtctgacaggccacagcccttgcagccggagggctttccc

SEQ ID NO: 697503 - DNA, 120 bp, Artificial Sequence
  ENSG00000189120_23 (sequence is synthesized)
acactcaagagaggggccttacagtccctctgacacccctcccccttcccctcgctccctttcttcacccggagccctctgcagagattagctgtgtattgatttttaagttataagcaa

SEQ ID NO: 697504 - DNA, 120 bp, Artificial Sequence
  ENSG00000189120_24 (sequence is synthesized)
agggtattttatttaatattaggttatgtgtgtgcatgttgtgtgtacctgtgtgcatgtatgtgtgtttctctactgagcctggggtctctagccagggagaccccatcttattcacca

SEQ ID NO: 697505 - DNA, 120 bp, Artificial Sequence
  ENSG00000189120_25 (sequence is synthesized)
tgtccaagatcctgggatctgggcccagcatctcttcctcctttgtagatgctggagcccagccaaggtctgggagctatatgggaagtgggggctgggatctgggtgggaatatgtgtt

SEQ ID NO: 697506 - DNA, 120 bp, Artificial Sequence
  ENSG00000189120_26 (sequence is synthesized)
tgtatacaaaggggccctccttaaaagggacaggatgaccttcccgaggaactcattggcctggggtagtttaagaagtaatgttctttctttctttctcttttccctacctcctgctaa

SEQ ID NO: 697507 - DNA, 120 bp, Artificial Sequence
  ENSG00000189120_27 (sequence is synthesized)
cccaaccagagatccccttccttgctgagagggttgggggcaggaggagatttggcagtgcctgcaggttgcctggccaggtggagagggggaaagaggaagggcaccgtgggtgtaaga

SEQ ID NO: 697508 - DNA, 120 bp, Artificial Sequence
  ENSG00000189120_28 (sequence is synthesized)
tgcctttctcctccacccatcgaaaccagccaccccttccctgtgccaccaagacagccttttccagtggccatcctaaggggaactcccaaatgggtgttgctggtggacacagatgct

SEQ ID NO: 697509 - DNA, 120 bp, Artificial Sequence
  ENSG00000189120_29 (sequence is synthesized)
ccccccaatggaagccccaagctctgaggtatgcgggtagaggctttggataggttttcttctgctcccctcttttatagatctaggctgcttggctgcctgtctttctaggcagtcccc

SEQ ID NO: 697510 - DNA, 120 bp, Artificial Sequence
  ENSG00000189120_30 (sequence is synthesized)
ctagaggaaaaatgtaggaatttattttttctttaactgctgtgaactcactttgagggggtaggaggagggagaaacagcctgtgttttttatgcaataaagtcatcaactacatcatg

SEQ ID NO: 697511 - DNA, 120 bp, Artificial Sequence
  ENSG00000189120_31 (sequence is synthesized)
agagagcgcgggtgagtcacgggcggagctggccttgttcgctcgctggctcctgcccgccctccgtcctccgccctctcgccagcgctcacctccgccgcctgccgcctgccgccagcc

SEQ ID NO: 697512 - DNA, 120 bp, Artificial Sequence
  ENSG00000189120_32 (sequence is synthesized)
gccgggtctggctcgccctgggctcctgccccttaccgctggagagctcgccggcgcacagggcctatgagcgaccgtcagtagcgcaccagccagccgtgcccggagcccgccgcagcc

SEQ ID NO: 697513 - DNA, 120 bp, Artificial Sequence
  ENSG00000189127_0 (sequence is synthesized)
gattcgaggcgccgaggagccgaagaccacagctcagctcagacggcgccctagggccgcacagagggtcgggcagtgccggagagaggtttgaaagcgccgccgccaactcgacagcgc

SEQ ID NO: 697514 - DNA, 120 bp, Artificial Sequence
  ENSG00000189127_1 (sequence is synthesized)
gtcccagcgccttgagctcgcttcctcctgctctcaggaaaaactgaggaaacgcgcctggttccaggggtcggcggggaccgtggagacgctgccagcatcctcaacagcttggaaatc

SEQ ID NO: 697515 - DNA, 120 bp, Artificial Sequence
  ENSG00000189127_2 (sequence is synthesized)
ccatcaccttggttccctgagacttggaggactagtaggaactgacagctggctgacagaaaacttatccagggagagaagagacaaaagtgaagtgtgaaattttgaataatgttttca

SEQ ID NO: 697516 - DNA, 120 bp, Artificial Sequence
  ENSG00000189127_3 (sequence is synthesized)
gatgctttgcattcagaatagacctctgagttgggacccaagctgtcaactgatcccaaattcctaagttcctgacttgcaggtattgagttctaacctccgaagatggatgaaggtatg

SEQ ID NO: 697517 - DNA, 120 bp, Artificial Sequence
  ENSG00000189127_4 (sequence is synthesized)
gaaatttcaagtgaaggaaattccttgatcaaagcagtccatcagagccggcttcgcctcacaagacttttgctagaaggcggtgcctacattaatgagagcaacgaccgtggggaaacc

SEQ ID NO: 697518 - DNA, 120 bp, Artificial Sequence
  ENSG00000189127_5 (sequence is synthesized)
cctttaatgatcgcttgtaagaccaaacatgtcgatcaccagagtgtcagtaaagccaaaatggtgaaatacctgttagagaacaatgccgatcccaacatacaggacaaatctgggaaa

SEQ ID NO: 697519 - DNA, 120 bp, Artificial Sequence
  ENSG00000189127_6 (sequence is synthesized)
acggctctgatgcatgcttgcttagaaaaagctggccctgaagttgtttccttgctcctcaagagtggggctgacctcagcttgcaagaccattctagttactcagctcttgtttatgct

SEQ ID NO: 697520 - DNA, 120 bp, Artificial Sequence
  ENSG00000189127_7 (sequence is synthesized)
ataaattcagaagatacagagaccctgaaagttcttcttagtgcttgcaaggcaaaagggaaagaggtcatcatcatcacaacagcaaagttgccctgtgggaagcatactactaaacaa

SEQ ID NO: 697521 - DNA, 120 bp, Artificial Sequence
  ENSG00000189127_8 (sequence is synthesized)
tacttaaatatgcctcctgtggatatagatgggtgtcattccccagctacctgcaccactccttcagaaatagacatcaaaactgcctcatcgccactttcacattcttctgaaacggaa

SEQ ID NO: 697522 - DNA, 120 bp, Artificial Sequence
  ENSG00000189127_9 (sequence is synthesized)
ctgacgctttttggctttaaagatcttgagcttgctggaagcaatgatgatacctgggacccaggttcccctgtgaggaaacctgcattggcccctaaggggcccaagctcccccacgct

SEQ ID NO: 697523 - DNA, 120 bp, Artificial Sequence
  ENSG00000189127_10 (sequence is synthesized)
ccaccctgggtcaagagtcccccattattaatgcaccagaacagagtggcttcattgcaagaggagctccaggatattacaccagaggaagaactatcctataaaaccaatgggctggca

SEQ ID NO: 697524 - DNA, 120 bp, Artificial Sequence
  ENSG00000189127_11 (sequence is synthesized)
ctttccaagcggttcatcactaggcaccaaagcattgatgtaaaagacactgcacatttgctaagagcctttgatcaggccagctcaaggaagatgtcatatgatgaaataaattgtcaa

SEQ ID NO: 697525 - DNA, 120 bp, Artificial Sequence
  ENSG00000189127_12 (sequence is synthesized)
tcttatctttcagaaggaaatcagcaatgcattgaagtccctgttgaccaggacccagattctaaccagacaatatttgcttccaccttaagaagtatagttcaaaaaagaaacttgggg

SEQ ID NO: 697526 - DNA, 120 bp, Artificial Sequence
  ENSG00000189127_13 (sequence is synthesized)
gcaaatcactacagctctgattcccagctctcagctggccttacccctccaacttcagaagacggcaaagcacttataggaaagaaaaagatcctctcaccatctccttcccaattgtca

SEQ ID NO: 697527 - DNA, 120 bp, Artificial Sequence
  ENSG00000189127_14 (sequence is synthesized)
gagtccaaagaattgttggagaatatccccccaggtcccctgagcaggagaaatcatgcagttttagaaaggcgaggttcaggagctttccctttagatcacagtgttacccaaaccaga

SEQ ID NO: 697528 - DNA, 120 bp, Artificial Sequence
  ENSG00000189127_15 (sequence is synthesized)
tcccacccttaaatgtaaattctcaccctcccatctcagatatcaatgtcaacaacaagatttgcagccttctttcttgtggtcaaaaagtgcttatgccaacagttccgattttcccta

SEQ ID NO: 697529 - DNA, 120 bp, Artificial Sequence
  ENSG00000189127_16 (sequence is synthesized)
aagaattcaaaagtaagaaaatgttgttaaggagacaatcattgcaaactgaacaaattaagcaattagtaaacttctaggagatgggtataaaacacatcttcttcaaatgtttatatc

SEQ ID NO: 697530 - DNA, 120 bp, Artificial Sequence
  ENSG00000189127_17 (sequence is synthesized)
agagaaacaaagaactagagaagaaatcttaaatgttcattcttttaaatctcgtgattggttagtccataatggctagatggattaaaatgtaatgtgatttgtactaggcgtcatgag

SEQ ID NO: 697531 - DNA, 120 bp, Artificial Sequence
  ENSG00000189127_18 (sequence is synthesized)
cataaaaaataatacatagtttctgttaagggaattctctcaaacaaaaggaaagcgatttttctcaatgcttctaatatttaacaatctccatgtagtccaaatttgtcattaaaaaaa

SEQ ID NO: 697532 - DNA, 120 bp, Artificial Sequence
  ENSG00000189127_19 (sequence is synthesized)
aatcaaagaaagaaggccacgtatgttggggtaatttttaaaaattttcagattggctaaatattttattaggaaacagttttcaagtcaataatttttttaacatttcatgttaataaa

SEQ ID NO: 697533 - DNA, 120 bp, Artificial Sequence
  ENSG00000189127_20 (sequence is synthesized)
tgagattgaaattttttatgatctctaaaccataaaagaaaacaccgacagctgtaaaatgttctaagataaaaaaactcgagctacaaagaaagaatgaactaattctttacaaatgtt

SEQ ID NO: 697534 - DNA, 120 bp, Artificial Sequence
  ENSG00000189127_21 (sequence is synthesized)
gactgaagatagataaaactctaattaaaaatttaaaaggttaaacactgtattagaatgggcaactaaaatattcgtggtgtcagtttaattagtgtcaaactggcaagtcagagtttt

SEQ ID NO: 697535 - DNA, 120 bp, Artificial Sequence
  ENSG00000189127_22 (sequence is synthesized)
acaacctactagtaatctatgccgggtcttgttgtttgtgcactgtgttttgctttgctttgttttggtttttaaacagacttacctgtaaagttatcttacggaattattctttctcca

SEQ ID NO: 697536 - DNA, 120 bp, Artificial Sequence
  ENSG00000189127_23 (sequence is synthesized)
tatcttttaaggaattattctttctccatatcatcttttaattcctgttattagttttggaagcttatccataagtttccaaagacaagatgatataaaagttaaaaagcattcctcttt

SEQ ID NO: 697537 - DNA, 120 bp, Artificial Sequence
  ENSG00000189127_24 (sequence is synthesized)
acttatatcaaattattcttgtctttcaaaaagaaccaaaaaaaaaaaattcatcatggataaaaactaagcgcttgccttcttttaaaaagaaaaactgatgattagattaggttagct

SEQ ID NO: 697538 - DNA, 120 bp, Artificial Sequence
  ENSG00000189127_25 (sequence is synthesized)
aaaattaatagaggcagtagaaacttaatcacaaaatgtactaaatatttggcaatattaaacaatgcctttttatttctgatatgtagttattagacatttatatattaaggataactt

SEQ ID NO: 697539 - DNA, 120 bp, Artificial Sequence
  ENSG00000189127_26 (sequence is synthesized)
acttccttagtgtgacattccaatcatttagtattttaggacctgtgaataacttccaacaaaattaatgaataccatattagtattataaaatattataaagtaataattatatcatct

SEQ ID NO: 697540 - DNA, 120 bp, Artificial Sequence
  ENSG00000189127_27 (sequence is synthesized)
aacttcaaagtatgatgtttatacaaagaatccttatttcagtctagcagcttaacaacaaaggataaatcagactatacaaaacctaagtgtattaatttgatgattgtcacgtacaac

SEQ ID NO: 697541 - DNA, 120 bp, Artificial Sequence
  ENSG00000189127_28 (sequence is synthesized)
tttctttgccttccaagtagaggtgatcctaacaattggcatgatgcttttcttggtaatttgatataagcaagttgtaatgtacatagtaattatttaattactgtggcttttatttta

SEQ ID NO: 697542 - DNA, 120 bp, Artificial Sequence
  ENSG00000189127_29 (sequence is synthesized)
aaaagtaattagaggtttttccatttcatgtcttgaacaacattaatattaattacactagaaatattttttgattcagaacttagaattgtacctgatatttataggtatttaaatgct

SEQ ID NO: 697543 - DNA, 120 bp, Artificial Sequence
  ENSG00000189127_30 (sequence is synthesized)
ttctgcaagttaaatatcgagaaaagtacttgacttcaagttgtaaggatacaatttggaagggtatgtaaatagattagttcataaacaaaatggtatcaataaagattttaaatatca

SEQ ID NO: 697544 - DNA, 120 bp, Artificial Sequence
  ENSG00000189127_31 (sequence is synthesized)
agctcagctcagacggcgccctagggccgcacagagggtcgggcagtgccggagagaggtttgaaagcgccgccgccaactcgacagcgcgtcccaggaaaaactgaggaaacgcgcctg

SEQ ID NO: 697545 - DNA, 120 bp, Artificial Sequence
  ENSG00000189129_0 (sequence is synthesized)
agacgcggcgctgcgctcggccaggccggcaccatgcggcccctgctctgcgcgctgaccggactggccctgctccgcgccgcgggctctttggccgctgccgaacccttcagccctccg

SEQ ID NO: 697546 - DNA, 120 bp, Artificial Sequence
  ENSG00000189129_1 (sequence is synthesized)
cgaggagactcagctcagagcacagcgtgtgacagacacatggctgtgcaacgccgtctagatgtcatggaggagatggtagagaagaccgtggatcacctggggacagaggtgaaaggc

SEQ ID NO: 697547 - DNA, 120 bp, Artificial Sequence
  ENSG00000189129_2 (sequence is synthesized)
ctgctgggcctgctggaggagctggcctggaacctgcccccgggacccttcagccccgctcccgaccttctcggagatggcttctgagccctggagctggagcccagcagttggaggtgg

SEQ ID NO: 697548 - DNA, 120 bp, Artificial Sequence
  ENSG00000189129_3 (sequence is synthesized)
agcttcatgtgaaataaaagctattctggtctcctctgtgtctgctgacagagtaacccgtttaactacagcctcctctcactccacttccatgcctggaggaagcctgcaaccccctcc

SEQ ID NO: 697549 - DNA, 120 bp, Artificial Sequence
  ENSG00000189129_4 (sequence is synthesized)
aggctcagacctggggacacccccactcctgtcatttataggggcagatggagcaggggttgattcacacagatgggggccctttgagtggccttgcttctcaaaatgtggccataggtg

SEQ ID NO: 697550 - DNA, 120 bp, Artificial Sequence
  ENSG00000189129_5 (sequence is synthesized)
aaaagcaaggggatcagggtctcaggacccacccagactgtttaatccaaatctgcattgcaatgagacccccagggattttatgtgtccattaaagtggtttgttgttgtttttaaaaa

SEQ ID NO: 697551 - DNA, 120 bp, Artificial Sequence
  ENSG00000189129_6 (sequence is synthesized)
gaatttctccgtctgaggctactatcttgctctggaggagggagtgagaactggatcactggttagcgtggtaactgttttggacaattgcatagccacagccaggaacacagaaggcag

SEQ ID NO: 697552 - DNA, 120 bp, Artificial Sequence
  ENSG00000189129_7 (sequence is synthesized)
ggggaaactgaggcaggtaggggcagagcctgagtgaggaaaacccaggtcacttagcgcccagtcctttcccactgcaccgcactggaccgccagctgctctcttaggacctagctgat

SEQ ID NO: 697553 - DNA, 120 bp, Artificial Sequence
  ENSG00000189129_8 (sequence is synthesized)
cacggggtgccgaggggcctctggagggggcgggttctctcgagccagaaagtccggagccgcccaggaattttggctcgaactgagtgcatttcctctcgggccggccgggtgcgatcc

SEQ ID NO: 697554 - DNA, 120 bp, Artificial Sequence
  ENSG00000189132_0 (sequence is synthesized)
agaagctggagaggtggcacaacagagagggccaccatgggggaccggaggccacaggaccggccaaggtcccaaggcatggactccaagccctggtactgtgacaaaccgccttccaag

SEQ ID NO: 697555 - DNA, 120 bp, Artificial Sequence
  ENSG00000189132_1 (sequence is synthesized)
tacttcgcgaagcgcaagcacaggcgcctgaggttcccgcctgtggacacccagaactgggtatttgtgacggagggcatggacgacttccgctacgcctgtcagtctcctgaagatacg

SEQ ID NO: 697556 - DNA, 120 bp, Artificial Sequence
  ENSG00000189132_2 (sequence is synthesized)
cttgtttgtcgccgtgacgagtttttactccccaaaatatctctcagaggtccccaagctgaccgcaaaagcaggaagaaaaagctgctcaagaaagcggccctattttccgagctctcg

SEQ ID NO: 697557 - DNA, 120 bp, Artificial Sequence
  ENSG00000189132_3 (sequence is synthesized)
ccagtacagccagcacggaaggcgttcgtagaggaagtggaagcccagctgatgaccaagcatcccttggccatgtaccccaatctgggaaaagatatgcctccagatctcctactacag

SEQ ID NO: 697558 - DNA, 120 bp, Artificial Sequence
  ENSG00000189132_4 (sequence is synthesized)
gtgctgaaacagctggatcccgagaggaagctggaggacgcttgggctcgttgtgaggcccgggagaagacaaccgaggtacccaccgagtctggtaaatatccctgtggggaatcctgc

SEQ ID NO: 697559 - DNA, 120 bp, Artificial Sequence
  ENSG00000189132_5 (sequence is synthesized)
ccgcggcctcccgagactccggtgtcccgtctccgtcctcagcttcccaagactccggtgtccagtcgccgcccagagcctcccaagactcgggtgtccagtctccgcccagagcctccc

SEQ ID NO: 697560 - DNA, 120 bp, Artificial Sequence
  ENSG00000189132_6 (sequence is synthesized)
aagactcgggtgtccagtctccacccggaacctccagagactcgcgcatctcatctccgcgtggatcctcccgagactggagtgtcccatctctgcccagagcctcccaagactctggtg

SEQ ID NO: 697561 - DNA, 120 bp, Artificial Sequence
  ENSG00000189132_7 (sequence is synthesized)
tccagtgtccacccagagcctcctgatactggagcgtcccatctctgcccggagcctcccgagactcgcgtatctcatctccacccggagcctcctgagactggagtgtcccatctccgc

SEQ ID NO: 697562 - DNA, 120 bp, Artificial Sequence
  ENSG00000189132_8 (sequence is synthesized)
tcccaacactcatcgggtgtccagtttcctactacaggtgctgaaactggattctgagaagaagctggaagacgcacgggctcgttgtgagggccaggagatgacaaccgaggaactcac

SEQ ID NO: 697563 - DNA, 120 bp, Artificial Sequence
  ENSG00000189132_9 (sequence is synthesized)
caagcctggtaaataccatttttgggaatcctgtccgcggccttttgagagtcggatgccccatctccgcctggtgcttcccataactcgtcgaatggccagtctctgcctgaagcctcc

SEQ ID NO: 697564 - DNA, 120 bp, Artificial Sequence
  ENSG00000189132_10 (sequence is synthesized)
caagactcgtcgggtgtccagtctctgcccggagcctaccaagaccggagcgtcccatctaaaagaactgtttcaggaagatacaccaagcacaatggagtgtgtttctgactctcttca

SEQ ID NO: 697565 - DNA, 120 bp, Artificial Sequence
  ENSG00000189132_11 (sequence is synthesized)
acgtagacacacatcgagaaaactccgtgacttcaagtgggctggagacctaggagttaatgaagaatccatcagcagtctgtttgactttacccctgagtgcagaacaaccgatcaaga

SEQ ID NO: 697566 - DNA, 120 bp, Artificial Sequence
  ENSG00000189132_12 (sequence is synthesized)
ccaaaagattaagaaggcaaacgagtgtgcttcaaggctgatgtacggcatggagctagacgacatggatgaggtcgaattcttacggataaaatactgggacaggagacgccgggcggc

SEQ ID NO: 697567 - DNA, 120 bp, Artificial Sequence
  ENSG00000189132_13 (sequence is synthesized)
accgcattcttatagtgcacagcgtgggaggataaggtatggaccatggtacttcgagcctaagttggggaaaaagctaagaagtgatgaacctttgattgaccccaagcccgtacttga

SEQ ID NO: 697568 - DNA, 120 bp, Artificial Sequence
  ENSG00000189132_14 (sequence is synthesized)
aaagcctgatgaacccgacattcttgacggtctttatggaccaattgcctttaaggatttcattctaagcaagggctacagaatgcctggcgtcattgaaaagctgtttgccaagaaggg

SEQ ID NO: 697569 - DNA, 120 bp, Artificial Sequence
  ENSG00000189132_15 (sequence is synthesized)
atggacttacgactctgttaagactcctattcaacgtgcagtgcaagtttacaagtacaaagaagacgtcacagatgcatcaaaagaagattagatggttttcaatttactgcttaattg

SEQ ID NO: 697570 - DNA, 120 bp, Artificial Sequence
  ENSG00000189132_16 (sequence is synthesized)
ggtatttcttgctctcattctaaacatcaatcagaatttatgatgactggccccgtgaatgtacaactttggcaacatctgtaaattcaatacccaatgcttataaatatgtcttaatga

SEQ ID NO: 697571 - DNA, 120 bp, Artificial Sequence
  ENSG00000189134_0 (sequence is synthesized)
agtgcgcctgcgtggccgcgaatcaccagccagcctctgggtctgtagcaaccgcccagcgttgaggcgcggctcatgcccccagtatcccggtccagctattccgaggacatcgtgggc

SEQ ID NO: 697572 - DNA, 120 bp, Artificial Sequence
  ENSG00000189134_1 (sequence is synthesized)
tctcggagaaggcgacgcagctcctcggggagcccaccatccccgcagagcagatgttcctcttgggatggctgttcccgctctcactcccgcggccgtgagggcctcaggcctccttgg

SEQ ID NO: 697573 - DNA, 120 bp, Artificial Sequence
  ENSG00000189134_2 (sequence is synthesized)
agtgagttggacgtgggcgctctttacccctttagtcgctctgggtcgcgagggcggctcccaagattccgcaactacgccttcgcgtcctcctggtcgacctcgtatagtggatatcgc

SEQ ID NO: 697574 - DNA, 120 bp, Artificial Sequence
  ENSG00000189134_3 (sequence is synthesized)
taccatcgtcactgctatgcagaagaacggcagtcagcggaagactacgagaaggaagagagccatcggcagaggaggctgaaggagagagagaggattggggaattgggagcgcctgaa

SEQ ID NO: 697575 - DNA, 120 bp, Artificial Sequence
  ENSG00000189134_4 (sequence is synthesized)
gtgtgggggccgtctccaaagttccctcagctagattctgacgaacataccccagttgaggatgaagaagaggtaacgcatcagaaaagcagcagttcagattccaactcggaagaacat

SEQ ID NO: 697576 - DNA, 120 bp, Artificial Sequence
  ENSG00000189134_5 (sequence is synthesized)
aggaaaaagaagaccagtcgttcaagaaacaagaaaaaaagaaagaataagtcgtctaaaagaaagcataggaaatattctgatagtgacagtaactcagagtctgacacaaattctgac

SEQ ID NO: 697577 - DNA, 120 bp, Artificial Sequence
  ENSG00000189134_6 (sequence is synthesized)
gactcaagctgtaaagactcagaagaggacttgtcagaagctacctggatggagcagccaaatgtggcagatactatggatttaatagggccagaagcacctataatacatacctctcaa

SEQ ID NO: 697578 - DNA, 120 bp, Artificial Sequence
  ENSG00000189134_7 (sequence is synthesized)
gatgaaaaacctttgaagtatggccatgctttgcttcccggtgaaggtgcagctatggctgagtatgtaaaagctggaaagcgaatcccacgaagaggtgaaattgggttgacaagtgaa

SEQ ID NO: 697579 - DNA, 120 bp, Artificial Sequence
  ENSG00000189134_8 (sequence is synthesized)
gagatcggttcttttgaatgctcaggttatgtcatgagtggtagcaggcatcgcagaatggaggctgtacgactgcgtaaggagaaccagatctacagtgctgatgagaagagagctctt

SEQ ID NO: 697580 - DNA, 120 bp, Artificial Sequence
  ENSG00000189134_9 (sequence is synthesized)
gcatcctttaaccaagaagagagacgaaagagagaaagtaagattttagccagtttccgagagatggtgcacaaaaagacaaaagagaaagatgacaagtaaggacttacttgttgcaca

SEQ ID NO: 697581 - DNA, 120 bp, Artificial Sequence
  ENSG00000189134_10 (sequence is synthesized)
gcaggaattttaacaacaaaaattttatgtgaccaaaagtgttaaaaggctttacagtgctactgtacttaccatattagtaagtccctcaggaaaaagcttcttttgagatatctttag

SEQ ID NO: 697582 - DNA, 120 bp, Artificial Sequence
  ENSG00000189134_11 (sequence is synthesized)
cagcttattttttgttattttaactttaaaaagtaatatgtgcacatggttttaaaaatattcaaccattataggaggagagttagtaaaaagtgaatctttcactttagcccctgacac

SEQ ID NO: 697583 - DNA, 120 bp, Artificial Sequence
  ENSG00000189134_12 (sequence is synthesized)
ctttcccccaaaaatatatattttggtgtcttatatacagaatatacattctgtgcatatacaagagtatatgttgcagcataaagattaaaagctattaaagttttttttcgctcgtta

SEQ ID NO: 697584 - DNA, 120 bp, Artificial Sequence
  ENSG00000189139_0 (sequence is synthesized)
agttataacagagactaaagaagaaagacgcttactgaataaggtgggatccaacaagagtgtagtatggaatgcaatagcttatgaattactttttttctgagggagctcaacagaatg

SEQ ID NO: 697585 - DNA, 120 bp, Artificial Sequence
  ENSG00000189139_1 (sequence is synthesized)
acacctaagaaagggaaagtctttgacacttggtacgtttgtgatttttggtcattacttgaaaattaataagtttgaaatcactactcttagaaatggaagaaagtgatgactctaatc

SEQ ID NO: 697586 - DNA, 120 bp, Artificial Sequence
  ENSG00000189139_2 (sequence is synthesized)
agcctatctcagcgtgtaggcaagaaattcgaaagagaagatgacccagcaaaccaatggtaggcaaatcccagcaaactgatgtaatagagaaaaagaaacacatggccataccaaaat

SEQ ID NO: 697587 - DNA, 120 bp, Artificial Sequence
  ENSG00000189139_3 (sequence is synthesized)
catctagccccaaagctacccatcgtattggtaatacttctggaagcaaaggcagctactctgccaaagcctatgagtctattagagtatcttctgagcttcagcaaacttggacaaaga

SEQ ID NO: 697588 - DNA, 120 bp, Artificial Sequence
  ENSG00000189139_4 (sequence is synthesized)
gaaagcatggacaggaaatgactagtaagtctctccagacagacaccattgtagaagagaaaaaagaagtcaagttagttgaggaaaccgtggtacctgaagaaaagtcagctgatgtta

SEQ ID NO: 697589 - DNA, 120 bp, Artificial Sequence
  ENSG00000189139_5 (sequence is synthesized)
gagaagctgctattgaattgccagagagtgttcaggatgtagaaattccaccaaacataccttcagttcaactaaaaatggacagatctcagcagaccagccgtacaggatactggacca

SEQ ID NO: 697590 - DNA, 120 bp, Artificial Sequence
  ENSG00000189139_6 (sequence is synthesized)
tgatgaacatcccccctgtagaaaaagtggacaaggaacaacagacatactttagtgaatcagaaatagtggttatttccaggccagatagttcttctacaaagtcaaaggaagatgccc

SEQ ID NO: 697591 - DNA, 120 bp, Artificial Sequence
  ENSG00000189139_7 (sequence is synthesized)
tgaaacataaatcgtcgggaaagatttttgctagtgaacaccctgaatttcaaccagcaacaaacagcaatgaagaaattgggcagaaaaatatcagcagaacttcatttactcaggaga

SEQ ID NO: 697592 - DNA, 120 bp, Artificial Sequence
  ENSG00000189139_8 (sequence is synthesized)
ctaaaaaaggtcccccggtacttttagaagatgagcttagggaagaagtaactgtacctgttgtacaagaaggttctgctgttaaaaaagtggcttctgctgaaatagagcctccatcaa

SEQ ID NO: 697593 - DNA, 120 bp, Artificial Sequence
  ENSG00000189139_9 (sequence is synthesized)
cagaaaaattcccagctaaaatacagcctccattagttgaagaggccactgctaaagcggagcccagacctgctgaagagacccatgtccaagtacagccatcaactgaagagactcctg

SEQ ID NO: 697594 - DNA, 120 bp, Artificial Sequence
  ENSG00000189139_10 (sequence is synthesized)
atgctgaggcagccactgcagttgcggagaattctgttaaagttcagcctccacctgctgaagaggcccctttagtggagtttcctgctgaaattcagcctccatcagctgaagagtctc

SEQ ID NO: 697595 - DNA, 120 bp, Artificial Sequence
  ENSG00000189139_11 (sequence is synthesized)
cttctgtagagcttctggctgaaattctgcctccatcagctgaagagtccccttcagaagagcctcctgctgaaattctgcctccaccagctgaaaagtctccttcagtagagcttcttg

SEQ ID NO: 697596 - DNA, 120 bp, Artificial Sequence
  ENSG00000189139_12 (sequence is synthesized)
gtgaaattcggtctccctcagcacaaaaggctcccattgaagtacagcctttaccagctgagggcgcccttgaagaggccccagctaaagtagagcctcccactgttgaagagacccttg

SEQ ID NO: 697597 - DNA, 120 bp, Artificial Sequence
  ENSG00000189139_13 (sequence is synthesized)
tattacctgaagaggctcctagagaagaggctcgagaacttcagctttcaacagctatggagacccctgcagaagaggctcctactgaatttcagtctccattacctaaagagaccactg

SEQ ID NO: 697598 - DNA, 120 bp, Artificial Sequence
  ENSG00000189139_14 (sequence is synthesized)
cagaagaggcctctgctgaaattcagcttctagcagctacggagcctcctgcagatgaaactcctgccgaagctcggtctccactatctgaggagacttctgcagaagaggctcatgctg

SEQ ID NO: 697599 - DNA, 120 bp, Artificial Sequence
  ENSG00000189139_15 (sequence is synthesized)
aagttcaatctccattagctgaagagaccactgcagaagaggcctctgctgaaattcagcttctagcagctatagaggctcctgcagatgaaactcctgctgaagctcagtctccactat

SEQ ID NO: 697600 - DNA, 120 bp, Artificial Sequence
  ENSG00000189139_16 (sequence is synthesized)
ctgaggagacttctgcagaagaggctcctgctgaagttcagtctccatcagctaagggagtttctatagaagaggcccctcttgagcttcagcctccatcaggtgaagagaccactgcag

SEQ ID NO: 697601 - DNA, 120 bp, Artificial Sequence
  ENSG00000189139_17 (sequence is synthesized)
aagaggcctctgctgcaattcagcttctagcagctacagaggcttctgcagaagaggctcctgctgaagttcagcctccaccagctgaggaggcccccgctgaagttcagcctccaccag

SEQ ID NO: 697602 - DNA, 120 bp, Artificial Sequence
  ENSG00000189139_18 (sequence is synthesized)
ctgaggaggcccccgctgaagttcagcctccaccagctgaggaggcccccgctgaagttcagcctccaccagctgaggaggcccccgctgaagttcagcctccaccagctgaggaggccc

SEQ ID NO: 697603 - DNA, 120 bp, Artificial Sequence
  ENSG00000189139_19 (sequence is synthesized)
ccgctgaagttcagcctccaccagctgaggaggcccctgctgaagttcagtctctaccagctgaggagactcctatagaagagacccttgctgcagtacactctcccccagctgatgatg

SEQ ID NO: 697604 - DNA, 120 bp, Artificial Sequence
  ENSG00000189139_20 (sequence is synthesized)
tccctgcagaagaggcctccgttgacaaacattccccaccagctgatttgcttctgactgaggagtttcctataggagaggcctctgctgaagtttcacctccaccatctgaacaaaccc

SEQ ID NO: 697605 - DNA, 120 bp, Artificial Sequence
  ENSG00000189139_21 (sequence is synthesized)
ctgaagatgaggctctggtagagaatgtgtctacagaatttcagtcaccgcaggtggcaggaattccagcagtaaaattaggatcggttgttttggaaggtgaagcaaaatttgaagagg

SEQ ID NO: 697606 - DNA, 120 bp, Artificial Sequence
  ENSG00000189139_22 (sequence is synthesized)
tttcaaaaatcaattctgtccttaaagatttgtctaataccaatgatggacaggctcccactcttgaaatagaaagtgtttttcatatagaattaaaacaacgtcctcctgaactgtagt

SEQ ID NO: 697607 - DNA, 120 bp, Artificial Sequence
  ENSG00000189139_23 (sequence is synthesized)
caggttgtacctaagctagcaatcagaagctacatggttttggaagaacatactttagaaaagggtgggcagcgggaagtagctttgtcaataaggcaaattaaaggggaccccaagact

SEQ ID NO: 697608 - DNA, 120 bp, Artificial Sequence
  ENSG00000189139_24 (sequence is synthesized)
tggaatacaggttggaaaatgaacaataaaaactgtagcagcataaaattacttgtgttaatttcattcaaatttatggcatgaaaaatacctattttgaaagtaagtttataattgaaa

SEQ ID NO: 697609 - DNA, 120 bp, Artificial Sequence
  ENSG00000189139_25 (sequence is synthesized)
aaaattgcttaaaatatccttcctacagtaaacttgttgacacgagtaaagtttaatctgcagccatcttttcttgtctttgccttccctttataagtaaatatagtttctagtggaaaa

SEQ ID NO: 697610 - DNA, 120 bp, Artificial Sequence
  ENSG00000189143_0 (sequence is synthesized)
aaaagtgcctttgttggcctgggctcaggaatccagagaaactggtcaggaggaggccccagtgacaaaaacccctccctctgcccccgcccctctgccagagccatataactgctcaac

SEQ ID NO: 697611 - DNA, 120 bp, Artificial Sequence
  ENSG00000189143_1 (sequence is synthesized)
ctgtccccgagagagagtgccctggcagctgtcggctggaaggaactggtctgctcacacttgctggcttgcgcatcaggactggctttatctcctgactcacggtgcaaaggtgcactc

SEQ ID NO: 697612 - DNA, 120 bp, Artificial Sequence
  ENSG00000189143_2 (sequence is synthesized)
tgcgaacgttaagtccgtccccagcgcttggaatcctacggcccccacagccggatcccctcagccttccaggtcctcaactcccgtggacgctgaacaatggcctccatggggctacag

SEQ ID NO: 697613 - DNA, 120 bp, Artificial Sequence
  ENSG00000189143_3 (sequence is synthesized)
gtaatgggcatcgcgctggccgtcctgggctggctggccgtcatgctgtgctgcgcgctgcccatgtggcgcgtgacggccttcatcggcagcaacattgtcacctcgcagaccatctgg

SEQ ID NO: 697614 - DNA, 120 bp, Artificial Sequence
  ENSG00000189143_4 (sequence is synthesized)
gagggcctatggatgaactgcgtggtgcagagcaccggccagatgcagtgcaaggtgtacgactcgctgctggcactgccgcaggacctgcaggcggcccgcgccctcgtcatcatcagc

SEQ ID NO: 697615 - DNA, 120 bp, Artificial Sequence
  ENSG00000189143_5 (sequence is synthesized)
atcatcgtggctgctctgggcgtgctgctgtccgtggtggggggcaagtgtaccaactgcctggaggatgaaagcgccaaggccaagaccatgatcgtggcgggcgtggtgttcctgttg

SEQ ID NO: 697616 - DNA, 120 bp, Artificial Sequence
  ENSG00000189143_6 (sequence is synthesized)
gccggccttatggtgatagtgccggtgtcctggacggcccacaacatcatccaagacttctacaatccgctggtggcctccgggcagaagcgggagatgggtgcctcgctctacgtcggc

SEQ ID NO: 697617 - DNA, 120 bp, Artificial Sequence
  ENSG00000189143_7 (sequence is synthesized)
gggggctgctttgctgcaactgtccaccccgcacagacaagccttactccgccaagtattctgctgcccgctctgctgctgccagcaactacgtgtaaggtgccacggctccactctgtt

SEQ ID NO: 697618 - DNA, 120 bp, Artificial Sequence
  ENSG00000189143_8 (sequence is synthesized)
cctctctgctttgttcttccctggactgagctcagcgcaggctgtgaccccaggagggccctgccacgggccactggctgctggggactggggactgggcagagactgagccaggcagga

SEQ ID NO: 697619 - DNA, 120 bp, Artificial Sequence
  ENSG00000189143_9 (sequence is synthesized)
aggcagcagccttcagcctctctggcccactcggacaacttcccaaggccgcctcctgctagcaagaacagagtccaccctcctctggatattggggagggacggaagtgacagggtgtg

SEQ ID NO: 697620 - DNA, 120 bp, Artificial Sequence
  ENSG00000189143_10 (sequence is synthesized)
gtggtggagtggggagctggcttctgctggccaggatagcttaaccctgactttgggatctgcctgcatcggcgttggccactgtccccatttacattttccccactctgtctgcctgca

SEQ ID NO: 697621 - DNA, 120 bp, Artificial Sequence
  ENSG00000189143_11 (sequence is synthesized)
tctcctctgttccgggtaggccttgatatcacctctgggactgtgccttgctcaccgaaacccgcgcccaggagtatggctgaggccttgcccacccacctgcctgggaagtgcagagtg

SEQ ID NO: 697622 - DNA, 120 bp, Artificial Sequence
  ENSG00000189143_12 (sequence is synthesized)
gatggacgggtttagaggggaggggcgaaggtgctgtaaacaggtttgggcagtggtgggggagggggccagagaggcggctcaggttgcccagctctgtggcctcaggactctctgcct

SEQ ID NO: 697623 - DNA, 120 bp, Artificial Sequence
  ENSG00000189143_13 (sequence is synthesized)
cacccgcttcagcccagggcccctggagactgatcccctctgagtcctctgccccttccaaggacactaatgagcctgggagggtggcagggaggaggggacagcttcacccttggaagt

SEQ ID NO: 697624 - DNA, 120 bp, Artificial Sequence
  ENSG00000189143_14 (sequence is synthesized)
cctggggtttttcctcttccttctttgtggtttctgttttgtaatttaagaagagctattcatcactgtaattattattattttctacaataaatgggacctgtgcacaggaggaaattt

SEQ ID NO: 697625 - DNA, 85 bp, Artificial Sequence
  ENSG00000189143_15 (sequence is synthesized)
tgcacccggcccaaacatttctttttctggctggagtgaaatggtgcgattatagttcactgcagcctcaaactcctggccttaa

SEQ ID NO: 697626 - DNA, 120 bp, Artificial Sequence
  ENSG00000189143_16 (sequence is synthesized)
cagagtcttgctctgttgcccgtggctggagtgaaatggtgcgattatagttcactgcagcctcaaactcctggccttaagcgatcctcccatcctggcctcccaaagtgctgggattat

SEQ ID NO: 697627 - DNA, 120 bp, Artificial Sequence
  ENSG00000189143_17 (sequence is synthesized)
atctgtgatgtatcaagccagatgctgggcactgaggttgcagaaggcattgttcctgtcttctaggagccccaggctagcagggaagacggatgtgtatagagttaaccacaataccag

SEQ ID NO: 697628 - DNA, 120 bp, Artificial Sequence
  ENSG00000189143_18 (sequence is synthesized)
gcctcaacttcccgtctgtaacacaggtggaccatgctagattgtcccagcctgccctgtgcttcattagccggtcaacagatccatctcaaatacctcccatgggtactcactgattgc

SEQ ID NO: 697629 - DNA, 120 bp, Artificial Sequence
  ENSG00000189143_19 (sequence is synthesized)
tttaacccaaaccatggcactcttgaagactttccctcaggaagctcaaggactatgcatccttctgggtcagaactggacacacagccaccagtgctggacaatggcggcggctcaggg

SEQ ID NO: 697630 - DNA, 120 bp, Artificial Sequence
  ENSG00000189143_20 (sequence is synthesized)
acacactggagccctggcccctgcagagctcccagcatggttgggaagagagatgcaaaatgaccacacggcgggtgaggaggagctccctcggtgcggctgggatgagccctagacact

SEQ ID NO: 697631 - DNA, 120 bp, Artificial Sequence
  ENSG00000189143_21 (sequence is synthesized)
ctcaatcacccccacgatgaccccttcccagaggtcccctcagtcatctgccctgaaccaagctcttcctgatcctagaccctccaccctccctctatcttccagggcttggtgacattc

SEQ ID NO: 697632 - DNA, 120 bp, Artificial Sequence
  ENSG00000189143_22 (sequence is synthesized)
caggcagaaatttctgacccttttactttggtccctccctccccagcccagtctctggtcaaactggattcctggctgttcccagaacgagctgcctttccccaccttgccacctctgcc

SEQ ID NO: 697633 - DNA, 120 bp, Artificial Sequence
  ENSG00000189143_23 (sequence is synthesized)
cttgttctctctgcctgaatgtcctccttcactagcctcgctgccttgcacatctctcctgagggctgtcatcccagaatgagctgcatttgtccagcctggcccaccgtctaccagaac

SEQ ID NO: 697634 - DNA, 120 bp, Artificial Sequence
  ENSG00000189143_24 (sequence is synthesized)
gtcctccttcagcctgtcccactgccttgcaaaacttttctgggggacctgttcacgatgccttctgtagcatactccaagaatccggcgccccctggagttgtgccacacagcacccct

SEQ ID NO: 697635 - DNA, 120 bp, Artificial Sequence
  ENSG00000189143_25 (sequence is synthesized)
ttgcagtcaagctccctcagcaccaccacctccaccctggaagagttccccttccctttgaaatctcatgggactttgcacccactctggctttattggaaggctttgtatgtctccaca

SEQ ID NO: 697636 - DNA, 120 bp, Artificial Sequence
  ENSG00000189143_26 (sequence is synthesized)
gggtaaacacccatttactggggtgatgatgtctccaggatctagttcatgtttgtcgttggtgactggccccacccagttctgggcaagcaggctggatcccggcaggaacagagccca

SEQ ID NO: 697637 - DNA, 120 bp, Artificial Sequence
  ENSG00000189143_27 (sequence is synthesized)
ccagcctaaacttccatggaggtggagaggggacaggcttctgtctctttttggctgaaggtgcatcatgtccaaggcccctcttctagccaagcagagaagctgggtgataaggatggg

SEQ ID NO: 697638 - DNA, 120 bp, Artificial Sequence
  ENSG00000189143_28 (sequence is synthesized)
tgagagtgggtgatgtaccccggagtcctggcctcccggctcctcactcccctacacgtaactttatccggccaatgccgcaaagactgctggtgaggccagatgcatgagtgatcatac

SEQ ID NO: 697639 - DNA, 120 bp, Artificial Sequence
  ENSG00000189143_29 (sequence is synthesized)
tcacaacagtcgtgaaactgccagtgatgaaactggtaaggacaagaaatgacaataatcaaggtggggtttctcgtggacgtttccaagacttcattctcaaattctctccctcagggt

SEQ ID NO: 697640 - DNA, 120 bp, Artificial Sequence
  ENSG00000189143_30 (sequence is synthesized)
gaatgagggggcactggcctgtggggaccctggtcttcaggctcccaaacctggctgggtctggttgccccctggccttaacctgtgaacatccagctgtccctgggctgtgattcagtg

SEQ ID NO: 697641 - DNA, 85 bp, Artificial Sequence
  ENSG00000189143_31 (sequence is synthesized)
cacttgtgctgagctactggctgatccccaaggacatccttctggcctctccttcacacctgggtcccctagccctgcatggcgc

SEQ ID NO: 697642 - DNA, 120 bp, Artificial Sequence
  ENSG00000189143_32 (sequence is synthesized)
acttgtgctgagctactggctgatccccaaggacatccttctggcctctccttcacacctgggtcccctagccctgcgtgagctctgtgcttcttcccctgccctgtgtctgctctatgc

SEQ ID NO: 697643 - DNA, 120 bp, Artificial Sequence
  ENSG00000189143_33 (sequence is synthesized)
ctggagcctctgtacctgccctctcctcaacccccaacccctccctgctctcagctcccgatacgcgtggctatgcctgggagggaaggacagcttcttagggccacagatggagtctcg

SEQ ID NO: 697644 - DNA, 120 bp, Artificial Sequence
  ENSG00000189143_34 (sequence is synthesized)
ggagttgagcccaatctctcttccccactgcaagaccctggtgcagtggttcctatacctattgcgatggtcctgaagaaagtcttccttgacatgctttaacatgtgttattgaataac

SEQ ID NO: 697645 - DNA, 120 bp, Artificial Sequence
  ENSG00000189143_35 (sequence is synthesized)
attttaacagttatggtgctgcaactcagataggaccagattcatccctggacgtagcttctccctaggacattaagtgagtgcctttgaagtctttgtcttccttcctgactgactcat

SEQ ID NO: 697646 - DNA, 120 bp, Artificial Sequence
  ENSG00000189144_0 (sequence is synthesized)
acccaatctatggcttcccttccgttttcgcgtggttcttttgcaagctctggattctctggagtttgaatgtttccagtattggaaccccaccaagtaggactgatcaggtcttacaat

SEQ ID NO: 697647 - DNA, 120 bp, Artificial Sequence
  ENSG00000189144_1 (sequence is synthesized)
tctaaaaccatgacctgttttcaggaattagtgacattcagggatgtggccatagacttctctcggcaggagtgggaatacctggaccctaatcagagggacttatacagggatgtgatg

SEQ ID NO: 697648 - DNA, 120 bp, Artificial Sequence
  ENSG00000189144_2 (sequence is synthesized)
ttggagaactatagaaacctggtatcactgggaggacattccatttctaaaccagttgtggttgatttactggagcgaggaaaagagccctggatgattttgagggaagaaacacagttc

SEQ ID NO: 697649 - DNA, 120 bp, Artificial Sequence
  ENSG00000189144_3 (sequence is synthesized)
acagatttggatttacagtgtgagataatcagctacatagaagtacccacttatgaaacagatatatcctctacacaacttcagagcatatataagagagagaaactctatgaatgtaag

SEQ ID NO: 697650 - DNA, 120 bp, Artificial Sequence
  ENSG00000189144_4 (sequence is synthesized)
aaatgtcagaagaaatttagtagtggttatcaacttattctacatcacaggtttcatgtcattgagagaccctatgaatgcaaagagtgtgggaagaactttcgtagtggctatcaactt

SEQ ID NO: 697651 - DNA, 120 bp, Artificial Sequence
  ENSG00000189144_5 (sequence is synthesized)
tactggtgagaaaccctatgaatgtacagaatgtgggaagaactttagaagtggttatcagctgactgtgcatcagagatttcatactggtgagaaaacctatgaatgtaggcagtgtgg

SEQ ID NO: 697652 - DNA, 120 bp, Artificial Sequence
  ENSG00000189144_6 (sequence is synthesized)
tatgaatgtaggcagtgtgggaaggcctttatatatgcctcacacattgttcaacatgagagaattcacactggtgggaagccgtatgaatgtcaggagtgtgggagggcctttagtcaa

SEQ ID NO: 697653 - DNA, 120 bp, Artificial Sequence
  ENSG00000189144_7 (sequence is synthesized)
ggtggacatcttagaattcatcagagagttcatactggcgaaaaaccatataaatgtaaggaatgtgggaagacttttagtaggcgctcaaatcttgttgaacatgggcagtttcatact

SEQ ID NO: 697654 - DNA, 120 bp, Artificial Sequence
  ENSG00000189144_8 (sequence is synthesized)
gatgagaagccatacatatgtgagaaatgtggaaaggcctttagaagaggtcaccagcttactgtacatcagagagttcacactggtaaaaagccatatgagtgtaaagaatgtgggaag

SEQ ID NO: 697655 - DNA, 120 bp, Artificial Sequence
  ENSG00000189144_9 (sequence is synthesized)
atagaaatcttactcggcatcagaatattcatactggtgagaaactttttgaatgcaagcaatgtgggaagacctatactactggttcaaaactctttcaacatcagaaaactcatactg

SEQ ID NO: 697656 - DNA, 120 bp, Artificial Sequence
  ENSG00000189144_10 (sequence is synthesized)
gcgagaaaccctatgaatgcaaggaatgcggaaaggcctttagcttgtatggctaccttaaacaacatcagaaaattcatactggcatgaaacactttgaatgtaaggagtgtaaaaaaa

SEQ ID NO: 697657 - DNA, 120 bp, Artificial Sequence
  ENSG00000189144_11 (sequence is synthesized)
cctttactttgtatagaaatcttactcgacatcagaatattcacactggtaagaaactttttgaatgtcaggaatgtgggaaggcctatagtactggctcaaaccttattcaacatcgga

SEQ ID NO: 697658 - DNA, 120 bp, Artificial Sequence
  ENSG00000189144_12 (sequence is synthesized)
aaactcatactggtgagaaaccctataaatgtaaggaatgtggcaagacctttagcttgcatggatatcttaatcaacatcagaaaattcatactggtatgaaaccctatgaatgtaagg

SEQ ID NO: 697659 - DNA, 120 bp, Artificial Sequence
  ENSG00000189144_13 (sequence is synthesized)
tatgtagaaaaacctttactttctatagaaatcttactctacatcaaagtattcatactgatgagaaaccttttgaatgtaaggaatgtgggaagacctttagacgtagttcacacctta

SEQ ID NO: 697660 - DNA, 120 bp, Artificial Sequence
  ENSG00000189144_14 (sequence is synthesized)
ctgcacatcagagcattcatgctgataaaaaaccctatgaatgtaaagaatgtggaaaggcctttaaaatgtatggctaccttacccaacatcagaaaattcatactggtggaaaacctt

SEQ ID NO: 697661 - DNA, 120 bp, Artificial Sequence
  ENSG00000189144_15 (sequence is synthesized)
atgaatgtaaagaatgtgggaaggccttcagtcgtgcttcaaaccttgttcaacatgagagaattcatactggtgagaaaccctatgtgtgtaagcagtgtgggaaaaccttcagatatg

SEQ ID NO: 697662 - DNA, 120 bp, Artificial Sequence
  ENSG00000189144_16 (sequence is synthesized)
gttcagcccttaaagcccatcagagaattcataggagcataaaagtgtaagaccgtaaagagtacgagcgcgccattcatcatcagacagcccacactggtgagaaatgatggaatgtta

SEQ ID NO: 697663 - DNA, 120 bp, Artificial Sequence
  ENSG00000189144_17 (sequence is synthesized)
gtcttataggtatggctttagcaattgagagagttcaaaatgcagatcttgccacattagaaagcattcaatgtcagtcctgttttaatggaatatctgactattcaatggtaaattaag

SEQ ID NO: 697664 - DNA, 120 bp, Artificial Sequence
  ENSG00000189144_18 (sequence is synthesized)
cacagagatgggggtctcactgggttgctcagctggtctctaactcctgggctcaagcagtcctcctgcattggcttcccaaagtgctgaaaatacaggtgcggtggctcacgcctgtaa

SEQ ID NO: 697665 - DNA, 120 bp, Artificial Sequence
  ENSG00000189144_19 (sequence is synthesized)
ggccgaggcgggcggatcacgagtgtgagataatcagctacatagaagtacccacttatgaaacagatatatcctctacacaacttcagagcatatataagagagagaaactctatgaat

SEQ ID NO: 697666 - DNA, 120 bp, Artificial Sequence
  ENSG00000189144_20 (sequence is synthesized)
tctgacgctaggtcaagggcggtgttcctgtgttcttagggccccaggaggcgagtctgagtggaacctggctggggtaggctgaaaggtgacttcgacgctcttctgaggcctcagacg

SEQ ID NO: 697667 - DNA, 120 bp, Artificial Sequence
  ENSG00000189144_21 (sequence is synthesized)
tgtgtgatgactgccctgtagaatcagtgctgtgaccccgagtaacaacgcgcgcttgagttggtataaactcctgaagagtgtagtcctgcaatttacaagaaaaagttaagtgtaaaa

SEQ ID NO: 697668 - DNA, 120 bp, Artificial Sequence
  ENSG00000189144_22 (sequence is synthesized)
gggacgcgatgtggagctggaagtcagtgatattgatgatcctgacacagtcctaggataaggatctttaactttattagcagctactgagctacagaatacaaaccaactgaaaacatt

SEQ ID NO: 697669 - DNA, 120 bp, Artificial Sequence
  ENSG00000189144_23 (sequence is synthesized)
aaagaaaggcttcctgaaacaggctttccagctcactacccaaaagacttgagtacttctattaaggcagctggaagcccaccctagacttcaatggcaatttgtcctttctctgccagt

SEQ ID NO: 697670 - DNA, 120 bp, Artificial Sequence
  ENSG00000189144_24 (sequence is synthesized)
cccaccctagacttcaatggcaatttgtcctttctctgccagtaaggcaatccaacacaatatgctacaggaaaaacagaatttccatggtgctgccctctggtacaagggaaacagcac

SEQ ID NO: 697671 - DNA, 120 bp, Artificial Sequence
  ENSG00000189144_25 (sequence is synthesized)
tcagagcaaaaggccacagaggactccctgagaatccagtacaactaagcgaggccttaaactgtcgagacaaactttgcaactggatcccggtgggacagtgccctgcggcgaggagta

SEQ ID NO: 697672 - DNA, 120 bp, Artificial Sequence
  ENSG00000189144_26 (sequence is synthesized)
ctgacactcaccccagtgcctggaccactttccaaatacggatctttaactttattagcagctactgagctacagaatacaaaccaactgaaaacattaaagaaaggcttcctgaaacag

SEQ ID NO: 697673 - DNA, 120 bp, Artificial Sequence
  ENSG00000189144_27 (sequence is synthesized)
cccaaagtgctgggattatagcacgagcctgggccagttacacagttctgtaggtattattttgtacttttcacagtaaccacgtgcagccatgttgctttctgctgttgcataacaaga

SEQ ID NO: 697674 - DNA, 120 bp, Artificial Sequence
  ENSG00000189144_28 (sequence is synthesized)
accctaatcagagggacttatacagggatgtgatgttggagaactatagaaacctggtatcactggagatgaggtctcgctctgttgcccgggttggtctcaaactcctggtctcaagtg

SEQ ID NO: 697675 - DNA, 120 bp, Artificial Sequence
  ENSG00000189144_29 (sequence is synthesized)
cgtgagccaccatgcctagccaatagtagtattattatgtccagtttatttgccaaattggaataatgagttgaagtcacatggccaaagtcacaaggaggacattccatttctaaacca

SEQ ID NO: 697676 - DNA, 87 bp, Artificial Sequence
  ENSG00000189144_30 (sequence is synthesized)
ctatggcttcccttccgttttcgcgtggttcttttgcaagatgttgggagccattgagctgaatctcattaacgttctcatagcacc

SEQ ID NO: 697677 - DNA, 120 bp, Artificial Sequence
  ENSG00000189144_31 (sequence is synthesized)
attttaggaggccaaggcggacggatcacttgagctctggattctctggagtttgaatgtttccagtattggaaccccaccaagtaggactgatcaggtcttacaattctaaaaccatga

SEQ ID NO: 697678 - DNA, 120 bp, Artificial Sequence
  ENSG00000189144_32 (sequence is synthesized)
atgctgaggtgctggcaccagcaaatgcagttggtagtgtgtctggcacagatggcaactctggtaggacaaagttgtcatagttatccgcaggtcaggaaggaagctttgcagaggctt

SEQ ID NO: 697679 - DNA, 120 bp, Artificial Sequence
  ENSG00000189144_33 (sequence is synthesized)
ctggcttgggtccaggaccaacaatctgtgcagaagagatattcttatcagcattaatgtcatctacagattcatatgatgggggagttgctggtatctgagatggataaatattgggaa

SEQ ID NO: 697680 - DNA, 120 bp, Artificial Sequence
  ENSG00000189144_34 (sequence is synthesized)
cgggcagcctcgagttcggattccacttctcagccttctggggtcactgaaaccctcagaactccgaggacaagtcggacacgccttcgcctcagccatcttcgccagcgcaataagtct

SEQ ID NO: 697681 - DNA, 120 bp, Artificial Sequence
  ENSG00000189144_35 (sequence is synthesized)
ctgtgtcttcacactcctggtagagggaaaactaaaacctccgggagccagcgtccggcggtgcctgcaatctaaccgggatttggggttccgagccacttttcccacaagccaccgcgg

SEQ ID NO: 697682 - DNA, 120 bp, Artificial Sequence
  ENSG00000189144_36 (sequence is synthesized)
aaaacggaacgatccaaaaactcctcgaaatagtgtttctgtttccccctccaaggctacaggtgcataatttcatacacataaccagaaggaagtatggatctttaactttattagcag

SEQ ID NO: 697683 - DNA, 120 bp, Artificial Sequence
  ENSG00000189152_0 (sequence is synthesized)
gagcccagctgctggagccccgagcagcggcatggagtccgtggccctgtacagctttcaggctacagagagcgacgagctggccttcaacaagggagacacactcaagatcctgaacat

SEQ ID NO: 697684 - DNA, 120 bp, Artificial Sequence
  ENSG00000189152_1 (sequence is synthesized)
ggaggatgaccagaactggtacaaggccgagctccggggtgtcgagggatttattcccaagaactacatccgcgtcaagccccatccgtggtactcgggcaggatttcccggcagctggc

SEQ ID NO: 697685 - DNA, 120 bp, Artificial Sequence
  ENSG00000189152_2 (sequence is synthesized)
cgaagagattctgatgaagcggaaccatctgggagccttcctgatccgggagagtgagagctccccaggggagttctctgtgtctgtgaataacagagcccagaggggtccctgcctggg

SEQ ID NO: 697686 - DNA, 120 bp, Artificial Sequence
  ENSG00000189152_3 (sequence is synthesized)
cccaaaatcacacagcagattggggtagagccggagaggacccgagactcctgtgccagcctgggcatcccctccactgccagggaaggactgcatccaagtcgcatccgtacccaggcc

SEQ ID NO: 697687 - DNA, 120 bp, Artificial Sequence
  ENSG00000189152_4 (sequence is synthesized)
ggacacaccaaacctcaccaagcacttccatttctgagggaatagaggttgtggcttccgtcaagcacccatttaccccaccctcctcctcctcttcctgcaaacttgagtcacagctgc

SEQ ID NO: 697688 - DNA, 120 bp, Artificial Sequence
  ENSG00000189152_5 (sequence is synthesized)
cctgctgggctcaggccccagggatgtctgagtcagcctggctggggttccagtcctgacaccgcccttaccagctgggagactccgggaacctccaaccctgctgagcctccacttcga

SEQ ID NO: 697689 - DNA, 120 bp, Artificial Sequence
  ENSG00000189152_6 (sequence is synthesized)
catccgtgaaacagccatgaataagcaggtctcaaaggtcgactcctgtatgcagggacacagcatgcagtaggtgcccaatcataacagcagcacccacctggagccccttatagcagc

SEQ ID NO: 697690 - DNA, 120 bp, Artificial Sequence
  ENSG00000189152_7 (sequence is synthesized)
ccttctcctctgcacttccacatggcatctcatttaaccttcaccacaacccaactaggaaggcaccatcattatcccattttactgatgaagaaactgaggcccaggaaggtgaattta

SEQ ID NO: 697691 - DNA, 120 bp, Artificial Sequence
  ENSG00000189152_8 (sequence is synthesized)
ccagccagctcacaaatggactagtagatggcagtttgtggattggagcccagaggctgtgctcctgcccacaccctctcaaatgagggctataaaataacactctaagagctcttccta

SEQ ID NO: 697692 - DNA, 120 bp, Artificial Sequence
  ENSG00000189152_9 (sequence is synthesized)
gagctctggcccttgggggtgtgtgcagaggagggtgggcggggttgggcagcatttgagctgagccttggggcccgggacgggctcacggagtgagggtggaggaatggcatccctgca

SEQ ID NO: 697693 - DNA, 120 bp, Artificial Sequence
  ENSG00000189152_10 (sequence is synthesized)
gagggagcagtccgggcagaggccttccggacacaggcggtggtctgggcaccccagggtgcagcccagagcagtggggtgtgttgggaaagcaggatcaggccagctgtgcaaggcctc

SEQ ID NO: 697694 - DNA, 120 bp, Artificial Sequence
  ENSG00000189152_11 (sequence is synthesized)
aatgccaggctgaaggtccaggcttctacgagtataggagccatcataggttcttcatcaggagagggcgatgtccagggtggtgatgtggcaagagattgagggcaggagagtgctgaa

SEQ ID NO: 697695 - DNA, 120 bp, Artificial Sequence
  ENSG00000189152_12 (sequence is synthesized)
acgcccagggcgggtgtccaggatgtgctccgcacagggtcccactctatgtgatatagttgggaagatgcaccctgaggccaggctgcctgggctcaaatgctagttctgccacttcct

SEQ ID NO: 697696 - DNA, 120 bp, Artificial Sequence
  ENSG00000189152_13 (sequence is synthesized)
agagtgagagctccccaggggagttctctgtgtctgtgaaatgggcaaactgaggccagagaggggccatgcctgatggagatcgcccagcgggcagttagcacccagtaacagagccca

SEQ ID NO: 697697 - DNA, 120 bp, Artificial Sequence
  ENSG00000189152_14 (sequence is synthesized)
accagtctgtctcagaccaaaggcccccttatctgctccccagagcctgacgtccccccactgaattgtcacccctgagctgtctaaatgcgagggaccctaggtgaccactggtggctg

SEQ ID NO: 697698 - DNA, 120 bp, Artificial Sequence
  ENSG00000189157_0 (sequence is synthesized)
acggtggccgcgaagctagggccaccatggcggaccgcaggcggcggctccggccggggacgttggccccggtgcgcgagggcgtgaactgcaggtccagatgtttcacaaagcacaaga

SEQ ID NO: 697699 - DNA, 120 bp, Artificial Sequence
  ENSG00000189157_1 (sequence is synthesized)
acgggctgaagttccccacctctctgcacagccggcagttggtatttccaagaaaggggctggacgacttcaggaagggctgcccgccttgcactggtctggtgactcaggtccctgtgg

SEQ ID NO: 697700 - DNA, 120 bp, Artificial Sequence
  ENSG00000189157_2 (sequence is synthesized)
agggctttctgccccagatttatcacagagctccccaactggccccaaagaagaggcagatcaagctgctcaaggaagcagacgtgctttccaagctctcgccagcccagcaggctcgga

SEQ ID NO: 697701 - DNA, 120 bp, Artificial Sequence
  ENSG00000189157_3 (sequence is synthesized)
aggcattcctggaggacgtggaggcccacctgaccccacatcccttagcgctctacctgaatctggaagaagctatgcccatagagctcttatcaaaggtgctggaagtgcttgatcctg

SEQ ID NO: 697702 - DNA, 120 bp, Artificial Sequence
  ENSG00000189157_4 (sequence is synthesized)
accggaagctggaggacacatgggcttattgtcaggacaccaggaaaggaatgaaggaacccacgaagcttttaaaaaaacattctacccaagtctacctgggaccttccaagaagacgt

SEQ ID NO: 697703 - DNA, 120 bp, Artificial Sequence
  ENSG00000189157_5 (sequence is synthesized)
ctgtgtcaaacgcaggccaatggctttatgaagaaaagccacataaaatggatttgctccatgaaaatggtcctcgtcctggtcttcatgaaaatggaatttcggacatcgatgaagagt

SEQ ID NO: 697704 - DNA, 120 bp, Artificial Sequence
  ENSG00000189157_6 (sequence is synthesized)
agcgtagtgtggggctcagtaaactgcaggagacagagttcttccagaaactaggctatgagaggaaactccagaaaccacagaatccttataagccaaagtgggtgaagatgaggtatg

SEQ ID NO: 697705 - DNA, 120 bp, Artificial Sequence
  ENSG00000189157_7 (sequence is synthesized)
gagcatggtatttgaaccccaagttgtggaaaaagcaaagagtagacgagcctctggttgaccctgaggtctcacataaggctcaagaggagaattttaaaaaggagctgcaggaacagg

SEQ ID NO: 697706 - DNA, 120 bp, Artificial Sequence
  ENSG00000189157_8 (sequence is synthesized)
aggagttacttgcagaccttcacggaacagttgcctttaaggatttcattctaagcaggggctacaggacgccacgtttccttgagaatatgtatatcgggaaggaatgtaaacgtgcat

SEQ ID NO: 697707 - DNA, 120 bp, Artificial Sequence
  ENSG00000189157_9 (sequence is synthesized)
gtaataagactcctataaaacgaactcaagcatagaagaatcgtaggagaatgattaggcagattttattactacgtacttggctatttctctgtctccttttaaagattaaacagagtt

SEQ ID NO: 697708 - DNA, 120 bp, Artificial Sequence
  ENSG00000189157_10 (sequence is synthesized)
tatgatgagtgtcccactgtggatgttcaactttgacttggcaacatctgtaaatgtaatacctgatggttataagcatttctcaatggatttctgcttcagttaatcaacattttgtat

SEQ ID NO: 697709 - DNA, 120 bp, Artificial Sequence
  ENSG00000189157_11 (sequence is synthesized)
actttatcacccatgagatcaatattcacatgtaatcttctcatatttttgtggcacgtgaatattatataggtatatcaactattggtaaaaataaataaaggcataaataaaaacaga

SEQ ID NO: 697710 - DNA, 120 bp, Artificial Sequence
  ENSG00000189157_12 (sequence is synthesized)
ctgcaagtgggttactacttttgtaagttagtggtaatatttaaacctacttttaaatgtcaagctcaaagttgcttttattaaaaaacagtattggataaaatctaagtcaaatcctca

SEQ ID NO: 697711 - DNA, 120 bp, Artificial Sequence
  ENSG00000189157_13 (sequence is synthesized)
acacacaccgcccaagcccggacggtggccgcgaagctagggccaccatggcggaccgcaggcggcggctccggccggggacgttggccccggtgcgcgagggcgtgaactgcaggtcca

SEQ ID NO: 697712 - DNA, 120 bp, Artificial Sequence
  ENSG00000189157_14 (sequence is synthesized)
aaccagactctgcggcgtaatacaaaggctcctgaaagccctccaccttgcatattgaattcagcaaggagaaagctaagtaatgttaaggagaatgtgtaataagcaagacttggaatc

SEQ ID NO: 697713 - DNA, 120 bp, Artificial Sequence
  ENSG00000189157_15 (sequence is synthesized)
tcctggctttgtggtagacatgacatctctaaagattggacagctactcatgctattccaccattcttggaacaatttattccaaggataattgttcaaagggtggtgtgacttggtacg

SEQ ID NO: 697714 - DNA, 120 bp, Artificial Sequence
  ENSG00000189157_16 (sequence is synthesized)
accacctcagtgcccagaatagatgtgctgtcatgagttatctttgggtaacaaaatgtgaagcttgtttcctatcagctatgggtgaatgtcaaaaaattcaaaatttcaaccaggaaa

SEQ ID NO: 697715 - DNA, 120 bp, Artificial Sequence
  ENSG00000189157_17 (sequence is synthesized)
agcgccctgcaccgcaggcccagcgctcgccccaccgaaattgccgaacctggttcacacactcatttactcattccgcagataggtctgagggcctcccatgggccacgcgctggggat

SEQ ID NO: 697716 - DNA, 120 bp, Artificial Sequence
  ENSG00000189157_18 (sequence is synthesized)
tcaaggtggctgggacattcccctgctctagaggcgctcgcaagttagcggggacaccgttaccgcaattacaacacaatgtagcaagtgcttctaccaggtgcctgctgagatcatgcc

SEQ ID NO: 697717 - DNA, 120 bp, Artificial Sequence
  ENSG00000189157_19 (sequence is synthesized)
agcaagcatgttctgcctggatgacctagggccccacattgaactggggcctgggggatgcataagtttgtcacgtaaggggcatgtgcaagaatggaagatgtgcaaaaaagggaggag

SEQ ID NO: 697718 - DNA, 120 bp, Artificial Sequence
  ENSG00000189157_20 (sequence is synthesized)
gggaggaggaggcatttcacggagaaggaaacggagtggaagcagcctgaggccctcatccaatgcagatgtctgtgccgtgcgtcttgtccagcctgcagaaccatgagccaaataaac

SEQ ID NO: 697719 - DNA, 120 bp, Artificial Sequence
  ENSG00000189157_21 (sequence is synthesized)
gaaccccaagttgtggaaaaagcaaagagtagacgagcctctggttgaccctgaggtctcacataaggctcaagaggagaattttaaaaaggagctgcaggaacagttccttgagaatat

SEQ ID NO: 697720 - DNA, 120 bp, Artificial Sequence
  ENSG00000189157_22 (sequence is synthesized)
aggttcctttgcttttgtagcaatcaagatgtctttggactttgaccaagtctgaaactttttcatattgtatttatttcaaataatgagatgatcaaaggtgatctgtgaaaaacacag

SEQ ID NO: 697721 - DNA, 120 bp, Artificial Sequence
  ENSG00000189157_23 (sequence is synthesized)
aaaggtgatctgtgaaaaacacaggatagaaactgcagcaccctgatagaacccacatctgggttgttgatgaaaagagtcaaactctgtagaatatttgaagagatttattctgagcca

SEQ ID NO: 697722 - DNA, 120 bp, Artificial Sequence
  ENSG00000189157_24 (sequence is synthesized)
ttgcaaagcaacaaacactcacaacaagggtgtgctctaattttactacagataaaccctgcctgctcattgcttgtgtaaaagtagctagtggaaagaagatactcattatggccctgg

SEQ ID NO: 697723 - DNA, 120 bp, Artificial Sequence
  ENSG00000189157_25 (sequence is synthesized)
aaatttggaaatagtgatgcaacacttgcatagtactctaatgaggatatttgcaaacctcttctctttttcaacagaccccaaacttctcctagataacagacgtgaaaacactttgag

SEQ ID NO: 697724 - DNA, 120 bp, Artificial Sequence
  ENSG00000189157_26 (sequence is synthesized)
aaagtaaaatacaatacaaattagacttattattcttcagtaatcactcatcaattgtcttcttcagattggaaagctaagacaggaaggatggtcattttaatcttttccagtactgaa

SEQ ID NO: 697725 - DNA, 120 bp, Artificial Sequence
  ENSG00000189157_27 (sequence is synthesized)
tataaattcttattttcaggtgtgaggtatgatacaaatttatgagcaccccatgtttatataagtctcaaaattatgtaaataatgtttggcagaatttcttagtatggtttttggaaa

SEQ ID NO: 697726 - DNA, 120 bp, Artificial Sequence
  ENSG00000189157_28 (sequence is synthesized)
gcctaggtttatgtgaatttaatatataacataaagctattccagttgcacttttattataaaaggtaacatcattttttctcaaattaaatatttaaaaagaaaaatagctacaaactt

SEQ ID NO: 697727 - DNA, 120 bp, Artificial Sequence
  ENSG00000189157_29 (sequence is synthesized)
ttgctttaaggtatctagagttctctttttaaaagcatattcttaattactaattcttaaagacttcaaaagttttacaaaacatatttcattttgatgacaaatgctataaagatgttt

SEQ ID NO: 697728 - DNA, 120 bp, Artificial Sequence
  ENSG00000189157_30 (sequence is synthesized)
gccaaaatggttacagtgagctaataaagtagcattatttaaatataattgatataactcgtatagtaaaagattgtttatcaggcagtttagacacagggaggatgcataacaatggaa

SEQ ID NO: 697729 - DNA, 120 bp, Artificial Sequence
  ENSG00000189157_31 (sequence is synthesized)
ttgttctacaataatttttataaatcacacctttttaatacctgaggaatgatttacattatcgactataggtggcaccaccaggctgtggcaccccagtttacaagacgcaggcactgt

SEQ ID NO: 697730 - DNA, 120 bp, Artificial Sequence
  ENSG00000189157_32 (sequence is synthesized)
ggggtactggtaagagacagtaactatgacaacatgactgtctttctgggaactcgtgagttttgactattcttgatagatttggtttggaaggtgaaatggttttaaagtactgaattg

SEQ ID NO: 697731 - DNA, 120 bp, Artificial Sequence
  ENSG00000189157_33 (sequence is synthesized)
aaattatgtaaacttatgcatccaatttttaaattaaaataaatgtaaagaaaaactaaaaagatgcataaatattgtagatgttgggactgatcaaatcatatttgattgtcctgtcct

SEQ ID NO: 697732 - DNA, 120 bp, Artificial Sequence
  ENSG00000189157_34 (sequence is synthesized)
ttgaagttaagatctatgatttgtggacatactgttaatcttaactaggttagattccagacatcataggtcaataattgtctaattgctaaaatgtgttgcccatccttaatatgggga

SEQ ID NO: 697733 - DNA, 120 bp, Artificial Sequence
  ENSG00000189157_35 (sequence is synthesized)
taaggaaaaggctaggggaaggagagaaagctggacatctttaaaagccttcatattcatcaactcatgaacattacacacatattcaaaaacaagaaggatatgggttaaaatgagata

SEQ ID NO: 697734 - DNA, 120 bp, Artificial Sequence
  ENSG00000189157_36 (sequence is synthesized)
ctttataaggaactaaatgcttttaatgagaacaaatatgaaatcaagcttctgatggctgacccctttcttcaaatgtgggtactcttttaggaggagttacttgcagaccttcacgga

SEQ ID NO: 697735 - DNA, 120 bp, Artificial Sequence
  ENSG00000189157_37 (sequence is synthesized)
acagttgcctttaaggatttcattctaagcaggggctacaggacgccacgtgtgagtaaagggtcctttcagaaggccctgctgaggggcttcatggctcacagttgttgacgggaagag

SEQ ID NO: 697736 - DNA, 120 bp, Artificial Sequence
  ENSG00000189157_38 (sequence is synthesized)
gttatgaccctgacaaacccaaatagttctcttacaggcacataccaagacaggcccctggaagaaagggcatgcttctccccagacggggactcagagataggatatggcattttgccc

SEQ ID NO: 697737 - DNA, 120 bp, Artificial Sequence
  ENSG00000189157_39 (sequence is synthesized)
tttttattctgcctatttggtttctgctactatcagagatactatttccctgtgatctttgactcatcttccttggatttggcctcaataggaggtctatgtacagggcatgggccttgc

SEQ ID NO: 697738 - DNA, 120 bp, Artificial Sequence
  ENSG00000189157_40 (sequence is synthesized)
ctgttactcaacaccctgaattctctaggatgttttcaagtctcctttgcgtcctggtctaaggacaaagagctgtggcttgggttaggacaaaatagcgttgggatttgcaatttcatc

SEQ ID NO: 697739 - DNA, 120 bp, Artificial Sequence
  ENSG00000189157_41 (sequence is synthesized)
attgcactattagctctgcctcaagtagaaacaggctaaggcaaaagttcacttcctggggggcctggccagtgtcttctgtcttttttccctttcttcatttctgcctcctggtttccc

SEQ ID NO: 697740 - DNA, 120 bp, Artificial Sequence
  ENSG00000189157_42 (sequence is synthesized)
ctcactaacttgtaaagctggccccagcatctccacacaatgtggtccccctttggacaatcacttgtaacagggttggggtgggaggttggcagaagggaacatggagcgggagggcct

SEQ ID NO: 697741 - DNA, 120 bp, Artificial Sequence
  ENSG00000189157_43 (sequence is synthesized)
gctgcctcgagcagtgtgcccagatcagccctgtcactgcagcaggagactagataggcatctggggctgaagtcatagctgataatgtcaagcatttgtccactgtcctctgtgtgcac

SEQ ID NO: 697742 - DNA, 120 bp, Artificial Sequence
  ENSG00000189157_44 (sequence is synthesized)
gtaccttggggtctttaggggacagtgcaactgagatggtcagaagtttctggaaatgggagatttgatttctgtttttccaagagtgatagaactaacaatagctgatacagctagcaa

SEQ ID NO: 697743 - DNA, 120 bp, Artificial Sequence
  ENSG00000189157_45 (sequence is synthesized)
ataaatgtaggacaaagttcagaatcagactggtttcaaagttaaatcaggcaagtctagagcatgagatggagatttgagactgggaaactccattatagaactggtttggaggaactc

SEQ ID NO: 697744 - DNA, 120 bp, Artificial Sequence
  ENSG00000189157_46 (sequence is synthesized)
aggaactcctttagctttgaacatcaatactaggtctgctagatatatttaatatacaaataactgcctaatctgtatataaggtttgcataactatatttatatataatatataaaata

SEQ ID NO: 697745 - DNA, 120 bp, Artificial Sequence
  ENSG00000189157_47 (sequence is synthesized)
gcatctatagctttaatattacataattatgtgtttacgagtccatattagatatgtaaaaatgtacttctgtggtatatgtgtgtgtatatataaatccttatttgccattgatattat

SEQ ID NO: 697746 - DNA, 120 bp, Artificial Sequence
  ENSG00000189157_48 (sequence is synthesized)
tgtggctcatttttgtatcttaacatttttagtggcaaaacacccttctttttttcattttgatgtgttccctattgatttaatccatactgttcatgaacatttagttcagttttgggc

SEQ ID NO: 697747 - DNA, 120 bp, Artificial Sequence
  ENSG00000189157_49 (sequence is synthesized)
ttttgggcaaaaggaagcatgcctgacacactggctattgcaggatctggccagcagcccgcaatgcaacggggctctctgttcccaggcggattggcaggttgagaaataatagacaca

SEQ ID NO: 697748 - DNA, 72 bp, Artificial Sequence
  ENSG00000189157_50 (sequence is synthesized)
cttaaaacagtaacagttgccacaaaagctggttacaaacaatccatggaaacaggaggtgaagctagacaa

SEQ ID NO: 697749 - DNA, 65 bp, Artificial Sequence
  ENSG00000189157_51 (sequence is synthesized)
caagatattaatcaacagtaacagttgccacaaaagctggttacaaacaatccatggaaacagga

SEQ ID NO: 697750 - DNA, 120 bp, Artificial Sequence
  ENSG00000189157_52 (sequence is synthesized)
gggataggaatgttggtgatgtgcaacctccctgactgcacgtccgttcataggctgtctgcagggggaagcacatcatgcgctgttggctcgttctggcagcccaacctggcattgtct

SEQ ID NO: 697751 - DNA, 79 bp, Artificial Sequence
  ENSG00000189157_53 (sequence is synthesized)
ctggctgtcctcttttcagtcacattgactagagaaatgatgcccctggtcacaacagagtcctctgagaacacctgtc

SEQ ID NO: 697752 - DNA, 120 bp, Artificial Sequence
  ENSG00000189157_54 (sequence is synthesized)
atgcccctggtcacaacagagtcctctgagaacacctgtcactcaaaaccctacaatattttgtccctttattcttacatcctatattcttattttatcaataagatttcaactgaagga

SEQ ID NO: 697753 - DNA, 120 bp, Artificial Sequence
  ENSG00000189157_55 (sequence is synthesized)
gagaaggggctctatcacagggaataagatatatatgcatatacacacacacagtatataaatatatgtgtgtgtatgtgtgtgtgtgtatacacagttattatttacttaaatctatat

SEQ ID NO: 697754 - DNA, 120 bp, Artificial Sequence
  ENSG00000189157_56 (sequence is synthesized)
gtgaacattcattcttttttttaacctcctgtgtacattcacatatgttatgtgaacatatgcacttacctacacattccagtatctgctgctggattaactacttgatgcatcacccac

SEQ ID NO: 697755 - DNA, 120 bp, Artificial Sequence
  ENSG00000189157_57 (sequence is synthesized)
agcctcattccctctgctgcacggatggatcccaagccttagtagcagggatgggcagcacaaggctatgttgagctgggctgggccagacttgggcacagaacaagtgtgaattccatc

SEQ ID NO: 697756 - DNA, 120 bp, Artificial Sequence
  ENSG00000189157_58 (sequence is synthesized)
tgagtgtttctgatactgtgtgactaccttccaaagaccaacatctatcatggtcagattattaacatgtgattttgcatagtgtaaggatatatattagagtgtgaaattttgagttag

SEQ ID NO: 697757 - DNA, 120 bp, Artificial Sequence
  ENSG00000189157_59 (sequence is synthesized)
atatggtagtggttgtggggaggactgtactgtgcaagttttgtttgccaatctaatgaaggttctctcatttttttttagttccttgagaatatgtatatcgggaaggaatgtaaacgt

SEQ ID NO: 697758 - DNA, 120 bp, Artificial Sequence
  ENSG00000189157_60 (sequence is synthesized)
ctggaggttgtgtcaagatttaagtctttattggaggaatagcaagaggctattgaacacaaaagcttgttcatgaatatccatagcagcattgtccttaacaggcaaaaagtggcaaca

SEQ ID NO: 697759 - DNA, 120 bp, Artificial Sequence
  ENSG00000189157_61 (sequence is synthesized)
gcccaaaagtccatcacctggatatgtttgtgaatggataaacaaaaagtggtctatgtagaccatggagtattggccataaaaaggaataaactactaatacatgctacaacatggatg

SEQ ID NO: 697760 - DNA, 120 bp, Artificial Sequence
  ENSG00000189157_62 (sequence is synthesized)
agccttgaaaacattatgctaattaagagaagccagacacaaaagactgcatattgcatggttccattcagatgaaatatccagaacaggcaaatctacggagacagaaaagtaggttag

SEQ ID NO: 697761 - DNA, 120 bp, Artificial Sequence
  ENSG00000189157_63 (sequence is synthesized)
ttgttgccaggagcgagggaaatggggaaatggtgagtgattattaatggctgcggggtttctttcggggtaataaaaatgttctggaataagatagtggtggtggttgcacaactttgt

SEQ ID NO: 697762 - DNA, 120 bp, Artificial Sequence
  ENSG00000189157_64 (sequence is synthesized)
gaatatataaagggtactctcatacacttttgaagtggtaaattttatgaatttcatggtggatgaattatatctcaatttttataaagaagctattgatggtgacgaagcgtggctgca

SEQ ID NO: 697763 - DNA, 120 bp, Artificial Sequence
  ENSG00000189157_65 (sequence is synthesized)
tttgatatgtccagagttacattttgaaatgactgcttgggatgcattgtagggaatggattgggggttggaggttgggggagccataggagttgatgatgcagagacactagcattttg

SEQ ID NO: 697764 - DNA, 120 bp, Artificial Sequence
  ENSG00000189157_66 (sequence is synthesized)
cagcagtccagagaaggagacagttacaatctgccagaccttaactgagctggattttaagaatgttagagaagtcaaggatgactcctacttgtcaaggttgcctgaggctttggtaga

SEQ ID NO: 697765 - DNA, 120 bp, Artificial Sequence
  ENSG00000189157_67 (sequence is synthesized)
cttcaagcacagtaatttgggcttttacccagtacatgttttaataaatggtactcaaaatttaaaaaaatcaacttataatggtaaatgctatgtaagttttaattattataactaatc

SEQ ID NO: 697766 - DNA, 120 bp, Artificial Sequence
  ENSG00000189157_68 (sequence is synthesized)
tgtgagcttgcaagagactgttagaaatacttgctttatgatttccttttgcctctaaaactgtttgaaatccatttggattcattgtgtctcatattgtaattctttaatgatcttatc

SEQ ID NO: 697767 - DNA, 120 bp, Artificial Sequence
  ENSG00000189157_69 (sequence is synthesized)
atgtttacatctcacatcattgcagctgtttcatatttttattttccattttattgttaggactttcttttctctctttcactccttcaactcatttttcttagttagatttacctagaa

SEQ ID NO: 697768 - DNA, 120 bp, Artificial Sequence
  ENSG00000189157_70 (sequence is synthesized)
actccttcaactcatttttcttagttagatttacctagaagtactctggcaggtactccttgattataatcttcacacaaaaatgttctgacatgccaggtgcagtggctcatgcctgta

SEQ ID NO: 697769 - DNA, 85 bp, Artificial Sequence
  ENSG00000189157_71 (sequence is synthesized)
gcgggcagatcacttgagttcaattgtctctcttgtatttttgtaaaaaatataaaaattaggccgggtgcagtggctcatgcct

SEQ ID NO: 697770 - DNA, 120 bp, Artificial Sequence
  ENSG00000189159_0 (sequence is synthesized)
agcggcggctcctgcagcggtggtcggctgttgggtgtggagtttcccagcgcccctcgggtccgaccctttgagcgttctgctccggcgccagcctacctcgctcctcggcgccatgac

SEQ ID NO: 697771 - DNA, 120 bp, Artificial Sequence
  ENSG00000189159_1 (sequence is synthesized)
cacaaccaccaccttcaagggagtcgaccccaacagcaggaatagctcccgagttttgcggcctccaggtggtggatccaatttttcattaggttttgatgaaccaacagaacaacctgt

SEQ ID NO: 697772 - DNA, 120 bp, Artificial Sequence
  ENSG00000189159_2 (sequence is synthesized)
gaggaagaacaaaatggcctctaatatctttgggacacctgaagaaaatcaagcttcttgggccaagtcagcaggtgccaagtctagtggtggcagggaagacttggagtcatctggact

SEQ ID NO: 697773 - DNA, 120 bp, Artificial Sequence
  ENSG00000189159_3 (sequence is synthesized)
gcagagaaggaactcctctgaagcaagctccggagacttcttagatctgaagggagaaggtgatattcatgaaaatgtggacacagacttgccaggcagcctggggcagagtgaagagaa

SEQ ID NO: 697774 - DNA, 120 bp, Artificial Sequence
  ENSG00000189159_4 (sequence is synthesized)
gcccgtgcctgctgcgcctgtgcccagcccggtggccccggccccagtgccatccagaagaaatccccctggcggcaagtccagcctcgtcttgggttagctctgactgtcctgaacgct

SEQ ID NO: 697775 - DNA, 120 bp, Artificial Sequence
  ENSG00000189159_5 (sequence is synthesized)
ttttcttttgaagaacaggtttctctctgtccttgactcttgggtctgtgggccatggcatgagtgttttctagtagtagattggagggaaagctttgtgacacttagtactgtgttttt

SEQ ID NO: 697776 - DNA, 120 bp, Artificial Sequence
  ENSG00000189159_6 (sequence is synthesized)
aagaagaaataatttggttccagatgtgttagaggatcttttgtactgaggtttttaacactttacttgggtttaccaagcctcaactggacagaccataaacagtccacaggcaccgtt

SEQ ID NO: 697777 - DNA, 120 bp, Artificial Sequence
  ENSG00000189159_7 (sequence is synthesized)
cctgccaggccccaacccacagggagtctctccgcagagccttcttggtgttgccctaacttgccagtggcctttgctcagagcctcctcctgtgacatgtgaacaatgaagaggcctgc

SEQ ID NO: 697778 - DNA, 120 bp, Artificial Sequence
  ENSG00000189159_8 (sequence is synthesized)
gcctcctgccttgccgcctgcaaagcaaagaaactgccttttattttttaaccttaaaaagtagccagatagtaacaagactggctggctgatgagcaaagcctttgctctcacgcagag

SEQ ID NO: 697779 - DNA, 120 bp, Artificial Sequence
  ENSG00000189159_9 (sequence is synthesized)
gaaggcttggatgtacaatgaaactgcctggaactaaaagcagtgaagcaagggaggcaatcacactgaagcgggtcttcctccaggaacggggtcccacaggcgtgttgttttaaataa

SEQ ID NO: 697780 - DNA, 120 bp, Artificial Sequence
  ENSG00000189159_10 (sequence is synthesized)
cctgatgctgtgtgcatgatgctggtgcttgaccatgaaaggaaagtctcatccttaaaatgtgttgtacttcacaatcctggactgttgcttcaagtaaacaatatccacattttgaaa

SEQ ID NO: 697781 - DNA, 120 bp, Artificial Sequence
  ENSG00000189159_11 (sequence is synthesized)
ggtttcaagtagatgttagctgctatgaactatgactgttttgcgtgttccaaaattaaaataggaagtaaatttttgaatttttttcttttctagggagaaggtgatattcatgaaaat

SEQ ID NO: 697782 - DNA, 120 bp, Artificial Sequence
  ENSG00000189159_12 (sequence is synthesized)
ttcttagatctgaaggtcagtgtgacagcatgaggccagaaaggctttcagggagaaggtgatattcatgaaaatgtggacacagacttgccaggcagcctggggcagagtgaagagaag

SEQ ID NO: 697783 - DNA, 74 bp, Artificial Sequence
  ENSG00000189159_13 (sequence is synthesized)
gatcctgccttggcctcctagggtgctgggattacagagttttgcggcctccaggtggtggatccaatttttca

SEQ ID NO: 697784 - DNA, 120 bp, Artificial Sequence
  ENSG00000189159_14 (sequence is synthesized)
cgtgcgctgtgctcgcgccggggcgggtggcggggttctgccgtcggcgccgcctttgtgccgcctggcgagccctgcgcgccggccccacccgggtccctgctgctctccattcattcc

SEQ ID NO: 697785 - DNA, 120 bp, Artificial Sequence
  ENSG00000189159_15 (sequence is synthesized)
ttccacggagtcaggggctgaggaggccggggctggtcgcccctcggagcacggccggttttcgttaatcggaaccttcggggagggcttcgctttctcctgtgtgcatcccggctggtg

SEQ ID NO: 697786 - DNA, 120 bp, Artificial Sequence
  ENSG00000189159_16 (sequence is synthesized)
catccccagggtggtgggcttggccccccaggtgcccggggatcctttagggccccatgcatggtcaggtcctattgtcccattgatgggccacgcgctcctgtctctcccccgtggcat

SEQ ID NO: 697787 - DNA, 120 bp, Artificial Sequence
  ENSG00000189159_17 (sequence is synthesized)
gcggttggtctcgctctcgcgcgcagccattggatccggagaccggatcgatcaggtccggcgggctccttaccctcgccgtgcccccactccttattcggacctacctgacaggtgcat

SEQ ID NO: 697788 - DNA, 120 bp, Artificial Sequence
  ENSG00000189159_18 (sequence is synthesized)
gtgtggtcgagcggggctggtcatcgcgacccttcaccccccattgaggacccaatcgttcttcccctcttcgaagtgcctcccctcttccaagtgtctccccttcctaacaaaggaaag

SEQ ID NO: 697789 - DNA, 120 bp, Artificial Sequence
  ENSG00000189159_19 (sequence is synthesized)
accccttctccccatccctgcgctcatttctaaggcggggggcgggggcgggcgcggggaacgagccaacccgagtgggttttctgcgcttaaaccttcggaccgtggcctttgcatcct

SEQ ID NO: 697790 - DNA, 120 bp, Artificial Sequence
  ENSG00000189159_20 (sequence is synthesized)
accttcgcttcctcctttgacgtttgcccagtgagttcatccctggccctggttcccttgcaggaggaggtttcttgttcttgggcggggccggagacatccattgtctctaacgtggta

SEQ ID NO: 697791 - DNA, 120 bp, Artificial Sequence
  ENSG00000189159_21 (sequence is synthesized)
gcgctacctgggaagcgggggatttttcttgcccttcttcccactgctttttgggcttggggcactgggtacagtgtttggacaggaacccttttccaagtccttgcttaacttacttgg

SEQ ID NO: 697792 - DNA, 120 bp, Artificial Sequence
  ENSG00000189159_22 (sequence is synthesized)
aggctgagccgtggccgccacagcccatcgtaatgccgcatggtgcttggcactccagagagccaataggaatgaaagaattcatttgaatcggccaatgccggcgggttagggggcggg

SEQ ID NO: 697793 - DNA, 120 bp, Artificial Sequence
  ENSG00000189159_23 (sequence is synthesized)
acttacttggtggaagggtttggattctgtggaaggtgtccacattgtctcagctaattgcacactgttctttaaggtgggttacagttatgtctgggatcctcttcaaggcttggaaga

SEQ ID NO: 697794 - DNA, 120 bp, Artificial Sequence
  ENSG00000189159_24 (sequence is synthesized)
agcttaaatcacttttttgagcatgtattttacatcgattatgacctgcattcatgtgtggctaccctcggggtcctggccaagtggcacaaagggagccattttgtggggctaagaaga

SEQ ID NO: 697795 - DNA, 120 bp, Artificial Sequence
  ENSG00000189159_25 (sequence is synthesized)
cacgtgaaatagccatatctcacaggggttagagaacttgggaacaaaaagcacgcctcactcagcaattgagccttaggaggaaagcatgggaaatgacattcctttacaactcaatac

SEQ ID NO: 697796 - DNA, 120 bp, Artificial Sequence
  ENSG00000189164_0 (sequence is synthesized)
agatctcgcagagctcagagtcctgcatgcctcagtcctcgcctcgctcctcctcgcggaggattctgggaggtgacgtcgcgggtctcggtcgcggggcccgtttgcagagcccgcggc

SEQ ID NO: 697797 - DNA, 120 bp, Artificial Sequence
  ENSG00000189164_1 (sequence is synthesized)
gccgggaggactttgttcttcttcagaagagaaaactgaagaaggaggaatggctgtggggctttgtaaagccatgtcccaggggttggtgaccttcagagatgtggcgctagacttttc

SEQ ID NO: 697798 - DNA, 120 bp, Artificial Sequence
  ENSG00000189164_2 (sequence is synthesized)
ccaagaagagtgggaatggctgaagccatctcagaaggatttatacagagatgtcatgttggagaactacaggaacttggtatggcttggactctccatttctaagcccaacatgatctc

SEQ ID NO: 697799 - DNA, 120 bp, Artificial Sequence
  ENSG00000189164_3 (sequence is synthesized)
cttactggagcaagggaaggaaccgtggatggtggagagaaagatgtcacagggtcactgtgcagactgggagtcttggtgtgaaattgaggaattatctccaaaatggttcattgatga

SEQ ID NO: 697800 - DNA, 120 bp, Artificial Sequence
  ENSG00000189164_4 (sequence is synthesized)
agatgaaatatcccaggagatggtaatggaaaggctagcaagtcatggccttgaatgctccagtttcagagaagcctggaaatataagggtgaatttgagctacatcagggaaatgcgga

SEQ ID NO: 697801 - DNA, 120 bp, Artificial Sequence
  ENSG00000189164_5 (sequence is synthesized)
gaggcatttcatgcaagtgacagctgttaaggaaatctctactgggaaaagagacaatgaatttagtaattctgggagaagcatacccctgaaatcagtatttttaacacaacagaaagt

SEQ ID NO: 697802 - DNA, 120 bp, Artificial Sequence
  ENSG00000189164_6 (sequence is synthesized)
tcctaccatacagcaagtacataaatttgatatttatgataaactcttcccccaaaattcagtcataattgaatataaaagactccatgctgagaaggaatctttgataggtaatgaatg

SEQ ID NO: 697803 - DNA, 120 bp, Artificial Sequence
  ENSG00000189164_7 (sequence is synthesized)
tgaagaattcaaccagagtacgtaccttagtaaagatataggaattcctcctggggagaaaccttatgaaagtcatgatttttcaaagctcttaagtttccactcattatttactcaaca

SEQ ID NO: 697804 - DNA, 120 bp, Artificial Sequence
  ENSG00000189164_8 (sequence is synthesized)
tcagaccactcattttggaaaattaccccatggatacgatgaatgtggtgatgcctttagctgttactcattctttactcaacctcagagaattcacagtggagaaaaaccatatgcatg

SEQ ID NO: 697805 - DNA, 120 bp, Artificial Sequence
  ENSG00000189164_9 (sequence is synthesized)
caatgactgtggaaaagcctttagccacgacttctttctcagtgaacatcaaagaactcatattggggagaaaccttatgaatgtaaggaatgtaacaaagctttcagacagagtgctca

SEQ ID NO: 697806 - DNA, 120 bp, Artificial Sequence
  ENSG00000189164_10 (sequence is synthesized)
ccttgctcaacatcagaggatccacactggagagaaaccgtttgcgtgcaatgaatgtgggaaggcctttagccgttatgccttccttgttgaacatcagagaattcacacaggtgagaa

SEQ ID NO: 697807 - DNA, 120 bp, Artificial Sequence
  ENSG00000189164_11 (sequence is synthesized)
tcagagaattcacacaggtgagaaaccatatgaatgtaaagaatgtaataaagccttcagacagagtgctcaccttaatcaacatcagaggattcacactggagagaaaccctatgaatg

SEQ ID NO: 697808 - DNA, 120 bp, Artificial Sequence
  ENSG00000189164_12 (sequence is synthesized)
cagacgcatagcccttactctacatcaaagaattcacacaggagagaaacccttcaaatgtagtgaatgtgggaagacctttggctatcgctcacacctgaatcaacatcagagaattca

SEQ ID NO: 697809 - DNA, 120 bp, Artificial Sequence
  ENSG00000189164_13 (sequence is synthesized)
taccggagaaaagccctatgaatgcatcaaatgtgggaagttttttaggactgactcacaacttaatcgacatcatagaattcacactggagagagaccatttgaatgcagtaaatgtgg

SEQ ID NO: 697810 - DNA, 120 bp, Artificial Sequence
  ENSG00000189164_14 (sequence is synthesized)
gaaagccttcagtgatgctttagttctaattcaccataagagaagtcatgcaggagagaaaccctatgaatgtaacaaatgtggaaaggccttcagttgtggctcatatcttaatcaaca

SEQ ID NO: 697811 - DNA, 120 bp, Artificial Sequence
  ENSG00000189164_15 (sequence is synthesized)
tcaaagaattcatactggagagaaaccctatgaatgtagtgaatgtgggaaggcttttcatcagatcttgtccctaagactacaccagagaattcacgctggagaaaaaccttataaatg

SEQ ID NO: 697812 - DNA, 120 bp, Artificial Sequence
  ENSG00000189164_16 (sequence is synthesized)
taacgaatgtgggaataattttagctgtgtctcagcccttagacgacatcagagaattcataatagagaaacgctctgattataacaagtataggaaagaaaacatgtggttaccactca

SEQ ID NO: 697813 - DNA, 120 bp, Artificial Sequence
  ENSG00000189164_17 (sequence is synthesized)
atccttattaaatattagtgagttctttttggttagtaattctttgaatgtagttcatatttcagttcatgagtatccgttatttgaagtagctcagtagtagacatctgttactttttt

SEQ ID NO: 697814 - DNA, 65 bp, Artificial Sequence
  ENSG00000189164_18 (sequence is synthesized)
atctcgaactcctgactttaggtgatccacacgcctcagactcccaaagtgctgggattatgggc

SEQ ID NO: 697815 - DNA, 120 bp, Artificial Sequence
  ENSG00000189164_19 (sequence is synthesized)
ttatgggcgtgagccaccgcgcctggccacatctgttactttttgatctgttctatacctggcttagcccaccctcaatgcatatgattcagatgaaactgttaatcagggacagcagtg

SEQ ID NO: 697816 - DNA, 120 bp, Artificial Sequence
  ENSG00000189164_20 (sequence is synthesized)
tcacaggctggccaattatttcccccaacctagtgataagggattggcaaatggccctgtctggatcaatgaagtcctttgcgggtattcctatgggcagtaagagaggttttattctgg

SEQ ID NO: 697817 - DNA, 120 bp, Artificial Sequence
  ENSG00000189164_21 (sequence is synthesized)
aactgcaagtttcaaggatttaataagattaaaaactcaccagtagcctttttgccactcatgaggaaagctttcccaaagagaaatctaacagaggaaaatggagatgagagacagaaa

SEQ ID NO: 697818 - DNA, 120 bp, Artificial Sequence
  ENSG00000189164_22 (sequence is synthesized)
tatgatgatacagcttgatctcctggatccagtcattcctgacagctacaccatcaccatcctttttcattttttgtgatccaataaatttcctttttttgcttaatttggattatattt

SEQ ID NO: 697819 - DNA, 120 bp, Artificial Sequence
  ENSG00000189164_23 (sequence is synthesized)
ttgcctcatggaattagagtgctgattcacacattctatgtttgctatacataaaagaaagccttaattttttacgtggcataattatttatcctgaggagcaaccttctgatataacaa

SEQ ID NO: 697820 - DNA, 120 bp, Artificial Sequence
  ENSG00000189164_24 (sequence is synthesized)
gtttatgaaagttgaatacacagccttcataaaactgagataattgttacattttatttgtcgataaaactattttagtgtttcttagtttttttcacattatggctgaatattttaaaa

SEQ ID NO: 697821 - DNA, 120 bp, Artificial Sequence
  ENSG00000189164_25 (sequence is synthesized)
ttcaccaagtaaaattctttaacaggcttccccttaaggagttaaaatcatttgtcacagtgactcaccatttgcctgtaaagagagaatggaaagctaagagaataatactttcatttg

SEQ ID NO: 697822 - DNA, 120 bp, Artificial Sequence
  ENSG00000189164_26 (sequence is synthesized)
tttaatgaatggctcttcatcttcaaggaattacttgattttcttctttcagtatgggtctaaacatattctgtggcagaatataataacaattaaattgtaaatgaggtcttttgtggg

SEQ ID NO: 697823 - DNA, 66 bp, Artificial Sequence
  ENSG00000189164_27 (sequence is synthesized)
atataataacaattaaattgtaaatgaggtcttttgtgggtgggctctaaatttggtttaagaccc

SEQ ID NO: 697824 - DNA, 120 bp, Artificial Sequence
  ENSG00000189164_28 (sequence is synthesized)
aagtgtatggataacttctttgcagctagagatatcaaacaaagatattgctggcagaaagaatgagtcatttttaacaaatggtaaaagtaaagcagttaatgcctaaaatttttagag

SEQ ID NO: 697825 - DNA, 120 bp, Artificial Sequence
  ENSG00000189164_29 (sequence is synthesized)
actaaatcatttccattattgggagtaatgaggaagatgaaggtgtagggcaatacgtttcttttttatctgagtggatatagggaaataaactggtgatatggcagctgggccatcttg

SEQ ID NO: 697826 - DNA, 120 bp, Artificial Sequence
  ENSG00000189164_30 (sequence is synthesized)
aatagtgagaaccagtaagaatattgggtattgcctgaagagcatctgtaaaaacatatcagaacaaatgaaagaggaaagaatgaaggatttatatgtgtgcatagagtgaatatatgt

SEQ ID NO: 697827 - DNA, 120 bp, Artificial Sequence
  ENSG00000189164_31 (sequence is synthesized)
gtgcatagagtgaaatattcaacttatacttatttctaataaaatctgaaaattatttttcataaatattcaaattccctttaaacagcttaaaatacagatttagtgactcagtacttc

SEQ ID NO: 697828 - DNA, 120 bp, Artificial Sequence
  ENSG00000189164_32 (sequence is synthesized)
actcagtacttcaaaccttgaatagaaacaaatatgattataaaatatttccaaacttatgttacatctaatctgaaacatattaatattataagcttaattcatgtcatcatttcttta

SEQ ID NO: 697829 - DNA, 120 bp, Artificial Sequence
  ENSG00000189164_33 (sequence is synthesized)
tttcctggaggtataaggatatttatttttataatttccaagcactgagtaataatttatttcagaaagtttcagaaggttacagtaaactttaccaaacttgaagaagaatgactcaga

SEQ ID NO: 697830 - DNA, 89 bp, Artificial Sequence
  ENSG00000189164_34 (sequence is synthesized)
tacagtaaactttaccaaacttgaagaagaatgactcagatcagtaagaagagtctgagttactcactaattgatttttattttattta

SEQ ID NO: 697831 - DNA, 88 bp, Artificial Sequence
  ENSG00000189164_35 (sequence is synthesized)
tctaccacacctggctaagtttcgcgtttttctgtagagatggggtttcgcgagttgcccaggctggtctccaactcttggcctgaag

SEQ ID NO: 697832 - DNA, 120 bp, Artificial Sequence
  ENSG00000189164_36 (sequence is synthesized)
cgcgagttgcccaggctggtctccaactcttggcctgaagtgatttgcccatctcggcttcccaaagtgctgagattatagggatgagtcactgtgcacagctactaattgatttttgat

SEQ ID NO: 697833 - DNA, 120 bp, Artificial Sequence
  ENSG00000189164_37 (sequence is synthesized)
ctatgtatggcacctgatttcatcctcgagagtgacgtaaacctaagctactggttcattctctgtttatatagttaaacttcacttgtaatgttgataaaatcttttgtacccatgtgt

SEQ ID NO: 697834 - DNA, 120 bp, Artificial Sequence
  ENSG00000189164_38 (sequence is synthesized)
ttagcttcagtgtattttacaatctgatgtttctcctcacaatgaagtactaaattttgtttcttttcaactgtacaacccattgtcttgtgatatattgacctgatctcttaggattag

SEQ ID NO: 697835 - DNA, 120 bp, Artificial Sequence
  ENSG00000189164_39 (sequence is synthesized)
tgaaaatttatgctttattaatatttgattgttattaggaccatctagagatttctgtttatgtgtgtgtatgtgcatctgaagatgtgtattttatttaaattttttgtattaagtgcc

SEQ ID NO: 697836 - DNA, 120 bp, Artificial Sequence
  ENSG00000189164_40 (sequence is synthesized)
gtggcatgatcttggctcactgcagcctatacctacggaactcaagcaatcttctcacctcagcatgcacaccactgcacctggttaatttttttgtttatttttcttgtagagacgagg

SEQ ID NO: 697837 - DNA, 120 bp, Artificial Sequence
  ENSG00000189164_41 (sequence is synthesized)
agcactcctgggctcaagcgatcctcccatcttggcatcccaaactgttgggattactggcatacttccacttttggagaattagattatttttctttttcttactgatttgtagtagaa

SEQ ID NO: 697838 - DNA, 120 bp, Artificial Sequence
  ENSG00000189164_42 (sequence is synthesized)
ctaaattctgggcattattcatttttctatgatatatgttttagttgttttttctcagattgtcccttgccttttgactttgtgttttctcccgcacacaagttttcaaggttaatgtca

SEQ ID NO: 697839 - DNA, 120 bp, Artificial Sequence
  ENSG00000189164_43 (sequence is synthesized)
aattcattcctttcaaccagatgtcgtcaggatggtagtgaggaggtcatgctccccttcactgtgttctctgtgtcttgcaggtttttaatgctgtaagtgtgtttctcttgatatttt

SEQ ID NO: 697840 - DNA, 120 bp, Artificial Sequence
  ENSG00000189164_44 (sequence is synthesized)
tttcatgaccttttccacaatgatagggaattttacaagtcaaccctggttgagttctttcacagagattttggtggaagaaaggtataaaatgcaagggcttaggtcctattattggtt

SEQ ID NO: 697841 - DNA, 120 bp, Artificial Sequence
  ENSG00000189164_45 (sequence is synthesized)
ttggaatgttctttttttgttcataattttcttttatattattgattacttttgtccaagtttatttaaaataattttcttaagttctgaaataaaatccttatggaattctggttgaaa

SEQ ID NO: 697842 - DNA, 120 bp, Artificial Sequence
  ENSG00000189164_46 (sequence is synthesized)
tggcttggtgatggctgcagctgctgtagcactttgagaaccactgtcacggcagaagcttcatcctcctcctcatccatacaagcgtcattccattctctagctcttcctctaatgtcc

SEQ ID NO: 697843 - DNA, 120 bp, Artificial Sequence
  ENSG00000189164_47 (sequence is synthesized)
attcttgcctgatgatcaagatattgggtctgcgtcctagacagctgtggcatgttgatttgtttgtctgtatgtctttctgtctcttgctctcatttttcttcccctgtgaacaggact

SEQ ID NO: 697844 - DNA, 120 bp, Artificial Sequence
  ENSG00000189167_0 (sequence is synthesized)
ttagactgcgcctgagcacctgagagcggatggagcgctttgtccgtgttccctatggcttgtaccagggttatgggagcacagtgcctttgggccagcctggactctcagggcacaaac

SEQ ID NO: 697845 - DNA, 120 bp, Artificial Sequence
  ENSG00000189167_1 (sequence is synthesized)
agcccgactggaggcaaaatatgggtcctcccacttttctggccaggccagggctgctggtgcccgcgaacgcccctgactactgcattgacccttacaagagggcgcagcttaaggcca

SEQ ID NO: 697846 - DNA, 120 bp, Artificial Sequence
  ENSG00000189167_2 (sequence is synthesized)
ttctctcccagatgaaccccagcctgagcccgcggctgtgcaagcccaacaccaaggaggtgggcgtgcaggtgagcccgcgggtggacaaggctgtgcagtgctctctggggcctcgca

SEQ ID NO: 697847 - DNA, 120 bp, Artificial Sequence
  ENSG00000189167_3 (sequence is synthesized)
ccctcagcagctgctccccctgggacggcagagacccccaggagcccctgccagcctgtggggtcacttcgcccgccaccggccgcaggggcttgatccgcctgcggagagatggggacg

SEQ ID NO: 697848 - DNA, 120 bp, Artificial Sequence
  ENSG00000189167_4 (sequence is synthesized)
ggccctgcggaggccagccagccgcagccaccatcacggaggtcaggagctgacaggcaggaggagcccgggcagctggaggaatcgggggagaaagacgccccgtgccctcaggagacg

SEQ ID NO: 697849 - DNA, 120 bp, Artificial Sequence
  ENSG00000189167_5 (sequence is synthesized)
aagagcaagcaggtgcctggagacgccgcctccgagccgctccggaggcccaacttccagtttttggaaccaaaatatggctatttccactgtaaagattgtaagaccaggtgggagagt

SEQ ID NO: 697850 - DNA, 120 bp, Artificial Sequence
  ENSG00000189167_6 (sequence is synthesized)
gcttacgtgtggtgcatttctggaacgaacaaggtttatttcaaacaactctgttgtaaatgccaaaagagttttaacccttatcgagtagaagcaatccaatgtcagacctgctcaaag

SEQ ID NO: 697851 - DNA, 120 bp, Artificial Sequence
  ENSG00000189167_7 (sequence is synthesized)
tctcattgttcctgtcctcaaaagaagagacacattgatctaaggaggcctcatcgacaggaactgtgtggtcgctgcaaagacaagagattctcctgtggcaatatttacagctttaaa

SEQ ID NO: 697852 - DNA, 120 bp, Artificial Sequence
  ENSG00000189167_8 (sequence is synthesized)
tatgtgatgtgacttgtacagtgtgacttgtaatggacccctgagctcttcttgtaacttactgtgctgtcttccttttttgcaacttggctctgacctggcatcggaaaatggctaggc

SEQ ID NO: 697853 - DNA, 120 bp, Artificial Sequence
  ENSG00000189167_9 (sequence is synthesized)
agtatctgaccgaataaagcgggagctggagattcggatcacctgtcttcctcgcaggctgaactggaagacctgacttcatctccgaattcgttggttctgtaacatgcctaatacaag

SEQ ID NO: 697854 - DNA, 120 bp, Artificial Sequence
  ENSG00000189167_10 (sequence is synthesized)
gctgaatagggtttgttgtaagacctacaaaaccttcaaatggattcagtgagagttgctcccatgggggccttgctgcttccagaaggtgcttgagcagtaaacagaagcaaccttgga

SEQ ID NO: 697855 - DNA, 120 bp, Artificial Sequence
  ENSG00000189167_11 (sequence is synthesized)
ttaggaaaaggggtaataagcagcagctcccattagaatctgaaataaatggagaagccaggaatgaatctgaaccaacctgatgaagagaaagaaggggcggatgaaggaggaaggcaa

SEQ ID NO: 697856 - DNA, 120 bp, Artificial Sequence
  ENSG00000189169_0 (sequence is synthesized)
agctcaacccccagcacggctgcatccaccatgtccgtctgctccagcgacctgagctatggcagccgcgtctgccttcctggttcctgtgactcttgctccgactcctggcaggtggac

SEQ ID NO: 697857 - DNA, 120 bp, Artificial Sequence
  ENSG00000189169_1 (sequence is synthesized)
gactgcccagagagctgctgtgagcccccctgctgcgccccggccccctgcctgagcctggtctgcaccccagtgagccgtgtatccagcccctgctgccgagtgacctgtgagcccagc

SEQ ID NO: 697858 - DNA, 81 bp, Artificial Sequence
  ENSG00000189169_2 (sequence is synthesized)
cctccccctgccagcaggcctgctgcgtgcccgtctgctgcaagactgtctgctgcaagcctgtgtgctgtatgcccgtct

SEQ ID NO: 697859 - DNA, 120 bp, Artificial Sequence
  ENSG00000189169_3 (sequence is synthesized)
cccgtctgctgtgggccttcttcttcatgctgccagcagtctagctgccagccagcttgctgcatctcctccccgtgtcaacagtcctgctgtgtgcccgtctgctgcaagcccatctgc

SEQ ID NO: 697860 - DNA, 120 bp, Artificial Sequence
  ENSG00000189169_4 (sequence is synthesized)
tgtgtgcctgtctgctctggggcctcctctctgtgctgccagcagtctagctgccagccagcttgctgcaccacctcctgctgcagaccctcctcctccgtgtccctcctctgccgccct

SEQ ID NO: 697861 - DNA, 120 bp, Artificial Sequence
  ENSG00000189169_5 (sequence is synthesized)
gtgtgcagacccgcccgccgcgtgcccgtcccctcctgctgtgtccccacctcctcctgccagccaagctgcggccgcctggcctcctgcgggtccctcctctgccgccccacatgttcc

SEQ ID NO: 697862 - DNA, 120 bp, Artificial Sequence
  ENSG00000189169_6 (sequence is synthesized)
cgcctggcctgctgaggcctctgctcaggccagaagtccagctgctgccaggcatgtcccccagggccactgggcactatgagtcccccacctctcccactactggcccctcggctgctc

SEQ ID NO: 697863 - DNA, 120 bp, Artificial Sequence
  ENSG00000189169_7 (sequence is synthesized)
tgtcaacagtcctgctgtgtgcccgtctgctgcaagcccatctgctgtgtgcctccagcttgctgcaccacctcctgctgcagaccctcctcctccgtgtccctcctctgccgccctgtg

SEQ ID NO: 697864 - DNA, 120 bp, Artificial Sequence
  ENSG00000189171_0 (sequence is synthesized)
gatgtcttaccccaagctgggccttgcagtacctgtggctggctgtgctggttgagcccggtcagccctgacaaaggtcagctagccccttgaggacatcagctttggcctcagggtcct

SEQ ID NO: 697865 - DNA, 120 bp, Artificial Sequence
  ENSG00000189171_1 (sequence is synthesized)
aatggcagcagaaccactgacagagctagaggagtccattgagaccgtggtcaccaccttcttcacctttgcaaggcaggagggccggaaggatagcctcagcgtcaacgagttcaaaga

SEQ ID NO: 697866 - DNA, 120 bp, Artificial Sequence
  ENSG00000189171_2 (sequence is synthesized)
gatgtgggctctcttgatgagaagatgaagagcttggatgtgaatcaggactcggagctcaagttcaatgagtactggagattgattggggagctggccaaggaaatcaggaagaagaaa

SEQ ID NO: 697867 - DNA, 120 bp, Artificial Sequence
  ENSG00000189171_3 (sequence is synthesized)
gacctgaagatcaggaagaagtaaagccgcctggctgagatggggtgggcagggcagagctgatcagggccgagcagaaccgcactcttcccaaataaagcttcctccttgaaacacaaa

SEQ ID NO: 697868 - DNA, 120 bp, Artificial Sequence
  ENSG00000189171_4 (sequence is synthesized)
gctgggaggagcggttagagtgtgtgtgggcggatgcgagtggccggagaccagggcccaacataaacaagctttggagacaaacaaccttatgacctgtcagccctgacaaaggtcagc

SEQ ID NO: 697869 - DNA, 120 bp, Artificial Sequence
  ENSG00000189171_5 (sequence is synthesized)
gtactaaacccgtcctggagcagggagtcagagacgccccgttccaggacccttgtcaccgggagacaggagcggggaggatctgtggggtcctgggttcagcactctgccctgctgccg

SEQ ID NO: 697870 - DNA, 120 bp, Artificial Sequence
  ENSG00000189171_6 (sequence is synthesized)
aggcagcagtggatggtgcaggggaaagaggtgggaaggaggtcctgggagggacactggatgtcttaccccaagctgggccttgcagtacctgtggctggctgtgctggttgagcccga

SEQ ID NO: 697871 - DNA, 120 bp, Artificial Sequence
  ENSG00000189171_7 (sequence is synthesized)
atcgaccacggaaatttgacacctccgggcttggaagcagctctctcctccttccccgctgcttataaacctcagccctgaggctccagctcactctaccccatctccttgccgggtcag

SEQ ID NO: 697872 - DNA, 120 bp, Artificial Sequence
  ENSG00000189171_8 (sequence is synthesized)
aacaaattggtaatcggtggttaaataaatatgcccaaagtcccacagctagaaagtagcagggctggaatttgaacccagtccaataaaacctcaaaaccggtgcactttctaccgtat

SEQ ID NO: 697873 - DNA, 120 bp, Artificial Sequence
  ENSG00000189171_9 (sequence is synthesized)
cctgaggcttctttactttggggccctggttagccttagcagcctagttttctacatccttcatgccagttgaatgaaactactgacatgctccacattcttctttctcccatgcttttg

SEQ ID NO: 697874 - DNA, 120 bp, Artificial Sequence
  ENSG00000189171_10 (sequence is synthesized)
ttcattcagttacctcctcctaaaatgtctgcatttacccagataatcttccaatggaaatccatggttcaagtgccacctcttcaggaaagccatctgacttcaatcaggaagccagag

SEQ ID NO: 697875 - DNA, 120 bp, Artificial Sequence
  ENSG00000189171_11 (sequence is synthesized)
agctccgtctgcagcagctctttcagctccttcttgctcagcttgtacttgtccccctctttgcccgagtgggcgtggaacacgttgatgagggtctccatcgccgtctccagctcagag

SEQ ID NO: 697876 - DNA, 120 bp, Artificial Sequence
  ENSG00000189171_12 (sequence is synthesized)
ctgggctcccaggtccctcccccagagccagctcagacaggaattcaggaaggagctttggatgatcgagcaacagcgcgtgcaggagtgtgtgacggggtggacagaaaagagaatgcc

SEQ ID NO: 697877 - DNA, 120 bp, Artificial Sequence
  ENSG00000189171_13 (sequence is synthesized)
gctgggaggagcggttagagtgtgtgtgggcggatgcgagtggccggagaccagggcccaacataaacaagctttggagacaaacaaccttatgacctgtgagtctgggtgagacaagaa

SEQ ID NO: 697878 - DNA, 120 bp, Artificial Sequence
  ENSG00000189171_14 (sequence is synthesized)
gggattcttgagacagacacgccacagaggggccaccagacttgaaggactccaagaaggaccttcaactgaagacctcctctcaagtagaggggtctccagatcgagggatcaccacag

SEQ ID NO: 697879 - DNA, 120 bp, Artificial Sequence
  ENSG00000189171_15 (sequence is synthesized)
aggggtccctaagccacagacatttaaaaaggatcccggattgtgagacctacagaagagggggtttctggagctgaatctcctgcccccaccaaaactgagatgccgttgcctggtctg

SEQ ID NO: 697880 - DNA, 120 bp, Artificial Sequence
  ENSG00000189171_16 (sequence is synthesized)
ctgccccaagctcaacccctgtcctctccctctttccccatatgccccctccaggctgagactgatgtgataacaccaaggcagggaccttctgaaccattcctgcatcttggggctccc

SEQ ID NO: 697881 - DNA, 120 bp, Artificial Sequence
  ENSG00000189180_0 (sequence is synthesized)
tctgcgtttccgcctttccttttgtttttctcaggttttgcgtgggaggcggtcccgggatttcaagggtctacgcgcttttctatggcgaatgcaacccgacgagggagtgggctgtat

SEQ ID NO: 697882 - DNA, 120 bp, Artificial Sequence
  ENSG00000189180_1 (sequence is synthesized)
cttcagagttgtctccgtctttccaagaacagaacaaaatgaacaaggtagaacagaagtcccaggagtcagtatcatttaaagatgtgactgtgggcttcacccaggaggagtggcagc

SEQ ID NO: 697883 - DNA, 120 bp, Artificial Sequence
  ENSG00000189180_2 (sequence is synthesized)
acctggaccctagtcagagggctctgtatagagatgtgatgctggagaactacagcaaccttgtctcagtggggtattgtgttcacaaaccagaggtgatcttcaggctgcaacaaggag

SEQ ID NO: 697884 - DNA, 120 bp, Artificial Sequence
  ENSG00000189180_3 (sequence is synthesized)
aagagccatggaaacaggaggaagaattcccaagccaaagctttccagtctggacagctgatcacctgaaagagaggagccaagaaaaccaatctaaacatttgtgggaagttgtattca

SEQ ID NO: 697885 - DNA, 120 bp, Artificial Sequence
  ENSG00000189180_4 (sequence is synthesized)
tcaataatgaaatgctgactaaggaacaaggtgatgtaataggaataccatttaatgtggatgtaagttcttttccttccagaaaaatgttctgtcagtgtgattcatgtggaatgagtt

SEQ ID NO: 697886 - DNA, 120 bp, Artificial Sequence
  ENSG00000189180_5 (sequence is synthesized)
tcaacactgtttcagaattggttatcagtaagataaactatttaggaaaaaagtctgatgaatttaatgcctgtgggaaattgttactcaatattaagcatgatgaaactcatactcaag

SEQ ID NO: 697887 - DNA, 120 bp, Artificial Sequence
  ENSG00000189180_6 (sequence is synthesized)
agaaaaatgaagttttgaaaaataggaacacactgagtcatcatgaggagactttgcagcatgagaagattcaaactttagagcacaattttgaatacagtatatgtcaggaaaccctcc

SEQ ID NO: 697888 - DNA, 120 bp, Artificial Sequence
  ENSG00000189180_7 (sequence is synthesized)
ttgaaaaggcagtattcaatacacagaagagagagaacgcagaagagaataactgtgattataatgaatttgggagaactttgtgtgatagttcatccctcttgttccatcagatatctc

SEQ ID NO: 697889 - DNA, 120 bp, Artificial Sequence
  ENSG00000189180_8 (sequence is synthesized)
cgtcaagggacaatcactatgaatttagtgattgtgagaagttcttatgtgtgaagtccaccctttctaaacctcatggggtatctatgaaacactatgattgtggtgaaagtgggaata

SEQ ID NO: 697890 - DNA, 120 bp, Artificial Sequence
  ENSG00000189180_9 (sequence is synthesized)
atttcaggaggaaattgtgtctgtcacaccttcagaaaggtgataaaggagagaaacactttgaatgtaatgaatgtgggaaagctttctgggagaagtcacatctcactcgacatcaga

SEQ ID NO: 697891 - DNA, 120 bp, Artificial Sequence
  ENSG00000189180_10 (sequence is synthesized)
gggtgcacacaggacagaaaccctttcaatgtaatgaatgtgaaaaagctttctgggataagtcaaacctcactaaacatcaaagatcacacacaggggagaaaccttttgaatgcaatg

SEQ ID NO: 697892 - DNA, 120 bp, Artificial Sequence
  ENSG00000189180_11 (sequence is synthesized)
aatgtgggaaagcctttagccataagtcagccctcacattacaccagagaacacatacaggggagaaaccctatcaatgtaatgcgtgtgggaaaactttttgccagaaatctgacctca

SEQ ID NO: 697893 - DNA, 120 bp, Artificial Sequence
  ENSG00000189180_12 (sequence is synthesized)
ctaaacatcagagaacacacacagggctgaaaccctatgaatgttatgaatgtggaaaatccttccgtgtgacttcgcaccttaaagtacaccagagaactcacacaggtgagaaacctt

SEQ ID NO: 697894 - DNA, 120 bp, Artificial Sequence
  ENSG00000189180_13 (sequence is synthesized)
ttgaatgtcttgagtgtgggaaatcctttagtgaaaagtcaaatcttacacagcatcagagaattcacataggagataaatcttatgaatgtaatgcatgtgggaaaactttctaccaca

SEQ ID NO: 697895 - DNA, 120 bp, Artificial Sequence
  ENSG00000189180_14 (sequence is synthesized)
agtcattactcaccaggcatcagataattcatacagggtggaaaccttatgaatgttatgaatgtgggaaaaccttctgcttgaagtcagacctcacagtacatcagagaacacacacag

SEQ ID NO: 697896 - DNA, 120 bp, Artificial Sequence
  ENSG00000189180_15 (sequence is synthesized)
ggcagaaaccctttgcatgtcccgaatgtgggaaattctttagccataagtcaaccctctctcaacattatagaacacacacaggggagaaaccctacgaatgtcatgaatgtggaaaaa

SEQ ID NO: 697897 - DNA, 120 bp, Artificial Sequence
  ENSG00000189180_16 (sequence is synthesized)
tcttttacaataaatcatacctaactaaacataatagaacacatacaggggagaaaccctatgaatgtaatgaatgtggaaaagccttctaccagaagtcacaactcactcagcatcaga

SEQ ID NO: 697898 - DNA, 120 bp, Artificial Sequence
  ENSG00000189180_17 (sequence is synthesized)
gaattcacataggggagaaaccctataaatgtaatgagtgtggaaaagctttctgccataagtcagctctaattgtacatcagagaacccatacacaagaaaagccctataaatgtaatg

SEQ ID NO: 697899 - DNA, 120 bp, Artificial Sequence
  ENSG00000189180_18 (sequence is synthesized)
aatgtggaaaatctttctgtgtaaaatcaggacttattttccatgagagaaagcacacgggggagaaaccctatgaatgcaatgaatgtgggaaattcttcaggcacaaatcatcactca

SEQ ID NO: 697900 - DNA, 120 bp, Artificial Sequence
  ENSG00000189180_19 (sequence is synthesized)
cagtacatcacagggctcacacaggagagaaatcttgtcaatgtaatgaatgtggaaaaatcttttaccgtaaatcggaacttgctcaacatcagagatcacatacaggggaaaagccct

SEQ ID NO: 697901 - DNA, 120 bp, Artificial Sequence
  ENSG00000189180_20 (sequence is synthesized)
atgaatgtaacacatgcaggaaaactttctctcaaaagtcaaatctcattgtacatcagagaagacatataggagaaaaccttatgaatgaaatggatattagaaatttccagccacaag

SEQ ID NO: 697902 - DNA, 120 bp, Artificial Sequence
  ENSG00000189180_21 (sequence is synthesized)
tcagcctccataatgcctcagagtattcacactgtggagaaagccctgatgacatcctgaatgttcagtaactatccacaaactcaccttatgttactccaaagtaatagtaggggataa

SEQ ID NO: 697903 - DNA, 120 bp, Artificial Sequence
  ENSG00000189180_22 (sequence is synthesized)
acccatagactacaacaattataggacagcttttgttaggaagtgatattctatgtaatatcagatggttaatacgggcataacaccttacagattttttttgaatttgtgaaagttttt

SEQ ID NO: 697904 - DNA, 120 bp, Artificial Sequence
  ENSG00000189180_23 (sequence is synthesized)
ggcaaaaatgcaaataaggttatgttagaatttacactgaggagaaaattgtcaatttaagaaatctaaagtgaaaattttgcttagaaataaaatacgacaagttatgttttgagtttg

SEQ ID NO: 697905 - DNA, 120 bp, Artificial Sequence
  ENSG00000189180_24 (sequence is synthesized)
atgccataatagtttttagggcacctaacaataatttatagatgtatattgtggaatgtaaagctttaagaacttaaacaaaggtaataattaaaataacctcacaagaagtttaatgag

SEQ ID NO: 697906 - DNA, 120 bp, Artificial Sequence
  ENSG00000189180_25 (sequence is synthesized)
atgttaccttgctggtagatagagacttagtcagattttactatggtttgcatgcactctgtgtgtgtgtgtacgtgtatgtgtgtgtgtgtggttatatcaaacttttacgacttttac

SEQ ID NO: 697907 - DNA, 120 bp, Artificial Sequence
  ENSG00000189180_26 (sequence is synthesized)
atttgagtaaccatcaacacgattagtttacagaactgaaaaggaatctgagatctgtactgtatcaggattacaaaggatttagcctcaagtagttccctttttgtattaataaccaca

SEQ ID NO: 697908 - DNA, 120 bp, Artificial Sequence
  ENSG00000189180_27 (sequence is synthesized)
cgctttctgcaaccctatcccttgcatccacttgactatgaagtttttttaaagcacagataaattgaataatcagggcaatagcattaagcacatctgcgaattatccctgaagttcaa

SEQ ID NO: 697909 - DNA, 120 bp, Artificial Sequence
  ENSG00000189180_28 (sequence is synthesized)
aagacttatatatgtataagtggtatgtgatataaatcgtgtgtttcatatgcataatggaatttaacgtaattgtgaataggaagtaggtatcctagtttagtagtggttacattatca

SEQ ID NO: 697910 - DNA, 120 bp, Artificial Sequence
  ENSG00000189180_29 (sequence is synthesized)
ggcccatcccagatgtttgtgatgtcctgaaacaatttaaaaggagacccacagagctaatgtttatccatttaaaaggtataaatcaaaataacaaattatctaaaaaaaatctatcct

SEQ ID NO: 697911 - DNA, 120 bp, Artificial Sequence
  ENSG00000189180_30 (sequence is synthesized)
gtacatgtgaagatctaggctcgcctccatgttactccctttctcttcctacctgtggctcatgccatgccatgaagtgcctagggtacatatgtgaacattccagccttcagcataagt

SEQ ID NO: 697912 - DNA, 120 bp, Artificial Sequence
  ENSG00000189180_31 (sequence is synthesized)
ggtagtccaaattttctttaagcagctgctctccaagacagggccctggaaaggcccacacatacagcccagggctgcccagggctgttggactgtcatttcaaggctcattgtccccag

SEQ ID NO: 697913 - DNA, 120 bp, Artificial Sequence
  ENSG00000189180_32 (sequence is synthesized)
acagggatctgggccctcagacttttgagaatatgaagaggagggttgaggctggagcagaaccagaatcaagctggtgtggggcttttattgatagtgtgaagattgtacactatatta

SEQ ID NO: 697914 - DNA, 120 bp, Artificial Sequence
  ENSG00000189180_33 (sequence is synthesized)
catgatcagatcatacaaataatctaagattatacagtctagtgatcctagattacacaagtaatctaagcttccactttaggaaactagaaaaagaagagcaaattaaatccaaagtaa

SEQ ID NO: 697915 - DNA, 120 bp, Artificial Sequence
  ENSG00000189180_34 (sequence is synthesized)
cctgaaaaaacattagagtaaaaatcattgaaattgaaaagagaaaatcgataaaacccaaaactggttccttgaaaaggtcagtaaaattgataaacctctagctagcttaagaacaaa

SEQ ID NO: 697916 - DNA, 120 bp, Artificial Sequence
  ENSG00000189180_35 (sequence is synthesized)
cagaagacaaatattgctaataccaaaaatgaaagaggccatcacagctaatcctatggtcaccaaaaggattagaaagaaacatggacaactctgtccataaatttgataacttagcta

SEQ ID NO: 697917 - DNA, 120 bp, Artificial Sequence
  ENSG00000189180_36 (sequence is synthesized)
aaatggaccaattccttgcaagacgcattctctcaaagctcacacaagatagacctcaataggcatatgtatctattaaataaaccaaagcagtaattaataaccttccaaggccaggta

SEQ ID NO: 697918 - DNA, 120 bp, Artificial Sequence
  ENSG00000189180_37 (sequence is synthesized)
gtactgcagcctgggtgacagaatgagactgcatctcaaaaaataataatgaaactttccaaaacaaagtgccaggaccagctgggttcactgatgtgtttttgagatacttaaggtaga

SEQ ID NO: 697919 - DNA, 120 bp, Artificial Sequence
  ENSG00000189180_38 (sequence is synthesized)
aatgataccaagtctctaccatctctttcagaaaataaaagcagagataacacttcccaactcattttgtgaggccagtattaccctaatagcaaaaccaggcaaagatattacaagaaa

SEQ ID NO: 697920 - DNA, 120 bp, Artificial Sequence
  ENSG00000189180_39 (sequence is synthesized)
ggaaaactacagatcaatatttccattgaacacagatgcagaaatcctcaaaatattagcaaatcaggaatgcaaggcttgttcaacatttgatattcagtgtaatccattgcatgcatt

SEQ ID NO: 697921 - DNA, 120 bp, Artificial Sequence
  ENSG00000189180_40 (sequence is synthesized)
agcagctcaaagatgaaatacgatcatatcaataggtacagaaaaagcatttgacaaaatccaatatccattcatgttaaaacctctcaacacagaaggaatacaggagaacttactcaa

SEQ ID NO: 697922 - DNA, 120 bp, Artificial Sequence
  ENSG00000189180_41 (sequence is synthesized)
gttggtaaagaacatactacaaaaaaccctacagctaacattatccttgatgtttccaactagacactttcctactaagatcaggaacatggcaaggaacaccacaccactgcttttcag

SEQ ID NO: 697923 - DNA, 120 bp, Artificial Sequence
  ENSG00000189180_42 (sequence is synthesized)
cattgtactggaagtgctatataatgcagtgttaaaaaaaaaagaaataaaatgcacatagatttgaaaggatgaaatacaactttgttcacaagtaacatgattgtctttgtagagaat

SEQ ID NO: 697924 - DNA, 120 bp, Artificial Sequence
  ENSG00000189180_43 (sequence is synthesized)
tctaaataacaaaaaccctgctgacattaataagcaattacagcaggattgcaggatacagtcctcaggtagatgataaaaaggaattggacatcaagtcattaaaagacacggagaaac

SEQ ID NO: 697925 - DNA, 120 bp, Artificial Sequence
  ENSG00000189180_44 (sequence is synthesized)
cctaaatgcttattgttaagtgaaaaccaatctgaaaaggctttctattttgtatgattgcaattatatgacattttgggagaggcaaaactattgagccagtgaaaggaccagtggttg

SEQ ID NO: 697926 - DNA, 120 bp, Artificial Sequence
  ENSG00000189180_45 (sequence is synthesized)
ctgagagttgaggggaaaggagggatggcaggtagagaggtgatttttaaggcagtgaaagtactctctagggtactgtaatttgtcaaaacgcagagaatggaaaacagtgaacggaaa

SEQ ID NO: 697927 - DNA, 120 bp, Artificial Sequence
  ENSG00000189180_46 (sequence is synthesized)
acacagagtaaaccctaatgtcaactctggacttcagttaataataatgtatcactgttggctcattaattgtaacaaatgaaccataatgatgcaagatgttaatgattggggagcctg

SEQ ID NO: 697928 - DNA, 120 bp, Artificial Sequence
  ENSG00000189180_47 (sequence is synthesized)
tggaagatgggaggggaaagggttatatgagaattctctatactttttgctcaactttctgtaaccctaaagctactctaaaaaatgaagtgtatcaagtaaataaataaccaaccaacc

SEQ ID NO: 697929 - DNA, 120 bp, Artificial Sequence
  ENSG00000189180_48 (sequence is synthesized)
ggaaacaggaggaagaattcccaagccaaagctttccaggtgagttaatatgtactgcacagattcacatcaggggatttgttgtttcccagtagttaattcagggtttggcaactttgg

SEQ ID NO: 697930 - DNA, 120 bp, Artificial Sequence
  ENSG00000189180_49 (sequence is synthesized)
aagatttttcaagaacatctccatagggatcctaacctctggaagtgatggagaatattgattcctaaatcaaacttccagatactactcacaaaaaattcctcctttttgaatcgtttt

SEQ ID NO: 697931 - DNA, 120 bp, Artificial Sequence
  ENSG00000189180_50 (sequence is synthesized)
ttgaatgtttactattcttacacctgccaatagttcagtctttgcccacctcaactttactgttgtttttcttggttatcatttttctccaagcactttcagtgtcctaccttgcctccc

SEQ ID NO: 697932 - DNA, 120 bp, Artificial Sequence
  ENSG00000189180_51 (sequence is synthesized)
gctgactaaggaacaaggtgatgtaataggaataccatttaatgtggatgcccctgagatgctcatgcccttggattaaacccctgcagtgctggaagaagaggactctgcactgcctgc

SEQ ID NO: 697933 - DNA, 120 bp, Artificial Sequence
  ENSG00000189180_52 (sequence is synthesized)
cacaccaggactggaagatccatggccttcccttcttccaaactaccttcccacaagatggggatggtggtcacatctccaacactagcatgctgtggaagagacatcagcattcttgca

SEQ ID NO: 697934 - DNA, 120 bp, Artificial Sequence
  ENSG00000189180_53 (sequence is synthesized)
ccagggctgaggcttctcgtgtccttggagctgctgtcctcccgaggagtgtccacactgcagccagctcagcctcaggtgtcttctctggttttgaaaccaaatctaagtgggaaaaga

SEQ ID NO: 697935 - DNA, 120 bp, Artificial Sequence
  ENSG00000189180_54 (sequence is synthesized)
agattcaagttttatccgatttagtctacataattttaagtatctatttgagctcaataccaagaatcacttccttctctctcccatctgtgatctccagaggaaaggtccccgggctag

SEQ ID NO: 697936 - DNA, 120 bp, Artificial Sequence
  ENSG00000189180_55 (sequence is synthesized)
gagacactggctggcatcctaaagccagagctggccaaagggtgtgtgtccactcttccttcacctcttccccaccccacacttgtttttgtctcacgctcacttgctctttctgcctcc

SEQ ID NO: 697937 - DNA, 120 bp, Artificial Sequence
  ENSG00000189180_56 (sequence is synthesized)
ctctcactctttaggtctcacaaaggctttggccaaagactgactgactttccttggctctctgtcatctccccatagtcaaaagcatttcataacacacaatccatgtgaagggacctc

SEQ ID NO: 697938 - DNA, 120 bp, Artificial Sequence
  ENSG00000189180_57 (sequence is synthesized)
tgatgaaaatccatttaaagaggagctcactaattatcaatacttactgctgagcctggaatcattcatatatacctcagagttcattcattccagatgcaatactagataaggagactc

SEQ ID NO: 697939 - DNA, 120 bp, Artificial Sequence
  ENSG00000189180_58 (sequence is synthesized)
ctatgaaccaaatatctaactctgaatagatagtgactgtcataatcaaaccctgtggctgcctcctccttactggagggtgtagaggaatgcagttttttgtttgtttatttgtttgtt

SEQ ID NO: 697940 - DNA, 120 bp, Artificial Sequence
  ENSG00000189181_0 (sequence is synthesized)
tcagatcacagatttccctgccaaatggacaatctcacaaaagtgacagaattcctgctgatggagttttctggtatctgggagctgcaggtgctgcacgccgggctgtttctgctgatt

SEQ ID NO: 697941 - DNA, 120 bp, Artificial Sequence
  ENSG00000189181_1 (sequence is synthesized)
tatctggcagtgctggtggggaacctgctcatcattgcagtcatcactctcgatcagcatcttcacacacccatgtacttcttcctgaagaacctctccgttttggatctgtgctacatc

SEQ ID NO: 697942 - DNA, 120 bp, Artificial Sequence
  ENSG00000189181_2 (sequence is synthesized)
tcagtcactgtgcctaaatccatccgtaactccctgactcgcagaagctccatctcttatcttggctgtgtggctcaagtctattttttctctgcctttgcatctgctgagctggccttc

SEQ ID NO: 697943 - DNA, 120 bp, Artificial Sequence
  ENSG00000189181_3 (sequence is synthesized)
cttactgtcatgtcttatgaccgctatgttgccatttgccaccccctccaatacagagccgtgatgacatcaggagggtgctatcagatggcagtcaccacctggctaagctgcttttcc

SEQ ID NO: 697944 - DNA, 120 bp, Artificial Sequence
  ENSG00000189181_4 (sequence is synthesized)
atccagtgtgatccaccagttcttccgtgacatccctcatgtgttggccctggtttcctgtgaggttttctttgtagagtttttgaccctggccctgagctcatgcttggttctgggatg

SEQ ID NO: 697945 - DNA, 120 bp, Artificial Sequence
  ENSG00000189181_5 (sequence is synthesized)
ctttattctcatgatgatctcctatttccaaatcttctcaacggtgctcagaatcccttcaggacagagtcgagcaaaagccttctccacctgctccccccagctcattgtcatcatgct

SEQ ID NO: 697946 - DNA, 120 bp, Artificial Sequence
  ENSG00000189181_6 (sequence is synthesized)
ctttcttaccacagggctctttgctgccttaggaccaattgcaaaagctctgtccattcaggatttagtgattgctctgacatacacagttttgcctcccttcctcaatcccatcatata

SEQ ID NO: 697947 - DNA, 120 bp, Artificial Sequence
  ENSG00000189181_7 (sequence is synthesized)
tagtcttaggaataaggagattaaaacagccatgtggagactctttgtgaagatatattttctgcaaaagtagaacatcctggtctttactatagaagatctgcaacaaaaccccaaaaa

SEQ ID NO: 697948 - DNA, 120 bp, Artificial Sequence
  ENSG00000189182_0 (sequence is synthesized)
aaaggagtcagagctcctttcctctctggtctctgcctccttcctgccaggctctttctcttgcctgcttctctggatgctccagcaaacatgagccaccaatttagttctcagtccgcg

SEQ ID NO: 697949 - DNA, 120 bp, Artificial Sequence
  ENSG00000189182_1 (sequence is synthesized)
tttagttcaatgagcaggcgggtttatagtaccagctcttctgcaggctctggtggtgggagtccggcagtgggttctgtgtgttatgctcgagggaggtgtggtggtggtggatatggg

SEQ ID NO: 697950 - DNA, 120 bp, Artificial Sequence
  ENSG00000189182_2 (sequence is synthesized)
atccatggaagggggtttggctctaggagcctctacaatctgggtggcagtagaagcatctccattaatctaatggggaggagcaccagtggtttctgccagggtgggggagtaggggga

SEQ ID NO: 697951 - DNA, 120 bp, Artificial Sequence
  ENSG00000189182_3 (sequence is synthesized)
tttggagggggcagaggctttggggttggcagcaccggggctggtggctttggaggaggtggttttgggggtgctggatttgggactagcaattttgggcttgggggctttggtccttat

SEQ ID NO: 697952 - DNA, 120 bp, Artificial Sequence
  ENSG00000189182_4 (sequence is synthesized)
tgtcctcctgggggcatccaagaggtgaccattaaccagagcctcctagagccacttcacctggaggtggaccctgaaattcagaggatcaagacccaggagcgggagcagattatggtt

SEQ ID NO: 697953 - DNA, 120 bp, Artificial Sequence
  ENSG00000189182_5 (sequence is synthesized)
ctcaacaacaagtttgcctccttcattgacaaggtgcgattcctggagcagcagaaccaggtgctacaaacaaaatgggagttgctgcagcaggtgaacacctcaactggaaccaacaac

SEQ ID NO: 697954 - DNA, 120 bp, Artificial Sequence
  ENSG00000189182_6 (sequence is synthesized)
ctggagcccctcttggagaactacatcggtgacctgcggaggcaggtggatttgctcagtgcggagcagatgcgccagaacgcggaggtcaggagcatgcaggatgtcgtggaggactac

SEQ ID NO: 697955 - DNA, 120 bp, Artificial Sequence
  ENSG00000189182_7 (sequence is synthesized)
aagagcaagtatgaggatgaaatcaacaagaggactggcagcgagaatgactttgtcgtcctgaagaaggatgtggatgctgcttatgtgagcaaagtggacctggagtccagggtggac

SEQ ID NO: 697956 - DNA, 120 bp, Artificial Sequence
  ENSG00000189182_8 (sequence is synthesized)
actctgactggggaggtcaatttcttgaaatatttatttttgacggagctgtctcaggtgcagactcacatcagcgacaccaacgtcatcctgtccatggacaataaccgttccctggac

SEQ ID NO: 697957 - DNA, 120 bp, Artificial Sequence
  ENSG00000189182_9 (sequence is synthesized)
ctggacagcatcatcgatgcagtgcggacccagtatgaactgattgcacagaggagcaaggacgaggccgaagccctgtaccagaccaagtaccaggagctccagatcacggcagggaga

SEQ ID NO: 697958 - DNA, 120 bp, Artificial Sequence
  ENSG00000189182_10 (sequence is synthesized)
catggagacgacctgaagaacagcaagatggagattgcagagctcaaccgcaccgtccagaggctgcaggcagagatcagcaacgtgaagaagcagattgaacagatgcagtcactcatt

SEQ ID NO: 697959 - DNA, 120 bp, Artificial Sequence
  ENSG00000189182_11 (sequence is synthesized)
tcggatgctgaggagagaggcgagcaggccctccaggatgcgtggcagaagctgcaggacctggaggaggccctgcagcagtccaaggaggagctggcccggctgctgcgtgactaccag

SEQ ID NO: 697960 - DNA, 120 bp, Artificial Sequence
  ENSG00000189182_12 (sequence is synthesized)
gccatgctgggggtcaagctgtccctggatgtggagatcgccacctaccgccagctgctggagggcgaggagagcaggatgtcaggagagctgcagagccatgtgagcatctccgtgcag

SEQ ID NO: 697961 - DNA, 120 bp, Artificial Sequence
  ENSG00000189182_13 (sequence is synthesized)
aacagccaggtgagcgtcaacggcggcgcgggaggcggcggcagctacggctcaggaggctacggcggcggcagcggtgggggctatggcggcggaagaagctaccgcggaggcggggca

SEQ ID NO: 697962 - DNA, 120 bp, Artificial Sequence
  ENSG00000189182_14 (sequence is synthesized)
aggagtggaggcggttatggcagcggctgcggcggcggtggcgggagctacggagggagcggcagaagcggccgcggatcctcgcgcgtgcagatcatccagacctccaccaacacctcc

SEQ ID NO: 697963 - DNA, 120 bp, Artificial Sequence
  ENSG00000189182_15 (sequence is synthesized)
cacaggcggatcttggagtagaggcctcgtttctgccacacatcacgcctgcccctcaccgccctctcctcaaactcctcccctccacgcccttcctgatcccctctcattcacttttct

SEQ ID NO: 697964 - DNA, 120 bp, Artificial Sequence
  ENSG00000189182_16 (sequence is synthesized)
taatgggtctcagcaattttgccaataaattcgactctaatgggggaagcagggtggataagtccaaacagcagatctctctttggagggcactggcttgcagtcagattcacagctagg

SEQ ID NO: 697965 - DNA, 120 bp, Artificial Sequence
  ENSG00000189182_17 (sequence is synthesized)
cacattctcactcagaccccgctctgctggccctgctgctgttcctgctcccacctttttggaagatcggtagcccagggtgagcacaaacattccagttagaggcagaggctgcgtgag

SEQ ID NO: 697966 - DNA, 120 bp, Artificial Sequence
  ENSG00000189182_18 (sequence is synthesized)
ttggcaaggtagggagaagtcattgttatcattcctctgcctccaagtagaatgcccttatgccccagttcaagccactgcagctaagtattaatccccagtgctaaaagataccaggca

SEQ ID NO: 697967 - DNA, 120 bp, Artificial Sequence
  ENSG00000189182_19 (sequence is synthesized)
tctagtttagcaatggagggaaacagaaacagcctgtagagagcatcgacaaggcgcataatggagagttggtatctcaaccccaagctccctttgctgtacctgggctgctctgtgaac

SEQ ID NO: 697968 - DNA, 120 bp, Artificial Sequence
  ENSG00000189182_20 (sequence is synthesized)
aagaatccacgcccccctgccctgctggggaccacataatgatccctttgggggaagttgctgattgcagggcaagctagcttggtaaggaaaacctctgcaccagcggcctattcctgc

SEQ ID NO: 697969 - DNA, 120 bp, Artificial Sequence
  ENSG00000189182_21 (sequence is synthesized)
ctcttggtccatagcctcatacactcatgttgatggatagtatagatttgctgcccacaccagatatctgtaaggcatcactgtcctgattctgaacctctgtttcaggaagcattctcc

SEQ ID NO: 697970 - DNA, 120 bp, Artificial Sequence
  ENSG00000189182_22 (sequence is synthesized)
cctgtgtaaacaactcaaggtggaagtatttcagagggcatagggtcatgaatccttacccaaaggaagcctgttttagcagtggatgcaggagttgatgaacagacaagcaagttctgc

SEQ ID NO: 697971 - DNA, 120 bp, Artificial Sequence
  ENSG00000189182_23 (sequence is synthesized)
ttctgtcctgtttcctcctgacagctccattcttttgaagcctgacccttcctaagctctgcatcataaccactctgagaattgccccattgggtgggcatgtgaagcccagctctgttc

SEQ ID NO: 697972 - DNA, 120 bp, Artificial Sequence
  ENSG00000189182_24 (sequence is synthesized)
catccaggtgcctcgggcctgaggagtctgaggatctgacttgggtcttggaagggttccaaccccaagtcagtcaggaagctgcccatttttttgcaaggcattttaatgccctttccc

SEQ ID NO: 697973 - DNA, 120 bp, Artificial Sequence
  ENSG00000189182_25 (sequence is synthesized)
agacctctctagtccctcctgccttctgttctctgtagctgtgagccctttgtgagaatatgactcttaattttgaatcttatgtaagaggcttgagatgtgctggagagggcaggaaga

SEQ ID NO: 697974 - DNA, 120 bp, Artificial Sequence
  ENSG00000189182_26 (sequence is synthesized)
ggaaagtatcaggccttgagagagggaatgtagctttgcttctatgatctggagtcaccttcacttgctagctgagtcctaacacaacttccaagtccatgattctcttggggcattgga

SEQ ID NO: 697975 - DNA, 120 bp, Artificial Sequence
  ENSG00000189182_27 (sequence is synthesized)
tgggctcagtgtgggtctcttaggctgttcttgtgacttcatcatttcctggttcaaagttgtactgtcaaggggcagcatttctggtatttctataataaatttttctgtgatctcaaa

SEQ ID NO: 697976 - DNA, 120 bp, Artificial Sequence
  ENSG00000189182_28 (sequence is synthesized)
ctccaccacccggccctcttttgcctgtgtctaacttgggggtacgtgctctgggccagatgctgtgttagaagtttatgttatgggtatctccattctacagatgggaaaactgaggca

SEQ ID NO: 697977 - DNA, 120 bp, Artificial Sequence
  ENSG00000189182_29 (sequence is synthesized)
ctgaggggttaaattacttgcttcattacctagctagtcaatggtacagccaagactcaaaagtgagtccaagtgactccttaactagagtccattctactgcctcggagtactcatgtg

SEQ ID NO: 697978 - DNA, 120 bp, Artificial Sequence
  ENSG00000189182_30 (sequence is synthesized)
gtttcaaggaagaggcatgcctgccaaggagcccagctcactatggtggccaagtcagagcaaggcagagtggcagctgcaggagaagtgtgatggggagatggtatctgaacgctccag

SEQ ID NO: 697979 - DNA, 120 bp, Artificial Sequence
  ENSG00000189182_31 (sequence is synthesized)
acacaacaattccaagagcttttcccaagactacctggcccaggcttctggcttcccccgagagccttgagggagcagcagaggaaaactgaggcccccagaggagaatggaaggagtca

SEQ ID NO: 697980 - DNA, 120 bp, Artificial Sequence
  ENSG00000189184_0 (sequence is synthesized)
gcaatcacgggtgtttagtctgcagccgagcagctaaagggagaaagaatcgctcaggaaagacacactgcagactccaccggcaccctgcaatagatggattccgactacacaagggag

SEQ ID NO: 697981 - DNA, 120 bp, Artificial Sequence
  ENSG00000189184_1 (sequence is synthesized)
aaaacgcggaggtgacactctcctgcctggaaagaggacgaacgaccaaacaaacgcaaggactggactccatgccgaaggtatctggaagtcgtgacacggtgtgtataaaacaaaagt

SEQ ID NO: 697982 - DNA, 120 bp, Artificial Sequence
  ENSG00000189184_2 (sequence is synthesized)
ttgcgagctgttaattgctgtgctgtgttattaagagacgctttcaagtttcaagtaccaaatgtagctttacgttgccaaaggaagttgaggcaattgctttgctgttttaacttgctc

SEQ ID NO: 697983 - DNA, 120 bp, Artificial Sequence
  ENSG00000189184_3 (sequence is synthesized)
tgtgagggaaatctcataaactgaccaatgcaccaaatgaatgctaaaatgcactttaggtttgtttttgcacttctgatagtatctttcaaccacgatgtactgggcaagaatttgaaa

SEQ ID NO: 697984 - DNA, 120 bp, Artificial Sequence
  ENSG00000189184_4 (sequence is synthesized)
tacaggatttatgaggaacagagggttggatcagtaattgcaagactatcagaggatgtggctgatgttttattgaagcttcctaatccttctactgttcgatttcgagccatgcagagg

SEQ ID NO: 697985 - DNA, 120 bp, Artificial Sequence
  ENSG00000189184_5 (sequence is synthesized)
ggaaattctcctctacttgtagtaaacgaggataatggggaaatcagcataggggctacaattgaccgtgaacaactgtgccagaaaaacttgaactgttccatagagtttgatgtgatc

SEQ ID NO: 697986 - DNA, 120 bp, Artificial Sequence
  ENSG00000189184_6 (sequence is synthesized)
actctacccacagagcatctgcagcttttccatattgaagttgaagtgctggatattaatgacaattctccccagttttcaagatctctcatacctattgagatatctgagagtgcagca

SEQ ID NO: 697987 - DNA, 120 bp, Artificial Sequence
  ENSG00000189184_7 (sequence is synthesized)
gttgggactcgcattcccctggacagtgcatttgatccagatgttggggaaaattccctccacacatactcgctctctgccaatgatttttttaatatcgaggttcggaccaggactgat

SEQ ID NO: 697988 - DNA, 120 bp, Artificial Sequence
  ENSG00000189184_8 (sequence is synthesized)
ggagccaagtatgcagaactcatagtggtcagagagttagatcgggagctgaagtcaagctacgagcttcagctcactgcctcagacatgggagtacctcagaggtctggctcatccata

SEQ ID NO: 697989 - DNA, 120 bp, Artificial Sequence
  ENSG00000189184_9 (sequence is synthesized)
ctaaaaataagcatttcagactccaatgacaacagccctgcttttgagcagcaatcttatataatacaactcttagaaaactccccggttggcactttgctcttagatctgaatgccacg

SEQ ID NO: 697990 - DNA, 120 bp, Artificial Sequence
  ENSG00000189184_10 (sequence is synthesized)
gatccagatgagggcgctaatgggaaaattgtatattccttcagcagtcatgtgtctcccaaaattatggagacttttaaaattgattctgaaagaggacatttgactcttttcaagcaa

SEQ ID NO: 697991 - DNA, 120 bp, Artificial Sequence
  ENSG00000189184_11 (sequence is synthesized)
gtggattatgaaatcaccaaatcctatgagattgatgttcaggctcaagatttgggtccaaattcaatcccagcccattgcaaaattataattaaggttgtggatgttaatgacaataaa

SEQ ID NO: 697992 - DNA, 120 bp, Artificial Sequence
  ENSG00000189184_12 (sequence is synthesized)
cctgaaattaacatcaacctcatgtcccctggaaaagaagaaatatcttatatttttgaaggggatcctattgatacatttgttgctttggtcagagttcaggacaaggattctgggctg

SEQ ID NO: 697993 - DNA, 120 bp, Artificial Sequence
  ENSG00000189184_13 (sequence is synthesized)
aatggagaaatagtttgtaagcttcatggacatggtcactttaaacttcagaagacatatgaaaacaattatttaatcttaactaatgccacactggatagagaaaagagatctgagtat

SEQ ID NO: 697994 - DNA, 120 bp, Artificial Sequence
  ENSG00000189184_14 (sequence is synthesized)
agtttgactgtaatcgctgaggacagggggacacccagtctctctacagtgaaacattttacagttcaaatcaatgatatcaatgacaatccaccccacttccagagaagccgatatgaa

SEQ ID NO: 697995 - DNA, 120 bp, Artificial Sequence
  ENSG00000189184_15 (sequence is synthesized)
tttgtaatttcagaaaataactcaccaggggcatatatcaccactgttacagccacagatcctgatcttggagaaaatgggcaagtgacatacaccatcttggagagttttattctagga

SEQ ID NO: 697996 - DNA, 120 bp, Artificial Sequence
  ENSG00000189184_16 (sequence is synthesized)
agttccataactacatatgtaaccattgacccatctaatggagccatctatgccctcagaatctttgatcatgaagaagtgagtcagatcacttttgtggtagaagcaagagatggagga

SEQ ID NO: 697997 - DNA, 120 bp, Artificial Sequence
  ENSG00000189184_17 (sequence is synthesized)
agcccgaagcaactggtaagcaataccacagttgtgctcaccatcattgacgaaaatgacaacgttcctgtggttatagggcctgcattgcgtaataatacggcagaaatcaccattccc

SEQ ID NO: 697998 - DNA, 120 bp, Artificial Sequence
  ENSG00000189184_18 (sequence is synthesized)
aaaggggctgaaagtggctttcatgtcacaagaataagggcaattgacagagactctggtgtgaatgctgaactcagctgcgccatagtagcaggtaatgaggagaatatcttcataatt

SEQ ID NO: 697999 - DNA, 120 bp, Artificial Sequence
  ENSG00000189184_19 (sequence is synthesized)
gatccacgatcatgtgacatccataccaacgttagcatggattctgttccctacacagaatgggagctgtcagttatcattcaggacaaaggcaatcctcagctacataccaaagtcctt

SEQ ID NO: 698000 - DNA, 120 bp, Artificial Sequence
  ENSG00000189184_20 (sequence is synthesized)
ctgaagtgcatgatctttgaatatgcagagtcggtgacaagtacagcaatgacttcagtaagccaggcatccttggatgtctccatgataataattatttccttaggagcaatttgtgca

SEQ ID NO: 698001 - DNA, 120 bp, Artificial Sequence
  ENSG00000189184_21 (sequence is synthesized)
gtgttgctggttattatggtgctatttgcaactaggtgtaaccgcgagaagaaagacactagatcctataactgcagggtggccgaatcaacttaccagcaccacccaaaaaggccatcc

SEQ ID NO: 698002 - DNA, 120 bp, Artificial Sequence
  ENSG00000189184_22 (sequence is synthesized)
cggcagattcacaaaggggacatcacattggtgcctaccataaatggcactctgcccatcagatctcatcacagatcgtctccatcttcatctcctaccttagaaagagggcagatgggc

SEQ ID NO: 698003 - DNA, 120 bp, Artificial Sequence
  ENSG00000189184_23 (sequence is synthesized)
agccggcagagtcacaacagtcaccagtcactcaacagtttggtgacaatctcatcaaaccacgtgccagagaatttctcattagaactcacccacgccactcctgctgttgagcaggtc

SEQ ID NO: 698004 - DNA, 120 bp, Artificial Sequence
  ENSG00000189184_24 (sequence is synthesized)
ggggcaatatcagccaagaccaagttttcgaggaaacaaatattccaggagctacagatatgcccttcaagacatggacaaatttagcttgaaagacagtggccgtggtgacagtgaggc

SEQ ID NO: 698005 - DNA, 120 bp, Artificial Sequence
  ENSG00000189184_25 (sequence is synthesized)
aggagacagtgattatgatttggggcgagattctccaatagataggctgttgggtgaaggattcagcgacctgtttctcacagatggaagaattccagcagctatgagactctgcacgga

SEQ ID NO: 698006 - DNA, 120 bp, Artificial Sequence
  ENSG00000189184_26 (sequence is synthesized)
ggagtgcagggtcctgggacactctgaccagtgctggatgccaccactgccctcaccgtcttctgattataggagtaacatgttcattccaggggaagaattcccaacgcaaccccagca

SEQ ID NO: 698007 - DNA, 120 bp, Artificial Sequence
  ENSG00000189184_27 (sequence is synthesized)
gcagcatccacatcagagtcttgaggatgacgctcagcctgcagattccggtgaaaagaagaagagtttttccacctttggaaaggactccccaaacgatgaggacactggggataccag

SEQ ID NO: 698008 - DNA, 120 bp, Artificial Sequence
  ENSG00000189184_28 (sequence is synthesized)
cacatcatctctgctctcggaaatgagcagtgtgttccagcgtctcttaccgccttccctggacacctattctgaatgcagtgaggtggatcggtccaactccctggagcgcaggaaggg

SEQ ID NO: 698009 - DNA, 120 bp, Artificial Sequence
  ENSG00000189184_29 (sequence is synthesized)
acccttgccagccaaaactgtgggttacccacagggggtagcggcatgggcagccagtacgcattttcaaaatcccaccaccaactgtgggccgccacttggaactcactccagtgtgca

SEQ ID NO: 698010 - DNA, 120 bp, Artificial Sequence
  ENSG00000189184_30 (sequence is synthesized)
gccttcttcaaaatggctgccagccatggaggagatccctgaaaattatgaggaagatgattttgacaatgtgctcaaccacctcaatgatgggaaacacgaactcatggatgccagtga

SEQ ID NO: 698011 - DNA, 120 bp, Artificial Sequence
  ENSG00000189184_31 (sequence is synthesized)
actggtggcagagattaacaaactgcttcaagatgtccgccagagctaggagattttagcgaagcatttttgtttccatgtatatggaaatagggaacaacaacaacaacaaaaaaccct

SEQ ID NO: 698012 - DNA, 120 bp, Artificial Sequence
  ENSG00000189184_32 (sequence is synthesized)
gaaagaactggcattgccaaatagttgcatttatcataaatgtgtctgtgtatattgaatattaaatactgtattttcgtatgtacacaatgcaagtgtgattattttaatctgtatttt

SEQ ID NO: 698013 - DNA, 120 bp, Artificial Sequence
  ENSG00000189184_33 (sequence is synthesized)
aaaaatacatttgtaccttatatttatgtgtaatttaacaaacaaattttatttttttactcccatgacagacatgtttttcctagtcgtgtagaaactagccactgttcaaatctgata

SEQ ID NO: 698014 - DNA, 120 bp, Artificial Sequence
  ENSG00000189184_34 (sequence is synthesized)
cactattcaaccacaaagtgtaaaggcactgcttagattagttttgttggggaagaattattatgttgtatgaacaaccccactgaagcattatacaattcttaattccattaagtgatc

SEQ ID NO: 698015 - DNA, 120 bp, Artificial Sequence
  ENSG00000189184_35 (sequence is synthesized)
ccactttttttcaataactttttagaaattaagaatcattaaaattgttaagctattttattgttattttctctactttctactagccccaatagttgaactcttataggaaaatcgaaa

SEQ ID NO: 698016 - DNA, 120 bp, Artificial Sequence
  ENSG00000189184_36 (sequence is synthesized)
gataaagtgaaagtttatttcaggactgagaaatatcttgaaggttatttattagatgactatctcaaatgaactttttatagacaatgatgaaaacagaattaaagtcaatgtttcctg

SEQ ID NO: 698017 - DNA, 120 bp, Artificial Sequence
  ENSG00000189184_37 (sequence is synthesized)
actcccaggcccctactattccaggccatcacactggcctgttccggagaatatttctctcacaatattattatctacttataattatggtaaacaataaattttattccatccttgtag

SEQ ID NO: 698018 - DNA, 120 bp, Artificial Sequence
  ENSG00000189184_38 (sequence is synthesized)
tatgaaacatgctccaaggaaatggaatctgtcctttaaatggataacagtatgtgttctaatggcataaaatattactggataaaaacagttgtgtcagtgtctctcctaaggtagtaa

SEQ ID NO: 698019 - DNA, 120 bp, Artificial Sequence
  ENSG00000189184_39 (sequence is synthesized)
atataattgacttattctgaacccattctattttgaatctcccctttcctctcacaatacttgaacattttaatcttttggaatattgtctttctttgttataactattcatttttagct

SEQ ID NO: 698020 - DNA, 120 bp, Artificial Sequence
  ENSG00000189184_40 (sequence is synthesized)
tttgtctccagtgcatgatctcatatttttgcttttatttttagtataagaacatttataaaatcatatttttgttactgcaattgttttatttgttgtgtggcaaatgagaaatccttt

SEQ ID NO: 698021 - DNA, 120 bp, Artificial Sequence
  ENSG00000189184_41 (sequence is synthesized)
atttattgtgctgtgatctctctgtgtggaatgccttggtgagagagatgcttattatgactattatcatttctgaccaagcttctattaatgttatttctaataatacactatcttgat

SEQ ID NO: 698022 - DNA, 120 bp, Artificial Sequence
  ENSG00000189184_42 (sequence is synthesized)
tgtactctccagaaaatttttctgtcagtgaaaataaaagaaaaattaaagtaaagctaaggaactgtctataagtcagagtcctgttcctacatatttgttcaaaagcttggcatgcag

SEQ ID NO: 698023 - DNA, 120 bp, Artificial Sequence
  ENSG00000189184_43 (sequence is synthesized)
caggcccttcctgagcgggtgattcagtgttgagtttcaaataataaacaggcagcattcagttggctgggcgaacaagaaaaacacaatggaaaaggaatgagtttgagacttgtaatg

SEQ ID NO: 698024 - DNA, 120 bp, Artificial Sequence
  ENSG00000189184_44 (sequence is synthesized)
ggaatgaaagtagtaagccatattccagctaaataagttaaatgcatttggggaataaagaaaaaagagtaagcaagcaataattgcttgaatatttttcaaattacaacaaaaaaaaat

SEQ ID NO: 698025 - DNA, 120 bp, Artificial Sequence
  ENSG00000189184_45 (sequence is synthesized)
actttcttaggacattttgtattaaattgtgcaggataaaaaggtatccttacaatgtttccaggaggcaagaatattatcgtccctggcttgctagtcaggaattgaaacactgggaaa

SEQ ID NO: 698026 - DNA, 120 bp, Artificial Sequence
  ENSG00000189184_46 (sequence is synthesized)
gttaagtaactgaaaagtgactaaaattcagatatttgaattctcaaatgagtaccacattaaatagaatatattacctctttcaacaggcacattttcctttataggagagattgcaat

SEQ ID NO: 698027 - DNA, 120 bp, Artificial Sequence
  ENSG00000189184_47 (sequence is synthesized)
tacaagtgaaatttcagtatatttttcagtagattacacacacaaacgctaaccatatttaaatgcattctgcctttcaacttcacttcctttcagtatatattaccattaagaaaaaga

SEQ ID NO: 698028 - DNA, 120 bp, Artificial Sequence
  ENSG00000189184_48 (sequence is synthesized)
cttttatatcctcactgttcttaatttaaagcaccagcagtaatatgggaagctatgctgaaaaccgctattttgaataatgtgaaataaataaaatgcaatatttcattcaacacaaaa

SEQ ID NO: 698029 - DNA, 120 bp, Artificial Sequence
  ENSG00000189184_49 (sequence is synthesized)
aggaattgtgtttactagttcttaaatgttttcattaataagtaacaatactaatactgtgcaaattaagtaggatacaagttacattgtgaatatgtagcaaagatgcacactttagca

SEQ ID NO: 698030 - DNA, 120 bp, Artificial Sequence
  ENSG00000189184_50 (sequence is synthesized)
tactgtttttagttttccttaagtaaataacttcatataatatgtgtaatattgaaaaataaatgtgaaggtcacaaaggactatgtaattagagtccccttgcttcccagattaaaata

SEQ ID NO: 698031 - DNA, 120 bp, Artificial Sequence
  ENSG00000189184_51 (sequence is synthesized)
atgggaagccaaaaagtagagacttgctttattttcaaggttatagtctttactgaacaaataaaaaaactgaggccttcagacttctatttcaatgcatgctatgtttgtccaagtttg

SEQ ID NO: 698032 - DNA, 120 bp, Artificial Sequence
  ENSG00000189184_52 (sequence is synthesized)
attttccatgtatttttacaggtggtcactttgtctgaattataaagaaaataaatcagttatttgaaagggagtcttctttcacaaagtaaaagtcagttgtattaggtcatccaaatc

SEQ ID NO: 698033 - DNA, 120 bp, Artificial Sequence
  ENSG00000189184_53 (sequence is synthesized)
tctctgagatatattttagttatagttggtagctggctgcgtggtccgccacagtccagcatttgcaaatcttttaaatagagagaatatattcaattacttagttgaaatagcaagcaa

SEQ ID NO: 698034 - DNA, 120 bp, Artificial Sequence
  ENSG00000189184_54 (sequence is synthesized)
attgcaatgttaggtgttagtgttcaggaattgtgtttactagttcttaaatgttttcattaataagtaacaatactaatactgtgcaaattaagtaggatacaagttacattgtctctc

SEQ ID NO: 698035 - DNA, 120 bp, Artificial Sequence
  ENSG00000189186_0 (sequence is synthesized)
tttagaagacgtcttgcactgttcaaatgcagaggaaggcgaatgactcgagtctatggttttggtatactgagcctggggctactggtgtcagcctggtggtagtgcagctcatctgat

SEQ ID NO: 698036 - DNA, 120 bp, Artificial Sequence
  ENSG00000189186_1 (sequence is synthesized)
gcctggggctgcaggatcctagttggttcctgtgacagaccttgggaagctcaatctcagatgtgttttcttaattgaagaaaatcatatcacatgtgaactttctgaccatactgtgga

SEQ ID NO: 698037 - DNA, 120 bp, Artificial Sequence
  ENSG00000189186_2 (sequence is synthesized)
gcggtgctaataaggaggaagctgcactgttgcagaggtccattaactctttcaggacggtgtggaatcagtggggaaatctctaattgctactgacacagagcttttaggggcctggcc

SEQ ID NO: 698038 - DNA, 120 bp, Artificial Sequence
  ENSG00000189186_3 (sequence is synthesized)
tttgcagttccagatctactacagcaaacatcgttcaagatgtcccaccaagaaggcagcacagacggcttaccagacttagggactgaaagcctgttcagcagcccagaggagcagtct

SEQ ID NO: 698039 - DNA, 120 bp, Artificial Sequence
  ENSG00000189186_4 (sequence is synthesized)
ggagccgtggcggcgacagaggcctcctcagacattgacatagcgacctcagagctgagtgtgacagtgaccggagatggcagtgatagcagggatggtggattccccaacgatgccagc

SEQ ID NO: 698040 - DNA, 120 bp, Artificial Sequence
  ENSG00000189186_5 (sequence is synthesized)
acagaaaatcgaagctcagaccaagaaagcgcaagtgaagacatcgaacttgagagcttggaggactttgagcatttcctcatgagtggtgaaagtttattccattaccctttagtggga

SEQ ID NO: 698041 - DNA, 120 bp, Artificial Sequence
  ENSG00000189186_6 (sequence is synthesized)
catgagtggtgaaagtttattccattaccctttagtgggagaggaggagacagaaagggaggaggaagacgaagagatacaagaggagggaggggaggaggaggaagaggaggaggagga

SEQ ID NO: 698042 - DNA, 120 bp, Artificial Sequence
  ENSG00000189186_7 (sequence is synthesized)
cagcctcgggcgggtccacaaggcagtggcggcaaccatgagcagtattcgttagaggaggatcaggcgctggaggagtgggtttcctcagagacatctgccctgccccgacctcgctgg

SEQ ID NO: 698043 - DNA, 120 bp, Artificial Sequence
  ENSG00000189186_8 (sequence is synthesized)
caggtcgttactgctcttcaccagcggcagctgggttcacgtccccgctttgtatatgaggcctgtggggcaagagcctttgtgcagcgtttccgcctgcaatatcgtcttgcagaccat

SEQ ID NO: 698044 - DNA, 120 bp, Artificial Sequence
  ENSG00000189186_9 (sequence is synthesized)
actgtacactttaaccagcgtggcacccggctggccagtagcggtgatgacctaaaggtgatagtgtgggactgggtgcggcagaggccagtactgaactttgaaagtggtcacacaaat

SEQ ID NO: 698045 - DNA, 120 bp, Artificial Sequence
  ENSG00000189186_10 (sequence is synthesized)
aatgtcttccaggccaagttccttcctaactgtggtgattccactctggccatgtgtgcccgtgatgggcaggtacgggtagcagagttaattaatgcatcatatttcaacaatactaag

SEQ ID NO: 698046 - DNA, 120 bp, Artificial Sequence
  ENSG00000189186_11 (sequence is synthesized)
tgtgtggcccagcacaggggacctgcccacaagttggctctggagcctgactctccttataagttcctcacttcaggtgaagatgctgttgtcttcaccattgacctcagacaagaccgg

SEQ ID NO: 698047 - DNA, 120 bp, Artificial Sequence
  ENSG00000189186_12 (sequence is synthesized)
ccagcttcaaaagttgtggtaacaagagaaaatgataagaaagtgggactgtatacaattactgtgaatcccgccaatacctaccaatttgcagtgggtggacaagatcagtttgtaagg

SEQ ID NO: 698048 - DNA, 120 bp, Artificial Sequence
  ENSG00000189186_13 (sequence is synthesized)
atttatgaccagaggaaaattgataagaaagaaaacaatggcgtgctcaagaaattcactcctcatcatctggttaattgtgatttcccaacaaacatcacctgcgttgtgtacagccac

SEQ ID NO: 698049 - DNA, 120 bp, Artificial Sequence
  ENSG00000189186_14 (sequence is synthesized)
gatggcacagagctgctagccagctacaatgatgacgatatttacctcttcaactcctctcacagtgatggtgctcaatacagtaagagatttaagggacacagaaataataccacagtc

SEQ ID NO: 698050 - DNA, 120 bp, Artificial Sequence
  ENSG00000189186_15 (sequence is synthesized)
aaaggtgttaatttctatggccccaggagtgagtttgtagtgagcggtagtgattgcgggcacatcttcttctgggagaaatcatcctgccaaatcatccagttcctaaaggggagcaga

SEQ ID NO: 698051 - DNA, 120 bp, Artificial Sequence
  ENSG00000189186_16 (sequence is synthesized)
gaaggtacaataaactgtcttgaaccccacccttacctacctgtgttggcgtgcagtggcctagatcatgatgtcaagatctggacacccacagctaaagctgccactgagcttactggg

SEQ ID NO: 698052 - DNA, 120 bp, Artificial Sequence
  ENSG00000189186_17 (sequence is synthesized)
ttaaagaaggtgattaagaagaacaagtgggaacgagatgaagacagcttgcaccatggcagcctgtttgaccagtacatgctttggttcctcctgcgtcacgtgacgcagagaggtcgt

SEQ ID NO: 698053 - DNA, 120 bp, Artificial Sequence
  ENSG00000189186_18 (sequence is synthesized)
caccaggactggagaagtggtgaagctgaatttccagatgaagaatcggatgagtcttccagcacttcagagacatctgaggaggaggtccaagaccgagtgcagtgcatgccatcctga

SEQ ID NO: 698054 - DNA, 120 bp, Artificial Sequence
  ENSG00000189186_19 (sequence is synthesized)
tgtgacagaccttgggaagctcaatctcaggtaaagcctggagtctggggtcataggggcctgcccagtactgggttttaatggggcacgtccagtgttggacctcacagcaaagtgctc

SEQ ID NO: 698055 - DNA, 120 bp, Artificial Sequence
  ENSG00000189186_20 (sequence is synthesized)
acttccctcttcttccctcaagcagaaagtttctccctccatgttgcgctgccggaggttgagggaagcttttcttaattgtgtcttttaaaaatgtatgtgctatacccaggtgctgta

SEQ ID NO: 698056 - DNA, 120 bp, Artificial Sequence
  ENSG00000189186_21 (sequence is synthesized)
atctcttccttggtttcccaatctcttgtaaaggtatttttgtgcatgaataattgttcaaatggaagtttttttgcagaaacaagtgcaggaaagtcctattttgccattttgctgatg

SEQ ID NO: 698057 - DNA, 120 bp, Artificial Sequence
  ENSG00000189186_22 (sequence is synthesized)
tctctccccagtatggtccatttaaaacagaaatcacgtcatgtctctgctcaaaaccctccagcagctccattttattcagaacaggtcaaggtttaccatggcctgcaagaccctaca

SEQ ID NO: 698058 - DNA, 120 bp, Artificial Sequence
  ENSG00000189186_23 (sequence is synthesized)
tggttttcatcccctaattctctgatttcatcttttgtgtactccttgttcactctgtcccaggcacattggctgttgctcacaaacacgaggcattttagggtctttgcacttgtgtct

SEQ ID NO: 698059 - DNA, 120 bp, Artificial Sequence
  ENSG00000189186_24 (sequence is synthesized)
tgcctgagggtctttgcactagctgtttcctctgcctagaacatccttacacaagagtattgtgtacttcccttgtgtctgtctttctcctatcctttgtgtctttgctcaagtcccacc

SEQ ID NO: 698060 - DNA, 120 bp, Artificial Sequence
  ENSG00000189186_25 (sequence is synthesized)
tccccaaagatgcctactcctgaccactgtatttaatactgtaccttgttctcagcatagccagctctcctgatttccctaactctgctctatttggtttcttttttttactacagcaat

SEQ ID NO: 698061 - DNA, 120 bp, Artificial Sequence
  ENSG00000189186_26 (sequence is synthesized)
ttatttatttactgtatgtatttttcagtgtctaccttatcttagtagaatgtcaactccaggaaggcagtaaattttgcctagttttttcactgatatatcccaaacaccttgaaggtg

SEQ ID NO: 698062 - DNA, 120 bp, Artificial Sequence
  ENSG00000189186_27 (sequence is synthesized)
tcctaacatacaataaacactttataaaagtatattgaaaacattagccaatgtttgttaatgaagtccgtatatctatgatgtaaaagtgtatatgtatgcatatgcatatgtatgtat

SEQ ID NO: 698063 - DNA, 120 bp, Artificial Sequence
  ENSG00000189186_28 (sequence is synthesized)
agaatggttttaatgagttaaacttctgtgagtaaacatacttgattgttagtgtaacatgaaaattgcaaagtcagaattttctaaatgaaaggtcataaagcttctttagtaaatgtt

SEQ ID NO: 698064 - DNA, 120 bp, Artificial Sequence
  ENSG00000189186_29 (sequence is synthesized)
aatttgtttcaaagtattttaatagtgatataaaatcctagatgtgttcaattgggttgagataatgatattggagaaaaattataattttcttgatgcccaagcccttccatctttaat

SEQ ID NO: 698065 - DNA, 120 bp, Artificial Sequence
  ENSG00000189186_30 (sequence is synthesized)
tttaatacttacggcacttcattaaaatgcatgctgtatttaattttccaggaaattgtacagcataaaagaagaatgtatattcaaagcaatttccagtcaaactagttgaaactttta

SEQ ID NO: 698066 - DNA, 120 bp, Artificial Sequence
  ENSG00000189186_31 (sequence is synthesized)
gaatataagccaatagagcctgtgtcttttctagatgtgaggctgttcttggcacatttgcaggggtcagtgtagcttctgagctacctttaacccttgctcggtgcacctatttcctaa

SEQ ID NO: 698067 - DNA, 120 bp, Artificial Sequence
  ENSG00000189186_32 (sequence is synthesized)
gacctttatcacattctgtaccctttccaaattgccgataccaatttcaaatccccagggcagacataatattctcataatatctgaccactgctaacagctgtgggaagaaaacttgct

SEQ ID NO: 698068 - DNA, 120 bp, Artificial Sequence
  ENSG00000189186_33 (sequence is synthesized)
gtttttagagcctctgcttcagtgtacatatcccattttcatccctcgtttcttaaaagaattatattgctgacaaatttaactttgagtccataataaatcttggaaattttttctggc

SEQ ID NO: 698069 - DNA, 120 bp, Artificial Sequence
  ENSG00000189186_34 (sequence is synthesized)
atttagaagacgtcttgcactgttcaaatgcagaggaaggcgaatgactcgagtctatgctttactgaagtataattgatatgcaaatgatggcacatatataatgtgtaaaatttgatg

SEQ ID NO: 698070 - DNA, 120 bp, Artificial Sequence
  ENSG00000189186_35 (sequence is synthesized)
ccaactactctacaaaggaaaagggatgtagtttgtaggattttccttgttatgagaggagcagaaacctaactgttgacaaggatgtgttttcttaattgaagaaaatcatatcacatg

SEQ ID NO: 698071 - DNA, 120 bp, Artificial Sequence
  ENSG00000189190_0 (sequence is synthesized)
gccccggcctggcttcagtcctgggcgcgcacaaacccggaagcggatcgcgtggagtgaaggtcctaccacggcgcgtgagttttgctctgccttggattaagtctgcacttcccaggt

SEQ ID NO: 698072 - DNA, 120 bp, Artificial Sequence
  ENSG00000189190_1 (sequence is synthesized)
ccccggcgcttctgcccctgggacgtgggatccccacggacctggaaattctcgcctgtcttcccttcacccagagcaaattgagacgtcccggattgattcctaaagactcatgttatg

SEQ ID NO: 698073 - DNA, 120 bp, Artificial Sequence
  ENSG00000189190_2 (sequence is synthesized)
tgaagaagcagctcagaagaggaaaggaaaggagccaggcatggctcttcctcagggacgcttgactttcagggatgtggctatagaattctcattggcagagtggaaatgcctgaaccc

SEQ ID NO: 698074 - DNA, 120 bp, Artificial Sequence
  ENSG00000189190_3 (sequence is synthesized)
ttcgcagagggctttgtacagggaagtgatgttggagaactacaggaacctggaagctgtggatatctcttccaaacgcatgatgaaggaggtcttgtcaacagggcaaggcaatacaga

SEQ ID NO: 698075 - DNA, 120 bp, Artificial Sequence
  ENSG00000189190_4 (sequence is synthesized)
agtgatccacacagggacattgcaaagatatcaaagttatcacattggagatttttgcttccaggaaattgagaaagaaattcatgatattgagtttcagtgtcaagaagatgaaagaaa

SEQ ID NO: 698076 - DNA, 120 bp, Artificial Sequence
  ENSG00000189190_5 (sequence is synthesized)
tggccatgaagcacccatgacaaaaataaaaaagttgactggtagcacagaccaacatgatcacaggcatgctggaaacaagcctattaaagatcagcttggatcaagcttttattcaca

SEQ ID NO: 698077 - DNA, 120 bp, Artificial Sequence
  ENSG00000189190_6 (sequence is synthesized)
tctgcctgaactccacataattcagatcaaaggtaaaattggtaatcaatttgagaagtctaccagtgatgctccctcggtttcaacatcccaaagaatttctcctaggccccaaatcca

SEQ ID NO: 698078 - DNA, 120 bp, Artificial Sequence
  ENSG00000189190_7 (sequence is synthesized)
tatttctaataactatgggaataattccccgaattcttcactactcccacaaaaacaggaagtatacatgagagaaaaatctttccaatgtaatgagagtggcaaagcctttaattgtag

SEQ ID NO: 698079 - DNA, 120 bp, Artificial Sequence
  ENSG00000189190_8 (sequence is synthesized)
ctcactcttaaggaaacaccagataccccatttaggagacaaacaatataaatgtgatgtatgtggcaagctctttaatcacaagcaataccttacatgccattgtagatgtcacactgg

SEQ ID NO: 698080 - DNA, 120 bp, Artificial Sequence
  ENSG00000189190_9 (sequence is synthesized)
aaaccttacaagtgtaatgagtgtggaaagtccttcagtcaggtatcatcccttacatgccatcgtagacttcacactgcagtaaaatctcacaagtgtaatgagtgtggcaagatcttt

SEQ ID NO: 698081 - DNA, 120 bp, Artificial Sequence
  ENSG00000189190_10 (sequence is synthesized)
ctttggtcaaaattcagcccttgtaattcataaggcaattcatactggagaaaaaccttacaagtgtaatgaatgtgacaaagcttttaatcagcaatcaaaccttgcacgtcatcgtag

SEQ ID NO: 698082 - DNA, 66 bp, Artificial Sequence
  ENSG00000189190_11 (sequence is synthesized)
cttacaaatgtgaagaatgtgacaaagttttcagtcggaaatcaacccttgagtcagctttcacat

SEQ ID NO: 698083 - DNA, 88 bp, Artificial Sequence
  ENSG00000189190_12 (sequence is synthesized)
aaaccatacaaatgtaaggtttgtgacacagctttcacatggaattctcagctggcaagacataaaagaattcacactggagagaaaa

SEQ ID NO: 698084 - DNA, 120 bp, Artificial Sequence
  ENSG00000189190_13 (sequence is synthesized)
atgccatcatagacttcatggtggagagaaatcttacaaatgtaaggtctgtgacaaggcttttgcgtggaattcacacctggtaagacatactagaattcatagtggaggaaaacctta

SEQ ID NO: 698085 - DNA, 120 bp, Artificial Sequence
  ENSG00000189190_14 (sequence is synthesized)
caagtgtaatgaatgtgggaagacctttggtcaaaattcagatcttctaattcataagtcaattcatactggagagcaaccttacaaatatgaagaatgtgaaaaggttttcagttgtgg

SEQ ID NO: 698086 - DNA, 83 bp, Artificial Sequence
  ENSG00000189190_15 (sequence is synthesized)
aaatgtaaggtttgtgacaaggcttttgcgtgtcattcctatctggcaaaacatactagaacagcaagaccttccgtctgagg

SEQ ID NO: 698087 - DNA, 90 bp, Artificial Sequence
  ENSG00000189190_16 (sequence is synthesized)
gttcatagcagcaagaccttcagtcagaggtcataccttcattgccatcgtagacttcatagtggtgagaaaccttacaagtgtaatgag

SEQ ID NO: 698088 - DNA, 120 bp, Artificial Sequence
  ENSG00000189190_17 (sequence is synthesized)
gtaatgagtgtggcaagaccttcagtcacaagccatcccttgttcaccatcgtagacttcatactggagagaaatcttacaaatgtacggtttgtgacaaggctttcgtgcgtaattcat

SEQ ID NO: 698089 - DNA, 120 bp, Artificial Sequence
  ENSG00000189190_18 (sequence is synthesized)
atactggagagaaatcttacaaatgtacggtttgtgacaaggctttcgtgcgtaattcatacctggcaagacataccagaattcacactgcagagaaaccttacaagtgtaatgaatgtg

SEQ ID NO: 698090 - DNA, 120 bp, Artificial Sequence
  ENSG00000189190_19 (sequence is synthesized)
tagaattcatgctggggagaaactttacaaatgtgaaacatgtgacaaagttttcagtcgcaaatcacaccttaaaagacataggagaattcatcctggaaagaaaccatacaaatgtaa

SEQ ID NO: 698091 - DNA, 88 bp, Artificial Sequence
  ENSG00000189190_20 (sequence is synthesized)
ataggagaattcatcctggaaacttttgggagtgattcacacctgaaacaacatactggacttcacactggagagaaaccttacaagt

SEQ ID NO: 698092 - DNA, 120 bp, Artificial Sequence
  ENSG00000189190_21 (sequence is synthesized)
tattcaccatcaggcagttcatggtgtagggaaacttgactaatgtaatgattgtcacaaagtcttcagtaacgctacaaccattgcaaatcattggagaatctataatgaataaagatc

SEQ ID NO: 698093 - DNA, 120 bp, Artificial Sequence
  ENSG00000189190_22 (sequence is synthesized)
taacaagtgtaataaatgtggcaaatttttcagacatcattcatacattgcagttcattgacacactcatactggagagaaaccttacaaatgtcatgactgtggcaaggtcttcagtca

SEQ ID NO: 698094 - DNA, 120 bp, Artificial Sequence
  ENSG00000189190_23 (sequence is synthesized)
agcttcatcctatgcaaaacataggagaattcatacaggagagaaacctcacatgtgtgatgattgtggcaaagcctttacttcatgttcacacctcattagacatcagagaatccctac

SEQ ID NO: 698095 - DNA, 120 bp, Artificial Sequence
  ENSG00000189190_24 (sequence is synthesized)
tggacagaaatcttacaaatgtcagaagtgtggcaaggtcttgagtccgaggtcactccttgcagaacatcagaaaattcatttttgagataactgttcccaatgcagtgagtatagcaa

SEQ ID NO: 698096 - DNA, 120 bp, Artificial Sequence
  ENSG00000189190_25 (sequence is synthesized)
accatcaagcattaattgacactagagtcagtccagcattgacttgagtttgtgttgacttaacattgagttcaacccttaattgacattcaagtgtttatgttaagaggattgggccag

SEQ ID NO: 698097 - DNA, 120 bp, Artificial Sequence
  ENSG00000189190_26 (sequence is synthesized)
gtgtggtttctcacacctgtaattccagcacggttggaggccaaggcacataggtcacttgaggtcagaagtttgaaaccagcatggccaacagatgtcagccacttttcccagcctgtt

SEQ ID NO: 698098 - DNA, 120 bp, Artificial Sequence
  ENSG00000189190_27 (sequence is synthesized)
ttttgattcttattttctatttttcttttttgagatagtactttttaaagagatagtacttttttgatatagtactttataaaagggagatcaggccaggcacggaggctcatgtaagta

SEQ ID NO: 698099 - DNA, 67 bp, Artificial Sequence
  ENSG00000189190_28 (sequence is synthesized)
ggcaggtggagacggagcttgcagggagccaacatcgtgccactgcactccggcctgggcgacagtg

SEQ ID NO: 698100 - DNA, 120 bp, Artificial Sequence
  ENSG00000189190_29 (sequence is synthesized)
gacttttggtacgtgaggaagaaacccagaagaggaagaggaaagcaaaggagtcagggatggctcttcctcagcaccactgggttagggtctccctgactgagctggtctcggcaagtg

SEQ ID NO: 698101 - DNA, 120 bp, Artificial Sequence
  ENSG00000189190_30 (sequence is synthesized)
gcgtaccttcatgggggctcgaatccaggttgaagggtcaccggagcgacagttggaatggaaaactagctggaggacacccaagtactcttaaagcaatccctgtggaggagttaatct

SEQ ID NO: 698102 - DNA, 70 bp, Artificial Sequence
  ENSG00000189190_31 (sequence is synthesized)
caccttttctcactttgtctgggcttacatgccaaacaggagagtcttctgcctgtgttaaatgtcatct

SEQ ID NO: 698103 - DNA, 88 bp, Artificial Sequence
  ENSG00000189190_32 (sequence is synthesized)
tatgtgtgggcaccttttctcactttgtctgggcttacatgccaaacaggagagtcttctgcctgtgttaaatgtcatcgcttctata

SEQ ID NO: 698104 - DNA, 60 bp, Artificial Sequence
  ENSG00000189190_33 (sequence is synthesized)
aatatggaacaccacaggagcaactgaatctggcattattaactttaaattttttgagcc

SEQ ID NO: 698105 - DNA, 60 bp, Artificial Sequence
  ENSG00000189190_34 (sequence is synthesized)
aatgatttggcagagagatccaataacaaaaatttgggaaataggtaaaataataacttg

SEQ ID NO: 698106 - DNA, 120 bp, Artificial Sequence
  ENSG00000189190_35 (sequence is synthesized)
tgcttgtgtttctccaggccaaaatcatcagtcagtttggataccatcaagacacctgaaatcttgtcatgggccagatgccaaggaagagattccgggaggatcctgaggacccccccg

SEQ ID NO: 698107 - DNA, 120 bp, Artificial Sequence
  ENSG00000189190_36 (sequence is synthesized)
gaccccaactgtcacgagcaacacccatcgaatacagccaccgacctggagacagatcaagaagctgtcacagatccaggaagacaacctgaggaaagcaggacaaccactcacagtgaa

SEQ ID NO: 698108 - DNA, 120 bp, Artificial Sequence
  ENSG00000189190_37 (sequence is synthesized)
aagacaacctgaggaaagcaggacaaccactcacagtgaataatttaatggtagctatgatggcagtgatcaccatttctgtgagtattccttcaacaaaggctgacacagagaacaatt

SEQ ID NO: 698109 - DNA, 120 bp, Artificial Sequence
  ENSG00000189190_38 (sequence is synthesized)
tccttcaacaaaggctgacacagagaacaattgtacttattaggcatatttatcaatcttagctggtaataatgcctggatgtaaatcactgtatgacacagttacacatgctttctgat

SEQ ID NO: 698110 - DNA, 120 bp, Artificial Sequence
  ENSG00000189190_39 (sequence is synthesized)
atctgctcctgtaattgaggcatacaacccccaaaaacctatttgtaaacaggattggactcagttagaaaaaatgaacgtatttgtttagcaagattgcattgcagaacaggcagaggt

SEQ ID NO: 698111 - DNA, 120 bp, Artificial Sequence
  ENSG00000189190_40 (sequence is synthesized)
ttcccatggaatcattattgactggtcccctaagggatatttagcttgaattgcacttctcagtctatgtgtcacgttcacactatgttcagcagatctgaacaaaatggtcagatggta

SEQ ID NO: 698112 - DNA, 70 bp, Artificial Sequence
  ENSG00000189190_41 (sequence is synthesized)
cactatgttcagcagatctgaacaaaatggtcagatggtagaaaagataagtgaggggaaaagaaagaga

SEQ ID NO: 698113 - DNA, 120 bp, Artificial Sequence
  ENSG00000189190_42 (sequence is synthesized)
ttgttctgtactaatagaaattcttctgtcttgagatgctgtgaatctgtaaccctagctccaaccctgtgcttgcagagacatgtgctgtgtcaactcaaggtttaatggatttagggc

SEQ ID NO: 698114 - DNA, 90 bp, Artificial Sequence
  ENSG00000189190_43 (sequence is synthesized)
gggctgtgcaggatgtgctttgtttaaaaagtgcttaaaggcagtatgcttggtaaaagtcatccccattctctaatctcaaatacccaa

SEQ ID NO: 698115 - DNA, 120 bp, Artificial Sequence
  ENSG00000189190_44 (sequence is synthesized)
acccccaaacacatttccttgcagtctgcacatctcagatgagggtgactacgtacttccggaaacggccgaacttgacagcatgtattttaaatttgtgaaataaattactttatttgt

SEQ ID NO: 698116 - DNA, 120 bp, Artificial Sequence
  ENSG00000189190_45 (sequence is synthesized)
atgggaagtgaaagacctgactgtcccccagcctgactcccataaagggtctgtgctgaagaggattaataaaagaggaaggcctctgcagttaagataagaggaaggcatctgtctcct

SEQ ID NO: 698117 - DNA, 120 bp, Artificial Sequence
  ENSG00000189190_46 (sequence is synthesized)
gaagatacatcacttccaatttttgtttgtttgtttgtttttttgagaggaattttcactcttgtggctgaggctggagtgcaatgccatgatatcagctcactgcaacctctgactcct

SEQ ID NO: 698118 - DNA, 120 bp, Artificial Sequence
  ENSG00000189190_47 (sequence is synthesized)
ctgtgagcctcagtgagcccacctgtaacatagaggtgaggaataagaccggaaaagctcagtcagtgacactgacccctgaaatgactgacaaaatacagtgtgtgacttttcttctgg

SEQ ID NO: 698119 - DNA, 120 bp, Artificial Sequence
  ENSG00000189190_48 (sequence is synthesized)
gagagggtagtgctcagttttaactcgaattttaaatgaattccagttctccaaatattaaaaaaaaaaaaaaagaagcacaagatgaacaaaaacggggtaattagactcaagtcacct

SEQ ID NO: 698120 - DNA, 120 bp, Artificial Sequence
  ENSG00000189190_49 (sequence is synthesized)
tgaaccttatcatctcacagctttaacccacctacatgactccatgtcccctgcaggcctcgcccctgagctctacaatcctgtgtccagttgtctcctcagctgtctcctgggtcatca

SEQ ID NO: 698121 - DNA, 120 bp, Artificial Sequence
  ENSG00000189190_50 (sequence is synthesized)
ctctactaaaaatacaaaagttagccggggggtggtggtgtgcacctttagttccagctacttgagaggctgaggcacaagagtcgcttaaacctgggaggtagaggttgccgtgaggca

SEQ ID NO: 698122 - DNA, 120 bp, Artificial Sequence
  ENSG00000189190_51 (sequence is synthesized)
cgcttaaacctgggaggtagaggttgccgtgaggcaaaatcgtgccactgccctcagcctgggcagtagagtcagtctccatctcaaagaaaccagcaaacaaaaaatattaaaaaaaaa

SEQ ID NO: 698123 - DNA, 120 bp, Artificial Sequence
  ENSG00000189190_52 (sequence is synthesized)
agacgtcccggaggaagaccaaggcagcctattgggccttccaggcaatcacatgggaatcagccacacgtccttcctcctcacctcagaacatctcagaataacttggtgaaatgtctc

SEQ ID NO: 698124 - DNA, 120 bp, Artificial Sequence
  ENSG00000189195_0 (sequence is synthesized)
gccggcagaagtaaacagagcgagtacgcctgcgcacgctcttcctgggtcaagagccggctcggttctgggattctgaggctccccaccgcggtccggcttctctgggagactgtctac

SEQ ID NO: 698125 - DNA, 120 bp, Artificial Sequence
  ENSG00000189195_1 (sequence is synthesized)
aaaccgacgagaggcgtcaaccttttaccctagggggcggatttgggtaggagccgagcgttcggtcggaaacgcccccttcttcctcctgggcggggcaagtgaggccaagtactgggc

SEQ ID NO: 698126 - DNA, 120 bp, Artificial Sequence
  ENSG00000189195_2 (sequence is synthesized)
ctccagggcgtcgtacctctgtgagacatggctcgctgtggggaaggcagtgcggcccccatggtacttctggggtccgctggagtttgcagtaaggggttgcaaaggaaggggccgtgt

SEQ ID NO: 698127 - DNA, 120 bp, Artificial Sequence
  ENSG00000189195_3 (sequence is synthesized)
gagcggcgccggctgaaggcgacggtgtcggagcagctcagccaggatttgctcaggcttctaagggaagaattccatacagatgttaccttctctgtgggttgtactttgttcaaagca

SEQ ID NO: 698128 - DNA, 120 bp, Artificial Sequence
  ENSG00000189195_4 (sequence is synthesized)
cacaaagcagtccttttagcaagagttcctgacttctattttcatactattggacagacatcaaatagtttaacaaatcaggagcctattgctgtggagaatgttgaagctttagaattt

SEQ ID NO: 698129 - DNA, 120 bp, Artificial Sequence
  ENSG00000189195_5 (sequence is synthesized)
agaacgtttttacagattatatattcatcaaacagaaacataaaaaactatgaagaggaaattcttaggaaaaagataatggagattgggatatcacaaaagcaacttgacatcagtttt

SEQ ID NO: 698130 - DNA, 120 bp, Artificial Sequence
  ENSG00000189195_6 (sequence is synthesized)
ccaaagtgtgaaaactcatctgattgttctcttcagaagcatgaaattccagaggatatcagtgacagagatgatgatttcatttccaatgataattatgacttggagcctgcatctgaa

SEQ ID NO: 698131 - DNA, 120 bp, Artificial Sequence
  ENSG00000189195_7 (sequence is synthesized)
ttaggagaagatttattgaagctttatgtgaaaccttgttgcccagatattgatatttttgttgatggaaaacgttttaaagctcacagggccattttgagtgccagatctagttatttt

SEQ ID NO: 698132 - DNA, 120 bp, Artificial Sequence
  ENSG00000189195_8 (sequence is synthesized)
gctgcaatgctgagtggctgttgggctgaaagctcccaagagtacgttactcttcaaggtataagccatgtagaactgaatgttatgatgcattttatatatggaggaactctggacatt

SEQ ID NO: 698133 - DNA, 120 bp, Artificial Sequence
  ENSG00000189195_9 (sequence is synthesized)
ccagacaaaactaatgttggtcagatactcaatatggctgatatgtatggactagaaggattaaaagaagtagcaatctatattttaagaagagattactgtaatttctttcagaagcct

SEQ ID NO: 698134 - DNA, 120 bp, Artificial Sequence
  ENSG00000189195_10 (sequence is synthesized)
gttcccagaacattgacgtctatactagaatgcctgattattgctcattcagttggagtggaaagtctttttgctgactgcatgaagtggattgtaaagcattttgcaaggttttggtct

SEQ ID NO: 698135 - DNA, 120 bp, Artificial Sequence
  ENSG00000189195_11 (sequence is synthesized)
gagagaagctttgcaaatatacctcctgagattcagaaaagttgtcttaatatgttgattcagtccttaaatgataagaatgctgcttttcttctgatggaaagtgacaggctaatcatc

SEQ ID NO: 698136 - DNA, 120 bp, Artificial Sequence
  ENSG00000189195_12 (sequence is synthesized)
agtttacccagagtgaagtggacggaagcagcactgaccatggcgtctcagcttcaagaaaaatgtattgcatttattgtagacaacttctccaagattattcagagtgaaaattttgct

SEQ ID NO: 698137 - DNA, 120 bp, Artificial Sequence
  ENSG00000189195_13 (sequence is synthesized)
cttcttttacagtcacaagcaatgagcagcacagccgatctgttggacacaattttaaaagcaattgaagaaaatatcaccactgaaaatagctgctctcttcttatggctctggacaca

SEQ ID NO: 698138 - DNA, 120 bp, Artificial Sequence
  ENSG00000189195_14 (sequence is synthesized)
ctgctgaactctgacagtacaaaggaaatgggttttacgtgcaagatccaggctctgcgtgataagctgtggatcttcctggttcagtctttctatgctgttcgtcacacagaaagctgg

SEQ ID NO: 698139 - DNA, 120 bp, Artificial Sequence
  ENSG00000189195_15 (sequence is synthesized)
aagctgatgagcacagatgatcaacagaaaatccaagcagctgcatttgacaaaggtgatgatcgaagacttggcaaaaagcctatattcagtagctcgcagcaaaggaaacaagtttct

SEQ ID NO: 698140 - DNA, 120 bp, Artificial Sequence
  ENSG00000189195_16 (sequence is synthesized)
gactctggtgatataaaaatcaaatcttggaggggaaataacaagaaagagtgttggagttatctctctactaataaaaagatgaaatctgatggattaggagcatctggacattcgtca

SEQ ID NO: 698141 - DNA, 120 bp, Artificial Sequence
  ENSG00000189195_17 (sequence is synthesized)
agtaccaatagaaatagtataaataaaactctgaagcaagatgatgtaaaggaaaaagatggtacaaaaatagcatctaagattacaaaagaactaaaaactgggggaaaaaatgtttct

SEQ ID NO: 698142 - DNA, 120 bp, Artificial Sequence
  ENSG00000189195_18 (sequence is synthesized)
ggaaagcccaaaactgtaacaaaatccaaaacagaaaatggtgataaggcacggttggaaaacatgtcacctagacaagttgtagaaagatcagcaacagcagcagcagcagcaactgga

SEQ ID NO: 698143 - DNA, 120 bp, Artificial Sequence
  ENSG00000189195_19 (sequence is synthesized)
cagaagaatttactaaatggaaaaggagtgagaaatcaggaagggcaaatttcaggtgccagacccaaggtactcacaggaaacttaaatgtgcaagccaaagcaaagcctttgaagaaa

SEQ ID NO: 698144 - DNA, 120 bp, Artificial Sequence
  ENSG00000189195_20 (sequence is synthesized)
gctacagggaaggattcaccatgcctcagcatcgcaggaccctccagcagatccacagattcaagtatggaattctcaatttccactgaatgtctggatgaaccgaaagaaaatggatca

SEQ ID NO: 698145 - DNA, 120 bp, Artificial Sequence
  ENSG00000189195_21 (sequence is synthesized)
acagaagaagaaaagccttctggacataaactatccttttgtgattctccaggacagatgatgaaaaacagtgtagatagtgtcaaaaattccactgtagccataaaatctcgacctgtt

SEQ ID NO: 698146 - DNA, 120 bp, Artificial Sequence
  ENSG00000189195_22 (sequence is synthesized)
tcaagagttaccaatggaacttccaataaaaaaagtattcatgaacaagacactaatgtaaataacagtgtactaaagaaagtcagtggcaaaggatgtagtgagccagtaccacaggca

SEQ ID NO: 698147 - DNA, 120 bp, Artificial Sequence
  ENSG00000189195_23 (sequence is synthesized)
attttgaagaaaagaggaactagcaatggatgtactgcagctcagcagaggacaaagagtaccccatctaatcttactaaaactcaaggatcccaaggagagtcaccaaactcagtaaaa

SEQ ID NO: 698148 - DNA, 120 bp, Artificial Sequence
  ENSG00000189195_24 (sequence is synthesized)
tcttcagtctcttcaaggcagtctgatgaaaatgtggcaaagttggaccacaatacaactacagagaaacaagcacctaagagaaaaatggtcaagcaagtacacacagctttgcctaag

SEQ ID NO: 698149 - DNA, 120 bp, Artificial Sequence
  ENSG00000189195_25 (sequence is synthesized)
gtcaaagaaaggtgaaactttgaataataaagattcaaaacagaaaatgcctcctggacaggttatatcaaaaactcagccttcctcccaaagacctttaaaacatgaaacatctactgt

SEQ ID NO: 698150 - DNA, 120 bp, Artificial Sequence
  ENSG00000189195_26 (sequence is synthesized)
ccaaaaaagtatgtttcatgatgtgcgtgataataacaacaaggacagtgtttctgaacagaagcctcacaaacctctcattaatcttgcatctgaaataagtgatgcagaagcactcca

SEQ ID NO: 698151 - DNA, 120 bp, Artificial Sequence
  ENSG00000189195_27 (sequence is synthesized)
gtcatcctgcaggcctgacccacaaaagccattaaacgatcaagaaaaagagaagttggcgttagaatgccaaaatatttcaaagctggataaatcattaaaacacgaactggaatcaaa

SEQ ID NO: 698152 - DNA, 120 bp, Artificial Sequence
  ENSG00000189195_28 (sequence is synthesized)
acagatttgtttagataaaagtgaaacaaaatttcccaatcacaaagaaacagatgattgcgatgcagctaacatatgttgtcattctgttgggagtgataatgtaaattcaaaatttta

SEQ ID NO: 698153 - DNA, 120 bp, Artificial Sequence
  ENSG00000189195_29 (sequence is synthesized)
tagcaccacagccctaaaatacatggtttcaaatccaaatgaaaactccttgaactctaatccagtttgtgatttagactcaacaagtgcagggcaaatccatttgatatcagataggga

SEQ ID NO: 698154 - DNA, 120 bp, Artificial Sequence
  ENSG00000189195_30 (sequence is synthesized)
gaaccaagtagggagaaaagatacaaacaaacaatcaagtattaaatgtgtggaagatgtttcactgtgtaatcctgaaaggacaaatggtaccttaaattctgctcaagaagacaaaaa

SEQ ID NO: 698155 - DNA, 120 bp, Artificial Sequence
  ENSG00000189195_31 (sequence is synthesized)
atcgaaagttcctgtggaaggactgacaattcctagtaagttgtcagatgaatctgctatggatgaagacaaacatgctacagcagactcagatgtatcttccaagtgtttttcgggaca

SEQ ID NO: 698156 - DNA, 120 bp, Artificial Sequence
  ENSG00000189195_32 (sequence is synthesized)
gctatcagaaaaaaattctcctaaaaatatggaaacatcagaatctccagagagccatgaaactccagaaactccatttgtgggtcactggaatttgagtactggtgttctgcatcagcg

SEQ ID NO: 698157 - DNA, 120 bp, Artificial Sequence
  ENSG00000189195_33 (sequence is synthesized)
agagagtcctgaatctgacactggcagtgctaccacctcctccgatgacataaagcccagatctgaagactatgatgctggagggtctcaggatgatgatgggtcaaatgacagaggtat

SEQ ID NO: 698158 - DNA, 120 bp, Artificial Sequence
  ENSG00000189195_34 (sequence is synthesized)
ctctaaatgtggcactatgctgtgccatgattttcttggaagaagtagcagtgataccagtactcctgaagaattaaaaatttatgatagtaatttaagaattgaagtaaaaatgaaaaa

SEQ ID NO: 698159 - DNA, 120 bp, Artificial Sequence
  ENSG00000189195_35 (sequence is synthesized)
gcaaagtaataatgatcttttccaagttaattcaacgagtgatgatgaaatccctaggaaaaggccagaaatttggtctcgatctgcaatagttcactctagggaaagagaaaatattcc

SEQ ID NO: 698160 - DNA, 120 bp, Artificial Sequence
  ENSG00000189195_36 (sequence is synthesized)
acgaggcagtgtccagtttgctcaggaaatagatcaggtatcttcttcagcagatgaaacagaagatgaaagatctgaagctgaaaacgttgcagaaaatttctctatatctaacccagc

SEQ ID NO: 698161 - DNA, 120 bp, Artificial Sequence
  ENSG00000189195_37 (sequence is synthesized)
tcctcagcagtttcagggaataattaatttagcttttgaagatgcaactgaaaatgaatgtcgtgaattttctgcaactaaaaagtttaaaaggtcagttttactttcagtcgatgaatg

SEQ ID NO: 698162 - DNA, 120 bp, Artificial Sequence
  ENSG00000189195_38 (sequence is synthesized)
tgaagagctgggatcagatgaaggagaagtccatactccctttcaggcttctgtagattctttttcaccttctgatgtttttgatggcatttctcatgaacatcatggaaggacctgcta

SEQ ID NO: 698163 - DNA, 120 bp, Artificial Sequence
  ENSG00000189195_39 (sequence is synthesized)
ttccagattctcacgagaaagtgaagataatattttagaatgtaaacaaaataaaggcaatagtgtatgtaaaaatgaaagcactgtcttggatcttagtagcattgactcttcaagaaa

SEQ ID NO: 698164 - DNA, 120 bp, Artificial Sequence
  ENSG00000189195_40 (sequence is synthesized)
aaataaacagagtgtttcagccacagaaaaaaagaacacaatagacgtcctatccagtagaagcagacagcttcttcgagaagataaaaaagtaaacaatggaagcaatgtggaaaatga

SEQ ID NO: 698165 - DNA, 120 bp, Artificial Sequence
  ENSG00000189195_41 (sequence is synthesized)
cattcagcaacgcagcaaattcttggatagtgatgtaaaatctcaagaaagaccatgtcacttggatcttcatcaaagagaacccaattctgacataccaaagaacagctctacaaaatc

SEQ ID NO: 698166 - DNA, 120 bp, Artificial Sequence
  ENSG00000189195_42 (sequence is synthesized)
tctagactcctttcggagtcaagttctgcctcaggaaggtccagtgaaagagagccattctacaactactgaaaaagctaatattgctttatctgcaggagacatagatgattgtgacac

SEQ ID NO: 698167 - DNA, 120 bp, Artificial Sequence
  ENSG00000189195_43 (sequence is synthesized)
actggcacaaacccgcatgtatgaccatcggccttcaaaaaccctgtctccaatatatgagatggatgtaatagaagcatttgagcagaaagtggaatcagaaacacatgttacagatat

SEQ ID NO: 698168 - DNA, 120 bp, Artificial Sequence
  ENSG00000189195_44 (sequence is synthesized)
ggattttgaagatgaccaacattttgcaaaacaagattggacactactaaagcaactgctctctgaacaggattcaaacttagatgttacaaattccgttcctgaagacttaagtttagc

SEQ ID NO: 698169 - DNA, 120 bp, Artificial Sequence
  ENSG00000189195_45 (sequence is synthesized)
acagtatctaatcaatcagacactacttttagcacgagatagctcaaaacctcagggtataacacatattgacactttgaacagatggagtgaactaacatctccacttgattcctcagc

SEQ ID NO: 698170 - DNA, 120 bp, Artificial Sequence
  ENSG00000189195_46 (sequence is synthesized)
gagcatcaccatggctagtttttcctctgaagattgttcgcctcaaggcgagtggacaattctggaactggaaactcagcattaagtgttaacattttggaaaaatttatgccactcctt

SEQ ID NO: 698171 - DNA, 120 bp, Artificial Sequence
  ENSG00000189195_47 (sequence is synthesized)
tattttttgatgcctatattatatccaaatgataattgcattagccggatataaactttctttaatattgagtctttccaatttaatgaggtaaacatagtttatttattaatatatcac

SEQ ID NO: 698172 - DNA, 120 bp, Artificial Sequence
  ENSG00000189195_48 (sequence is synthesized)
atatagaaaaatgtttttctaaagtttttgagcatgttttctctaattattagagaaattagaagacttataaggaaaccctagcttcagttttcctttcctagctgatgatttgttcac

SEQ ID NO: 698173 - DNA, 120 bp, Artificial Sequence
  ENSG00000189195_49 (sequence is synthesized)
ttaatcattattcaagaatttaaaatgtgaatgcagaagtagatcagtccctttactttttgctctgcatagggtaacatagtaatttaacaataaaaacttaccgtgcttgtgtccatt

SEQ ID NO: 698174 - DNA, 120 bp, Artificial Sequence
  ENSG00000189195_50 (sequence is synthesized)
caaggttggaaccaaccctggacaggataccattccagcgcagggtgcactcacagcacagaacactcacttatactgggacattgtagagatgccagttcactaaatgtgcacatcttt

SEQ ID NO: 698175 - DNA, 120 bp, Artificial Sequence
  ENSG00000189195_51 (sequence is synthesized)
gggatgtgggaggaaactggagtgtccagagaaaacccatgcagacatggggaaaacatgcaaactctacacagacaatggcctggccaggaatccttttttcccttatcaacattataa

SEQ ID NO: 698176 - DNA, 120 bp, Artificial Sequence
  ENSG00000189195_52 (sequence is synthesized)
agttaggttctgctttgttgagctgtgttgcaaagtgttaatgaagtagaaactttgctttttatagtctattatactatatcttcagtaggttttgagaacatctaaaaacaataagca

SEQ ID NO: 698177 - DNA, 120 bp, Artificial Sequence
  ENSG00000189195_53 (sequence is synthesized)
aatcatcttatttagaagaaaaggtgacttatcaactcacagtaataagattgagaacagtctttattagacttaaatttagaagaagctataaattatggtttatagatcaataaattg

SEQ ID NO: 698178 - DNA, 120 bp, Artificial Sequence
  ENSG00000189195_54 (sequence is synthesized)
attaaacttttatcaaactttaaaaattactactttttaaattttaggatatcttttctaaacagcaaaagaaaagaaaaaacatagttaagaatataggggctgggtgcggtggctctc

SEQ ID NO: 698179 - DNA, 120 bp, Artificial Sequence
  ENSG00000189221_0 (sequence is synthesized)
cgggtatcaaaagaaggatcggctccgcccccgggctccccgggggagttgatagaagggtccttcccaccctttgccgtccccactcctgtgcctacgacccaggagcgtgtcagccaa

SEQ ID NO: 698180 - DNA, 120 bp, Artificial Sequence
  ENSG00000189221_1 (sequence is synthesized)
agcatggagaatcaagagaaggcgagtatcgcgggccacatgttcgacgtagtcgtgatcggaggtggcatttcaggactatctgctgccaaactcttgactgaatatggcgttagtgtt

SEQ ID NO: 698181 - DNA, 120 bp, Artificial Sequence
  ENSG00000189221_2 (sequence is synthesized)
ttggttttagaagctcgggacagggttggaggaagaacatatactataaggaatgagcatgttgattacgtagatgttggtggagcttatgtgggaccaacccaaaacagaatcttacgc

SEQ ID NO: 698182 - DNA, 120 bp, Artificial Sequence
  ENSG00000189221_3 (sequence is synthesized)
ttgtctaaggagctgggcatagagacttacaaagtgaatgtcagtgagcgtctcgttcaatatgtcaaggggaaaacatatccatttcggggcgcctttccaccagtatggaatcccatt

SEQ ID NO: 698183 - DNA, 120 bp, Artificial Sequence
  ENSG00000189221_4 (sequence is synthesized)
gcatatttggattacaataatctgtggaggacaatagataacatggggaaggagattccaactgatgcaccctgggaggctcaacatgctgacaaatgggacaaaatgaccatgaaagag

SEQ ID NO: 698184 - DNA, 120 bp, Artificial Sequence
  ENSG00000189221_5 (sequence is synthesized)
ctcattgacaaaatctgctggacaaagactgctaggcggtttgcttatctttttgtgaatatcaatgtgacctctgagcctcacgaagtgtctgccctgtggttcttgtggtatgtgaag

SEQ ID NO: 698185 - DNA, 120 bp, Artificial Sequence
  ENSG00000189221_6 (sequence is synthesized)
cagtgcgggggcaccactcggatattctctgtcaccaatggtggccaggaacggaagtttgtaggtggatctggtcaagtgagcgaacggataatggacctcctcggagaccaagtgaag

SEQ ID NO: 698186 - DNA, 120 bp, Artificial Sequence
  ENSG00000189221_7 (sequence is synthesized)
ctgaaccatcctgtcactcacgttgaccagtcaagtgacaacatcatcatagagacgctgaaccatgaacattatgagtgcaaatacgtaattaatgcgatccctccgaccttgactgcc

SEQ ID NO: 698187 - DNA, 120 bp, Artificial Sequence
  ENSG00000189221_8 (sequence is synthesized)
aagattcacttcagaccagagcttccagcagagagaaaccagttaattcagcggcttccaatgggagctgtcattaagtgcatgatgtattacaaggaggccttctggaagaagaaggat

SEQ ID NO: 698188 - DNA, 120 bp, Artificial Sequence
  ENSG00000189221_9 (sequence is synthesized)
tactgtggctgcatgatcattgaagatgaagatgctccaatttcaataaccttggatgacaccaagccagatgggtcactgcctgccatcatgggcttcattcttgcccggaaagctgat

SEQ ID NO: 698189 - DNA, 120 bp, Artificial Sequence
  ENSG00000189221_10 (sequence is synthesized)
cgacttgctaagctacataaggaaataaggaagaagaaaatctgtgagctctatgccaaagtgctgggatcccaagaagctttacatccagtgcattatgaagagaagaactggtgtgag

SEQ ID NO: 698190 - DNA, 120 bp, Artificial Sequence
  ENSG00000189221_11 (sequence is synthesized)
gagcagtactctgggggctgctacacggcctacttccctcctgggatcatgactcaatatggaagggtgattcgtcaacccgtgggcaggattttctttgcgggcacagagactgccaca

SEQ ID NO: 698191 - DNA, 120 bp, Artificial Sequence
  ENSG00000189221_12 (sequence is synthesized)
aagtggagcggctacatggaaggggcagttgaggctggagaacgagcagctagggaggtcttaaatggtctcgggaaggtgaccgagaaagatatctgggtacaagaacctgaatcaaag

SEQ ID NO: 698192 - DNA, 120 bp, Artificial Sequence
  ENSG00000189221_13 (sequence is synthesized)
gacgttccagcggtagaaatcacccacaccttctgggaaaggaacctgccctctgtttctggcctgctgaagatcattggattttccacatcagtaactgccctggggtttgtgctgtac

SEQ ID NO: 698193 - DNA, 120 bp, Artificial Sequence
  ENSG00000189221_14 (sequence is synthesized)
aaatacaagctcctgccacggtcttgaagttctgttcttatgctctctgctcactggttttcaataccaccaagaggaaaatattgacaagtttaaaggctgtgtcattgggccatgttt

SEQ ID NO: 698194 - DNA, 120 bp, Artificial Sequence
  ENSG00000189221_15 (sequence is synthesized)
aagtgtactggatttaactacctttggcttaattccaatcattgttaaagtaaaaacaattcaaagaatcacctaattaatttcagtaagatcaagctccatcttatttgtcagtgtaga

SEQ ID NO: 698195 - DNA, 120 bp, Artificial Sequence
  ENSG00000189221_16 (sequence is synthesized)
aagttaaacgtgatgtgctcatcagaaacaatttctgtgtcctgtttttattcccttcaatgcaaaatacatgatgatttcagaaacaaagcatttgactttctgtctgtggaggtggag

SEQ ID NO: 698196 - DNA, 120 bp, Artificial Sequence
  ENSG00000189221_17 (sequence is synthesized)
taggtgaaggcccagcctgtaactgtcctttttcttcccttaggcaatggtgaactgtcattacagagcctagaggctcacagcctcctggaggaagcagcctccactttggatcaggaa

SEQ ID NO: 698197 - DNA, 120 bp, Artificial Sequence
  ENSG00000189221_18 (sequence is synthesized)
atagtaaaggaaagcagtgttgggggtagcggcatgcagaccctcagaccagaatggggacatcttgtggtctgctgcctcaggaatctcctgaccacttgtagtccctccgacttctct

SEQ ID NO: 698198 - DNA, 120 bp, Artificial Sequence
  ENSG00000189221_19 (sequence is synthesized)
agacatctagtctcagtgctagcttatttgtatttttcctctttcacttcttatggaggagagtgtttaactgagttagaatgttgaaactgacttgctgtgacttatgtgcagctttcc

SEQ ID NO: 698199 - DNA, 120 bp, Artificial Sequence
  ENSG00000189221_20 (sequence is synthesized)
agttgagcagaggaaaatagtggcaggactgtcccccaggaggactccctgcttagctctgtgggagaccaactacgactggcatcttctcttccccctggaaggcagctagacaccaat

SEQ ID NO: 698200 - DNA, 120 bp, Artificial Sequence
  ENSG00000189221_21 (sequence is synthesized)
ggatccttgtcagttgtaacattctatttcaacttcaggaaagcagcagttttcttttaatttttcctatgaccataaaattagacatacctctcaacttacatatgtcttcaacatggt

SEQ ID NO: 698201 - DNA, 120 bp, Artificial Sequence
  ENSG00000189221_22 (sequence is synthesized)
tacctctgcataaatattagcaaagcatgccaatttctcttaagtactgaaatacatatgataaatttgactgttatttgttgagactatcaaacagaaaagaaattagggctctaattt

SEQ ID NO: 698202 - DNA, 120 bp, Artificial Sequence
  ENSG00000189221_23 (sequence is synthesized)
ccttaaagcaagctcacttgctttagttgttaagttttataaaagacatgaaattgagtcattttatatatgaaaactaagttctctatcttaggagtaatgtcggcccacaagggtgcc

SEQ ID NO: 698203 - DNA, 120 bp, Artificial Sequence
  ENSG00000189221_24 (sequence is synthesized)
cacctcttgttttccccttttaaaaactcagatttttaaaagccctttccaaaggtttcaactgtaaaatacttctttttacaatgtatcaacatatttttatttaaggggaattaacaa

SEQ ID NO: 698204 - DNA, 120 bp, Artificial Sequence
  ENSG00000189221_25 (sequence is synthesized)
ttgccagggaaaccagccaacccaagtttattatatcattaaccttatcataaattcaaacctaagttgctggaccctggtgtgaggacataaatcttccaaagttttgcctatcctaag

SEQ ID NO: 698205 - DNA, 120 bp, Artificial Sequence
  ENSG00000189221_26 (sequence is synthesized)
agctgcatttttctactgctctttaccttgcattttagctaatttaggagttttgagaatgtattggatacgctccagtacataaggagttgccgcatattatatcagactgctttgaga

SEQ ID NO: 698206 - DNA, 120 bp, Artificial Sequence
  ENSG00000189221_27 (sequence is synthesized)
aatctcatccctagtctattgcagttgtttctattagcttactgattaactcagtcctgacacaccttttgggaaatgctgatttaaacttcttaactggcaacagttggaacagtaatc

SEQ ID NO: 698207 - DNA, 120 bp, Artificial Sequence
  ENSG00000189221_28 (sequence is synthesized)
agtttgctaacatatttaaagtcttgaatgttgaagaactcatgtgatttacccttttcaactttttggaaaacgatttaatttattctaattagattaaccctattaatctatggattg

SEQ ID NO: 698208 - DNA, 120 bp, Artificial Sequence
  ENSG00000189221_29 (sequence is synthesized)
ggtatcaaaatgaatgccagtccagatgtgcctagacacgaaattggagctgaggactctcacgatatgcaagttcatccaacgtgaagataccataagctttttctctgaaccagagaa

SEQ ID NO: 698209 - DNA, 120 bp, Artificial Sequence
  ENSG00000189221_30 (sequence is synthesized)
atgaaagtcagtttaagaggctgatagatcttggccctgttaaggcatccacttcacagttctgaaggctgagtcagccccactccacagttaggccaagaattagattttaaaacttca

SEQ ID NO: 698210 - DNA, 120 bp, Artificial Sequence
  ENSG00000189221_31 (sequence is synthesized)
tctgtctgtcccagttaactgttaaataaggcctcatcctccactgaagagtatggattgaaggattgtgaactatgtttagtgtgattgtgaacttggtgcctaatgttccatgtctga

SEQ ID NO: 698211 - DNA, 120 bp, Artificial Sequence
  ENSG00000189221_32 (sequence is synthesized)
agtttgccccagtgctacacgttggagtatacctatgtgtgtgctttgccactgaagtaagattttgcctgtatggtactgttttgtttgttaataaagtgcactgccacccccaatgca

SEQ ID NO: 698212 - DNA, 120 bp, Artificial Sequence
  ENSG00000189221_33 (sequence is synthesized)
ggcggagccaggccggcctagagtcacttctccccgcccctgactgggccgggagcccggggctggtctctaagagtgggtaccgagaacagcctgaccgtggagaagggctgcgggaag

SEQ ID NO: 698213 - DNA, 120 bp, Artificial Sequence
  ENSG00000189221_34 (sequence is synthesized)
cagaacaccgcccccagcgcccagcgtgctccagaaacatgagcacaaacgcctcagcctccttccccggcggcaccggcaccggcaccagtacccgcaccagtaccggcaccggcacca

SEQ ID NO: 698214 - DNA, 120 bp, Artificial Sequence
  ENSG00000189221_35 (sequence is synthesized)
gtacccgcaccagtaccggcaccggcaccagtacccgcaccagtaccggcaccggcaccgagcgcaaggcggagggcccgcccgaagccgggggcacaactgcccaggtcccgaacccgg

SEQ ID NO: 698215 - DNA, 120 bp, Artificial Sequence
  ENSG00000189221_36 (sequence is synthesized)
actccagcttggacgacacctcctacagcctgtccgaatggagcgtccgttctgagtggcggtccgtctcggatccgctagccagttcccagtggagcacgtcctcaactgccgaggccg

SEQ ID NO: 698216 - DNA, 120 bp, Artificial Sequence
  ENSG00000189221_37 (sequence is synthesized)
cctcctggagctccagcatacactccccaatcagcactaccggtcttagcgagagtactgactccgactccaagagtggcctccggggtttcagcgcttacaacccgagcagtcggatcc

SEQ ID NO: 698217 - DNA, 120 bp, Artificial Sequence
  ENSG00000189221_38 (sequence is synthesized)
ccaagtctaccaccagctcgaactcctccgatggggccgtcacagcctccaatcaggacaccggcattccctgggtattagtaacaggacctaccccgcccgtaaactcccccgtagagt

SEQ ID NO: 698218 - DNA, 120 bp, Artificial Sequence
  ENSG00000189221_39 (sequence is synthesized)
cattgcaagggtctgccttctcctcagggttcagcaccccacggggtttggtaaaaggaccgaccctgcccccggattccaacctgacctcagtgtccgactacacttggatatttgtac

SEQ ID NO: 698219 - DNA, 120 bp, Artificial Sequence
  ENSG00000189221_40 (sequence is synthesized)
ggggacctcctatacccaatgacctttcgcaagtgtcaatacaagcacctcctacacccagtaacacccccgagtgtcagtacaagggtctgccgcatcctcagtgtccagcttcccctg

SEQ ID NO: 698220 - DNA, 120 bp, Artificial Sequence
  ENSG00000189221_41 (sequence is synthesized)
gggtttggtaccaggaccacctctacccaataacatttccccagtgtcgccacaagcacctcctgcaccccataacatccccccagtgtcaaggcaggcgtctacccccacctcagtgcc

SEQ ID NO: 698221 - DNA, 120 bp, Artificial Sequence
  ENSG00000189221_42 (sequence is synthesized)
tgacactccgcggggttcaatacaagaacctcctgcacccagtaatcctttccagctgccgacacaaggacattctaaacctaataactctcgccgagtgtcagtacaagggtccgcccc

SEQ ID NO: 698222 - DNA, 120 bp, Artificial Sequence
  ENSG00000189221_43 (sequence is synthesized)
gaagagattggcatgaactgttgctttgccagttccagccagtaccagcaaaaacatacatgtatgttggagcatcagaggaaagcagctcctggtggagagactatctgctgccaaact

SEQ ID NO: 698223 - DNA, 120 bp, Artificial Sequence
  ENSG00000189221_44 (sequence is synthesized)
cttctgcagactaaatgagggcagtgattggctcatttaccctgcccaccttcccaagtaactctgtgtaacctcttggttcccttgaagggtgattcgtcaacccgtgggcaggatttt

SEQ ID NO: 698224 - DNA, 80 bp, Artificial Sequence
  ENSG00000189227_0 (sequence is synthesized)
cgggggcgcgcttgcgcgccagcggctgcggacaccagcctgcgtccccggcgcggcgggccatggaggccctgaggagg

SEQ ID NO: 698225 - DNA, 120 bp, Artificial Sequence
  ENSG00000189227_1 (sequence is synthesized)
ggaggccctgaggagggcccacgaggtcgcgctccgcctgctgctgtgtaggccgtgggcctcgcgcgccgccgcccgccccaagcccagcgcctcggaggtgctgacgcggcatctgct

SEQ ID NO: 698226 - DNA, 120 bp, Artificial Sequence
  ENSG00000189227_2 (sequence is synthesized)
gcagcggcgcctgccgcactggacctccttctgcgtgccctacagcgccgtccgcaacgaccagttcggcctctcgcacttcaactggccggtgcagggcgccaactaccacgtcctgcg

SEQ ID NO: 698227 - DNA, 120 bp, Artificial Sequence
  ENSG00000189227_3 (sequence is synthesized)
caccggctgcttccccttcatcaagtaccactgctccaaggctccctggcaggacctggcccggcagaaccgcttcttcacggcgctcaaggtcgtcaacctcggtattccaactttatt

SEQ ID NO: 698228 - DNA, 120 bp, Artificial Sequence
  ENSG00000189227_4 (sequence is synthesized)
atatggacttggctcctggttatttgccagagtcacagagactgtgcataccagttatggacccataacagtttattttctcaataaagaagatgaaggtgccatgtattgaaagtgtgc

SEQ ID NO: 698229 - DNA, 120 bp, Artificial Sequence
  ENSG00000189227_5 (sequence is synthesized)
gtcaaagaacataaatatcagtggattttctctgtgtatatgtgcagtatttatttttgatcctttaaaataaaacttttgcaaatacttttttctttctacagtatctgcttctttaag

SEQ ID NO: 698230 - DNA, 120 bp, Artificial Sequence
  ENSG00000189227_6 (sequence is synthesized)
atgaatcattgccctcaagaggtgaagctttttatacatcgttatatattacatactctgtttagctgatgtgaactacaaacacatgaagcttcacaccattttttccctagaactagg

SEQ ID NO: 698231 - DNA, 120 bp, Artificial Sequence
  ENSG00000189227_7 (sequence is synthesized)
ttaacctacagataaaaaatgattacaatgtaatagattctatagttaattaacaatttaaatcaactctgaagagaaaatatagatgcccacacaaaagagaaggggggaaaatctttt

SEQ ID NO: 698232 - DNA, 120 bp, Artificial Sequence
  ENSG00000189227_8 (sequence is synthesized)
atgtaacaatggaaaaagaagtagaagacattaggatgtatgatggaaatattacatcattggcaaatccaaaattgatgagaatctaattgtaatctcaagtctaaaccattcagctgc

SEQ ID NO: 698233 - DNA, 120 bp, Artificial Sequence
  ENSG00000189227_9 (sequence is synthesized)
caggattgtaaatagaaacgttttaaaggccttgtgccatttacctggaggaggggttggagtgtaatgttgaaacttcttgttgcttaaagagtccaaaaccatatcgtttgtaaaatg

SEQ ID NO: 698234 - DNA, 120 bp, Artificial Sequence
  ENSG00000189227_10 (sequence is synthesized)
taataataactggttaatataagtgtagcaaggtgaatgaaactcagacttattaaaagttaaaacagctttcctataaagctgtaagaacaattaagatcttctagaaagatgcagaaa

SEQ ID NO: 698235 - DNA, 120 bp, Artificial Sequence
  ENSG00000189227_11 (sequence is synthesized)
aataaatttggtaactgtttataaaagcaattaactgaaatggtacatatccatagacttattggcaataaggagtgggctgaaattttaaagacctaatggcacttttgcatttgaatt

SEQ ID NO: 698236 - DNA, 120 bp, Artificial Sequence
  ENSG00000189227_12 (sequence is synthesized)
ttattaacttaattgcatttttgaaagccaagtcatttaaaaaaatgtatccttggggtagtcacaaaatacccagatgaatggtaaatttcagacatttggagtaatttagggagaact

SEQ ID NO: 698237 - DNA, 120 bp, Artificial Sequence
  ENSG00000189227_13 (sequence is synthesized)
aagtagaactatttaatttctaaaccaatgggtgtttaagatttatgatctctcccataattacaaacatacattatatatcattttatgttaatgtgttgctgatactctgcaacactt

SEQ ID NO: 698238 - DNA, 120 bp, Artificial Sequence
  ENSG00000189227_14 (sequence is synthesized)
acacatttttgtagcaaaacattttataaaattcaacatttggatgcttatgtcaagtcagtagagaaagtgagtggaagtgactgaggtgaaggcaccagaataatgaagtaatacaaa

SEQ ID NO: 698239 - DNA, 120 bp, Artificial Sequence
  ENSG00000189227_15 (sequence is synthesized)
ctagcttcgttaaaggtagtcattttaaatgatctacagagtgaactgttcttcaaatatatgtggtgttcacttgtctaaaagcaattctaagtaacactttaatcaaagaagtactta

SEQ ID NO: 698240 - DNA, 120 bp, Artificial Sequence
  ENSG00000189227_16 (sequence is synthesized)
tgccaatatatttagtccagaagaatatacttgacactagttaaatgaatggcttacacaaaggagatagtgttacattaagcttcattaataataaaacaactggctattagcattttg

SEQ ID NO: 698241 - DNA, 120 bp, Artificial Sequence
  ENSG00000189227_17 (sequence is synthesized)
tgtaaaggtttggtcccaacacaaggctgataaaatggtctttaattaccagactataaatacagcttttcagtagagttgcacctcttttcacactggcctgtttgatttctgataatt

SEQ ID NO: 698242 - DNA, 120 bp, Artificial Sequence
  ENSG00000189227_18 (sequence is synthesized)
tgtactgctgactctgcttacctgtttttcaatagctatagtcagtgtgacttcttgcccatatgtgataggtaagtgtccttggagaacatctttgacaaactaccctattgatctctg

SEQ ID NO: 698243 - DNA, 120 bp, Artificial Sequence
  ENSG00000189227_19 (sequence is synthesized)
taattctctgctgcttgcagcattaaacagggccttgatttcttgtctgatgtgctcactgtataacaagtaaatgtaatattttcttgtattacatgaaaatcaatagacctcttgctc

SEQ ID NO: 698244 - DNA, 120 bp, Artificial Sequence
  ENSG00000189227_20 (sequence is synthesized)
ttacggagttgatcatggtgaaggatgaactaactcaacaatgggtaaaggcgtggtttaaaaatttaaatatcattcattggatttattaagtcttgtaaacttgtagtctgaaaacaa

SEQ ID NO: 698245 - DNA, 120 bp, Artificial Sequence
  ENSG00000189227_21 (sequence is synthesized)
tacttcccattgaacagcaatggtttaagttttttctttaaagctgcatattacaccaaagtattatggcctgaaagggagaaagtataaatgtgtaagtcaggagactgagtctatttt

SEQ ID NO: 698246 - DNA, 120 bp, Artificial Sequence
  ENSG00000189227_22 (sequence is synthesized)
tagtattggtgctgtcttactttttgacctcaggctaataactctcctcctttgtgtcttggtttttccacctgtaatctgagaagaacgaaacaagagacatttctacccgaaaatgta

SEQ ID NO: 698247 - DNA, 120 bp, Artificial Sequence
  ENSG00000189227_23 (sequence is synthesized)
catcaattttacttttgtctctgcaaaagctctgtttttataatccacattcttctgctccattatacttaaaggacttcattaattaaaaaatttcaaaaataaggtgatggagaaaga

SEQ ID NO: 698248 - DNA, 120 bp, Artificial Sequence
  ENSG00000189227_24 (sequence is synthesized)
aggagagatgcattgatagcacatgcccactaaccctgaagtggcatgtggggagctgaagaggcccttctcttctgcatatcagtagttttcttaattggtgaaaccactgattagctt

SEQ ID NO: 698249 - DNA, 120 bp, Artificial Sequence
  ENSG00000189227_25 (sequence is synthesized)
ttctgtcatatttctttgacaggatttttatctttaatccaaccaaaactgttttaataaaggtgtacttttagtacaaaaccttgcatctcttctattgttatttctatacaaatgaat

SEQ ID NO: 698250 - DNA, 120 bp, Artificial Sequence
  ENSG00000189227_26 (sequence is synthesized)
tatcacgtattggaataaatttctaggcaaattcctaggcaaaattcttagttcctgtgtaagttgtgagccactataaagatgcagtaacctatttgggagcgtgagagaggctgctaa

SEQ ID NO: 698251 - DNA, 120 bp, Artificial Sequence
  ENSG00000189227_27 (sequence is synthesized)
tacaaaaatctctattttcttagtgttgatgtcctaaaatgccaaattgtagaaacagttatagtttaccacacattttggggcattaatatttttctaacgttgacttccgtaaaaatt

SEQ ID NO: 698252 - DNA, 80 bp, Artificial Sequence
  ENSG00000189227_28 (sequence is synthesized)
gggcattaatatttttctaacgttgacttccgtaaaaattcaaacttttctttttgagaaggagtttcagtcttgttgtc

SEQ ID NO: 698253 - DNA, 62 bp, Artificial Sequence
  ENSG00000189227_29 (sequence is synthesized)
ggattacaggtatgcaccaccacgccggctaattttgtattttctgtacaggcctcggcctc

SEQ ID NO: 698254 - DNA, 120 bp, Artificial Sequence
  ENSG00000189227_30 (sequence is synthesized)
gattacaggcatgagccaccaggcctagctgaaacatttgtaattattaaaaccgtgtatcttttaaagtacattttacttcatgtcatttatattcacccaaaactgtaagcatagaac

SEQ ID NO: 698255 - DNA, 120 bp, Artificial Sequence
  ENSG00000189227_31 (sequence is synthesized)
cacccaaaactgtaagcatagaacatctatagttcttcatgaaatatcttttaactctgttaaagaatgatgtttgaataagtgggatgacataaaaggcaaagatcttggtttcactgc

SEQ ID NO: 698256 - DNA, 120 bp, Artificial Sequence
  ENSG00000189227_32 (sequence is synthesized)
actgaaaagctaatgcagataacagaaaccttatcctaaagctagtggattaagtatctactgttactcaaacaataatgacatttgggggcatcttaacctaaacaagtacttagcatt

SEQ ID NO: 698257 - DNA, 120 bp, Artificial Sequence
  ENSG00000189227_33 (sequence is synthesized)
acatctcacctgggtcaacagtctagagtatcagagttaaactctgttactgtaaattaatggaaaatgtaactgcactttgctgaaagatcaatgtccaataaaggctgcacgatcaaa

SEQ ID NO: 698258 - DNA, 120 bp, Artificial Sequence
  ENSG00000189227_34 (sequence is synthesized)
cgcgggagtcagctctgcctcccggcgccggcttcgcctggggtcctttgtactcctcgcccagggggtccccagcttgctgagctcctggcacccgaagccgttcgcctgctgcgggcg

SEQ ID NO: 698259 - DNA, 120 bp, Artificial Sequence
  ENSG00000189227_35 (sequence is synthesized)
cgtcctcgggcctagggaggggcgggtcgccctcctgtcctgcccatgttaaccagagtagacccctggcctgggcagtaagccagggggcgtcaggaaacgccccctagaaagtggctc

SEQ ID NO: 698260 - DNA, 120 bp, Artificial Sequence
  ENSG00000189227_36 (sequence is synthesized)
tgaagttgacatccgtcctactgcatggcaggactcattcccgtgaacatcactttgcagctgcgtttatgttgcaataactggaactactcttttaagtttcttttgttttctttgtat

SEQ ID NO: 698261 - DNA, 120 bp, Artificial Sequence
  ENSG00000189227_37 (sequence is synthesized)
acataacagcttcctgaggtgctaggcctaaaagatttttaaagatctttaatatttgtatattttcatggagacgccctgaggatgtttactgtcactaggtgtttattttcttttggt

SEQ ID NO: 698262 - DNA, 120 bp, Artificial Sequence
  ENSG00000189233_0 (sequence is synthesized)
acttctgctgtgtaaacgtggctttgtgattgtggcccaaagggctacgtaccccagctggttccaaatacctgaaccaaggagaagctgccaccatctcctctgtggactcctgtaacc

SEQ ID NO: 698263 - DNA, 120 bp, Artificial Sequence
  ENSG00000189233_1 (sequence is synthesized)
aaaccagaactttttttttttttttctgttcagtgacatctggctggttctcctgaactgagaagagcaggagttcacgtaacaaggaatggcagaaacgaaggatgtttttggccagga

SEQ ID NO: 698264 - DNA, 120 bp, Artificial Sequence
  ENSG00000189233_2 (sequence is synthesized)
accgcatccagttgaagatgatttatataaagaacgaacgagaaaaagaaggaaatcagatcgagaccagcggttccgagcatttccctccatggagcagagtgctcttaaggaatatga

SEQ ID NO: 698265 - DNA, 120 bp, Artificial Sequence
  ENSG00000189233_3 (sequence is synthesized)
aaaattggaatcacggaccagaagggttttgagcaacacttatcagaaacttattcagtctgtcttcctggatgacagcatccctaatggagtcaagtatctcataaataggcttcttgc

SEQ ID NO: 698266 - DNA, 120 bp, Artificial Sequence
  ENSG00000189233_4 (sequence is synthesized)
cttgattgaaaagccgacagtggacccaatctacattgcattatttggaagcactggggctgggaagagctccctgatcaatgccatcatccagcaagcaatgtttctaccagtgtctgg

SEQ ID NO: 698267 - DNA, 120 bp, Artificial Sequence
  ENSG00000189233_5 (sequence is synthesized)
agaaagcatatgtacttcctgcattgtacaagtgagctctggctgctgtgtgcagtatgaggccaaaatccaccttctgtctgaccaggagtggagggaggagctgaagaacctgaccaa

SEQ ID NO: 698268 - DNA, 120 bp, Artificial Sequence
  ENSG00000189233_6 (sequence is synthesized)
actcctgcataggacggaggagctgagcagagaagaggcagatgcgtggaacagggatgaggcagtggaggaagccacctggaagctacaaatgatttatggaaatggggcagagagtaa

SEQ ID NO: 698269 - DNA, 120 bp, Artificial Sequence
  ENSG00000189233_7 (sequence is synthesized)
gaactatgaggagttactgagggcgaagcccaaaaggaagatccccacctccagagtcatcaccctcaaggcggaagaggcagaagagctgtccatcaagctggacccctacatccgcac

SEQ ID NO: 698270 - DNA, 120 bp, Artificial Sequence
  ENSG00000189233_8 (sequence is synthesized)
acagaggagagattgggatggagaggccgctgagatgcgcatctggcccttgatcaaacatgtggaagtgacacttcccaaatccgacctgatcccagaaggggtcgtgctggtggacat

SEQ ID NO: 698271 - DNA, 120 bp, Artificial Sequence
  ENSG00000189233_9 (sequence is synthesized)
cccaggcacaggcgacttcaacagcaagagggacgagatgtggaaaaagaccattgacaagtgctcagtgatctgggtgatcagcgacatagagcgagtttctggggggcaagcccacga

SEQ ID NO: 698272 - DNA, 120 bp, Artificial Sequence
  ENSG00000189233_10 (sequence is synthesized)
agaccttctgaatgagagcatcaaagcctgccagcggggcttctgtagggacgtggccctggtggtcaccaagatggacaaactccacttgccagaatacctaagggaaagaaaggcagg

SEQ ID NO: 698273 - DNA, 120 bp, Artificial Sequence
  ENSG00000189233_11 (sequence is synthesized)
aaatcaagctattcagagtcagcgagaggctgttttagaaagaaatgaaatgataaaactacaaaggactagaattctcaaggaaaaactgaagagaaaactgccagctgacttcaaggt

SEQ ID NO: 698274 - DNA, 120 bp, Artificial Sequence
  ENSG00000189233_12 (sequence is synthesized)
tctggaagcctcagatctggtgtatacagtcagcgcccaggagtactggcagcaggctctcctcaccgaggaggaaacggaaatccctaagttaagagaatacatcaggaagagcctctt

SEQ ID NO: 698275 - DNA, 120 bp, Artificial Sequence
  ENSG00000189233_13 (sequence is synthesized)
ggacaagaagaagaggacagtgaccaagtatgtgactgaagcctttggcctgttgctcctcacagatagtttcaactccacgcaaaacctgccgaatgaacacttgcacatgagtgtcct

SEQ ID NO: 698276 - DNA, 120 bp, Artificial Sequence
  ENSG00000189233_14 (sequence is synthesized)
gcggagatttgcggaagagaaggttgagctgctggagaaggccatcgcacagtgcttcgcctgcatggagcagcctctgcaagaaggggtcaggaccgccaggacttcttaccgctgcat

SEQ ID NO: 698277 - DNA, 120 bp, Artificial Sequence
  ENSG00000189233_15 (sequence is synthesized)
cctcagagcatgcttggtgaggagtaaaggaaaccaaggttttcatcagaccctgaaagctgtttgcctgaaaaatggcatctatgcctccaggactctggcgagaattgatctaaatga

SEQ ID NO: 698278 - DNA, 120 bp, Artificial Sequence
  ENSG00000189233_16 (sequence is synthesized)
tccctgcaggagaaaatgacagaaattgggataagaagtggctggaaatatgatagctgcaaaaaaaatttcctgatccaggagataagtgccatcctcgggggcctggaggaccacatc

SEQ ID NO: 698279 - DNA, 120 bp, Artificial Sequence
  ENSG00000189233_17 (sequence is synthesized)
ctcagaaggaagaggaggatctacgagtccctcactgcctctgtccagagtgacctgaagctctgttacgaagaggcagctcagatcacgggcaaaaaagcgtgtgagcggatgaaagat

SEQ ID NO: 698280 - DNA, 120 bp, Artificial Sequence
  ENSG00000189233_18 (sequence is synthesized)
gccatcagaagaggagtggaccggcaggtggctgagggcatgtttgaaagggcccaggaaaggatgcagcaccagtttcagcagctgaagactggaatcgtggagaaggtgaagggcagc

SEQ ID NO: 698281 - DNA, 120 bp, Artificial Sequence
  ENSG00000189233_19 (sequence is synthesized)
atcaccactatgctggcccttgcttcgtcccagggggatggcctctacaaggagcttgcagatgtcgggagtgaatacaaggagatggagaagctgcacagaagcctgagggaggtcgcg

SEQ ID NO: 698282 - DNA, 120 bp, Artificial Sequence
  ENSG00000189233_20 (sequence is synthesized)
gagaatgcacggctgaggaagggcatgcaagaattcctcctaagggcatcccccagcaaggctggcccccccgggacatcactgtaactcctggggcttagtcccaatggatgaaaaatc

SEQ ID NO: 698283 - DNA, 120 bp, Artificial Sequence
  ENSG00000189233_21 (sequence is synthesized)
tcctggggcttagtcccaatggatgaaaaatcagcccagagccagagaattagaattactttttttgttcttaagagacaagatctatctacctctgttgcccaggctggagtgcagtgg

SEQ ID NO: 698284 - DNA, 90 bp, Artificial Sequence
  ENSG00000189233_22 (sequence is synthesized)
tgcagcctcgaactcctaggctcaagcgatcctccagcctcagcctccagagcagctggggctacaggtacaggccaccacacctgggta

SEQ ID NO: 698285 - DNA, 80 bp, Artificial Sequence
  ENSG00000189233_23 (sequence is synthesized)
tgggattacgggcatgagccaccgtgcccggcccatacctgggtaattttttaattttttgtggagatggcatcttgctc

SEQ ID NO: 698286 - DNA, 120 bp, Artificial Sequence
  ENSG00000189233_24 (sequence is synthesized)
tgtgctaggattgcaggcatgagccattgtgcctggctcagaattctttctgttttgtgaaatctaatagaggacatttctcaactatttggactttgcatgcaatataaaactagtatg

SEQ ID NO: 698287 - DNA, 120 bp, Artificial Sequence
  ENSG00000189233_25 (sequence is synthesized)
tttactgcattttattttatagccccaaagagtcatcttcaatacctaatggagttctaaagctttagggcaagaaacttttgcttccgcaaaaacatctaaacatcgctgggcatggtg

SEQ ID NO: 698288 - DNA, 120 bp, Artificial Sequence
  ENSG00000189233_26 (sequence is synthesized)
aaaaaagaaaaagaaaaaaatatatatatatacacacacacacccatacataaaaaaacttaaacattatagaaaaaacattgcacgatataaaacaagccataaaaagaaattcatcct

SEQ ID NO: 698289 - DNA, 120 bp, Artificial Sequence
  ENSG00000189233_27 (sequence is synthesized)
ttgcacgatataaaacaagccataaaaagaaattcatccttcaataaagaaaaatatctaaacgttgaaaaacttaagtattatggaaaacattgcaaaataaagcttttaggaatccaa

SEQ ID NO: 698290 - DNA, 120 bp, Artificial Sequence
  ENSG00000189241_0 (sequence is synthesized)
gcggcggttagctcccagttcggcctctgaggaaaacgggcgttcgcctgcggttggtccgactgttagcaacatgagcggcctggatggggtcaagaggaccactcccctccaaaccca

SEQ ID NO: 698291 - DNA, 120 bp, Artificial Sequence
  ENSG00000189241_1 (sequence is synthesized)
cagcatcattatttctgaccaagtcccgagcgaccaggacgcacaccagtacctgaggctccgcgaccaaagcgaggcgacacaggtgatggcggagccgggtgagggaggctcggagac

SEQ ID NO: 698292 - DNA, 120 bp, Artificial Sequence
  ENSG00000189241_2 (sequence is synthesized)
cgtcgcgctcccgcctccaccgccttcagaggaggggggcgtaccccaggatgccgcgggccgtggcggtactccccagatccgagttgttgggggtcgcggtcatgtggcgatcaaagc

SEQ ID NO: 698293 - DNA, 120 bp, Artificial Sequence
  ENSG00000189241_3 (sequence is synthesized)
cgggcaggaagagggccagcctcccgccgaaggcctggcagccgcttctgtggtgatggcagccgaccgcagcctgaaaaagggcgttcagggtggagagaaggccctagaaatctgtgg

SEQ ID NO: 698294 - DNA, 120 bp, Artificial Sequence
  ENSG00000189241_4 (sequence is synthesized)
cgcccagagatccgcgtctgagctgacggcgggggcggaggctgaggcggaggaggtgaagacaggaaagtgcgccaccgtctcagcagccgtggctgagagggagagcgctgaggtggt

SEQ ID NO: 698295 - DNA, 120 bp, Artificial Sequence
  ENSG00000189241_5 (sequence is synthesized)
gaaggaaggcctggcggagaaggaggtaatggaggagcagatggaggtagaggagcagccgccagaaggtgaagaaatagaagtggcggaggaggatagattggaggaggaggcgaggga

SEQ ID NO: 698296 - DNA, 120 bp, Artificial Sequence
  ENSG00000189241_6 (sequence is synthesized)
ggaagaagggccctggcctttgcatgaggctctccgcatggaccctctggaggccatccagctggaactggacactgtgaatgctcaggccgacagggccttccaacagctggagcacaa

SEQ ID NO: 698297 - DNA, 120 bp, Artificial Sequence
  ENSG00000189241_7 (sequence is synthesized)
gtttgggcggatgcgtcgacactacctggagcggaggaactacatcattcagaatatcccgggcttctggatgactgcttttcgaaaccacccccagttgtccgccatgattaggggcca

SEQ ID NO: 698298 - DNA, 120 bp, Artificial Sequence
  ENSG00000189241_8 (sequence is synthesized)
agatgcagagatgttaaggtacataaccaatttagaggtgaaggaactcagacaccctagaaccggttgcaagttcaagttcttctttagaagaaacccctacttcagaaacaagctgat

SEQ ID NO: 698299 - DNA, 120 bp, Artificial Sequence
  ENSG00000189241_9 (sequence is synthesized)
tgtcaaggaatatgaggtaagatcctccggccgagtggtgtctctttctactccaattatatggcgcagggggcatgaaccccagtccttcattcgcagaaaccaagacctcatctgcag

SEQ ID NO: 698300 - DNA, 120 bp, Artificial Sequence
  ENSG00000189241_10 (sequence is synthesized)
cttcttcacttggttttcagaccacagccttccagagtccgacaaaattgctgagattattaaagaggatctgtggccaaatccactgcaatactacctgttgcgtgaaggagtccgtag

SEQ ID NO: 698301 - DNA, 120 bp, Artificial Sequence
  ENSG00000189241_11 (sequence is synthesized)
agcccgacgtcgcccgctaagggagcctgtagagatccccaggccctttgggttccagtctggttaacatttgcccttgggaatactcctgcacaaggtctcctaccaccttctgctgga

SEQ ID NO: 698302 - DNA, 120 bp, Artificial Sequence
  ENSG00000189241_12 (sequence is synthesized)
cctgtgcttgggcatcagcaatgagtatgccttctattgtgctttgtttttgctgacttttctgcaccctgtttcctttggatattcagttctctcaacctcaagattgagacggtggtg

SEQ ID NO: 698303 - DNA, 120 bp, Artificial Sequence
  ENSG00000189241_13 (sequence is synthesized)
aagcaaatgatactgtagattgtactgcctttatctgcactgcttggaccctgtttattcccagggcctctgaactggttgctgtcacttggatttctagctttgggagcctgttccacc

SEQ ID NO: 698304 - DNA, 120 bp, Artificial Sequence
  ENSG00000189241_14 (sequence is synthesized)
tactcagctctgcattgagcagtatgggcacatgccctgtggacagttactggacgttaatgaactcagaggagaaaagcagtgagccacttgttctgtgtgatttatggtacttcattg

SEQ ID NO: 698305 - DNA, 120 bp, Artificial Sequence
  ENSG00000189241_15 (sequence is synthesized)
tgatttatggtacttcattgctcttccttcacctctagtcactttctattgctacctgccctacattggctcctgccaaggtccctctctctccctgttttccttttttttttttttttt

SEQ ID NO: 698306 - DNA, 78 bp, Artificial Sequence
  ENSG00000189241_16 (sequence is synthesized)
cccgatctcgtgatccgccctccttagcctcccaatcctctcttaaaaaagtgatagctcagaaacatttgtaaaagc

SEQ ID NO: 698307 - DNA, 120 bp, Artificial Sequence
  ENSG00000189241_17 (sequence is synthesized)
tctcttaaaaaagtgatagctcagaaacatttgtaaaagcaaggtttttatttcattttggctctgtcattttcagaggcaaagaagttggcctgtaaaatagagtgctagagctcttac

SEQ ID NO: 698308 - DNA, 120 bp, Artificial Sequence
  ENSG00000189241_18 (sequence is synthesized)
gcccctccccttcttcccaacttcctacttcctagcccttttatcaactcctagaatagttaaagagagacacatctagatgggatgaaaggtgccctaagcaggagaaactgaacaaaa

SEQ ID NO: 698309 - DNA, 120 bp, Artificial Sequence
  ENSG00000189241_19 (sequence is synthesized)
ggctagaggcatgggccaggtaaaaattgggcctagagtgaagactgtgctgtcgttaagagctttcgaggaaggagtacttactccccaatgatgatgaatggaaaaatacttttcagg

SEQ ID NO: 698310 - DNA, 120 bp, Artificial Sequence
  ENSG00000189241_20 (sequence is synthesized)
gagaattgaaggggttaaagtgttaaatatgttgcctagacaagggttctttaaagaaagacagcgcaactttgaatgctttcttacttgttttgtgacctaatttatgtggaagattgt

SEQ ID NO: 698311 - DNA, 120 bp, Artificial Sequence
  ENSG00000189241_21 (sequence is synthesized)
tatttcattaggatttagtaaaatttttttttctgattctaaacttattgtgaaaattgagctgtacagatattcttttgatttcaattgggaacatttggaagaacaacagtcttactt

SEQ ID NO: 698312 - DNA, 120 bp, Artificial Sequence
  ENSG00000189241_22 (sequence is synthesized)
gcctgtacaatatagagacatatgaatagtcataacagttttcaacttgttcttgtttctgttaaactatattcctagaaacatagtttgaacaacttggtctttgttaggcttgtcaaa

SEQ ID NO: 698313 - DNA, 120 bp, Artificial Sequence
  ENSG00000189241_23 (sequence is synthesized)
ttgccttcatggaaaaataatctacaaaagtatggtttaattgattgtcttacatgataattttccctggtaacaacttagtaagtgatatatcttttttcctaaattgcttaaatactg

SEQ ID NO: 698314 - DNA, 120 bp, Artificial Sequence
  ENSG00000189241_24 (sequence is synthesized)
tgaaattgctctgacaaattggaagtgtaccattggcatatttgtcttcctttttatgcatgatggtaaaataaaagcatgttgttctgctagatttcttatttttcaccttacccataa

SEQ ID NO: 698315 - DNA, 120 bp, Artificial Sequence
  ENSG00000189241_25 (sequence is synthesized)
atgtaatgcttgaatgaagttgttcatattaattaaaaattatggaatcattaaagtcctttaatccattaaagttcttaatggattaaaatcattaaagttcttaatggattaaaatca

SEQ ID NO: 698316 - DNA, 120 bp, Artificial Sequence
  ENSG00000189241_26 (sequence is synthesized)
tgagaggagttgaccatccccctcaggactgacttcctttccttcaacattattatataattaaagtcctagactatatagaagtgacaggccaaaattgacctttctcaagattctctt

SEQ ID NO: 698317 - DNA, 120 bp, Artificial Sequence
  ENSG00000189241_27 (sequence is synthesized)
agtttacaaactgaggtctgtcatcctctggtcattgaagtgaagtctgcttaggacatattgtcctgtaaataggattgacattccctggggccctctcaagaatctctctgagcttcc

SEQ ID NO: 698318 - DNA, 120 bp, Artificial Sequence
  ENSG00000189241_28 (sequence is synthesized)
ttttccatttctgaccatttagatgcttacaagatgcttttctctgacttcttcagctccaactgctcctttccattaccctaaagctgtggatcataaagagtgttctccagaccagca

SEQ ID NO: 698319 - DNA, 120 bp, Artificial Sequence
  ENSG00000189241_29 (sequence is synthesized)
gtatctgcaccacctggatcttgttagaaatgcagattttcgaaccccacccatgagctactgaaacagaactctgaaggtgaggcctagaaaccggttttaaccaatgtgccaagtgat

SEQ ID NO: 698320 - DNA, 120 bp, Artificial Sequence
  ENSG00000189241_30 (sequence is synthesized)
tctaatgcctgctatcaatcatttgggaaccattgtcctaaactcagctgctgcttctgcttcatctccagttgattcagtttccttaattgttaccattataaaaacaaaataaagcaa

SEQ ID NO: 698321 - DNA, 120 bp, Artificial Sequence
  ENSG00000189241_31 (sequence is synthesized)
aacaagacatttacctatattattaatcacaaataagttccctaccctgtggggtcacaatttgggctttggatatctaattctgcatcaagtacatatctctgtcttcacaatctcaac

SEQ ID NO: 698322 - DNA, 120 bp, Artificial Sequence
  ENSG00000189241_32 (sequence is synthesized)
aaattattagatatatcagtaacttccatatatgctctcattttgtagttgcagtgtcactatctccatttaatggatagggaaataggggctcaggaaagagaagtgtattatccaaga

SEQ ID NO: 698323 - DNA, 120 bp, Artificial Sequence
  ENSG00000189241_33 (sequence is synthesized)
cgaaggtaacatgggctgcattcaattagggtttctcatttccagctaagacactttgcaccatattgaagcagcttgtaactaaatttgccataaaaatatatctaaaatcctaattaa

SEQ ID NO: 698324 - DNA, 120 bp, Artificial Sequence
  ENSG00000189241_34 (sequence is synthesized)
tatcctgtctttaaaaatgtaattttttatatctactgcctgaattaaattgcttagttgtactttccagagaaatagaatggaccaaagcagttcaaatattttaatattcttctggag

SEQ ID NO: 698325 - DNA, 120 bp, Artificial Sequence
  ENSG00000189241_35 (sequence is synthesized)
tttggctgctgagatgtaaagaactattgatatcactagtaaataaataatgtatatttattgaggtttagtcaatagagcgattacttataagaggcatgtagtacttaattatcatcc

SEQ ID NO: 698326 - DNA, 120 bp, Artificial Sequence
  ENSG00000189241_36 (sequence is synthesized)
tcttcaccaaactccaacttaaccttggacaatacaattaagagttgtgttcagatggctttaaaaacaggtgcatggtacaacatgctcttgttgttaaccattttgcttaatggccaa

SEQ ID NO: 698327 - DNA, 120 bp, Artificial Sequence
  ENSG00000189241_37 (sequence is synthesized)
acttctcttgggtcagttttgataactcctctgcaatttcatcaacaatgagggaaatgtaatttcaaggtgagcattgagcactgagtatattaggcaagagtggggcttgcttatttt

SEQ ID NO: 698328 - DNA, 120 bp, Artificial Sequence
  ENSG00000189241_38 (sequence is synthesized)
tggccttgcagctcccagaaatagaatgtttacaaggtgtaatcatatttcagtaccttgtttttccagaattgttttcttttcccagaaattttttactctctatttatttgtatttag

SEQ ID NO: 698329 - DNA, 120 bp, Artificial Sequence
  ENSG00000189241_39 (sequence is synthesized)
ctcttctttactaaagtataactctatcagagcagaagactgtgtcttcttcatctttatatcttacattcttagcatggtagatgtttaattggaatgtgatttcagagagtggctgtg

SEQ ID NO: 698330 - DNA, 120 bp, Artificial Sequence
  ENSG00000189241_40 (sequence is synthesized)
ttccagtcttgatccaatattgatgaactgaatgtgttagtctattataagcaaagattttcaggtcaaacttggtttgaaatacagactgtatgttcctcacagaaaatgtgactttga

SEQ ID NO: 698331 - DNA, 120 bp, Artificial Sequence
  ENSG00000189241_41 (sequence is synthesized)
gcaaccaagtctgcttaaagtcagctattaaaagtatgtatttcatgcatctagttttttcttaatatattttataaagtctttaaagtgatatgtggaagaatgtggtaaagcacttta

SEQ ID NO: 698332 - DNA, 120 bp, Artificial Sequence
  ENSG00000189241_42 (sequence is synthesized)
gttagagcaaaaagggttgttttccctatcagcccaaaataccatatgtctagaatcattaggaattaactgtaacatagtggacaagcattattactatgtgctagtgtttcatgactt

SEQ ID NO: 698333 - DNA, 120 bp, Artificial Sequence
  ENSG00000189241_43 (sequence is synthesized)
cctcagattattcaaatggtatccaatctacttggtccaattcaactcttcttttcttccacaaacctttcacttattttacatggatgacttttgtttctcaacttttatacaattaca

SEQ ID NO: 698334 - DNA, 120 bp, Artificial Sequence
  ENSG00000189241_44 (sequence is synthesized)
gtttcataatagaatttgacattgattttatactgcctacaatattgtttatttaatgtaattcttagcataaaaataataaaaatgagcaagtcagcttctatttattgaaagcatatt

SEQ ID NO: 698335 - DNA, 120 bp, Artificial Sequence
  ENSG00000189241_45 (sequence is synthesized)
gtgaaaaacacttcacagatatctcatttcaccttcatgataattctgtaagttgttttattatattcattttgtatatgagtaaattgtggcttagagagctgaagtgacttgcctaaa

SEQ ID NO: 698336 - DNA, 120 bp, Artificial Sequence
  ENSG00000189241_46 (sequence is synthesized)
ttaaacagctagtaagtaacagaactgggacttgacgtcagatctgtttgatttcaaagggtgcatctttaaccagcatacaaaggtgtggggtcattcaggtcagagcctttgtctctg

SEQ ID NO: 698337 - DNA, 120 bp, Artificial Sequence
  ENSG00000189241_47 (sequence is synthesized)
gtttctcttaagactggtgaaagcaggagcatatgaggtttttttttttctttttttttttaaagtattatcacaggcagtgatcataactagataattagcctgagaaaatattacttt

SEQ ID NO: 698338 - DNA, 120 bp, Artificial Sequence
  ENSG00000189241_48 (sequence is synthesized)
tgtaacagtgatagcctaaataaaatagaaatgtgattccattgtaataataaagagtaccaaacatatgtgagaaactatgccacagttattttactgaaatatgatctatttttgcca

SEQ ID NO: 698339 - DNA, 120 bp, Artificial Sequence
  ENSG00000189241_49 (sequence is synthesized)
agctgatctatatcagcttaaacttgaactttgagggcagacaaaacagaatcgtactatcatcctaaagactacttcctccctctagtgaccaggaatgggaatatcacagctacaggc

SEQ ID NO: 698340 - DNA, 120 bp, Artificial Sequence
  ENSG00000189241_50 (sequence is synthesized)
atttagaaaacttgattctcaatgtatatgcatacctccctctaggggatatttgggaaattttcagtagtaattttggttattacgatgaatagggctgcagctggtattcattaaggg

SEQ ID NO: 698341 - DNA, 120 bp, Artificial Sequence
  ENSG00000189241_51 (sequence is synthesized)
cattagggatgctagacatcgtgaatgtgagggatagtgccctatataaaataattttccagctcaaaacattcatgtagatgaaaaattcattattttttaagtctagaacatagcagt

SEQ ID NO: 698342 - DNA, 120 bp, Artificial Sequence
  ENSG00000189241_52 (sequence is synthesized)
tcagtcatgtttcacttaacaatgagacattctgagaaatgtgtcattaggcaatttcatcattgtgcaaacatcatacaatatacttacacaaacctaaatgctatagcctactacaca

SEQ ID NO: 698343 - DNA, 120 bp, Artificial Sequence
  ENSG00000189241_53 (sequence is synthesized)
tgtaggctctatggtatagtctattgctcctaggctacaagcctgtgcagcatattactgtactgaattctataagcaataggaacacaatggcaagtatttgtgtaactaaacatatct

SEQ ID NO: 698344 - DNA, 120 bp, Artificial Sequence
  ENSG00000189241_54 (sequence is synthesized)
aacatatgttgtgtaactaacatatctacatagaaaaactactgtaaaaagatggcataaaatattttaaaatggtatacctgtataggacacttaccattaatggagcctgtaggactg

SEQ ID NO: 698345 - DNA, 120 bp, Artificial Sequence
  ENSG00000189241_55 (sequence is synthesized)
taatggagcctgtaggactggaagttgatctgggtgagtcagtgagtgagtggtaagcgcatgtgaaggtctaggacattactgtacactacttgatacggtttggctctgtgtccccac

SEQ ID NO: 698346 - DNA, 120 bp, Artificial Sequence
  ENSG00000189241_56 (sequence is synthesized)
taatccttacatgtcagaggggcctggtgggaggtgactgaatcatgggggcagacttcctccttactgttctttttatagtgagctctcatgagatctgggggtttaaaagtatgtggc

SEQ ID NO: 698347 - DNA, 120 bp, Artificial Sequence
  ENSG00000189241_57 (sequence is synthesized)
gtgagctctcatgagatctgggggtttaaaagtatgtggcttgctctctctctctctctctcaagctttgtcatggttagatgtgccttgcttccccttcaccttctgtcatgattgtaa

SEQ ID NO: 698348 - DNA, 120 bp, Artificial Sequence
  ENSG00000189252_0 (sequence is synthesized)
atcccactgggaagcttcaacatagctgtggaagtctgcagtctacaggagcctactatagacattctacaaccaaccagaatcatggaacagccaacttccagcaccaatggggagaag

SEQ ID NO: 698349 - DNA, 120 bp, Artificial Sequence
  ENSG00000189252_1 (sequence is synthesized)
acgaagagcccctgtgaatccaataacaaaaaaaatgatgagatgcaagaggtaccaaacagagtcttagcccccgaacagagtttgaagaacacaaaaacatcagaatatccaataata

SEQ ID NO: 698350 - DNA, 120 bp, Artificial Sequence
  ENSG00000189252_2 (sequence is synthesized)
agacttatctgaaggatcttcaaatgaggatgaagacctaggcccatgtgaaggaccttcaaaggaggacaaagatctagactcatctgaaggatcctcacaggaggatgaagacctagg

SEQ ID NO: 698351 - DNA, 120 bp, Artificial Sequence
  ENSG00000189252_3 (sequence is synthesized)
cttatctgaaggatcttcacaggacagtggggaggattagtcacacatggagaaaccaaattggacaaatcatcaccactgatggcgatgattacaataaaatcaagtttaaggagctga

SEQ ID NO: 698352 - DNA, 120 bp, Artificial Sequence
  ENSG00000189253_0 (sequence is synthesized)
atggattcagacgacctgcaagtcttccagaatgagctcatttgctgcatttgcgtgaactacttcatagatccggtcaccattgactgtgggcacagcttttgcaggccctgcctctgc

SEQ ID NO: 698353 - DNA, 120 bp, Artificial Sequence
  ENSG00000189253_1 (sequence is synthesized)
ctctgctcagaagaaggcagagcaccaatgcgctgcccttcgtgcagaaaaacctcagagaagcccaacttcaacaccaatctggtactcaaaaagctgtcttccctagccagacagacc

SEQ ID NO: 698354 - DNA, 120 bp, Artificial Sequence
  ENSG00000189253_2 (sequence is synthesized)
agacctcagaacatcaacagctcagacaatatctgtgtgctccatgaggagactaaggagctcttctgtgaggctgacaagagattgctctgtgggccctgctctgagtcaccagagcac

SEQ ID NO: 698355 - DNA, 120 bp, Artificial Sequence
  ENSG00000189253_3 (sequence is synthesized)
atggctcacagccacagcccaataggatgggctgctgaggaatgcagggagaaacttataaaggaaatggactatttatgggaaatcaatcaagagacaagaaacaatctaaatcaggaa

SEQ ID NO: 698356 - DNA, 120 bp, Artificial Sequence
  ENSG00000189253_4 (sequence is synthesized)
actagcacatttcattcgttaaaggactatgtgtcagtaaggaagaggataatcactattcaatatcaaaagatgcctatatttctcgatgaggaggagcaacggcatctgcaggcactg

SEQ ID NO: 698357 - DNA, 120 bp, Artificial Sequence
  ENSG00000189253_5 (sequence is synthesized)
gaaagagaagcagaagagcttttccaacaactacaagacagtcaagtgagaatgacccaacatttagaaaggatgaaagacatgtacagagagctgtgggagacatgccacatgcctgac

SEQ ID NO: 698358 - DNA, 120 bp, Artificial Sequence
  ENSG00000189253_6 (sequence is synthesized)
gtggtgctgctccaggatgtgagaaatgtatcagcaaggactgatttggcacagatgcaaaagccccagccagtgaacccagagctcacttcatggtgcataactggagtcctagacatg

SEQ ID NO: 698359 - DNA, 120 bp, Artificial Sequence
  ENSG00000189253_7 (sequence is synthesized)
ctcaacaacttcagagtggatagtgctctgagcacggaaatgattccttgctatataagcctttctgaggatgtgagatatgtgatatttggagatgaccatctcagtgctcccacggat

SEQ ID NO: 698360 - DNA, 120 bp, Artificial Sequence
  ENSG00000189253_8 (sequence is synthesized)
ccccagggagtggacagctttgctgtgtggggagcgcaagcattcacctccggcaagcattactgggaggtggatgtgaccctctcctccaactggattctgggagtctgtcgagattcc

SEQ ID NO: 698361 - DNA, 120 bp, Artificial Sequence
  ENSG00000189253_9 (sequence is synthesized)
aggactgcagatgccaatttcgttattgattctgatgaaagattttttttaatttcctcaaagaggagcaatcactatagtctctccaccaactctccacctttaattcagtatgtgcaa

SEQ ID NO: 698362 - DNA, 120 bp, Artificial Sequence
  ENSG00000189253_10 (sequence is synthesized)
aggcctctgggtcgagttggggtgtttctggattatgataatggatctgtgagtttttttgatgtttctaaaggttctcttatctatggttttcctccttcctccttctcttcccctctg

SEQ ID NO: 698363 - DNA, 120 bp, Artificial Sequence
  ENSG00000189253_11 (sequence is synthesized)
tttattgtgacctcccacatatgaggcaaatactgtcctaagacactatgtgcgagagcctgtgagctcattgtaacttcatggaatgtaattactatgtggttatgaatgggataacca

SEQ ID NO: 698364 - DNA, 120 bp, Artificial Sequence
  ENSG00000189253_12 (sequence is synthesized)
ccttgaatgtgtacttttgttaattaaattattttaattaataagttattgtggaatctttactagaacatcaataatggtttttttgtactagttttgttgagattcattcatttactg

SEQ ID NO: 698365 - DNA, 120 bp, Artificial Sequence
  ENSG00000189253_13 (sequence is synthesized)
taaaagtcatgttctaatgtatttaattcagatattgttagtatatcacacttgagcagccatcagagctctctactacctgtgaacttttatcacttccagaagaatcccaatacacat

SEQ ID NO: 698366 - DNA, 120 bp, Artificial Sequence
  ENSG00000189253_14 (sequence is synthesized)
taacattaattctccttttaccctcccccattccttgacagcacttaatctactttttatgtttttgcattcaggtaaataaaatcatacaatgtaagttctttttttaatctgatttct

SEQ ID NO: 698367 - DNA, 120 bp, Artificial Sequence
  ENSG00000189253_15 (sequence is synthesized)
ttttcagagagtatgttttcagtttgtacacactgtaaaccatttgtcttagtcgtatatttcaaccaggctggggtagaataatgaagtggtggatatctcatcttacaaagaataaaa

SEQ ID NO: 698368 - DNA, 120 bp, Artificial Sequence
  ENSG00000189253_16 (sequence is synthesized)
agagtgctttttttctttttaagtctgagcaagttaggttgacctcacagactttattatgtctcaacaacctagttattaatcacatttcagctcatacaacagtttttcagtgctggg

SEQ ID NO: 698369 - DNA, 120 bp, Artificial Sequence
  ENSG00000189253_17 (sequence is synthesized)
ttgctctgctattacatcttctctgaatatattatatcaggttataatattaagaaaactcttatacttattactaccagattgaaaagtccaagggggcaatggcagtatttgtcttct

SEQ ID NO: 698370 - DNA, 120 bp, Artificial Sequence
  ENSG00000189253_18 (sequence is synthesized)
tgtcttctttgctaatatattacaattattcaatgcaatttttagaatagattacacagtaaataagatgagtaaatggataagtagaggagttaacatgtataaatactattctaacat

SEQ ID NO: 698371 - DNA, 120 bp, Artificial Sequence
  ENSG00000189253_19 (sequence is synthesized)
ttttccaaaatataagtaacaaaataggacagaacatactaatgaatatctatcaaaagataagaaataaattgattttcagattcatatcaaagataacactattatgttggggtttaa

SEQ ID NO: 698372 - DNA, 120 bp, Artificial Sequence
  ENSG00000189253_20 (sequence is synthesized)
aataattgtagcataatttttacagggttgatttcaattgtcttaggttttttcatataaactatggaaagaggaaggttcctatataagatgatggggaacaggaacaggacttagaat

SEQ ID NO: 698373 - DNA, 120 bp, Artificial Sequence
  ENSG00000189253_21 (sequence is synthesized)
aatggaggctgtccttatttaaactgacatataattacttgctaagcataaagtggtataaaccttcttatgcagtagaaagaacaaactttggttacatttcaaataagaatccagatg

SEQ ID NO: 698374 - DNA, 120 bp, Artificial Sequence
  ENSG00000189266_0 (sequence is synthesized)
gtcggtagaggcagaaggagaaggtcgggttgtagaagctggggtggccggcagctcgctcatcggtgttcgtgggctttgtcggtccgtgcctcgtctctccctggaaagggagggagg

SEQ ID NO: 698375 - DNA, 120 bp, Artificial Sequence
  ENSG00000189266_1 (sequence is synthesized)
cttcgacgtcgagagggagccgctgccgcgttagttccgagcttgaagtcactaggacttctctcaaacttgtgtgctgaggagactcagatgttggcctcagctcctaggctgaactca

SEQ ID NO: 698376 - DNA, 120 bp, Artificial Sequence
  ENSG00000189266_2 (sequence is synthesized)
gcagatcggcccatgaaaacttctgtattgagacaaaggaagggatctgtcagaaagcaacacttgttatcttgggcttggcagcaaggaagaggacaggtagtggagatcctgcaatct

SEQ ID NO: 698377 - DNA, 120 bp, Artificial Sequence
  ENSG00000189266_3 (sequence is synthesized)
gaaaagcagactgaaaggtgacaaagaagctgaagatgggtggtggagagaggtataacattccagcccctcaatctagaaatgttagtaagaaccaacaacagcttaacagacagaaga

SEQ ID NO: 698378 - DNA, 120 bp, Artificial Sequence
  ENSG00000189266_4 (sequence is synthesized)
ccaaggaacagaattcccagatgaagattgttcataagaaaaaagaaagaggacatggttataactcatcagcagctgcctggcaggccatgcaaaatggggggaagaacaaaaattttc

SEQ ID NO: 698379 - DNA, 120 bp, Artificial Sequence
  ENSG00000189266_5 (sequence is synthesized)
caaataatcaaagttggaattctagcttatcaggtcccaggttactttttaaatctcaagctaatcagaactatgctggtgccaaatttagtgagccgccatcaccaagtgttcttccca

SEQ ID NO: 698380 - DNA, 120 bp, Artificial Sequence
  ENSG00000189266_6 (sequence is synthesized)
aaccaccaagccactgggtccctgtttcctttaatccttcagataaggaaataatgacatttcaacttaaaaccttacttaaagtacaggtataaaataagacaaatgtttaaatttagt

SEQ ID NO: 698381 - DNA, 120 bp, Artificial Sequence
  ENSG00000189266_7 (sequence is synthesized)
tatgttcacggatagttgtcaattggtctgaaacaaattcgctagggaatctatttgtgtagaactaattaatgtaaaaaaaatagaccatctcgtgttgtgtgcactgtgatataatgg

SEQ ID NO: 698382 - DNA, 120 bp, Artificial Sequence
  ENSG00000189266_8 (sequence is synthesized)
tagtatcagtgcaacttaaactaatgattgtacttgatattaagtgttctcaactgagtaacttttaagtggaaaccaagtttagatttggggagtggtaaaggaatcagctttttctat

SEQ ID NO: 698383 - DNA, 120 bp, Artificial Sequence
  ENSG00000189266_9 (sequence is synthesized)
tgttaggggaagacagtaatttatcattcatggaccagtagattgttgaaagttggtgaatcggattataagcttctagctaacacaaggattcagaattaggtaaacatctgaaggttt

SEQ ID NO: 698384 - DNA, 120 bp, Artificial Sequence
  ENSG00000189266_10 (sequence is synthesized)
agtatattagaaacacccaaaccagtaatatgctaacctgatgcactgctgaaagaaaatgtgaatttttcgtaataattgcattttagtgaattgtacagtgggtggaaagggcatttg

SEQ ID NO: 698385 - DNA, 120 bp, Artificial Sequence
  ENSG00000189266_11 (sequence is synthesized)
gagctcattagaatgagacatagtacaccccaatggccctgtttattaaatgtagtggattaagtgtctgtcaacaaatacaccaaaaccattttttatagaaacagtatttaatggtca

SEQ ID NO: 698386 - DNA, 120 bp, Artificial Sequence
  ENSG00000189266_12 (sequence is synthesized)
ctcaatagctttcaaaatacatttttgtattacagcactgcacaagctattctaatagtgctctggcctcatcattcctgcaaagcttgctttggggagttggataatgtgaaaatttta

SEQ ID NO: 698387 - DNA, 120 bp, Artificial Sequence
  ENSG00000189266_13 (sequence is synthesized)
agtacctaggggagaaagagccatgtaaatatctgtaataaacttgtagcatatgtaaagttttcttggcctttatcttacaaaaatggagtattttagtatgaatttgctgaatgtaag

SEQ ID NO: 698388 - DNA, 120 bp, Artificial Sequence
  ENSG00000189266_14 (sequence is synthesized)
accgtggactgttttttataatatggcctaattttaaaggtccaaaataacttgtttttaaagtttgcccttgtgctaaagtgccagtgtatgtatgttatacttgatttggttgtaaac

SEQ ID NO: 698389 - DNA, 120 bp, Artificial Sequence
  ENSG00000189266_15 (sequence is synthesized)
tatatttcaaagtaaaccctagtgtaataagttttataactaaaaaggtttaagctgctaaaactatttttaagagatgtgaaatgcagtatgggactatctttttttcctcctctaagc

SEQ ID NO: 698390 - DNA, 120 bp, Artificial Sequence
  ENSG00000189266_16 (sequence is synthesized)
ccaaagattaactagagtccctccaaccttatagattgttggctttcacaatcttataacctaggatacaggtagtttcgagtatggtgccagtgatgttttgtttttgtttggtcaagg

SEQ ID NO: 698391 - DNA, 120 bp, Artificial Sequence
  ENSG00000189266_17 (sequence is synthesized)
ggtaggtgcaacccaatggaccacttatgcaaaagatgtaaactcttgcataatacattgataacatgttttgccaactttaaatgcttaaacataagcgaaaccagtagcaagtatgtg

SEQ ID NO: 698392 - DNA, 120 bp, Artificial Sequence
  ENSG00000189266_18 (sequence is synthesized)
ggtcagcttaaaaattttgattgttaatgccctattttctaatttggcacctcttgatgcctaagcaggtaagcagatgcctaagctgtatttctccaaataaatcaagatgaagtactg

SEQ ID NO: 698393 - DNA, 120 bp, Artificial Sequence
  ENSG00000189266_19 (sequence is synthesized)
cccaagttaaatattgatagcctaaagacaagtttatgtagtacttaatgtacatgatatgaatgtgaagcataaaattaaataaaatttttccccattggcttggttttattttaaaaa

SEQ ID NO: 698394 - DNA, 120 bp, Artificial Sequence
  ENSG00000189266_20 (sequence is synthesized)
cctttagggccaggatggagcctccttcactgctgtatccccagagcgtggcatagtgcctggcacaaatttaggtgagctgtatcctgagagctgtttgtcggcatcaacattttccta

SEQ ID NO: 698395 - DNA, 120 bp, Artificial Sequence
  ENSG00000189266_21 (sequence is synthesized)
tttgaattgagaactgctaataggattgtgctggtggagctgagtttaaagaccatatggttctggcagaggctgtatcagatgtcccaaaaaagctaggacttctctcaaacttgtgtg

SEQ ID NO: 698396 - DNA, 120 bp, Artificial Sequence
  ENSG00000189266_22 (sequence is synthesized)
tgggtggggagagctgcagccacaggaaacggtaacacggcgcgtaaagggctctaattgaacttaaggaccaatggggccaccaagcaggaagtgactgacttgcccgcgtgtgtctga

SEQ ID NO: 698397 - DNA, 120 bp, Artificial Sequence
  ENSG00000189269_0 (sequence is synthesized)
agtcagtagctcgcagtggagggaggaggagctccaactgtgctctttgatggcagtttttgcacctttgggtgcttgtcatgttcgtttatttttcaaagaagacagcaggtccctgac

SEQ ID NO: 698398 - DNA, 120 bp, Artificial Sequence
  ENSG00000189269_1 (sequence is synthesized)
ctcatagaccagctagtttgggaggtggcggcagaataagggctgaggacccagatctgcctggggtcaggctgcttctaaaagtgcagggccaccctcagtagtgtggctgctagggca

SEQ ID NO: 698399 - DNA, 120 bp, Artificial Sequence
  ENSG00000189269_2 (sequence is synthesized)
gcacagttacaatttcgctgaaggctgaggcaggagtggagaggcatggagaggccccatggggaatatactgacctgttgtatcaactcccactgtggctggcccagggggaaggacgc

SEQ ID NO: 698400 - DNA, 120 bp, Artificial Sequence
  ENSG00000189269_3 (sequence is synthesized)
accctgttatgaatctgatactgatatttatgagactgtggctgctgcaacatcagaatccactactgtagagcctggcaagctggatgtgggagccacggagggccaagacctgcagca

SEQ ID NO: 698401 - DNA, 120 bp, Artificial Sequence
  ENSG00000189269_4 (sequence is synthesized)
catcagcaaccaaaagatgcccacaggtccccctgaggaccgcctgagtttaaaatttctgccatcaagtgaggaagacaatgatgatgccaagattttaccatcacctgtccagggttc

SEQ ID NO: 698402 - DNA, 120 bp, Artificial Sequence
  ENSG00000189269_5 (sequence is synthesized)
cagggtggctgttaccggtttgatagcagttcttgttcttctgaggacaacctgagtttagtatgcctaccacgaagtgaagatgatgactgtgatgatgatgatgatgatgcccagatt

SEQ ID NO: 698403 - DNA, 120 bp, Artificial Sequence
  ENSG00000189269_6 (sequence is synthesized)
ttaccgtcacctgtccaggcttgttctgaagatagcctgtttttaagatgctcactgagacacaaagatgaagaagaagaagatgatgatgacatccacataacagctcggatagaaagt

SEQ ID NO: 698404 - DNA, 120 bp, Artificial Sequence
  ENSG00000189269_7 (sequence is synthesized)
gacttgacgctggagagtctaagtgatgaagagattcatccagggtgaagcccttctgtggagctgaccagggtgctgacccaaagggcaggccagcgcgtgctgcagggtccccagctt

SEQ ID NO: 698405 - DNA, 120 bp, Artificial Sequence
  ENSG00000189269_8 (sequence is synthesized)
tgcccctggaggtctcaatcctctctacattctgaggaaaactcttggtcccagcagagagaaaaagtccaaggctgcttcccacccaccgccagcactaggtttggcctgtaccatcca

SEQ ID NO: 698406 - DNA, 120 bp, Artificial Sequence
  ENSG00000189269_9 (sequence is synthesized)
ggacccagtgcttctgggcctggcatttctcctttggcaagagagtgagaagagacgtgactgtgctccacgagcagaaagtgccattcccacttgaaataaagagactgagtgcattta

SEQ ID NO: 698407 - DNA, 120 bp, Artificial Sequence
  ENSG00000189280_0 (sequence is synthesized)
agcacacccggcaggctctgtcctggaaacaggcttcaacgggcttccccgaaaaccttccccgcttctggatatgaaattcaagctgcttgctgagtcctattgccggctgctgggagc

SEQ ID NO: 698408 - DNA, 120 bp, Artificial Sequence
  ENSG00000189280_1 (sequence is synthesized)
caggagagccctgaggagtagtcactcagtagcagctgacgcgtgggtccaccatgaactggagtatctttgagggactcctgagtggggtcaacaagtactccacagcctttgggcgca

SEQ ID NO: 698409 - DNA, 120 bp, Artificial Sequence
  ENSG00000189280_2 (sequence is synthesized)
tctggctgtctctggtcttcatcttccgcgtgctggtgtacctggtgacggccgagcgtgtgtggagtgatgaccacaaggacttcgactgcaatactcgccagcccggctgctccaacg

SEQ ID NO: 698410 - DNA, 120 bp, Artificial Sequence
  ENSG00000189280_3 (sequence is synthesized)
tctgctttgatgagttcttccctgtgtcccatgtgcgcctctgggccctgcagcttatcctggtgacatgcccctcactgctcgtggtcatgcacgtggcctaccgggaggttcaggaga

SEQ ID NO: 698411 - DNA, 120 bp, Artificial Sequence
  ENSG00000189280_4 (sequence is synthesized)
agaggcaccgagaagcccatggggagaacagtgggcgcctctacctgaaccccggcaagaagcggggtgggctctggtggacatatgtctgcagcctagtgttcaaggcgagcgtggaca

SEQ ID NO: 698412 - DNA, 120 bp, Artificial Sequence
  ENSG00000189280_5 (sequence is synthesized)
aaatatatcctccctcctgtggtcaagtgccacgcagatccatgtcccaatatagtggactgcttcatctccaagccctcagagaagaacattttcaccctcttcatggtggccacagct

SEQ ID NO: 698413 - DNA, 120 bp, Artificial Sequence
  ENSG00000189280_6 (sequence is synthesized)
gccatctgcatcctgctcaacctcgtggagctcatctacctggtgagcaagagatgccacgagtgcctggcagcaaggaaagctcaagccatgtgcacaggtcatcacccccacggtacc

SEQ ID NO: 698414 - DNA, 120 bp, Artificial Sequence
  ENSG00000189280_7 (sequence is synthesized)
acctcttcctgcaaacaagacgacctcctttcgggtgacctcatctttctgggctcagacagtcatcctcctctcttaccagaccgcccccgagaccatgtgaagaaaaccatcttgtga

SEQ ID NO: 698415 - DNA, 120 bp, Artificial Sequence
  ENSG00000189280_8 (sequence is synthesized)
ggggctgcctggactggtctggcaggttgggcctggatggggaggctctagcatctctcataggtgcaacctgagagtgggggagctaagccatgaggtaggggcaggcaagagagagga

SEQ ID NO: 698416 - DNA, 120 bp, Artificial Sequence
  ENSG00000189280_9 (sequence is synthesized)
ttcagacgctctgggagccagttcctagtcctcaactccagccacctgccccagctcgacggcactgggccagttccccctctgctctgcagctcggtttccttttctagaatggaaata

SEQ ID NO: 698417 - DNA, 120 bp, Artificial Sequence
  ENSG00000189280_10 (sequence is synthesized)
gtgagggccaatgcccagggttggagggaggagggcgttcatagaagaacacacatgcgggcaccttcatcgtgtgtggcccactgtcagaacttaataaaagtcaactcatttgctggt

SEQ ID NO: 698418 - DNA, 120 bp, Artificial Sequence
  ENSG00000189283_0 (sequence is synthesized)
gaattgcagtccccgctctgctctgtccggtcacaggactttttgccctctgttcccgggtccctcaggcggccacccagtgggcacactcccaggcggcgctccggccccgcgctccct

SEQ ID NO: 698419 - DNA, 120 bp, Artificial Sequence
  ENSG00000189283_1 (sequence is synthesized)
ccctctgcctttcattcccagctgtcaacatcctggaagctttgaagctcaggaaagaagagaaatccactgagaacagtctgtaaaggtccgtagtgctatctacatccagacggtgga

SEQ ID NO: 698420 - DNA, 120 bp, Artificial Sequence
  ENSG00000189283_2 (sequence is synthesized)
agggagagaaagagaaagaaggtatcctaggaatacctgcctgcttagaccctctataaaagctctgtgcatcctgccactgaggactccgaagaggtagcagtcttctgaaagacttca

SEQ ID NO: 698421 - DNA, 120 bp, Artificial Sequence
  ENSG00000189283_3 (sequence is synthesized)
actgtgaggacatgtcgttcagatttggccaacatctcatcaagccctctgtagtgtttctcaaaacagaactgtccttcgctcttgtgaataggaaacctgtggtaccaggacatgtcc

SEQ ID NO: 698422 - DNA, 120 bp, Artificial Sequence
  ENSG00000189283_4 (sequence is synthesized)
ttgtgtgcccgctgcggccagtggagcgcttccatgacctgcgtcctgatgaagtggccgatttgtttcagacgacccagagagtcgggacagtggtggaaaaacatttccatgggacct

SEQ ID NO: 698423 - DNA, 120 bp, Artificial Sequence
  ENSG00000189283_5 (sequence is synthesized)
ctctcaccttttccatgcaggatggccccgaagccggacagactgtgaagcacgttcacgtccatgttcttcccaggaaggctggagactttcacaggaatgacagcatctatgaggagc

SEQ ID NO: 698424 - DNA, 120 bp, Artificial Sequence
  ENSG00000189283_6 (sequence is synthesized)
ctgcgggtctactttcagtgacacaggtaaagactgcatttcgtcattacccagaccctcccgtgggcctcaggaaagaggctgcactctcagaatggggatgcacaaaaacaccttcac

SEQ ID NO: 698425 - DNA, 120 bp, Artificial Sequence
  ENSG00000189283_7 (sequence is synthesized)
cagcatccttgggtggtggctgcaaaggacaaagagctggaggggagaaaaccctggcccttgagtactgtattcccagcctcccagtctcttccaactctcctgcctcttcactctctt

SEQ ID NO: 698426 - DNA, 120 bp, Artificial Sequence
  ENSG00000189283_8 (sequence is synthesized)
cttccaagccagtgcccccagcccaccaccacctttctccagtctttcctgcggtggtgctcctccagaatccaatgttcacaaagcagaccttctgtcatgcacaacttcttgtttaaa

SEQ ID NO: 698427 - DNA, 120 bp, Artificial Sequence
  ENSG00000189283_9 (sequence is synthesized)
aggtcaaccccaacttaacttaaaggtgtgacatggcccttaggctcaagtctgtctgcaaagccctgtaaaccagctttctctgcctccctaacacgcccccgggcaaactcctctgct

SEQ ID NO: 698428 - DNA, 120 bp, Artificial Sequence
  ENSG00000189283_10 (sequence is synthesized)
ttcactgagtggactcttctcttcagttgctatttggtaaattgcccttcatgtttccctttatgttcggctcctaggaagctcaggccacagggaaaagtcaaggcttgatagaattaa

SEQ ID NO: 698429 - DNA, 120 bp, Artificial Sequence
  ENSG00000189283_11 (sequence is synthesized)
tctttgtcttaatgatgactaactgttgagagatcataggtttaagactctggtagaaagatagctatagccaatttccttgtcaaaatgcttctactccaaatttttatgcagtgtcta

SEQ ID NO: 698430 - DNA, 120 bp, Artificial Sequence
  ENSG00000189283_12 (sequence is synthesized)
acgagctcatgcctagatctatctggcaatctatattatccctcctagtctcagttcacatagtagactgctggaatgactgagggtgatgtttggcctgtaaacaaaaagtgttaaaga

SEQ ID NO: 698431 - DNA, 120 bp, Artificial Sequence
  ENSG00000189283_13 (sequence is synthesized)
gagctattgccaaccagtttgaagaccgccccccgcctctccccaagaggaactgaatcagcatgaaaatgcagtttcttcatctcaccatcctgtattcttcaaccagtgatcccccac

SEQ ID NO: 698432 - DNA, 120 bp, Artificial Sequence
  ENSG00000189283_14 (sequence is synthesized)
ctcggtcactccaactcccttaaaatacctagacctaaacggctcagacaggcagatttgaggtttccccctgtctccttattcggcagccttatgattaaacttccttctctgctgcaa

SEQ ID NO: 698433 - DNA, 120 bp, Artificial Sequence
  ENSG00000189283_15 (sequence is synthesized)
acatgacaaggaggactttcctgcctcttggagatcagaggaggaaatggcagcagaagccgcagctctgcgggtctactttcagtgacacagatgtttttcagatcctgaattccagca

SEQ ID NO: 698434 - DNA, 120 bp, Artificial Sequence
  ENSG00000189283_16 (sequence is synthesized)
tttcaaaaaaaatgtctacatattgaatttttatacattaagtggttcatgaaacccctgaaatgtgttagtaaatagggcaattatgaaatatttggacatagctagactttaaaaatt

SEQ ID NO: 698435 - DNA, 120 bp, Artificial Sequence
  ENSG00000189283_17 (sequence is synthesized)
gttaatctgaaggtcagatagacttggccttctccagctttcgtgattattccctcagcagcaagctagtcttaggcagagcaagtttaaagacattcatggtgctcactctgcaaaact

SEQ ID NO: 698436 - DNA, 120 bp, Artificial Sequence
  ENSG00000189283_18 (sequence is synthesized)
cttgcaagtgatgagaaaactaaggcttaaggatgttaagtattattagttcaaggccaacggtaagtggcaaagctcagatttgaatccaggcagtcccaccctaaaggccattctctt

SEQ ID NO: 698437 - DNA, 120 bp, Artificial Sequence
  ENSG00000189283_19 (sequence is synthesized)
agtctgtgtactgccctccttgctaaaagagctcacctctctagccacttccttctccctgtcccatctccccttgtaccctccaaatagtcttcttagcctcttcaccttatctactgg

SEQ ID NO: 698438 - DNA, 120 bp, Artificial Sequence
  ENSG00000189283_20 (sequence is synthesized)
cctatttctgccttgaggacctcccacctcctcgcctgctggacttcttccttacctgccttgttaatacaaccctgcccagcacctgcctccctggtcacactacagccaggtagcaga

SEQ ID NO: 698439 - DNA, 120 bp, Artificial Sequence
  ENSG00000189283_21 (sequence is synthesized)
aaccaaaatgggcctggatttccccaaccaacttggttctacttgcaagattctcagatcatgctgaatcctgcctaggctaccctcccactttcttttctttaccatctgaccacatgc

SEQ ID NO: 698440 - DNA, 120 bp, Artificial Sequence
  ENSG00000189283_22 (sequence is synthesized)
ctaaataaacatcacttgggcgaatacagtgttccccaaattgcattcattcccattttgtcatgatttttcttatctttgtggaccacctagagcattatttacttgattcactttttg

SEQ ID NO: 698441 - DNA, 120 bp, Artificial Sequence
  ENSG00000189283_23 (sequence is synthesized)
aattttagtatatatatcttaaactttatatttcagcctcaaagaaaaacaagtactacctgtaattagaagttaagcataaaaataaacataagagaaaaacaatgctgatgatttcca

SEQ ID NO: 698442 - DNA, 120 bp, Artificial Sequence
  ENSG00000189283_24 (sequence is synthesized)
gctctgcatagttgcttgccttagcaactaggagtgagattcagtctctgtgttaaaaagtgaggctagccaccattagaggggcatttaattctagcaccaaaccgaaactctccattt

SEQ ID NO: 698443 - DNA, 120 bp, Artificial Sequence
  ENSG00000189283_25 (sequence is synthesized)
ggcatattcagaaggattaaagagaataacctactgagagattcaatgtagatcacttaagattatcttaaacaggaatatgactgactcccaactttggagaaacagcagtggaggcca

SEQ ID NO: 698444 - DNA, 120 bp, Artificial Sequence
  ENSG00000189283_26 (sequence is synthesized)
gatcttaaacccagagcaagctggctttagacttgcttcaaccctaaaccagtactcctttccacccacccacctccccccaacccctgcaggcatatcaagaagacaaggtgcatgggg

SEQ ID NO: 698445 - DNA, 120 bp, Artificial Sequence
  ENSG00000189283_27 (sequence is synthesized)
gaaaaccaaagagtcagcttccctagggctgatgggtcaaatctcagtgcttgcctctgacattttgcttgccgacagtctgtcttgaaaaccaacaggttgcaaagaagaatgtgaaca

SEQ ID NO: 698446 - DNA, 120 bp, Artificial Sequence
  ENSG00000189283_28 (sequence is synthesized)
cctatatccagagatgccctatataagaataaagactataagaccaaaaagatgttcttgacttaatgtttggggtggacatacctagttatacgatttggctgtttccccacccacatc

SEQ ID NO: 698447 - DNA, 90 bp, Artificial Sequence
  ENSG00000189283_29 (sequence is synthesized)
agggggagggtctttcccatgctgttctcatgattgatagtgatggttttataaaggacatttcccctgaatacgctgtcttgcctgctg

SEQ ID NO: 698448 - DNA, 120 bp, Artificial Sequence
  ENSG00000189283_30 (sequence is synthesized)
ataaaggacatttcccctgaatacgctgtcttgcctgctgccatgtaagatgtggctttgctcctcttttgccttcctccatgattgcgagtccattaaacctcattcctttataaatta

SEQ ID NO: 698449 - DNA, 120 bp, Artificial Sequence
  ENSG00000189283_31 (sequence is synthesized)
ctctgttcccgggtccctcaggcggccacccagtgggcacactcccaggcggcgctccggccccgcgctccctccctctgcctttcattcccagctgtcaacatcctggaagctgattct

SEQ ID NO: 698450 - DNA, 120 bp, Artificial Sequence
  ENSG00000189283_32 (sequence is synthesized)
gattgaaaaccactgattctaataacacagcattgtggaatgattcgcagctgattctaaagtgcatttaacattgaaaaccactgattctaataacacagcatcgtggaatgaatcagg

SEQ ID NO: 698451 - DNA, 120 bp, Artificial Sequence
  ENSG00000189283_33 (sequence is synthesized)
cactgagaacagtctgtaaagagtgagaagtggaccttggaccaccctgtctggagtcattccctgggcttctccagcccctgaagaaaatagtctcactcttgtcacccaggctggagt

SEQ ID NO: 698452 - DNA, 120 bp, Artificial Sequence
  ENSG00000189283_34 (sequence is synthesized)
taaccagccaaatgaatataaatacaagattggcctccagtctgtccaaaaaggtaaataaagaatccatctccctcccacttcggagacaccaggtaagatgttactcatatttattct

SEQ ID NO: 698453 - DNA, 120 bp, Artificial Sequence
  ENSG00000189283_35 (sequence is synthesized)
tgcagaacttctgaggagagttgcttagcaaccgtggctttggaggtgaatttttgcttgaccttttcactaccatagctgagtaaataaataggtgcttctaaaatgagcccagtgaat

SEQ ID NO: 698454 - DNA, 120 bp, Artificial Sequence
  ENSG00000189283_36 (sequence is synthesized)
atcacgggcacttggttttcagcttatctgttgtgaattttaatagtagattgagtggtgcctttgtgatgtggaagtaagatatgtgaggatttgagactgactttgttgctttacctc

SEQ ID NO: 698455 - DNA, 120 bp, Artificial Sequence
  ENSG00000189283_37 (sequence is synthesized)
ttggagatcattcaagttgtgcgttttaattaaatttatattatagatatacttacaaattttttttaaaaaatattaggacctgaaatagcattttctcttgggaaaaataccagcttg

SEQ ID NO: 698456 - DNA, 120 bp, Artificial Sequence
  ENSG00000189283_38 (sequence is synthesized)
cagatcattgaccagtgtcattggtggagttgttttatttccctctgaccactgagttgtagtctttcctcctatagacttcaataggagctttattcttttgcagtgggaataacaagt

SEQ ID NO: 698457 - DNA, 120 bp, Artificial Sequence
  ENSG00000189283_39 (sequence is synthesized)
attggtgaaatgcttgggaagttatctttatgttgttaaaagtttcactcctgattgtgtgcatatgaattttgtacggactcttcaggatgtttttctctttcctccttcacttagttt

SEQ ID NO: 698458 - DNA, 120 bp, Artificial Sequence
  ENSG00000189283_40 (sequence is synthesized)
gccatgcagaaggcaacagaataaaatttgatattttcagataataagtattttccacgctgagacatgattttgctttgaaatgaatttcttagtaattctgaatgtacaaatatgcca

SEQ ID NO: 698459 - DNA, 120 bp, Artificial Sequence
  ENSG00000189283_41 (sequence is synthesized)
agaggtttttcagagtaagctacattttttttccagtgaaaatgtggaaagtgcctgagaactttatgaacaagcttcttttctagccacgtaactattgtatgctaaaaaaaaaaaaaa

SEQ ID NO: 698460 - DNA, 120 bp, Artificial Sequence
  ENSG00000189283_42 (sequence is synthesized)
aatcactgcattcagttttgagatttgtcatcaaacaaactgcacccttgccatttgtaactttgtggcaccacaggatattctaatctcatcttgttcctgtcctgtcccattaatgga

SEQ ID NO: 698461 - DNA, 120 bp, Artificial Sequence
  ENSG00000189283_43 (sequence is synthesized)
gccaaccacttctccaaggaggtctggttccttttttatttttattttttggagaatggtatttagaaaccaagatctggacatcagacgacccagagagtcgggacagtggtggaaaaa

SEQ ID NO: 698462 - DNA, 120 bp, Artificial Sequence
  ENSG00000189283_44 (sequence is synthesized)
ttcaaaaaaacaggagagagagagagagaaatgtatctatctctctgaaatttgtttataaatatagggttaccatgcaatactggcatatatctagactaaaaaaattacttgtttatc

SEQ ID NO: 698463 - DNA, 120 bp, Artificial Sequence
  ENSG00000189283_45 (sequence is synthesized)
tgaaattcaaatttaactggtatcttgtatttttttctggcaaacctgttaataaactcccatggaccccagttacagatcctctcctataaatagtttcttttttgtttttagaattag

SEQ ID NO: 698464 - DNA, 120 bp, Artificial Sequence
  ENSG00000189283_46 (sequence is synthesized)
ataattccaaattaaaattaggcaattcttcatctgacctgtgaataaatatgttcatgttataagttgcagaagtagatcagacacaaataaaaaacaaaattagtgaataaatgctgt

SEQ ID NO: 698465 - DNA, 120 bp, Artificial Sequence
  ENSG00000189283_47 (sequence is synthesized)
tagcaattgattggaaaaaattgtatcaaccacttagtgatcatgatttttagctagaaaacacattcattgtattctgatttcaccttgaaatgtaagtaagtctttactggatagctt

SEQ ID NO: 698466 - DNA, 120 bp, Artificial Sequence
  ENSG00000189283_48 (sequence is synthesized)
taaatatatgtgcacttggcctttctctccccagccctctttttagagtattctaaatagttaaagacccagactaccttgccccctattgttgttcaaatatggtgttgtactcagatc

SEQ ID NO: 698467 - DNA, 120 bp, Artificial Sequence
  ENSG00000189283_49 (sequence is synthesized)
cttgcattctagaaagcttatttcattctcccatgtcataagtttgtcagctctgcactcagttgcctggggggatatggcaagtgctataacagaggctgtctttcatattttattttg

SEQ ID NO: 698468 - DNA, 120 bp, Artificial Sequence
  ENSG00000189283_50 (sequence is synthesized)
aaccttttccactgttcaccatctctctctcgttttttaaggatcaagctagtttagtttacctaagaacataggcctatgggcatgactacaaacctctttctgttcctcttatgaagg

SEQ ID NO: 698469 - DNA, 120 bp, Artificial Sequence
  ENSG00000189283_51 (sequence is synthesized)
ccagtatgtcattttagagtgccctgttcaaatttaaatggggtgacaatacctcagacttgactgcctaggttgaattttttctcctgggttttctatgcagtgggtattttcaggtag

SEQ ID NO: 698470 - DNA, 120 bp, Artificial Sequence
  ENSG00000189283_52 (sequence is synthesized)
aggctagaaagctttagcctttttcccaaggcttgctgaattgtaggagttttgtcttagaatgctttttctagacactttaagaactttaagaagattcaaacttattacccaaatttc

SEQ ID NO: 698471 - DNA, 120 bp, Artificial Sequence
  ENSG00000189283_53 (sequence is synthesized)
ctgtaggctttgttttgtcagtttttgcttctgtcttgcctggaggcctgacacctcctgtcttccaggtaaattgacttcccttgtacatcttaccagaaagatatttaccctaacttg

SEQ ID NO: 698472 - DNA, 120 bp, Artificial Sequence
  ENSG00000189283_54 (sequence is synthesized)
ttacacaaactattgccacagtacctgtggatttttaagttaactaacatgtgtatttctctttaaaggttttgtgcacagaccaaacaaatcaccctcagtcttcccagcagtcagatg

SEQ ID NO: 698473 - DNA, 120 bp, Artificial Sequence
  ENSG00000189283_55 (sequence is synthesized)
tggtaactaagactaggacggataatataggttgtgaggtggcaaacaacttagggtcctaagattttgccaagactgtcatcattacctggagtataatgggactaactatacctccct

SEQ ID NO: 698474 - DNA, 120 bp, Artificial Sequence
  ENSG00000189283_56 (sequence is synthesized)
ttaaggacaatggaaacattctattgaaaccatcctcacagggttaacaagaattagatgctgggttctggacagaaatatagttgtaattaagcattaatcaggctgcactttggccca

SEQ ID NO: 698475 - DNA, 120 bp, Artificial Sequence
  ENSG00000189292_0 (sequence is synthesized)
gtgggcgggacctcgggcgtgatcgtcgaggagaccgcggctccctcacctgccggcttgttcctcggggtccgcggagcgagcccagctctcggcgcgtgtcggagtctcccagccccg

SEQ ID NO: 698476 - DNA, 80 bp, Artificial Sequence
  ENSG00000189292_1 (sequence is synthesized)
ctcccagccccgcggccccgagcgcacgatgcgcggacccgggcaccccctcctcctggggctgctgctggtgctggggg

SEQ ID NO: 698477 - DNA, 120 bp, Artificial Sequence
  ENSG00000189292_2 (sequence is synthesized)
ggcgctgctgcggctggtggtggaactcgtccaggagctgcggaagcaccactcggcggagcacaagggcctgcagctcctcgggcgggactgcgccctgggccgcgcggaggcggcggg

SEQ ID NO: 698478 - DNA, 120 bp, Artificial Sequence
  ENSG00000189292_3 (sequence is synthesized)
gctggggccttcgccggagcagcgagtggaaattgttcctcgagatctgaggatgaaggacaagtttctaaaacaccttacaggccctctttattttagtccaaagtgcagcaaacactt

SEQ ID NO: 698479 - DNA, 120 bp, Artificial Sequence
  ENSG00000189292_4 (sequence is synthesized)
ataagcagtgagcagaccgtacaggagcagcacaccaggagccatgagaagtgccttggaaaccaacagggaaacagaactatctttatacacatcccctcatggacaagagatttattt

SEQ ID NO: 698480 - DNA, 120 bp, Artificial Sequence
  ENSG00000189292_5 (sequence is synthesized)
ttgcagacagactcttccataagtcctttgagttttgtatgttgttgacagtttgcagatatatattcgataaatcagtgtacttgacagtgttatctgtcacttatttaaaaaaaaaac

SEQ ID NO: 698481 - DNA, 120 bp, Artificial Sequence
  ENSG00000189292_6 (sequence is synthesized)
acaaaaggaatgctccacatttgacgtgtagtgctataaaacacagaatatttcattgtcttcattaggtgaaatcgcaaaaaatatttctttagaaacataagcagaatcttaaagtat

SEQ ID NO: 698482 - DNA, 120 bp, Artificial Sequence
  ENSG00000189292_7 (sequence is synthesized)
attttcatataacataatttgatattctgtattactttcactgttaaattctcagagtattatttggaacggcatgaaaaattaaaatttcggtcatgttttagagacagtggagtgtaa

SEQ ID NO: 698483 - DNA, 120 bp, Artificial Sequence
  ENSG00000189292_8 (sequence is synthesized)
atctgtggctaattctgttggtcgtttgtattataaatgtaaaatagtattccagctattgtgcaatatgtaaatagtgtaaataaacacaagtaataaatgaagtgtttgttataatga

SEQ ID NO: 698484 - DNA, 120 bp, Artificial Sequence
  ENSG00000189292_9 (sequence is synthesized)
ctttggaaatggaagcatttccagcaaagctttcccaactgaaaaggaagcatccaggctccttcatggccctgcccagagtggtggcccacggggaatttcccaggaaagcatgaaagc

SEQ ID NO: 698485 - DNA, 120 bp, Artificial Sequence
  ENSG00000189292_10 (sequence is synthesized)
ggcggggggactgacgaagatccgcatgggggtactaacacttcagcggcttctaattaaagccccgctcggagcccttggggacccgcctgacgtcggcgggcgcggggataagaagct

SEQ ID NO: 698486 - DNA, 120 bp, Artificial Sequence
  ENSG00000189292_11 (sequence is synthesized)
ccccgaggtctgaggcgggactcggagccggcgcaccccaggtcggccgtgggtccagcgctcggagcggccgagtccccgcgtcccgtgcgctccgcccgccgggcatggagtagtggc

SEQ ID NO: 698487 - DNA, 120 bp, Artificial Sequence
  ENSG00000189292_12 (sequence is synthesized)
cagcaaacacttccatagactttatcacaacaccagagactgcaccattcctgcatgtaagtaacagcattggatttttataaaatgcaagagcagtgcaggcagcggttcccctctttc

SEQ ID NO: 698488 - DNA, 120 bp, Artificial Sequence
  ENSG00000189292_13 (sequence is synthesized)
catttcctcatataggcccctgccttcttagctcaaatttgcctattccttcctcactatggagttaggggccaagatcgccagaccattgcagaagataactaacttctgcatcagcta

SEQ ID NO: 698489 - DNA, 120 bp, Artificial Sequence
  ENSG00000189298_0 (sequence is synthesized)
gctagtttcaagcactttgtgagtatggggtgaatcggcgtcggccttccactgtggggttaaatctcatcccgcggctctcctcctgtcggtcctgcagttcttttgtccccgggtaga

SEQ ID NO: 698490 - DNA, 120 bp, Artificial Sequence
  ENSG00000189298_1 (sequence is synthesized)
gggatcttctgcagaaatagcgctggaagctagagtgaggcctgagtactgccttggcctaggatggctagagaattaagtgaaagcacagccctggatgcccagtctacagaagaccag

SEQ ID NO: 698491 - DNA, 120 bp, Artificial Sequence
  ENSG00000189298_2 (sequence is synthesized)
atggagcttctggtcataaaggtggaggaagaagaagccggttttcccagtagcccagatctgggttctgagggctcccgcgagcgcttccgaggcttccgctacccggaggctgcaggc

SEQ ID NO: 698492 - DNA, 120 bp, Artificial Sequence
  ENSG00000189298_3 (sequence is synthesized)
ccccgcgaggcgctgagtcggctccgagagctctgccgacagtggctgcagcctgagatgcacagcaaggagcagatcctggagctgctggtgctggagcagttcctgaccatcctgccg

SEQ ID NO: 698493 - DNA, 120 bp, Artificial Sequence
  ENSG00000189298_4 (sequence is synthesized)
gggaatctgcagagctgggtgcgggagcagcatccagagagcggggaggaggtggtggtgctattggagtatttggagaggcagctggatgagccggcgccgcaggtttcaggtgttgac

SEQ ID NO: 698494 - DNA, 120 bp, Artificial Sequence
  ENSG00000189298_5 (sequence is synthesized)
caggggcaagaactgctctgttgcaagatggcactattgacaccagccccagggtcacaaagtagccaatttcagctaatgaaggctctgctcaagcatgaatctgtgggatcccagcct

SEQ ID NO: 698495 - DNA, 120 bp, Artificial Sequence
  ENSG00000189298_6 (sequence is synthesized)
ttacaagatagagttctccaggtccccgtgcttgcccatggaggatgctgcagagaagataaagtggtagcttctaggcttactccagagtcccaggggttgttgaaagtggaagatgtg

SEQ ID NO: 698496 - DNA, 120 bp, Artificial Sequence
  ENSG00000189298_7 (sequence is synthesized)
gccctgaccctcacccctgaatggacacagcaggattcatctcaggggaatctctgtagagatgaaaagcaggagaaccatggcagcctggtctccctgggtgatgaaaaacagactaag

SEQ ID NO: 698497 - DNA, 120 bp, Artificial Sequence
  ENSG00000189298_8 (sequence is synthesized)
agcagggacttgcctccagctgaggagcttccagaaaaggagcatgggaagatatcgtgccacctgagagaagacattgcccagattcctacatgtgcagaagctggtgaacaggagggc

SEQ ID NO: 698498 - DNA, 120 bp, Artificial Sequence
  ENSG00000189298_9 (sequence is synthesized)
aggctacaaagaaagcagaaaaatgccacaggagggaggcggcacatctgccatgaatgtggaaagagttttgctcaaagctcaggcctgagtaaacacaggagaatccacactggtgag

SEQ ID NO: 698499 - DNA, 120 bp, Artificial Sequence
  ENSG00000189298_10 (sequence is synthesized)
aaaccctacgaatgtgaagagtgtggcaaagccttcattgggagctctgcccttgtcattcatcagagagtccacactggtgagaagccatatgagtgtgaagaatgtggtaaggccttc

SEQ ID NO: 698500 - DNA, 120 bp, Artificial Sequence
  ENSG00000189298_11 (sequence is synthesized)
agtcatagctcagaccttatcaagcatcagagaacccacactggggagaagccctatgagtgtgatgactgtgggaagaccttcagccagagctgcagcctccttgaacatcacagaatc

SEQ ID NO: 698501 - DNA, 120 bp, Artificial Sequence
  ENSG00000189298_12 (sequence is synthesized)
cacactggggagaagccgtatcagtgcagtatgtgtggcaaagcctttaggcgaagttcacatctcctgagacatcagaggatccatactggggataaaaatgttcaggaacctgagcag

SEQ ID NO: 698502 - DNA, 120 bp, Artificial Sequence
  ENSG00000189298_13 (sequence is synthesized)
ggagaggcctggaaaagtaggatggaaagccagttggaaaatgttgaaactcccatgtcttataaatgtaatgagtgtgaaagaagtttcactcagaatacaggcctcattgaacatcaa

SEQ ID NO: 698503 - DNA, 120 bp, Artificial Sequence
  ENSG00000189298_14 (sequence is synthesized)
aaaatccacactggtgagaaaccctatcagtgtaatgcgtgtggaaaaggcttcacccgaatttcataccttgttcaacatcagagaagccatgtagggaaaaacatcctatcacagtga

SEQ ID NO: 698504 - DNA, 120 bp, Artificial Sequence
  ENSG00000189298_15 (sequence is synthesized)
cccatgccatacatgccagagttggtgctcatttgtcactgatctgaagccactccccctggagtctcaactatagaaattgtgggctgggctttatttaccactacacattatcaggtg

SEQ ID NO: 698505 - DNA, 120 bp, Artificial Sequence
  ENSG00000189298_16 (sequence is synthesized)
ttagaaaatgtagactgggttagacaaattatcttctaagttctagaaggggtttgtaatcaaaacatatttgataggaggctacgggagagttgtctagaagaggtaagacctgaaact

SEQ ID NO: 698506 - DNA, 120 bp, Artificial Sequence
  ENSG00000189298_17 (sequence is synthesized)
gtttgttctctcccactagaattaaatggatgtttagactggctacttgccctaaaccagcacttggtgatgtctactgggtggatggttgtgatttgggggctgcttctctgaccattc

SEQ ID NO: 698507 - DNA, 120 bp, Artificial Sequence
  ENSG00000189298_18 (sequence is synthesized)
tttttgactgtaatgaatcctccacagttggtcagattcataaagtcttatatccccctctgtgccttttctgcaggtgctaataaatgtttattgaatgtaccagtgagattaccttca

SEQ ID NO: 698508 - DNA, 120 bp, Artificial Sequence
  ENSG00000189298_19 (sequence is synthesized)
gaaaatctgatgttatccaggtttctgaagaacttctcgccaaggccatttgtgcttgtgtccaattctctgacctagattgtgactcaatctagtgtgtttcttaccaagtacataggc

SEQ ID NO: 698509 - DNA, 81 bp, Artificial Sequence
  ENSG00000189298_20 (sequence is synthesized)
tgtgactcaatctagtgtgtttcttaccaagtacataggcagagcagggttactgtgattgaaagaatccatttttttttt

SEQ ID NO: 698510 - DNA, 72 bp, Artificial Sequence
  ENSG00000189298_21 (sequence is synthesized)
tccatatttctttaccagactaggaattctattctagtgcaaatgccttaaaaagcttatcactaaatcatt

SEQ ID NO: 698511 - DNA, 120 bp, Artificial Sequence
  ENSG00000189298_22 (sequence is synthesized)
tctagtgcaaatgccttaaaaagcttatcactaaatcattacgaatgtgtgccatccgtggaattgcttttttttttttttttttgtaaatatgaggtctcactatgttgcccaggctgg

SEQ ID NO: 698512 - DNA, 120 bp, Artificial Sequence
  ENSG00000189298_23 (sequence is synthesized)
tctcgaaatcctgggcaatcctcctgcctcaccctctcaagtactggaattacaggcgtgagccaccatacccagcccaaatttcactctttaatgttttcctgttgctattctttaagg

SEQ ID NO: 698513 - DNA, 120 bp, Artificial Sequence
  ENSG00000189298_24 (sequence is synthesized)
aaaaaactttcctattcagacagtgtgaaaatcagtcatcaagtcagaataaaatgatgaatattctaatgctcagtatcttagttctctcgggcctaaccaatgcctcctaaaacaata

SEQ ID NO: 698514 - DNA, 120 bp, Artificial Sequence
  ENSG00000189298_25 (sequence is synthesized)
gatactatcctgccccaccctaccacccaacacacactgtatagtaaactgcatcaaaacttattcctgctaagttcatactttctccagctcaatggattcacaccaaatttttttttt

SEQ ID NO: 698515 - DNA, 87 bp, Artificial Sequence
  ENSG00000189298_26 (sequence is synthesized)
tgtccaagtgttctcccgtgtttgattttttgttcttggcgatagtttgctgagaatgatgagacgaggtttcactgtgttagccag

SEQ ID NO: 698516 - DNA, 84 bp, Artificial Sequence
  ENSG00000189298_27 (sequence is synthesized)
atcacttatggtttcagaacgccattattagtgtctgactgtcttggtcttcttatacattgattcccaaatcacgtgtggtaa

SEQ ID NO: 698517 - DNA, 120 bp, Artificial Sequence
  ENSG00000189298_28 (sequence is synthesized)
tggtcttcttatacattgattcccaaatcacgtgtggtaacagcatctcaatttttcatgatgacggtttgaaccattaatttaattcctcaggctatctacttttttgttaaacatact

SEQ ID NO: 698518 - DNA, 120 bp, Artificial Sequence
  ENSG00000189298_29 (sequence is synthesized)
gtgtagaccatcttttttttttcccatcatgatagtcaaaattttagtctgtgtattcaagtgagaaaatttttagtcagcattatacaagtagtatttattatgtatacattcagtgga

SEQ ID NO: 698519 - DNA, 120 bp, Artificial Sequence
  ENSG00000189298_30 (sequence is synthesized)
gttgtttctacaaaagtatttcggaatgactattctgctgcaaacttttgtgtaagcgcttcaccttattcctacaataaggagaagtgcactaacaaaatgaacaatgcagcaagggct

SEQ ID NO: 698520 - DNA, 120 bp, Artificial Sequence
  ENSG00000189298_31 (sequence is synthesized)
tcagtcgcagctcaggtcttatcaaacaccagagaaccctcaatgggagaagccttatgagtgtgacaactgtggaaagacagttccttttttgttagtatcacttctacttattgtaga

SEQ ID NO: 698521 - DNA, 120 bp, Artificial Sequence
  ENSG00000189298_32 (sequence is synthesized)
aatatgctttcattattgcatctactcacatttctcactcggtttctggcaccagcaatctcttccatatttataatatcagtcaaaaactctggaattcaaatataacaagacttttct

SEQ ID NO: 698522 - DNA, 120 bp, Artificial Sequence
  ENSG00000189298_33 (sequence is synthesized)
ggtcacctttgatagttaatgacttgggcattgtgatatattatctcctgctgtatgtattttgtttagtagaaattgaatcattatccacaatcctttatagaactatccaagtccctg

SEQ ID NO: 698523 - DNA, 120 bp, Artificial Sequence
  ENSG00000189298_34 (sequence is synthesized)
tttttatgctagtttccaaggcttggtccttcaaggttttcagggatctaggggacacaaatctaacaaatcctaatgtatattatttgtattatagtaataaaccatatggttactttg

SEQ ID NO: 698524 - DNA, 120 bp, Artificial Sequence
  ENSG00000189298_35 (sequence is synthesized)
agtttcaagcactttgtgagtatggggtgaatcggcgtcggccttccactgtggggttaaatctcatcccgcggctctcctcctgtcggtcctgcagttcttttgtccccgggtagaggt

SEQ ID NO: 698525 - DNA, 120 bp, Artificial Sequence
  ENSG00000189299_0 (sequence is synthesized)
ttcctcttgaagtgactttctgcttccaatcaaagctcaagaattccacctaaaaatgtttttctgctcaaaagctcttttttattacttccatgttttgagccttgttccagaaagctg

SEQ ID NO: 698526 - DNA, 120 bp, Artificial Sequence
  ENSG00000189299_1 (sequence is synthesized)
aggtttctccaggtctgaccactaatcagtgagacattggtgcctctttcttcagtgcttctagcaggcctactgataagctccctagatgagatacactgcataaaaaaatgatgccca

SEQ ID NO: 698527 - DNA, 120 bp, Artificial Sequence
  ENSG00000189299_2 (sequence is synthesized)
aaggacagctttaagtgcctgctagatatctgttctttcagaagtctctctccacctatctctccagtaaagatggacttaaaactaaaagactgtgaattttggtatagtctccatggc

SEQ ID NO: 698528 - DNA, 120 bp, Artificial Sequence
  ENSG00000189299_3 (sequence is synthesized)
caggtcccagggctgctggactgggacatgaggaatgagttatttctgccttgtaccacagaccagtgctctttagctgagcaaatccttgccaaatacagagtcggagtaatgaagccc

SEQ ID NO: 698529 - DNA, 120 bp, Artificial Sequence
  ENSG00000189299_4 (sequence is synthesized)
ccagaaatgcctcagaagaggagacccagtcctgatggagatggtcctccctgtgaacccaatctgtggatgtgggtggaccccaatatcctgtgcccccttggcagccaggaggcccca

SEQ ID NO: 698530 - DNA, 120 bp, Artificial Sequence
  ENSG00000189299_5 (sequence is synthesized)
aagcccagtggaaaagaggatctgacaaacatttctcctttccctcagcccccacaaaaagacgaagggtctaactgctcagaggacaaagtggtagagtctctgccatcttcctccagt

SEQ ID NO: 698531 - DNA, 120 bp, Artificial Sequence
  ENSG00000189299_6 (sequence is synthesized)
gagcagtctcctttacagaagcagggtatccattcccccagtgactttgagctcacagaagaggaggctgaggaaccagacgacaactccctccagtcccctgaaatgaaatgttaccag

SEQ ID NO: 698532 - DNA, 120 bp, Artificial Sequence
  ENSG00000189299_7 (sequence is synthesized)
agccagaaactatggcaaatcaacaaccaagagaagtcctggcaaaggccccctctcaattgtagccaccttattgccctagcattaagaaacaacccccactgtggcctcagtgtgcag

SEQ ID NO: 698533 - DNA, 120 bp, Artificial Sequence
  ENSG00000189299_8 (sequence is synthesized)
gagatctacaatttcacccgacagcatttcccctttttctggacagctccggatggctggaagagcaccattcattacaacctctgcttcctggacagctttgagaaggtgccagacagc

SEQ ID NO: 698534 - DNA, 120 bp, Artificial Sequence
  ENSG00000189299_9 (sequence is synthesized)
cttaaggatgaagataatgcaagacctcgctcttgcctttggaagctcactaaggaggggcaccgccgcttttgggaggagactcgtgtcttagcctttgctcaaagggagagaatccaa

SEQ ID NO: 698535 - DNA, 120 bp, Artificial Sequence
  ENSG00000189299_10 (sequence is synthesized)
gagtgcatgagtcagccagagttgttgacctctctctttgatctttgaaatgccattgctcccttttggaacactgccttccttactgtgcctacttatcccctgacattcattaatctc

SEQ ID NO: 698536 - DNA, 120 bp, Artificial Sequence
  ENSG00000189299_11 (sequence is synthesized)
tctttagctactgttacaataatggtgttaagtaaagttagaggtgggtacaggggagacagaacttaaatccaggtggagagtcatggaaagtcgcacgaggagagtggctgttgttcc

SEQ ID NO: 698537 - DNA, 120 bp, Artificial Sequence
  ENSG00000189299_12 (sequence is synthesized)
aaattttgagcaaaggaaaagaaatcctagaaacaatggcatagaaactaaggaaagaagggtgtgttttgtgaaagaaaggaattttgtttatagagagtattttcacacatgaaagtg

SEQ ID NO: 698538 - DNA, 120 bp, Artificial Sequence
  ENSG00000189299_13 (sequence is synthesized)
aacagtggaatataaagcataaaaggcaggatggagccgagccatggagaacctcgagtgccatgtgaagagaatttgacttgtgatgaagaatcaagtttccccttctaccattcatca

SEQ ID NO: 698539 - DNA, 120 bp, Artificial Sequence
  ENSG00000189299_14 (sequence is synthesized)
gctacatctcctttttaagtaacccattttatccttcagaacctcacttttctatttctggccctggacttctaagccttgtttctttgtcatccaattccaatattgacaaataattct

SEQ ID NO: 698540 - DNA, 120 bp, Artificial Sequence
  ENSG00000189299_15 (sequence is synthesized)
aaacagctacttttagtttgtatgtttaacgtcctgtgaaatattcctgtattaaccccaagccttttgatgataaagctttattttctattatttttagttctcaagattttattgagg

SEQ ID NO: 698541 - DNA, 120 bp, Artificial Sequence
  ENSG00000189299_16 (sequence is synthesized)
atatgctaatgtgtcaaggtccatcttagatgctgaggataaaaagctgagggatactagtgggagacatatttataatgtaaatatgatgaaacagatgtgagaaattgacatggaaat

SEQ ID NO: 698542 - DNA, 120 bp, Artificial Sequence
  ENSG00000189299_17 (sequence is synthesized)
ggggagacattcttcctgggaaagacatgaaagggcattggaaaaaatacattttgagctagttttgaagaataaatggcaaactggagtagaggcattacagagacaacaatgtgaaca

SEQ ID NO: 698543 - DNA, 120 bp, Artificial Sequence
  ENSG00000189299_18 (sequence is synthesized)
aagtggatggagtgtttgggggaatggcatgaagttcagtgtgacttaactacatgaggaccgtgagtgactaagagaaaactattaggtgtttggacttcatcttgtgggtttttagga

SEQ ID NO: 698544 - DNA, 120 bp, Artificial Sequence
  ENSG00000189299_19 (sequence is synthesized)
gccaagagacatcagtggagttttgctaaaaaacaaaaaaagaaacaagccagcagcaacaacaaacactacagcatttgtttttctaatttcaaaattatctttaacatcttttctatg

SEQ ID NO: 698545 - DNA, 120 bp, Artificial Sequence
  ENSG00000189299_20 (sequence is synthesized)
caaataaacttttgtttatcagatttaagcatagctttttgcttcaatgatattaacatatatccaggagaaaatagatttttaggtataaatttagttgcaaaaccttcataatggggg

SEQ ID NO: 698546 - DNA, 120 bp, Artificial Sequence
  ENSG00000189299_21 (sequence is synthesized)
tacaaaaacgcctgtaagctacaaaagcaattaattcaatataattgtaactattttcaaagttcacatttttataatgatgtattatacctcatacaaaattgtatatttaggttaaat

SEQ ID NO: 698547 - DNA, 120 bp, Artificial Sequence
  ENSG00000189299_22 (sequence is synthesized)
cacaaaacaacatatgcaaacagtattttttgaaaaaaattgtaaatgctacttctgtatcataaggcaaagaccaagttaacagaataccttggaattaataaaatattctgcatataa

SEQ ID NO: 698548 - DNA, 120 bp, Artificial Sequence
  ENSG00000189306_0 (sequence is synthesized)
gggtggcaagatggtggcgcgcaggaggaagtgcgccgcgcgggacccggaggaccgtatccccagcccactgggctacgcagctattccaatcaagttctctgaaaagcaacaggcttc

SEQ ID NO: 698549 - DNA, 120 bp, Artificial Sequence
  ENSG00000189306_1 (sequence is synthesized)
tcactacctctatgtgagagcacacggcgttcgacaaggcaccaagtccacctggcctcagaagaggactctttttgtcctcaatgtgcccccatactgcacagaggagagcctgtcccg

SEQ ID NO: 698550 - DNA, 120 bp, Artificial Sequence
  ENSG00000189306_2 (sequence is synthesized)
cctcctgtccacctgtggcctcgtccagtctgtagagttgcaggagaagccggacctggctgagagcccaaaggagtcaaggtcgaagttttttcatcccaagccagttccgggtttcca

SEQ ID NO: 698551 - DNA, 120 bp, Artificial Sequence
  ENSG00000189306_3 (sequence is synthesized)
ggtagcctatgtggtgttccagaagccaagtggggtgtcagcggccttggccctgaagggccccctgctggtgtccacagagagccaccctgtgaagagtggcattcacaagtggatcag

SEQ ID NO: 698552 - DNA, 120 bp, Artificial Sequence
  ENSG00000189306_4 (sequence is synthesized)
tgactacgcagactctgtgcccgaccctgaggccctgagggtggaagtggacacgttcatggaggcatatgaccagaagatcgctgaggaagaagctaaggccaaggaggaggagggggt

SEQ ID NO: 698553 - DNA, 120 bp, Artificial Sequence
  ENSG00000189306_5 (sequence is synthesized)
ccctgacgaggagggctgggtgaaggtgacccgccggggccggcggcctgtgctcccccggactgaggcagccagcttgcgggtgctggagagggagagacggaagcgcagccgaaaaga

SEQ ID NO: 698554 - DNA, 120 bp, Artificial Sequence
  ENSG00000189306_6 (sequence is synthesized)
gctgctcaacttctacgcctggcagcatcgagagagcaagatggagcatctagcgcagctgcgcaagaagttcgaggaggacaagcagaggatcgagctgctgcgggcccagcgcaaatt

SEQ ID NO: 698555 - DNA, 120 bp, Artificial Sequence
  ENSG00000189306_7 (sequence is synthesized)
ccgaccgtactgagctgtgagagccgcagtgaatggctggaggtgcagggccaggaggaggcgaggcagggcctgcagcggtctctgagaggccgagctctggccaacgggccccaggtt

SEQ ID NO: 698556 - DNA, 120 bp, Artificial Sequence
  ENSG00000189306_8 (sequence is synthesized)
gaaggccaccgcgtccaacagccccatcagagtccacacaggccaggagggaaggaccaggccacccctcgggtcttgtgcttcagcagtcctggggacccaggcgtgccgagaggagga

SEQ ID NO: 698557 - DNA, 120 bp, Artificial Sequence
  ENSG00000189306_9 (sequence is synthesized)
cttgtccttcctgcttcttgcctccacaccctcctctccaggaccctggatgaatccgttctgtgcttccttttccctcaatgcaaaagcccttgctggcaacgaaaaagcctcaaaagc

SEQ ID NO: 698558 - DNA, 120 bp, Artificial Sequence
  ENSG00000189306_10 (sequence is synthesized)
agtgagaatacaagaaccttttattttccatccagttgggcagcagggaaaggctaggtgggcccagcccgcccttccttcctccagctggctggagattattagccaggagacagcagc

SEQ ID NO: 698559 - DNA, 120 bp, Artificial Sequence
  ENSG00000189306_11 (sequence is synthesized)
cctggaacccagactctgtctcccccttgaggtcacagatgttgaagttggaatctcgctccttcccctgactaccatcctaggctgggcctcaagactagtgaggcctgtccccaccat

SEQ ID NO: 698560 - DNA, 120 bp, Artificial Sequence
  ENSG00000189306_12 (sequence is synthesized)
ccctggccttgttgtggggctcaggaactcagagtcccagtgttgagtctgggagcactaggtcttcatagttccaggcccagagctacagctgggctgggagcgtgtgtgtgcactgta

SEQ ID NO: 698561 - DNA, 120 bp, Artificial Sequence
  ENSG00000189306_13 (sequence is synthesized)
agaaggagctgatgatactggccacgtgctggggttcgctcatgtggacacagtgattgcctgggacttccacaaactggaaccgctggagaggggagggggtgggtagtgagatgtggc

SEQ ID NO: 698562 - DNA, 120 bp, Artificial Sequence
  ENSG00000189306_14 (sequence is synthesized)
cagaggagcctagggagctccatgggccccggggtcagggccctcccacagcattccagctccctgcaggtcaggagcgcctcccacagtgagtttcccccacactcggctccttggagc

SEQ ID NO: 698563 - DNA, 120 bp, Artificial Sequence
  ENSG00000189306_15 (sequence is synthesized)
cccgacagtccatagcaccccaggagatgtctaaccttagggacttggaggcctcccaggggtctaggccagctgagttgtgaagttgcatggcagggacagggcagggccgaggccagg

SEQ ID NO: 698564 - DNA, 120 bp, Artificial Sequence
  ENSG00000189306_16 (sequence is synthesized)
gttgctgtgattgtatccgaagtagtcctcgtgagaaaagataatgagatgacgtgagcagcctgcagacttgtgtctgccttcaagaagccagacaggaaggccctgcctgccttggct

SEQ ID NO: 698565 - DNA, 120 bp, Artificial Sequence
  ENSG00000189306_17 (sequence is synthesized)
ctgacctggcggccagccagccagccacaggtgggcttcttccttttgtggtgacaacgccaagaaaactgcagaggccccagggtcaggtgtaagtgggtaggtgaccataaaacacca

SEQ ID NO: 698566 - DNA, 120 bp, Artificial Sequence
  ENSG00000189306_18 (sequence is synthesized)
ggtgctcccaggaacccgggcaaaggccatccccacctacagccagcatgcccactggcgtgatgggtgcagagggatgaggcagccaggtgttctgctgtggtttgggagcctataaag

SEQ ID NO: 698567 - DNA, 77 bp, Artificial Sequence
  ENSG00000189306_19 (sequence is synthesized)
ggcagccaggtgttctgctgtggtttgggagcctataaagtgagactaggctgggcatggtggctcccatctgcaaa

SEQ ID NO: 698568 - DNA, 78 bp, Artificial Sequence
  ENSG00000189306_20 (sequence is synthesized)
tgactattagctgggcatgatggcatgcgcctgtagtgccacctactcaggtggctgaggtgggaggatcatttgagc

SEQ ID NO: 698569 - DNA, 120 bp, Artificial Sequence
  ENSG00000189306_21 (sequence is synthesized)
tttgaggctgcagtgagctatgactgagcctgagcaacagaatgagaccctgtctctcaaaaaatgtgggactgtctctggcagttgggtcacctaattgtgcctggccccaagaaggag

SEQ ID NO: 698570 - DNA, 120 bp, Artificial Sequence
  ENSG00000189306_22 (sequence is synthesized)
cccaagaaggaggggtgggtacttgaggatggtaaagaacctccccaccaaaggtctctgtttcttaaattctgattacatgtgtccccaggcctctagggactgatcactggagcatga

SEQ ID NO: 698571 - DNA, 120 bp, Artificial Sequence
  ENSG00000189306_23 (sequence is synthesized)
ggcctgatagatcctggtggtcacttgttgggcctgggggcagaccaggggtctttcccagtgcatgagaagagatgggtgaggtgggaccagagtgggcgacagtggctggacaccagc

SEQ ID NO: 698572 - DNA, 120 bp, Artificial Sequence
  ENSG00000189306_24 (sequence is synthesized)
tgcctgagccccgccttacctctttgagggtggatttcattgtgtctatcatgaacgacagggactccttgtcagagtaattctctcttggatcaaaatatccgtggactgctctggaaa

SEQ ID NO: 698573 - DNA, 120 bp, Artificial Sequence
  ENSG00000189306_25 (sequence is synthesized)
gtgaggagttgggggttgttggggttcatcttagaaccgcctcccagcggtgcccccatcctgccctgggttcaggcctctgaggagaaaccaaagcctgggctaccccaactcccacag

SEQ ID NO: 698574 - DNA, 120 bp, Artificial Sequence
  ENSG00000189306_26 (sequence is synthesized)
ctgggtcccttgaccctgggttggatttgaggctcagttaatctcagctcacgctcagctggcacaagccaggcgcaagcaagtgctgaaggcacagccttgctggggcgcagggagttc

SEQ ID NO: 698575 - DNA, 120 bp, Artificial Sequence
  ENSG00000189306_27 (sequence is synthesized)
aggacttggtcacagtcagccctgaacagcagagctgggatctgaacaggcgctggagcccacacttgctctgagagagaatttatgtcttcacaatcctcccattgaaagtctacaatc

SEQ ID NO: 698576 - DNA, 120 bp, Artificial Sequence
  ENSG00000189306_28 (sequence is synthesized)
ctccatctcaaaaaaaaaaaaaaaaaagtctacaatcccgtggtttttaatacattgagttgtgagaccatcgtcacaattacattttcatcacccccaaagaaatcgcaaacctctgag

SEQ ID NO: 698577 - DNA, 120 bp, Artificial Sequence
  ENSG00000189306_29 (sequence is synthesized)
catcacccccaaagaaatcgcaaacctctgagcttacacacacacacacacaccccacccccccacccccaacaggcttccggtcctgagcaaccatgacctggctttgtctctgccgtg

SEQ ID NO: 698578 - DNA, 120 bp, Artificial Sequence
  ENSG00000189306_30 (sequence is synthesized)
tgtcctatttggacttgaacgtgaatgcagccatacaacacgtagacggttgtgtctgacttcatccacttagtgcgatgttttcaaggctcatccatgctggagcccatgtcagtgctt

SEQ ID NO: 698579 - DNA, 120 bp, Artificial Sequence
  ENSG00000189306_31 (sequence is synthesized)
ttttcaaggctcatccatgctggagcccatgtcagtgcttcgtttctttttatggcttaaaaatcgtctatggtgggccacgcacggtggctctcgcctgtaatcccaacactgggaggc

SEQ ID NO: 698580 - DNA, 120 bp, Artificial Sequence
  ENSG00000189306_32 (sequence is synthesized)
gaggcagaggttgcagtgagtcgagactgggctcactggttatggagccttacctgggcatgccccccgctgacacctgtggaaaggcatgggacagccccggcccatcccctgctgcct

SEQ ID NO: 698581 - DNA, 120 bp, Artificial Sequence
  ENSG00000189306_33 (sequence is synthesized)
gagccctcccctcctctgaccttcctccttccatgaccctgctgccaggggggcttcccaaaaaagatcttgagtcttagcgatgtggtcgacacgcagagaacttggagcctcatgcca

SEQ ID NO: 698582 - DNA, 120 bp, Artificial Sequence
  ENSG00000189306_34 (sequence is synthesized)
gggccccctcccagagattcctggcgcccatgtctccttggggggtgactgaaggggatgggtccagactcacttgatcaacaggacatgggcctgcagcttcctgatggaatgcgcaca

SEQ ID NO: 698583 - DNA, 120 bp, Artificial Sequence
  ENSG00000189306_35 (sequence is synthesized)
cagctccctgctgacgaagtcaatgctgttctctgcctgcagagacaaaaacatggtgaattctcgtcacaaggcacaggcactctcgtgggcacgaaacccatctctgttggggtggct

SEQ ID NO: 698584 - DNA, 120 bp, Artificial Sequence
  ENSG00000189306_36 (sequence is synthesized)
aagccctggcgagggcaccttagccacccaccctgggtctgagcccaggaccccacatcactgcctcatcgaaggctctttagcccctggtggccagagactcctgccctctccaagtct

SEQ ID NO: 698585 - DNA, 120 bp, Artificial Sequence
  ENSG00000189306_37 (sequence is synthesized)
gttctcccctcttcctgggctcgtggctacccagcctgactccatttccaatactcctttgccaccaggtatggctgtgtgattaaagtcagagaagtgagttgggccacttttgggcct

SEQ ID NO: 698586 - DNA, 120 bp, Artificial Sequence
  ENSG00000189306_38 (sequence is synthesized)
ggattttaggacttaggtgtggcccttccacacccctttcccagtccataggctgcacctcacgctgtcccctgccagcctgggacaggcttcttgccaggagaaagaaacttgctggga

SEQ ID NO: 698587 - DNA, 120 bp, Artificial Sequence
  ENSG00000189306_39 (sequence is synthesized)
ccacagtgcaggatgggcactccgtgatggccccagccagcctcctccgcggccctgcctgccctgtcttgtgactgttttacgtctggatggcggggatgtggccagcttgagtgagat

SEQ ID NO: 698588 - DNA, 120 bp, Artificial Sequence
  ENSG00000189306_40 (sequence is synthesized)
gtgctgtaggtgtgacacgaagctggatttggaaaacagcatgcaaaataatgcaatcaagctttatgttgattacatcttaaatcacattgtggatgttaaataaaaatatgagaagaa

SEQ ID NO: 698589 - DNA, 120 bp, Artificial Sequence
  ENSG00000189306_41 (sequence is synthesized)
gtggcaagatggtggcgcgcaggaggaagtgcgccgcgcgggacccggaggaccgtatccccagcccactgggctacgcagcctccagactgttaagagaagctgtgaaggcacaggcag

SEQ ID NO: 698590 - DNA, 120 bp, Artificial Sequence
  ENSG00000189308_0 (sequence is synthesized)
actggtggtggcggcggcggcggcggcccgggctccggctgtcggggaagctgctgagctgtgatggtgatgacgaggtgaaaatggcggatctttcgaaatacaatcccggcccctgac

SEQ ID NO: 698591 - DNA, 120 bp, Artificial Sequence
  ENSG00000189308_1 (sequence is synthesized)
ataccagaggcggcggcgacggcgacgtcgccaccccggctcccttctcggtccccgggtaccctggagcgctccagtttggacaaactgggaaaggaagctgctggccagagctatcgt

SEQ ID NO: 698592 - DNA, 120 bp, Artificial Sequence
  ENSG00000189308_2 (sequence is synthesized)
gcacgggcaaaacaagccccgccggggctcgggattgcccaggaccttctggagcccctacctcggagcccgagggaggagaaagcggcagccgctggagtgcctgatcaactttctagc

SEQ ID NO: 698593 - DNA, 120 bp, Artificial Sequence
  ENSG00000189308_3 (sequence is synthesized)
gggagaacgatcatggaggtggtgccagctgaggtgaatagtttgcttccagaggaaataatggacactggtataactttagtggatgatgatagtattgaggctgttattgtttcatcc

SEQ ID NO: 698594 - DNA, 120 bp, Artificial Sequence
  ENSG00000189308_4 (sequence is synthesized)
ccaattcccatggagacagaactggaagaaattgtcaacataaattctactggtgactctacagccacgcccatttccacggaaccaatcacagtgtacagtaaccacactaaccaagtt

SEQ ID NO: 698595 - DNA, 120 bp, Artificial Sequence
  ENSG00000189308_5 (sequence is synthesized)
gcagtgaataccacaattactaaagcagattctaataccacagtgaaaccagcttttccaagtggccttcaaaaacttggtgctcagactcctgtgactatatcagccaatcagattatt

SEQ ID NO: 698596 - DNA, 120 bp, Artificial Sequence
  ENSG00000189308_6 (sequence is synthesized)
ttaaacaaagtatcacagacatctgatcttaaacttggcaatcagacccttaaaccagatggacagaagttaattttaacaactttgggcaagtctggttcaccaattgttttagcacta

SEQ ID NO: 698597 - DNA, 120 bp, Artificial Sequence
  ENSG00000189308_7 (sequence is synthesized)
ccccatagccaactaccccaggctcagaaagttacaactcaggcccagtcaggagatgctaagttaccaccgcagcaaattaaagtagttaccattggagggaggccagaggtgaaacct

SEQ ID NO: 698598 - DNA, 120 bp, Artificial Sequence
  ENSG00000189308_8 (sequence is synthesized)
gtcattggtgtctcagcattgaccccaggaagtcaactgattaatactacaactcagccctctgtgttacagacccaacagttaaaaacagtacagattgctaagaagcctcgaacgcca

SEQ ID NO: 698599 - DNA, 120 bp, Artificial Sequence
  ENSG00000189308_9 (sequence is synthesized)
acctctggtccagtaatcacgaagctgatctttgcaaaaccaattaatagtaaagcagttacaggacagacaactcaagtttcaccaccagttattgcaggtagggttctttcacagtct

SEQ ID NO: 698600 - DNA, 120 bp, Artificial Sequence
  ENSG00000189308_10 (sequence is synthesized)
actcccggaactccatcaaagaccataacaatatctgaaagtggtgttattggatcaactttaaattctacaacacagacaccaaataaaatagccatctcacctttgaaatcgccaaat

SEQ ID NO: 698601 - DNA, 120 bp, Artificial Sequence
  ENSG00000189308_11 (sequence is synthesized)
aaggcagtgaaatcaactgtgcagaccatcactgttggaggagtgagcacatcacagtttaagacaattattcctctggcaactgctcccaatgtccagcagattcaagtgcctggaagc

SEQ ID NO: 698602 - DNA, 120 bp, Artificial Sequence
  ENSG00000189308_12 (sequence is synthesized)
aagtttcattatgtccgacttgttactgccacatcagccagtagctcaacccagccagttagtcagaatcccagtacaaacactcagcctcttcagcaagcaaagccagtggttgttaat

SEQ ID NO: 698603 - DNA, 120 bp, Artificial Sequence
  ENSG00000189308_13 (sequence is synthesized)
acaaccccagtgcggatgtcagttccaattgtctcagctcaggctgtcaaacaagttgttccaaaaccaatcaatccaacttcacaaatagtaactactagccagccacagcaacggctt

SEQ ID NO: 698604 - DNA, 120 bp, Artificial Sequence
  ENSG00000189308_14 (sequence is synthesized)
atcatgcctgccacaccactgccacagatccagcccaacctcactaacctgccaccaggcactgtcctggcaccagctccgggaacagggaatgtgggttatgcagtgcttccagctcag

SEQ ID NO: 698605 - DNA, 120 bp, Artificial Sequence
  ENSG00000189308_15 (sequence is synthesized)
tatgttactcagctacagcagtcttcatatgtatcaatagcaagcaactctacctttactggaacatctggtatccagacccaggcacggcttccattcaatggcataatcccatcagag

SEQ ID NO: 698606 - DNA, 120 bp, Artificial Sequence
  ENSG00000189308_16 (sequence is synthesized)
tcggccagtcggccccgaaagccctgtaattgtacaaaatcactgtgtttgaaattgtattgtgattgctttgcaaatggtgaattttgcaacaactgcaattgtactaattgttacaac

SEQ ID NO: 698607 - DNA, 120 bp, Artificial Sequence
  ENSG00000189308_17 (sequence is synthesized)
aatttggaacatgaaaatgaaaggcaaaaagcaataaaggcatgccttgacagaaatccagaagcctttaagcctaagatagggaaaggaaaggagggagaatctgatcgacgtcatagc

SEQ ID NO: 698608 - DNA, 120 bp, Artificial Sequence
  ENSG00000189308_18 (sequence is synthesized)
aaagggtgtaattgcaaacgatcaggatgtcttaaaaactactgtgaatgctatgaggcaaaaataatgtgttcctcaatatgcaaatgtattggctgtaagaattttgaagaaagcccg

SEQ ID NO: 698609 - DNA, 120 bp, Artificial Sequence
  ENSG00000189308_19 (sequence is synthesized)
gaaaggaagacattgatgcatttggcagatgcagctgaagtaagggtacagcaacaaacagcagccaagacgaagttatcctctcaaatttcagacttgcttactaggccaacaccagct

SEQ ID NO: 698610 - DNA, 120 bp, Artificial Sequence
  ENSG00000189308_20 (sequence is synthesized)
ttaaatagtggaggcggaaaattgccatttacatttgtaactaaggaagtagctgaagccacatgtaattgcctccttgcccaggcagagcaggcagacaagaagggaaaatcaaaggca

SEQ ID NO: 698611 - DNA, 120 bp, Artificial Sequence
  ENSG00000189308_21 (sequence is synthesized)
gcagcggaacggatgatacttgaggaattcggacgatgtttgatgagtgtcatcaactctgcaggaaaggcaaaaagtgacccttgtgccatgaattgctaactcttgcacaaaagactg

SEQ ID NO: 698612 - DNA, 120 bp, Artificial Sequence
  ENSG00000189308_22 (sequence is synthesized)
ataaatggaactgtacagaaaatttaaggtgcagggacacttgattttctggaagaaaaacaattactgtattttaattcagtccttgttttaaaagacctgaaattataatactgaagg

SEQ ID NO: 698613 - DNA, 120 bp, Artificial Sequence
  ENSG00000189308_23 (sequence is synthesized)
agaagaaattttaaatgaggaaattagtacattttaaatcttagttaaatctgcttatgccccttctaaattgaatttttctttattatatagattttttaatttgcttgggtttcttaa

SEQ ID NO: 698614 - DNA, 120 bp, Artificial Sequence
  ENSG00000189308_24 (sequence is synthesized)
gaattagatgttctctttctgatacctttgacaaaaaatgtttataaattcatataatttataatgtatggtgttgtatgactttgttaatagaaaagccaaagcagcagtggttagcac

SEQ ID NO: 698615 - DNA, 120 bp, Artificial Sequence
  ENSG00000189308_25 (sequence is synthesized)
cattctttgggacttgatctagaatatctgcagacagaatgttacataaacaaattcttatgaaacacattcaaatgacattttgtatttagaaaaggactatcttttaaagaaaaagca

SEQ ID NO: 698616 - DNA, 120 bp, Artificial Sequence
  ENSG00000189308_26 (sequence is synthesized)
gccttttagggccgattctggaataatatcctgttgtcactttgggaatgtcagaaggggaaacaatccccaggcacactaaaaattttttaaagttatttaaaaaaacatataaaatat

SEQ ID NO: 698617 - DNA, 120 bp, Artificial Sequence
  ENSG00000189308_27 (sequence is synthesized)
taaaggacagtaaatctcagaggatgggcaatgtgtttctataataaggaaaggctaacagatgctctgggctgtctccattttctttcaaagaggtggtatgtatttgaagtaataaat

SEQ ID NO: 698618 - DNA, 120 bp, Artificial Sequence
  ENSG00000189308_28 (sequence is synthesized)
tgtcaaagtgattactgggtactattaaaatgataggtggatataaatggaagtaaacattatgtagtgataatatagaacctcacatagtaatcaagtataaaatttggcatgggtgga

SEQ ID NO: 698619 - DNA, 120 bp, Artificial Sequence
  ENSG00000189308_29 (sequence is synthesized)
taaaatttggcatgggtggagaaacaaagaatagggaagctgcaaaagatgaatttagagaagttttcatctatacaatcaattatttttacagacttttttttttttttttttgagacg

SEQ ID NO: 698620 - DNA, 120 bp, Artificial Sequence
  ENSG00000189308_30 (sequence is synthesized)
agccgccgtgccaggccctttttatagacttttgaactaagaggtttcaaaccaaatcgcaactcttacttgatttacagaaatgggcctcctaacaaaattttcaaaattgtggtggga

SEQ ID NO: 698621 - DNA, 120 bp, Artificial Sequence
  ENSG00000189308_31 (sequence is synthesized)
tttctttttataagggaagtttaatatggcattattttcagccagtgatttggaaggtctgttttcctataattactaaaataacctaaatcattttcagtattcaaaaactctatgaat

SEQ ID NO: 698622 - DNA, 120 bp, Artificial Sequence
  ENSG00000189308_32 (sequence is synthesized)
ttaagagcctgttgtgacaggactcttgattttatgacaagaaaaaaccatgttggaattcaggcattttgttaggtaccttaatcatcagtaattagtatatgattatttcatttccta

SEQ ID NO: 698623 - DNA, 120 bp, Artificial Sequence
  ENSG00000189308_33 (sequence is synthesized)
caaggactctatagttgtatgtattaagtgtgtatatatgttcatatgaacatgcaagatataggcaatagaaattaagtaatccaaaagaggattccgttattcactaaagtatcttcc

SEQ ID NO: 698624 - DNA, 120 bp, Artificial Sequence
  ENSG00000189308_34 (sequence is synthesized)
ttttaaatttggatttataaaatcatagtgcagtaactttaaatgtagatagttcaaacattcttagcacctcaatctagtatgtttaattaaaatttgtataaatgtaaattagtgtaa

SEQ ID NO: 698625 - DNA, 120 bp, Artificial Sequence
  ENSG00000189308_35 (sequence is synthesized)
gagggtaaaataataatcaagttatttttcaaaagattgcaataagtttttggtctaaacttaaactttgttcattttgtacatactctgtgttaattctaattgcacctttgtgatgtg

SEQ ID NO: 698626 - DNA, 120 bp, Artificial Sequence
  ENSG00000189308_36 (sequence is synthesized)
tatttatatacagtgtgcagaaaatgttcgtgaaattttgattacaattgtagattatgtatgatggcattgcttacgaatgttttgcttgtaaaaaaatttcaaggtgcaatcaaatgc

SEQ ID NO: 698627 - DNA, 120 bp, Artificial Sequence
  ENSG00000189308_37 (sequence is synthesized)
tactagtttttctgattttcaaaaatctatctatctaaaatattaagccttttccttcctgtgtagtacttactaaataactttttgtattcaggcatttgcatcaaattgctgaacaag

SEQ ID NO: 698628 - DNA, 120 bp, Artificial Sequence
  ENSG00000189308_38 (sequence is synthesized)
atgaatagccacattaattcaatgattttaaaagactatttggggagggttgggtatataattttttagctctatttacatcccaaagtagaaagattaaatttatatttactagagcta

SEQ ID NO: 698629 - DNA, 120 bp, Artificial Sequence
  ENSG00000189308_39 (sequence is synthesized)
ttcaaagaatacacttttctatattgtaaaaacaggacagcaaagtaaatcatacagaaaataaacatttatactattctgtaaaaaaggttttgcattttttctttagtataataacac

SEQ ID NO: 698630 - DNA, 120 bp, Artificial Sequence
  ENSG00000189308_40 (sequence is synthesized)
cactttattaaccatttaatatgcaaaaaaccttttaaattatctgaagtaaatttgacattacttctgaaaacacacaactaaaaaattctatcattttgctcagttattactaacata

SEQ ID NO: 698631 - DNA, 120 bp, Artificial Sequence
  ENSG00000189308_41 (sequence is synthesized)
atcattttgctcagttattactaacataaattgctttgaaatgagaatatgtcttctctttttttccccactgtttcttttaagagcagaaactcagccgggcatggtggctcacgcctg

SEQ ID NO: 698632 - DNA, 77 bp, Artificial Sequence
  ENSG00000189308_42 (sequence is synthesized)
gcactgcgtgtggtggcgcacacctgcagtcctcgctactttgaaggcctgagcctgcagaggttgaggctgtagtg

SEQ ID NO: 698633 - DNA, 120 bp, Artificial Sequence
  ENSG00000189308_43 (sequence is synthesized)
actttgaaggcctgagcctgcagaggttgaggctgtagtgagtcaaaattacaccactgcactccagcctggcaatcagagtgagaccttgtctcaaaaacaaaaatacctagaaaatca

SEQ ID NO: 698634 - DNA, 120 bp, Artificial Sequence
  ENSG00000189308_44 (sequence is synthesized)
atctactctgtcttttaatgtgaaatgttcttatgatagctatctttcttagtttcctttttttctgaagcactaaacacaacctgtaggtcttatctctggggtctgggaaacagaacc

SEQ ID NO: 698635 - DNA, 120 bp, Artificial Sequence
  ENSG00000189308_45 (sequence is synthesized)
ttaatgttacaggtacaaaagcaaacagagtgattagttccccattttctggtagtgaacaactgacattttttcaatcttatgtaaaatgtgaataaaaataattttagaaaagttatc

SEQ ID NO: 698636 - DNA, 120 bp, Artificial Sequence
  ENSG00000189308_46 (sequence is synthesized)
tatttttattgttctgtaacacaaatagttaagaaaatgaatacttgttatgtaaatgaagcttcacagcaggacctccggccataactttgatcatgttgtatctcttaagcattttat

SEQ ID NO: 698637 - DNA, 120 bp, Artificial Sequence
  ENSG00000189308_47 (sequence is synthesized)
ataggaattctggtgtggctacccaaagcagaagggaaggcaatcaactaaaaatccctttctattggagttattttcatcatgtaaattacttcaggcttttcttgttagggcttcttg

SEQ ID NO: 698638 - DNA, 120 bp, Artificial Sequence
  ENSG00000189308_48 (sequence is synthesized)
aatgcacattttgtcattatctgtataccaaaggtgagcttttttttttaatccatgtgattttatgagttgaaagctataaggttttttttaattaaaaatttccttctaaatggcaaa

SEQ ID NO: 698639 - DNA, 120 bp, Artificial Sequence
  ENSG00000189308_49 (sequence is synthesized)
gcggcggtggaatggggctgggcgcgtgattttgaacaaaccctggtctgtgtctcggaggcgccgccgccgccgctgctgctgggagcccagggagcgccgcgcgaccaggaggcggcg

SEQ ID NO: 698640 - DNA, 120 bp, Artificial Sequence
  ENSG00000189308_50 (sequence is synthesized)
actggtggtggcggcggcggcggcggcccgggctccggctgtcggggaagctgctgagctgtgatggtgatgacgagtgcctgatcaactttctagcgggagaacgatcatggaggtggt

SEQ ID NO: 698641 - DNA, 120 bp, Artificial Sequence
  ENSG00000189308_51 (sequence is synthesized)
gaaatctcaatggtatctgaatatctacagctactagaacaatgtcatgaacatgaagcagaatggcaaagtacctaaagaaatgagcaactgtttaagtactggaattataaatctaaa

SEQ ID NO: 698642 - DNA, 120 bp, Artificial Sequence
  ENSG00000189308_52 (sequence is synthesized)
tatataatgttacagcaaaggtcacaaaatgcaaaatgacatgaagagagaaaagataaatgtgcgctggaattaccaggaagatttaatctaggagttgacgcagaactatgggaaatg

SEQ ID NO: 698643 - DNA, 120 bp, Artificial Sequence
  ENSG00000189308_53 (sequence is synthesized)
aagaaaaccatgaaaaagaaaagataagaagttacctgaaatctcttatataaaccatagtgaaataccattaagtaatgctttaaaaccagtgaagagattaaaaaggtatatgcttct

SEQ ID NO: 698644 - DNA, 80 bp, Artificial Sequence
  ENSG00000189319_0 (sequence is synthesized)
ctcctgcacgccgccgccgcgcctagcgcccgggcccgcgacaccgcccgctaagcgccgggccgagttcacgcagccgc

SEQ ID NO: 698645 - DNA, 120 bp, Artificial Sequence
  ENSG00000189319_1 (sequence is synthesized)
ggtctggcggctccgcggcggcggcgggtgcgggcggcctggccggtgccggttaaagggacgagttgcaaacacttcaggaagtgacaagtcgatttcctcctccccgggagtcgctcg

SEQ ID NO: 698646 - DNA, 120 bp, Artificial Sequence
  ENSG00000189319_2 (sequence is synthesized)
ttcctcctccccgggagtcgctcgtacaaagcgctcggcgccggcaggcgagcgtgcgcgcggcggacgcgcggcgggcaccccggacgacttggcgagcgctggcggtgacggcgcggg

SEQ ID NO: 698647 - DNA, 120 bp, Artificial Sequence
  ENSG00000189319_3 (sequence is synthesized)
cgcacaggagttgaccacatttggccatttcccagaagggccccaccccaagggtgagtggccaatggggagctgtttctgctgacatcaattccccaggaggtactcaccccaagtctg

SEQ ID NO: 698648 - DNA, 120 bp, Artificial Sequence
  ENSG00000189319_4 (sequence is synthesized)
cccaagtgaagatggctgatacccaccctgggatggagcccagcgcctgaggcccttatcatggtgatggtcctaagtgaaagcctcagcacccggggagctgactccattgcatgtggg

SEQ ID NO: 698649 - DNA, 120 bp, Artificial Sequence
  ENSG00000189319_5 (sequence is synthesized)
accttcagccgtgaactgcacacgccaaagaagatgagtcaaggacctacacttttctcttgtggaattatggaaaatgacagatggcgagacctggacaggaaatgccctcttcagatt

SEQ ID NO: 698650 - DNA, 120 bp, Artificial Sequence
  ENSG00000189319_6 (sequence is synthesized)
gaccaaccgagcaccagcatctgggaatgcctgcctgaaaaggacagctcactatggcaccgggaggcagtgaccgcctgcgctgtgaccagtctgatcaaagacctcagcatcagcgac

SEQ ID NO: 698651 - DNA, 120 bp, Artificial Sequence
  ENSG00000189319_7 (sequence is synthesized)
cacaacgggaacccctcagcaccccctagcaagcgccagtgccgctcactgtccttctccgatgagatgtccagttgccggacatcatggaggcccttgggctccaaagtctggactccc

SEQ ID NO: 698652 - DNA, 120 bp, Artificial Sequence
  ENSG00000189319_8 (sequence is synthesized)
gtggaaaagagacgctgctacagcgggggcagcgtccagcgctattccaacggcttcagcaccatgcagaggagttccagcttcagcctcccttcccgggccaacgtgctctcctcaccc

SEQ ID NO: 698653 - DNA, 120 bp, Artificial Sequence
  ENSG00000189319_9 (sequence is synthesized)
tgcgaccaggcaggactccaccaccgatttggagggcagccctgccaaggggtgccaggctcagccccgtgtggacaggcaggtgacacctggagccctgacctgcaccccgtgggagga

SEQ ID NO: 698654 - DNA, 120 bp, Artificial Sequence
  ENSG00000189319_10 (sequence is synthesized)
ggccggctggacctgcagcggtccctctcttgctcacatgagcagttttcctttgtggaatactgtcctccctcagccaacagcacacctgcctcaacaccagagctggcgagacgctcc

SEQ ID NO: 698655 - DNA, 120 bp, Artificial Sequence
  ENSG00000189319_11 (sequence is synthesized)
agcggcctttcccgcagccgctcccagccgtgtgtccttaacgacaagaaggtcggtgttaaaaggcggcgccctgaagaagtgcaagagcagaggccttctctagaccttgccaagatg

SEQ ID NO: 698656 - DNA, 120 bp, Artificial Sequence
  ENSG00000189319_12 (sequence is synthesized)
gcacagaactgtcagaccttcagcagcctcagctgcctgagcgcagggacagaggactgcggtccccagagccccttcgcccgccacgtcagcaacaccagggcctggaccgccctgctc

SEQ ID NO: 698657 - DNA, 120 bp, Artificial Sequence
  ENSG00000189319_13 (sequence is synthesized)
tcagcctccggcccagggggcaggacccccgctgggaccccggtccctgagcctcttcccccttccttcgacgaccacctcgcctgccaggaggacctgtcctgtgaggagtcagacagc

SEQ ID NO: 698658 - DNA, 120 bp, Artificial Sequence
  ENSG00000189319_14 (sequence is synthesized)
tgcgccctggacgaggattgtggcaggagagcggagccggctgcagcctggcgggaccgcggggcccctgggaacagcctctgctccctggacggcgagttggacattgagcagatagag

SEQ ID NO: 698659 - DNA, 120 bp, Artificial Sequence
  ENSG00000189319_15 (sequence is synthesized)
aagaactgagggggtgtgggcccaggcagggctggggtgtgctggcatcgacagcccccactctgggcactaggtgggcccttgaaggggagcccaactcgtgggcctgatgaaagcttc

SEQ ID NO: 698660 - DNA, 120 bp, Artificial Sequence
  ENSG00000189319_16 (sequence is synthesized)
ctgagtggtgtcgggtcccagagagggagcccacctgctgcctgggggagagcctggcctggccgcgtcatacagcgggtgtgtcagcctctcaccggctccccgagcgtggcagccacc

SEQ ID NO: 698661 - DNA, 120 bp, Artificial Sequence
  ENSG00000189319_17 (sequence is synthesized)
aggtccacagaactactgcagcccagaggacagctttgaagtttgcgtcttttctgcctctttccctgtgggatgttgggcagtctctgttgtccccggcagagctgggcaccgctctgt

SEQ ID NO: 698662 - DNA, 120 bp, Artificial Sequence
  ENSG00000189319_18 (sequence is synthesized)
atccccctggtggtgggggctgtcagggagggcctggggtgggggccaggggccatctgctatgtcagggcccttcttggcctcactcaggttcacttctggggagtcggccccgcagct

SEQ ID NO: 698663 - DNA, 120 bp, Artificial Sequence
  ENSG00000189319_19 (sequence is synthesized)
tctttcactcagttttactccgtgccttctctcccaggtctccctgcttcaggcttgggaaggttcgggagatgcttccttctgtaacaccagaaccatttggccttaattccaatgtga

SEQ ID NO: 698664 - DNA, 120 bp, Artificial Sequence
  ENSG00000189319_20 (sequence is synthesized)
gagacagaatccctggggtgctggactggccctccagagggtaagccatgtccggagtctcgggcccaaggaacgatttggagggtgcttgttagggcctcccgtgttgggtagaaattt

SEQ ID NO: 698665 - DNA, 120 bp, Artificial Sequence
  ENSG00000189319_21 (sequence is synthesized)
ggtggatctgttggctgaaaagacggacttgcttgcctctcctacagcatggagaggctgaccccatggctctgccaccgttggggcagggttagcagatggcagcccttctctgtggct

SEQ ID NO: 698666 - DNA, 120 bp, Artificial Sequence
  ENSG00000189319_22 (sequence is synthesized)
gacaggtcactgagtgataagcatggttggttccggtgagtgtagggatggcacgataccagggcagcctcttgaaaacggcctcgggagacgggagctgcgagcaggtgggcagatgag

SEQ ID NO: 698667 - DNA, 120 bp, Artificial Sequence
  ENSG00000189319_23 (sequence is synthesized)
cccacctcaagacaagcccacgcccttgtcagcttagggggagcccagtcctgagggctgcatctctgttgtaggcccagccaccggcacaaagctggattcatgctccctgcccctacc

SEQ ID NO: 698668 - DNA, 120 bp, Artificial Sequence
  ENSG00000189319_24 (sequence is synthesized)
ccaccctggctcctcaccctggggcatccgaggagcctagccccctgagggtttgctctcctctcaaggtttgtagctcctctccggctgccttgcagacaccaccacatgggctctgct

SEQ ID NO: 698669 - DNA, 120 bp, Artificial Sequence
  ENSG00000189319_25 (sequence is synthesized)
ctatgggaatctggcttttagcgaatgtggcgtcttctgcaaacaatagcaattgggctggcttaggagcaagtggctcattttcccataaggctaaaaataactggtgcgctcccttgt

SEQ ID NO: 698670 - DNA, 120 bp, Artificial Sequence
  ENSG00000189319_26 (sequence is synthesized)
gttggctgacacgcgcgttcaaagcacttttgtagtcactttgcttttgctcgtcttcatggacgagtgaacgcctcgcttctgcaggttgagtccagatgcttctcaccttctttctcc

SEQ ID NO: 698671 - DNA, 120 bp, Artificial Sequence
  ENSG00000189319_27 (sequence is synthesized)
tcaagaaagatgctttttgggaaacgttgtttaaatcttatttttttactacatcaaaaggatggtggttcaagttcccaatatgtgggtggcacttcttaaaaatcagctttaaggagc

SEQ ID NO: 698672 - DNA, 120 bp, Artificial Sequence
  ENSG00000189319_28 (sequence is synthesized)
tggcagaaagcccccagccccacagccctgagagatggtgttgctagctcaggtggctgacacatggggtatgccgggcactgggcaggtcccagagccggggaaccagctcacctctgg

SEQ ID NO: 698673 - DNA, 120 bp, Artificial Sequence
  ENSG00000189319_29 (sequence is synthesized)
ttgctgtagctcctgccggaggcatgtctacttgtgatcccggacagccgaacccaagagctggtggctctgagcagacagagacatcttggcctgtccctgcctgggggtcatggagac

SEQ ID NO: 698674 - DNA, 120 bp, Artificial Sequence
  ENSG00000189319_30 (sequence is synthesized)
catgtcttcttagagcaaatgtggaggcggccagggcagttgttgggtgaatgtggagagcacatggccatgtcttgcccccggagtaccactgggcgtggggggtcctggcaccacatg

SEQ ID NO: 698675 - DNA, 120 bp, Artificial Sequence
  ENSG00000189319_31 (sequence is synthesized)
cccggtgtggccgagggcacacagcctctatagcaggccttcctgtggaaggcagaggcagtgagggaggtggacggtgccagctgaggctgaggcatgcagcagcccccagctaccttt

SEQ ID NO: 698676 - DNA, 120 bp, Artificial Sequence
  ENSG00000189319_32 (sequence is synthesized)
gcttagggctggggtgggaggcacatggtgacaggtatatgtcgtgggactggggtgtgggtgacctgccctcaaaccttgcctgccacctccccattcaggcctggtggcaggaaggga

SEQ ID NO: 698677 - DNA, 120 bp, Artificial Sequence
  ENSG00000189319_33 (sequence is synthesized)
caagctgtggagctggctgagtcacagccacctccccacctccccgcaagctggtcccatcgaccagcaagcccagccccagggcgcttagggagaaatgacccagcctcctcagacccc

SEQ ID NO: 698678 - DNA, 120 bp, Artificial Sequence
  ENSG00000189319_34 (sequence is synthesized)
gcctgcctgtcctgtgcccaccacgcagcagtcaggggagaaaatggtggctatcccttctgcttagagaaagaaatggcctttagctggtttcatgtttgtgttttgactggagggagt

SEQ ID NO: 698679 - DNA, 120 bp, Artificial Sequence
  ENSG00000189319_35 (sequence is synthesized)
agaccctatctataaggtgccaccccatcatccaagctgccacactgcccggagcagcctgttcctgcactccaccctgctggccccaggacttctgatctcagtcctctgggagggagg

SEQ ID NO: 698680 - DNA, 120 bp, Artificial Sequence
  ENSG00000189319_36 (sequence is synthesized)
ttcgcctaggaggtgccccccacattggtgtccccatgggcagcaggcagacagctcacccccaccagcatgatggccccagctgggggcagtggcaggagccttacttttgtcacagcc

SEQ ID NO: 698681 - DNA, 120 bp, Artificial Sequence
  ENSG00000189319_37 (sequence is synthesized)
ttgcccacaaaccctgcctctgaggggagactgaggaagggcagagccagaagcaagccgtgccaggccatctgcctgctcatggggtcctaaagcgcgggctaagcctgcaggaaagcc

SEQ ID NO: 698682 - DNA, 120 bp, Artificial Sequence
  ENSG00000189319_38 (sequence is synthesized)
ggggcggtggggggggcttagtgccacatgcaccccactcattccaaagccaccaaactgccaggggctgccgtccacccgtggggcccaggggctggggccacagccttgccattttcg

SEQ ID NO: 698683 - DNA, 120 bp, Artificial Sequence
  ENSG00000189319_39 (sequence is synthesized)
ttgccataccctcttgccttactcgcggtggaggccggatttgcacgggcagacgtgcacctgggcccgtggggagcttgttctgaccagacgtacagattttcattctcagaaagcctt

SEQ ID NO: 698684 - DNA, 120 bp, Artificial Sequence
  ENSG00000189319_40 (sequence is synthesized)
acttttcaaccaaatttttgtagccagttttgtgaatttgtacactgaaagaaaatttaaataaaggggaagtccacattaaaaagaaaacaaaacaaaccctaactaacttccaaatgg

SEQ ID NO: 698685 - DNA, 120 bp, Artificial Sequence
  ENSG00000189319_41 (sequence is synthesized)
gtctcctggtgcgggggcgtgagtggccgtgccctgggtgtgctgcctgtctgagcaagcttccctagctgtggaaccccgggccccctgctgcgggctctgccttggtgtcatgcctgc

SEQ ID NO: 698686 - DNA, 120 bp, Artificial Sequence
  ENSG00000189319_42 (sequence is synthesized)
tgcacccccgtttccactgacgtgccgtctgtggctatgggggtggtcactggaatgacggtcactccagacgtcagccggcagggatgcagcaggctggccgcgcaccggggctcgggc

SEQ ID NO: 698687 - DNA, 120 bp, Artificial Sequence
  ENSG00000189319_43 (sequence is synthesized)
accctctggccccacactggcaatgatgccacaccttgccatgtccacgctgttggtcaaacccctctgtcatgcctctttaaagagaaaagaagagaaagattttttttttttttaatg

SEQ ID NO: 698688 - DNA, 120 bp, Artificial Sequence
  ENSG00000189319_44 (sequence is synthesized)
gcagaccgaagtggagatcttgtagcctagataggatagtctgaccttctagcatagtctttttggcaaatgatttgtgttttcagtgtgtggggaagctgtcctgggggctggggcgac

SEQ ID NO: 698689 - DNA, 120 bp, Artificial Sequence
  ENSG00000189319_45 (sequence is synthesized)
agatagcacataggctgtttctggggctgcaggggcttccctgagctggatgttgtgggtgttgccgtgcttcaggaagtgtggcgaccagaaagcgtagacccggggcccagggtctgc

SEQ ID NO: 698690 - DNA, 120 bp, Artificial Sequence
  ENSG00000189319_46 (sequence is synthesized)
ccgcccctgcagcctggcctccccgcacaggctgtggcttgcactccagccgctctagtctctcaggaatttgcttgttacttgtactgtgtaaataaagcttcctggttcaatacccaa

SEQ ID NO: 698691 - DNA, 120 bp, Artificial Sequence
  ENSG00000189319_47 (sequence is synthesized)
gtactgtacttaggacgatggtgaacaaagaaaagctctttgcagcgtttgatgaatgggattctgcctcctataggccacactccgagtcttccatacggtacaatctccggactcggt

SEQ ID NO: 698692 - DNA, 120 bp, Artificial Sequence
  ENSG00000189319_48 (sequence is synthesized)
ggtgttaggaaagtggcccccggaatggcttgcattccgggtctgggatcctggggtgggcatttgtgccgtcgccttcgccgccgcgctcgccttgcaggagcgggtgcagatggagcc

SEQ ID NO: 698693 - DNA, 120 bp, Artificial Sequence
  ENSG00000189319_49 (sequence is synthesized)
aggctgacggttgttcaacaggaacaaatgtttgttcaattgttggatggtggagaaaagggactgtttcctattgactgctgcaggagttggaatggcattgtttattggcctgggaag

SEQ ID NO: 698694 - DNA, 120 bp, Artificial Sequence
  ENSG00000189319_50 (sequence is synthesized)
ccaggcaagcgtcttgtgctgcttacaacatattagcagacttccaaatgacatgctagcatatgtgttcccagcagtccccaccggctggcagggagattcctccttgctccagatcct

SEQ ID NO: 698695 - DNA, 120 bp, Artificial Sequence
  ENSG00000189319_51 (sequence is synthesized)
ctagtagccagttattaagagaagaaagtgaaatgactttgaatagtatatttaacccagtatttccaaaatactatcatttccacatgtcatcgatgtaagtaaatcatgaatgcacta

SEQ ID NO: 698696 - DNA, 120 bp, Artificial Sequence
  ENSG00000189320_0 (sequence is synthesized)
agttccccaatcccagagagcgtcaaatgaagagaggtaccgactcctgtcccacccaggacgcagccttcagcctccagccttctgaggcagagtaggcatttctgcacgtctgcaaaa

SEQ ID NO: 698697 - DNA, 120 bp, Artificial Sequence
  ENSG00000189320_1 (sequence is synthesized)
ggaagggagggaagcactccatcatctcactgggaagaacggcacgggcatacctgcagctactggggttccactgggcttgagggtcgatttttcaccttttgaaggacaagatgcatt

SEQ ID NO: 698698 - DNA, 120 bp, Artificial Sequence
  ENSG00000189320_2 (sequence is synthesized)
ggaagatgttgctgcttctgctgttgtattacaatgctgaggcttctatgtgccacaggtggagcagggctgtgctcttccctgccgcccaccggccaaagaggtcctcatcactgccat

SEQ ID NO: 698699 - DNA, 120 bp, Artificial Sequence
  ENSG00000189320_3 (sequence is synthesized)
tgaacccagtcctgcagacctccctggaggaggtggagctgctctacgagttcctgctggccgaacttgagatcagccctgacctgcagatctccatcaaggacgaggagctggcctcct

SEQ ID NO: 698700 - DNA, 120 bp, Artificial Sequence
  ENSG00000189320_4 (sequence is synthesized)
tgcggaaggcctcagacttccgcaccgtctgcaacaacgtcatccccaagagcatcccagacatccgccggctcagcgccagcctctccagccaccctggcatcctcaagaaagaagact

SEQ ID NO: 698701 - DNA, 120 bp, Artificial Sequence
  ENSG00000189320_5 (sequence is synthesized)
ttgaaaggacagtgctgaccctggcctacacagcctaccgcacagccctgtcccacggccatcagaaggacatctgggcgcagtccctcgttagcctcttccaggccctgaggcacgact

SEQ ID NO: 698702 - DNA, 120 bp, Artificial Sequence
  ENSG00000189320_6 (sequence is synthesized)
tgatgcgctcctcacagccgggagtacctccctgagagactggcccacaccaggacctcagagcagggaccagcacagtaatccagaaagtcttcattctctactccatttacagagacc

SEQ ID NO: 698703 - DNA, 120 bp, Artificial Sequence
  ENSG00000189320_7 (sequence is synthesized)
gattcatgccatcatgtgacctgggctggaagaaagggctggaatggtcattcaagacgcctccatgggcagaatggtttgcctatggcaggcagaattctgatatgcttcaacccagag

SEQ ID NO: 698704 - DNA, 120 bp, Artificial Sequence
  ENSG00000189320_8 (sequence is synthesized)
cagtggccacacactcaagagtgagaacaggcgtgagccaccgtgcctggcccaggatctaaaaactttctaagtttcctccatcgttggcatcctcacagctatctccaatgtcactca

SEQ ID NO: 698705 - DNA, 120 bp, Artificial Sequence
  ENSG00000189320_9 (sequence is synthesized)
agagacatcaacagacatttaactgctgcagacttcattgctctgtcacctcaccttgaatctaacaaatcaaagtatttctgcaggtccaatggtctaaaatcaaatgcttgttaaatg

SEQ ID NO: 698706 - DNA, 120 bp, Artificial Sequence
  ENSG00000189320_10 (sequence is synthesized)
actttttacaacaccccttactttcctaatccatttcaatcttattttttttattgtggtaaaaaacacatcaggtaaaatgtaccatcttaaccatttttaagcatatggtacagcagt

SEQ ID NO: 698707 - DNA, 120 bp, Artificial Sequence
  ENSG00000189320_11 (sequence is synthesized)
gttaactccatgcatgttgtgaaacagacccccggaactttctcatcttgtaattctgaagttctatacccaccgaacaactcctcttttccccttccccctgcctgccccagctcttgg

SEQ ID NO: 698708 - DNA, 120 bp, Artificial Sequence
  ENSG00000189320_12 (sequence is synthesized)
caccattattctgctttctgtttttgagagtctgactacttaagatacctcatacaagcgggatctggcttacatttcttgagcattgtattctggaaaagtgtttccttcctctgaaaa

SEQ ID NO: 698709 - DNA, 120 bp, Artificial Sequence
  ENSG00000189320_13 (sequence is synthesized)
atgggtagagttctgaaggagaactactggtcttattgtacacttgctgtacctatttttatttaacaaatattcatctatggtataataaagatgtcatgattgagttgctcactggaa

SEQ ID NO: 698710 - DNA, 78 bp, Artificial Sequence
  ENSG00000189320_14 (sequence is synthesized)
gcctatggcaggcagaattctgatatgcttcaacccagagcagtggccacacactcaagagtgagaacaggccgggca

SEQ ID NO: 698711 - DNA, 120 bp, Artificial Sequence
  ENSG00000189320_15 (sequence is synthesized)
tgaacccagtcctgcagacctccctggaggaggtggagctgctctacgaggagaaattccagagttcaactgcagctaagaccttgtccctgaacttgtcaacttcttccctgccctccc

SEQ ID NO: 698712 - DNA, 120 bp, Artificial Sequence
  ENSG00000189320_16 (sequence is synthesized)
ccagagagaccactgacatctgggcatgagactggcatctagactttgccagggaggcagctatacttcccaaaagatctggggtctttctcacgagctcataccctctgctggcctaga

SEQ ID NO: 698713 - DNA, 120 bp, Artificial Sequence
  ENSG00000189320_17 (sequence is synthesized)
ccctttatattcccccctcggtgctgaggcaaacgatctttgccagcagggaggtctgaaaggcttaactttgtacactctgaggcaaattctccagaagtaatgttgcattttctccct

SEQ ID NO: 698714 - DNA, 120 bp, Artificial Sequence
  ENSG00000189320_18 (sequence is synthesized)
gccaccaggcacattcccttcccaaggtctagatcagcaggtggccctcccagcgaaagctctgtgtcctatgatccgaaacaataaagctgtgcttgggtacgtgagattatgtttacg

SEQ ID NO: 698715 - DNA, 120 bp, Artificial Sequence
  ENSG00000189320_19 (sequence is synthesized)
atgatggtcatcactccagccctaggaagtttgagaaactgaaaaataagcttagcaggctgcctaggttctgcggaatcagcaggcccccgctgtgaccaatcaagagcggccgcgggg

SEQ ID NO: 698716 - DNA, 120 bp, Artificial Sequence
  ENSG00000189325_0 (sequence is synthesized)
gacactcagaaaattgccagcaccaaagtagtggcatcttctccctgggagagctgggtctgacttctcactggacacaacttccagctgacagggagcagagcctaacacagagacctc

SEQ ID NO: 698717 - DNA, 120 bp, Artificial Sequence
  ENSG00000189325_1 (sequence is synthesized)
ttgtctgaagatcccagcccagggtgttcaggacagaagcgatttctgtggtccaagcccgatggagaatccaaggtgcccaaggaggcccctggcggagaagaaagccaggtctctgga

SEQ ID NO: 698718 - DNA, 120 bp, Artificial Sequence
  ENSG00000189325_2 (sequence is synthesized)
caggccgcaggcccccgggaaaggctcggagtcgtgggactgccattggctctccctgcccactgccccctccaggaaggcgcttcactggacgaccagtgattgggccagacattcaga

SEQ ID NO: 698719 - DNA, 120 bp, Artificial Sequence
  ENSG00000189325_3 (sequence is synthesized)
cagcccagctccatctgcagaggctcactgcaccaccgctgcagcccccactcccgaggagaccggagattttctccccagcgagcagaggccttcgcaagacaccaagaaggggtggct

SEQ ID NO: 698720 - DNA, 120 bp, Artificial Sequence
  ENSG00000189325_4 (sequence is synthesized)
gaagaccatgctgaacttcttcgtgaggacgggccctgaggagcccagagaaaaggccagcaggaggccaagggggaaggagggtatctcccagcatccggagcccctggaagcagcagg

SEQ ID NO: 698721 - DNA, 120 bp, Artificial Sequence
  ENSG00000189325_5 (sequence is synthesized)
ggagccagccctcaggaagaaagcccaccacgacaagaagcccagccgcaagaagcaaggtcacaagaaacacgcggccgaggtgactaaggcagctcaagaccaggaggccagaggccg

SEQ ID NO: 698722 - DNA, 120 bp, Artificial Sequence
  ENSG00000189325_6 (sequence is synthesized)
agaggaagggttgtccaaggcagctgctgccttgcgctccggggaggctgacctgggcccagctcgcaggggtggggaagattctgatcaccagtccttcctcatcaaagtggatggtac

SEQ ID NO: 698723 - DNA, 120 bp, Artificial Sequence
  ENSG00000189325_7 (sequence is synthesized)
tggagctttggatgtttctccccatgccacaggtcatcagcaagaagaggagctcaaaaagcctgaccaggatgctatcattcagatgatagtggaattgctcaaaagagtgggagacca

SEQ ID NO: 698724 - DNA, 120 bp, Artificial Sequence
  ENSG00000189325_8 (sequence is synthesized)
gtgggaagaagagcaatctctggcctcacagctgggggtggccctgccaaacccagcaccagctgttaggaagaaatcccaagagaaaaagacaagcctcaagagaacctcaaagacaaa

SEQ ID NO: 698725 - DNA, 120 bp, Artificial Sequence
  ENSG00000189325_9 (sequence is synthesized)
ccccaagaaacacggctccgaggaggccaagaggggggctgcagatgtttccagtccagaggcctggccacccaagaagtccagctttctgcccctgtgtgtcagcggccatcggccttc

SEQ ID NO: 698726 - DNA, 120 bp, Artificial Sequence
  ENSG00000189325_10 (sequence is synthesized)
catctccagcagctatggcttggaagaacctaaagtccaggaggccccatctacagaggctggggctccaggtccctccgtgcttcccaccccatcagagagccaggaacctggagagga

SEQ ID NO: 698727 - DNA, 120 bp, Artificial Sequence
  ENSG00000189325_11 (sequence is synthesized)
gcttccgctggacagagcctcggaatacaaagaattcattcagaagatcatttccatgctccaagatgcagaagaacagcaaggagaggagcaacctcaagtccagcaggaagaggtggg

SEQ ID NO: 698728 - DNA, 120 bp, Artificial Sequence
  ENSG00000189325_12 (sequence is synthesized)
tgtagaaaacccggccccacactgcagaaggaaatctcaagaaaaaaggtcgagcttcaggagagcgttttaccataagaaacacacctccaaggaacccagaagagcgggggcagcagg

SEQ ID NO: 698729 - DNA, 120 bp, Artificial Sequence
  ENSG00000189325_13 (sequence is synthesized)
ggctgccagcccagaggcccgacgacccaagaggcccagctttctgcccctgtgtgttggtggccatcggccctccacctccagcagccttgatccagaagatctcgagtgccgggagcc

SEQ ID NO: 698730 - DNA, 120 bp, Artificial Sequence
  ENSG00000189325_14 (sequence is synthesized)
cctgcccgcagaaggggagccagttgtgatctcagaagcaccctcccaggctagaggccacacgccagaaggggcacctcagctgagtggagcatgtgaatctaaggagatcatcatcca

SEQ ID NO: 698731 - DNA, 120 bp, Artificial Sequence
  ENSG00000189325_15 (sequence is synthesized)
tctccaagaagtggatggccaactggggcagcagatcaggcgccaccccagctttaagaggtttttttacgagttctcggactcctccctcagcaagctggtagccaccctgcgcagcca

SEQ ID NO: 698732 - DNA, 120 bp, Artificial Sequence
  ENSG00000189325_16 (sequence is synthesized)
ggtggctcactcctctaagctggacaggaaccgcgccaggagactctaccagtttgacgttagcttagctaacaaatttgctggcagcaacagccatgccatgtgcatcctcatgggcct

SEQ ID NO: 698733 - DNA, 120 bp, Artificial Sequence
  ENSG00000189325_17 (sequence is synthesized)
aagagaccactacaattgcacccagttcccatacagggaggaccagccgaacatcacaagtcctaaggttgaaagtccagattgaaagctgtgtcttgcactcaaattcccttgaactag

SEQ ID NO: 698734 - DNA, 120 bp, Artificial Sequence
  ENSG00000189325_18 (sequence is synthesized)
ccaaatggttcgcagctttagccaggagaccctgaagatgctctgtgatgtcccaatccctgcttcacaaacgtgatggaagacaagagcagacaatcattctgtgtccataccctagta

SEQ ID NO: 698735 - DNA, 120 bp, Artificial Sequence
  ENSG00000189325_19 (sequence is synthesized)
tctgagaagcacagagcattcttccacaaggcaagacacagaggccatgtctggggaaatcagcactggactgggaatgaggaagactggggctctacctgctgaacctaccccagactt

SEQ ID NO: 698736 - DNA, 120 bp, Artificial Sequence
  ENSG00000189325_20 (sequence is synthesized)
gctgcatgaccctctacacattccccctcctctccagactttggagtctaggatcccacccagaaggcctactgatattttctcagatgttcatgttaactgagtctagtttttaaacta

SEQ ID NO: 698737 - DNA, 120 bp, Artificial Sequence
  ENSG00000189325_21 (sequence is synthesized)
aatttttatttaatctctaaacagaacatccacatgcatccaaacagatatgcatcgaagtgtatcccatcatttcttcagttgaccagtagttcttcatgctcatatggatttgtagat

SEQ ID NO: 698738 - DNA, 120 bp, Artificial Sequence
  ENSG00000189325_22 (sequence is synthesized)
gcctcccaggaactctgcaggcccaagatggaaaaacctagagactggggacacttggtctctcagaatccttctaaccctgtgtcctgtcattctatgactagagaaatggagctgata

SEQ ID NO: 698739 - DNA, 120 bp, Artificial Sequence
  ENSG00000189325_23 (sequence is synthesized)
ccttgcacctctcccatctcatgggattggctaggagtcagtgagaaaatggatgtgaagagttctgaaaattacctagtgccatgtccatgtaggcactatagcttcttttgggtagtt

SEQ ID NO: 698740 - DNA, 120 bp, Artificial Sequence
  ENSG00000189325_24 (sequence is synthesized)
ttcaggaagtggaggagggcttcaatgggctggactgccatggattgttgcacaggggtgcactgctcaagagcaccatactccaggaggtactattcatgtcctagacattgtggattt

SEQ ID NO: 698741 - DNA, 120 bp, Artificial Sequence
  ENSG00000189325_25 (sequence is synthesized)
gtagatttatcatgacagttttgcagctggtagcagtaacatgtcttgagaaaagggctattttttgtatttgcacaaaggtgaagtgtgggggtgccagaggctctgccttctgtatag

SEQ ID NO: 698742 - DNA, 120 bp, Artificial Sequence
  ENSG00000189325_26 (sequence is synthesized)
ctcaacagtttcaatagcttgactcaggtgtgaaatttgccacatgttcatatctatgtgcaggaaggacaagactgtagacagacagtcggctcccttggacactgcccagaacatgtg

SEQ ID NO: 698743 - DNA, 120 bp, Artificial Sequence
  ENSG00000189325_27 (sequence is synthesized)
gtcatgggggaaagggtgttaaacctggatggcaagtgagatcttgtgacccttggggacatggtattgccgtgttgaacctgctgtcgcaccatggggtaggactggggaggaggagca

SEQ ID NO: 698744 - DNA, 120 bp, Artificial Sequence
  ENSG00000189325_28 (sequence is synthesized)
gtctagagcggagaggccctgggtgcttatatgggactggcctccaacctgaggcactggcttcataagctcaactcagcctatccggaaagccatttagtttttattgctgcttctgag

SEQ ID NO: 698745 - DNA, 120 bp, Artificial Sequence
  ENSG00000189325_29 (sequence is synthesized)
aagtgggggagaggtgagctatttgtggatttgttttaggcagtgttcacaatcatagcacctaaatatgaaggatcagaataagttatgaaatgaaggtcaggaaccttttgtacatag

SEQ ID NO: 698746 - DNA, 120 bp, Artificial Sequence
  ENSG00000189325_30 (sequence is synthesized)
tttcttatttggaatgatgttctttaagccctatgagtatttggtatgtgctcctgatgctggcatctgagtctcatttttgtaccgtgttatttgagcaaataaatacattaacttgca

SEQ ID NO: 698747 - DNA, 120 bp, Artificial Sequence
  ENSG00000189326_0 (sequence is synthesized)
aaagctctgggacagcccactggaaagcttcaatacagctgtggaaatctgcaccctagaagatcctagtacagaaattctacaaccaaccataatcatggaagagccaacttccagcac

SEQ ID NO: 698748 - DNA, 120 bp, Artificial Sequence
  ENSG00000189326_1 (sequence is synthesized)
acagagcctcagcccctgaacagagtttgaaagagacagaaaaagcaaaatatccaacattagtgttttactgcaggaagaataagaaaagaaattcaaatcaactggagaataaccagc

SEQ ID NO: 698749 - DNA, 120 bp, Artificial Sequence
  ENSG00000189326_2 (sequence is synthesized)
ctacagagagctccactgatccaatcaaagagaaaggagacctagacatatctgcaggatctccacaggatggtgggcagaattagtccaaattggacaaatcatcaccactgatggcga

SEQ ID NO: 698750 - DNA, 120 bp, Artificial Sequence
  ENSG00000189326_3 (sequence is synthesized)
aaagagaaaggagacctagacatatctgcaggatctccacaggatggagaggaagaaaaggatttggtgttccttggagcacgtgcatgtttagaagagcacataagaagatctgtattg

SEQ ID NO: 698751 - DNA, 120 bp, Artificial Sequence
  ENSG00000189326_4 (sequence is synthesized)
tatgtaggtgacagtgacactctttccaaaatgaagacatcagaatcaccaccttcaggccacatacctcagagtggtgtgttttgtaactcacccaatgctgtgagcaactgaaggtcc

SEQ ID NO: 698752 - DNA, 120 bp, Artificial Sequence
  ENSG00000189334_0 (sequence is synthesized)
cctcctgtcttgtctcagcggctgccaacagatcatgagccatcagctcctctggggccagctataggacaacagaactctcaccaaaggaccagacacagtgggcaccatgggacagtg

SEQ ID NO: 698753 - DNA, 120 bp, Artificial Sequence
  ENSG00000189334_1 (sequence is synthesized)
tcggtcagccaacgcagaggatgctcaggaattcagtgatgtggagagggccattgagaccctcatcaagaactttcaccagtactccgtggagggtgggaaggagacgctgaccccttc

SEQ ID NO: 698754 - DNA, 120 bp, Artificial Sequence
  ENSG00000189334_2 (sequence is synthesized)
tgagctacgggacctggtcacccagcagctgccccatctcatgccgagcaactgtggcctggaagagaaaattgccaacctgggcagctgcaatgactctaaactggagttcaggagttt

SEQ ID NO: 698755 - DNA, 120 bp, Artificial Sequence
  ENSG00000189334_3 (sequence is synthesized)
ctgggagctgattggagaagcggccaagagtgtgaagctggagaggcctgtccgggggcactgagaactccctctggaattcttggggggtgttggggagagactgtgggcctggagata

SEQ ID NO: 698756 - DNA, 120 bp, Artificial Sequence
  ENSG00000189334_4 (sequence is synthesized)
tgtcttggatgctctggggagctcatgggtggaggagtctccaccagagggaggctcaggggactggttgggccagggatgaatatttgagggataaaaattgtgtaagagccaaagaat

SEQ ID NO: 698757 - DNA, 120 bp, Artificial Sequence
  ENSG00000189334_5 (sequence is synthesized)
tggtagtagggggagaacagagaggagctgggctatgggaaatgatttgaataatggagctgggaatatggctggatatctggtactaaaaaagggtctttaagaacctacttcctaatc

SEQ ID NO: 698758 - DNA, 120 bp, Artificial Sequence
  ENSG00000189334_6 (sequence is synthesized)
tcttccccaatccaaaccatagctgtctgtccagtgctctcttcctgcctccagctctgccccaggctcctcctagactctgtccctgggctagggcaggggaggagggagagcagggtt

SEQ ID NO: 698759 - DNA, 120 bp, Artificial Sequence
  ENSG00000189334_7 (sequence is synthesized)
gggggagaggctgaggagagtgtgacatgtggggagaggaccagctgggtgcttgggcattgacagaatgatggttgttttgtatcatttgattaataaaaaaaaatgaaaaaagtgaaa

SEQ ID NO: 698760 - DNA, 120 bp, Artificial Sequence
  ENSG00000189334_8 (sequence is synthesized)
ctctgggccgctgaggggagctgaagggaggtcaggcaaacactcactcaatctgcctccctccatcaggctgcccttctctggcttcctcctgatccaagttctctacattcatctctc

SEQ ID NO: 698761 - DNA, 120 bp, Artificial Sequence
  ENSG00000189334_9 (sequence is synthesized)
atactgcctgctgtccagagggcacacttaggatcatgagccatcagctcctctggggccagctataggacaacagaactctcaccaaaggaccagacacagatgctcaggaattcagtg

SEQ ID NO: 698762 - DNA, 120 bp, Artificial Sequence
  ENSG00000189337_0 (sequence is synthesized)
cttcttggagcagctctcggcgcccgcccgccggggtctcggcgatcgctgctcctcctcctccttctcctcctcttttttctcctccgcctcctccccccgccgcctcgccaccgccgc

SEQ ID NO: 698763 - DNA, 120 bp, Artificial Sequence
  ENSG00000189337_1 (sequence is synthesized)
ggctagggctggaggcgccgctgtcattcctgtgccggaggaaccggcgctgccggtgcctgggggtcggggcgcgggcgaagccgggccgcggaggacacaacaggtagagccgggggt

SEQ ID NO: 698764 - DNA, 120 bp, Artificial Sequence
  ENSG00000189337_2 (sequence is synthesized)
gcccggccgcgcgccccccgcgcatcatgcagctctttgtcacctctctcgcccccaggccaaaatcctgagcatgatggaagacaataagcagctcgcgctccgcatcgatggggcggt

SEQ ID NO: 698765 - DNA, 120 bp, Artificial Sequence
  ENSG00000189337_3 (sequence is synthesized)
ccagtcggccagccaggaggtgaccaacctgcgagccgaactcacggccaccaaccggagactggcggaactgagcggcggcggcggccccggcccgggcccgggagccgcggccagcgc

SEQ ID NO: 698766 - DNA, 120 bp, Artificial Sequence
  ENSG00000189337_4 (sequence is synthesized)
ctcggcggcgggggactcggcggcgacgaacatggagaacccccagcttggagcgcaagtgctcctgcgggaagaagtgtcgcggctccaggaggaagttcaccttctccggcagatgaa

SEQ ID NO: 698767 - DNA, 120 bp, Artificial Sequence
  ENSG00000189337_5 (sequence is synthesized)
ggagatgttggcgaaggacctggaggagtcgcagggcggcaagtcctctgaggtcctctcggccaccgagctcagggtccagctggcccagaaggagcaggagctagccagagccaaaga

SEQ ID NO: 698768 - DNA, 120 bp, Artificial Sequence
  ENSG00000189337_6 (sequence is synthesized)
agccttgcaggccatgaaagctgatcggaagcgcttaaagggcgagaagacagacctggtgagccagatgcagcagctgtatgccacactggagagccgcgaggagcagctccgagactt

SEQ ID NO: 698769 - DNA, 120 bp, Artificial Sequence
  ENSG00000189337_7 (sequence is synthesized)
catccgcaactatgagcagcaccgcaaggagagcgaggatgcggtcaaagcgctggccaaggagaaggacctgctggagcgtgagaagtgggagctgcggcgccaagccaaggaggccac

SEQ ID NO: 698770 - DNA, 120 bp, Artificial Sequence
  ENSG00000189337_8 (sequence is synthesized)
agaccacgccacggcactgcgctcccagctggacctcaaggacaaccggatgaaggagctggaggccgagctggccatggccaaacagtccttagctacgctgaccaaggacgtccccaa

SEQ ID NO: 698771 - DNA, 120 bp, Artificial Sequence
  ENSG00000189337_9 (sequence is synthesized)
gcggcattccctcgccatgccgggcgagacggtgctcaatggcaaccaggagtgggtggtgcaggcggacctcccgctgaccgcagccatccggcagagtcaacagactctctaccactc

SEQ ID NO: 698772 - DNA, 120 bp, Artificial Sequence
  ENSG00000189337_10 (sequence is synthesized)
acacccccctcaccctgcggaccggcaagcggtcagggtgagcccctgccactcccggcagccctctgtcatctccgacgcatctgccgccgaaggcgaccggtcgtccacaccgagcga

SEQ ID NO: 698773 - DNA, 120 bp, Artificial Sequence
  ENSG00000189337_11 (sequence is synthesized)
catcaactcccctcgacaccggacacactccctctgcaacggcgacagtcccggcccagttcagaagaacctgcacaaccctattgtacagtcactagaggatcttgaagaccaaaaacg

SEQ ID NO: 698774 - DNA, 120 bp, Artificial Sequence
  ENSG00000189337_12 (sequence is synthesized)
gaaaaagaagaaagagaagatgggattcggctccatctcccgcgtcttcgccagagggaagcagcggaagtccctcgaccccggcctctttgatgactcggacagccagtgcagccccac

SEQ ID NO: 698775 - DNA, 120 bp, Artificial Sequence
  ENSG00000189337_13 (sequence is synthesized)
gcggcagagcctcagcctgtcggaaggcgaggagcagatggaccggctgcagcaggtggagctggtgaggaccacccctatgtcccactggaaggcgggcaccgtccaggcctggctgga

SEQ ID NO: 698776 - DNA, 120 bp, Artificial Sequence
  ENSG00000189337_14 (sequence is synthesized)
ggtggtgatggccatgcctatgtacgtcaaggcctgcacggagaacgtgaagagcgggaaggtgctgctgagcctgagtgacgaggacctgcagctgggccttggggtgtgcagctccct

SEQ ID NO: 698777 - DNA, 120 bp, Artificial Sequence
  ENSG00000189337_15 (sequence is synthesized)
gcaccggcgcaagctgcgcctggccatcgaggactaccgtgatgccgaggcaggccgcagcctgtccaaagctgccgagctggaccatcactgggtggccaaggcctggctgaatgacat

SEQ ID NO: 698778 - DNA, 120 bp, Artificial Sequence
  ENSG00000189337_16 (sequence is synthesized)
tggcctgtcccagtactcccaggcctttcagaaccacctggttgatgggcggatgctgaattccctgatgaagcgagacctggagaagcacctgaacgtgtccaagaagttccaccaggt

SEQ ID NO: 698779 - DNA, 120 bp, Artificial Sequence
  ENSG00000189337_17 (sequence is synthesized)
cagcatcctgctggggatcgagctgctgtaccaagtgaacttcagcagggaggccctccaggagcgccgggcccgctgcgagacgcagaacattgaccccgtggtgtggaccaaccagcg

SEQ ID NO: 698780 - DNA, 120 bp, Artificial Sequence
  ENSG00000189337_18 (sequence is synthesized)
ggtgctcaagtgggttcgagacatcgacctgaaggagtacgcagacaacctgaccaacagcggcgtccatggtgctgtgctggtgctggagcccacattcaatgccgaggccatggccac

SEQ ID NO: 698781 - DNA, 120 bp, Artificial Sequence
  ENSG00000189337_19 (sequence is synthesized)
tgccctgggcatccccagtgggaagcacatcctccggagacacctggcagaggagatgagcgccgtcttccacccagccaactccacaggcatccgggaggctgagcgttttggaacgcc

SEQ ID NO: 698782 - DNA, 120 bp, Artificial Sequence
  ENSG00000189337_20 (sequence is synthesized)
ccctggcagggcctccagcgtcacgcgggcaggaaaggaggagaacagcagcggtctcaagtacaaggctggccggctgcccctggggaagataggaaggggcttcagcagcaaagatcc

SEQ ID NO: 698783 - DNA, 120 bp, Artificial Sequence
  ENSG00000189337_21 (sequence is synthesized)
cgatttccatgatgactatggctctcttcaaaacgaagattgcggagacgatgacccccagagcaggctggaacagtgccgtctggaaggctacaacagcctggaggtcaccaacgtgta

SEQ ID NO: 698784 - DNA, 120 bp, Artificial Sequence
  ENSG00000189337_22 (sequence is synthesized)
aggaactggtggctccaccagacccaacgtgagagacccaggaaggaagagaagccagatggccccaggtgtcgttctcactgtacatagcggccgcaggctgaggatgtcccttgctcc

SEQ ID NO: 698785 - DNA, 120 bp, Artificial Sequence
  ENSG00000189337_23 (sequence is synthesized)
tgggcaaaatcccgatggactctgcggtttcagctccacagcgcccaggagagagaagacaccagcccacctgtcttgggtgggccatggactttcctgttcagctggagatgggcccag

SEQ ID NO: 698786 - DNA, 120 bp, Artificial Sequence
  ENSG00000189337_24 (sequence is synthesized)
aggacctgtcacagtgtccggccctgcctccatccaggatacacaggctccacctcagagtgaccgtcactgtggagcagccaagcagtccctggagccttaaacggagctgccaaggtg

SEQ ID NO: 698787 - DNA, 120 bp, Artificial Sequence
  ENSG00000189337_25 (sequence is synthesized)
gaccccaaccccacaccccagcgcccagtgcattggcagagccgggtgcaggaagtgctgcctcttgccgagacgtcggacagggcgggggttggggaactctcggctacagcatcttac

SEQ ID NO: 698788 - DNA, 120 bp, Artificial Sequence
  ENSG00000189337_26 (sequence is synthesized)
ccttgactgagaacttgggtcctgacttggctcactgaatctctcttgggagaatgcaaaatccttccacctgaaaagctctgtgacacatgggggtggacgtattgaagagctgtttgc

SEQ ID NO: 698789 - DNA, 120 bp, Artificial Sequence
  ENSG00000189337_27 (sequence is synthesized)
cgatccacccaggagtggctacgctgagtggggagccggtgaatgatccgtgcaggagtggggcttagcagccacatttctaggagatgcagatatcctatcaccagaatgaaagctatt

SEQ ID NO: 698790 - DNA, 120 bp, Artificial Sequence
  ENSG00000189337_28 (sequence is synthesized)
gggacaacaggatcggggatgaccgacggccccatatggtgaatctctggcctgtggtttggctttactgagattccaaaccccactatctgcactccgtgacagtggtatggagtgtgg

SEQ ID NO: 698791 - DNA, 120 bp, Artificial Sequence
  ENSG00000189337_29 (sequence is synthesized)
caatgagtttggggtctggggcagggaaatgcttgacattgttaacccaacaaacctttgttgtgatgtccctgtcacctgaaacataggtgacatagctcaccaatgtcctaaccgaga

SEQ ID NO: 698792 - DNA, 120 bp, Artificial Sequence
  ENSG00000189337_30 (sequence is synthesized)
cacaaactccacagagcaaaatcatttggtattggtggggagaaccccagcccttttcttgacctgccactgttatgctgtgtggcttcttcccagtggcctcacctctctgtgcctcga

SEQ ID NO: 698793 - DNA, 120 bp, Artificial Sequence
  ENSG00000189337_31 (sequence is synthesized)
tgtcttcatctacgatacttctggttccctcccagggacatcgtgaggattaacacttgctaatatctgtaacacaatttgtaacctctcaggagacaatgggaagttatggggtagcta

SEQ ID NO: 698794 - DNA, 120 bp, Artificial Sequence
  ENSG00000189337_32 (sequence is synthesized)
atttcccatttacaacacagaaatgatatagagctagttcgctccaactctttaggttgaagcagtgtgcaaaaggaagaaaagaaatgtttaatgttcagacctgccaagagcctccaa

SEQ ID NO: 698795 - DNA, 120 bp, Artificial Sequence
  ENSG00000189337_33 (sequence is synthesized)
cagggctcaagaaacatataaatcccatgagcacagccttgaaaaccagtttgactcaagccttcgggcctcagttcattgaccagatgacagccacgtgatgattagggaaggacggat

SEQ ID NO: 698796 - DNA, 120 bp, Artificial Sequence
  ENSG00000189337_34 (sequence is synthesized)
gcattgcgattctgcttacacatcgggttatcaaagcgagtcacttgttggaaccatgatgctcgacctccttcaaggccgtttgcactggggcttgagtttccaagattcacaacaggt

SEQ ID NO: 698797 - DNA, 120 bp, Artificial Sequence
  ENSG00000189337_35 (sequence is synthesized)
gtcagcctctgagaaccctcaaagcgtgtgttcttcaacctggcaaattgtttcctctcatgggggaagccgagctctgatgaacttgagaattacacctctctcatgccgaagaccgtg

SEQ ID NO: 698798 - DNA, 120 bp, Artificial Sequence
  ENSG00000189337_36 (sequence is synthesized)
gtgttccccctaatgacataaacgcagcctttcttgctgtctgagaccaaatgtctagttggtagacaggtggatgtttggcctcctaagggcacacttctgatcctgggccccaggtgg

SEQ ID NO: 698799 - DNA, 120 bp, Artificial Sequence
  ENSG00000189337_37 (sequence is synthesized)
tgaatctctggcatgtggcttggctttgttgagactccaaattccattatcttcatgacattcggcctcatccatagggtcctgaagctgcagtccacagctcagaaaggagaggtgaga

SEQ ID NO: 698800 - DNA, 120 bp, Artificial Sequence
  ENSG00000189337_38 (sequence is synthesized)
cctccctccaacctggtgccacaggtctctcccaagccacatccagcctggatgacctgggaccccagaaactgccgtttgggaggcagcaacagcaacgtgcccaggcaggcagttatt

SEQ ID NO: 698801 - DNA, 120 bp, Artificial Sequence
  ENSG00000189337_39 (sequence is synthesized)
cccacagagtgagccagaattgtagcagggcacttgaatgcagagctgatgatttgaaaccaacgttcacccaacttgtcagaaatggcacttacatggttcgatcttgctggagacaag

SEQ ID NO: 698802 - DNA, 120 bp, Artificial Sequence
  ENSG00000189337_40 (sequence is synthesized)
tggacaattgggggtcactggcagagacagtattgcccaaaatgttcacagcaggaggccagcaggcctgaggcaacacgggcaaccgcgaatgcctcttttggtttaaattatgccatc

SEQ ID NO: 698803 - DNA, 120 bp, Artificial Sequence
  ENSG00000189337_41 (sequence is synthesized)
acaaccctctttcacccatgaggctccccatccctgacagccaggtgagcatttggagctggtttctcaacatgaggatgggttggttgttaaattaacaacctccacagtatcagattg

SEQ ID NO: 698804 - DNA, 120 bp, Artificial Sequence
  ENSG00000189337_42 (sequence is synthesized)
agtgagctttgtctgctggaaaaacctgaaacgtcaactctgcttcaaggtcggcaagaagaacagaaggcggagacttggcagagagactcaagctgattgtcacaggctacagagggg

SEQ ID NO: 698805 - DNA, 120 bp, Artificial Sequence
  ENSG00000189337_43 (sequence is synthesized)
ccagctccagaacagtgaccagctacatcctgtccaagcagcccgagtgtggtcttggtccctgcagggcaatgtgggcatctggacctggggacgatgtggatgcacttcttggaaagc

SEQ ID NO: 698806 - DNA, 120 bp, Artificial Sequence
  ENSG00000189337_44 (sequence is synthesized)
tgttgtagcttgtgcctgtgggtggagaaggcacctgcctggtagactctcagctttctgacccccaggagcctctgcgaggcccctttgtccttggctgagccggacctttcttttgga

SEQ ID NO: 698807 - DNA, 120 bp, Artificial Sequence
  ENSG00000189337_45 (sequence is synthesized)
aatctgtctgtctgttggcatcgctgttttcagaccccaggctgcagaggaggggagaagccacacaacaatctggacccaataaagtggagagaagggcgtctctacacagcccggcca

SEQ ID NO: 698808 - DNA, 120 bp, Artificial Sequence
  ENSG00000189337_46 (sequence is synthesized)
gcgtggagggccccaggacagggacccaaaagcttgacgtcactgaacagggctgggtactggcagaacaggaagatttggccagaggtgacctcagtgttccctccaggggcatccagg

SEQ ID NO: 698809 - DNA, 120 bp, Artificial Sequence
  ENSG00000189337_47 (sequence is synthesized)
cccctctgacctggggagaagaaggcccatgctcaggcccacctccctcttcccatcagagcccatgcgtcctgggcaccaccacttccactctgcttttcgaggctccggagggctctt

SEQ ID NO: 698810 - DNA, 120 bp, Artificial Sequence
  ENSG00000189337_48 (sequence is synthesized)
cctgctgtgaaaggaaaggagaagaaagcctgtgggcaatggcaacctctgagtctggcattcttgccaatggctggccagcgaggagaatctcccgagccctgacacacaaaggcattt

SEQ ID NO: 698811 - DNA, 120 bp, Artificial Sequence
  ENSG00000189337_49 (sequence is synthesized)
tgtggctgcagaggaaatgggttggctctgaacaaagatgcagtttctagggccgtggccccaaatcgcttccccgagagtgaattttaacactgtaacaataaatactactgcacagca

SEQ ID NO: 698812 - DNA, 120 bp, Artificial Sequence
  ENSG00000189337_50 (sequence is synthesized)
gctgggctgagttagcacttccctccgcatccagaatatctcccaggaactgccccctttgcatcgccgcaccggggtggcggcgcgggctgggggccgctgcagcaggtctcagtccct

SEQ ID NO: 698813 - DNA, 120 bp, Artificial Sequence
  ENSG00000189337_51 (sequence is synthesized)
ccctccctgctgccacgcgaggagtggggagcggcagggcctaggcgtcccgagtggaggatgagccggagacgcctgcgggtccggagctgcaccgcgcccgtgcggcccgcgccgccc

SEQ ID NO: 698814 - DNA, 80 bp, Artificial Sequence
  ENSG00000189337_52 (sequence is synthesized)
cccgcgctctccctttggcagcagccggacgcctggcgcgtgcaggacctggggccgcggcgctcgcgcggggacgcggg

SEQ ID NO: 698815 - DNA, 120 bp, Artificial Sequence
  ENSG00000189337_53 (sequence is synthesized)
cagcaaggccagctccccggggaccctggggcagcctcgcgccctgcctgcctccctggactgagacgccgcggggcctgggcagcgctctgccggcagctggtgctggaacacagccgg

SEQ ID NO: 698816 - DNA, 120 bp, Artificial Sequence
  ENSG00000189337_54 (sequence is synthesized)
gagctgctcccggggaccctgccccttccaggtgaccccaggagaagcagccccgggccggggggcaagttccagccacccttccgggtcaagaagccacgactcctggttagggggaaa

SEQ ID NO: 698817 - DNA, 120 bp, Artificial Sequence
  ENSG00000189337_55 (sequence is synthesized)
cttagatttttcttttgcatggaactgctgctgtgcaagatttgccaaggcttatagggtttcattttttacttgactggtgtttgagaaaaactgcaaggaaagggtggcgaaaggaag

SEQ ID NO: 698818 - DNA, 120 bp, Artificial Sequence
  ENSG00000189337_56 (sequence is synthesized)
aaacactataaactttgggggcggggacattttcttggaagtgacaagtagcctcagatctgcagttcctgggccagcgacggcatcctttgctctgacactccaagggtctggacgctg

SEQ ID NO: 698819 - DNA, 120 bp, Artificial Sequence
  ENSG00000189337_57 (sequence is synthesized)
ccacatgaccaacaccaaagaccccaaaagagccatggaatccacgctggcgacatccaattctgccacaggccccgtcaccttctcccacgtctttggtcagcagtgccaacttatgca

SEQ ID NO: 698820 - DNA, 120 bp, Artificial Sequence
  ENSG00000189337_58 (sequence is synthesized)
agcagctgtgcaatcattgcacaccctcaatgaccagatttcccattttattgtcaccaagtcgaaggcactggaggaggacaaagacccttttctacccactgagaaggagactctgaa

SEQ ID NO: 698821 - DNA, 120 bp, Artificial Sequence
  ENSG00000189337_59 (sequence is synthesized)
gggagagggaaggtcaggcttgcctcctgttcacaaggacaacctctgtctcccttgtggcggcttctatgaaggtggggactccaggctttctctcgtctgctttttggatgccttcaa

SEQ ID NO: 698822 - DNA, 120 bp, Artificial Sequence
  ENSG00000189337_60 (sequence is synthesized)
gagaggccagttagaggatatcaattgtggcaattccccagagccctcatcagatggcattagcccgtcatgtgctgcagtggcacccagtttggaggaaattcggaaccagaagagtgt

SEQ ID NO: 698823 - DNA, 120 bp, Artificial Sequence
  ENSG00000189337_61 (sequence is synthesized)
tctgtgcgtgtgggcgtgtgtgcaagcgagcgtgggtgcgcgtgtggccgtgcgtggggtgcgtgtgcacgtgtgcgctggcacacatgggtgctgggtgtggccgagcgcctctaacaa

SEQ ID NO: 698824 - DNA, 120 bp, Artificial Sequence
  ENSG00000189337_62 (sequence is synthesized)
gtgaaaacacgagtgtgaacctctctcccctgcgtcgccacctctgtaattgatgtacataccgcaaaccgtgtgtgaacctgtcaactctctgtcgtctttggagcgatacagttgtgt

SEQ ID NO: 698825 - DNA, 120 bp, Artificial Sequence
  ENSG00000189337_63 (sequence is synthesized)
tgttaatctggtttattatttttcttcagtgtttggtttttctttttctttttgtttggttcgtcggtttgtttttgtttttgtttttttccccctttctcctcccctcctcctttttat

SEQ ID NO: 698826 - DNA, 120 bp, Artificial Sequence
  ENSG00000189337_64 (sequence is synthesized)
gaaacttgaaaacttgaaggactgctgtgtatttgtaaataacaaaactattgtgcactctgtgcttgtaaatgtccctcgtccaaaccgctactcctggagcccgtctggcagaggatg

SEQ ID NO: 698827 - DNA, 120 bp, Artificial Sequence
  ENSG00000189337_65 (sequence is synthesized)
cgtgtgggaccagaccctgtcctgggggtgcgcccaagtcactttaaccacaaaacgccatcgtcgtcagggtaagctctgctctctacaaagactcgcgagccgggccaaggggccttg

SEQ ID NO: 698828 - DNA, 120 bp, Artificial Sequence
  ENSG00000189337_66 (sequence is synthesized)
tcttggctgggtttgtcagaggtcaaaccggctcttttaaacggcctaccagtttttaaattgcattgccgtttctttctttatgaaaaaaaagaaaaaaagaaaattgtttcatttaat

SEQ ID NO: 698829 - DNA, 120 bp, Artificial Sequence
  ENSG00000189337_67 (sequence is synthesized)
ttatttgcacaaatgctgaaaacttattctatctaaattattacataaatattggaatgtctatttttccatggggtgggcgggaggtgggtgtctctgttgacttgtctgttctgttac

SEQ ID NO: 698830 - DNA, 120 bp, Artificial Sequence
  ENSG00000189337_68 (sequence is synthesized)
catgctgctacccaactgtgcaaagtagtttagggtggccagaacccagggaccattggatttcaaagcttgctttttctgttggttcttctctctccttctctctctgtctctcccatt

SEQ ID NO: 698831 - DNA, 120 bp, Artificial Sequence
  ENSG00000189337_69 (sequence is synthesized)
ctcctgcccatgcatgaaaggatcctccaccttcttcccacccagagctccctccaggcctttctctatatatttatttatctgacatacagaacacgactttagtgagcagagtgctga

SEQ ID NO: 698832 - DNA, 120 bp, Artificial Sequence
  ENSG00000189337_70 (sequence is synthesized)
cagtcatggtccccttctttgggtctgtcttttgagagaggttgagttcagggcaagacagcctgccacacatccaagggtacgaccagtgggaccctggcctgagtctgttctccgagg

SEQ ID NO: 698833 - DNA, 120 bp, Artificial Sequence
  ENSG00000189337_71 (sequence is synthesized)
ggcctccagcagcttctgttcctccctgcagctgtgtctttcttgtcctgggtttaggatgcaggtgggccaggcaggtgttgttaggggaggcacccacttcaaaaggagggccacagt

SEQ ID NO: 698834 - DNA, 120 bp, Artificial Sequence
  ENSG00000189337_72 (sequence is synthesized)
ggggacacagagtccagcacctgagccctccaccctccccattctggttggttccatcagccacacttagaatctcccaggatcccttggactccgtcccccaacttgtcacagcagcct

SEQ ID NO: 698835 - DNA, 120 bp, Artificial Sequence
  ENSG00000189337_73 (sequence is synthesized)
gagcctacccaccccaggagacaagagctggcaggaacatctgcctatatggggggtggcgttggccccaaagaggcttcaccagcaaaggaactgtgtgtattttaatgccaggggacg

SEQ ID NO: 698836 - DNA, 120 bp, Artificial Sequence
  ENSG00000189337_74 (sequence is synthesized)
gaggatgtgtgagctgttcagcaaggtctgcccaaggcctaaaactcaatttccttattcttttgcttctgctcgtccttaacaactaacagctcaacccacacctctagacaacagtag

SEQ ID NO: 698837 - DNA, 120 bp, Artificial Sequence
  ENSG00000189337_75 (sequence is synthesized)
tcgtgctttctgctaacggtgacattttcagctcttaaaaagaagcaaggagattttcaaatgctagagtatctctatcagaaggcataggacattgtgtccaaagtctcaagaacaaac

SEQ ID NO: 698838 - DNA, 120 bp, Artificial Sequence
  ENSG00000189337_76 (sequence is synthesized)
aacactttccttctgacctggtccaaaagtcagcaaacagcaagcaggcagaggccctcataaggacttttctgtcctcctttgaccaaactgtttaaccgagcctaggggtgacgggga

SEQ ID NO: 698839 - DNA, 120 bp, Artificial Sequence
  ENSG00000189337_77 (sequence is synthesized)
gcgacccaagctggcatctttctctacggagacagattttagaaaatacttttcttgcccatgaatttcttttctggttgatttttatcattttccctttacttacaagaaaataagatt

SEQ ID NO: 698840 - DNA, 120 bp, Artificial Sequence
  ENSG00000189337_78 (sequence is synthesized)
gcaaccactcctgctaatgatttagtagttccttttcatttcagtttttgtaaattaggagataattctaagagttactaaaggatgatttatttaagagaactacgtcaaatagcgaat

SEQ ID NO: 698841 - DNA, 120 bp, Artificial Sequence
  ENSG00000189337_79 (sequence is synthesized)
gagttatgggtaacattagacgaaaataacctttcccgtgggaaaggtttctcgaaggcatggatgcaaatataaaatattaaaaaaaatctaaataaagcttattttaaaatatgatcg

SEQ ID NO: 698842 - DNA, 80 bp, Artificial Sequence
  ENSG00000189337_80 (sequence is synthesized)
agccgttcccacgtgagaggctccgcggccgaattcctcgcgtgcagcaggcgcggaccgcccggcgtccggccggactg

SEQ ID NO: 698843 - DNA, 80 bp, Artificial Sequence
  ENSG00000189337_81 (sequence is synthesized)
ccgggtctgtgagcccggcgcgcgccgtcggagcccctcgcgcagccgctggtagcgtccccccgggcacccggcatgcg

SEQ ID NO: 698844 - DNA, 80 bp, Artificial Sequence
  ENSG00000189337_82 (sequence is synthesized)
ggcatgcgggcggccgactcgggctcgtgggagcgcgtccgccagctcgcggcgcagggcgagccggcgccttcctgcgg

SEQ ID NO: 698845 - DNA, 120 bp, Artificial Sequence
  ENSG00000189337_83 (sequence is synthesized)
gtgcgtggacgcggcggggcccggcgatcggccccgcgccggggttccccgggtccgagcggatggcgactgcagccagcccgtgctcctgcgggaagaagtgtcgcggctccaggagga

SEQ ID NO: 698846 - DNA, 120 bp, Artificial Sequence
  ENSG00000189337_84 (sequence is synthesized)
gcatcagcagctgtctgccagtgttgacggagggctcatgggtgccaggccgcttgctggggctttttatctgtcctcaggcattggcacagcagccctgggagatgaatactattgtga

SEQ ID NO: 698847 - DNA, 120 bp, Artificial Sequence
  ENSG00000189337_85 (sequence is synthesized)
tcttcattctccacacaaggacagggaagtgacgtgccagggtcaaacaactacccaaggacagagccaggatttgaaccaggccatccagttccagaaccactgctcttcactgtcatt

SEQ ID NO: 698848 - DNA, 120 bp, Artificial Sequence
  ENSG00000189337_86 (sequence is synthesized)
cggacacactccctctgcaacgtaaggccagcagcagcggggcctgggcccctgggccctgcccagaaactgcaggggcgggggtggcggggtgaagccatactcgctgtttcctctcgt

SEQ ID NO: 698849 - DNA, 120 bp, Artificial Sequence
  ENSG00000189337_87 (sequence is synthesized)
ccacccagggagcactctggcgaatgcatttcctgttctgttctttccttttgcaagaagcgatggatgtggggagaaaaaggaatgaggcccgtttgctccttgtgtccgggagggtga

SEQ ID NO: 698850 - DNA, 120 bp, Artificial Sequence
  ENSG00000189337_88 (sequence is synthesized)
ggagaatccagaggaagcgggcctgggtcggccgcaggcacagcctggaactctgccccagtgggccctgtctgggaccgtgggcttctcctcccacacattaccttccagagctcaggg

SEQ ID NO: 698851 - DNA, 120 bp, Artificial Sequence
  ENSG00000189337_89 (sequence is synthesized)
cctccccagcacctcctcatttccctttagagccagctctctatcctgacccaggagtcttggcatgaattgcctctggagaggcttgtgaatatggtctaagtttgtttcctttgttta

SEQ ID NO: 698852 - DNA, 120 bp, Artificial Sequence
  ENSG00000189337_90 (sequence is synthesized)
tttcatcaaacactttttgattgcatactgggcaccagctcccaggaggcaaaggccctagctgcctagctcttgatgactagtggggcagacagatgggctctgcaacagtgtgggagt

SEQ ID NO: 698853 - DNA, 120 bp, Artificial Sequence
  ENSG00000189337_91 (sequence is synthesized)
aaattgaaggtgggttgagcttctgaggacagttggaagccatgtcgaggctctaacatgaaatattggggtctgggtgtggggaccaccttgaatttttgttttatcacacagttggta

SEQ ID NO: 698854 - DNA, 120 bp, Artificial Sequence
  ENSG00000189337_92 (sequence is synthesized)
atgcagaggctcccctctgccatatcctgaagacagacatcatagggttagatcctcaaatgcacgagacggctttttccaaaactcagttaatgtcactttattaaccagcgaaataga

SEQ ID NO: 698855 - DNA, 120 bp, Artificial Sequence
  ENSG00000189337_93 (sequence is synthesized)
taataaaaaagaaatgaggtgaacacattggacaaaaccattacttgccagtgacatgattctctacctggagaactcaagagaataacttgaaaagctattagaatgaataataagcat

SEQ ID NO: 698856 - DNA, 120 bp, Artificial Sequence
  ENSG00000189337_94 (sequence is synthesized)
gtacataacagtgttgcttggaaatcagtgtgtaaaaatcaatcactttcctatagatgagtcgtaattatggaaccatttttttcaatccacaataatgaaaagtgcttataaaaatag

SEQ ID NO: 698857 - DNA, 120 bp, Artificial Sequence
  ENSG00000189337_95 (sequence is synthesized)
ctaagagtaaacttcagagaagctgcctcagtctgctcaggtgggcggcagagattgctggcccggggactttagatggcctcctcagagtaggaaggtcatttgcagcctggggccctg

SEQ ID NO: 698858 - DNA, 120 bp, Artificial Sequence
  ENSG00000189337_96 (sequence is synthesized)
ctcaggcctgggattctcttttttattgttttattttatttatttgtatgtgtgtgtgatggagtttcactcttgtcacccaggatggagtgcagtgacgcagtctcagctcactgcaac

SEQ ID NO: 698859 - DNA, 78 bp, Artificial Sequence
  ENSG00000189337_97 (sequence is synthesized)
caggatggagtgcagtgacgcagtctcagctcactgcaaccaacaccttcccattacagatgcctgccatcacacccg

SEQ ID NO: 698860 - DNA, 120 bp, Artificial Sequence
  ENSG00000189337_98 (sequence is synthesized)
atagacatgagccactgcacctggcgggattctctgttttatactggtgctttgaggaagcagtatgttcttctcttgtccccagaagagaatcctagtgacaaagtctatcttgactaa

SEQ ID NO: 698861 - DNA, 120 bp, Artificial Sequence
  ENSG00000189337_99 (sequence is synthesized)
cagaaccaaggcaaggaaggtgggccactggaggggtctctgacatccattccctgatcctgaaggaccactgtggagttatacctacagccagcagtgtccctgcaccattctcatccc

SEQ ID NO: 698862 - DNA, 120 bp, Artificial Sequence
  ENSG00000189337_100 (sequence is synthesized)
agttgagaataccttccccccacggccatattttgtcttctcgtggtgggcccatggggactctggcagcagaaatgctgctggaaaaaccccattctgcagaaggagttctccaaaggc

SEQ ID NO: 698863 - DNA, 120 bp, Artificial Sequence
  ENSG00000189337_101 (sequence is synthesized)
ctcttgaattgcatttgacccagtcctagtcttttgcccaccatagccttggcacattcctgctgccaggaaatgggtgctttgataagccagttgtctgcatacaggcgtttcagtgag

SEQ ID NO: 698864 - DNA, 120 bp, Artificial Sequence
  ENSG00000189337_102 (sequence is synthesized)
caggccccattctctttacccatagatttggcaaagatgttcctatccagagtggaactatcttagctgccttcagaatggattctgtttgcaaaccttgagactaaagactaaactacc

SEQ ID NO: 698865 - DNA, 120 bp, Artificial Sequence
  ENSG00000189337_103 (sequence is synthesized)
attcattaattccctcacttcctcaaccctttttatccccccatctcaacaggtgtgcatgcaggtaagccaggaagagcccaaaaatagctacaggtaaccctttgccttgggcatctg

SEQ ID NO: 698866 - DNA, 120 bp, Artificial Sequence
  ENSG00000189337_104 (sequence is synthesized)
acgtccaccagcaagaatagtgcagcctggactaatgactgcctcatcctctcacactctggccactaatttagagcaaaagtaggaactcagcatagagaggttggagaaggttgacgg

SEQ ID NO: 698867 - DNA, 120 bp, Artificial Sequence
  ENSG00000189337_105 (sequence is synthesized)
accttggcattatgcttgcaattccagaaataaccaccaggagtctccctagtaatgactgttttgatccaaaggatctgtgggctccagacagggcagactgattctgggatgtagtga

SEQ ID NO: 698868 - DNA, 120 bp, Artificial Sequence
  ENSG00000189337_106 (sequence is synthesized)
aggcttttgtacacctgtaggctattaagggttccctccacacccacgtaaggcagggctggcaacacaatggaaatgtcctacctgcccatcctagggacctgtcgtctgaggctccct

SEQ ID NO: 698869 - DNA, 120 bp, Artificial Sequence
  ENSG00000189337_107 (sequence is synthesized)
aggaaaaagggaaggagttcagacccctcctggggcagcccaaagctcaggaccaagtatgcagttaccctggagctcctgcctggaaggagcactgtgccaggaggaatctgacagccc

SEQ ID NO: 698870 - DNA, 120 bp, Artificial Sequence
  ENSG00000189337_108 (sequence is synthesized)
ccaattggagctgtagctctgcatccaattagctccacggtagtggactgtctgctgcctctcttgatatctgtgaatagggctaacgagtcctgcctgcccctgcgcaaactaagagat

SEQ ID NO: 698871 - DNA, 120 bp, Artificial Sequence
  ENSG00000189337_109 (sequence is synthesized)
tcattgtgtcggttgtgggggaagctagaggctacgtggtctcccaagtttgtttctgtcccaaaattctctattttgtgctttttctataaaagtacatttctttatgaaaagcaccaa

SEQ ID NO: 698872 - DNA, 120 bp, Artificial Sequence
  ENSG00000189337_110 (sequence is synthesized)
gtctaaccaagctctagctctaactcagaggacagactgggacaggaacttagacgccctggagtggctaatttgttggtcagaagatgctgggggttgagaggccagactgggcaggag

SEQ ID NO: 698873 - DNA, 120 bp, Artificial Sequence
  ENSG00000189337_111 (sequence is synthesized)
aggaccccaggaactctagggaaactccaggccccatcaataagccatctgggggtatctgcttcaggagatggggggtgggctccccactgcagaggcagggtggcccctgagagatgg

SEQ ID NO: 698874 - DNA, 120 bp, Artificial Sequence
  ENSG00000189337_112 (sequence is synthesized)
catccttccacggaaggccccacaccgcacgggccgcctctgctctcctgtgtcacctgtctctgctgtttcatcttcctcttctcctctggctacagggcgacagtcccggcccagttc

SEQ ID NO: 698875 - DNA, 120 bp, Artificial Sequence
  ENSG00000189339_0 (sequence is synthesized)
tccgtggctctggggcactgaggagcggcgcccgcggggcagcgaggagcccgatgcagggttctgcgcgtcatttccggtcccgcgggcgccccgtgaagcccacctggatccgccagc

SEQ ID NO: 698876 - DNA, 120 bp, Artificial Sequence
  ENSG00000189339_1 (sequence is synthesized)
gctgtgccactccccagtgccgagctccgagctgtctccgcggcctcgcgcccggcccctccaccgcgcgcctctcaggccccgcccgccagcgtccctttgttgtgaaggcgccggggc

SEQ ID NO: 698877 - DNA, 120 bp, Artificial Sequence
  ENSG00000189339_2 (sequence is synthesized)
ctagcgctatgcctgcggcggagactgcatcaggctctcgcgtctgcttctgcgctttgcctgggagaggccctggtggcctcgttcctggcgcccggagtccctgctgcggccccaccc

SEQ ID NO: 698878 - DNA, 120 bp, Artificial Sequence
  ENSG00000189339_3 (sequence is synthesized)
ccgggcggtcacggtgacccatgctgcccagcctggaggtaaaatcgttcgtggctgtggcttcagcatgtcgtcctcggtgaaaaccccagcactggaagagctggttcctggctccga

SEQ ID NO: 698879 - DNA, 120 bp, Artificial Sequence
  ENSG00000189339_4 (sequence is synthesized)
agagaagccgaaaggcaggtcgcctctcagctggggctctctgtttggtcaccgaagtgagaagattgtttttgccaagagcgacggcggcacagatgagaacgtactgaccgtcaccat

SEQ ID NO: 698880 - DNA, 120 bp, Artificial Sequence
  ENSG00000189339_5 (sequence is synthesized)
cacggagaccacggtcatcgagtcagacttgggtgtgtggagctcgcgggcgctgctctacctcacgctgtggttcttcttcagcttctgcacgctcttcctcaacaagtacatcctgtc

SEQ ID NO: 698881 - DNA, 120 bp, Artificial Sequence
  ENSG00000189339_6 (sequence is synthesized)
cctgctgggaggcgagcccagcatgctaggtgcggtgcagatgctgtccaccacggttatcgggtgtgtgaaaaccctcgttccttgctgtttgtatcagcacaaggcccggctttccta

SEQ ID NO: 698882 - DNA, 120 bp, Artificial Sequence
  ENSG00000189339_7 (sequence is synthesized)
cccacccaacttccttatgacgatgctgtttgtgggtctgatgaggtttgcaactgtggttttgggtttggtcagcctgaaaaatgtggcggtttcgtttgctgagacggtgaagagctc

SEQ ID NO: 698883 - DNA, 120 bp, Artificial Sequence
  ENSG00000189339_8 (sequence is synthesized)
cgcccccatcttcacggtgatcatgtctcggatgattctgggggagtacacagggctgctggtcaacctctccctcatcccagtcatgggcgggctggcgctgtgcacggccactgagat

SEQ ID NO: 698884 - DNA, 120 bp, Artificial Sequence
  ENSG00000189339_9 (sequence is synthesized)
cagcttcaatgtcctggggttctcggccgcactgtccaccaacatcatggactgtttgcaaaatgttttttcaaaaaagctgctcagcggggacaaatacaggttctcggccccggagct

SEQ ID NO: 698885 - DNA, 120 bp, Artificial Sequence
  ENSG00000189339_10 (sequence is synthesized)
gcagttctacaccagcgccgctgcggtggccatgctcgtcccggcccgggttttctttacggacgtcccagtgatcgggaggagtgggaagagcttcagctacaaccaggacgtggtgct

SEQ ID NO: 698886 - DNA, 120 bp, Artificial Sequence
  ENSG00000189339_11 (sequence is synthesized)
gctgcttctgacagacggagtcctgttccaccttcagagcgtcacggcgtacgccctcatggggaaaatctccccggtgactttcagcgtcgccagcaccgtgaaacatgccttgtccat

SEQ ID NO: 698887 - DNA, 120 bp, Artificial Sequence
  ENSG00000189339_12 (sequence is synthesized)
ctggctcagcgtaatcgttttcggcaacaagatcaccagcttgtcggccgttggcacagccctggtgaccgttggggtcctgctctacaacaaagccaggcaacaccagcaggaggcgct

SEQ ID NO: 698888 - DNA, 120 bp, Artificial Sequence
  ENSG00000189339_13 (sequence is synthesized)
gcagagcctggctgcagccactggccgggccccagacgacacagtggagccgctgcttccacaggaccccaggcagcatccctgagagcaggaagctgccagctgctgctgtcctcgtga

SEQ ID NO: 698889 - DNA, 120 bp, Artificial Sequence
  ENSG00000189339_14 (sequence is synthesized)
cactgcatcccccagaaatgggcagggacgccctcctccatggccctgctggggtgcaggacatggggagctaagttggccattgcctgcggctttctcggtttgtcggtgaagaccagc

SEQ ID NO: 698890 - DNA, 120 bp, Artificial Sequence
  ENSG00000189339_15 (sequence is synthesized)
agaaactcaaactggggattccaggtatcagcttcctggagtagagaccagaccagtagctgactgtgtccgccgagcccatccccgtgtaatgtgaaaacagcctctgaggctcccatg

SEQ ID NO: 698891 - DNA, 120 bp, Artificial Sequence
  ENSG00000189339_16 (sequence is synthesized)
ctgggggtgcccacttcctctctgggcgacaccccagggtccaccgggagccagaggtgggtccagtgccaacgagagccgctccctgccacagccaagagagccctcggcttcccacac

SEQ ID NO: 698892 - DNA, 120 bp, Artificial Sequence
  ENSG00000189339_17 (sequence is synthesized)
cagccatcgaaggccctgaggccctggaccggcggcagactggccctgggcatgaggccacagagcagggccgaagggaggggacagagggccctggaaggaagggtctcctgctgccac

SEQ ID NO: 698893 - DNA, 120 bp, Artificial Sequence
  ENSG00000189339_18 (sequence is synthesized)
ggtgggcactcagaacttctccccacctgacccagggctgtgggcatcctcagactatcccagaggcatcgcaagcctcaagctgcagcattgcacggcactcaagggctatgaccacgg

SEQ ID NO: 698894 - DNA, 120 bp, Artificial Sequence
  ENSG00000189339_19 (sequence is synthesized)
aggccgttcagtcgcttctgtttagaggaaggccccctacctcttccacaccctgccctcctatcccttccacaccctgggctgcgtgagctccccgcaaccccagggcaccctgccctc

SEQ ID NO: 698895 - DNA, 120 bp, Artificial Sequence
  ENSG00000189339_20 (sequence is synthesized)
ctacctgtgggggtttccagccctgaggttgaggacaaacctctcgtgtttaacttgggaggagatgtgtacgttccttttcttttttggactctgagtatgaggcaggctgttctgagg

SEQ ID NO: 698896 - DNA, 120 bp, Artificial Sequence
  ENSG00000189339_21 (sequence is synthesized)
tccccgtggggtgagcctgtctgtcctccctcagagcccactgttcctatcatcatctagcacctgtccggttccccacgtgagccttgggcaggacgctgcagtgttgatggtttgggt

SEQ ID NO: 698897 - DNA, 120 bp, Artificial Sequence
  ENSG00000189339_22 (sequence is synthesized)
tacgtggcgtttacctgggcgccgtccttactgaaaaaggaaacgtccacactgaatgtttctggggcgcgtggtgtgtgtcaggcgcccaccctgtcccactctccccaagggacagta

SEQ ID NO: 698898 - DNA, 120 bp, Artificial Sequence
  ENSG00000189339_23 (sequence is synthesized)
gtacggcacactggggccaccagccagctcaactcatcctcctgtgtcacgcacccccgagggcgcaggaggcctgaggagtggctactggagccgtgtgttaggcagaggcttctgacc

SEQ ID NO: 698899 - DNA, 120 bp, Artificial Sequence
  ENSG00000189339_24 (sequence is synthesized)
ccagcctttgagacccagagctccagggcttgtcagaggcagcatggggctccagtggtcccgagtctcatttccctgcctgctctttaggcctttggcacccatggtcacttcactggc

SEQ ID NO: 698900 - DNA, 120 bp, Artificial Sequence
  ENSG00000189339_25 (sequence is synthesized)
tttccatttggcttctcacctgggaaatacaaaaatagcccctcctgaagataaaatcattcagaaacagagcaataattctgactcattaacttctacctactcaaaaaagtctgccat

SEQ ID NO: 698901 - DNA, 90 bp, Artificial Sequence
  ENSG00000189339_26 (sequence is synthesized)
ctgactcattaacttctacctactcaaaaaagtctgccatgatgatggaccgaagtgaggctttttaacccacaagtaacctttgtcacc

SEQ ID NO: 698902 - DNA, 120 bp, Artificial Sequence
  ENSG00000189339_27 (sequence is synthesized)
caaatgatcctcccacctcagcctcccatgtggctggaaccacaggcacgtgccaccatgcctggctatttttttgttgagctgggctctcgctttgttgcccaggctggtcttgaactc

SEQ ID NO: 698903 - DNA, 120 bp, Artificial Sequence
  ENSG00000189339_28 (sequence is synthesized)
ggctggtcttgaactcctcggctcaagcaatccttcccactcagcctcctgtagtgtcgagaatataggcgtgggctactacacctgcttcagccgcttctataaaaccgctgacctgtg

SEQ ID NO: 698904 - DNA, 120 bp, Artificial Sequence
  ENSG00000189339_29 (sequence is synthesized)
tgtggaggacaggccaggtgtgtgctcactgcgctgcgaagatgttttgtcacgtgactttccccggatttccatttctttttttctgctttcctcaaaaactaatagaagactgggtgc

SEQ ID NO: 698905 - DNA, 86 bp, Artificial Sequence
  ENSG00000189339_30 (sequence is synthesized)
tttttctgctttcctcaaaaactaatagaagactgggtgcggtggctcacgcctctaatcgcagcactttgggaggcagcagctgg

SEQ ID NO: 698906 - DNA, 120 bp, Artificial Sequence
  ENSG00000189339_31 (sequence is synthesized)
agcctgggcaacagggcaagattccgtctcaaaaacaaacactattagaaaatgccctggaggtggcggggagttgttgatttgtgaggacagattgaaagcaactcccagggtggcctt

SEQ ID NO: 698907 - DNA, 120 bp, Artificial Sequence
  ENSG00000189339_32 (sequence is synthesized)
gtccacctccccgtcgagaatgtggctgccggcctctttgaagattgtggtctggcataaggagaggtgcaggcgcctggttctgagcaccttggaatttccagccgcacagcatctggt

SEQ ID NO: 698908 - DNA, 120 bp, Artificial Sequence
  ENSG00000189339_33 (sequence is synthesized)
gccctcccctccaccctcacaaggagctgccatcctgtttggattttctgtttgtggaccagaaacaaacgtttttccaaaggattagcaaatagggtaatttcctgtgtaacgctgctc

SEQ ID NO: 698909 - DNA, 120 bp, Artificial Sequence
  ENSG00000189339_34 (sequence is synthesized)
tggggcctcttcctcatcctggcagaaggagcctggagcccatgaggcagccagcactgtgcccttgctcagtcgtgctgtcccctccctctccctcagtctcctctccatgcccaagtc

SEQ ID NO: 698910 - DNA, 120 bp, Artificial Sequence
  ENSG00000189339_35 (sequence is synthesized)
agtttccagccgctggtcttcatggcattcccagcacagccgggcaccaagaggcaaaacccaaggcctggcttggccgtgttaacgattgtacagacattttttaaaataactttgtgt

SEQ ID NO: 698911 - DNA, 120 bp, Artificial Sequence
  ENSG00000189339_36 (sequence is synthesized)
aatacttttctggaatagtaagttcttgttgaactgtcacaggtgagcttctaggaacacaccaggtgtggttacttccactgggtgtgtccatggtcgtggtctgtgcttttgtaaacg

SEQ ID NO: 698912 - DNA, 120 bp, Artificial Sequence
  ENSG00000189339_37 (sequence is synthesized)
aacagaacacttgaaccacctcccgaattgggtcatcggcttctttacgttgatacttaagagatttgcagctctctttcaaggaaacttcccctactgaaaggcataaaaaggttaaaa

SEQ ID NO: 698913 - DNA, 120 bp, Artificial Sequence
  ENSG00000189339_38 (sequence is synthesized)
aagaaaatccgagagtcccaattccctgtataacagcattaaaataatctgcctgcctggaaagatgagaacactgttgcacaacccaaaatgtgtctttaatttgtgaaaaattaccat

SEQ ID NO: 698914 - DNA, 120 bp, Artificial Sequence
  ENSG00000189339_39 (sequence is synthesized)
ggtgagtcagacagtcattttaaacagctgaacagagactatcatcagcaaatagagctcagctttgtagctgcctttaaaatccttgtcccaaatccggtgagctctgcttgctgccgc

SEQ ID NO: 698915 - DNA, 120 bp, Artificial Sequence
  ENSG00000189339_40 (sequence is synthesized)
cgcgctcctgggtgatcactcagacgggtcagtgggaataacaggccaacaagacagctttttacatgtgtccaaaggatggcctttcgaaggcctggaagtatttcactgttggaagaa

SEQ ID NO: 698916 - DNA, 120 bp, Artificial Sequence
  ENSG00000189339_41 (sequence is synthesized)
gtaaacaagaatgacattccagatggaaatagaattctctctcttgcctttgaccaacatggtactaaggggtttcttctttcccaatgtatgtacgtgccctgctgggggccttacttt

SEQ ID NO: 698917 - DNA, 120 bp, Artificial Sequence
  ENSG00000189339_42 (sequence is synthesized)
atagaatgagagcatccgagcttccctaatgaatctggctagttctgtgtctggctgaggatacaggagtgggacatccactctcggatccctcagagcacagaaaccttcagctttgct

SEQ ID NO: 698918 - DNA, 120 bp, Artificial Sequence
  ENSG00000189339_43 (sequence is synthesized)
gtctctgaagtatttcctccagtttccctgcgggcccctatgtttgagtttgatggctgctggatcctcactcaacgaaaactcggttggaaactgttccgcctggcagtccttttttgt

SEQ ID NO: 698919 - DNA, 120 bp, Artificial Sequence
  ENSG00000189339_44 (sequence is synthesized)
tgttttccatctcatttcccttccatctgaaagtggcattcagctgacttgctcatttagactgttcacggagtctgaatctgccaacgtggtgttggaggctccaccttgaaaagggcc

SEQ ID NO: 698920 - DNA, 120 bp, Artificial Sequence
  ENSG00000189339_45 (sequence is synthesized)
acagtcagggcaactttccccatacaggaaaacttgaaaattacatcaacagtctacgtcacagccaaattatatttcctttataccaaacaaaactatggagaactaaaagtacatcac

SEQ ID NO: 698921 - DNA, 120 bp, Artificial Sequence
  ENSG00000189339_46 (sequence is synthesized)
acaaaacgtttatagtgttttgcatgtgacctatttcagtatttatataactagattagtgctttctagcaaacggttctgttaattagcgagtcactgttgattctgctgtggtggtaa

SEQ ID NO: 698922 - DNA, 120 bp, Artificial Sequence
  ENSG00000189339_47 (sequence is synthesized)
gttgataccgtgtaactaatcccgtggatgcctcctcgttatttttgtccaaacgaagcagccgtggtagtagctgtctatgattcttgctcagcaaagtaaaataaatgttaaatatgg

SEQ ID NO: 698923 - DNA, 120 bp, Artificial Sequence
  ENSG00000189339_48 (sequence is synthesized)
cccggggagctgtgcccagacagcagaagggaaggatgtcacttctgagatgaggttcagaaaggtctgggctcctgtcctggctgctctctcccactccctgatgagcttgctggatga

SEQ ID NO: 698924 - DNA, 120 bp, Artificial Sequence
  ENSG00000189339_49 (sequence is synthesized)
aagctcctgtcaggctgtggggcgtcctgtggagaagctggcaagaaactggtgggggccctttccacctatagccagcaaggaactgaacccagccagcgtccacctgagtgagctcag

SEQ ID NO: 698925 - DNA, 120 bp, Artificial Sequence
  ENSG00000189339_50 (sequence is synthesized)
aggtgggcctcagccccagttgagccttcggatgaggtcacagccctggtccatggtgtgactgcagcttcaggagggaccttaagccagaggtgcctggctaagcttcccgcagattgc

SEQ ID NO: 698926 - DNA, 120 bp, Artificial Sequence
  ENSG00000189339_51 (sequence is synthesized)
tttttcaaaaaagctgctcagcggggacaaatacaggttctcgtaagtattattcgtcagtgaaatctccaagtcataagacgaagaggacttcctgctcactgtaagagtcagaacacc

SEQ ID NO: 698927 - DNA, 120 bp, Artificial Sequence
  ENSG00000189339_52 (sequence is synthesized)
ccacaggcctgactcccttcctgtctggcttgggtggcctttacaagtaccctgtctaagctcgggagggacccgcccgtttctcagctactcccttgagcccctcagccagcctggtgt

SEQ ID NO: 698928 - DNA, 120 bp, Artificial Sequence
  ENSG00000189339_53 (sequence is synthesized)
gcgtttgcgttttcatttctgggaagctgcagcaccctagtcctgtctagagagaatgaacgtcttctgggctggggtgcctgggtgttcttgctgtgagggagctgcgtgtgaactcgg

SEQ ID NO: 698929 - DNA, 120 bp, Artificial Sequence
  ENSG00000189339_54 (sequence is synthesized)
gtcacagagaaggtgggcgtgagggggacgagacccggtgctcacctgcatctgggtgtgcagattctcaggtgagctgagaattcctcccgtgagccaaagcaggtgcgtccaatgctg

SEQ ID NO: 698930 - DNA, 120 bp, Artificial Sequence
  ENSG00000189339_55 (sequence is synthesized)
ccctttcctaaagagcaaaacaacaggtatccccggcaggtaagtttctcaaaaataagccgaaatttcaggatggacggtcttggtacttaaaatgctaaccatggagacacggttagc

SEQ ID NO: 698931 - DNA, 120 bp, Artificial Sequence
  ENSG00000189339_56 (sequence is synthesized)
tgacaaatgctgaaatacgcagatacgctcagcagtgtgtctcgctcggtgtgtcttcatgcggctgccagagcagggacagtcccccagcggcaggttctgcctgtttgggagctgcgc

SEQ ID NO: 698932 - DNA, 120 bp, Artificial Sequence
  ENSG00000189339_57 (sequence is synthesized)
ggcctccaggtcgggcggatcctctgcttccttgtggccatctgtgtcctggtgtcacgatggcaggaaggatgagaggccgactcccacagcgaggacagcgcgtggcaggctcccaga

SEQ ID NO: 698933 - DNA, 120 bp, Artificial Sequence
  ENSG00000189339_58 (sequence is synthesized)
ggagagggccctgttatttacgtctttgtcactcggtagagaagagcggtggacgctgcacttcgggggccgttcagattcacccagaattgggcgtccacctccctgccgtgctgttaa

SEQ ID NO: 698934 - DNA, 120 bp, Artificial Sequence
  ENSG00000189339_59 (sequence is synthesized)
tggccacactccagccccggcaaaacctgccctttgagaatgaccggcttctaggcttttcctgcttttgaggaaagaaaggaaaagacaccaccactggtgtctgagagtttatcatta

SEQ ID NO: 698935 - DNA, 120 bp, Artificial Sequence
  ENSG00000189339_60 (sequence is synthesized)
accactggtgtctgagagtttatcattattactgataatcaaaacaggtttgtggtgagattttgaataatacagaagtaaaaataaaaatatgttgggcacagtggctcacgcctgtaa

SEQ ID NO: 698936 - DNA, 120 bp, Artificial Sequence
  ENSG00000189339_61 (sequence is synthesized)
tccccggtgactttcaggcccagtaaatgcggatgtttatcttccattgtttgtttcctgagattcagatgtctaaagcatttttctgtgacttttcaagtcaagaggaaaacctgacat

SEQ ID NO: 698937 - DNA, 120 bp, Artificial Sequence
  ENSG00000189339_62 (sequence is synthesized)
atggaaagggaattaattgctcgttttatcctcttctcctgcaatgctctgaatccatgggtttggagtggggccctgggagttgggggaagcaccatacccagtgagtctgcactttga

SEQ ID NO: 698938 - DNA, 76 bp, Artificial Sequence
  ENSG00000189339_63 (sequence is synthesized)
agttgggggaagcaccatacccagtgagtctgcactttgaggacccactgccagtgtcagcttcaaaatcacattg

SEQ ID NO: 698939 - DNA, 87 bp, Artificial Sequence
  ENSG00000189339_64 (sequence is synthesized)
ttgaacccgggaggaggcacctgggcggcagagcaaggctccgactcaaaagtaaatacatgaataaataaaataaaatcacatcgt

SEQ ID NO: 698940 - DNA, 120 bp, Artificial Sequence
  ENSG00000189350_0 (sequence is synthesized)
gtttattcaaggagagctttgctgagagctggagcacgccagcagtggagctcgtggccacccagcccctgctcagacaggaggctgcggcccaggactgtgtggctggtgggggccagg

SEQ ID NO: 698941 - DNA, 120 bp, Artificial Sequence
  ENSG00000189350_1 (sequence is synthesized)
gtgggccaggcctggggctgccccgtccttgcctccctgggcccatgagcatcaacgtctctatagagaccaaggaccctggattcctccagtgacaggggtttggcctctggacagaga

SEQ ID NO: 698942 - DNA, 120 bp, Artificial Sequence
  ENSG00000189350_2 (sequence is synthesized)
ggtcccggatgttacaggtcagagccctccagacccccaaggactgtactcactgcccagaaatagctgctgcctctgggcaaccttgtaggcaccttctccacccaggacatgggcacc

SEQ ID NO: 698943 - DNA, 120 bp, Artificial Sequence
  ENSG00000189350_3 (sequence is synthesized)
cgtgacgatgtccccgaagccaaggtcctggtccccgtggccgtgtactgcgggagcatccctcggaccagtgctgggccccgggtgctcccgcctggaagcatcaactccagtctgcct

SEQ ID NO: 698944 - DNA, 120 bp, Artificial Sequence
  ENSG00000189350_4 (sequence is synthesized)
catggagaaggttctctccagcctgagccaagagccctgctgaacaacgaggaaccgtcacagctcctgcgtggactcggacagctgggtggcctcaagctggacaccccttccaagggc

SEQ ID NO: 698945 - DNA, 120 bp, Artificial Sequence
  ENSG00000189350_5 (sequence is synthesized)
tggcaggcaaggaatggtcaccccaggaacctcagggccttgtctttgggggaccagcccctggtgctcctcccttctccggagtcagaggccaacagcgtggccagggacaccatccag

SEQ ID NO: 698946 - DNA, 120 bp, Artificial Sequence
  ENSG00000189350_6 (sequence is synthesized)
attaaggacaagctcaagaaaaggaggctctcagagggcttggcagcgtcttcccgagcctctctggatccagggggaggcccccaaggagttcccctgcacagcaccatcccccgagcc

SEQ ID NO: 698947 - DNA, 120 bp, Artificial Sequence
  ENSG00000189350_7 (sequence is synthesized)
acctctcagaggctgctgagggtgcccaggccgatgcctctcatccagagcatccctaccacccctgaggccagcggagtcaaagagaagggcctggacctaccggggagcattccgggt

SEQ ID NO: 698948 - DNA, 120 bp, Artificial Sequence
  ENSG00000189350_8 (sequence is synthesized)
cctcacgagttgagacccggtgctcaggaggcgcagatctcctggcaatacctgcactgcaatgatgagaagatgcagaagtccctgggcgccatcgtgatcccacccatcccaaaggcc

SEQ ID NO: 698949 - DNA, 120 bp, Artificial Sequence
  ENSG00000189350_9 (sequence is synthesized)
aggacggttgcagcgaccccctcccgtgtgcctggctcccttcccagcccgttacctccaggccagggagtcctcacaggcctgagggccccacgcacgcgattggctcgggggagtggg

SEQ ID NO: 698950 - DNA, 120 bp, Artificial Sequence
  ENSG00000189350_10 (sequence is synthesized)
cctcgggagaagacccctgcatctctggagccaaaacctttggcctcacccatcagagacaggcctgccgctgccaagaagcctgccctgcctttttctcagtctgctcccacgctgaca

SEQ ID NO: 698951 - DNA, 120 bp, Artificial Sequence
  ENSG00000189350_11 (sequence is synthesized)
gccttctcctttgactgtgccagagaagcctgccctccgctgaaagaagaggaccagaaggagatcggcaccaagatccaagtcaccatctccaagtctgcccgggagaagatgcagctg

SEQ ID NO: 698952 - DNA, 120 bp, Artificial Sequence
  ENSG00000189350_12 (sequence is synthesized)
aagcagatgaaggagatggagctgcttcggaggctggaggagcccaggacagggcaggagctcacttcccagtgcctgggctcccagagagccttcatgaaggaaggcctccttcccctc

SEQ ID NO: 698953 - DNA, 120 bp, Artificial Sequence
  ENSG00000189350_13 (sequence is synthesized)
cggggcagcgggacactgtctgtgcccactaggctgagcggcccatgcagaaacgacgtcagcatcatcctgaggaagtgggccagccgggcctccctgcccagcatccccatcagccgg

SEQ ID NO: 698954 - DNA, 120 bp, Artificial Sequence
  ENSG00000189350_14 (sequence is synthesized)
caggagccccgctttgcccgccacgcctcagctaactcattacctgcggtgctcacgttggggtctcctgaatgggaagaagaggaggagatggatcttagagcctgtaaggagttgagg

SEQ ID NO: 698955 - DNA, 120 bp, Artificial Sequence
  ENSG00000189350_15 (sequence is synthesized)
cctttctcgaacccggagctggggctgagggatgcactccagtgcctcaacagcagtgactggcagatgaaggagaagggtctggtgagcatccagcgcttggcagcctgtcactcagag

SEQ ID NO: 698956 - DNA, 120 bp, Artificial Sequence
  ENSG00000189350_16 (sequence is synthesized)
gtcctcaccgggaagctgcacgacgtgtgcttggtggtgactggggaggtcaccaacctgcggtccaaggtgtctcacctggccatcagcaccttgggagacctcttccaggccttgaag

SEQ ID NO: 698957 - DNA, 120 bp, Artificial Sequence
  ENSG00000189350_17 (sequence is synthesized)
aagaatatggaccaggaggccgaggagatcgcccgctgcttgctgcagaagatggcggacaccaacgagttcatccagagagcagccggccagtctctgagggctatggtggagaatgtg

SEQ ID NO: 698958 - DNA, 120 bp, Artificial Sequence
  ENSG00000189350_18 (sequence is synthesized)
acccttgcccgctccctggtggtcctcacctcggcgggtgtctaccaccggaaccccttgatccggaaatacgcggctgagcacctctcagctgtgctggagcagatcggcgctgagaag

SEQ ID NO: 698959 - DNA, 120 bp, Artificial Sequence
  ENSG00000189350_19 (sequence is synthesized)
cttctctcgggcaccagagacagcacagacatgttggtgcacaacctggtgaggctggcacaggactccaaccaggacaccagattttatggccggaagatggtgaatatcttgatggcg

SEQ ID NO: 698960 - DNA, 120 bp, Artificial Sequence
  ENSG00000189350_20 (sequence is synthesized)
aacactaagtttgatgcatttctgaagcaatctctcccatcttacgacttgcagaaggtcatggcggccattaaacagcagggaatagaagataatgatgaacttccctctgccaaaggc

SEQ ID NO: 698961 - DNA, 120 bp, Artificial Sequence
  ENSG00000189350_21 (sequence is synthesized)
cgcaaggtgttgaggagtctggtggtgtgtgagaacgggctgcccatcaaggaggggctcagctgcaatggcccaaggctggtggggctgcgctccacactgcagggccgcggggagatg

SEQ ID NO: 698962 - DNA, 120 bp, Artificial Sequence
  ENSG00000189350_22 (sequence is synthesized)
gtggagcagctacgggagctgacacggctgctggaggccaaggacttccggtcccggatggaaggcgtggggcagctcctggagctctgcaaggccaagacggagcttgtcactgcccac

SEQ ID NO: 698963 - DNA, 120 bp, Artificial Sequence
  ENSG00000189350_23 (sequence is synthesized)
ctggtccaggtctttgatgctttcaccccaaggcttcaggattccaacaagaaagtgaaccagtgggcgctggagtccttcgccaagatgatccccctcctcagagagagcttacacccc

SEQ ID NO: 698964 - DNA, 120 bp, Artificial Sequence
  ENSG00000189350_24 (sequence is synthesized)
atgctgctctccatcatcatcactgttgcagacaacctcaactccaagaactcagggatttacgctgctgccgtggctgtgctggatgcgatggttgagagcctggacaacctttgcctt

SEQ ID NO: 698965 - DNA, 120 bp, Artificial Sequence
  ENSG00000189350_25 (sequence is synthesized)
ctaccagcgcttgctgggcgagtgcgtttcctgagtggccgtgcggtgctggatgtcacagatcgcctggcagtgctggtggcctcagtttacccccggaagcctcaagctgtagagcgg

SEQ ID NO: 698966 - DNA, 120 bp, Artificial Sequence
  ENSG00000189350_26 (sequence is synthesized)
catgtccttcccatcctctggcacttcctgaacaccgccaccaggaatggcaccctgcctggacccagcgggaacatccgcggggtggtgtgccggctgtccaggagcctccaggagcac

SEQ ID NO: 698967 - DNA, 120 bp, Artificial Sequence
  ENSG00000189350_27 (sequence is synthesized)
atgggctcccgcctgctggactttgccgccagccagccaaagcacgtcctcaagacgctccaggaactcttagactcagagtccttgggaggcagccgcaaggccactgacagaggggtg

SEQ ID NO: 698968 - DNA, 120 bp, Artificial Sequence
  ENSG00000189350_28 (sequence is synthesized)
gcccctgacagcaagacaactggcagctcatacccttttcagctggattaaagatggatctgaaatgggcaattattatttatcttatttttttgatggactattctcctggttactttc

SEQ ID NO: 698969 - DNA, 120 bp, Artificial Sequence
  ENSG00000189350_29 (sequence is synthesized)
ccccttagagttccagatgtacatggtatattttgaagtagaaataaaagaattacttatttttctaaggttttattatcttgtacttttttaatcacagagaattttccagtaactagg

SEQ ID NO: 698970 - DNA, 120 bp, Artificial Sequence
  ENSG00000189350_30 (sequence is synthesized)
tttgtgatgaacgaaatgaaatgtgacagcagcaaaaccagttgcagacaatgttgagacaaagagttaggaagaaaaagggtagcacagccctgcaagctgcagcccgctcgagacgat

SEQ ID NO: 698971 - DNA, 120 bp, Artificial Sequence
  ENSG00000189350_31 (sequence is synthesized)
agttgcccatctgtgagctgctgggcaagccctcctgaaacccgcagcctgagttggtcatcgaatccagtccatttgttatgggcctgattggaggtgagtgtaacaaacgtgttcagg

SEQ ID NO: 698972 - DNA, 120 bp, Artificial Sequence
  ENSG00000189350_32 (sequence is synthesized)
gacatcgtgcttctgccctgcaaaagctgcagcacgtgtctgttggtcctgtgggaaccttctgatcggcccagcttatcaaaagacaaggggaatttgagatttgcatcactaaaagcc

SEQ ID NO: 698973 - DNA, 120 bp, Artificial Sequence
  ENSG00000189350_33 (sequence is synthesized)
ttctctagaagttggagttctggctagttctgaagaggactagacaatgctttgccattgaaacaccctaaatggagatgcatgtggagcgtaaagtgctaccagtgtgcagatgctgcc

SEQ ID NO: 698974 - DNA, 120 bp, Artificial Sequence
  ENSG00000189350_34 (sequence is synthesized)
gagtctctgaaactgcacaggctgcaattgtgggccacatcacaaggctggaggggcgagtgggcacagcacgggccaggacttgtggaagcagggaaggtgttggcccctgggggaaca

SEQ ID NO: 698975 - DNA, 120 bp, Artificial Sequence
  ENSG00000189350_35 (sequence is synthesized)
gccagtgaaatgaagtcccggcagtggagagggaagtctggggctcaggctctggacactttaggtaggagtggctctgccttggctggggccagtggcaggttaacaactgtgtgacca

SEQ ID NO: 698976 - DNA, 120 bp, Artificial Sequence
  ENSG00000189350_36 (sequence is synthesized)
gaaagagttagagctaaggccatgacctcaaatgcacaggcaaggcaggcctggtaaggcaaaggctgaagaggcagcatcccagctcttgcaggggagcccagcctgcagccacgtgct

SEQ ID NO: 698977 - DNA, 120 bp, Artificial Sequence
  ENSG00000189350_37 (sequence is synthesized)
ggggcagatccagacgaccgaggccctgagggcccagcctcatgccagcaagttttctggcagacacccccctcccctgcccttccccagtggaacctctttccactgtcatctgccccc

SEQ ID NO: 698978 - DNA, 120 bp, Artificial Sequence
  ENSG00000189350_38 (sequence is synthesized)
caggcctaacatccattccacatccctgttctgagcctctcctggggagtctggctctggaaagccccgaatctactcacttatgtatttccataccccaccaggctgaggaagccactt

SEQ ID NO: 698979 - DNA, 120 bp, Artificial Sequence
  ENSG00000189350_39 (sequence is synthesized)
tcccatcttgcctctgtggcaggtgtagttagtccggcccctccttacgccctggggtgaggttgggcctgcgagtcatcccgggccttgggcttgtcataggcggcttaagagtgactt

SEQ ID NO: 698980 - DNA, 120 bp, Artificial Sequence
  ENSG00000189350_40 (sequence is synthesized)
tgggtaattctagcccagtgagctgcttctcacctgattgtgaccccagcaggggcttccctgcgaccatctagctctttgttgattctgattgaaccaggttaaaggcctgctagacag

SEQ ID NO: 698981 - DNA, 120 bp, Artificial Sequence
  ENSG00000189350_41 (sequence is synthesized)
gcagccatccaaaaatgcccaagaggctgacagtaaatgttttaagtgttgaacaatttaatgaattgcatttgcctgtcatctgagcaaatgtttttggtttggtgaggagacttgcat

SEQ ID NO: 698982 - DNA, 120 bp, Artificial Sequence
  ENSG00000189350_42 (sequence is synthesized)
tttctgcttttatcctagaatgtatcagaacatttcagggttttttagatccctaggaggccagggacgtagagtctggcaaggattttgacggcagaaatgaagcttagcagtactgtc

SEQ ID NO: 698983 - DNA, 120 bp, Artificial Sequence
  ENSG00000189350_43 (sequence is synthesized)
ctgtcttcctgccttccatgtgtgttctcacacaggaagcttcccatcccatgggcctccacccactctcaggggcggaggcattgaaaacagctgaaaacagtggaaaagtgcagaata

SEQ ID NO: 698984 - DNA, 120 bp, Artificial Sequence
  ENSG00000189350_44 (sequence is synthesized)
catctttgcactgttctcttttccctcattatttcaggttttattaaccacacctgtggtgtgacgctgctgggaggcactgggtggctctggtgtaccttgagaaatttccatctccaa

SEQ ID NO: 698985 - DNA, 120 bp, Artificial Sequence
  ENSG00000189350_45 (sequence is synthesized)
agacttccttacctcattacttttaaaatgaagggaagacagcatgttggtaacctggccctgggcctgttgggaatacctgtgggaatctaatgggacggcctgtcatgggacatgaag

SEQ ID NO: 698986 - DNA, 120 bp, Artificial Sequence
  ENSG00000189350_46 (sequence is synthesized)
attttcctaagagctggggctggagctaagcccacacatactttgcttggttctgtgtgtggccaggaactccacttacatgagatgctcttgggggtgggaatacagcctctaatgatg

SEQ ID NO: 698987 - DNA, 120 bp, Artificial Sequence
  ENSG00000189350_47 (sequence is synthesized)
gaagattctctttctctcaatctctctctccatgtaacaaaaatgcaggtgcagtcactcactgcttgcagactccagtgaacaaaagggaggcctggtataaagaaactgactttttat

SEQ ID NO: 698988 - DNA, 120 bp, Artificial Sequence
  ENSG00000189350_48 (sequence is synthesized)
tccaaagctagtttaggggaagaagctgccttgaagggtactgtgtcgtttttggagcagaaagtgggcacttttaaaggggcgggggggggggtgctggcacgaatggcatgcaggaga

SEQ ID NO: 698989 - DNA, 120 bp, Artificial Sequence
  ENSG00000189350_49 (sequence is synthesized)
ggaagcgggcaggtgggggagtccacatacttgctttgatgacttatgtaacgggtggtcaagttggcatcttcgtgggcagaactaggttgtaaagtggctgaagctctccgggtggga

SEQ ID NO: 698990 - DNA, 120 bp, Artificial Sequence
  ENSG00000189350_50 (sequence is synthesized)
gggagtttcatagtgggcatattttgggttattaattgactgttgtgtctccaggcagtttcctggtgggtgcaagttctgctctagagcttctaagcacacagttagatgagcctgccc

SEQ ID NO: 698991 - DNA, 120 bp, Artificial Sequence
  ENSG00000189350_51 (sequence is synthesized)
gcacacagttagatgagcctgccctggagggagtgtctggtaaaggggaggtaaaaggttatagttgcatttcttttatatatatgtttatttgtttatttatttattatactttaagtt

SEQ ID NO: 698992 - DNA, 120 bp, Artificial Sequence
  ENSG00000189350_52 (sequence is synthesized)
ccaagtctttgctattgtgagtagtgccgtatagttgcatttctaaagggctaagtaggaagtggggaacaaggggaaatggggaaaagagaagagaaataattttaaaaactcgttttc

SEQ ID NO: 698993 - DNA, 120 bp, Artificial Sequence
  ENSG00000189350_53 (sequence is synthesized)
aaaagagaagagaaataattttaaaaactcgttttcttagaaaaatgagtgtactcagttcagagtgagactcatagacagaagacttgtctgagagctgtaactgccaggattcccttt

SEQ ID NO: 698994 - DNA, 120 bp, Artificial Sequence
  ENSG00000189350_54 (sequence is synthesized)
tacatcaaggagaatttttttgagattttaggaaacttttcctataggtcccattgtggcaggccaggtatcactaatgcaggcatccataacaactgtttcaatactgactgagtggtt

SEQ ID NO: 698995 - DNA, 82 bp, Artificial Sequence
  ENSG00000189350_55 (sequence is synthesized)
cctaggcctttgctgggccttgaagcatgatgagataatgaaggaattcttagtgggacctgtttaggattaaacaagcttt

SEQ ID NO: 698996 - DNA, 120 bp, Artificial Sequence
  ENSG00000189350_56 (sequence is synthesized)
ggaattcttagtgggacctgtttaggattaaacaagctttactgggtgtctgaagaaactccccaggcctccaaaaacaagtttattggaggtctgaaggaactccccaaaccttcagga

SEQ ID NO: 698997 - DNA, 120 bp, Artificial Sequence
  ENSG00000189350_57 (sequence is synthesized)
acctggacccatttagattaagtaaatctattgaggctccagaggaaggtcttcaggacttagatgttagctacagattaaaagaaattaatcgcttatgtctttagatgagtgcacact

SEQ ID NO: 698998 - DNA, 120 bp, Artificial Sequence
  ENSG00000189350_58 (sequence is synthesized)
aaattaatcgcttatgtctttagatgagtgcacacttacacatagacatgtagcttagaagatatgcaagctctggaaaactttgtaatttgagttggtctggcgatattttccaggcct

SEQ ID NO: 698999 - DNA, 120 bp, Artificial Sequence
  ENSG00000189350_59 (sequence is synthesized)
tctccctgtaaccggttatggaaataaaaaactctcttcctccccagttcatctgcatcttgttactgggccacgagaaatagcagcccaaccctcagtttggtccaggaacaaaatctc

SEQ ID NO: 699000 - DNA, 120 bp, Artificial Sequence
  ENSG00000189350_60 (sequence is synthesized)
tcatcttgttttctcctccctttattatctcctacctgctgagataataaacgtttctaccctctcactgtgcttcggaatcatctggcaagacttaaaaaatactgaggtctaccccca

SEQ ID NO: 699001 - DNA, 120 bp, Artificial Sequence
  ENSG00000189350_61 (sequence is synthesized)
ccccacagggattttgattcacttggtctgaggtgaagcctaggcagctgtatttttttttcttttaactccaggtgattctaatggctgggtgaattcaaaaaccacaataaaatatca

SEQ ID NO: 699002 - DNA, 120 bp, Artificial Sequence
  ENSG00000189350_62 (sequence is synthesized)
gataaaaaaggaaactggccatggcttaggccctgtgggctcctggcctgccagctccccttacctcacagccctagagtattctggggttgacggtagaaactgagtccaggctctgga

SEQ ID NO: 699003 - DNA, 120 bp, Artificial Sequence
  ENSG00000189350_63 (sequence is synthesized)
gtcaggcctgtggcctgctggcgtgtggcttgggacccatctatcaacctctctgatctttccatatcaatctagtgtgtggatgacatcaatgcccacctacacctggctgtggtgacg

SEQ ID NO: 699004 - DNA, 120 bp, Artificial Sequence
  ENSG00000189350_64 (sequence is synthesized)
atgactgagaacattctcataaagcatttagcataaggccacgaaaacagggagctgttctgcttggggcctgccatttctccagctgtcttaccctttctccagacgccctcagaacca

SEQ ID NO: 699005 - DNA, 120 bp, Artificial Sequence
  ENSG00000189350_65 (sequence is synthesized)
tccctccccccagagaagaaaacccagaagctcttctctccttgtggctgttccttcccctccactcttctgactcttgagactggagaggggatgatttgcaggggagcagagtgcttt

SEQ ID NO: 699006 - DNA, 120 bp, Artificial Sequence
  ENSG00000189350_66 (sequence is synthesized)
cttgcctaaagcattttcctcttattataacttggttctgccattaggaaaagaaagggggaaatgaccataagtctcctgctctccttgtgatggagggaggaagatgggggcccagaa

SEQ ID NO: 699007 - DNA, 120 bp, Artificial Sequence
  ENSG00000189350_67 (sequence is synthesized)
agggaagccgagaggaagagccaacctcctcattaaattctgcagtgttccaggtctgccattcttcttgacatcttataaggaagatattatttcttccatttcctgatgaggaaactg

SEQ ID NO: 699008 - DNA, 120 bp, Artificial Sequence
  ENSG00000189350_68 (sequence is synthesized)
ggcctcagcgatgcttaatgaataaccgcagccagtgcacaggaatcacctgggaatcttggtaaagttcagattctgcttcagcaggtctgggtggggcctgagagtctgtagtgttca

SEQ ID NO: 699009 - DNA, 120 bp, Artificial Sequence
  ENSG00000189350_69 (sequence is synthesized)
attcccaggtgaggtcaatcctgtgagtctggcagggaccacactttgaggcgtcaggtcctaagacagcaagaaagtggctgaaacttgggtgtgtgtccaggcctgtttgactccaaa

SEQ ID NO: 699010 - DNA, 120 bp, Artificial Sequence
  ENSG00000189350_70 (sequence is synthesized)
gcccctgactttctgttccaggatgttttatggctccaagacatttacctccccttgggtcagtttgagccctttgaaataagccacggaaaccccatggatttctggagttagtctggt

SEQ ID NO: 699011 - DNA, 120 bp, Artificial Sequence
  ENSG00000189350_71 (sequence is synthesized)
cccagagttttgctcccaaaagcttcagggcagagagggtctgcttggtcagctctgatcattaggacatgctgtgaacacttggcctctggtggggacgggatttgtggacacaaatga

SEQ ID NO: 699012 - DNA, 120 bp, Artificial Sequence
  ENSG00000189350_72 (sequence is synthesized)
aggctacatgagcaaagtgtagcctattcagagcttgctatagcaagggagcctgccatgacgacctgagttttggcagagactcatatgcaagcagaggtaatgctgcagcttcatagt

SEQ ID NO: 699013 - DNA, 120 bp, Artificial Sequence
  ENSG00000189350_73 (sequence is synthesized)
ggaaaaaggggagacttcaggtatgccctgattggaagctgttggcctggggacgctgtaggcacgaagtgtggactgtggcttgcttgttacagtatcacccacggtgcttgttaaagt

SEQ ID NO: 699014 - DNA, 120 bp, Artificial Sequence
  ENSG00000189350_74 (sequence is synthesized)
acagatccctgggttgtactgcagacctaccgaatcagagccttgatcactcaaagttgagaacctctgtcacaatctcaaagctttcagtggttattaggttcccaggctagcccacac

SEQ ID NO: 699015 - DNA, 120 bp, Artificial Sequence
  ENSG00000189350_75 (sequence is synthesized)
ctgggagtcagcatccctaaatcagtctttaccaaatgtggttgatgaaaagaattgcttgcgggaggagaacggggagagagagacgggaacaagtgctttttaaaaactcagactctt

SEQ ID NO: 699016 - DNA, 120 bp, Artificial Sequence
  ENSG00000189350_76 (sequence is synthesized)
agtctcagctgtagatctgttactggggggaaggcctgggaatctgcaaattatcaagcagctgattctgaggatcaggaagcctgggaagcagcgtcctaactgcctgctcccagccgg

SEQ ID NO: 699017 - DNA, 120 bp, Artificial Sequence
  ENSG00000189350_77 (sequence is synthesized)
gttccagacagcacggcagcatcactgtgtgcacagatgctccctggtgggtgtttctgagtcagggacctcttgggggctcaggtttggtccttatgattactggggtttattcagggg

SEQ ID NO: 699018 - DNA, 120 bp, Artificial Sequence
  ENSG00000189350_78 (sequence is synthesized)
gcgtgctggtttcgccatattccgtcccctggtgtttcagtgaagctggctgtaacatttgaaggctttgctttattttaatcacatctttataattacctcgctgtgagttgacagctg

SEQ ID NO: 699019 - DNA, 120 bp, Artificial Sequence
  ENSG00000189350_79 (sequence is synthesized)
ttattaacatcaccttgggttctccttgagaatttttacatccttaaagtgatgcggcacttctgcagctgaagtcagaagccgttaactaaataatcgctctaaaatgtcaccaggttt

SEQ ID NO: 699020 - DNA, 120 bp, Artificial Sequence
  ENSG00000189350_80 (sequence is synthesized)
tgtaaacatagccaatactgtccccttccaaaggaggaaaaaaaattgctagataaataattttcatgaaggcaatttgtttcccagggtctatattattttctgtctcatccactggtt

SEQ ID NO: 699021 - DNA, 120 bp, Artificial Sequence
  ENSG00000189350_81 (sequence is synthesized)
tttgccgctgtggggcactggcaataaagagctgtctcaagaaggaggccacgtctgctcctgccaattttcatctggaagcccacttcagggttcatggcaatgagaagcaaagatttt

SEQ ID NO: 699022 - DNA, 75 bp, Artificial Sequence
  ENSG00000189350_82 (sequence is synthesized)
gcccacttcagggttcatggcaatgagaagcaaagatttttggaaaagacttttctttttctcttaatgctagca

SEQ ID NO: 699023 - DNA, 120 bp, Artificial Sequence
  ENSG00000189350_83 (sequence is synthesized)
ggaattattttaaaaactcttggaaacattgttttgagttttcatccaagctagtttgaggaatggctagaatttcagctgaactttgattagatatgaaaagtaatgtcctgggctagg

SEQ ID NO: 699024 - DNA, 71 bp, Artificial Sequence
  ENSG00000189350_84 (sequence is synthesized)
gaactttgattagatatgaaaagtaatgtcctgggctaggtgtggcagctcacacccggagtttgagacca

SEQ ID NO: 699025 - DNA, 88 bp, Artificial Sequence
  ENSG00000189350_85 (sequence is synthesized)
aacagagcaagaccccatctctacaaaaaaataaaaaatcgtagctgggaatggtggtgcatgcctgcagtgccagttaattaggagt

SEQ ID NO: 699026 - DNA, 120 bp, Artificial Sequence
  ENSG00000189350_86 (sequence is synthesized)
ttgtgtcacttcactccagcctgggcgacattgagtgagaccctgtatctttaaaaagaaaaataatttcctatttgtaaatgttggagaaaatggagaatttcttccatagaaaggtat

SEQ ID NO: 699027 - DNA, 120 bp, Artificial Sequence
  ENSG00000189350_87 (sequence is synthesized)
gctgtctccttccagtactgcctctatggaataatctagatcttgctttcagcaggtatcaggaggaaggctggccagggtaagaggcctgctctgccctcactggcaatgtatctttgg

SEQ ID NO: 699028 - DNA, 120 bp, Artificial Sequence
  ENSG00000189350_88 (sequence is synthesized)
agtgagatctttttttcatgtgtaaaaggtattgaaaaaacacttgctttgtccatctcatagcgtcttttttcctctaaagatttaatgaaacaatgtacatgattgcattttgaaaaa

SEQ ID NO: 699029 - DNA, 120 bp, Artificial Sequence
  ENSG00000189350_89 (sequence is synthesized)
gtagagtgttacatacaaagaaaggtagaattattaactggagcctcatcccacactgtgtgcaaagcctgctgtttagcagtgttcagagtaattgccagtcatctatctgactgactg

SEQ ID NO: 699030 - DNA, 120 bp, Artificial Sequence
  ENSG00000189350_90 (sequence is synthesized)
acaagcctcatgactcaacatgggaaagatgagagattcagaggcttaatttgtttttttccatgtggtatatttgacatatgtacttgcaattgcaagcaaatattgtaaagtcttttc

SEQ ID NO: 699031 - DNA, 120 bp, Artificial Sequence
  ENSG00000189350_91 (sequence is synthesized)
tcttcactttgaaagacatgaaaaccttcaaagaaggaagtcaattcttgctgagtttgacagctgtttttaagtttctccaaagatcaaagcgcagcccaggaatgagggggaaatgat

SEQ ID NO: 699032 - DNA, 120 bp, Artificial Sequence
  ENSG00000189350_92 (sequence is synthesized)
attggcttcttttctcaatcgggatcttaaagtgcggaggcagcagagatgaacactaaagaccaaaatggccaggattatgagttccgttccccgaggtggctcaaaaagatgccttag

SEQ ID NO: 699033 - DNA, 120 bp, Artificial Sequence
  ENSG00000189350_93 (sequence is synthesized)
aaaagacaggtttgcccctgttgtgcagatggcaggataaataggctgacattattatcactgctttgcagatgaagacacgggctcagagatgccaggtcacagagccaggggatggag

SEQ ID NO: 699034 - DNA, 120 bp, Artificial Sequence
  ENSG00000189350_94 (sequence is synthesized)
gtgtcatgactcaggctctggtgttctaattccaactctcaggagcgtgataccctctggctcctgagaatgcgtggcccatttaccataccccttgtttctttcccctcctgctctctt

SEQ ID NO: 699035 - DNA, 120 bp, Artificial Sequence
  ENSG00000189350_95 (sequence is synthesized)
cctcctctttttcttcttcctccaatttaggccagtcagctttatctatgggcattaactgagccccgccagtgctatcactccagccaaaaccgattgctgcctcgtgtgctagacttc

SEQ ID NO: 699036 - DNA, 120 bp, Artificial Sequence
  ENSG00000189350_96 (sequence is synthesized)
aaggctgtctgcagtgacagcgttcagaagcgggtgactagatcagtggaatcctagagccacctgatgcagggcccaccgaccattcacaaagttactttgtgaagtccaggagtgcga

SEQ ID NO: 699037 - DNA, 120 bp, Artificial Sequence
  ENSG00000189350_97 (sequence is synthesized)
tcaagcctgcagtgtccagggtccttcctaaaattgaattagagtgctgagtgaattaactgtttgctcctcttcttgtgtgatgcatttttaattacatttcataaaaacgtctggatg

SEQ ID NO: 699038 - DNA, 120 bp, Artificial Sequence
  ENSG00000189350_98 (sequence is synthesized)
gattgatggagctttagttaaacttcaggtaggcagggggagtagacgatggtgcagtataacatgttctgttaatacaggctcagaacacatgtactttatggcagttcaactgaatct

SEQ ID NO: 699039 - DNA, 120 bp, Artificial Sequence
  ENSG00000189350_99 (sequence is synthesized)
ttgatgtagggctacttaaaaatatattacctttgaaaagatttcctttgaaagatagagtgggtgctttagcagcctgtaagccgtcagccagacgatcaattgacaaacacgtcagca

SEQ ID NO: 699040 - DNA, 120 bp, Artificial Sequence
  ENSG00000189350_100 (sequence is synthesized)
cttataattcactgcagcggctcccctgatacatgcaaaacactggtttatttcagaaaaagaatatatttctcaaaatccctttcattcacattgtaaggtttatgaggcaagtcttgt

SEQ ID NO: 699041 - DNA, 120 bp, Artificial Sequence
  ENSG00000189350_101 (sequence is synthesized)
caatcctaggcccttcacaatgaaagaaaagtctctttggtctgtctgccctgcgtttcctacaacatggattattttaggctctgaactgggcatacgatgtgaggaaggagaatagat

SEQ ID NO: 699042 - DNA, 120 bp, Artificial Sequence
  ENSG00000189350_102 (sequence is synthesized)
acggcttaaagtaaacagcagctcagaccccagccacggagggaggttatatttcattttgaagattgtatttatacttgcaaaaagctatcactgttctgccagaatatgatgtttact

SEQ ID NO: 699043 - DNA, 120 bp, Artificial Sequence
  ENSG00000189350_103 (sequence is synthesized)
cttggggtgcttcctgtttctcagtaaagtgaagttgcggcgacctcgtgcctgccttatgtgcacctgtgccagcatctttctcaggtcccggatgttacagagaagcctgccctccgc

SEQ ID NO: 699044 - DNA, 120 bp, Artificial Sequence
  ENSG00000189350_104 (sequence is synthesized)
agtctgctcccacgctgacagccttctcctttgactgtgccagagaagcctgccctccgctgaaagaagaggaccagaaggagatcggcaccaagctaactcattacctgcggtgctcac

SEQ ID NO: 699045 - DNA, 120 bp, Artificial Sequence
  ENSG00000189350_105 (sequence is synthesized)
tttcactccggctggccctggctcatctccttgaggaggaagtgtgtgtcctctcctgcacgcctctccttcctggggagccctggctcacagctggagccagcaggcctggaggctgca

SEQ ID NO: 699046 - DNA, 120 bp, Artificial Sequence
  ENSG00000189350_106 (sequence is synthesized)
gtttattttattaatctattttttaactgggtagggattgcttttgtaattagaaaaagtattaaaaactctctttaattaggaagattatgtaaagctgtaaagcaaatttattttgca

SEQ ID NO: 699047 - DNA, 120 bp, Artificial Sequence
  ENSG00000189350_107 (sequence is synthesized)
caaggaagcagctgtgaacagcagaaagaggatgagaggattggggaagacctcggtttctttcctgttgcttcataaaatgtcagggctggacagcactggctacagacaggaatcaga

SEQ ID NO: 699048 - DNA, 120 bp, Artificial Sequence
  ENSG00000189350_108 (sequence is synthesized)
gggtccagagcttctaccagggcacctcaggaatcgtgcctgggacatggggacgctctgtccccattctaccagaggagcttctatgttgcctcattttttttttttgtatactgggca

SEQ ID NO: 699049 - DNA, 120 bp, Artificial Sequence
  ENSG00000189350_109 (sequence is synthesized)
cggtgctggatgtcacagatcgcctggcaggtgagcacccccagccccaccccaccccatctcctggcagatttctgttctctcctggtctgtggttgaaccattcacccagttatctta

SEQ ID NO: 699050 - DNA, 120 bp, Artificial Sequence
  ENSG00000189350_110 (sequence is synthesized)
gacctgaaataatcccccccaatcatttaaaattttgaaaatctgctttttttgtgtgtgacaatctccatattgccagaagacaatctttgtttttgatcaaaatgaagtaggtttgta

SEQ ID NO: 699051 - DNA, 120 bp, Artificial Sequence
  ENSG00000189350_111 (sequence is synthesized)
caaaagcaaaagtgtttttaaaaaactgttacaggttgaatctccctaatcagaaaattagaaatgctccaaaacctgaaactttttgagcgctgacatgacattaaaagaaaatgtaca

SEQ ID NO: 699052 - DNA, 120 bp, Artificial Sequence
  ENSG00000189350_112 (sequence is synthesized)
ttggggcatttccgatttcagatttttggattagggatgcagaactggtatcatgaaaatattccaaaatcagaaaaaaagccgaagtacttctggtaccaaacattttagataagggac

SEQ ID NO: 699053 - DNA, 120 bp, Artificial Sequence
  ENSG00000189350_113 (sequence is synthesized)
actcaacctgtgtgcgtttcttcctccttgcaaacaaggctgcttctagcctatagagtacctttgtgtgagtcagaaaaaagcctcctttttcagacagaccatgcctagtgggtgcat

SEQ ID NO: 699054 - DNA, 120 bp, Artificial Sequence
  ENSG00000189350_114 (sequence is synthesized)
atggcttggtcagttgacagcaccatcaagagaattagaaaaagttgccatgtacaactttagcatgtgcagcctggcaagcaggcaccagctgggtttcaacccctcaggaccccttgg

SEQ ID NO: 699055 - DNA, 120 bp, Artificial Sequence
  ENSG00000189350_115 (sequence is synthesized)
ccagtgctgggactgtattatgtggagacggggccttagcctgagtctactcagccttgctcaagcttcagctggtgaagggttgctccaatcctgtttctgctttgagtctgcaggaga

SEQ ID NO: 699056 - DNA, 120 bp, Artificial Sequence
  ENSG00000189350_116 (sequence is synthesized)
agtccaagtgacttcattccagggctgaaatctgttcttgtggtccttgaggtggcaacacagaaaggacacaggctttggtgtccacacacccatctgccaccaccagccctgaccttg

SEQ ID NO: 699057 - DNA, 120 bp, Artificial Sequence
  ENSG00000189350_117 (sequence is synthesized)
ggcaggttacttatcttggtttcatgatcatttttgcttgcacaaagcctcctcccctgccttgggaaggtcccatctagggaggggggcagagggactctgttccctagactcccgatg

SEQ ID NO: 699058 - DNA, 120 bp, Artificial Sequence
  ENSG00000189350_118 (sequence is synthesized)
gtccccctgaaatgcagacagatcatgcaccagccctgctttaatctttgtgagactcctgagctgtcttcaggatagtgtccaggccccctggagtggcccacagctgtcactgctgct

SEQ ID NO: 699059 - DNA, 120 bp, Artificial Sequence
  ENSG00000189350_119 (sequence is synthesized)
ctaggatgtgccgccttcctcccaccccagctctatgctcattgaatcctcatgaccaccccacaggaggatgtagattccacttggtggagaaaaggagaatggagctcagaaaagtga

SEQ ID NO: 699060 - DNA, 120 bp, Artificial Sequence
  ENSG00000189350_120 (sequence is synthesized)
aatgcacaaggtctcttggtgaggagcccaggatgtgtcctgggagcctggctgaagggccaagaccccaaccctgtgctgtgctgcttccccctggcactctgcctcctgggtgcctgc

SEQ ID NO: 699061 - DNA, 120 bp, Artificial Sequence
  ENSG00000189350_121 (sequence is synthesized)
atgcagtggccggtctctcaacttcttgctctgcccacttgtggctgccctgcccggaaagccttctccattcttcttcctctacctgggggatgcctgcttggctctggcattaccttc

SEQ ID NO: 699062 - DNA, 120 bp, Artificial Sequence
  ENSG00000189350_122 (sequence is synthesized)
tccctgtgtgcttctcaagactgcatcccacatggtatcactggtctgtctactgccctcccctcctagcccagctgtgagcatccagagaggggcctggcacatgctgcatggctgagg

SEQ ID NO: 699063 - DNA, 120 bp, Artificial Sequence
  ENSG00000189350_123 (sequence is synthesized)
accttggcaccagctgccctttcagcttctcccctgccccatctcttgcgcctggccttgcctctatgcaggttctgtccttccagcattcctggagtggcctcttaccttacgggaagg

SEQ ID NO: 699064 - DNA, 120 bp, Artificial Sequence
  ENSG00000189350_124 (sequence is synthesized)
caggtgcgagtgaggcagggctggctgcaggtgagctgggggagaacagggtatgtaagtaagatggtcctagacaccagacaaggaaccctttgccattgctcaaagtcagcattttct

SEQ ID NO: 699065 - DNA, 120 bp, Artificial Sequence
  ENSG00000189350_125 (sequence is synthesized)
gcatgaaaggtttacctgtccttgtctgggtaatttacggggcccagaggtgggcaagtatcttcaccttatccacttactgtaattttttcttgtctatttccaagagacctcaaaaga

SEQ ID NO: 699066 - DNA, 120 bp, Artificial Sequence
  ENSG00000189350_126 (sequence is synthesized)
agagcttctccataggtcttctgttaactctgtgtccaccaggaacacagaagaaaatttttattgacacaggcgaggcctaataatagcacagcttaataggagtaaatcttctgctaa

SEQ ID NO: 699067 - DNA, 120 bp, Artificial Sequence
  ENSG00000189350_127 (sequence is synthesized)
ttacttcagctgcttctaagcttgagtttaatggggcttgctcccgcatgctggcccccagaagggcctcaccatctttgccagcttaagagtcaacacctgccagccaggcgactgcca

SEQ ID NO: 699068 - DNA, 120 bp, Artificial Sequence
  ENSG00000189350_128 (sequence is synthesized)
catccttgcacctggggaatgtggctctgaagtagcctgagttctattagccaagacgtgatcagagaaggtggcctgggctgtggaattgagtttgggtggggactgctactcttcctg

SEQ ID NO: 699069 - DNA, 120 bp, Artificial Sequence
  ENSG00000189350_129 (sequence is synthesized)
tggagtgagcttcctgggggctgaagtgtaaacacgcctcactctgtggaagagaattcaaggagcaagagtggataaaatgtagcaggatggggaaggaggctctgttggggggcaggt

SEQ ID NO: 699070 - DNA, 120 bp, Artificial Sequence
  ENSG00000189350_130 (sequence is synthesized)
agagcccccccagcctttggtgggggtgggggtggagggtgcgtgcctgggtttggctcttgagatagttctcacttttccctgctgtattagcctgttctcatgctgctgataaagaca

SEQ ID NO: 699071 - DNA, 120 bp, Artificial Sequence
  ENSG00000189350_131 (sequence is synthesized)
atttataaagaaaaagaggtttaatggacgaacagttccatgttgctggggaggcctcacaatcatgccactcatcttacatggtggcaaggaagacagaatttgtgcaggaaaattccc

SEQ ID NO: 699072 - DNA, 120 bp, Artificial Sequence
  ENSG00000189350_132 (sequence is synthesized)
atcagatctcatgagacttactatcacaagaagtacaccggaaagacctgcccccatgattcaattacttcctaccggctccctcccatgacacgtaggaattgtgggagctacaattca

SEQ ID NO: 699073 - DNA, 84 bp, Artificial Sequence
  ENSG00000189350_133 (sequence is synthesized)
ccccattaaaagaattgtgttaaaatacacaacataaaatgtaccaccttaaccatttttagttgtacagttcagtggtagtgt

SEQ ID NO: 699074 - DNA, 120 bp, Artificial Sequence
  ENSG00000189350_134 (sequence is synthesized)
caccttaaccatttttagttgtacagttcagtggtagtgtccatgatttttgcagtcatcttccgaactgttaccttgcaaaacagaaactacgtccccattaggcactagctccccatt

SEQ ID NO: 699075 - DNA, 120 bp, Artificial Sequence
  ENSG00000189350_135 (sequence is synthesized)
ccagtccctggcaaccaccaactactttctgtctctacgattttggctattctaggtatgtcatataaatggaactgtacagtttgtctttttgtgtctggcttaattcacacagcagaa

SEQ ID NO: 699076 - DNA, 120 bp, Artificial Sequence
  ENSG00000189350_136 (sequence is synthesized)
aattcacacagcagaatgtcctcaagatttatccatgttgtagcgggtgtcagaatttccttccttttttttttttttttttcagagagattctcgttctgtcacccaggctggagtgca

SEQ ID NO: 699077 - DNA, 120 bp, Artificial Sequence
  ENSG00000189350_137 (sequence is synthesized)
atctcagctcactgcaacctctgtctcctagggtcaagccattctcatgcttcaggctcccaagtaactgggattacaggcgcccaccacaacacccagctaattttttttttttttttt

SEQ ID NO: 699078 - DNA, 89 bp, Artificial Sequence
  ENSG00000189350_138 (sequence is synthesized)
ttttttttttttttggtgtagtggcgcgatctcagctcactgctacccctgcctccctggtcccggttcaagcaattctccttcctcag

SEQ ID NO: 699079 - DNA, 120 bp, Artificial Sequence
  ENSG00000189350_139 (sequence is synthesized)
cctcaagtgatccacccacctgggacccccacagtgctgggattatagtcatgaaccacagcacctggccagaattcccttccttttgaaggctgaaaaacattccattaaatgtatata

SEQ ID NO: 699080 - DNA, 120 bp, Artificial Sequence
  ENSG00000189350_140 (sequence is synthesized)
ccacattttgtttatccattcctcaatggacactgggctgcttctgccttttggcgattgtgaaaaaggttggtataaacacgggcatagaaatctctgtgttctcacctatttttgcat

SEQ ID NO: 699081 - DNA, 120 bp, Artificial Sequence
  ENSG00000189350_141 (sequence is synthesized)
tccatagggattcaggatacttttgagttatcgttattcagtgtaggcggctactcagggtcattcgttttcttttggttccctctcactgtcccccttctagtttcccctcatctccca

SEQ ID NO: 699082 - DNA, 120 bp, Artificial Sequence
  ENSG00000189350_142 (sequence is synthesized)
ccctggggctgacagggactgctttcttgtcacctgttctcttcctactcagcctgtttcaagcacaaggaatagaactctcaactctttccaaccagtgtacctctttgctccacttta

SEQ ID NO: 699083 - DNA, 120 bp, Artificial Sequence
  ENSG00000189350_143 (sequence is synthesized)
gaaagctcctccaagccctttaccccaggatcctttcctggggaatgctggggtgacccaaaaggtgcagtcctgcccttccagttatcaggaccaccttcacctctgaggatcctgtga

SEQ ID NO: 699084 - DNA, 120 bp, Artificial Sequence
  ENSG00000189350_144 (sequence is synthesized)
ccctcggaggttccctgcaagagccccaagggtgcagcctcaaagccaacattccttgataaatgtcaccaagagagtgtcaggctgaccagagggtggcccagggcatcttccctggtt

SEQ ID NO: 699085 - DNA, 120 bp, Artificial Sequence
  ENSG00000189350_145 (sequence is synthesized)
cctccttattccaggctggctttgaaatcagagggacccgtggggctctaaggggaaggtatcctaggggattagatgatgtggtcctgatgaaggaaggacaaattgcagtttcatgaa

SEQ ID NO: 699086 - DNA, 120 bp, Artificial Sequence
  ENSG00000189350_146 (sequence is synthesized)
aaggacaaattgcagtttcatgaaaaataaaacaaggtggctcacctatgatcccagcactttgggaggtcaagatgggcagattgcttaagaccaggagttcaagaccagcctgggtaa

SEQ ID NO: 699087 - DNA, 78 bp, Artificial Sequence
  ENSG00000189350_147 (sequence is synthesized)
agaccagcctgggtaacataatgagacccccatctctacaaaaaaaatttttaaaaaaataactgagcgtggaggcgc

SEQ ID NO: 699088 - DNA, 120 bp, Artificial Sequence
  ENSG00000189350_148 (sequence is synthesized)
ctgggtgacagagcaagacactgtctcaataaataaataaaacaaaaaataaagctccagatcacctctgaaatatggaatccctagaaatttggggacagcatgcggtagaaagagtgt

SEQ ID NO: 699089 - DNA, 120 bp, Artificial Sequence
  ENSG00000189350_149 (sequence is synthesized)
gcatgcggtagaaagagtgtggactttggagtccaggcagattaggcctttgtcctctgctttgccctttgccttgatttgagtcttgctttcctcctctggaaaacggacaagcatcct

SEQ ID NO: 699090 - DNA, 120 bp, Artificial Sequence
  ENSG00000189350_150 (sequence is synthesized)
gcctctcaggggtgctgtgagcatgaaatggagctgtgatgtgaagctctgagccctgggctcaggcagtttccaggatatggaaactgttttccacagaattcccggcccacagaatca

SEQ ID NO: 699091 - DNA, 120 bp, Artificial Sequence
  ENSG00000189350_151 (sequence is synthesized)
ataaagcgctgctgttagtgttgtttgcctgccccagcacttatccttcggctggatgacaggcagagcatgtgaatcgcaaagccagcttcgatagtgctaatgcgcttaggataatgc

SEQ ID NO: 699092 - DNA, 120 bp, Artificial Sequence
  ENSG00000189350_152 (sequence is synthesized)
ggccacagctgaaggcctgagcagcccctctggggacccaggagagcccttgatgtggttttaatgtggccacagccctggcatttactcaggtgatgaagagctggttggcagattcag

SEQ ID NO: 699093 - DNA, 120 bp, Artificial Sequence
  ENSG00000189350_153 (sequence is synthesized)
ctggcttctgggttttccggggtttagagagggttgggggccttgggaaaccagatatgggggcttatcactggaatggtctgtgcagagcttgctggttcacaagcacgttcatgcctc

SEQ ID NO: 699094 - DNA, 120 bp, Artificial Sequence
  ENSG00000189350_154 (sequence is synthesized)
tgctgctggtctcgtcctgaggtttggcatccgggcaccggggaggctgtgctaggcttctcccctgccagctgtcttgtctgccagcatgcttcatgtgagagggtcttgatttccctc

SEQ ID NO: 699095 - DNA, 120 bp, Artificial Sequence
  ENSG00000189350_155 (sequence is synthesized)
cccagtagtttttctctgtatttgtgtggacttccataggtggtgatgtggataaatgcagtattactatagttactatttgtcacctgcctgcctacaggtaggcactttatgtatatt

SEQ ID NO: 699096 - DNA, 120 bp, Artificial Sequence
  ENSG00000189350_156 (sequence is synthesized)
atcgaatttctaacaatctggagaggttggttcagcatttttatccttactttatgggtttggaaaaggctcagaaaggtcgggtggcttcctcatgctgacacagttgatgggggcagg

SEQ ID NO: 699097 - DNA, 120 bp, Artificial Sequence
  ENSG00000189350_157 (sequence is synthesized)
attgtaaccaggcgtgcctgcctctttcctgttccctgggctggaggaaccattatgattgtcagagattctgcatatttctgcctttgcgtgcccctttctccataaaaaatatttaaa

SEQ ID NO: 699098 - DNA, 120 bp, Artificial Sequence
  ENSG00000189350_158 (sequence is synthesized)
aattatagtttctgactggttggtataagcacagatataaaccaggttggacatattcatatattttctactaatgttaaaagaagctaacacattttcataggctgctaaatgtgtcat

SEQ ID NO: 699099 - DNA, 120 bp, Artificial Sequence
  ENSG00000189350_159 (sequence is synthesized)
gatccttagttgctgtgcctgctgggctgccagccctttgggggacaaagttggtgtcccaagagagggaagtgggagagggagagagtgcctggctcaagtgactctccttttctgcct

SEQ ID NO: 699100 - DNA, 120 bp, Artificial Sequence; identical to SEQ ID NO: 680704
  ENSG00000189357_0 (sequence is synthesized)

SEQ ID NO: 699101 - DNA, 120 bp, Artificial Sequence; identical to SEQ ID NO: 680705
  ENSG00000189357_1 (sequence is synthesized)

SEQ ID NO: 699102 - DNA, 120 bp, Artificial Sequence; identical to SEQ ID NO: 680706
  ENSG00000189357_2 (sequence is synthesized)

SEQ ID NO: 699103 - DNA, 120 bp, Artificial Sequence; identical to SEQ ID NO: 680707
  ENSG00000189357_3 (sequence is synthesized)

SEQ ID NO: 699104 - DNA, 120 bp, Artificial Sequence; identical to SEQ ID NO: 680708
  ENSG00000189357_4 (sequence is synthesized)

SEQ ID NO: 699105 - DNA, 120 bp, Artificial Sequence; identical to SEQ ID NO: 680709
  ENSG00000189357_5 (sequence is synthesized)

SEQ ID NO: 699106 - DNA, 120 bp, Artificial Sequence; identical to SEQ ID NO: 680710
  ENSG00000189357_6 (sequence is synthesized)

SEQ ID NO: 699107 - DNA, 120 bp, Artificial Sequence; identical to SEQ ID NO: 680711
  ENSG00000189357_7 (sequence is synthesized)

SEQ ID NO: 699108 - DNA, 120 bp, Artificial Sequence; identical to SEQ ID NO: 680712
  ENSG00000189357_8 (sequence is synthesized)

SEQ ID NO: 699109 - DNA, 120 bp, Artificial Sequence; identical to SEQ ID NO: 680713
  ENSG00000189357_9 (sequence is synthesized)

SEQ ID NO: 699110 - DNA, 120 bp, Artificial Sequence; identical to SEQ ID NO: 680714
  ENSG00000189357_10 (sequence is synthesized)

SEQ ID NO: 699111 - DNA, 120 bp, Artificial Sequence; identical to SEQ ID NO: 680715
  ENSG00000189357_11 (sequence is synthesized)

SEQ ID NO: 699112 - DNA, 120 bp, Artificial Sequence; identical to SEQ ID NO: 680716
  ENSG00000189357_12 (sequence is synthesized)

SEQ ID NO: 699113 - DNA, 120 bp, Artificial Sequence; identical to SEQ ID NO: 680717
  ENSG00000189357_13 (sequence is synthesized)

SEQ ID NO: 699114 - DNA, 120 bp, Artificial Sequence; identical to SEQ ID NO: 680718
  ENSG00000189357_14 (sequence is synthesized)

SEQ ID NO: 699115 - DNA, 120 bp, Artificial Sequence; identical to SEQ ID NO: 680719
  ENSG00000189357_15 (sequence is synthesized)

SEQ ID NO: 699116 - DNA, 120 bp, Artificial Sequence; identical to SEQ ID NO: 680720
  ENSG00000189357_16 (sequence is synthesized)

SEQ ID NO: 699117 - DNA, 120 bp, Artificial Sequence; identical to SEQ ID NO: 680721
  ENSG00000189357_17 (sequence is synthesized)

SEQ ID NO: 699118 - DNA, 120 bp, Artificial Sequence; identical to SEQ ID NO: 680722
  ENSG00000189357_18 (sequence is synthesized)

SEQ ID NO: 699119 - DNA, 120 bp, Artificial Sequence
  ENSG00000189357_19 (sequence is synthesized)
taactctgagagagacctaggaactcatatgatgcatctgtcagggaatgattcaggggtgagactaggtcagaaacaacttgaaaatgccctgacagtacatttgagcaagaaatttga

SEQ ID NO: 699120 - DNA, 120 bp, Artificial Sequence
  ENSG00000189357_20 (sequence is synthesized)
ggaaatcaatgagggtcgaatgcctgggactgtgcatagttcatggcactcagtcaagcagacaatatgtcttcctgagaaatcccacagccaaattaaacatcgaaatttggcagcatt

SEQ ID NO: 699121 - DNA, 120 bp, Artificial Sequence
  ENSG00000189357_21 (sequence is synthesized)
ggtgagtgaggaccacggcgttgatacctcccaggagatgtccttccttagttccaacaaacaaaagatgttggaagcccatattaaatctttccatatgaagcccatattaaatctttc

SEQ ID NO: 699122 - DNA, 120 bp, Artificial Sequence
  ENSG00000189357_22 (sequence is synthesized)
catatgaggatgctgtggggccttccccgcaagatccgtgaacccatagaaatcttcaaatcagaagaggatatttccaattccttttcccatttctaccttccctcctcagccagcttt

SEQ ID NO: 699123 - DNA, 120 bp, Artificial Sequence
  ENSG00000189357_23 (sequence is synthesized)
atttctcagggagattccaaagatggggtctctaagtctcatagacgaagcacttttcaaggagaaaagttgggaacaacaagctcagtccctgtccttaatcatcctcagcctgtctcc

SEQ ID NO: 699124 - DNA, 120 bp, Artificial Sequence
  ENSG00000189357_24 (sequence is synthesized)
tcacctattggcaaagaagggcaggggaccctgagaagacaattttctgatactgaccatgaccttatagagacagatgccaaagatggtgcctccacgccccttagaagaggcactaca

SEQ ID NO: 699125 - DNA, 120 bp, Artificial Sequence
  ENSG00000189357_25 (sequence is synthesized)
tattttcaaggagaaaaattagaaacaacaagctcattctccatcttgggtcatcctcacctcgtcacctcacctgttgatcaagaaaagcaggggaccctcagaagagaattcgctgat

SEQ ID NO: 699126 - DNA, 120 bp, Artificial Sequence
  ENSG00000189357_26 (sequence is synthesized)
actgacgaggatcttacagaaagtgtctggacaactgaggatggcagacagacttttctgccccccacacacagcatcatagacgaagtcagtcagaaacagactgtacttgccagtaga

SEQ ID NO: 699127 - DNA, 120 bp, Artificial Sequence
  ENSG00000189357_27 (sequence is synthesized)
tgcagtgcagagctgcccatactgcaagctggagttggccgtgattcaagggataagagagagagtgccagtaataatgttaacaggcttcagggcagtagaaagacctttcctgtcacc

SEQ ID NO: 699128 - DNA, 120 bp, Artificial Sequence
  ENSG00000189357_28 (sequence is synthesized)
aatgggtcgaaggagatgttcaaggaagaggagatctgtactcttcaatcacaaactaggaacaacttgacaaccagcaagtcaggaagctgcttagtgacaaacgtgaaaagaagcact

SEQ ID NO: 699129 - DNA, 120 bp, Artificial Sequence
  ENSG00000189357_29 (sequence is synthesized)
tctcatgaaactgaaattttcccaccaagaatatcagttcctcaaactcctaaatcatcatatcttaaaaatcagatgttgagccagttaaagttggtccagaggaagcatagccaacct

SEQ ID NO: 699130 - DNA, 120 bp, Artificial Sequence
  ENSG00000189357_30 (sequence is synthesized)
cagagccatttcactggcatgtctcttgccttagataacttgagttccaaggacttactgactcatgcccagggcatctcgaatcaggacttgggaacttcccaggtgctgcatgtccac

SEQ ID NO: 699131 - DNA, 120 bp, Artificial Sequence
  ENSG00000189357_31 (sequence is synthesized)
ttggaggtcagaggaatccgtgtggcacagcagcaggagcacagggtccctacgcatgtcttacagaaatgccaagttaagaatttttcaccagctacaaagagagtgagccctttaaga

SEQ ID NO: 699132 - DNA, 120 bp, Artificial Sequence
  ENSG00000189357_32 (sequence is synthesized)
cccaatggaggagagcttggtggaggggatgcagggttggggacatcccaactcactagaaagagcctccctgttcataacaaggcatcaggagaggtgcctgggagcaaatcttcccca

SEQ ID NO: 699133 - DNA, 120 bp, Artificial Sequence
  ENSG00000189357_33 (sequence is synthesized)
accttgaaaacacagcctccttctgaaaaccttttcagaaaatggatgcagaccttattgcagtggtttaataaacctagcataatgtgtgaagaacaagaaagttcttgggaaaagggt

SEQ ID NO: 699134 - DNA, 120 bp, Artificial Sequence
  ENSG00000189357_34 (sequence is synthesized)
agctccctgtcatcatctgtgcagaatagaagtcgagttacaagtagagctgcttttactggtgctactgaagctcagaaaattaggaaagacactggggagttcctagaagaaaagctg

SEQ ID NO: 699135 - DNA, 120 bp, Artificial Sequence
  ENSG00000189357_35 (sequence is synthesized)
gggcatagccatgggatagatatcacctgtccctaagaacccttttccttcccagtggagcttgggaaagctcagcacaacccagaagtgcaggtcagagcagagcccttccagggctat

SEQ ID NO: 699136 - DNA, 120 bp, Artificial Sequence
  ENSG00000189357_36 (sequence is synthesized)
ccccgcaactacacagctccctcccgcaaagtgacatgtaccaaatcttgcagccaacaagctatctttgttggacagaattatcctacaaggattagacagatcatagacaaggacaga

SEQ ID NO: 699137 - DNA, 120 bp, Artificial Sequence
  ENSG00000189357_37 (sequence is synthesized)
cagccccaggaagttgaggcatttaaggggaagatattgtatcaaaggcatccccaatccatgccccacagggatcctgtgccacatctaaaccccacttgtcagcgtcaagtcaccctg

SEQ ID NO: 699138 - DNA, 120 bp, Artificial Sequence
  ENSG00000189357_38 (sequence is synthesized)
gtgtgtccagctgtcccaattagtggcaaaagcactgtgttcagtgatgtgcctttactaactggacacaaaatgcattggaagtatttgcagggaggcaaatctccccccacaaaataa

SEQ ID NO: 699139 - DNA, 120 bp, Artificial Sequence
  ENSG00000189362_0 (sequence is synthesized)
acttccgctcctcgcagcggagccggtcccctagggctcgggtcgcacggagctgacccctaacgaaatggggccgcgccaagggcggtggtggctgctgctctggctgccgcccctggc

SEQ ID NO: 699140 - DNA, 120 bp, Artificial Sequence
  ENSG00000189362_1 (sequence is synthesized)
cacactgcccgtgcgcggggaggcggcggcggcagcgttatcagttcgtaggtgtaaagctttgaaggaaaaagatttaattagaacgtctgagtcagactgttactgctacaatcaaaa

SEQ ID NO: 699141 - DNA, 120 bp, Artificial Sequence
  ENSG00000189362_2 (sequence is synthesized)
ttcccaagtggagtggaaatacatatggtcaactatgcaggtgaaaattaccagtccaggcctgttcagaattgtatatatcgcagaaagacataattgccaatatccagaaaacattct

SEQ ID NO: 699142 - DNA, 120 bp, Artificial Sequence
  ENSG00000189362_3 (sequence is synthesized)
atcttttatcaaatgtgtgattcataacttttggataccaaaggaatctaacgaaataaccataatcatcaatccatacagggagactgtgtgcttctctgtggagcctgtcaagaagat

SEQ ID NO: 699143 - DNA, 120 bp, Artificial Sequence
  ENSG00000189362_4 (sequence is synthesized)
atttaactatatgatacatgtgaatcgaaacatcatggatttcaaactcttccttgtgtttgtggcaggagtttttcttttcttttatgcaaggaccctgagtcaaagccctactttcta

SEQ ID NO: 699144 - DNA, 120 bp, Artificial Sequence
  ENSG00000189362_5 (sequence is synthesized)
ttactcctcgggaactgtgctaggtgttctaatgacattagtctttgtcttgctgttggtgaaaagattcattccgaagtatagcaccttttgggctctaatggttggttgttggtttgc

SEQ ID NO: 699145 - DNA, 120 bp, Artificial Sequence
  ENSG00000189362_6 (sequence is synthesized)
ctcagtttatattgtatgccagttgatggaagatctgaagtggctgtggtatgaaaacaggatatatgtattaggctatgtcttgatagttggatttttcagctttgttgtttgttacaa

SEQ ID NO: 699146 - DNA, 120 bp, Artificial Sequence
  ENSG00000189362_7 (sequence is synthesized)
gcatgggccccttgcagacgacaggagcagaagtcttctgatgtggatgctgcgactcctctccctggttctggtctatgctggtgtggccgtgcctcagtttgcctatgcagccataat

SEQ ID NO: 699147 - DNA, 120 bp, Artificial Sequence
  ENSG00000189362_8 (sequence is synthesized)
cctcctcatgtcctcctggagtctgcactacccactgagagcatgcagttatatgaggtggaaaatggagcagtggtttacatcaaaagagctggtggtgaaatatcttacggaagacga

SEQ ID NO: 699148 - DNA, 120 bp, Artificial Sequence
  ENSG00000189362_9 (sequence is synthesized)
gtacagggagcaagctgatgctgaaacgaacagtgctctggaggagctacgccgggcctgccgaaaacccgactttccctcatggctggtcgtctccagactccacactcctagcaaatt

SEQ ID NO: 699149 - DNA, 120 bp, Artificial Sequence
  ENSG00000189362_10 (sequence is synthesized)
tgcagactttgttcttggaggaagccacttgtcacctgaagaaatcagtctgcatgaagagcagtatggccttgggggtgccttcttggaagagcagctctttaacccgagtactgcctg

SEQ ID NO: 699150 - DNA, 120 bp, Artificial Sequence
  ENSG00000189362_11 (sequence is synthesized)
acatgcgaccttcaagttgacttcattctggacaaggaagtgggcaaagggcagggattctattaaagttaggcagaactgttctagtgaacggtggcaaaaacatttgctgtggagaaa

SEQ ID NO: 699151 - DNA, 120 bp, Artificial Sequence
  ENSG00000189362_12 (sequence is synthesized)
aacaagtcagtctggaaagggaaaccaacccattttgaagataacttagcattcttggtgacttctgctacttattgtactgtaggtggataccaaaattctgtgacagccactaccact

SEQ ID NO: 699152 - DNA, 120 bp, Artificial Sequence
  ENSG00000189362_13 (sequence is synthesized)
taccttgaatgaaggctttcattaggaacaggggaatggcgttgttcttaaggggctagtaagcatgaacaggtgctttgtcgacaccagggcactaaatctggtcttaatcccctgaac

SEQ ID NO: 699153 - DNA, 120 bp, Artificial Sequence
  ENSG00000189362_14 (sequence is synthesized)
ctgtgtcagaagactctgcaatactcttcctatagttcgtcagtataagtccttaaagagacctgagacatgctggaccagtgttttccaaagtacagctcacaggctactaccaagtgt

SEQ ID NO: 699154 - DNA, 120 bp, Artificial Sequence
  ENSG00000189362_15 (sequence is synthesized)
tggtcaataaaggtattctgaggtcaactaagattgatataaagttaaactaatgtatttcagtatctctcagaggcattcataatgctcgtgtgcactgtgaatctcccaaaggggaga

SEQ ID NO: 699155 - DNA, 120 bp, Artificial Sequence
  ENSG00000189362_16 (sequence is synthesized)
aattgtgtgctgcagtttcttgcttaatttgaccacagaactctttttcatgagattaatattccttggaacacgtttggaaaatgctaatggtggtggaactgagctcatgagaggtta

SEQ ID NO: 699156 - DNA, 120 bp, Artificial Sequence
  ENSG00000189362_17 (sequence is synthesized)
aataacttgtgcaagaccacactgagatgcagcactggtagaaatccagccctgatgtatcctttgactcaggtagacaagatcttcaggtgcaagcttaggagccatctccctacagcc

SEQ ID NO: 699157 - DNA, 120 bp, Artificial Sequence
  ENSG00000189362_18 (sequence is synthesized)
atgggcctcacaatgttggtggctttactttttatttttcaataatggccaacttgctatttaactgtgataaagggaaatgtttctgaagacattttaaagttttttatacatacgtaa

SEQ ID NO: 699158 - DNA, 120 bp, Artificial Sequence
  ENSG00000189362_19 (sequence is synthesized)
gatttttatatacatacgtaaggattagatactatgattactttttttgtattttgaaattgaaggcacttaagctcttgtgatattttgaattgactgatccatttaaaaaattgttta

SEQ ID NO: 699159 - DNA, 120 bp, Artificial Sequence
  ENSG00000189362_20 (sequence is synthesized)
gctataggtgtttgtaacaatttcttataaaatgattttttttcttgattcatgatattaaactccagattgaaatgaggggctatgagctttgaccctgaggaaagaaggccaaaacat

SEQ ID NO: 699160 - DNA, 120 bp, Artificial Sequence
  ENSG00000189362_21 (sequence is synthesized)
agatctgaggaaagatttgaacatggcaagacaatctcagggttaagatgttgctaagttgattctgagaatcaaaatcaggctttttttcctgtgatgggatcataaaaataatctttt

SEQ ID NO: 699161 - DNA, 120 bp, Artificial Sequence
  ENSG00000189362_22 (sequence is synthesized)
tatcaggacaaaggttatgggcgaaggatagacagaattttggcactgctgctttcctgagccaaattaagtagtttttctaaatcatgaaaaaagagcatgactatccatctggaactt

SEQ ID NO: 699162 - DNA, 120 bp, Artificial Sequence
  ENSG00000189362_23 (sequence is synthesized)
cctagattgattttcaaatgatagttcctctttgaagtatttacaggtctgtttttgccagacatcttttcatactgggaacttttttttttgtaatatccactaaagttaatctgcctt

SEQ ID NO: 699163 - DNA, 120 bp, Artificial Sequence
  ENSG00000189362_24 (sequence is synthesized)
cctttatatagacttggatttttaaaaaaccaaaggatatattttccattcagatttatggtaactattttatgagtaaatagaagtttgaatatttttcttatggtttaatctgttttt

SEQ ID NO: 699164 - DNA, 120 bp, Artificial Sequence
  ENSG00000189362_25 (sequence is synthesized)
ccaagttcgtctcctaagaagcagtttgtgtgctacaacgtatgcgtatgagtaaataacacatgaacaatctgctggggctgccaggtacatcccagccaggacagccgctgggccagg

SEQ ID NO: 699165 - DNA, 120 bp, Artificial Sequence
  ENSG00000189362_26 (sequence is synthesized)
gggaagaggtactgctgagggaaggaagcagctcttcatgggcagctagccaggtgtaaccatcacagtaaaaacagccaaagagagaagaacaacagcagtccttgaggatattgtttt

SEQ ID NO: 699166 - DNA, 120 bp, Artificial Sequence
  ENSG00000189362_27 (sequence is synthesized)
ccatgtttatttttagaggaaatcataggtttgtcagtttctgctttgtgactactgtgagaagctaaacaattagaagcattacttgtgatatttttagtgtatttatgttgttttcat

SEQ ID NO: 699167 - DNA, 120 bp, Artificial Sequence
  ENSG00000189362_28 (sequence is synthesized)
ttgatttgggggtgtattatagtactgatcacaattctaatccccatcaagcaatgtacagataactcttccaagaaatgtttccctcctttctttcctcccttcccttctctttctccc

SEQ ID NO: 699168 - DNA, 120 bp, Artificial Sequence
  ENSG00000189362_29 (sequence is synthesized)
tcacctcctgtctcctctcctcctccctttttaaaggcctttgaacagtttaaacgaccactcaataaaatggctctgcccttcacaggtggttggaagttggctttgtgcctcacacac

SEQ ID NO: 699169 - DNA, 120 bp, Artificial Sequence
  ENSG00000189362_30 (sequence is synthesized)
cataggtgtataattatggagcctaacagatccctttgttattttactgcttatgcttggtgcctacaaaagcttactgttgttagcaagttgaactctttgacaccagatgtgtgggtg

SEQ ID NO: 699170 - DNA, 120 bp, Artificial Sequence
  ENSG00000189362_31 (sequence is synthesized)
agatatagtgtaggtggctatgcttaaacaatcgtatcattcaagtgttatttttaaaaggttttaaaacacattttacatatcacaaaaaatgctttgtgaattagttgtatggtttgc

SEQ ID NO: 699171 - DNA, 120 bp, Artificial Sequence
  ENSG00000189362_32 (sequence is synthesized)
cagtaatacctagggctgaattacaggggaatgtccatctgacatgaaggacaatatttcaatttatgactttttaaaaaaatctggaaatttcatatatttagattttaagagggtttg

SEQ ID NO: 699172 - DNA, 120 bp, Artificial Sequence
  ENSG00000189362_33 (sequence is synthesized)
gaatagatgatggattacataaaaatatctaaatatgtggaggaattaagatcctgaaatgatgtcaactaaagaaatgctctcttacattatgctatgtgtgattgtttcccagagtga

SEQ ID NO: 699173 - DNA, 120 bp, Artificial Sequence
  ENSG00000189362_34 (sequence is synthesized)
gagatgtacaattttataaattagcttttcttgtccaactgaaagcaagatagacaacataatggatgtggaagtttgaagacacctgcaggaagacagagaggtacttttaggtgacaa

SEQ ID NO: 699174 - DNA, 120 bp, Artificial Sequence
  ENSG00000189362_35 (sequence is synthesized)
caggagcaagctgccttctgagagagcctgctgggtggcatgacattgaagagtgaactatttgggtgtgactgttagccttattgacttagaaccctgctttttgttattgcaccataa

SEQ ID NO: 699175 - DNA, 120 bp, Artificial Sequence
  ENSG00000189362_36 (sequence is synthesized)
gacctgtctcttgttagtcaattcatatagttggtacaggtagtgattcacaaccaaaaatataactagcataaggataaaaacacttgacttgatatgaccagcagattctctctcaga

SEQ ID NO: 699176 - DNA, 120 bp, Artificial Sequence
  ENSG00000189362_37 (sequence is synthesized)
agacagatttacaaggggtcaaattataataaggtggctacttggtgaactgaaacaaaacaaagggagcttgttatataattcacatggttaatgtcatgaggccaaagagtttgatgc

SEQ ID NO: 699177 - DNA, 120 bp, Artificial Sequence
  ENSG00000189362_38 (sequence is synthesized)
agatgccaccccccaccccagtggggctagccttgttaatgggatgagataccaggtctgttgacaaagaccacgccttcctttatgcaggtcctgccaactttttcctctctgtgactg

SEQ ID NO: 699178 - DNA, 120 bp, Artificial Sequence
  ENSG00000189362_39 (sequence is synthesized)
ctgtttttctaatcttcattattgacaaacatcccaccccctctgatgggcatatttttactcagatgtgttaaaatctttagtctttctctggcctaggagttggattatcttttaaag

SEQ ID NO: 699179 - DNA, 120 bp, Artificial Sequence
  ENSG00000189362_40 (sequence is synthesized)
gtaactgtattttttttgttatgatccctgaatgtgaaaccttaataggtcaccagagatttgaaatgaatactatacttatctaatataaatcttggaagatacagttagtgggtagct

SEQ ID NO: 699180 - DNA, 120 bp, Artificial Sequence
  ENSG00000189362_41 (sequence is synthesized)
tctctattatttaaataatttgaggcatctgtttttttagatttggtcgtttttccaaaaaagaaagactgattgaaaagagaaagggaaagaataccaacattgactagagatccatca

SEQ ID NO: 699181 - DNA, 120 bp, Artificial Sequence
  ENSG00000189362_42 (sequence is synthesized)
ggcactatatgaggcaccttcgatacctcttaatttgcacctcatgaccactctgtgatatgttttggtattttcattttacagatgaggaaagacccagagaaggtaggagaaagttgc

SEQ ID NO: 699182 - DNA, 120 bp, Artificial Sequence
  ENSG00000189362_43 (sequence is synthesized)
tgaaggacacatatagctaaagtggtagaatcagaattcaagcccccatatgtctgcttccagggctcatattctacttcctttatttattaccatctttttaagaaagtgaaggaaatg

SEQ ID NO: 699183 - DNA, 120 bp, Artificial Sequence
  ENSG00000189362_44 (sequence is synthesized)
accccatggataaggcattcaagaggtgactacatctgctgatgttatacacataccagtcatttgtgccccgcagcaatggacactgtagtctgcggctcttgtcagtgcttctcagac

SEQ ID NO: 699184 - DNA, 120 bp, Artificial Sequence
  ENSG00000189362_45 (sequence is synthesized)
tgtctggggtgatggaccagtttccctctagttcatcactagtaatacttttgtaagatacactaaattattagaaaaatgaaataatctttgaaagaaaagacatacagaatataagca

SEQ ID NO: 699185 - DNA, 120 bp, Artificial Sequence
  ENSG00000189362_46 (sequence is synthesized)
cgatgatcatgtcatgacaatgtcaacttgccatacatattttgaaatgtctaatttctatgttgtcacataccagcagtagtttgacagcaccagtcattgagcacactttgagtagca

SEQ ID NO: 699186 - DNA, 120 bp, Artificial Sequence
  ENSG00000189362_47 (sequence is synthesized)
ctggtctacatgttatttttctaagatgccagtgatcttttcaggaaacaaaaaaaatccgaccttttttcaaatgtaagtttacaatttaaaagaatagcatcctacactgactattgg

SEQ ID NO: 699187 - DNA, 120 bp, Artificial Sequence
  ENSG00000189362_48 (sequence is synthesized)
agagagtatggtatataatttgttaaatgattataaaattgtttacttttgttgacacctttaagaagaaaaagaaaaatgaaaattatgaaacttataacctctctcagcagacttttg

SEQ ID NO: 699188 - DNA, 120 bp, Artificial Sequence
  ENSG00000189362_49 (sequence is synthesized)
cactttatggaattgtcaccatcatcacttttttccatcctcttcaacttaagttttgcttaattttgtctcttaactaactcatatccccaaccacttaatgtttacaatgcatgttgg

SEQ ID NO: 699189 - DNA, 120 bp, Artificial Sequence
  ENSG00000189362_50 (sequence is synthesized)
aattgaatgccttactgtacagcttactagatataggtaaatatgtatagtatggcactgtagattgggagaatggaatatgattatagatttaaatggcaataaaataatagaactaga

SEQ ID NO: 699190 - DNA, 120 bp, Artificial Sequence
  ENSG00000189362_51 (sequence is synthesized)
agttggacattttgtaattttagaattagaagcaaccgcgcgatccagtcgcccaattccctcgttttacagaagcaaccgaaactcagagaggttttgatttgcccagggtcacacagc

SEQ ID NO: 699191 - DNA, 120 bp, Artificial Sequence
  ENSG00000189362_52 (sequence is synthesized)
ggcacagctgaccctagtctccagactttcagcacacggccttttgtacagtacatcaatgcgtgttgaaatccttgttatttcactatctcgcattcctttggtctcaagactagagaa

SEQ ID NO: 699192 - DNA, 120 bp, Artificial Sequence
  ENSG00000189362_53 (sequence is synthesized)
ggtaacagcttcagcttcagaatcggagcgaaaattcttctgcccctgactgttgtgaccttgagcgagtaaacataacggtcccacgtgagcggcagttcgtaggtgtaaagctttgaa

SEQ ID NO: 699193 - DNA, 120 bp, Artificial Sequence
  ENSG00000189366_0 (sequence is synthesized)
tgggagtgacccgatttcccagctcagaacctgaggacgcagccatggagcggtcggccttcatggagctggatgctgggagcaggctggtgatgcatctccgcgagtggccagccctgc

SEQ ID NO: 699194 - DNA, 120 bp, Artificial Sequence
  ENSG00000189366_1 (sequence is synthesized)
tggtcagcagcacgggctggacagagtttgaacaacttactcttgatggacacaaccttccttctcttgtctgtgtgataacagggtcggtggacctgggtgtctgtctgcacatgtcct

SEQ ID NO: 699195 - DNA, 120 bp, Artificial Sequence
  ENSG00000189366_2 (sequence is synthesized)
tgaggactcagaggaactggcagctctgcagatgcttttctcaaactttcctgatcctgcaggcaagctaaaccagttttggaagaacctgcgggagtcgcagcagctccgatgggatga

SEQ ID NO: 699196 - DNA, 85 bp, Artificial Sequence
  ENSG00000189366_3 (sequence is synthesized)
acaactcctgggccagaggctaaaaccccgggacccctgctgtccttcccgcagcttcttctcggagtctcagggcaaacccttt

SEQ ID NO: 699197 - DNA, 120 bp, Artificial Sequence
  ENSG00000189366_4 (sequence is synthesized)
ttcccgcagcttcttctcggagtctcagggcaaacccttttgagcagcgcctcccagtggccagaagctgaaatgacggcagtggtgccgcctggtgaatgaattggttctgtgacccgg

SEQ ID NO: 699198 - DNA, 120 bp, Artificial Sequence
  ENSG00000189367_0 (sequence is synthesized)
agctttttgacttgtaaaagtggtgaaggtttcaaagggacttgtcagtactgctctgtggaatggttggacttattttgcatccccttttcttgtaaagaatcgagattcaccgagctg

SEQ ID NO: 699199 - DNA, 120 bp, Artificial Sequence
  ENSG00000189367_1 (sequence is synthesized)
agacttttctctttaagacagctagccatccactttcttccactgctaattgaccagtggtcgagcatccataggatttctccccagtgtgaaaggctttattttaaaggcaagtgagac

SEQ ID NO: 699200 - DNA, 120 bp, Artificial Sequence
  ENSG00000189367_2 (sequence is synthesized)
tgcttcaaataaaacaacttcaagcttccaagaaacagttaagaggaggcagagaagagcagaaacacttctttgctgacacttacactgttgccatggacctacataagcagtgggaga

SEQ ID NO: 699201 - DNA, 120 bp, Artificial Sequence
  ENSG00000189367_3 (sequence is synthesized)
acacagagactaactggcataaggaaaagatggaattactggaccagtttgacaatgaaagaaaggaatgggaaagtcaatggaagattatgcagaagaaaatagaagagctttgccggg

SEQ ID NO: 699202 - DNA, 120 bp, Artificial Sequence
  ENSG00000189367_4 (sequence is synthesized)
aagtaaagctttggaggaaaatcaatatcaatgaaagtgctaagatcattgatctttaccatgagaagaccattccagagaaagtgatagaatcttccccaaattaccccgatttaggac

SEQ ID NO: 699203 - DNA, 120 bp, Artificial Sequence
  ENSG00000189367_5 (sequence is synthesized)
aaagtgaatttataaggacgaatcacaaagatggtctgagaaaagaaaataaaagagagcagagcttagtcagtggaggaaatcaaatgtgtaaggaacaaaaagcaacaaaaaaatcaa

SEQ ID NO: 699204 - DNA, 120 bp, Artificial Sequence
  ENSG00000189367_6 (sequence is synthesized)
aagtagggtttttggatcctttggctacagacaaccaaaaggaatgtgaggcctggcctgacctgaggacttctgaggaagacagcaagagctgttctggcgccctcagtacagctcttg

SEQ ID NO: 699205 - DNA, 120 bp, Artificial Sequence
  ENSG00000189367_7 (sequence is synthesized)
aagaacttgcgaaggtgagtgaagaattatgcagctttcaagaggaaattcgaaagcggtctaaccatagaaggatgaagtcagattcttttctccaggaaatgccaaatgtaactaata

SEQ ID NO: 699206 - DNA, 120 bp, Artificial Sequence
  ENSG00000189367_8 (sequence is synthesized)
tacctcatggggaccccatgatcaacaatgaccagtgcattcttccaatcagtttagaaaaagaaaaacagaaaaacaggaagaatctgagctgtaccaatgtgctccagagcaattcta

SEQ ID NO: 699207 - DNA, 120 bp, Artificial Sequence
  ENSG00000189367_9 (sequence is synthesized)
cgaaaaaatgtggaattgatacaatcgatttaaaaagaaatgaaactccaccagttcctcctccaagaagcacctctcgaaattttcccagctcggattctgaacaagcctatgaaagat

SEQ ID NO: 699208 - DNA, 120 bp, Artificial Sequence
  ENSG00000189367_10 (sequence is synthesized)
ggaaggaaaggttagaccacaacagctgggtgccccatgagggtcgaagtaaaaggaattacaaccctcacttccctttgagacaacaagagatgtctatgttgtatccaaatgaaggga

SEQ ID NO: 699209 - DNA, 120 bp, Artificial Sequence
  ENSG00000189367_11 (sequence is synthesized)
aaacttcgaaagatggtatcatcttttcctctttggtaccagaagtcaaaatagatagcaagcctccaagtaatgaagatgttggacttagcatgtggtcatgtgacattgggataggtg

SEQ ID NO: 699210 - DNA, 120 bp, Artificial Sequence
  ENSG00000189367_12 (sequence is synthesized)
caaaaaggagcccctctacttcgtggtttcagaaaacctgctctacccccagtaatccaaaatatgaaatggtgatcccagatcaccctgctaaatctcatcctgatcttcatgtaagta

SEQ ID NO: 699211 - DNA, 120 bp, Artificial Sequence
  ENSG00000189367_13 (sequence is synthesized)
atgactgtagctcctcagtagcagagagcagtagcccacttagaaatttcagttgtggctttgaaaggactacaaggaatgagaagctggcagcaaagactgatgaatttaacagaactg

SEQ ID NO: 699212 - DNA, 120 bp, Artificial Sequence
  ENSG00000189367_14 (sequence is synthesized)
tatttagaacagatagaaattgtcaggcaatacagcaaaatcacagctgctcaaaatcatcggaggatctcaagccctgtgatacctcatctactcacacaggtagcatatcacaaagta

SEQ ID NO: 699213 - DNA, 120 bp, Artificial Sequence
  ENSG00000189367_15 (sequence is synthesized)
acgatgtgtccggtatttggaaaaccaatgcccacatgcctgtgcccatggaaaatgtgcctgataatcccaccaagaaatccacaacaggcctagtaagacaaatgcagggacacctaa

SEQ ID NO: 699214 - DNA, 120 bp, Artificial Sequence
  ENSG00000189367_16 (sequence is synthesized)
gtcctcgcagttatcgaaatatgctccacgagcatgactggagaccgagtaatttgtctggccgtccgaggtcagctgatcccaggtcaaattatggtgttgtggaaaagctgctgaaaa

SEQ ID NO: 699215 - DNA, 120 bp, Artificial Sequence
  ENSG00000189367_17 (sequence is synthesized)
cctatgagacagcaacagagtctgcattgcaaaattctaagtgcttccaggataattggaccaaatgtaattctgatgtcagtggtggtgccacattaagtcagcatttagaaatgctcc

SEQ ID NO: 699216 - DNA, 120 bp, Artificial Sequence
  ENSG00000189367_18 (sequence is synthesized)
aaatggaacaacagtttcagcaaaagacagctgtgtgggggggacaggaagtgaagcaaggaatagatccgaaaaagataacagaggaatccatgtcagtgaacgcctcacatggaaaag

SEQ ID NO: 699217 - DNA, 120 bp, Artificial Sequence
  ENSG00000189367_19 (sequence is synthesized)
gattttcccgacctgctagaccagcaaatcgtcgtctcccctccagatgggcatccagatctccatctgcaccccctgccttgcggagaactacccacaactataccatttctctgcgat

SEQ ID NO: 699218 - DNA, 120 bp, Artificial Sequence
  ENSG00000189367_20 (sequence is synthesized)
ccgaagcattgatggtttaagtctttggcctggattgctatattacagaagttctagtcccacttgtcaaacagagcattctgagtgtttacaggcggacctgttctcttccgacaagca

SEQ ID NO: 699219 - DNA, 120 bp, Artificial Sequence
  ENSG00000189367_21 (sequence is synthesized)
atttgaatcttaactttccatcagtcttcagtgtttttaatctaaggaataattatcttcctgcattttgatttcttagatcagaattttttaatgccatcctcattagttttccaatac

SEQ ID NO: 699220 - DNA, 120 bp, Artificial Sequence
  ENSG00000189367_22 (sequence is synthesized)
aatataagttgaaacaatgtacaatattgtatattctttgttgcaagtggcagaaagtaaggttatgtgcatggccatgtgtttgtaggtgcatgtgttgaaataggaagtatcctagta

SEQ ID NO: 699221 - DNA, 120 bp, Artificial Sequence
  ENSG00000189367_23 (sequence is synthesized)
tgtatttagatatgaaaaacttatgtgctagtgttgactttgaaattataacatgtatacctatatattctttgtgtttatttaaaagttttgaaaatatgcagtactgtttatattttg

SEQ ID NO: 699222 - DNA, 120 bp, Artificial Sequence
  ENSG00000189367_24 (sequence is synthesized)
tataccttttaataggtatccacttaaggcatttgcagtacaaatattaattgaccacttccttggcccccagctacaatgaaaaagaagaattatgcacacatctaacattggtagatt

SEQ ID NO: 699223 - DNA, 120 bp, Artificial Sequence
  ENSG00000189367_25 (sequence is synthesized)
tctaaagacaactcataaataatttcttaacccatataaggataaaataataccattgatattcttgtttattctttttaaataaaaatgtcacaagtttaatagatcagccttgtaaag

SEQ ID NO: 699224 - DNA, 120 bp, Artificial Sequence
  ENSG00000189367_26 (sequence is synthesized)
caagcataaaatgttcataaatgttttatatattatttggtagtctagtatggctttaactgaatatttgatcctcagagacagtatcatgagactgcattataaatgacatgattaaat

SEQ ID NO: 699225 - DNA, 120 bp, Artificial Sequence
  ENSG00000189367_27 (sequence is synthesized)
gatgaatttattttgtcagcctcagcaacaaacatttcctaaatgggatgcaaaaagaaactgaatgatgttgaattttagtttttctttaagttgtggtaagcttttagtttagctgct

SEQ ID NO: 699226 - DNA, 120 bp, Artificial Sequence
  ENSG00000189367_28 (sequence is synthesized)
ttaacatggagtcatacatacttagaggtaagtcatttattatttttttcctttttctaatcttttccttaaaattaatagataacaaactaagttacttttttactaacaaggaagatc

SEQ ID NO: 699227 - DNA, 120 bp, Artificial Sequence
  ENSG00000189367_29 (sequence is synthesized)
aggaataatatttctttgaaagctgaaattatacttctcacagtttgctaccgaaaaaaggcttaaactaaaccttgacatccacagtagcatcaggaatagaaatgtgtattttggcta

SEQ ID NO: 699228 - DNA, 120 bp, Artificial Sequence
  ENSG00000189367_30 (sequence is synthesized)
cagtttgcatacagtgaacacataaaatctatattgaaaactgacagaaatatgaatgtcgaggggcttggaattctaaatggaagattttagaaggaactttgctctctactgtcacta

SEQ ID NO: 699229 - DNA, 120 bp, Artificial Sequence
  ENSG00000189367_31 (sequence is synthesized)
tataaaaccaattatgttatgttattagatattaactctatttaagcttttcttttactaagaaattcttatgccaaatgtattccaagagccatctccttatgatgtatttgaaccatt

SEQ ID NO: 699230 - DNA, 120 bp, Artificial Sequence
  ENSG00000189367_32 (sequence is synthesized)
tagagaaattcacttcattgtaccccatgacctgaggtaaagaaaataattttcaaattgcagacttccttgaaaggctcaagactgtagcatggtgatgtctagattcatactttactg

SEQ ID NO: 699231 - DNA, 120 bp, Artificial Sequence
  ENSG00000189367_33 (sequence is synthesized)
ttttaattcttatttccttcaggaagatccttttccacaggaagctatcaaagaaaagtaaactagacaccaagtaatatcactctcataatatgctttccagctagaggggagaaaaca

SEQ ID NO: 699232 - DNA, 120 bp, Artificial Sequence
  ENSG00000189367_34 (sequence is synthesized)
ccaggaaagaggaaccctgggtcataaaatgacggacctgttaggaaaatgctgttgtgtgacaatggagagcctgcccaaggactgtgcaacctatctgttcctctccaccagtgtatc

SEQ ID NO: 699233 - DNA, 120 bp, Artificial Sequence
  ENSG00000189367_35 (sequence is synthesized)
ccaagtagtctggtatgatctgtggttccttagaatattgaggatctctttaaaaaatgaaatttctgatctcaccccatattactaaagcaaaatttccaggggtagggactgggactc

SEQ ID NO: 699234 - DNA, 120 bp, Artificial Sequence
  ENSG00000189367_36 (sequence is synthesized)
cagaaccattaataaaacaaaacaaaacaaagcaaaatattgatgatcaggcagatttgaaaacagtgacattgcttgatctctgaatggatggatgcccttgggtggtcacttttcttc

SEQ ID NO: 699235 - DNA, 120 bp, Artificial Sequence
  ENSG00000189367_37 (sequence is synthesized)
ctaggacttgcctttgttatctgtaaattagaatggctatactttcagacttcacaattttaagccacttttttctattaacagttgaatgaaccagtgggacacattttaacgtcttct

SEQ ID NO: 699236 - DNA, 120 bp, Artificial Sequence
  ENSG00000189367_38 (sequence is synthesized)
tatgttgactaaaattatagttagagctgagaaaaaaaaaatagcatctagtccaactccttgattgtaaaactgaaaaactaaggttatttgaatgttctgttttctctttttaaatat

SEQ ID NO: 699237 - DNA, 120 bp, Artificial Sequence
  ENSG00000189367_39 (sequence is synthesized)
tttataacttttaaatggaaaaacctattaggtaaatggaaataatccttgaaaatagtttttgatgttttgtgatttttaactggtaaatttctactttaggtgggcattttcttccct

SEQ ID NO: 699238 - DNA, 120 bp, Artificial Sequence
  ENSG00000189367_40 (sequence is synthesized)
agaatatgccctttattatgctatcattgctagatttaaagggacttgtaagcatttctggaaatatttgatttaaaaacatatattaatagatgttttccctagcagacttttggagca

SEQ ID NO: 699239 - DNA, 120 bp, Artificial Sequence
  ENSG00000189367_41 (sequence is synthesized)
aaaatattattttagttcagcagaggattactgatattatgggctgatctcagaaaggaataaggatgaggcagagaggagtacttgagtttgtgtgtgtgtgtgtgtgtgtgtgtttgt

SEQ ID NO: 699240 - DNA, 120 bp, Artificial Sequence
  ENSG00000189367_42 (sequence is synthesized)
gtcagtgtcacataagttctccatattgccttatgtcccaaagccaaatataaaaatataaatgatgctttgtataattcattttatcaaaaattacccataactttcatttgtttttat

SEQ ID NO: 699241 - DNA, 120 bp, Artificial Sequence
  ENSG00000189367_43 (sequence is synthesized)
atcgacaatgaagatgatcatatttcattttgcagatgtggccataaaatattatttacttctatataggtgattttaccaggtttagttatcctgagaaaacatctggacttaagagtt

SEQ ID NO: 699242 - DNA, 120 bp, Artificial Sequence
  ENSG00000189367_44 (sequence is synthesized)
tctgcttccctacaaagatctttaaagttatttttaggcacatttgtgacaaacaactacttgatattgaaatctccttcagccattagaagctatcaaataaagtaggtgtaaaaacaa

SEQ ID NO: 699243 - DNA, 120 bp, Artificial Sequence
  ENSG00000189367_45 (sequence is synthesized)
ctgtctgtggcatttgtatacatcgagaacatttttctttccctcattttctgcagtgaactccagtaaagctaagtgtcttatgaaatctaaactcatatatgtacacagttcactcta

SEQ ID NO: 699244 - DNA, 120 bp, Artificial Sequence
  ENSG00000189367_46 (sequence is synthesized)
gcttcttccaaaatatctctaggtagtacaactgaagccaaacctgcctgacttcctgctcctggccacccaaaactccatatggcttctcgtacactgacatcctctctctacccattt

SEQ ID NO: 699245 - DNA, 120 bp, Artificial Sequence
  ENSG00000189367_47 (sequence is synthesized)
aactgctaattgagtctgataaaagtcttctttgaaaaaagtttttacttctaagatttgcatttacatcataaaattaaaccattttcaggaaaatcagatttttttattacagtacta

SEQ ID NO: 699246 - DNA, 120 bp, Artificial Sequence
  ENSG00000189367_48 (sequence is synthesized)
aaaatcagatttttttattacagtactatttgctttaaattcggcatgtttttcttaagtagcaagtacatgtatcggaacttagaactggtgggcgcggtggctcttgcctgtaatccc

SEQ ID NO: 699247 - DNA, 80 bp, Artificial Sequence
  ENSG00000189367_49 (sequence is synthesized)
gaggtcaggagatggagaccatcctggtttcatcacggtgaaacccccggtcacctgtagtcccagctgctcgggaggct

SEQ ID NO: 699248 - DNA, 120 bp, Artificial Sequence
  ENSG00000189367_50 (sequence is synthesized)
agaacttataactatgacttgttcatctcaccctgaaaatatgttcctacaagaaaatgtgctttgcaaagcaaaaaaggcaaaaattggggatgagttcttcagacaagtaccaaaaat

SEQ ID NO: 699249 - DNA, 120 bp, Artificial Sequence
  ENSG00000189367_51 (sequence is synthesized)
gatttctcgtcatttttattgtatgcatattcatcatagaaaataattttttgttttattgggaataaaatcatgatacttaaaatctgatacacatttcaatgatagtattaatccaat

SEQ ID NO: 699250 - DNA, 120 bp, Artificial Sequence
  ENSG00000189367_52 (sequence is synthesized)
aggttaaattaacaaattcttaggaaaaaaatctgtttatatgaagctatggagaaatctagaaagtaggtaacggtttagattttgagggacctatgaactcagaacaagttcatttag

SEQ ID NO: 699251 - DNA, 120 bp, Artificial Sequence
  ENSG00000189367_53 (sequence is synthesized)
aggtgggaaacctgagattcaaagaggtctgcatggctgccaagattgcagggacagaatccaagcctgggctcactcatgatctgctctcctgtataaatgtcccatgtgcatctatga

SEQ ID NO: 699252 - DNA, 120 bp, Artificial Sequence
  ENSG00000189367_54 (sequence is synthesized)
ccttattgtttgcaaagcaaattcatattccacgacttgtctgcttcttacaacaaactacaaggcaggcattgtgatttctaagtaagaaggaaaaattaagtagtcaagataatattt

SEQ ID NO: 699253 - DNA, 120 bp, Artificial Sequence
  ENSG00000189367_55 (sequence is synthesized)
agaataaatatttttgaagatgatagttaaatagatggctcttcagactcctagctcaggctatttttccagccttcttttcccaaggaagagaagacaaaaaaaaaaaaagattgaaca

SEQ ID NO: 699254 - DNA, 120 bp, Artificial Sequence
  ENSG00000189367_56 (sequence is synthesized)
gctctttttcatttttgttttgttcattttatacatgacacaaattgtttatcttgctctcattgggagtttctgttgattccctctttcaatgatcatcaaaagtcatcacccctgact

SEQ ID NO: 699255 - DNA, 120 bp, Artificial Sequence
  ENSG00000189367_57 (sequence is synthesized)
taaatggttttatgaaattcaagaagttgtgaacaaggctttaacaaaatatttccacttttaatgcctatgctctgattttatataaattttgtatgtaggacatgatgttgaagtaaa

SEQ ID NO: 699256 - DNA, 120 bp, Artificial Sequence
  ENSG00000189367_58 (sequence is synthesized)
accaataaatagccaatcagtattcatctctagcgtcaactgaatcctgacctcaatcttcaaaagaatcagaatagtttcacacttcataagttacatatactccagaataaataaaag

SEQ ID NO: 699257 - DNA, 120 bp, Artificial Sequence
  ENSG00000189367_59 (sequence is synthesized)
cagtttgcttgaagtattatcttggctcatttgtgctgctataacaaaacacacttgagactgggttatttataaagaacagaaatttatttctctacagttctggaggctgggaagtcc

SEQ ID NO: 699258 - DNA, 120 bp, Artificial Sequence
  ENSG00000189367_60 (sequence is synthesized)
aagatcaagctgcaagcagattcggtgtctggtgagggctgctgtgtgctttcaaggtggtgccttattgctgtgtctttatatggcagaaggggccaacaatggagaaacagcagaata

SEQ ID NO: 699259 - DNA, 120 bp, Artificial Sequence
  ENSG00000189367_61 (sequence is synthesized)
gcaagaagcagctgaatgctatgtgatgcttcttttataagggccttaaatcccattcatgaaagagaagccttcataatccaatcacctcctaaaggccctacctcttaatattgaaga

SEQ ID NO: 699260 - DNA, 120 bp, Artificial Sequence
  ENSG00000189367_62 (sequence is synthesized)
ttaagtttcaacatgaattttggaggtacgtattcaaaccatagcaagcatacagtaatttccaatataaacctcactcaaaattacagtcacatgctgcacaaaccagttcaatgcaca

SEQ ID NO: 699261 - DNA, 120 bp, Artificial Sequence
  ENSG00000189367_63 (sequence is synthesized)
cacatatatgatgataagattataatacaatatttttgctatactttttctatgtttacatatacagatatcattgtgttacaattgcctttagtattcagtacagtaacatgctgtaca

SEQ ID NO: 699262 - DNA, 120 bp, Artificial Sequence
  ENSG00000189367_64 (sequence is synthesized)
tgtagcctaggagcaatagatcatactttcaagcctaccatctagatttatataattacactctgtgatgttcgctcagtgatgaaatcacctgagaacacgtttctcagatcatatccc

SEQ ID NO: 699263 - DNA, 120 bp, Artificial Sequence
  ENSG00000189367_65 (sequence is synthesized)
tgttgttaagcaatgtgactgcaattgtgctctgctgccagtttatttttgaagctttatttttcaattacttactcatggcaattttataagaatcattaaacaaatttaatccagcta

SEQ ID NO: 699264 - DNA, 120 bp, Artificial Sequence
  ENSG00000189367_66 (sequence is synthesized)
cttaagtagactgttgtcatctcttttcttttgagtccaattttcctatagtttgtttatgtcaatggctcgacaaaatgataaaatatatttccagaaagcacatggatttggaactct

SEQ ID NO: 699265 - DNA, 120 bp, Artificial Sequence
  ENSG00000189367_67 (sequence is synthesized)
tgcggctgttaaacatagagtcatttgctttgatagtcatctgacagtctcttttgaagtttgacaagcttttacatgacccaagcctaaagagaaagccatttctttcctctattcaga

SEQ ID NO: 699266 - DNA, 120 bp, Artificial Sequence
  ENSG00000189367_68 (sequence is synthesized)
agtgaactgaatgagtgtgtgcaggttcaactaagatctcataaagaagtaatctggattctaccttaatacagactaatagatgatcaaagccttgcagttctattatatcacgtaggg

SEQ ID NO: 699267 - DNA, 120 bp, Artificial Sequence
  ENSG00000189367_69 (sequence is synthesized)
tattgtcatatttgttttaatctggatgagaaatattttaaaaatgtgtatcactttgagattttttaaaaatctcagtaatatctagccctcacaatgtaattgaccaaccaaaggaaa

SEQ ID NO: 699268 - DNA, 120 bp, Artificial Sequence
  ENSG00000189367_70 (sequence is synthesized)
catcttttgactgacaagtgactgtttagggaacaagaataagttgacttactatctgagattgtcaagcatttagacagttaaatgttagtgtacaagtaggaccagacatttgaaaac

SEQ ID NO: 699269 - DNA, 120 bp, Artificial Sequence
  ENSG00000189367_71 (sequence is synthesized)
tatgactttaatgttaaattcttgcatctctctgaaagcaattatataatatggccagtaattgattcaggtcattctaattttgtgacagtgtttctgtatttatatacagatacagat

SEQ ID NO: 699270 - DNA, 120 bp, Artificial Sequence
  ENSG00000189367_72 (sequence is synthesized)
ttattttatttttgaatgattgattgctagtcaaaagaattagcatccatgtgttgccctactaaaagtagcctttatgtttcatcaaacttgttccagctaatccatattttagaggca

SEQ ID NO: 699271 - DNA, 120 bp, Artificial Sequence
  ENSG00000189367_73 (sequence is synthesized)
ctatttggaggccgaagcattaatacccaggaagtatattttaatatggcaaagagaactcaaagcggtttgcttagtatcaagaatattagcaaagtgaattaggggaaaagaagtttt

SEQ ID NO: 699272 - DNA, 120 bp, Artificial Sequence
  ENSG00000189369_0 (sequence is synthesized)
atatctgctgctgccgccgcagttgcgaatgcagcatcggcgcttagctgcctccgcggtgcagctaaggttcgtgtcgctaccccttggcccttcgctcttgctgccttaaccccgccg

SEQ ID NO: 699273 - DNA, 120 bp, Artificial Sequence
  ENSG00000189369_1 (sequence is synthesized)
gcggagcccgctcttctggcctgttgagcccgctccctcactgccacacagcaagttccgagaccatggattcgggcagcagcagcagcgactcggcgcccgattgctgggaccaggtgg

SEQ ID NO: 699274 - DNA, 120 bp, Artificial Sequence
  ENSG00000189369_2 (sequence is synthesized)
acatggaatccccggggtcggccccgagcggggatggagtctcctctgcggtggccgaggcccagcgcgagcccctcagctcggctttcagccgtaagctcaacgtcaacgccaagccct

SEQ ID NO: 699275 - DNA, 120 bp, Artificial Sequence
  ENSG00000189369_3 (sequence is synthesized)
tcgtgcctaacgtacacgccgcggagttcgtgccgtccttcctgcggggcccgactcagccgcccaccctcccggccggctccggcagcaacgatgaaacctgcaccggcgcgggatacc

SEQ ID NO: 699276 - DNA, 120 bp, Artificial Sequence
  ENSG00000189369_4 (sequence is synthesized)
ctcaaggtaaaaggatgggacggggggcacctgtggaaccttcccgagaggaaccgttagtgtcgcttgaaggttccaattcagccgttaccatggaactttcagaacctgttgtagaaa

SEQ ID NO: 699277 - DNA, 120 bp, Artificial Sequence
  ENSG00000189369_5 (sequence is synthesized)
atggagaggtggaaatggccctagaagaatcatgggagcacagtaaagaagtaagtgaagccgagcctgggggtggttcctcgggagattcagggcccccagaagaaagtggccaggaaa

SEQ ID NO: 699278 - DNA, 120 bp, Artificial Sequence
  ENSG00000189369_6 (sequence is synthesized)
tgatggaggaaaaagaggaaataagaaaatccaaatctgtgatcgtaccctcaggtgcacctaagaaagaacacgtaaatgtagtattcattggccatgtagacgctggcaagtcaacca

SEQ ID NO: 699279 - DNA, 120 bp, Artificial Sequence
  ENSG00000189369_7 (sequence is synthesized)
tcggaggacagataatgtttttgactggaatggttgacaaaagaacactggagaaatatgaaagagaagctaaggaaaaaaacagagaaacctggtatttgtcctgggccttagatacaa

SEQ ID NO: 699280 - DNA, 120 bp, Artificial Sequence
  ENSG00000189369_8 (sequence is synthesized)
atcaggaggaacgagacaagggtaaaacagtcgaagtgggtcgtgcctattttgaaacagaaaggaaacatttcacaattttagatgcccctggccacaagagttttgtcccaaatatga

SEQ ID NO: 699281 - DNA, 120 bp, Artificial Sequence
  ENSG00000189369_9 (sequence is synthesized)
ttggtggtgcttctcaagctgatttggctgtgctggtcatctctgccaggaaaggagagtttgaaactggatttgaaaaaggtggacagacaagagaacatgcgatgttggcaaaaacgg

SEQ ID NO: 699282 - DNA, 120 bp, Artificial Sequence
  ENSG00000189369_10 (sequence is synthesized)
caggggtaaaacatttaatagtgcttattaataagatggatgatcccacagtaaattggagcatcgagagatatgaagaatgtaaagaaaaactggtgccctttttgaaaaaagtaggct

SEQ ID NO: 699283 - DNA, 120 bp, Artificial Sequence
  ENSG00000189369_11 (sequence is synthesized)
ctgctcaggactgaccggagcaaatattaaagagcagtcagatttctgcccttggtacactggattaccatttattccgtatttggataacttgccaaacttcaacagatcaattgatgg

SEQ ID NO: 699284 - DNA, 120 bp, Artificial Sequence
  ENSG00000189369_12 (sequence is synthesized)
accaataagactgccaattgtggataagtacaaagatatgggcactgtggtcctgggaaagctggaatccgggtccatttttaaaggccagcagctcgtgatgatgccaaacaagcacaa

SEQ ID NO: 699285 - DNA, 120 bp, Artificial Sequence
  ENSG00000189369_13 (sequence is synthesized)
tgtagaagttcttggaatactttctgatgatactgaaactgattttgtagccccaggtgaaaacctcaaaatcagactgaagggaattgaagaagaagagattcttccaggattcatact

SEQ ID NO: 699286 - DNA, 120 bp, Artificial Sequence
  ENSG00000189369_14 (sequence is synthesized)
ttgtgatcctagtaacctctgccattctggacgcacgtttgatgttcagatagtgattattgagcacaaatccatcatctgcccaggttataatgcggtgctgcacattcatacttgtat

SEQ ID NO: 699287 - DNA, 120 bp, Artificial Sequence
  ENSG00000189369_15 (sequence is synthesized)
tgaggaagttgagataacagcgttaatctccttggtagacaaaaaatcaggagaaaaaagtaagacacgaccccgcttcgtgaaacaagatcaagtatgcattgctcgtttaaggacagc

SEQ ID NO: 699288 - DNA, 120 bp, Artificial Sequence
  ENSG00000189369_16 (sequence is synthesized)
aggaaccatctgcctcgagacgttcaaagattttcctcagatgggtcgttttactttaagagatgagggtaagaccattgcaattggaaaagttctgaaattggtcccagagaaggacta

SEQ ID NO: 699289 - DNA, 120 bp, Artificial Sequence
  ENSG00000189369_17 (sequence is synthesized)
agcaattttcttgatgcctctgcaagatactgtgaggagaattgacagcaaaagttcaccacctactcttatttactgcccattgattgacttttcttcatattttgcaaagagaaattt

SEQ ID NO: 699290 - DNA, 120 bp, Artificial Sequence
  ENSG00000189369_18 (sequence is synthesized)
cacagcaaaaattcatgttttgtcagctttctcatgttgagatctgttatgtcactgatgaatttaccctcaagtttccttcctctgtaccactctgcttccttggacaatatcagtaat

SEQ ID NO: 699291 - DNA, 120 bp, Artificial Sequence
  ENSG00000189369_19 (sequence is synthesized)
agctttgtaagtgatgtggacgtaattgcctacagtaatgaaaaattaatgtactttaatttttcattttcttttaggatatttagaccacccttgttccacgcaaaccagagtgtgtca

SEQ ID NO: 699292 - DNA, 120 bp, Artificial Sequence
  ENSG00000189369_20 (sequence is synthesized)
gtgtttgtgtgtgtgttaaaatgataactaacatgtgaataaaatactccatttgaaactcttcggttatttgaaatgcttttgaataatgtttaaatgtcattatgtaatgctattcaa

SEQ ID NO: 699293 - DNA, 120 bp, Artificial Sequence
  ENSG00000189369_21 (sequence is synthesized)
ttagctttattactttctcaaatagttgaatatgttctatcacttaaaaacttaaaaactcttcaccacttactgttttaagtgaggaatttacaaacaatgcataagtgtgtattaaag

SEQ ID NO: 699294 - DNA, 120 bp, Artificial Sequence
  ENSG00000189369_22 (sequence is synthesized)
gaataattttaattttgagaaaaaaacgtatgttaaggctcttcccagtgggctttgttttctctgtccaagtccagtcaataaaggagctcttctgcttccccacttgtgatttgaaaa

SEQ ID NO: 699295 - DNA, 120 bp, Artificial Sequence
  ENSG00000189375_0 (sequence is synthesized)
gaggcagggtctggtcctggaagagccactgggacagagcccctgtgggtggggtggagggtgaaattcttggtccaagtctgtgccctaagcttggtccccacaggaggaggtcactga

SEQ ID NO: 699296 - DNA, 120 bp, Artificial Sequence
  ENSG00000189375_1 (sequence is synthesized)
tggttgctgtgggacccactggacacatggggtccttcatctaggagtggggtggggagccctctgccctcaggcagttgtggaaaatgaaggagccctggagggctgcctggagggtga

SEQ ID NO: 699297 - DNA, 120 bp, Artificial Sequence
  ENSG00000189375_2 (sequence is synthesized)
caatcgtctctcctggtcaaagaggcttggggactggaaccctcctgcagcgtcccattctctctgtctggtcctctagaggccttgccttccgtttgccccgagtattcctggggggga

SEQ ID NO: 699298 - DNA, 120 bp, Artificial Sequence
  ENSG00000189375_3 (sequence is synthesized)
cggttcccccaggtgttctctaggactaaggccccagcgttctcttgttctttcttggtgacccaggaaaacaaagtcccctcctgtattgacagctgggaattgtggtgtccaccgtcc

SEQ ID NO: 699299 - DNA, 120 bp, Artificial Sequence
  ENSG00000189375_4 (sequence is synthesized)
tcgacctgcgacggggtctccatgagcacagaggctgctctggagtcaacagatcatcttttccccaaaccaaactgcttggctggcgttgttcctgaaggggcttcactggccagaaga

SEQ ID NO: 699300 - DNA, 120 bp, Artificial Sequence
  ENSG00000189375_5 (sequence is synthesized)
catccagtccctgactccacctgcctccaggtgcccagaacagcccatcgtggggacttcaccctcagcaagtggacgccgtttgtcctgccagggcaggatggagatggatgaggaccc

SEQ ID NO: 699301 - DNA, 120 bp, Artificial Sequence
  ENSG00000189375_6 (sequence is synthesized)
ggataacctgcctgcccaggggcaaggcaatatcatcattactaagtatgagcagggacaccgagctggggcagcagtggacttggggcatgagcaggttgatgtcagaaaatacaccaa

SEQ ID NO: 699302 - DNA, 120 bp, Artificial Sequence
  ENSG00000189375_7 (sequence is synthesized)
taacctcgggattgtgcatgagatggagctgccccgcgtcagtgccctggaggtgaagcaaagacgcaaggaaagtaaacgtaccaacaagtggcaaaagatgcttgcagactggacaaa

SEQ ID NO: 699303 - DNA, 120 bp, Artificial Sequence
  ENSG00000189375_8 (sequence is synthesized)
atataggagcaccaagaagctgtctcaaagagtatgcaaagtcattcccctggcggtgcggggccgggcgttgtcacttttgctagatattgacaaaatcaagtcccagaacccaggcaa

SEQ ID NO: 699304 - DNA, 120 bp, Artificial Sequence
  ENSG00000189375_9 (sequence is synthesized)
atataaggtcatgaaggagaagggcaagaggtcctccagaatcatccactgcatccagctagatgtcagccacaccctgcagaaacacatgatgttcatacaaagattcggagtcaagca

SEQ ID NO: 699305 - DNA, 120 bp, Artificial Sequence
  ENSG00000189375_10 (sequence is synthesized)
gcaggaattatgtgacatcctcgtggcctattctgcatataaccctgtgagtattcccgggcagcgatattcctggtacctgtgcccatattcacaggcatgggtgtctctcgggggtgt

SEQ ID NO: 699306 - DNA, 120 bp, Artificial Sequence
  ENSG00000189375_11 (sequence is synthesized)
caccaggacgtagtaggcaggacttcagctcgctgctggcagaaaagggttgaagcccagactcctggtctcacatggacccaatcaccacatctcagatgaagaaatgaccttcccctc

SEQ ID NO: 699307 - DNA, 120 bp, Artificial Sequence
  ENSG00000189375_12 (sequence is synthesized)
ctggtgttgccccaaagcctaggagcttggcagggtcccacacaggatggtccttgtaggagacaggtttgacaagttgctgaggtgcctgatgggccaggcacttgtcatgaaatgagt

SEQ ID NO: 699308 - DNA, 120 bp, Artificial Sequence
  ENSG00000189375_13 (sequence is synthesized)
ttgcatcctgggggagcctcttcttcactggaaacctggcaaggatccaatttcccctttgcctgatccccacaggagcatagcagatagggaggggggtcacccaggtggctcttcctg

SEQ ID NO: 699309 - DNA, 120 bp, Artificial Sequence
  ENSG00000189375_14 (sequence is synthesized)
cttggcccccactttccagaccattccaggcagggagagctgctgagctgactgcatgagctgcccacatggaggacccagccaccccttatgttcggcaggcagcccttgggctgttgc

SEQ ID NO: 699310 - DNA, 120 bp, Artificial Sequence
  ENSG00000189375_15 (sequence is synthesized)
aggaccgtggccagttcttggtattgctcaagtcccctgggccttcagactggcgggtgacttcaagggagcaaccatcctgggcctctcctgggacaaacacttgccttcacccactat

SEQ ID NO: 699311 - DNA, 120 bp, Artificial Sequence
  ENSG00000189375_16 (sequence is synthesized)
cgatgtcttgctcagccctcagaggagcgtggttggcgtggattacttcatgccttgattctgccttcccggaaaccacggtggcagcaggcttggatgtcaccaagtcaccgtgtttca

SEQ ID NO: 699312 - DNA, 120 bp, Artificial Sequence
  ENSG00000189375_17 (sequence is synthesized)
tgctatttctggaggttctcgcctttgtggcctcggaaaggaaggcgatctggtgctttggggaaagccctcgggatgctcctccagatggtcttcttcaggccttttgctcagcattgg

SEQ ID NO: 699313 - DNA, 120 bp, Artificial Sequence
  ENSG00000189375_18 (sequence is synthesized)
tctgatcagttctgccagctctgggccatgatctcttggcactggcgcggctttccttcaataattccataaactccagacttcgtgtcttttgcatggaaagcacgcggtgcccatttc

SEQ ID NO: 699314 - DNA, 120 bp, Artificial Sequence
  ENSG00000189375_19 (sequence is synthesized)
atcgacaccgcaccccggagtccaaacgtcagccctgcgggtgttgggtttgttagggacaatttcgggctcaggtgcagggggcgcttccccagcgcgggcgcttcctgggccccatct

SEQ ID NO: 699315 - DNA, 120 bp, Artificial Sequence
  ENSG00000189375_20 (sequence is synthesized)
gaggccgtgggctcctggcaggaggacctggagttttcagatccccgggaaggatgcatttcccccactctcgggcacaagctgccctttgctggcgttgggcacggatcatggcctcgc

SEQ ID NO: 699316 - DNA, 120 bp, Artificial Sequence
  ENSG00000189375_21 (sequence is synthesized)
agaagcccgcgacagcgtggagcaggtggtgcccccgcccgggactcctggtgggtgatggctccgggaggccttggctgggacagagtggggcctccgggtcggtcagcggcccgagcc

SEQ ID NO: 699317 - DNA, 120 bp, Artificial Sequence
  ENSG00000189375_22 (sequence is synthesized)
cggctgcggctctcggaggcttgggtttggaagacaccgcctgccatcccgcggcgcctctcggggtccgctcccccggactggccctgcccaccgcgcgcgagtagtagcgggcggcca

SEQ ID NO: 699318 - DNA, 120 bp, Artificial Sequence
  ENSG00000189375_23 (sequence is synthesized)
actggtgctgagcactcgcccacctgtccgcttgccgtctctatgtctggagctcttagagataagacatagaggtgtctggttctgagaaaaggaagttttgctaagtgagagacacaa

SEQ ID NO: 699319 - DNA, 120 bp, Artificial Sequence
  ENSG00000189375_24 (sequence is synthesized)
gtgttgtgcagcacttgcacataagacgcacacaggtgtctggttctgtggtgcatgaacgacttttctaagcgagagacacagcagcctgagcagactcaggtgagtgacctctgggca

SEQ ID NO: 699320 - DNA, 120 bp, Artificial Sequence
  ENSG00000189375_25 (sequence is synthesized)
gatgccgacgagggtcacccctgagcactcaccgggtacatgttctgcactgacggcgtggaccatcctctcctttgtcctcacagagactctgtggcgatgggtgctgtccccaaatgt

SEQ ID NO: 699321 - DNA, 120 bp, Artificial Sequence
  ENSG00000189375_26 (sequence is synthesized)
tgactcaggggctggaggacaccgactctgggccctcttgacctgggcaatggcccattatgatgggtgccatgacctcaaaatgtcactggtgctgagtgaccgcccacctgcccaccc

SEQ ID NO: 699322 - DNA, 120 bp, Artificial Sequence
  ENSG00000189376_0 (sequence is synthesized)
gcttcctcgttgcccccgccgcgggcgcgagatggattccgggtgctggttgttcggcggcgagttcgaggactcggtgttcgaggagaggccggagcggcggtcaggaccgcccgcgtc

SEQ ID NO: 699323 - DNA, 120 bp, Artificial Sequence
  ENSG00000189376_1 (sequence is synthesized)
ctactgcgccaagctctgcgagccgcagtggttttatgaagaaacagaaagcagtgatgatgttgaagtgctgactctcaagaaattcaaaggagacctggcctacagacgacaagagta

SEQ ID NO: 699324 - DNA, 120 bp, Artificial Sequence
  ENSG00000189376_2 (sequence is synthesized)
tcagaaagcactgcaggagtattccagtatctctgaaaaattgtcatcaaccaattttgccatgaaaagggatgtccaggaaggtcaggctcggtgtctggctcacctgggtaggcatat

SEQ ID NO: 699325 - DNA, 120 bp, Artificial Sequence
  ENSG00000189376_3 (sequence is synthesized)
ggaggcgctggagattgctgcaaacttggaaaataaagcaaccaacacagaccatttaaccacggtactctacctccagcttgctatttgttcaagtttgcagaacttggagaaaacaat

SEQ ID NO: 699326 - DNA, 120 bp, Artificial Sequence
  ENSG00000189376_4 (sequence is synthesized)
tttctgcctgcagaaactgatttctttgcatccttttaatccttggaactggggcaaattggcagaggcttacctgaatctggggccagctctttcagcagcacttgcgtcatctcagaa

SEQ ID NO: 699327 - DNA, 120 bp, Artificial Sequence
  ENSG00000189376_5 (sequence is synthesized)
ctgtggaagcgaatagcagtaatagccagaaaaatgagaaagctctgacaaatatccaaaactgtatggcagaaaagagagaaacagtgttgatagagactcagctgaaagcatgtgcct

SEQ ID NO: 699328 - DNA, 120 bp, Artificial Sequence
  ENSG00000189376_6 (sequence is synthesized)
cttttatacgaaccaggcttctgcttcagtttacccaacctcagcaaacatcgtttgctttggagaggaacttaaggactcagcaggaaattgaagataaaatgaaagggttcagcttca

SEQ ID NO: 699329 - DNA, 120 bp, Artificial Sequence
  ENSG00000189376_7 (sequence is synthesized)
aagaagacactttgctgttgatagctgaggttatgggagaagatatcccagaaaaaataaaagatgaagttcacccagaggtgaagtgtgttggctccgtagccctgactgccttggtga

SEQ ID NO: 699330 - DNA, 120 bp, Artificial Sequence
  ENSG00000189376_8 (sequence is synthesized)
ctgtatcctcagaagaatttgaagacaagtggttcagaaagatcaaagaccatttctgtccatttgaaaatcagttccatacagagatacaaatcttggcttagtgggttataaaaaaca

SEQ ID NO: 699331 - DNA, 120 bp, Artificial Sequence
  ENSG00000189376_9 (sequence is synthesized)
aaaccacaaatatcttgtactgtattaattgtccttgtttacttcagacaggatccattgctaatcatggagtataaatgattatttatgttttataaaactggcttctgtctcaaatga

SEQ ID NO: 699332 - DNA, 88 bp, Artificial Sequence
  ENSG00000189376_10 (sequence is synthesized)
tcgaggagaggccggagcggcggtcaggaccgcccgcgtcctactgcgccaagctctgcgagccgcaggtggagtttgttgtcacccc

SEQ ID NO: 699333 - DNA, 82 bp, Artificial Sequence
  ENSG00000189376_11 (sequence is synthesized)
aaagcgattctcctgcctcagcctcccagctagctgggattacagacgtgtgccaccatgccggctgttgttagccaggctg

SEQ ID NO: 699334 - DNA, 85 bp, Artificial Sequence
  ENSG00000189376_12 (sequence is synthesized)
aagccactgcctttccctacgttatttattcaatagtcaagcaatctcagtctcactttcctttttatccataggatttaaatca

SEQ ID NO: 699335 - DNA, 77 bp, Artificial Sequence
  ENSG00000189376_13 (sequence is synthesized)
gcaggatcacttgtgctcaggagttcaagactaacctggccagactcttgaagaagtctttttttgacgtttaatca

SEQ ID NO: 699336 - DNA, 120 bp, Artificial Sequence
  ENSG00000189376_14 (sequence is synthesized)
ggccagactcttgaagaagtctttttttgacgtttaatcaattatattatgggaaattgcttctgaatatgaggtggaaaagcatagctcactctgtaataggctattttcatgatttca

SEQ ID NO: 699337 - DNA, 120 bp, Artificial Sequence
  ENSG00000189376_15 (sequence is synthesized)
gtgtttataatctgaggctcccaagtttccgttcttttctgcttggctctgtatgatttgtttgttttctgtaactccaacaaaaggatctctttggggtccttgtccttgtaggtttat

SEQ ID NO: 699338 - DNA, 120 bp, Artificial Sequence
  ENSG00000189376_16 (sequence is synthesized)
tcctcaaggttctgaatctcctcattacttaggaccctctagcacagacatttcacagtgccacaggagcaaatcaccccaaaatgtataagaaaaagaactaacaactagatgttagat

SEQ ID NO: 699339 - DNA, 120 bp, Artificial Sequence
  ENSG00000189376_17 (sequence is synthesized)
tgcgttacatatgtatctcatttcatctgcatgagaatcctgtttttattttgctgatgaaaaggttataaagtaagttagtggcaataccagaattcaaagcctagtatatttggtccc

SEQ ID NO: 699340 - DNA, 120 bp, Artificial Sequence
  ENSG00000189377_0 (sequence is synthesized)
atagaccaccaggctgagtatcctgacctgagtcatccccagggatcaggagcctccagcagggaaccttccattatattcttcaagcaacttacagctgcaccgacagttgcgatgaaa

SEQ ID NO: 699341 - DNA, 120 bp, Artificial Sequence
  ENSG00000189377_1 (sequence is synthesized)
gttctaatctcttccctcctcctgttgctgccactaatgctgatgtccatggtctctagcagcctgaatccaggggtcgccagaggccacagggaccgaggccaggcttctaggagatgg

SEQ ID NO: 699342 - DNA, 120 bp, Artificial Sequence
  ENSG00000189377_2 (sequence is synthesized)
ctccaggaaggcggccaagaatgtgagtgcaaagattggttcctgagagccccgagaagaaaattcatgacagtgtctgggctgccaaagaagcagtgcccctgtgatcatttcaagggc

SEQ ID NO: 699343 - DNA, 120 bp, Artificial Sequence
  ENSG00000189377_3 (sequence is synthesized)
aatgtgaagaaaacaagacaccaaaggcaccacagaaagccaaacaagcattccagagcctgccagcaatttctcaaacaatgtcagctaagaagctttgctctgcctttgtaggagctc

SEQ ID NO: 699344 - DNA, 120 bp, Artificial Sequence
  ENSG00000189377_4 (sequence is synthesized)
tgagcgcccactcttccaattaaacattctcagccaagaagacagtgagcacacctaccagacactcttcttctcccacctcactctcccactgtacccacccctaaatcattccagtgc

SEQ ID NO: 699345 - DNA, 120 bp, Artificial Sequence
  ENSG00000189377_5 (sequence is synthesized)
tctcaaaaagcatgtttttcaagatcattttgtttgttgctctctctagtgtcttcttctctcgtcagtcttagcctgtgccctccccttacccaggcttaggcttaattacctgaaaga

SEQ ID NO: 699346 - DNA, 120 bp, Artificial Sequence
  ENSG00000189377_6 (sequence is synthesized)
ttccaggaaactgtagcttcctagctagtgtcatttaaccttaaatgcaatcaggaaagtagcaaacagaagtcaataaatatttttaaatgtcacagatcaaaattgtttccttcaaat

SEQ ID NO: 699347 - DNA, 120 bp, Artificial Sequence
  ENSG00000189377_7 (sequence is synthesized)
ggggtctgccaattcacaaccagatgacccattttaccctattcactgcagactgaatccagattctacacatacttatccccaccaagaccctcactctgtctccattggcctacttgt

SEQ ID NO: 699348 - DNA, 120 bp, Artificial Sequence
  ENSG00000189377_8 (sequence is synthesized)
tcatctttcactcattcgacaaatctttctgaggtaagagcgaggtgggacaaaaaaaaaaaagcataccaatgaaccagacacggtcttattaaagataatataggtttaaaaaaaaaa

SEQ ID NO: 699349 - DNA, 120 bp, Artificial Sequence
  ENSG00000189401_0 (sequence is synthesized)
gaggacttctggtctgttcggtacttgaactgccagcaaatttcaactcccgcttgccattcaacatcatggatgatccgaagagtgaacagcagcgcatactgcgccgccaccaacgcg

SEQ ID NO: 699350 - DNA, 120 bp, Artificial Sequence
  ENSG00000189401_1 (sequence is synthesized)
agaggcaggagctgcaggcccagatccggagcttaaaaaactcggtccccaagaccgacaagacgaaaagaaagcagttgctccaagacgtggcccgcatggaggccgagatggctcaga

SEQ ID NO: 699351 - DNA, 120 bp, Artificial Sequence
  ENSG00000189401_2 (sequence is synthesized)
agcaccggcaggagctggagaagttccaagacgacagtagcattgaatctgtcgtcgaagacctggccaagatgaatctggaaaaccggcctccccgctcctccaaagcccacagaaaga

SEQ ID NO: 699352 - DNA, 120 bp, Artificial Sequence
  ENSG00000189401_3 (sequence is synthesized)
gagaaagaatggagtccgaggagagggagcgccaggagagcatcttccaggctgagatgtcggagcacctggccggcttcaagcgcgaggaggaggagaagctcgccgccatcctgggag

SEQ ID NO: 699353 - DNA, 120 bp, Artificial Sequence
  ENSG00000189401_4 (sequence is synthesized)
ccaggggtctggagatgaaagcgatcccggccgacggccactgcatgtaccgcgccatccaagaccagctggtgttcagcgtgtctgtggagatgctgcgctgccgcaccgccagctaca

SEQ ID NO: 699354 - DNA, 120 bp, Artificial Sequence
  ENSG00000189401_5 (sequence is synthesized)
tgaagaagcacgtcgacgagttcctgcccttcttcagcaaccccgagaccagcgactccttcggctacgacgacttcatgatctactgcgacaacatcgtgcgcaccacggcatggggag

SEQ ID NO: 699355 - DNA, 120 bp, Artificial Sequence
  ENSG00000189401_6 (sequence is synthesized)
gccagctggagctgagggccctgtcgcacgtcctgaagacccccatcgaggtgatccaggccgactcgcccaccttgatcatcggggaggagtacgtcaagaagccgatcatcctggtct

SEQ ID NO: 699356 - DNA, 120 bp, Artificial Sequence
  ENSG00000189401_7 (sequence is synthesized)
gacaccgctcgaggccggcgccgccgggggcgtgctcccgcgtctcctgtaggccccaaggcgctgagcagccccgggaaactgtcgccgtcgccgcatctcctcagtaggctcagttta

SEQ ID NO: 699357 - DNA, 120 bp, Artificial Sequence
  ENSG00000189401_8 (sequence is synthesized)
ttttccccttttgcttttctctgtttttcttttccttccttttaatcaaaactacccgcccccgccccgcccccgctttcctaaccttgctgctttcacagggtgggaaacgaaattcga

SEQ ID NO: 699358 - DNA, 120 bp, Artificial Sequence
  ENSG00000189401_9 (sequence is synthesized)
gggaaattccccggaaatatgagggaaatctctgcattgcaccaccagaggggcataaatttgaaagttctaacctcttcttgcccttaagggtcttttacctccctcaccaactaagat

SEQ ID NO: 699359 - DNA, 75 bp, Artificial Sequence
  ENSG00000189401_10 (sequence is synthesized)
ttgcccttaagggtcttttacctccctcaccaactaagatttggtcatgttgcgtataacttcaccacaaaaatg

SEQ ID NO: 699360 - DNA, 120 bp, Artificial Sequence
  ENSG00000189401_11 (sequence is synthesized)
gagccgagatcgtgcctttgcactccagcgtggaagacagtgagactccgtctcaaaaaaatgaaaaattagccaggcaggttggcgggggcctgtaatcctagctacttggggtgctga

SEQ ID NO: 699361 - DNA, 120 bp, Artificial Sequence
  ENSG00000189401_12 (sequence is synthesized)
aatcctagctacttggggtgctgaggcaggagaatcaactgaacccgggaggcggaggctgcagtgggccgggatcgtactactgcactccagcatggaagacagcgagactccgtctcc

SEQ ID NO: 699362 - DNA, 120 bp, Artificial Sequence
  ENSG00000189403_0 (sequence is synthesized)
atctcagggccaaaccgataggaaacgaggctgcctcgcggtggcaccgccaccccccaaccgggttccgagcaccggagctggctgctgctccctctttggagcaaagttttatgcaaa

SEQ ID NO: 699363 - DNA, 120 bp, Artificial Sequence
  ENSG00000189403_1 (sequence is synthesized)
gagggtgttttttgaaactttcggtgcacgaaaaataactaaacatgggcaaaggagatcctaagaagccgagaggcaaaatgtcatcatatgcattttttgtgcaaacttgtcgggagg

SEQ ID NO: 699364 - DNA, 120 bp, Artificial Sequence
  ENSG00000189403_2 (sequence is synthesized)
agcataagaagaagcacccagatgcttcagtcaacttctcagagttttctaagaagtgctcagagaggtggaagaccatgtctgctaaagagaaaggaaaatttgaagatatggcaaaag

SEQ ID NO: 699365 - DNA, 120 bp, Artificial Sequence
  ENSG00000189403_3 (sequence is synthesized)
cggacaaggcccgttatgaaagagaaatgaaaacctatatccctcccaaaggggagacaaaaaagaagttcaaggatcccaatgcacccaagaggcctccttcggccttcttcctcttct

SEQ ID NO: 699366 - DNA, 120 bp, Artificial Sequence
  ENSG00000189403_4 (sequence is synthesized)
gctctgagtatcgcccaaaaatcaaaggagaacatcctggcctgtccattggtgatgttgcgaagaaactgggagagatgtggaataacactgctgcagatgacaagcagccttatgaaa

SEQ ID NO: 699367 - DNA, 120 bp, Artificial Sequence
  ENSG00000189403_5 (sequence is synthesized)
agaaggctgcgaagctgaaggaaaaatatgaaaaggatattgctgcatatcgagctaaaggaaagcctgatgcagcaaaaaagggagttgtcaaggctgaaaaaagcaagaaaaagaagg

SEQ ID NO: 699368 - DNA, 120 bp, Artificial Sequence
  ENSG00000189403_6 (sequence is synthesized)
aagaggaggaagatgaggaagatgaagaggatgaggaggaggaggaagatgaagaagatgaagatgaagaagaagatgatgatgatgaataagttggttctagcgcagttttttttttct

SEQ ID NO: 699369 - DNA, 120 bp, Artificial Sequence
  ENSG00000189403_7 (sequence is synthesized)
tgtctataaagcatttaacccccctgtacacaactcactccttttaaagaaaaaaattgaaatgtaaggctgtgtaagatttgtttttaaactgtacagtgtctttttttgtatagttaa

SEQ ID NO: 699370 - DNA, 120 bp, Artificial Sequence
  ENSG00000189403_8 (sequence is synthesized)
cacactaccgaatgtgtctttagatagccctgtcctggtggtattttcaatagccactaaccttgcctggtacagtatgggggttgtaaattggcatggaaatttaaagcaggttcttgt

SEQ ID NO: 699371 - DNA, 120 bp, Artificial Sequence
  ENSG00000189403_9 (sequence is synthesized)
ttttttcatcttcagttgtctctgatgcagcttatacgaaataattgttgttctgttaactgaataccactctgtaattgcaaaaaaaaaaaaaaagttgcagctgttttgttgacattc

SEQ ID NO: 699372 - DNA, 120 bp, Artificial Sequence
  ENSG00000189403_10 (sequence is synthesized)
tgaatgcttctaagtaaatacaattttttttattagtattgttgtccttttcataggtctgaaatttttcttcttgaggggaagctagtcttttgcttttgcccattttgaatcacatga

SEQ ID NO: 699373 - DNA, 120 bp, Artificial Sequence
  ENSG00000189403_11 (sequence is synthesized)
attattacagtgtttatcctttcatatagttagctaataaaaagcttttgtctacacaccctgcatatcataatgggggtaaagttaagttgagatagttttcatccataactgaacatc

SEQ ID NO: 699374 - DNA, 120 bp, Artificial Sequence
  ENSG00000189403_12 (sequence is synthesized)
caaaatcttgatcagttaagaaatttcacatagcccacttacatttacaaactgaagagtaatcaatctactcaaagcatgggattattagaatcaaacattttgaaagtctgtccttga

SEQ ID NO: 699375 - DNA, 120 bp, Artificial Sequence
  ENSG00000189403_13 (sequence is synthesized)
aggactaatagaaaagtatgttctaacctttacatgaggactctattctttaactcccattaccatgtaatggcagttatattttgcagttcccacattaaagaagacctgagaatgtat

SEQ ID NO: 699376 - DNA, 120 bp, Artificial Sequence
  ENSG00000189403_14 (sequence is synthesized)
ccccaaaagcgtgagcttaaaatacaagactgccatattaaattttttgttgacattagtctcagtgaagactatgaaaatgctggctatagatgtcttttcccatttatctaaatatgg

SEQ ID NO: 699377 - DNA, 120 bp, Artificial Sequence
  ENSG00000189403_15 (sequence is synthesized)
actgctcaggaaacgagactttccattacaagtatttttaattaattgggccagcttttcaaacaaagatgccacattcaaaatagggtatattttcctatattacggtttgccccttta

SEQ ID NO: 699378 - DNA, 120 bp, Artificial Sequence
  ENSG00000189403_16 (sequence is synthesized)
taaatccaagtagataggaagaaagaagacaaactttgcatctcagtatgaattattcaatttatttgaatgatttttctttacaaaacaaactcattcattagtcatgtttatctgctt

SEQ ID NO: 699379 - DNA, 120 bp, Artificial Sequence
  ENSG00000189403_17 (sequence is synthesized)
aggagtttagggaacaatttggcaattttgtggttttcgagattatcgttttcttaaagtgccagtattttaaaatagcgttcttgtaattttacacgcttttgtgatggagtgctgttt

SEQ ID NO: 699380 - DNA, 120 bp, Artificial Sequence
  ENSG00000189403_18 (sequence is synthesized)
tgttatataatttagacttggattctttccatttgcatttgtttatgtaatttcaggaggaatactgaacatctgagtcctggatgatactaataaactaataattgcagaggttttaaa

SEQ ID NO: 699381 - DNA, 120 bp, Artificial Sequence
  ENSG00000189403_19 (sequence is synthesized)
aatgttacagagcggagagagtgaggaggctgcgtctggctcccgctctcacagccattgcagtacattgagctccatagagacagcaccggggcaagtgagagccggacgggcactggg

SEQ ID NO: 699382 - DNA, 120 bp, Artificial Sequence
  ENSG00000189403_20 (sequence is synthesized)
taaataagtataagggatggcaaagtttttccctttaaaaatactcactttatgcttataaataggttaatgggctgataaaaggttttgtcaaacattgcaagtattcggtgctatata

SEQ ID NO: 699383 - DNA, 120 bp, Artificial Sequence
  ENSG00000189403_21 (sequence is synthesized)
taaaggaggaaaaactagttttactttcagaatgatttaaacaagatttttaaaaacaagatacatgcaagcgaacagcagggttagtgataggctgcaattgtgtcgaacatcagattt

SEQ ID NO: 699384 - DNA, 120 bp, Artificial Sequence
  ENSG00000189403_22 (sequence is synthesized)
gaaatcaccattaatcaccaacattaataattctgatccatttaaaatgaattctggctcaaggagaatttgtaactttagtaggtacgtcatgacaactaccatttttttaagatgttg

SEQ ID NO: 699385 - DNA, 120 bp, Artificial Sequence
  ENSG00000189403_23 (sequence is synthesized)
agaatgggaacagtttttttagggtttattcttgaccacagatcttaagaaaatggacaaaacccctcttcaatctgaagattagtatggtttggtgttctaacagtatcccctagaagt

SEQ ID NO: 699386 - DNA, 120 bp, Artificial Sequence
  ENSG00000189403_24 (sequence is synthesized)
tggatgtctaaaactcaagtaaatggaagtgggaggcaatttagataagtgtaaagccttgtaactgaagatgattttttttagaaagtgtatagaaactattttaatgccaagatagtt

SEQ ID NO: 699387 - DNA, 120 bp, Artificial Sequence
  ENSG00000189403_25 (sequence is synthesized)
acagtgctgtggggtttaaagactttgttgacatcaagaaaagactaaatctataattaattgggccaacttttaaaatgaagatgctttttaaaactaatgaactaagatgtataaatc

SEQ ID NO: 699388 - DNA, 120 bp, Artificial Sequence
  ENSG00000189403_26 (sequence is synthesized)
ttagtttttttgtattttaaagataggcatatggcatattgattaacgagtcaaatttcctaactttgctgtgcaaaggttgagagctattgctgattagttaccacagttctgatgatc

SEQ ID NO: 699389 - DNA, 120 bp, Artificial Sequence
  ENSG00000189403_27 (sequence is synthesized)
gtcccatcacagtgttgttaatgtttgctgtatttattaattttcttaaagtgaaatctgaaaaatgaaatttgtgtgtcctgtgtacccgaggggtaatgattaaatgataaagataag

SEQ ID NO: 699390 - DNA, 120 bp, Artificial Sequence
  ENSG00000189403_28 (sequence is synthesized)
aaaagcgcccatgtaacacaaactgccattcaacaggtatttcccttactacctaaggaattgtaaccattgctcagacattgtaggatttaactatgttgaaaactacaggagaggccg

SEQ ID NO: 699391 - DNA, 120 bp, Artificial Sequence
  ENSG00000189403_29 (sequence is synthesized)
tccatctcaaaaaaaaaaaaaaaacacaggagagacaactggtttttgaatgaaatacatgggtactgccttgcttgacatcacatagtccttgatgaaagttcacatttaggtctgctt

SEQ ID NO: 699392 - DNA, 120 bp, Artificial Sequence
  ENSG00000189403_30 (sequence is synthesized)
tgatgaaagttcacatttaggtctgcttggtacaatacgcctcctaaaaaggtccttgatgaaagttcacatttaggtctgcttggtacaacacgcctcctgaaagggtctgatagcttt

SEQ ID NO: 699393 - DNA, 120 bp, Artificial Sequence
  ENSG00000189403_31 (sequence is synthesized)
cagtagcagtaagacacttgcatgtgatggtaaggtatctgcaaatttgcacacaccgtacacagcttaagtcttagaattaacttgctaaaatgtgagcctttggtaattaggctgttt

SEQ ID NO: 699394 - DNA, 120 bp, Artificial Sequence
  ENSG00000189403_32 (sequence is synthesized)
tattagggagtgtgataatatttgaatttcttttcatatttgtgctttgtgtcattttcaaatgacccttgaaatgtattttaaaagtagataaaagccagaaagtgatttgattgtcta

SEQ ID NO: 699395 - DNA, 120 bp, Artificial Sequence
  ENSG00000189403_33 (sequence is synthesized)
tccagcaaaagatggtggttcattttcttgtcctcttaataccaaggcagtgctaataacacttgccacaacttgggaaattccatgggtctatgccacattgctcccagagtaatgagg

SEQ ID NO: 699396 - DNA, 120 bp, Artificial Sequence
  ENSG00000189403_34 (sequence is synthesized)
caaaatagtgctctgttatagaattgcttgtttcacgatacatcatgacagataaccatacaacatggaatgacacaaacataatatgccacactccagaatatgtaatgctcgtcttcc

SEQ ID NO: 699397 - DNA, 120 bp, Artificial Sequence
  ENSG00000189403_35 (sequence is synthesized)
aggggggttcagtctaaggtaatctctaccaggaagaaatgctagatgactttagacatgtgcattggtttggaccttctaattagtggaatttttacttattttgacatgagagattac

SEQ ID NO: 699398 - DNA, 120 bp, Artificial Sequence
  ENSG00000189403_36 (sequence is synthesized)
atagaatctctatgttgcccaggttggtctccaaatctgctcaaacaatcctcccgcctcagtttctcaagtagctgggattacagggacacaccactgtgcttagcttaaatagttgaa

SEQ ID NO: 699399 - DNA, 120 bp, Artificial Sequence
  ENSG00000189403_37 (sequence is synthesized)
tttattgggcatccactgaaaagaaggaagtaggaataaaatctgcaatagtatgactaaacctgtaagtgagcatgagcagtggtgggcaagggtatgcagactctggaatccagaaat

SEQ ID NO: 699400 - DNA, 63 bp, Artificial Sequence
  ENSG00000189403_38 (sequence is synthesized)
cactagcctgggcaacatagtgaggccttgtctactagaaataaataattttgcagatatact

SEQ ID NO: 699401 - DNA, 120 bp, Artificial Sequence
  ENSG00000189403_39 (sequence is synthesized)
ggccttgtctactagaaataaataattttgcagatatactaaataccattttaaaaataagtggaaaagggattagagagatccttgtaaattatgtactcatattcattgttctcttta

SEQ ID NO: 699402 - DNA, 120 bp, Artificial Sequence
  ENSG00000189403_40 (sequence is synthesized)
gtcacataattcagtcatgtacgtgacattccacagtatggtgctccataatacatattttttcttttttcgatctcacttgtatatgatccataatatttttcatcattcccttactga

SEQ ID NO: 699403 - DNA, 120 bp, Artificial Sequence
  ENSG00000189403_41 (sequence is synthesized)
tggacatttagattgtttcctattttttgctgtttaacagtactgcgctgaacatctgtacatttctctcaggcatgtgtgggtcttcagatacctcaaaagtagaactgctgagtcaaa

SEQ ID NO: 699404 - DNA, 120 bp, Artificial Sequence
  ENSG00000189403_42 (sequence is synthesized)
agacatttgcatttaacattttggaagatgttgataaattgcaccccaccaccccccccccccgcccacaaaagctgttatttatgctgtgaaacattttaacaatgattttgcaattaa

SEQ ID NO: 699405 - DNA, 80 bp, Artificial Sequence
  ENSG00000189403_43 (sequence is synthesized)
gcggccgggcggcggggggagcggcgccgctgcgctcgctggaacatggctgactcgggcccggcgctgctggctggaga

SEQ ID NO: 699406 - DNA, 120 bp, Artificial Sequence
  ENSG00000189403_44 (sequence is synthesized)
tttctgcggagggattacgctgacgaaagagacctgcttgcgcgtcgctgttccgtggtccgcgcgagcgtggtcgggagccgctggttcctggggtgacccgcggaggtgggagaggga

SEQ ID NO: 699407 - DNA, 120 bp, Artificial Sequence
  ENSG00000189403_45 (sequence is synthesized)
agggcttccgaagccggcgggggtgccatggaccctctccgccggcgcggccttcacagctgggccgcgccgggcatccgtagtccgctctcccaaagcctcggtggagctgaagctgcc

SEQ ID NO: 699408 - DNA, 120 bp, Artificial Sequence
  ENSG00000189403_46 (sequence is synthesized)
acagagtgcatgttcacaaagggtcatcacacacggagctgcccctccctgtctccctagagcccatcttcgaggccaggggcttttctaccaggattctggggtgtttctcctcctttc

SEQ ID NO: 699409 - DNA, 120 bp, Artificial Sequence
  ENSG00000189403_47 (sequence is synthesized)
ctccctcccagatcttctcacggtaaggggagcagcgaaagcgcagggactttgcattccacgacccgttctgactagtcaacagccgatctgtccctgctgctctaattccagctgccc

SEQ ID NO: 699410 - DNA, 120 bp, Artificial Sequence
  ENSG00000189403_48 (sequence is synthesized)
tgccttgttttaacttcagagaaagggggagttctcatttgataagtttaagcctttgctttcgtaggaaggtcatgtggcttaagggacatcgtgaccgcgtatgctatttctgcctgt

SEQ ID NO: 699411 - DNA, 120 bp, Artificial Sequence
  ENSG00000189403_49 (sequence is synthesized)
gcattctaaatcttgggggcagcatattccagaagtccttttggtcgattggttctgtgtcctaggataacaatttgtagtttctgaccatttctttacagaaaaaccacaattggtatt

SEQ ID NO: 699412 - DNA, 120 bp, Artificial Sequence
  ENSG00000189403_50 (sequence is synthesized)
ttggactgcggggttttttagtggtctcaaactaaatgattatattctggaataatgctgacaatttggatagggtggtgtggaggaaacaagtctcgtgtagaagaaattatttagtaa

SEQ ID NO: 699413 - DNA, 120 bp, Artificial Sequence
  ENSG00000189403_51 (sequence is synthesized)
ggttccgagcaccggagctggctgctgctccctctttggagcaaagttttatgcaaagagggtgttttttgaaactttcggtgcacggtgattttttttttttaaggtcccataattagg

SEQ ID NO: 699414 - DNA, 120 bp, Artificial Sequence
  ENSG00000189403_52 (sequence is synthesized)
aagagtcgactcgcttaggcccttgtttattccctatctagtgcaaagccacgaattggcagcatgttttctgacctttggtttggttggtttaaaatggtgttctagattttaaaatcg

SEQ ID NO: 699415 - DNA, 120 bp, Artificial Sequence
  ENSG00000189403_53 (sequence is synthesized)
tttaagtgaccagttagatactcattcagagcagactcgggcggatagatagggaatactgtatgggtatatctttgtgtctagactttttgagatcgccctgaaggactgtttttgttt

SEQ ID NO: 699416 - DNA, 120 bp, Artificial Sequence
  ENSG00000189403_54 (sequence is synthesized)
tgttttgtttgcttggcatagccccttcaaggaatttaatctctcggccatattcttgtctgattttacggaggttgatgtcgctactgtgttaaataaccagtactttggttttcattc

SEQ ID NO: 699417 - DNA, 120 bp, Artificial Sequence
  ENSG00000189403_55 (sequence is synthesized)
ttcataaagttctgccatgttctatttctttccttaatgtttttttcttccctactgttttatcctccctttgctttggaaggatattgctgcatatcgagctaaaggaaagcctgatgc

SEQ ID NO: 699418 - DNA, 120 bp, Artificial Sequence
  ENSG00000189403_56 (sequence is synthesized)
agtgctcagagaggtggaaggtaagagggcttaaaacatgctaacaaggtaattaaaagacagtttccaattgaggatgcaaaaaaaagcctagttggcattctcgtagtgggacgctat

SEQ ID NO: 699419 - DNA, 120 bp, Artificial Sequence
  ENSG00000189403_57 (sequence is synthesized)
tacatagcaaaagacattggttttgaggataatttacttaaatgttacaacttaaacttacaaataattattttgtagaccatgtctgctaaagagaaaggaaaatttgaagatatggca

SEQ ID NO: 699420 - DNA, 120 bp, Artificial Sequence
  ENSG00000189403_58 (sequence is synthesized)
gtaataagtttttagggtaacagctacattaagtatggtgttgatataagtcctcatccttcaaagaatgcagaggaccaaataaattagggtttttttgactaaaatgtaatcagactc

SEQ ID NO: 699421 - DNA, 120 bp, Artificial Sequence
  ENSG00000189409_0 (sequence is synthesized)
cttgctgccccatgcagccctgagccccacagcaagtctgccatgggccgcggggcccgtgtcccctcggaggccccgggggcaggcgtcgagcgccgctggcttggagccgcgctggtc

SEQ ID NO: 699422 - DNA, 80 bp, Artificial Sequence
  ENSG00000189409_1 (sequence is synthesized)
gtgctgctggcccggctgggggccccggcggtgccggcctggagcgcagcgcagggagacgtcgctgcgctgggcctctc

SEQ ID NO: 699423 - DNA, 120 bp, Artificial Sequence
  ENSG00000189409_2 (sequence is synthesized)
cacccgggtcccgggcccactggccccccgcagacgccgctacacgctgactccagccaggctgcgctgggaccacttcaacctcacctacaggatcctctccttcccgcggaacctgct

SEQ ID NO: 699424 - DNA, 120 bp, Artificial Sequence
  ENSG00000189409_3 (sequence is synthesized)
gagcccgcgggagacgcggcgggccctagctgccgccttccgcatgtggagcgacgtgtcccccttcagcttccgcgaggtggcccccgagcagcccagcgacctccggataggcttcta

SEQ ID NO: 699425 - DNA, 120 bp, Artificial Sequence
  ENSG00000189409_4 (sequence is synthesized)
cccgatcaaccacacggactgcctggtctccgcgctgcaccactgcttcgacggccccacgggggagctggcccacgccttcttccccccgcacggcggcatccacttcgacgacagcga

SEQ ID NO: 699426 - DNA, 120 bp, Artificial Sequence
  ENSG00000189409_5 (sequence is synthesized)
gctcacggacctggtgcacgtggcggcccacgagatcggccacgcgctgggcctgatgcactcacaacacggccgggcgctcatgcacctgaacgccacgctgcgcggctggaaggcgtt

SEQ ID NO: 699427 - DNA, 120 bp, Artificial Sequence
  ENSG00000189409_6 (sequence is synthesized)
gtcccaggacgagctgtgggggctgcaccggctctacggatgcctcgacaggctgttcgtgtgcgcgtcctgggcgcggaggggcttctgcgacgctcgccggcggctcatgaagaggct

SEQ ID NO: 699428 - DNA, 120 bp, Artificial Sequence
  ENSG00000189409_7 (sequence is synthesized)
ctgccccagcagctgcgacttctgctacgaattccccttccccacggtggccaccaccccaccgccccccaggaccaaaaccaggctggtgcccgagggcaggaacgtgaccttccgctg

SEQ ID NO: 699429 - DNA, 120 bp, Artificial Sequence
  ENSG00000189409_8 (sequence is synthesized)
cggccagaagatcctccacaagaaagggaaagtgtactggtacaaggaccaggagcccctggagttctcctaccccggctacctggccctgggcgaggcgcacctgagcatcatcgccaa

SEQ ID NO: 699430 - DNA, 120 bp, Artificial Sequence
  ENSG00000189409_9 (sequence is synthesized)
cgccgtcaatgagggcacctacacctgcgtggtgcgccgccagcagcgcgtgctgaccacctactcctggcgagtccgtgtgcggggctgagcccggctgataaagcactttctctctga

SEQ ID NO: 699431 - DNA, 120 bp, Artificial Sequence
  ENSG00000189409_10 (sequence is synthesized)
cacagcggacaacagagcccggtggtctgcgactcccctcccacacatggtcccgggtcactcaaaggacgacacggggagctttcctcgaagaatattttaatacattttaaaactcaa

SEQ ID NO: 699432 - DNA, 120 bp, Artificial Sequence
  ENSG00000189409_11 (sequence is synthesized)
gctgttcgtgtgcgcgtcctgggcgcggaggggcttctgcgacgctcgccggcggctcatgaagaggctctgccccagcagctgcgacttctgctacggtgatgcccacggggccgggac

SEQ ID NO: 699433 - DNA, 120 bp, Artificial Sequence
  ENSG00000189409_12 (sequence is synthesized)
gggtcctgggccccacgcgctacagctggaagaaaggtgaccgtccaggctggcctcctggaggcctctcctctgcagcacagtgggctgccgcggtcgggctttggggcagacggcagg

SEQ ID NO: 699434 - DNA, 120 bp, Artificial Sequence
  ENSG00000189409_13 (sequence is synthesized)
tttcccatccccctgcgcctctggagcgggagctggagctgcattcctgggggccgagctcaccgcctgggcccagaacattcttatctttccgtggctgcggccgagggcggctccgcg

SEQ ID NO: 699435 - DNA, 120 bp, Artificial Sequence
  ENSG00000189409_14 (sequence is synthesized)
tgggggctgcaccggctctacggtgagtccctttgtcgggcgggagggcggggaccgggcggtcctgagccaggccgtgctccccacgctcccgataggatgcctcgacaggctgttcgt

SEQ ID NO: 699436 - DNA, 120 bp, Artificial Sequence
  ENSG00000189410_0 (sequence is synthesized)
agttcccggctgagaacgtcccggcaggaagaaagtgaggaggaggatgcgcaacgaccctccactcacaagggccgggcccgaaccaccctgagcgcctcctccgagccaggctcgatc

SEQ ID NO: 699437 - DNA, 120 bp, Artificial Sequence
  ENSG00000189410_1 (sequence is synthesized)
cttcacactgggaacggagacactccggtccagtgtcacttgtcctcgagtaagaggagagggatgacaggcgagcaacggagtcacaagggctctgcagagaatgaagcgtgagtggtg

SEQ ID NO: 699438 - DNA, 120 bp, Artificial Sequence
  ENSG00000189410_2 (sequence is synthesized)
gtcgtggaaggcttcccggaggaggcggtgcggtagccgcggctcggatgacgcggaggagccagccagagaggggaggggcagaggccctccaggaggagggacccgtgagtgaggcgc

SEQ ID NO: 699439 - DNA, 120 bp, Artificial Sequence
  ENSG00000189410_3 (sequence is synthesized)
gattcagcgcccccagcccgggaggaggtgccttctgagctccgggcgagcccctcccgcccttccaggcggagcgccgggcgtgggcagtgccagggcccctcgcggccgctgattggg

SEQ ID NO: 699440 - DNA, 120 bp, Artificial Sequence
  ENSG00000189410_4 (sequence is synthesized)
tgattgggtggtgcggccgagcggagcggctccgcgggcgccgattgcctcccctcccgtggagctggaagccaggcaccctgggggccatgcagaaggcgggggctgggggccgcaggg

SEQ ID NO: 699441 - DNA, 120 bp, Artificial Sequence
  ENSG00000189410_5 (sequence is synthesized)
tgactgcgggctggcccctcaccggcccaggtgcatcaccaagtttgcccagtacgtgggctccttccctgtggatgacctggacacccaggagagcgtgtggctggtgcagcagcagct

SEQ ID NO: 699442 - DNA, 120 bp, Artificial Sequence
  ENSG00000189410_6 (sequence is synthesized)
gtgggcgctgaaggactgtccccgacgccgggccgtcatcctgaaattcagccttcagggtctcaagatctacagcggggagggtgaggtgctgctgatggctcatgccctgaggcgcat

SEQ ID NO: 699443 - DNA, 120 bp, Artificial Sequence
  ENSG00000189410_7 (sequence is synthesized)
actctactccacctggtgccctgccgactgccagtttgccttcatggctcgaaacccacggagcccagccagcaagctcttctgccacctctttgtgggcagccagccaggagaggtcca

SEQ ID NO: 699444 - DNA, 120 bp, Artificial Sequence
  ENSG00000189410_8 (sequence is synthesized)
gatcctgcacctgctgctgtgccgctctttccagctggcttacctcttgcagcaccctgaggagcgggcacagccagagccctgcccagggcccacaggggaggtgcccctgaagccact

SEQ ID NO: 699445 - DNA, 120 bp, Artificial Sequence
  ENSG00000189410_9 (sequence is synthesized)
gtccagctctgggggcctggtgcgggagcccttcggccgtgatcagctctctcagaacgtccatgccctggtctcctttcggcggctgccagcagaggggctggtgggcagtgggaagga

SEQ ID NO: 699446 - DNA, 120 bp, Artificial Sequence
  ENSG00000189410_10 (sequence is synthesized)
gctgccagagtcggaaggccgtgcccgccatgcccgcctggggaatccctactgctcgcccacgctggtgcgcaagaaggccattcgcagcaaggtgatccgctcgggggcctaccgcgg

SEQ ID NO: 699447 - DNA, 120 bp, Artificial Sequence
  ENSG00000189410_11 (sequence is synthesized)
ctgcacctatgagacccagctgcagctgtcggctcgggaggcctttcctgccgcatgggaggcatggccccggggtcctggtggccactcgtgcctggtggagagcgagggcagcctgac

SEQ ID NO: 699448 - DNA, 120 bp, Artificial Sequence
  ENSG00000189410_12 (sequence is synthesized)
ggagaacatctgggccttcgctggcatctccaggccctgtgccctggccctgttgcggagagacgtgctgggggccttcctgctgtggcctgagctgggtgctagcggccagtggtgtct

SEQ ID NO: 699449 - DNA, 120 bp, Artificial Sequence
  ENSG00000189410_13 (sequence is synthesized)
gtccgtgcgcacgcagtgcggcgtggtgccccaccaggtcttccggaaccacctgggccgctactgcttggagcacctgccggcagagttccccagcctggaggctctggtggagaacca

SEQ ID NO: 699450 - DNA, 120 bp, Artificial Sequence
  ENSG00000189410_14 (sequence is synthesized)
cgcggttactgaacgtagcctcttctgtcccctcgacatgggccgcctgaaccccacctacgaggagcaggactgtgggcccccaggcaggccgccccggactctccggcccctcagcca

SEQ ID NO: 699451 - DNA, 120 bp, Artificial Sequence
  ENSG00000189410_15 (sequence is synthesized)
tgccaagtccgaggcagagctgcagggcctgggctaagaggtagggccccggtcccacaggccccgcctcaccccggctcctgggccccagcagcatctctgcccgtcctgcacccctct

SEQ ID NO: 699452 - DNA, 120 bp, Artificial Sequence
  ENSG00000189410_16 (sequence is synthesized)
ccgtgggaggggagccctgagggtgggtatcgccaatggcttcttggagaacatgtggcctgctgagattccaggagggcaggtggagttgcaggcttcggataaccctttgggtggctt

SEQ ID NO: 699453 - DNA, 120 bp, Artificial Sequence
  ENSG00000189410_17 (sequence is synthesized)
cggatgacctgctgtgtggcttcggatgctttgggacttctgggcttctgctttactcctggggcaggagcttgttcacggcaaagctgcagccctctcctaaggaggctaggccttggg

SEQ ID NO: 699454 - DNA, 120 bp, Artificial Sequence
  ENSG00000189410_18 (sequence is synthesized)
gcgctgactgggagtctccagaaagagggttttggggaggcaggagtgagcttttactctgggcaaagacctggagtgagccaccctgtctatgagagcagagatgactccatggagctt

SEQ ID NO: 699455 - DNA, 120 bp, Artificial Sequence
  ENSG00000189410_19 (sequence is synthesized)
gtgggcaggaggctggggatgagccccatctaggctgacagagcagggctgtttctcatatgtatctgagagtgaaggaggggtgggaaggtgcagagagggcaggagggacagagggct

SEQ ID NO: 699456 - DNA, 120 bp, Artificial Sequence
  ENSG00000189410_20 (sequence is synthesized)
gtacctaacgctcacgcacggtggactcctgtgtgcagaaagggatgcgcaccagcagacagggccaagaatctccatgctgtctccactcaaaacctcagggctgtgactcccgctttc

SEQ ID NO: 699457 - DNA, 120 bp, Artificial Sequence
  ENSG00000189410_21 (sequence is synthesized)
tcagaagggatgcgcaggctcaccccttccccctaggaatcaccagggcacccccacccccagctcatctcctttagccatttgacagggaggggccagcagtgagctgcaggcttagag

SEQ ID NO: 699458 - DNA, 120 bp, Artificial Sequence
  ENSG00000189410_22 (sequence is synthesized)
gggtgaccagggcccttcctaactcgaccgcatgtggtttggtggctgccttgggagggaggctgtccgatgctgacattccccttagcatggccctgaccgtggctgtcaggggccacc

SEQ ID NO: 699459 - DNA, 120 bp, Artificial Sequence
  ENSG00000189410_23 (sequence is synthesized)
ttgcctcaccaggccagccccactgggaatggggtcagtcacagcagaaccgtcgaaaggtggacctgatgtgggccctgccgggggcgcttggcctcagcgggccatgggagacccagg

SEQ ID NO: 699460 - DNA, 120 bp, Artificial Sequence
  ENSG00000189410_24 (sequence is synthesized)
gaaacgactctagtgtgaggcagtggtcctgccagtgactgacaaaccctctttgtaagcaaacttgacaaataatgaatctactgaactctgttatagaacaagttcattttgcatgaa

SEQ ID NO: 699461 - DNA, 120 bp, Artificial Sequence
  ENSG00000189410_25 (sequence is synthesized)
cttctcttattgaagcagaagccacgtcatgagcctgggggctgccctctccccgtctgggagtgggacagaactgttcagtgccttgaaagtcacagatttctgactcctggaaggaac

SEQ ID NO: 699462 - DNA, 120 bp, Artificial Sequence
  ENSG00000189410_26 (sequence is synthesized)
tgggcagtcccaccagagcagaaagaaaggaggcaaacttggggagtgagaagccagcctcccagaggcccaggcctcgtgttccccacctccaaccctcccgtgaggagaggggcttgg

SEQ ID NO: 699463 - DNA, 120 bp, Artificial Sequence
  ENSG00000189410_27 (sequence is synthesized)
cctgggaccttgtaacttccttgcaagttaagtgagctatcctgtcacaaaagatagaaggaactgccctttgggacttcttttcactggaaacccagcactggttttatgttgagtgag

SEQ ID NO: 699464 - DNA, 120 bp, Artificial Sequence
  ENSG00000189410_28 (sequence is synthesized)
tgggaagctgggactctgttttacagccatctgtactggagcctggacaaaccactggtctctatgggaggccccagcctcacatttccctggcaaggagagagaggtttagccatgtcc

SEQ ID NO: 699465 - DNA, 120 bp, Artificial Sequence
  ENSG00000189410_29 (sequence is synthesized)
tgggtctaggattacagcccagagatgggcacttaagaagacctggtcattggtccagacttgggccaaggctctcctctgtgagggatgggttttactggtgaattacctgtgtggaga

SEQ ID NO: 699466 - DNA, 120 bp, Artificial Sequence
  ENSG00000189410_30 (sequence is synthesized)
agctatcagggccatgtttagcacactgaagggaccagtctccaccaagcactttaacatccctccagccagcatagattgatctcgtgttacagagagggcaaggtttttggcccctgt

SEQ ID NO: 699467 - DNA, 120 bp, Artificial Sequence
  ENSG00000189410_31 (sequence is synthesized)
ttgcagactccatgtcttaatcagagaccacagttttctctttgttccaatctgcgccacctcggtagccccactttccttgctgtgtggacttgaaacaaaataaaatgtgttgcttca

SEQ ID NO: 699468 - DNA, 120 bp, Artificial Sequence
  ENSG00000189410_32 (sequence is synthesized)
ctcctcgtggactggcagggacccccaccaaactccaagagtggacaccctacttatctgtgggaggggagtccgagcagaaaggcaccgccatggcctgaggaaacagctccagagaca

SEQ ID NO: 699469 - DNA, 120 bp, Artificial Sequence
  ENSG00000189410_33 (sequence is synthesized)
tggatttgcttccctgctctcccactgaagctgtgtgactatggggccacctggaaaacctcagaggacagctccagcctcattccaagtgtgtccccttcggaaggtgctggcccagcc

SEQ ID NO: 699470 - DNA, 120 bp, Artificial Sequence
  ENSG00000189410_34 (sequence is synthesized)
tcactttaccccccatgccgcctccaccaccccagctgggtgcccccagagggcgggcaccttcgtccaccggcggcggggcctgacacacagtcagcctcggaaacattccaagaagga

SEQ ID NO: 699471 - DNA, 120 bp, Artificial Sequence
  ENSG00000189420_0 (sequence is synthesized)
gatggcagccattctcctgaccacgagacccaaggtgccagtatcttttgaggatgtgtccgtgtacttcacaaagacagaatggaagcttctggacctcagacaaaaggtcctctacaa

SEQ ID NO: 699472 - DNA, 120 bp, Artificial Sequence
  ENSG00000189420_1 (sequence is synthesized)
gcgggtgatgctggagaactatagccatttggtgtcactgggattttccttctccaagcctcacctgatctcccaattggaacgaggggaaggaccctgggtagcagacatccccagaac

SEQ ID NO: 699473 - DNA, 120 bp, Artificial Sequence
  ENSG00000189420_2 (sequence is synthesized)
ctgggccaccgcaggattgcacataggtgacagaacacagagcaagacgtcgacttcaacgcagaagcattctggacgacaactccccggggccgatccacaaggtggcaaggaggggca

SEQ ID NO: 699474 - DNA, 120 bp, Artificial Sequence
  ENSG00000189420_3 (sequence is synthesized)
ggcggcgaggtcgtctgtgctccagagaggtgcccagggcttggggcagagttcggctgcggggccgcagggccccaaaggcgcggagaagcggtacctgtgccagcagtgtgggaaggc

SEQ ID NO: 699475 - DNA, 120 bp, Artificial Sequence
  ENSG00000189420_4 (sequence is synthesized)
cttcagccgcagctccaacctcatcaagcaccgcatcatccacagtggcgagaagccttacgcgtgccccgagtgcggcaagctgtttcgccgcagcttcgcgctcctggagcaccagcg

SEQ ID NO: 699476 - DNA, 120 bp, Artificial Sequence
  ENSG00000189420_5 (sequence is synthesized)
catccacagcggcgagaagccctacgcctgccccgagtgcagcaagaccttcacgcgcagctccaacctcatcaagcaccaggtcatccacagcggcgagcggcccttcgcctgcggcga

SEQ ID NO: 699477 - DNA, 120 bp, Artificial Sequence
  ENSG00000189420_6 (sequence is synthesized)
ctgcggcaaactgttccgccgcagcttcgcgctcctggagcacgcgcgcgtgcacagcggcgagcggccctacgcgtgcccagagtgcggcaaggccttcagccgcagctccaacctcat

SEQ ID NO: 699478 - DNA, 120 bp, Artificial Sequence
  ENSG00000189420_7 (sequence is synthesized)
cgagcaccagcgcacgcaccgcggcgagaagccctacgcctgcggccagtgcgccaaggccttcaagggcgtctcgcagctcatccaccaccagcgcagccacagcggcgagcggccctt

SEQ ID NO: 699479 - DNA, 120 bp, Artificial Sequence
  ENSG00000189420_8 (sequence is synthesized)
cgcgtgccgcgagtgcggcaaggccttccgtggccgttcgggcctcagccagcaccggcgcgtgcacagcggtgagaagccctacgagtgcagcgactgcggcaaggccttcggccggcg

SEQ ID NO: 699480 - DNA, 120 bp, Artificial Sequence
  ENSG00000189420_9 (sequence is synthesized)
cgccaacctattcaagcaccaggcagtgcacggcgccaggcgccctgcgaaggcggagacggcgcggaggctagcgggccctgggagcaccggccctgggagcgcggtggcggccaccag

SEQ ID NO: 699481 - DNA, 120 bp, Artificial Sequence
  ENSG00000189420_10 (sequence is synthesized)
gagcacagccgccaggccttccaggcccagccgccgctgactccccgccagcgcacccagggcgcggccggtctgcgtggggggccttcctggggacgtcgaggctcagcccccttcagg

SEQ ID NO: 699482 - DNA, 120 bp, Artificial Sequence
  ENSG00000189420_11 (sequence is synthesized)
gcccccttcaggtgggaagaccgccctcccagggcctcgattgcggccacagccctgacctctttggccatcagaagaccccaggcagagcctcaccctgaggctgagaaacgcaggaag

SEQ ID NO: 699483 - DNA, 120 bp, Artificial Sequence
  ENSG00000189420_12 (sequence is synthesized)
gactcagaaccgaggactgccgcctgccctggctcctccatcaacggcagtgcgggctgggaatggaggccctctactccctcctgagtcctgggccttgcaactgaggcacatagatgg

SEQ ID NO: 699484 - DNA, 120 bp, Artificial Sequence
  ENSG00000189420_13 (sequence is synthesized)
cacctgggccactcgtccctgagccacaggtactatcgagtgtgcacaggcgtgcgtggaggggatgcgtgaaccatccctcggatttgcatcagaatcgcctgctgcgggtagggagga

SEQ ID NO: 699485 - DNA, 120 bp, Artificial Sequence
  ENSG00000189420_14 (sequence is synthesized)
ggccacgtgaggccagtgaggccagccagcgcggggcacgctggctttgagttacagaagagtggtgcatttcctccctgggggtcgttcccctcgccctaagagttgttagtgttccca

SEQ ID NO: 699486 - DNA, 120 bp, Artificial Sequence
  ENSG00000189420_15 (sequence is synthesized)
agtagaagatactgaaagcactttaatcctttaagcgcttatattgcaggtgggggaggcgctaaagttagcacagaggcaagaggctccctgaatgttggcataggatggggggctgtg

SEQ ID NO: 699487 - DNA, 120 bp, Artificial Sequence
  ENSG00000189420_16 (sequence is synthesized)
ccagaaaactcccgccttgtctgggtggccccagctgcttctgggaggaggagcagcgcccaggccccatcatccctgagcaccagtggttctgggaatggctagcccaggccctgcaga

SEQ ID NO: 699488 - DNA, 120 bp, Artificial Sequence
  ENSG00000189420_17 (sequence is synthesized)
gaggataagacccttcaagtcactcacaattggacatttgtagctagccaccctccaggctttgctttcccccctgcccgcccactgccttctgctccccagaccccaccagcaaaggcc

SEQ ID NO: 699489 - DNA, 120 bp, Artificial Sequence
  ENSG00000189420_18 (sequence is synthesized)
accctggcctctctgtcccctgtccccctgccccgccccaccaccagtgcctaaagcttcgcacttacctgctcctccccatcaggcagcctctcttgcggctggtgacgattaggagga

SEQ ID NO: 699490 - DNA, 120 bp, Artificial Sequence
  ENSG00000189420_19 (sequence is synthesized)
aagccagacgggttaggaatttgcacttaggcaacagagcaagcccaggaacgaatctttcatcgaatgtcttttgcgtgacattttgtagaatactggacgttccgttgctttgattgt

SEQ ID NO: 699491 - DNA, 120 bp, Artificial Sequence
  ENSG00000189420_20 (sequence is synthesized)
ttttgtattcaggggtaatgtatattgaaaatagagattttgccatatcagagtatcagggattcactccctaaataagagtccccccagccctctgagaagacctcaggcaggagaaag

SEQ ID NO: 699492 - DNA, 120 bp, Artificial Sequence
  ENSG00000189420_21 (sequence is synthesized)
ggggccaccccaggcctgcccccagatgagtgtggtggcaagcctggcccctcttctccctacaacgatgcagtccacccctcttccccttagccctgcagaaacagggcagactcttca

SEQ ID NO: 699493 - DNA, 120 bp, Artificial Sequence
  ENSG00000189420_22 (sequence is synthesized)
aatggcactttactgaaagccaaggggaattctcaaggaaaagtctcagggctggcagaggcagctgctggcaggccttatcctagttccccagcgctgtccccagagctgggctcagga

SEQ ID NO: 699494 - DNA, 120 bp, Artificial Sequence
  ENSG00000189420_23 (sequence is synthesized)
gctctgccccttggtgctctcagcccagcgtcctggtcagcggccacctccttccagccctgtcccctcccaggggagagggggtttttcatccacaaggcctgagggcaggtgggtggt

SEQ ID NO: 699495 - DNA, 120 bp, Artificial Sequence
  ENSG00000189420_24 (sequence is synthesized)
aggcgtggtggaggggggaggttcaaagacagctggctcctatcaggagagtgtgggaagacccaaacatacaggattccctcggagaatgctgcttggagtgccagtcactaggacaac

SEQ ID NO: 699496 - DNA, 120 bp, Artificial Sequence
  ENSG00000189420_25 (sequence is synthesized)
tataccgtagcctccttcagtgtgtccctattccccatcctgtgattgcgttcttgtctgcaagctggtctcataagcccacaagtgtgtgtcatgcctgtccccatgtccttgatgcca

SEQ ID NO: 699497 - DNA, 120 bp, Artificial Sequence
  ENSG00000189420_26 (sequence is synthesized)
agcccggtgctggtaatcagtaagcatgagtgaaataggtcttgcagtcctagcacctcagactcaggcttgggaccattgtcggctccagccttgccttgaggcaatccgaagcatcta

SEQ ID NO: 699498 - DNA, 120 bp, Artificial Sequence
  ENSG00000189420_27 (sequence is synthesized)
cgactttgggttttccagaaaaagaagtattaggaatggtgtatttgaagtccctgatgaggccattgggaagtctgggtttttctgctgtgcagacagtctttgcaagggctggcatgg

SEQ ID NO: 699499 - DNA, 120 bp, Artificial Sequence
  ENSG00000189420_28 (sequence is synthesized)
gcccagaaatgcaatcctcgtgcagagtaggtgcctgtggcaggaggccatgcaattgggctctagtcttgcttcattcaactgaaccaggaaagaaacagatccacgcactctgatacc

SEQ ID NO: 699500 - DNA, 120 bp, Artificial Sequence
  ENSG00000189420_29 (sequence is synthesized)
catttccgttgttctaggaggtaaatgatttcgttcctacaagccagacagtagccagctttcactaaagaagaatcgactccttagtatcttgtcatgccattggttctgatgcataag

SEQ ID NO: 699501 - DNA, 120 bp, Artificial Sequence
  ENSG00000189420_30 (sequence is synthesized)
tgaaccctgtttttaacggaagctccttttttttcacctcaggacctacccaagactgtctagatactggcaggacaaggtacaggagttttcagcagaaagtggagttgccaggagaga

SEQ ID NO: 699502 - DNA, 120 bp, Artificial Sequence
  ENSG00000189420_31 (sequence is synthesized)
tgctgggcacttgcactgtgactttggagtgccgggaaaagttccagggtccccagtgcttacttagataaatggcatttaaaatagtgcagccttttatcattgcttagtctaatttag

SEQ ID NO: 699503 - DNA, 120 bp, Artificial Sequence
  ENSG00000189420_32 (sequence is synthesized)
ctccccataatgacattctcactgcaaggtggtcattgctatcattttcttttgggtgtggcagttaggtatgccacgtgagctgaacgggtttcacatggaatcaaagtcagaatgttc

SEQ ID NO: 699504 - DNA, 120 bp, Artificial Sequence
  ENSG00000189420_33 (sequence is synthesized)
gaaaaggacatttgtgtttttccttcaatggtgccttgaaattgggctccctccctcttgctgtgtggggaactgggagggtatagcccaagcttgctttgtgatggacagctagaatgt

SEQ ID NO: 699505 - DNA, 120 bp, Artificial Sequence
  ENSG00000189420_34 (sequence is synthesized)
aaaagcttaaactatggggaaagtcttgcctgttttccaaggcttcctccaccctgccaccgaagaacttacctggatgccaacctgggacccctttgtctttgggcttttgccctttga

SEQ ID NO: 699506 - DNA, 120 bp, Artificial Sequence
  ENSG00000189420_35 (sequence is synthesized)
aactgtgaatgcttcaagagccacataaatgctctggcagtgtctccatgtaactagtaaattgtcctggctggattcgttgtgaaatggaactgtcccatttactttggttgcaaataa

SEQ ID NO: 699507 - DNA, 120 bp, Artificial Sequence
  ENSG00000189420_36 (sequence is synthesized)
ggaagatgtatgagtattggcctggaaatgagccctctagtgtagagaggttattctgagggtttaaactacatggataggccttgggttcaaggttacaggaaaggctgtaagcctgag

SEQ ID NO: 699508 - DNA, 120 bp, Artificial Sequence
  ENSG00000189420_37 (sequence is synthesized)
attgtggggaatggccagagctgggctttgggtgttccttgtgggggtccctgtgaaggtaagacagaaaggcattctgggtgagctgcctcgggtcagcccaggggtgcaggctcctct

SEQ ID NO: 699509 - DNA, 120 bp, Artificial Sequence
  ENSG00000189420_38 (sequence is synthesized)
gactgggaccacaggcagccacccgaggccactcagatgccgtgactctgagaccagagggaagggaggctgggcctggtcccctgtgttcctcagcaaagtgccacatcagtctcctga

SEQ ID NO: 699510 - DNA, 120 bp, Artificial Sequence
  ENSG00000189420_39 (sequence is synthesized)
gaacacagctgtgtgttctttccagtcgcttctgttcccagacttcaggcaacatggcagctcccatacttgccagggtagttggaagggcagctctggagacaggaagtggaggtagaa

SEQ ID NO: 699511 - DNA, 120 bp, Artificial Sequence
  ENSG00000189420_40 (sequence is synthesized)
gcaaaggaagggagtccttggctgggaagtgcttgggttcggacagacagggaagaagggaaagtatgaggtgtgttcagggaagcttagaagggcagagaggtttcagtaggacatgta

SEQ ID NO: 699512 - DNA, 120 bp, Artificial Sequence
  ENSG00000189420_41 (sequence is synthesized)
tgggctaaagggtcagttagaaccagagtatggagagtctgggatgccatatacaaaagtttgggctctaacagtctcctgatgaggagcaattttccaaaacatgaaagaattattcta

SEQ ID NO: 699513 - DNA, 120 bp, Artificial Sequence
  ENSG00000189420_42 (sequence is synthesized)
agaatgacaaagggaagttaatataaattatgactaccacagggtttgaatttacacactgaccaccacaaattttataactgtagtcgtctcgatggttgtgatgcccatgaggtgttg

SEQ ID NO: 699514 - DNA, 120 bp, Artificial Sequence
  ENSG00000189420_43 (sequence is synthesized)
ggctgggggcatgatgacgctgaggcaacatgagaggggacgtctttgacaccagggccccagccacgtgtctcaggggctcccacttgccatgggactcgcagctggttccatccgatg

SEQ ID NO: 699515 - DNA, 120 bp, Artificial Sequence
  ENSG00000189420_44 (sequence is synthesized)
ccagccccagtgcatctatcactgtcttcacaaaacgggggtcctccaggagttctggacagctgctctgcagattcttatatacctttaatcgaaggccttggacttttgagaggagcg

SEQ ID NO: 699516 - DNA, 120 bp, Artificial Sequence
  ENSG00000189420_45 (sequence is synthesized)
cagtgccctccttttgtgttcaggaaggccaaattagagccttctccaccgccggggaatattcatgtgggaaatggaggcctgctgcagacctgaaggtcaatgattgtttaatctttc

SEQ ID NO: 699517 - DNA, 120 bp, Artificial Sequence
  ENSG00000189420_46 (sequence is synthesized)
tttgacagcattatgaaggtataatgggcatacaagaaactgcacgtctttaaagtgtacagttggagggtttttggcatgtgtggacacccatgaaacctcccccataatcaagacagt

SEQ ID NO: 699518 - DNA, 120 bp, Artificial Sequence
  ENSG00000189420_47 (sequence is synthesized)
gaattgatccgccactcccaaaagtggccttgcgcctccagcaacccctctttcctgctcctcactgtcccccatccccaccgccactgcttggcttgctgtcactatagattaattccc

SEQ ID NO: 699519 - DNA, 120 bp, Artificial Sequence
  ENSG00000189420_48 (sequence is synthesized)
attttctagaattccatagaaatggactcatacagtgtatgtctggcctctttcactcagcacaattcttttttcatcaggtgtttttgtgcatatcagtactccatttttttttattgt

SEQ ID NO: 699520 - DNA, 120 bp, Artificial Sequence
  ENSG00000189420_49 (sequence is synthesized)
tggtaggatcccattgtatgggtggaccacaatacctgttgaatacctgttgatggacatttgggttgttaccaggttttggccatgacaaataaagctgctgtgaacatttgtgtacca

SEQ ID NO: 699521 - DNA, 120 bp, Artificial Sequence
  ENSG00000189430_0 (sequence is synthesized)
agtccccactgctcagcactaggccggcagaatctgagcgatgtcttccacactccctgccctgctctgcgtcgggctgtgtctgagtcagaggatcagcgcccagcagcagactctccc

SEQ ID NO: 699522 - DNA, 120 bp, Artificial Sequence
  ENSG00000189430_1 (sequence is synthesized)
aaaaccgttcatctgggccgagccccatttcatggttccaaaggaaaagcaagtgaccatctgttgccagggaaattatggggctgttgaataccagctgcactttgaaggaagcctttt

SEQ ID NO: 699523 - DNA, 120 bp, Artificial Sequence
  ENSG00000189430_2 (sequence is synthesized)
tgccgtggacagaccaaaaccccctgagcggattaacaaagtccaattctacatcccggacatgaactcccgcatggcagggcaatacagctgcatctatcgggttggggagctctggtc

SEQ ID NO: 699524 - DNA, 120 bp, Artificial Sequence
  ENSG00000189430_3 (sequence is synthesized)
agagcccagcaacttgctggatctggtggtaacagaaatgtatgacacacccaccctctcggttcatcctggacccgaagtgatctcgggagagaaggtgaccttctactgccgtctaga

SEQ ID NO: 699525 - DNA, 120 bp, Artificial Sequence
  ENSG00000189430_4 (sequence is synthesized)
cggagttccccctgggccctgtgaccacagcccacagagggacataccgatgttttggctcctataacaaccatgcctggtctttccccagtgagccagtgaagctcctggtcacaggcg

SEQ ID NO: 699526 - DNA, 120 bp, Artificial Sequence
  ENSG00000189430_5 (sequence is synthesized)
acattgagaacaccagccttgcacctgaagaccccacctttcctgcagacacttggggcacctaccttttaaccacagagacgggactccagaaagaccatgccctctgggatcacactg

SEQ ID NO: 699527 - DNA, 120 bp, Artificial Sequence
  ENSG00000189430_6 (sequence is synthesized)
cccagaatctccttcggatgggcctggcctttctagtcctggtggctctagtgtggttcctggttgaagactggctcagcaggaagaggactagagagcgagccagcagagcttccactt

SEQ ID NO: 699528 - DNA, 120 bp, Artificial Sequence
  ENSG00000189430_7 (sequence is synthesized)
gggaaggcaggagaaggctgaacacacagactctttgaagaatgaccatgagacacagtggccatgggtggatctgaaagctggtgttgagcctgggcggcgtgagctctgtgttggacc

SEQ ID NO: 699529 - DNA, 120 bp, Artificial Sequence
  ENSG00000189430_8 (sequence is synthesized)
cacggaggagggagtcactgcagggaaagagggacactggcattccatttgtcagagcatcccggacgatgcagagggtgggagaactacatgctaaatttctttttttttttttttgag

SEQ ID NO: 699530 - DNA, 78 bp, Artificial Sequence
  ENSG00000189430_9 (sequence is synthesized)
acataggctcagtcttttcagtatctgctttactggttcagtaaaagccaggaaacacaactttgtggtaatctgaat

SEQ ID NO: 699531 - DNA, 120 bp, Artificial Sequence
  ENSG00000189430_10 (sequence is synthesized)
cagtaaaagccaggaaacacaactttgtggtaatctgaatgttattgaactgtattttgttcactttattgtaaatactagtgaacagtgaataaatggttgtatattcctaataagaaa

SEQ ID NO: 699532 - DNA, 120 bp, Artificial Sequence
  ENSG00000189430_11 (sequence is synthesized)
aaaaaaaaaaaagacccaaagtacagcgagctgatgccgatctcatttcgcagaggtccgcctgctctcccctctccaagagtgtaatcctatgcttaataaacttatgccgctttgcta

SEQ ID NO: 699533 - DNA, 120 bp, Artificial Sequence
  ENSG00000189430_12 (sequence is synthesized)
actgctcagcactaggccggcagaatctgagcgatgtcttccacactccctgccctgctctgcgtcgggctgtgtctgagtcagaggatcagcgcccagcagcgtgagtccttccttcaa

SEQ ID NO: 699534 - DNA, 120 bp, Artificial Sequence
  ENSG00000189430_13 (sequence is synthesized)
agcccagggtcactcttccggattcaggccaagctccttccacccaagcacggctggggtgaggggacagggtgctggcttcccaggagagcttggggccagcagctgggtggagcctaa

SEQ ID NO: 699535 - DNA, 120 bp, Artificial Sequence
  ENSG00000189430_14 (sequence is synthesized)
actgctcagcactaggccggcagaatctgagcgatgtcttccacactccctgccctgctctgcgtcggtgagttctggcgtggaaggggaatgggatcacggtgtgcctgggaggcaaca

SEQ ID NO: 699536 - DNA, 120 bp, Artificial Sequence
  ENSG00000189431_0 (sequence is synthesized)
agagccagagcggcgggagccggtcctgggcgcgttgccccgggagcgcccgtcgtccgggcagagcgcagccgcaaccgcgaccacagccgcagtcgctttccagcctgccttcggtgc

SEQ ID NO: 699537 - DNA, 120 bp, Artificial Sequence
  ENSG00000189431_1 (sequence is synthesized)
gcagcgggggaacagggctagtgcagccgccggaggggggcacgggctcctctcccatcccagagctactgggctgcccttgctgtcctcgccgccccagcagaccccggccggacctgc

SEQ ID NO: 699538 - DNA, 120 bp, Artificial Sequence
  ENSG00000189431_2 (sequence is synthesized)
cacctgcgccctggttgcgccatggatccttcggaaaagaagatatcggtgtggatctgccaggaagagaagctggtgtccggcctctcccgccgcaccacttgctccgacgttgtgcga

SEQ ID NO: 699539 - DNA, 120 bp, Artificial Sequence
  ENSG00000189431_3 (sequence is synthesized)
gtgcttttggaggacggctgccggcggcgacggagacagcggcggagccggcggctggggtcggccggcgacccgcatggcccgggagagctgcccgaacccccgaacgaggacgacgag

SEQ ID NO: 699540 - DNA, 120 bp, Artificial Sequence
  ENSG00000189431_4 (sequence is synthesized)
gacgacgacgaggcgctgccgcagggcatgctgtgcgggcccccgcagtgctattgcatcgtggagaagtggcgcggctttgagcgcatcctccccaacaagacgcgcatcttgcgcctc

SEQ ID NO: 699541 - DNA, 120 bp, Artificial Sequence
  ENSG00000189431_5 (sequence is synthesized)
tgggctgcctggggcgaagagcaagagaatgtgcgcttcgtgctagtgcgcagcgaggcatcgctgcctaacgccggcccccgcagcgccgaggcgcgcgtagtgctgagccgagagcgc

SEQ ID NO: 699542 - DNA, 120 bp, Artificial Sequence
  ENSG00000189431_6 (sequence is synthesized)
ccctgtccggcccgcggggccccggcgcggcccagcctggccatgacccaggagaaacagcggcgagtggtgcgcaaggcctttcgcaaactggccaagctcaaccggcggcgccagcag

SEQ ID NO: 699543 - DNA, 120 bp, Artificial Sequence
  ENSG00000189431_7 (sequence is synthesized)
cagacaccgtcgtcctgttcgtccacttcgtcgtccactgcctcgtcctgctcttcgtcgccgcggacccacgagagcgcgtcggtggagcgcatggagacgctggtgcatctggtgctt

SEQ ID NO: 699544 - DNA, 120 bp, Artificial Sequence
  ENSG00000189431_8 (sequence is synthesized)
tcccaggaccacacaattcgccagcaggtgcagcggctccacgagctggaccgcgagatcgatcactacgaggccaaggtgcacctggaccgcatgcggcgtcacggggtcaactacgtg

SEQ ID NO: 699545 - DNA, 120 bp, Artificial Sequence
  ENSG00000189431_9 (sequence is synthesized)
caggacacttacttggttggggcaggcatcgagctcgacgggtccagaccgggagaggagccagaagaggtggcggcggaggcggaggaggcggcggcggcgccccctctagccggcgag

SEQ ID NO: 699546 - DNA, 120 bp, Artificial Sequence
  ENSG00000189431_10 (sequence is synthesized)
gcgcaggcggcggcgctggaggagctggcccggcgctgcgacgacttgctgcggcttcaggagcaacgggttcagcaggaggagttgctggagcgcctttcagccgagattcaggaggaa

SEQ ID NO: 699547 - DNA, 120 bp, Artificial Sequence
  ENSG00000189431_11 (sequence is synthesized)
gcgggaggagcccctggagcccgacggtggccccgacggcgagctgctgctggagcaggaacgggtcaggacgcagctcagtaccagcctttacattgggctgcggctcaacacggacct

SEQ ID NO: 699548 - DNA, 120 bp, Artificial Sequence
  ENSG00000189431_12 (sequence is synthesized)
agaggccgtcaagtcggacttggattacagccagcagcaatgggacagcaagaagcgcgagctacagggccttctgcaaactttgcacactttggagctgacggtggcaccggatggggc

SEQ ID NO: 699549 - DNA, 120 bp, Artificial Sequence
  ENSG00000189431_13 (sequence is synthesized)
tcctggctctggcagtccctcgcgggaacctgggcctcaagcctgcgccgacatgtgggtggaccaggcccgtggactggccaagagcggtcctggcaacgacgaagactcggatacggg

SEQ ID NO: 699550 - DNA, 120 bp, Artificial Sequence
  ENSG00000189431_14 (sequence is synthesized)
ggtcctggcaacgacgaagactcggatacgggactgagctctatgcatagccaagactcggactccttgcccatgtgcgaatcccttgtgtaggggtggggggcggggggcggggggcgg

SEQ ID NO: 699551 - DNA, 120 bp, Artificial Sequence
  ENSG00000189431_15 (sequence is synthesized)
agtgggccagccggctcgcggacttgaaaccaggctgttgcgagcccagagctccggctgggcagcagcgctctgcgcagcctcgcgctcatctggctccggggtgagtgcagagcaggg

SEQ ID NO: 699552 - DNA, 120 bp, Artificial Sequence
  ENSG00000189431_16 (sequence is synthesized)
tgagggtagaagaagtaggatcctcaatacaagctcattaaagagagggaaggagggaggaggcaagaaccccctatactggaaaacaaacaacccaaggaaattgacgtggtccgagcc

SEQ ID NO: 699553 - DNA, 120 bp, Artificial Sequence
  ENSG00000189431_17 (sequence is synthesized)
cattttcaaagtaaggaagtataatggagatttcgctactcttctgtatgggaaggactgatggcagctagaactttagtttgtggtatgaagtgctttaaaagaaacacttggatgaaa

SEQ ID NO: 699554 - DNA, 120 bp, Artificial Sequence
  ENSG00000189431_18 (sequence is synthesized)
aggaaattccttgaatgttaattgtgactgtaaacgtgttaaaactagccaaagaggacgcactggtgtcggtctctgcctttcttacctctttgataaaacccataggcaccaaaatcc

SEQ ID NO: 699555 - DNA, 120 bp, Artificial Sequence
  ENSG00000189431_19 (sequence is synthesized)
tggctgtttacatttctgcagatttgggaattacccatctgctaaatcatttgtcttttattttctttcaaaggctaaactgtatcgaagtctaaccctgtatttcctcctagtaaacac

SEQ ID NO: 699556 - DNA, 120 bp, Artificial Sequence
  ENSG00000189431_20 (sequence is synthesized)
aatagatgttaaaagggaattcttttcccaaaataaccttttattattacaaaagccaaacataatcatttgagatataaaatcctggcaaacataatcgtggttaaaatttaatctggg

SEQ ID NO: 699557 - DNA, 120 bp, Artificial Sequence
  ENSG00000189431_21 (sequence is synthesized)
ccctttgggatctgtcccttcaaaggcaggtgagttgccctttaattcgtattgccacttcattgactcaatcactgttatttcagaaaaaaataaaaggaagtagcagaattcaagtta

SEQ ID NO: 699558 - DNA, 120 bp, Artificial Sequence
  ENSG00000189431_22 (sequence is synthesized)
cgcaaaacaaaacttgctgtctaacaagcactctttgaaagcaaagatgttttagtgttcagcttttaaattgagctatgtgattaaaaccaaccatgaccttaacggattttacccaaa

SEQ ID NO: 699559 - DNA, 120 bp, Artificial Sequence
  ENSG00000189433_0 (sequence is synthesized)
caaacagacaagcccaaggacaaggaagcagctactggacccaagaaggaataaggtagaccctgattttggaacctgaagaccaaagtgcaagattagctctgctacttccatctgtgg

SEQ ID NO: 699560 - DNA, 120 bp, Artificial Sequence
  ENSG00000189433_1 (sequence is synthesized)
accattgggcaggtatctctgggccttcacttactctttgtgaaatgaggacaggggcaatccctaccctaccaagtcattgggagtgaagacatgatgacacggtgattgtgaaaagat

SEQ ID NO: 699561 - DNA, 120 bp, Artificial Sequence
  ENSG00000189433_2 (sequence is synthesized)
tttgtcaatcgcaccagcattaagggtgcccatctccaggttcccccaggcctcaaggctcccaaggcctgagtgggcaggtagcacccaggtatagaccttccacgtgcagcacccagg

SEQ ID NO: 699562 - DNA, 120 bp, Artificial Sequence
  ENSG00000189433_3 (sequence is synthesized)
acacagccagcatgaactgggcatttctgcagggcctgctgagtggcgtgaacaagtactccacagtgctgagccgcatctggctgtctgtggtgttcatctttcgtgtgctggtgtacg

SEQ ID NO: 699563 - DNA, 120 bp, Artificial Sequence
  ENSG00000189433_4 (sequence is synthesized)
tggtggcagcggaggaggtgtgggacgatgagcagaaggactttgtctgcaacaccaagcagcccggctgccccaacgtctgctatgacgagttcttccccgtgtcccacgtgcgcctct

SEQ ID NO: 699564 - DNA, 120 bp, Artificial Sequence
  ENSG00000189433_5 (sequence is synthesized)
gggccctacagctcatcctggtcacgtgcccctcactgctcgtggtcatgcacgtggcctaccgcgaggaacgcgagcgcaagcaccacctgaaacacgggcccaatgccccgtccctgt

SEQ ID NO: 699565 - DNA, 120 bp, Artificial Sequence
  ENSG00000189433_6 (sequence is synthesized)
caacctgagcaagaagcggggcggactgtggtggacgtacttgctgagcctcatcttcaaggccgccgtggatgctggcttcctctatatcttccaccgcctctacaaggattatgacat

SEQ ID NO: 699566 - DNA, 120 bp, Artificial Sequence
  ENSG00000189433_7 (sequence is synthesized)
gccccgcgtggtggcctgctccgtggagccttgcccccacactgtggactgttacatctcccggcccacggagaagaaggtcttcacctacttcatggtgaccacagctgccatctgcat

SEQ ID NO: 699567 - DNA, 120 bp, Artificial Sequence
  ENSG00000189433_8 (sequence is synthesized)
cctgctcaacctcagtgaagtcttctacctggtgggcaagaggtgcatggagatcttcggccccaggcaccggcggcctcggtgccgggaatgcctacccgatacgtgcccaccatatgt

SEQ ID NO: 699568 - DNA, 120 bp, Artificial Sequence
  ENSG00000189433_9 (sequence is synthesized)
cctctcccagggagggcaccctgaggatgggaactctgtcctaatgaaggctgggtcggccccagtggatgcaggtgggtatccataacctgcgagatcagcagataagatcaacaggtc

SEQ ID NO: 699569 - DNA, 120 bp, Artificial Sequence
  ENSG00000189433_10 (sequence is synthesized)
ccccccacatgaggccacccaggaaaaaaggcaggggcagtggcatccttgccgtagcagggtggtgaggagggtggctgtgggggctcaggaagctcgcccaggggccaatgtgggagg

SEQ ID NO: 699570 - DNA, 120 bp, Artificial Sequence
  ENSG00000189433_11 (sequence is synthesized)
ttgggggtagtttggtccctgggtcctgagcctcaggggagggaggttgatagctactggggattttgtatatggcaacagtatatgtcaaacctcttaataaatatgattttcccagta

SEQ ID NO: 699571 - DNA, 120 bp, Artificial Sequence
  ENSG00000196071_0 (sequence is synthesized)
ttctgtcttccaatggtggaacctgagagacttcagtgtaaaatgccttattctgttctcactgaaacaagcaaaagttgaaaaatcagtaacccaagatgactaaccaaatcaatatgc

SEQ ID NO: 699572 - DNA, 120 bp, Artificial Sequence
  ENSG00000196071_1 (sequence is synthesized)
tgggcaggatgagacatcagtgtctgcctcagacagaagagcacacacaaaacatgacctctcactccaagcccagttacagcagaaagttttcatggagaaatggaatcacacttcaaa

SEQ ID NO: 699573 - DNA, 120 bp, Artificial Sequence
  ENSG00000196071_2 (sequence is synthesized)
tgatttcattttgttgggtctgcttcccccaaatcaaactggaatatttctcttgtgccttatcatcctcatattctttctggcctcggtgggtaactcggccatgattcacctcatcca

SEQ ID NO: 699574 - DNA, 120 bp, Artificial Sequence
  ENSG00000196071_3 (sequence is synthesized)
cgtggatcctcgtctccacacaccgatgtactttcttctcagccagctctcccttatggacctgatgtacatctccaccaccgtccccaagatggcgtacaacttcctgtccggccagaa

SEQ ID NO: 699575 - DNA, 120 bp, Artificial Sequence
  ENSG00000196071_4 (sequence is synthesized)
aggcatctccttcctgggatgtggtgtgcaaagcttcttcttcctgaccatggcgtgttctgaaggcttactcctgacctccatggcctacgaccgttatttggccatctgccactctct

SEQ ID NO: 699576 - DNA, 120 bp, Artificial Sequence
  ENSG00000196071_5 (sequence is synthesized)
ctattatcctatccgcatgagtaaaatgatgtgtgtgaagatgattggaggctcttggacactggggtccatcaactccttggcacacacagtctttgcccttcatattccctactgcag

SEQ ID NO: 699577 - DNA, 120 bp, Artificial Sequence
  ENSG00000196071_6 (sequence is synthesized)
gtctagggctattgaccatttcttctgcgatgtcccagccatgttgcttcttgcctgtacagatacttgggtctatgaatatatggtttttgtaagtacaagcctctttctccttttccc

SEQ ID NO: 699578 - DNA, 120 bp, Artificial Sequence
  ENSG00000196071_7 (sequence is synthesized)
tttcattggcatcacttcttcctgtggccgagtcctatttgctgtctatcatatgcactcaaaggaggggagaaaaaaggccttcaccaccatttcaacacatttaactgtagtgatctt

SEQ ID NO: 699579 - DNA, 120 bp, Artificial Sequence
  ENSG00000196071_8 (sequence is synthesized)
acctatcttcggcccaggaatctccgctcaccagctgaagacaagatcctggcagtcttctacaccatccttacccccatgctcaatcccattatctacagcctgaggaataaggaagtc

SEQ ID NO: 699580 - DNA, 120 bp, Artificial Sequence
  ENSG00000196071_9 (sequence is synthesized)
ctgggggctatgaggagagtgtttgggatattctctttcctgaaagaataatcatggccatccccactccctttgtatttcctctttccaagttgattccaacacgctagagcagggttg

SEQ ID NO: 699581 - DNA, 120 bp, Artificial Sequence
  ENSG00000196071_10 (sequence is synthesized)
aacacgctagagcagggttgtccaatagaaatacaacataatttaaaattttctaataggtacatttaagcagtcaaataaatttaaataatatatttaattcaaaacaatgttataatt

SEQ ID NO: 699582 - DNA, 120 bp, Artificial Sequence
  ENSG00000196071_11 (sequence is synthesized)
atatgcaatatattatagtacatgtttgtacatatattactattaacgtgataatgtttattcttgtatattgacatagaatttcttcatgtaataacacaaatttgttaatgttgcctt

SEQ ID NO: 699583 - DNA, 120 bp, Artificial Sequence
  ENSG00000196071_12 (sequence is synthesized)
cttcatgtaataacacaaatttgttaatgttgccttttactctgtttgcattctaagtcttcaaagtcttgtgtttgttttatagagtgcagcgcagcttggacaaaacacatttcaagt

SEQ ID NO: 699584 - DNA, 120 bp, Artificial Sequence
  ENSG00000196071_13 (sequence is synthesized)
gcccagtagtcagtgtctatagtgttggacagcacattcttagagcatccccaatcaatagtttcagaagttatatatgcatgtgtatgtgcatgtatggtgtatacaaacatatttttg

SEQ ID NO: 699585 - DNA, 120 bp, Artificial Sequence
  ENSG00000196071_14 (sequence is synthesized)
ttatatacaatattgctgatgaactgaaaattaacaagtaaaatgcacatgctaaggtagtgtttatgtgtttctttatctgttggctcatttttagcatatgcacatttattgtaatta

SEQ ID NO: 699586 - DNA, 120 bp, Artificial Sequence
  ENSG00000196071_15 (sequence is synthesized)
acatttgaagtccagtttatcctaactcctttaataaaactattcagggagagcttatctgacttatgattttgctgatttcataaagatactgagataaaataacttgaatatgaatat

SEQ ID NO: 699587 - DNA, 120 bp, Artificial Sequence
  ENSG00000196071_16 (sequence is synthesized)
caacaaggatggccaaggcagtcactaatctcacactcacctgatagccacaggaacaacattttcccagctataagcaaaagttgaaaaatcagtaacccaagatgactaaccaaatca

SEQ ID NO: 699588 - DNA, 120 bp, Artificial Sequence
  ENSG00000196072_0 (sequence is synthesized)
ggaaacagcgcggggtccgctatggcggcggcagccgagggcgtactggcgacccggagtgatgagcccgcccgagacgatgccgccgtggagacagctgaggaagcaaaggagcctgct

SEQ ID NO: 699589 - DNA, 120 bp, Artificial Sequence
  ENSG00000196072_1 (sequence is synthesized)
gaagctgacatcactgagctctgccgggacatgttctccaaaatggccacttacctgactggggaactgacggccaccagtgaagactataagctcctggaaaatatgaataaactcacc

SEQ ID NO: 699590 - DNA, 120 bp, Artificial Sequence
  ENSG00000196072_2 (sequence is synthesized)
agcttgaagtatcttgaaatgaaagatattgctataaacattagtaggaacttaaaggacttaaaccagaaatatgctggactgcagccttatctggatcagatcaatgtcattgaagag

SEQ ID NO: 699591 - DNA, 120 bp, Artificial Sequence
  ENSG00000196072_3 (sequence is synthesized)
caggtagcagctcttgagcaggcagcttacaagttggatgcatattcaaaaaaactggaagccaagtacaagaagctggagaagcgatgagaaacttatttctatgggacagagtctttt

SEQ ID NO: 699592 - DNA, 120 bp, Artificial Sequence
  ENSG00000196072_4 (sequence is synthesized)
ttttttaatgtggaagaatgtcttataaaacctgaatcctgaggctgatgaattgtgaaaattcctcaaaaggaaattatgctggtcatcacaggaacatctcaacgttcgagtaaactg

SEQ ID NO: 699593 - DNA, 120 bp, Artificial Sequence
  ENSG00000196072_5 (sequence is synthesized)
gaggactgtggctattcctgaaccttctttgagacagaatccctcagaatctcacacttataacttcctaccttttacttgaatgctttgccatattcaggacagagactctcacaaagt

SEQ ID NO: 699594 - DNA, 120 bp, Artificial Sequence
  ENSG00000196072_6 (sequence is synthesized)
tcagaaaacagctggacttaccagtaaaatcaaatgagaggacctattttctctggtagtggttgattactacattattttcttaagtggctggttttttagttactatgtaaatggtcg

SEQ ID NO: 699595 - DNA, 120 bp, Artificial Sequence
  ENSG00000196072_7 (sequence is synthesized)
tttttctgttaatgatgctaatgtgttgtaaacaagattctaaatttaaaaaggaaaacaaaacaaacttgttctttgcagcttatcaccttgtgaatgtcggtaacttacttttccata

SEQ ID NO: 699596 - DNA, 120 bp, Artificial Sequence
  ENSG00000196072_8 (sequence is synthesized)
atattgcaaataacataaaatcttaaaataattccaagctgagtcttctagattgagcagaaatggtgaaaggagtattgataacttggcgtatgtgatgggcccctcttgtttattttc

SEQ ID NO: 699597 - DNA, 120 bp, Artificial Sequence
  ENSG00000196072_9 (sequence is synthesized)
tatgtgagtcacattgacatgcgatcagtttgggaaatgtgatgaaaacaaagactagatgggtatgtgtgtttatgtgttgggtagggaggtgacgattgccactcataaaataaagga

SEQ ID NO: 699598 - DNA, 120 bp, Artificial Sequence
  ENSG00000196072_10 (sequence is synthesized)
actgactgaccagtctaggttgaaagataggcagccttacccagaacacaacattagcagctgggaaggtgtctgaggtccccaattacatatcccaaagagtttcttacttctgtttct

SEQ ID NO: 699599 - DNA, 120 bp, Artificial Sequence
  ENSG00000196072_11 (sequence is synthesized)
gtcatttcccctctgttccagacagtcatcatttatcctctgttcttcctggactgttgctgtggtctcttctcatcttaactgtcccttccaaccaccctccacactgctgccagagca

SEQ ID NO: 699600 - DNA, 120 bp, Artificial Sequence
  ENSG00000196072_12 (sequence is synthesized)
atcttaaaaatgtaaactggccctattactcctgcttagaaccctgtagtgacttatcatggcctctgaaaaatctagactttcattatgcatacaagtcccttgtgtttttttgtttgt

SEQ ID NO: 699601 - DNA, 89 bp, Artificial Sequence
  ENSG00000196072_13 (sequence is synthesized)
ttgtttgtttatagacagggtctctataatagctcaccttgacctcctaggctcaactgatcttcccacctcagcctcctgaatagctg

SEQ ID NO: 699602 - DNA, 87 bp, Artificial Sequence
  ENSG00000196072_14 (sequence is synthesized)
atggaggcctcaagtgattctcttaccacagcctgccagagtgctgagattgtaggcatgaaccaccgtgcctaacataaggcccct

SEQ ID NO: 699603 - DNA, 120 bp, Artificial Sequence
  ENSG00000196072_15 (sequence is synthesized)
gattgtaggcatgaaccaccgtgcctaacataaggcccctatttaaacatttttcttaaataaaaaacaaaagaattaaactgtaactctactatcttaacatagaatcagtcttacccc

SEQ ID NO: 699604 - DNA, 80 bp, Artificial Sequence
  ENSG00000196072_16 (sequence is synthesized)
ctgtaactctactatcttaacatagaatcagtcttaccccttcttccaacccttttccttttccgtgcatgtattgatct

SEQ ID NO: 699605 - DNA, 120 bp, Artificial Sequence
  ENSG00000196072_17 (sequence is synthesized)
agtttttatttcctgttacactgtgttcagctatcttcagccaccttaaattcccatggatgagttttcataaactttttgaaaatagatttagatttacgggaaagttgcaaagataat

SEQ ID NO: 699606 - DNA, 120 bp, Artificial Sequence
  ENSG00000196072_18 (sequence is synthesized)
acagaatttaatggatgagtttttttattgatgtgtaatagatgtatgtattttcagagtacaagtgataatttaatacatgtatataatgtgtaaatattaaatcaagagttattggga

SEQ ID NO: 699607 - DNA, 120 bp, Artificial Sequence
  ENSG00000196072_19 (sequence is synthesized)
agtgaaggacttgaaattatggcagatggagaatggagccgacttgatggaatgaaggcaagtggagggatgtcggaacaggctgctttggctggattagcaccgggtgtaggcgggaca

SEQ ID NO: 699608 - DNA, 120 bp, Artificial Sequence
  ENSG00000196072_20 (sequence is synthesized)
gtgtcagatgggcagggacgcagtgaaggacttgaaattatggcagatggagaatggagccgacttgatggaatgaagacgatgccgccgtggagacagctgaggaagcaaaggagcctg

SEQ ID NO: 699609 - DNA, 120 bp, Artificial Sequence
  ENSG00000196072_21 (sequence is synthesized)
gcagcttacaagttggatgcatattcaaaaaaactgggtaaccgtttttacttctgttttgatgtaataaagactgcttcttgccagcatattcttagtaaacataatagttaacattta

SEQ ID NO: 699610 - DNA, 120 bp, Artificial Sequence
  ENSG00000196074_0 (sequence is synthesized)
gcagagttgcgacgctcggcggcatagggggcggctccaccgacactacgcggacgcctcctgccgcagatacacaatcatcatcttactagttctctgtgttgctcgctaaccagtccc

SEQ ID NO: 699611 - DNA, 90 bp, Artificial Sequence
  ENSG00000196074_1 (sequence is synthesized)
tcatcttactagttctctgtgttgctcgctaaccagtcccccagttcagtagactggagcccagagcctgcttacttgtcaggtgaaatg

SEQ ID NO: 699612 - DNA, 120 bp, Artificial Sequence
  ENSG00000196074_2 (sequence is synthesized)
aaaatgcattgatgatgctttaagaaaaaatgatttcaaacctttgaaaacacttttgcaaattgatatttgtgaagatgtgaagattaaatgcagcaaacagtttttccacaaggtgga

SEQ ID NO: 699613 - DNA, 120 bp, Artificial Sequence
  ENSG00000196074_3 (sequence is synthesized)
caaccttatatgcagggaacttaataaagaggatatccacaatgtttcagccattttggtttctgttggaagatgtggcaaaaatatcagtgtattggggcaagctggacttctaacgat

SEQ ID NO: 699614 - DNA, 120 bp, Artificial Sequence
  ENSG00000196074_4 (sequence is synthesized)
gataaaacaaggactaatacaaaagatggttgcctggtttgaaaaatccaaggacattattcagagtcaaggaaattcaaaagatgaagctgttctaaatatgatagaagacttagttga

SEQ ID NO: 699615 - DNA, 120 bp, Artificial Sequence
  ENSG00000196074_5 (sequence is synthesized)
tcttctgctggtcatacatgatgtcagtgatgaaggtaaaaaacaagtagtggaaagtttcgtacctcgcatttgttccctggttattgactcaagagtgaatatttgtattcagcaaga

SEQ ID NO: 699616 - DNA, 120 bp, Artificial Sequence
  ENSG00000196074_6 (sequence is synthesized)
gattataaaaaaaatgaatgctatgcttgacaaaatgcctcaagatgcccggaaaatactctctaaccaagaaatgttaattctcatgagtagtatgggagaaaggattttagatgctgg

SEQ ID NO: 699617 - DNA, 120 bp, Artificial Sequence
  ENSG00000196074_7 (sequence is synthesized)
agattatgacttacaggtaggcattgtagaagctttgtgtagaatgaccacagaaaaacaaagacaagaactggcacatcagtggttttcaatggattttattgctaaggcatttaaaag

SEQ ID NO: 699618 - DNA, 120 bp, Artificial Sequence
  ENSG00000196074_8 (sequence is synthesized)
aattaaggactctgaatttgaaacagattgcaggatatttctcaaccttgtaaatggcatgcttggagacaaaagaagggtctttacatttccttgtttatcagcatttcttgataaata

SEQ ID NO: 699619 - DNA, 120 bp, Artificial Sequence
  ENSG00000196074_9 (sequence is synthesized)
tgagctgcaaataccatcagatgaaaaacttgaggaattttggattgattttaatcttgggagtcagactctctcattctacattgctggagataatgatgatcatcaatgggaagcagt

SEQ ID NO: 699620 - DNA, 120 bp, Artificial Sequence
  ENSG00000196074_10 (sequence is synthesized)
tactgtgccagaggaaaaagtacaaatatacagcattgaagtgagagaatcaaagaagctactgacaataattctgaaaaatacagtaaaaattagcaaaagagaagggaaagaattgct

SEQ ID NO: 699621 - DNA, 120 bp, Artificial Sequence
  ENSG00000196074_11 (sequence is synthesized)
tttgtattttgacgcatcactagaaatcactaatgtaactcaaaaaatttttggtgcaactaaacatagggaatctatcagaaaacaaggtatttcagttgccaaaacgtcgctgcatat

SEQ ID NO: 699622 - DNA, 120 bp, Artificial Sequence
  ENSG00000196074_12 (sequence is synthesized)
actttttgacgcaagtggatcacagattctagtgccagaaagtcaaatctcaccagtcggagaagagctcgttagtttaaaggaaaaatcaaagtccccaaaggaatttgctaaaccttc

SEQ ID NO: 699623 - DNA, 120 bp, Artificial Sequence
  ENSG00000196074_13 (sequence is synthesized)
aaaatatatcaaaaacagtgacaaagggaatagaaataatagtcagcttgagaaaactactcctagcaaaagaaaaatgtctgaagcatcaatgattgtttctggtgcagatagatacac

SEQ ID NO: 699624 - DNA, 120 bp, Artificial Sequence
  ENSG00000196074_14 (sequence is synthesized)
tatgagaagtccagtgcttttcagcaacacatcaataccaccacgaagaagaagaattaaaccaccactgcaaatgacgagctctgcagagaaacctagtgtttctcaaacatcagaaaa

SEQ ID NO: 699625 - DNA, 120 bp, Artificial Sequence
  ENSG00000196074_15 (sequence is synthesized)
tagagtggataatgctgcatcactgaaatctagatcatcagaaggaagacatagaagagataatatagacaaacatatcaaaactgctaagtgtgtagaaaacacagaaaataagaatgt

SEQ ID NO: 699626 - DNA, 120 bp, Artificial Sequence
  ENSG00000196074_16 (sequence is synthesized)
tgaattcccaaaccaaaattttagtgaactccaggatgttataccagattcacaggcagcggaaaaaagagatcatactatattacctggtgttttagacaacatctgtggaaataaaat

SEQ ID NO: 699627 - DNA, 120 bp, Artificial Sequence
  ENSG00000196074_17 (sequence is synthesized)
acacagcaaatgggcatgttggacacctgtaacaaacattgaactatgtaataaccaaagagcaagtacttcgtcaggagacacattgaatcaagatattgttataaataaaaaacttac

SEQ ID NO: 699628 - DNA, 120 bp, Artificial Sequence
  ENSG00000196074_18 (sequence is synthesized)
taaacaaaaatcatcctcttcaatatctgatcataattctgaaggaacaggaaaagtgaaatataagaaagaacaaaccgaccatatcaaaatagataaagcagaagtagaagtttgcaa

SEQ ID NO: 699629 - DNA, 120 bp, Artificial Sequence
  ENSG00000196074_19 (sequence is synthesized)
gaaacacaatcagcaacaaaatcatcctaaatattcagggcagaaaaatactgaaaatgccaagcagagtgattggcctgttgaatctgaaactacttttaaatcggttctcctaaataa

SEQ ID NO: 699630 - DNA, 120 bp, Artificial Sequence
  ENSG00000196074_20 (sequence is synthesized)
gacaattgaagaatcgctgatatataggaagaaatacatattgtcaaaagatgtgaatactgctacttgcgataaaaatccatctgctagcaaaaatgtgcaaagtcatagaaaagcaga

SEQ ID NO: 699631 - DNA, 120 bp, Artificial Sequence
  ENSG00000196074_21 (sequence is synthesized)
gaaagaattgacttctgagcttaattcctgggattcgaaacaaaaaaaaatgagagaaaagtcaaaagggaaagaatttaccaatgtagcagaatccttgataagccaaatcaataaaag

SEQ ID NO: 699632 - DNA, 120 bp, Artificial Sequence
  ENSG00000196074_22 (sequence is synthesized)
atacaaaacaaaagatgacatcaagtctacaagaaaattaaaggagtctttgattaacagtggtttttcaaacaaacctgttgtacaactcagtaaggaaaaagttcagaaaaaaagcta

SEQ ID NO: 699633 - DNA, 120 bp, Artificial Sequence
  ENSG00000196074_23 (sequence is synthesized)
tgttaatgttacttctgaatgcccagtgaatgatgtttacaattttaatttgaatggagctgatgaccctatcataaaacttggaatccaagagtttcaagctacagctaaagaagcttg

SEQ ID NO: 699634 - DNA, 120 bp, Artificial Sequence
  ENSG00000196074_24 (sequence is synthesized)
tgcggataggtcaattagattggtaggtccaaggaatcatgatgaacttaaatcttctgtcaaaacaaaagataaaaaaattataacaaatcatcaaaagaaaaatctgtttagtgatac

SEQ ID NO: 699635 - DNA, 120 bp, Artificial Sequence
  ENSG00000196074_25 (sequence is synthesized)
tgaaacagagtacagatgtgatgacagcaagactgatattagctggctaagagaaccgaaatcaaaaccacagctaatagactatagcagaaataaaaatgtgaagaatcataaaagtgg

SEQ ID NO: 699636 - DNA, 120 bp, Artificial Sequence
  ENSG00000196074_26 (sequence is synthesized)
aaaatcaagatcatccttggaaaagggacagccaagctctaaaatgacacccagtaaaaatatcacaaaaaagatggacaagacaattccggaaggaagaatcagacttccacgaaaagc

SEQ ID NO: 699637 - DNA, 120 bp, Artificial Sequence
  ENSG00000196074_27 (sequence is synthesized)
aaccaaaacaaaaaaaaactataaagatctctcaaattcagaatcagagtgtgaacaagaattttcacattcatttaaagagaacataccagtaaaggaggagaatatccattccagaat

SEQ ID NO: 699638 - DNA, 120 bp, Artificial Sequence
  ENSG00000196074_28 (sequence is synthesized)
gaaaacggtaaagctaccaaagaaacaacagaaagtcttctgtgctgaaacagaaaaggaactatcaaaacaatggaaaaactcatctctactaaaagatgctatacgagataattgcct

SEQ ID NO: 699639 - DNA, 120 bp, Artificial Sequence
  ENSG00000196074_29 (sequence is synthesized)
tgacttatctcccagatctttatctggcagtccatcatctatagaagtaacgagatgtatagagaaaataacagaaaaggattttactcaggattatgactgcataacaaaatctatatc

SEQ ID NO: 699640 - DNA, 120 bp, Artificial Sequence
  ENSG00000196074_30 (sequence is synthesized)
accttatccaaaaacttcatcacttgaatccttaaatagtaacagtggagttggaggtacaataaagtcacccaaaaacaatgagaaaaacttcctgtgtgcaagtgaaagttgttcacc

SEQ ID NO: 699641 - DNA, 120 bp, Artificial Sequence
  ENSG00000196074_31 (sequence is synthesized)
aattccacgaccactgtttttgcccagacatactccaactaagagtaatactattgtaaatagaaaaaaaataagttctctggtacttacacaagaaacacaaaacagtaacagctattc

SEQ ID NO: 699642 - DNA, 120 bp, Artificial Sequence
  ENSG00000196074_32 (sequence is synthesized)
agatgtaagcagttatagttcagaagaacggtttatggaaattgaatctccacatatcaatgaaaattatatacaaagcaaaagagaggaaagtcatttagcatcttcattatccaagtc

SEQ ID NO: 699643 - DNA, 120 bp, Artificial Sequence
  ENSG00000196074_33 (sequence is synthesized)
tagtgaaggaagagagaaaacgtggtttgacatgccctgtgatgctactcatgtatcaggccccacccaacatcttagtcgcaaaagaatatatatagaagataatctaagtaattccaa

SEQ ID NO: 699644 - DNA, 120 bp, Artificial Sequence
  ENSG00000196074_34 (sequence is synthesized)
tgaagtagaaatggaagagaaaggagaaaggagagcaaacttgcttcccaaaaaactgtgtaaaattgaagatgcagatcatcatatccacaaaatgtctgaaagtgtatcttcattatc

SEQ ID NO: 699645 - DNA, 120 bp, Artificial Sequence
  ENSG00000196074_35 (sequence is synthesized)
aacaaatgacttttctattccttgggagacctggcaaaatgaatttgcagggatagagatgacttatgagacttacgagaggctcaattcagaatttaagagaaggaataatatccgaca

SEQ ID NO: 699646 - DNA, 120 bp, Artificial Sequence
  ENSG00000196074_36 (sequence is synthesized)
taaaatgttgagttattttactacgcagtcttggaaaacagctcagcaacatctgagaacaatgaatcatcaaagtcaggactctaggattaaaaaacttgataaattccaattcattat

SEQ ID NO: 699647 - DNA, 120 bp, Artificial Sequence
  ENSG00000196074_37 (sequence is synthesized)
catagaggagctggagaattttgaaaaagattcacagtctttaaaagatttggaaaaggaatttgtggacttttgggaaaagatatttcagaagttcagtgcatatcaaaaaagcgaaca

SEQ ID NO: 699648 - DNA, 120 bp, Artificial Sequence
  ENSG00000196074_38 (sequence is synthesized)
acagaggcttcatcttttgaaaacttcattggctaaaagtgtcttctgtaatactgatagtgaagaaactgtttttacatccgagatgtgtttgatgaaagaagatatgaaagtgctgca

SEQ ID NO: 699649 - DNA, 120 bp, Artificial Sequence
  ENSG00000196074_39 (sequence is synthesized)
agacaggcttcttaaggacatgctagaagaggagcttcttaatgtacgcagagaactgatgtcagtattcatgtctcatgaaagaaatgctaatgtgtgaaatctagtttttatcaccat

SEQ ID NO: 699650 - DNA, 120 bp, Artificial Sequence
  ENSG00000196074_40 (sequence is synthesized)
actttatctaattattattctctgtatataactgaggaaataagaatagtcctacaaagagaaaaatatacatgtcaccgaagcaagtgtaccctttataggaaccctcaaattaaaaaa

SEQ ID NO: 699651 - DNA, 120 bp, Artificial Sequence
  ENSG00000196074_41 (sequence is synthesized)
aaatgtcttttaatggatgagagggaaccactataacatgagtccaagcccagaagacttctgtctatacaatatttttttttaattttggagataaaagctttaagaaactttttgagt

SEQ ID NO: 699652 - DNA, 120 bp, Artificial Sequence
  ENSG00000196074_42 (sequence is synthesized)
aagaaactttttgagttaattatactcataaaatgagtttctttaataaattaaattttattgtgtaaaatgtattattacataaaatgtgtttttgaatcaatgcagtttggggatgaa

SEQ ID NO: 699653 - DNA, 120 bp, Artificial Sequence
  ENSG00000196074_43 (sequence is synthesized)
ttaataacttagaattcaactaataaaaatttagccacacttacaagggggaggaagtccctagtttaaaatgtataactgagtggtagatcagtactttcagcacactgttggaaacat

SEQ ID NO: 699654 - DNA, 120 bp, Artificial Sequence
  ENSG00000196074_44 (sequence is synthesized)
ttattcagatatggctctaatgtattaggaagcactaaatggcctaaaaaagctactacattgcctaaatatgttaattcaatatagaagtcctatttcataaccaggctgtttgacaaa

SEQ ID NO: 699655 - DNA, 120 bp, Artificial Sequence
  ENSG00000196074_45 (sequence is synthesized)
ttgacaaatacttttaatctagtagtcattgtaatatcttgctagattaatttataaaaatgagtatacatttgatttgcttttaatgaagttgaaataaatgcttatgtcacttgaata

SEQ ID NO: 699656 - DNA, 120 bp, Artificial Sequence
  ENSG00000196074_46 (sequence is synthesized)
ctccatcctactccattcccataataaaactcagtgattaagaaaaaattaggcttctaagtttatgtgcctagaatatttctcttaatagtgtttcactgaatgtaaagttaatgcatt

SEQ ID NO: 699657 - DNA, 120 bp, Artificial Sequence
  ENSG00000196074_47 (sequence is synthesized)
aatttgtgttctctgtgccctgagcctaaaagtcactaacagattggttggtgacttggttggattggtctgttcagattgtataaagcatttattctggtaaatataattaaatggtta

SEQ ID NO: 699658 - DNA, 120 bp, Artificial Sequence
  ENSG00000196074_48 (sequence is synthesized)
gaaaccaggagaagttttatggaacagcatattcattgccaagaataactgaaaaataaaggctgtagtccagtttttctcgtgtttccttaagaccattattgatttatcatgtatgaa

SEQ ID NO: 699659 - DNA, 120 bp, Artificial Sequence
  ENSG00000196074_49 (sequence is synthesized)
tctattcaaactagtactttcaacctttattagcacttggaatattcataatttcttggagctagttgattttttataaaatattaaagtagcatttcatttgattgtttttaaatttat

SEQ ID NO: 699660 - DNA, 120 bp, Artificial Sequence
  ENSG00000196074_50 (sequence is synthesized)
ctaaatattatacttgtctgttctttctcttctctctccttctagctttgttttcttgctttagccatgaatataacatcataattgtctgttatttctaaaatcattgtatattccagt

SEQ ID NO: 699661 - DNA, 90 bp, Artificial Sequence
  ENSG00000196074_51 (sequence is synthesized)
tgcggcggtccctgaggcgcagagttgcgacgctcggcggcatagggggcggctccaccgacactacgcggacgcctcctgccgcaggtg

SEQ ID NO: 699662 - DNA, 120 bp, Artificial Sequence
  ENSG00000196074_52 (sequence is synthesized)
tgcagagttcgcggcgagggtggctcgcgcaggcgcgaggctccccatcagcacctgcctggccagcctcggcctcggggatgggaaatgggcgctcggagccgcccccgcgcgtgggcg

SEQ ID NO: 699663 - DNA, 120 bp, Artificial Sequence
  ENSG00000196081_0 (sequence is synthesized)
ctcgtcttccctgctttgtgtcccctgctcttagaggcccagcctctgtggccctctgacctgcaagcattgggagatccacagctaagacgccagggcctcccctggaagcctagaaat

SEQ ID NO: 699664 - DNA, 120 bp, Artificial Sequence
  ENSG00000196081_1 (sequence is synthesized)
gggaccattgacatttatggatgtggccatagaattctctgtggaggagtggcaatgcctggacactgcacagcagaatttatataggaacgtgatgttagagaactacagaaacctggt

SEQ ID NO: 699665 - DNA, 120 bp, Artificial Sequence
  ENSG00000196081_2 (sequence is synthesized)
cttcctgggtattgctgtctctaagccagacctgatcacctgtctggagcaaggcaaagagccctggaatatggagagacatgagatggtggccaaacccccaggtatgtgttgttattt

SEQ ID NO: 699666 - DNA, 120 bp, Artificial Sequence
  ENSG00000196081_3 (sequence is synthesized)
tgcccaagaccttcggccagagcagagcataaaagcttctttgcaaagaataatactgagaaaatatgaaaaatgtggacatcacaatttacagttaaaaaaaggctataaaagtgtgga

SEQ ID NO: 699667 - DNA, 120 bp, Artificial Sequence
  ENSG00000196081_4 (sequence is synthesized)
tgagtacaaggtgcacaaaggaagttataatggatttaaccagtgtttgacaactacccagagcaaaatatttcagtgtgataaatatgtgaaagactttcataaattttcaaattcaaa

SEQ ID NO: 699668 - DNA, 120 bp, Artificial Sequence
  ENSG00000196081_5 (sequence is synthesized)
tagacataagactgaaaagaatcctttcaaatgtaaagaatgtggcaagtcattttgtgttctttcacacctaactcaacataaaagaattcacactactgtcaattcctacaaacttga

SEQ ID NO: 699669 - DNA, 120 bp, Artificial Sequence
  ENSG00000196081_6 (sequence is synthesized)
agaatgtggcaaggcctttaatgtgtcctcaaccctttctcaacataagagaattcatacaggacaaaaacactacaaatgtgaagaatgtggcatagcctttaacaagtcctcacacct

SEQ ID NO: 699670 - DNA, 89 bp, Artificial Sequence
  ENSG00000196081_7 (sequence is synthesized)
tttaacaagtcctcacaccttaaccctacaaacgtgaagaatgtggaaaagcttttaacatatcctcacaccttactacacataagata

SEQ ID NO: 699671 - DNA, 120 bp, Artificial Sequence
  ENSG00000196081_8 (sequence is synthesized)
gtaaagaatgtggcaaagcttttaaccaatcatcaacccttactagacataagataattcatgctggagagaagccctacatatgtgaacattgtggcagagcttttaaccaatcctcga

SEQ ID NO: 699672 - DNA, 120 bp, Artificial Sequence
  ENSG00000196081_9 (sequence is synthesized)
agccctacatatgtgaacattgtggcagagcttttaaccaatcctcgaaccttactaaacataagagaattcatactggtgataaaccttataaatgtgaagaatgtggcaaagccttta

SEQ ID NO: 699673 - DNA, 120 bp, Artificial Sequence
  ENSG00000196081_10 (sequence is synthesized)
tggagagaaaccttacaaatgtgaagagtgtggcaaagcctttaacgtgtcctcaactcttactcaacataagagaattcatactggagaaaaaccatacaaatgtgaagaatgtggcaa

SEQ ID NO: 699674 - DNA, 70 bp, Artificial Sequence
  ENSG00000196081_11 (sequence is synthesized)
gtgaagaatgtggcaaagcctttaacacatcctcacacctcaccacacataaaagaattcatactctcac

SEQ ID NO: 699675 - DNA, 74 bp, Artificial Sequence
  ENSG00000196081_12 (sequence is synthesized)
agaatgtggcaaagcttttaaccaatcctcgacacttgctagacataagataattcataccaatactcaaacct

SEQ ID NO: 699676 - DNA, 120 bp, Artificial Sequence
  ENSG00000196081_13 (sequence is synthesized)
gtaaagaatgtggcaaagcttttaaccaatgctcaaaccttactacacacaagaaaattcatgctgtagaaaaatctgacaaataagaaaaatggaccaggcgtggtggctcacacctgt

SEQ ID NO: 699677 - DNA, 120 bp, Artificial Sequence
  ENSG00000196081_14 (sequence is synthesized)
aagagattgagaccatcctggccaacgaagagaattactggagagaaaccgtacaaacctgaaagatataacagtgcagttgacaacacctcaatatttctaaacacctttaaatggttg

SEQ ID NO: 699678 - DNA, 120 bp, Artificial Sequence
  ENSG00000196081_15 (sequence is synthesized)
tttaaatggttgtcatacttgattgtaggtaaaatatagtagaggaaacctctacaagtgtgaagaatgtggcaaaacttttaaccaatgctgacactttattggacaggaaatgatgta

SEQ ID NO: 699679 - DNA, 120 bp, Artificial Sequence
  ENSG00000196081_16 (sequence is synthesized)
tacttgagaaaaattatgcaaatgtaaagaatgtgaagaagccattaatatctgttcacatcttattcaatatcagagagttcatacttaatagaagcattaaagatgaaattactgtca

SEQ ID NO: 699680 - DNA, 120 bp, Artificial Sequence
  ENSG00000196081_17 (sequence is synthesized)
atagatttttcagaaaatataagcctttaaagtgaagaagagtatttattttgaagacaagcattaaaatatcaagagtgtaagctgggcatggtggctcaggcctgtaatttcagcact

SEQ ID NO: 699681 - DNA, 79 bp, Artificial Sequence
  ENSG00000196081_18 (sequence is synthesized)
caaaatacaaaaattaggtgggtgtggtagtgcatgactaatcccagctactcggtggttgagacaggagaatcgcttg

SEQ ID NO: 699682 - DNA, 63 bp, Artificial Sequence
  ENSG00000196081_19 (sequence is synthesized)
ccaaaatacaaaaattaggtgggtgtggtagtgcatgactaatcccagctactcggttgtgcc

SEQ ID NO: 699683 - DNA, 75 bp, Artificial Sequence
  ENSG00000196081_20 (sequence is synthesized)
gagagtgaatatgacagatgacacagatgagaggtccaaatgtcaaggagaaagtcagtttttgaaatacgatag

SEQ ID NO: 699684 - DNA, 120 bp, Artificial Sequence
  ENSG00000196083_0 (sequence is synthesized)
aaagggggaaaagaaagtgcggcggaaagtaagaggctcactggggaagactgccgggatccaggtctccggggtccgctttggccagaggcgcggaaggaagcagtgcccggcgacact

SEQ ID NO: 699685 - DNA, 120 bp, Artificial Sequence
  ENSG00000196083_1 (sequence is synthesized)
gcacccatcccggctgcttttgctgcgccctctcagcttcccaagaaaggatgacacttctgtggtgtgtagtgagtctctacttttatggaatcctgcaaagtgatgcctcagaacgct

SEQ ID NO: 699686 - DNA, 120 bp, Artificial Sequence
  ENSG00000196083_2 (sequence is synthesized)
gcgatgactggggactagacaccatgaggcaaatccaagtgtttgaagatgagccagctcgcatcaagtgcccactctttgaacacttcttgaaattcaactacagcacagcccattcag

SEQ ID NO: 699687 - DNA, 120 bp, Artificial Sequence
  ENSG00000196083_3 (sequence is synthesized)
ctggccttactctgatctggtattggactaggcaggaccgggaccttgaggagccaattaacttccgcctccccgagaaccgcattagtaaggagaaagatgtgctgtggttccggccca

SEQ ID NO: 699688 - DNA, 120 bp, Artificial Sequence
  ENSG00000196083_4 (sequence is synthesized)
ctctcctcaatgacactggcaactatacctgcatgttaaggaacactacatattgcagcaaagttgcatttcccttggaagttgttcaaaaagacagctgtttcaattcccccatgaaac

SEQ ID NO: 699689 - DNA, 120 bp, Artificial Sequence
  ENSG00000196083_5 (sequence is synthesized)
tcccagtgcataaactgtatatagaatatggcattcagaggatcacttgtccaaatgtagatggatattttccttccagtgtcaaaccgactatcacttggtatatgggctgttataaaa

SEQ ID NO: 699690 - DNA, 120 bp, Artificial Sequence
  ENSG00000196083_6 (sequence is synthesized)
tacagaattttaataatgtaatacccgaaggtatgaacttgagtttcctcattgccttaatttcaaataatggaaattacacatgtgttgttacatatccagaaaatggacgtacgtttc

SEQ ID NO: 699691 - DNA, 120 bp, Artificial Sequence
  ENSG00000196083_7 (sequence is synthesized)
atctcaccaggactctgactgtaaaggtagtaggctctccaaaaaatgcagtgccccctgtgatccattcacctaatgatcatgtggtctatgagaaagaaccaggagaggagctactca

SEQ ID NO: 699692 - DNA, 120 bp, Artificial Sequence
  ENSG00000196083_8 (sequence is synthesized)
ttccctgtacggtctattttagttttctgatggattctcgcaatgaggtttggtggaccattgatggaaaaaaacctgatgacatcactattgatgtcaccattaacgaaagtataagtc

SEQ ID NO: 699693 - DNA, 120 bp, Artificial Sequence
  ENSG00000196083_9 (sequence is synthesized)
atagtagaacagaagatgaaacaagaactcagattttgagcatcaagaaagttacctctgaggatctcaagcgcagctatgtctgtcatgctagaagtgccaaaggcgaagttgccaaag

SEQ ID NO: 699694 - DNA, 120 bp, Artificial Sequence
  ENSG00000196083_10 (sequence is synthesized)
cagccaaggtgaagcagaaagtgccagctccaagatacacagtggaactggcttgtggttttggagccacagtcctgctagtggtgattctcattgttgtttaccatgtttactggctag

SEQ ID NO: 699695 - DNA, 120 bp, Artificial Sequence
  ENSG00000196083_11 (sequence is synthesized)
agatggtcctattttaccgggctcattttggaacagatgaaaccattttagatggaaaagagtatgatatttatgtatcctatgcaaggaatgcggaagaagaagaatttgtattactga

SEQ ID NO: 699696 - DNA, 120 bp, Artificial Sequence
  ENSG00000196083_12 (sequence is synthesized)
ccctccgtggagttttggagaatgaatttggatacaagctgtgcatctttgaccgagacagtctgcctgggggaattgtcacagatgagactttgagcttcattcagaaaagcagacgcc

SEQ ID NO: 699697 - DNA, 120 bp, Artificial Sequence
  ENSG00000196083_13 (sequence is synthesized)
tcctggttgttctaagccccaactacgtgctccagggaacccaagccctcctggagctcaaggctggcctagaaaatatggcctctcggggcaacatcaacgtcattttagtacagtaca

SEQ ID NO: 699698 - DNA, 120 bp, Artificial Sequence
  ENSG00000196083_14 (sequence is synthesized)
aagctgtgaaggaaacgaaggtgaaagagctgaagagggctaagacggtgctcacggtcattaaatggaaaggggaaaaatccaagtatccacagggcaggttctggaagcagctgcagg

SEQ ID NO: 699699 - DNA, 120 bp, Artificial Sequence
  ENSG00000196083_15 (sequence is synthesized)
tggccatgccagtgaagaaaagtcccaggcggtctagcagtgatgagcagggcctctcgtattcatctttgaaaaatgtatgaaaggaataatgaaaagggtaaaaagaacaaggggtgc

SEQ ID NO: 699700 - DNA, 120 bp, Artificial Sequence
  ENSG00000196083_16 (sequence is synthesized)
tccaggaagaaagagtccccccagtcttcattcgcagtttatggtttcataggcaaaaataatggtctaagcctcccaatagggataaatttagggtgactgtgtggctgactattctgc

SEQ ID NO: 699701 - DNA, 120 bp, Artificial Sequence
  ENSG00000196083_17 (sequence is synthesized)
ttcctcaggcaacactaaagtttagaaagatatcatcaacgttctgtcaccagtctctgatgccactatgttctttgcaggcaaagacttgttcaatgcgaatttccccttctacattgt

SEQ ID NO: 699702 - DNA, 120 bp, Artificial Sequence
  ENSG00000196083_18 (sequence is synthesized)
ctatccctgtttttatatgtctccattctttttaaaatcttaacatatggagcagcctttcctatgaatttaaatatgcctttaaaataagtcactgttgacagggtcatgagtttccga

SEQ ID NO: 699703 - DNA, 120 bp, Artificial Sequence
  ENSG00000196083_19 (sequence is synthesized)
tcttatttttactcgtccgttgaaaagataatcaaggcctacattttagctgaggataatgaacttttttcctcattcggctgtataatacataaccacagcaagactgacatccactta

SEQ ID NO: 699704 - DNA, 120 bp, Artificial Sequence
  ENSG00000196083_20 (sequence is synthesized)
ggatgatacaaagcagtgtaactgaaaatgtttcttttaattgatttaaaggacttgtcttctataccacccttgtcctcatctcaggtaatttatgaaatctatgtaaacttgaaaaat

SEQ ID NO: 699705 - DNA, 120 bp, Artificial Sequence
  ENSG00000196083_21 (sequence is synthesized)
atttcttaatttttgtttttgctccagtcaattcctgattatccacaggtcaacccacattttttcattccttctccctatctgcttatatcgcattgctcatttagagtttgcaggagg

SEQ ID NO: 699706 - DNA, 120 bp, Artificial Sequence
  ENSG00000196083_22 (sequence is synthesized)
ctccatactaggttcagtctgaaagaaatctcctaatggtgctatagagagggaggtaacagaaagactcttttagggcatttttctgactcatgaaaagagcacagaaaaggatgtttg

SEQ ID NO: 699707 - DNA, 120 bp, Artificial Sequence
  ENSG00000196083_23 (sequence is synthesized)
gcaatttgtcttttaagtcttaaccttgctaatgtgaatactgggaaagtgattttttctcactcgtttttgttgctccattgtaaagggcggaggtcagtcttagtggccttgagagtt

SEQ ID NO: 699708 - DNA, 120 bp, Artificial Sequence
  ENSG00000196083_24 (sequence is synthesized)
gcttttggcattaatattctaagagaattaactgtatttcctgtcacctattcactagtgcaggaaatatacttgctccaaataagtcagtatgagaagtcactgtcaatgaaagttgtt

SEQ ID NO: 699709 - DNA, 120 bp, Artificial Sequence
  ENSG00000196083_25 (sequence is synthesized)
ttgtttgttttcagtaatattttgctgtttttaagacttggaaaactaagtgcagagtttacagagtggtaaatatctatgttacatgtagattatacatatatatacacacgtgtatat

SEQ ID NO: 699710 - DNA, 120 bp, Artificial Sequence
  ENSG00000196083_26 (sequence is synthesized)
acacgtgtatatgagatatatatcttatatctccacaaacacaaattatatatatacatatccacacacatacattacatatatctgtgtatataaatccacatgcacatgaaatatata

SEQ ID NO: 699711 - DNA, 120 bp, Artificial Sequence
  ENSG00000196083_27 (sequence is synthesized)
ttgtgtgtgtgtatgtgtatgtatatgactttaaatagctatgggtacaatattaaaaaccactggaactcttgtccagtttttaaattatgtttttactggaatgtttttgtgtcagtg

SEQ ID NO: 699712 - DNA, 120 bp, Artificial Sequence
  ENSG00000196083_28 (sequence is synthesized)
ttttctgtacatattatttgttaattcacagctcacagagtgatagttgtcatagttcttgccttccctaagtttatataaataacttaagtattgctacagtttatctaggttgcagtg

SEQ ID NO: 699713 - DNA, 120 bp, Artificial Sequence
  ENSG00000196083_29 (sequence is synthesized)
gcatctgctgtgcacagagcttccatggtcactgctaagcagtagccagccatcgggcattaattgatttcctactatattcccagcagacacatttagaaactaagctatgttaacctc

SEQ ID NO: 699714 - DNA, 120 bp, Artificial Sequence
  ENSG00000196083_30 (sequence is synthesized)
agtgctcaactatttgaactgttgagtgataaaggaaacaaatataactgtaaatgaatcttggtatcctgtgaaacagaataattcgtaatttaagaaagcccttatcccggtaacatg

SEQ ID NO: 699715 - DNA, 120 bp, Artificial Sequence
  ENSG00000196083_31 (sequence is synthesized)
aatgttgatgaacaaatgtaaaattatatcctatatttaagtacccataataaatcatttccctctataagtgttattgattattttaaattgaaaaaagtttcacttggatgaaaaaag

SEQ ID NO: 699716 - DNA, 120 bp, Artificial Sequence
  ENSG00000196083_32 (sequence is synthesized)
tagaaaagtaggtcattcttggatctacttttttttagccttattaatatttttccctattagaaaccacaattactccctctattaacccttcacttactagaccagaaaagaacttat

SEQ ID NO: 699717 - DNA, 120 bp, Artificial Sequence
  ENSG00000196083_33 (sequence is synthesized)
tccagataagctttgaatatcaattcttacataaactttaggcaaacagggaatagtctagtcaccaaaggaccattctcttgccaatgctgcattccttttgcacttttggattccata

SEQ ID NO: 699718 - DNA, 120 bp, Artificial Sequence
  ENSG00000196083_34 (sequence is synthesized)
tttatcccaaatgctgttgggcacccctagaaataccttgatgttttttctatttatatgcctgcctttggtacttaattttacaaatgctgtaatataaagcatatcaagtttatgtga

SEQ ID NO: 699719 - DNA, 120 bp, Artificial Sequence
  ENSG00000196083_35 (sequence is synthesized)
tacgtatcattgcaagagaatttgtttcaagatttttttttaatgttccagaagatggccaatagagaacattcaagggaaatggggaaacataatttagagaacaagaacaaaccatgt

SEQ ID NO: 699720 - DNA, 120 bp, Artificial Sequence
  ENSG00000196083_36 (sequence is synthesized)
ctcaaatttttttaaaaaaaattaatggttttaaatatatgctatagggacgttccatgcccaggttaacaaagaactgtgatatatagagtgtctaattacaaaatcatatacgattta

SEQ ID NO: 699721 - DNA, 120 bp, Artificial Sequence
  ENSG00000196083_37 (sequence is synthesized)
tttaattctcttctgtattgtaacttagatgattcccaaggactctaataaaaaatcacttcattgtatttggaaacaaaaacatcattcattaattacttattttctttccataggttt

SEQ ID NO: 699722 - DNA, 120 bp, Artificial Sequence
  ENSG00000196083_38 (sequence is synthesized)
ataggttttaatattttgagagtgtcttttttatttcattcatgaacttttgtatttttcatttttcatttgatttgtaaatttacttatgttaaaaataaaccatttattttcagcttt

SEQ ID NO: 699723 - DNA, 120 bp, Artificial Sequence
  ENSG00000196083_39 (sequence is synthesized)
gccagaaagctggagtttgatcatagctctaccactctctagccaaaggatcgtggtgatgttattgaaacttgtctctagccaaaggatcttagttatgttatttaaacctgtgtatta

SEQ ID NO: 699724 - DNA, 120 bp, Artificial Sequence
  ENSG00000196083_40 (sequence is synthesized)
aacttctttatctgcatgtaatatgggaattgaaaaacaaacaacaaaaaaacagaaacaaaataaaacctgtcttattggttggttctgacaatgaaatttgttaatattgtaaaattc

SEQ ID NO: 699725 - DNA, 120 bp, Artificial Sequence
  ENSG00000196083_41 (sequence is synthesized)
ttagaacagtccctagtctatagtcagcaggcatgaatgctagttattattatttaagcccttgaaagtagtaagtgatttcccttacctttgtatttatggttacaggatgacacttct

SEQ ID NO: 699726 - DNA, 120 bp, Artificial Sequence
  ENSG00000196083_42 (sequence is synthesized)
cccggctgcttttgctgcgccctctcagcttcccaagaaagggctttgacctgaagcttgaaattgagtttgggacaataatgtgtctcatggggaattgcatggactccttatcataag

SEQ ID NO: 699727 - DNA, 120 bp, Artificial Sequence
  ENSG00000196083_43 (sequence is synthesized)
ccaaatgctgaggtaaagctgcggaattgagtcgtcctccaagaagggagagaaaatgatgtcttgtgacatttccagataactggcatcgtcatgtgatcatcacctaagaactagaac

SEQ ID NO: 699728 - DNA, 120 bp, Artificial Sequence
  ENSG00000196083_44 (sequence is synthesized)
gttagttctgtatctttctgtaacctcttcctgttgtcttaaatacgctttaaccaacgaaaaagtttttccacattttttacagaagcacaacatattgacagtacataaatattgtgt

SEQ ID NO: 699729 - DNA, 120 bp, Artificial Sequence
  ENSG00000196083_45 (sequence is synthesized)
aagtacctcccgcaccaagcattagtaaaggatgggatcacctgcttctatcagcttgttccatgtacatgcattgtggcttttgctggtgacacagatgtaggatctggtgagtcactg

SEQ ID NO: 699730 - DNA, 120 bp, Artificial Sequence
  ENSG00000196083_46 (sequence is synthesized)
aaaaaaagaagaagaaaagaaaaaagaaacaccaaagaataggaaggttacagaacatttgaaaacacggtgaaggatgatgctgaagtgcccgtttgcatatattgacagcaagaccag

SEQ ID NO: 699731 - DNA, 120 bp, Artificial Sequence
  ENSG00000196083_47 (sequence is synthesized)
gtagggtaatgagtccactcttcctgaaaatgaatttaaataaacataatgttattcatgtccattgtcttctgcggtagcaaataatcataaagcagaataatagaattttgatgatgg

SEQ ID NO: 699732 - DNA, 120 bp, Artificial Sequence
  ENSG00000196083_48 (sequence is synthesized)
agatatttcttgggtagtagaaaaagaaatacttcacagagctgtcaaatctccacatcttcagcattaaatatcatgcaaccaaatgatgacacttctgtggtgtgtagtgagtctcta

SEQ ID NO: 699733 - DNA, 120 bp, Artificial Sequence
  ENSG00000196083_49 (sequence is synthesized)
aaaggaaaccgaggctcatagagttacgtagcatggcctatgtattagtctgtgttcatgctgctgataaagacagacccaagactgggcagtttgcaaaagaaagaggttcattggact

SEQ ID NO: 699734 - DNA, 120 bp, Artificial Sequence
  ENSG00000196083_50 (sequence is synthesized)
gtcacatcttacgtggatggcagcaggccaaaaaagagaacttgtgcagagaaactctcattttgaaaactatctgatcttgtgagacccattcactatcacgagaatagcatgggacag

SEQ ID NO: 699735 - DNA, 61 bp, Artificial Sequence
  ENSG00000196083_51 (sequence is synthesized)
actatctgatcttgtgagacccattcactatcacgagaatagcatgggacagacctacccc

SEQ ID NO: 699736 - DNA, 120 bp, Artificial Sequence
  ENSG00000196083_52 (sequence is synthesized)
tcagcctgtgtaacagcacaaagcaagacatgatgctgagactcatctacgcattttattctagagttaggaagaacttccaattgtcccacctctggactagaactgaggacttagact

SEQ ID NO: 699737 - DNA, 120 bp, Artificial Sequence
  ENSG00000196083_53 (sequence is synthesized)
gagagattgagaacaagagagctccagcacctagcccgacggcatctaacccatagtaatgaatcaaacttaaatgaaaaatatgaaagttttcatctatgtaagatactcaaaatattg

SEQ ID NO: 699738 - DNA, 120 bp, Artificial Sequence
  ENSG00000196083_54 (sequence is synthesized)
tttctgatattgttagtaccgtaatgcccaaatgtagctaaaaaaatcgacgtgagtacagtgagacacaattttgtgtctgtacaattatgaaaaattaaaaacaaagaaaatattcaa

SEQ ID NO: 699739 - DNA, 120 bp, Artificial Sequence
  ENSG00000196083_55 (sequence is synthesized)
agctaccaaagatagaaaaaactggtagagccacatattgttggtgaattattaagacccttttaaaaatcattcatggtagacttcaagagtcataaaaaagattgcatcatctgacct

SEQ ID NO: 699740 - DNA, 120 bp, Artificial Sequence
  ENSG00000196083_56 (sequence is synthesized)
aagactttcggaatttttcctgaacaaataacagaaagggaattatataccttttaatattattagaagcattatctgtagttgtaaaacattattaatagcagccatccaattgtatgc

SEQ ID NO: 699741 - DNA, 120 bp, Artificial Sequence
  ENSG00000196083_57 (sequence is synthesized)
aactaattaaggtattgaatgtttattttccaaaaatgcataattataatattattttaaacactatgtatcaatatttaagcaggtttataatataccagcagccacaattgctaaaat

SEQ ID NO: 699742 - DNA, 120 bp, Artificial Sequence
  ENSG00000196083_58 (sequence is synthesized)
gaaaatcatttaaattatgattttaaatggtataaacatgatttctatgttgatagtactatattattctacaataaatggaaattataaagccttcttgtcagaagtgctgctcctaaa

SEQ ID NO: 699743 - DNA, 120 bp, Artificial Sequence
  ENSG00000196083_59 (sequence is synthesized)
gatagagtacacagggggcagtgggccgctgtgtttaaacacaggtatttttcattaccttcacactcagccaactagaatattgcttttttcccttacctcaggtcctatgggggaaaa

SEQ ID NO: 699744 - DNA, 120 bp, Artificial Sequence
  ENSG00000196083_60 (sequence is synthesized)
cttcccaagaaagtccttttgcagattgctcagcacaggacatgataattttcatctcggattttggaggaattgatgacacttctgtggtgtgtagtgagtctctacttttatggaatc

SEQ ID NO: 699745 - DNA, 120 bp, Artificial Sequence
  ENSG00000196083_61 (sequence is synthesized)
aagcagtttttgatttcattcagagaagcagaaggatgattgttgttctgagccctgactatgtgacagaaaagagcatcagcatgctggagtttaaactgggtgtcatgtgccagaact

SEQ ID NO: 699746 - DNA, 120 bp, Artificial Sequence
  ENSG00000196083_62 (sequence is synthesized)
ccattgccaccaagctcattgtggttgagtaccgtccccttgagcacccgcacccaggcattcttcagctcaaagagtctgtgtcttttgtgagctggaagggagaaaagtccaaacatt

SEQ ID NO: 699747 - DNA, 120 bp, Artificial Sequence
  ENSG00000196083_63 (sequence is synthesized)
ctggctctaaattctggaaagctttgcggttggctcttcccctgagaagtctgagtgccagttctggctggaatgagagctgctcttcccagtctgacatcagtctggatcacgttcaaa

SEQ ID NO: 699748 - DNA, 120 bp, Artificial Sequence
  ENSG00000196083_64 (sequence is synthesized)
ggaggagaagtcgtttgaaagagcccccagaacttcagagctcagagagggctgcaggtagccctccagccccaggcacaatgtccaagcaccgagggaagtcctccgccacctgccgct

SEQ ID NO: 699749 - DNA, 120 bp, Artificial Sequence
  ENSG00000196083_65 (sequence is synthesized)
gttgtgtcacctactgtgaaggagagaatcaccttaggaacaagagccgggcagagattcataaccagccccagtgggagacacacctctgtaagcctgttccccaagagtcagaaactc

SEQ ID NO: 699750 - DNA, 120 bp, Artificial Sequence
  ENSG00000196083_66 (sequence is synthesized)
aatggatacaaaatggcaccagattggaaccccctgctccccagatctcagcccttgctcttcatcatttcacggacttatccaataacaacgacttttatatcctataattactgtgtg

SEQ ID NO: 699751 - DNA, 120 bp, Artificial Sequence
  ENSG00000196083_67 (sequence is synthesized)
tggtgggtggtggctactatctctaccaaccctctgtatgtcatgaacctgtgggaaaatctgacatttttatcatctaatggactatcagatttctgtcccctttattgatttttaaaa

SEQ ID NO: 699752 - DNA, 120 bp, Artificial Sequence
  ENSG00000196083_68 (sequence is synthesized)
actatttatttctaggagacaaaagacctgaaggacctgaatccagaattattgcctctaaaggcctcagaagagcacactcttcttgggccctagaaggtcagtatgtgaaagttgcct

SEQ ID NO: 699753 - DNA, 120 bp, Artificial Sequence
  ENSG00000196083_69 (sequence is synthesized)
aaagtctgatcctctatcttgtccaatggtttaaaactgagctaagaatttaaatgtgtttcttttcagtgagttgatcaacctcacattataagtcagtcaggtgtacttgggctatga

SEQ ID NO: 699754 - DNA, 120 bp, Artificial Sequence
  ENSG00000196083_70 (sequence is synthesized)
tatgcattcccagggagcagcatggaaaggagctggttctggtggaagctgtaggacgaagctcaacagaaaacctacagcacatttttcctcaaagaaccaaacatacccacccaggga

SEQ ID NO: 699755 - DNA, 120 bp, Artificial Sequence
  ENSG00000196083_71 (sequence is synthesized)
tacatggcgttctctgtctcactgtaaactagtgttctctaaactgcctaacattgttagcatcaataaaattctatttttacgtcattttatttgtactaacaaatttttacatctctc

SEQ ID NO: 699756 - DNA, 120 bp, Artificial Sequence
  ENSG00000196083_72 (sequence is synthesized)
tcacccttctacttcctatgattgttgtattcttatctggagagtattccatttcagaaaatggagatttggtttaggtaccagaaaaactaagatgccttttttgtttctctctgatat

SEQ ID NO: 699757 - DNA, 120 bp, Artificial Sequence
  ENSG00000196083_73 (sequence is synthesized)
gtaatgggagagatgtggaaaataaccaaaagagagggagaatgtgacttaaatgaaatggaagtttacaacaatctcatatttttagaactgacagatgaaaaattccgtattgtaagt

SEQ ID NO: 699758 - DNA, 120 bp, Artificial Sequence
  ENSG00000196083_74 (sequence is synthesized)
gatgtagcgtagaaataggtgccttcgtcccattcaggcttctgagaagggataataaattcaagtgcctacaaggatcagaaggtaagagaaaagagaaaatatggccagataccagct

SEQ ID NO: 699759 - DNA, 120 bp, Artificial Sequence
  ENSG00000196083_75 (sequence is synthesized)
tattttacatgctctccatctagaactgatgtgaatagggacataggcacagatagttatttcttctctgtaaacattttcataaactcatataaggcacatggcatttgatttccaagt

SEQ ID NO: 699760 - DNA, 120 bp, Artificial Sequence
  ENSG00000196083_76 (sequence is synthesized)
catataaggcacatggcatttgatttccaagtcaggtagatcattggccctctaagcaactgaagaacacatatttcttaaaaagggtcagcttcaggccgggtgtggtggctcatgcct

SEQ ID NO: 699761 - DNA, 74 bp, Artificial Sequence
  ENSG00000196083_77 (sequence is synthesized)
gcctataatcccagcactttgggaagtcaagacttgtggatcaactgaggtcagttgttcaagagttagccagg

SEQ ID NO: 699762 - DNA, 120 bp, Artificial Sequence
  ENSG00000196083_78 (sequence is synthesized)
atgggtagcttctactcagttccatttgatttttgtcactaattgagccccaatgttgccatattgtccatttttttctaaagaatctaaaaaattcagatttttatgtataatgtcaat

SEQ ID NO: 699763 - DNA, 120 bp, Artificial Sequence
  ENSG00000196083_79 (sequence is synthesized)
tatgggatggcttaaagttaagaaggaaaaaacaaagagccaaacaaattatatctgtgggacatagttagcctgagggcaactagtttgtaatttcataactaaagtattcagccaaag

SEQ ID NO: 699764 - DNA, 120 bp, Artificial Sequence
  ENSG00000196083_80 (sequence is synthesized)
aacatatctccaaatggaattttagtgtccctgataataccagaactggaagacacaggttggctctaaggacatagtggagcatgtttatcctctcctcaaattgaagacatctgggct

SEQ ID NO: 699765 - DNA, 120 bp, Artificial Sequence
  ENSG00000196083_81 (sequence is synthesized)
gttacaattgagctgatctgacctaaccctccattagaaaagaaaaatctggaaaattcggtgccttccatttactctttagaggtttcttgcctgcttactgtcagaaaataagaagaa

SEQ ID NO: 699766 - DNA, 120 bp, Artificial Sequence
  ENSG00000196083_82 (sequence is synthesized)
cgaagtctgctactcctgaacatgagcagaaccaaaaaagcaagagaccacaccttacatgagaagtcacctttaatacattagctgtggctgttagtgagttgtggcccaatgagtgtc

SEQ ID NO: 699767 - DNA, 120 bp, Artificial Sequence
  ENSG00000196083_83 (sequence is synthesized)
agtggctcccggtcagtaacagtgaatgggcagtggggaaagaaagaaagcagtttcatctcactacccctcttgaaaatgttctcagaagatcctttctttgtcgaaacaaacaaacaa

SEQ ID NO: 699768 - DNA, 120 bp, Artificial Sequence
  ENSG00000196083_84 (sequence is synthesized)
acaaaaaactagaagattcctactccaaagatgggggaacaagggccccctagagtaaatgtgaactcaccctgaaacttgtaatcagaaaacgacaggccaccctaactaaatatccag

SEQ ID NO: 699769 - DNA, 120 bp, Artificial Sequence
  ENSG00000196083_85 (sequence is synthesized)
tagaaaatgacttagcacaacccaaaggccttgtcctctattaaatcccttcttgtaaagaataatccatccttgatgtatattcaagaaccttcagttggaagacagatagcagtttct

SEQ ID NO: 699770 - DNA, 120 bp, Artificial Sequence
  ENSG00000196083_86 (sequence is synthesized)
ctccaaatctattaataatgggtaatgtaagcggctccgaagctcaaggagggagaagattctctgacccactatcagtgttatgccttattaacacagcatctcaaagtgtaaaatatc

SEQ ID NO: 699771 - DNA, 120 bp, Artificial Sequence
  ENSG00000196083_87 (sequence is synthesized)
tttggaagaaaatgagaaattaaatttttcatttatacattattttctgttttagtgaagacaaagaaatgaaagaactattggcagagtcatggaaaattaaatatgagctcatattat

SEQ ID NO: 699772 - DNA, 120 bp, Artificial Sequence
  ENSG00000196083_88 (sequence is synthesized)
atgagtagctagaaaattttggtgctctcaaaactacattttggcaagtatcaatttccttggacaatataagtgtagtggaagcagtaaaagtcttagttttcagtattagttatacag

SEQ ID NO: 699773 - DNA, 120 bp, Artificial Sequence
  ENSG00000196083_89 (sequence is synthesized)
cggtcagaaagataatagactatacttctactgtatggagaaaggatcagaggttatattattatttcttgacctgacatgccaaattgaatgtgatgttcagtaccatacatttcaatg

SEQ ID NO: 699774 - DNA, 120 bp, Artificial Sequence
  ENSG00000196083_90 (sequence is synthesized)
aagcaaattataataagaaagaaatttttttcatgggccatgcatatccataatagaaataacaggattgtagggtaaatggatatatcattgcataagaaatattgtctacttagttgc

SEQ ID NO: 699775 - DNA, 120 bp, Artificial Sequence
  ENSG00000196083_91 (sequence is synthesized)
atgagttttaaatcaaatagagatggatgtgagtcctacttctctcctatctgtttgaacatggtctctctgagcctcaatttcctactagctaaaataaagatactattatcaacctca

SEQ ID NO: 699776 - DNA, 120 bp, Artificial Sequence
  ENSG00000196090_0 (sequence is synthesized)
atggcgagcctcgccgcgctcgccctcagcctgctcctgaggctgcagctgccgccactgcccggcgcccgggctcagagcgccgcaggtggctgttcctttgatgagcactacagcaac

SEQ ID NO: 699777 - DNA, 120 bp, Artificial Sequence
  ENSG00000196090_1 (sequence is synthesized)
tgtggttatagtgtggctctagggaccaatgggttcacctgggagcagattaacacatgggagaaaccaatgctggaccaggcagtgcccacaggatctttcatgatggtgaacagctct

SEQ ID NO: 699778 - DNA, 120 bp, Artificial Sequence
  ENSG00000196090_2 (sequence is synthesized)
gggagagcctctggccagaaggcccaccttctcctgccaaccctgaaggagaatgacacccactgcatcgacttccattactacttctccagccgtgacaggtccagcccaggggccttg

SEQ ID NO: 699779 - DNA, 120 bp, Artificial Sequence
  ENSG00000196090_3 (sequence is synthesized)
aacgtctacgtgaaggtgaatggtggcccccaagggaaccctgtgtggaatgtgtccggggtcgtcactgagggctgggtgaaggcagagctcgccatcagcactttctggccacatttc

SEQ ID NO: 699780 - DNA, 120 bp, Artificial Sequence
  ENSG00000196090_4 (sequence is synthesized)
tatcaggtgatatttgaatccgtctcattgaagggtcatcctggctacatcgccgtggacgaggtccgggtccttgctcatccatgcagaaaagcacctcattttctgcgactccaaaac

SEQ ID NO: 699781 - DNA, 120 bp, Artificial Sequence
  ENSG00000196090_5 (sequence is synthesized)
gtggaggtgaatgtggggcagaatgccacatttcagtgcattgctggtgggaagtggtctcagcatgacaagctttggctccagcaatggaatggcagggacacggccctgatggtcacc

SEQ ID NO: 699782 - DNA, 120 bp, Artificial Sequence
  ENSG00000196090_6 (sequence is synthesized)
cgtgtggtcaaccacaggcgcttctcagccacagtcagtgtggcagacactgcccagcggagcgtcagcaagtaccgctgtgtgatccgctctgatggtgggtctggtgtgtccaactac

SEQ ID NO: 699783 - DNA, 120 bp, Artificial Sequence
  ENSG00000196090_7 (sequence is synthesized)
gcggagctgatcgtgaaagagcctcccacgcccattgctcccccagagctgctggctgtgggggccacatacctgtggatcaagccaaatgccaactccatcatcggggatggccccatc

SEQ ID NO: 699784 - DNA, 120 bp, Artificial Sequence
  ENSG00000196090_8 (sequence is synthesized)
atcctgaaggaagtggaatatcgcaccaccacaggcacgtgggcagagacccacatagtcgactctcccaactataagctgtggcatctggaccccgatgttgagtatgagatccgagtg

SEQ ID NO: 699785 - DNA, 120 bp, Artificial Sequence
  ENSG00000196090_9 (sequence is synthesized)
ctcctcacacgaccaggtgaggggggtacgggaccgccagggcctcccctcaccaccaggaccaagtgtgcagatccggtacatggcccacagaacgtggaaatcgtagacatcagagcc

SEQ ID NO: 699786 - DNA, 120 bp, Artificial Sequence
  ENSG00000196090_10 (sequence is synthesized)
cggcagctgaccctgcagtgggagcccttcggctacgcggtgacccgctgccatagctacaacctcaccgtgcagtaccagtatgtgttcaaccagcagcagtacgaggccgaggaggtc

SEQ ID NO: 699787 - DNA, 120 bp, Artificial Sequence
  ENSG00000196090_11 (sequence is synthesized)
atccagacctcctcccactacaccctgcgaggcctgcgccccttcatgaccatccggctgcgactcttgctgtctaaccccgagggccgaatggagagcgaggagctggtggtgcagact

SEQ ID NO: 699788 - DNA, 120 bp, Artificial Sequence
  ENSG00000196090_12 (sequence is synthesized)
gaggaagacgttccaggagctgttcctctagaatccatccaaggggggccctttgaggagaagatctacatccagtggaaacctcccaatgagaccaatggggtcatcacgctctacgag

SEQ ID NO: 699789 - DNA, 120 bp, Artificial Sequence
  ENSG00000196090_13 (sequence is synthesized)
atcaactacaaggctgtcggctcgctggacccaagtgctgacctctcgagccagagggggaaagtgttcaagctccggaatgaaacccaccacctctttgtgggtctgtacccagggacc

SEQ ID NO: 699790 - DNA, 120 bp, Artificial Sequence
  ENSG00000196090_14 (sequence is synthesized)
acctattccttcaccatcaaggccagcacagcaaagggctttgggccccctgtcaccactcggattgccaccaaaatttcagctccatccatgcctgagtacgacacagacaccccattg

SEQ ID NO: 699791 - DNA, 120 bp, Artificial Sequence
  ENSG00000196090_15 (sequence is synthesized)
aatgagacagacacgaccatcacagtgatgctgaaacccgctcagtcccggggagctcctgtcagtgtttatcagctggttgtcaaggaggagcgacttcagaagtcacggagggcagct

SEQ ID NO: 699792 - DNA, 120 bp, Artificial Sequence
  ENSG00000196090_16 (sequence is synthesized)
gacattattgagtgcttttcggtgcccgtgagctatcggaatgcctccagcctcgattctctacactactttgctgctgagttgaagcctgccaacctgcctgtcacccagccatttaca

SEQ ID NO: 699793 - DNA, 120 bp, Artificial Sequence
  ENSG00000196090_17 (sequence is synthesized)
gtgggtgacaataagacatacaatggctactggaaccctcctctctctcccctgaaaagctacagcatctacttccaggcactcagcaaagccaatggagagaccaaaatcaactgtgtt

SEQ ID NO: 699794 - DNA, 120 bp, Artificial Sequence
  ENSG00000196090_18 (sequence is synthesized)
cgtctggctacaaaaggtgcctccacccagaattctaacactgtggagccagagaagcaggtggacaacaccgtgaagatggctggcgtgatcgctggcctcctcatgttcatcatcatt

SEQ ID NO: 699795 - DNA, 120 bp, Artificial Sequence
  ENSG00000196090_19 (sequence is synthesized)
ctcctgggcgtgatgctcaccatcaaaaggagaagaaatgcttattcctactcctattacttgaagctggccaagaagcagaaggagacccagagtggagcccagagggagatggggcct

SEQ ID NO: 699796 - DNA, 120 bp, Artificial Sequence
  ENSG00000196090_20 (sequence is synthesized)
gtggcctctgccgacaaacccaccaccaagctcagcgccagccgcaatgatgaaggcttctcttctagttctcaggacgtcaacggattcacagatggcagccgcggggagctttcccag

SEQ ID NO: 699797 - DNA, 120 bp, Artificial Sequence
  ENSG00000196090_21 (sequence is synthesized)
cccaccctcacgatccagactcatccctaccgcacctgtgaccctgtggagatgagctacccccgggaccagttccaacccgccatccgggtggctgacttgctgcagcacatcacgcag

SEQ ID NO: 699798 - DNA, 120 bp, Artificial Sequence
  ENSG00000196090_22 (sequence is synthesized)
atgaagagaggccagggctacgggttcaaggaggaatacgaggccttaccagaggggcagacagcttcgtgggacacagccaaggaggatgaaaaccgcaataagaatcgatatgggaac

SEQ ID NO: 699799 - DNA, 120 bp, Artificial Sequence
  ENSG00000196090_23 (sequence is synthesized)
atcatatcctacgaccattcccgggtgaggctgctggtgctggatggagacccgcactctgactacatcaatgccaactacattgacggataccatcgacctcggcactacattgcgact

SEQ ID NO: 699800 - DNA, 120 bp, Artificial Sequence
  ENSG00000196090_24 (sequence is synthesized)
caaggtccgatgcaggagactgtaaaggacttttggagaatgatctggcaggagaactccgccagcatcgtcatggtcacaaacctggtggaagtgggcagggtgaaatgtgtgcgatac

SEQ ID NO: 699801 - DNA, 120 bp, Artificial Sequence
  ENSG00000196090_25 (sequence is synthesized)
tggccagatgacacggaggtctacggagacattaaagtcaccctgattgaaacagagcccctggcagaatacgtcatacgcaccttcacagtccagaagaaaggctaccatgagatccgg

SEQ ID NO: 699802 - DNA, 120 bp, Artificial Sequence
  ENSG00000196090_26 (sequence is synthesized)
gagctccgcctcttccacttcaccagctggcctgaccacggcgttccctgctatgccactggccttctgggcttcgtccgccaggtcaagttcctcaaccccccggaagctgggcccata

SEQ ID NO: 699803 - DNA, 120 bp, Artificial Sequence
  ENSG00000196090_27 (sequence is synthesized)
gtggtccactgcagtgctggggctgggcggactggctgcttcattgccattgacaccatgcttgacatggccgagaatgaaggggtggtggacatcttcaactgcgtgcgtgagctccgg

SEQ ID NO: 699804 - DNA, 120 bp, Artificial Sequence
  ENSG00000196090_28 (sequence is synthesized)
gcccaaagggtcaacctggtacagacagaggagcaatatgtgtttgtgcacgatgccatcctggaagcgtgcctctgtggcaacactgccatccctgtgtgtgagttccgttctctctac

SEQ ID NO: 699805 - DNA, 120 bp, Artificial Sequence
  ENSG00000196090_29 (sequence is synthesized)
tacaatatcagcaggctggacccccagacaaactccagccaaatcaaagatgaatttcagaccctcaacattgtgacaccccgtgtgcggcccgaggactgcagcattgggctcctgccc

SEQ ID NO: 699806 - DNA, 120 bp, Artificial Sequence
  ENSG00000196090_30 (sequence is synthesized)
cggaaccatgataagaatcgaagtatggacgtgctgcctctggaccgctgcctgcccttccttatctcagtggacggagaatccagcaattacatcaacgcagcactgatggatagccac

SEQ ID NO: 699807 - DNA, 120 bp, Artificial Sequence
  ENSG00000196090_31 (sequence is synthesized)
aagcagcctgccgccttcgtggtcacccagcaccctctacccaacaccgtggcagacttctggaggctggtgttcgattacaactgctcctctgtggtgatgctgaatgagatggacact

SEQ ID NO: 699808 - DNA, 120 bp, Artificial Sequence
  ENSG00000196090_32 (sequence is synthesized)
gcccagttctgtatgcagtactggcctgagaagacctccgggtgctatgggcccatccaggtggagttcgtctccgcagacatcgacgaggacatcatccacagaatattccgcatctgt

SEQ ID NO: 699809 - DNA, 120 bp, Artificial Sequence
  ENSG00000196090_33 (sequence is synthesized)
aacatggcccggccacaggatggttatcgtatagtccagcacctccagtacattggctggcctgcctaccgggacacgcccccctccaagcgctctctgctcaaagtggtccgacgactg

SEQ ID NO: 699810 - DNA, 120 bp, Artificial Sequence
  ENSG00000196090_34 (sequence is synthesized)
gagaagtggcaggagcagtatgacgggagggagggacgtactgtggtccactgcctaaatgggggaggccgtagtggaaccttctgtgccatctgcagtgtgtgtgagatgatccagcag

SEQ ID NO: 699811 - DNA, 120 bp, Artificial Sequence
  ENSG00000196090_35 (sequence is synthesized)
caaaacatcattgacgtgttccacatcgtgaaaacactgcgtaacaacaaatccaacatggtggagaccctggaacagtataaatttgtatacgaggtggcactggaatatttaagctcc

SEQ ID NO: 699812 - DNA, 120 bp, Artificial Sequence
  ENSG00000196090_36 (sequence is synthesized)
ttttagctcaatgggatggggaacctgccggagtccagaggctgctgtgaccaagcccccttttgtgtgaatggcagtaactgggctcaggagctctgaggtggcaccctgcctgactcc

SEQ ID NO: 699813 - DNA, 120 bp, Artificial Sequence
  ENSG00000196090_37 (sequence is synthesized)
aaggagaagactggtggccctgtgttccacggggggctctgcaccttctgaggggtctcctgttgccgtgggagatgctgctccaaaaggcccaggcttccttttcaacctaaccagcca

SEQ ID NO: 699814 - DNA, 120 bp, Artificial Sequence
  ENSG00000196090_38 (sequence is synthesized)
cagccaagggcccaagcagaagtacacccacaagcaaggccttggatttctggctcccagaccacctgcttttgttctgagtttgtggatctcttggcaagccaactgtgcaggtgctgg

SEQ ID NO: 699815 - DNA, 120 bp, Artificial Sequence
  ENSG00000196090_39 (sequence is synthesized)
ggagtgggaggctcccctgccctccttctccttaggagtggaggagatgtgtgttctgctcctctacgtcatggaaaagattgaggctcttgggggtcactgctctgctgccccctgcaa

SEQ ID NO: 699816 - DNA, 120 bp, Artificial Sequence
  ENSG00000196090_40 (sequence is synthesized)
cctccttcaggggcctctggcaccagacatttgcagtctggaccagtgtgaccttacgatgttccctaggccacaagagaggccccccatcctcacacctaacctgcatggggcttcgcc

SEQ ID NO: 699817 - DNA, 120 bp, Artificial Sequence
  ENSG00000196090_41 (sequence is synthesized)
cacaaccattctgtaccccttccccagcctgggccttgaccgtccagcattcactggccggccagctgtgtccacagcagtttttgataaaggtgttctttgcttttttgtgtggtcagt

SEQ ID NO: 699818 - DNA, 120 bp, Artificial Sequence
  ENSG00000196090_42 (sequence is synthesized)
gggagggggtggaactgcagggaacttctctgctcctccttgtctttgtaaaaagggaccacctccctggggcagggcttgggctgacctgtaggatgtaacccctgtgtttctttggtg

SEQ ID NO: 699819 - DNA, 120 bp, Artificial Sequence
  ENSG00000196090_43 (sequence is synthesized)
gtagctttctttggaagagacaaacaagataagatttgattattttccaaagtgtatgtgaaaagaaactttcttttggagggtgtaaaatcttagtctcttatgtcaaaaagaaggggg

SEQ ID NO: 699820 - DNA, 120 bp, Artificial Sequence
  ENSG00000196090_44 (sequence is synthesized)
cgggggagtttgagtatgtacctctaagacaaatctctcgggccttttattttttcctggcaatgtccttaaaagctcccaccctgggacagcatgccactgagcaaggagagatgggtg

SEQ ID NO: 699821 - DNA, 120 bp, Artificial Sequence
  ENSG00000196090_45 (sequence is synthesized)
agcctgaagatggtccctttggtttctggggcaaatagagcaccagctttgtgcataatttggatgtccaaatttgaactccttcctaaagaaacccagcagccaccttgaaaaaggcca

SEQ ID NO: 699822 - DNA, 120 bp, Artificial Sequence
  ENSG00000196090_46 (sequence is synthesized)
ttgtggagcccattatactttgatttaaaataggccaagagaatcaggcctggagatctagggtcttgtccaaagtgtgagtgagtcaatgagagggaaccaacatttgctaagtctcta

SEQ ID NO: 699823 - DNA, 120 bp, Artificial Sequence
  ENSG00000196090_47 (sequence is synthesized)
ctgtatgccagggatcatgcttggcactttccataggacatttcacacagtccttagaacccccaggagagagctactgacttgttatcatctccatttgatcatctcctccaatgagga

SEQ ID NO: 699824 - DNA, 120 bp, Artificial Sequence
  ENSG00000196090_48 (sequence is synthesized)
aacccacgcaccttccttagtaatgaaatcctgggttccaaaggggcaggtaatggcaatgagacttctccgtgctgttttcttcatcttctctaagccaagcaattattttatggaggg

SEQ ID NO: 699825 - DNA, 120 bp, Artificial Sequence
  ENSG00000196090_49 (sequence is synthesized)
aaaataaggccagaaacttctgagcagataactccacaaatggaaatttagtactttcttcctgatgccagttcttctgggaagcgcagaatttcagatatattttagtaacacattccc

SEQ ID NO: 699826 - DNA, 120 bp, Artificial Sequence
  ENSG00000196090_50 (sequence is synthesized)
agctccccaggaaagccagtctcatctaatttcttagtcagtaaaaacaattccctgttccttcaggctatgaatggaccagccagggaaactctcgaccttgatctctagccagtgctt

SEQ ID NO: 699827 - DNA, 120 bp, Artificial Sequence
  ENSG00000196090_51 (sequence is synthesized)
aattcaagaaggtacagctttggccctcaagagcccactgtatgctggggaaatggaaccatggtgcagtagtgtggagtggatgagtgttccatgagcctaggagcaagaaagtctctt

SEQ ID NO: 699828 - DNA, 120 bp, Artificial Sequence
  ENSG00000196090_52 (sequence is synthesized)
cggcctcgggcttcctggagaaggggacgtccattcctgctgggtcttaacaagcataaaaaggaaaaaaaggaaactcaggcaaagggatccatatgtgcaatggcaaagaaatgtgaa

SEQ ID NO: 699829 - DNA, 120 bp, Artificial Sequence
  ENSG00000196090_53 (sequence is synthesized)
aaggcattgggagaagcagtctgggggaggccagcccagtgcgggcacagcacaacacggggagcagcaagagatgagccagggtccaggagacagatgcccatcgcgagtacagacttt

SEQ ID NO: 699830 - DNA, 120 bp, Artificial Sequence
  ENSG00000196090_54 (sequence is synthesized)
gtcctattggcaacaaggagtccatggagctttagagagatgcactcagcttcgtgttggccaagactccttctgggccaatggggctgcctcttttcctttcatcagacactgtgaaaa

SEQ ID NO: 699831 - DNA, 120 bp, Artificial Sequence
  ENSG00000196090_55 (sequence is synthesized)
cattcccttaagcgtgcactttttaatatcacatctatttgtctgtctgctcattgttttgttgctggaactaaatatgcaatggatcatgagactcagattctatgagaaacccagggt

SEQ ID NO: 699832 - DNA, 120 bp, Artificial Sequence
  ENSG00000196090_56 (sequence is synthesized)
ctctgctttaccacggagcagggtcaccaacccagatctccaggcccatgaggatggaacatgaaaggagccgacaaaagttgcttccattggcatgggctctggagctgtccagaagtc

SEQ ID NO: 699833 - DNA, 120 bp, Artificial Sequence
  ENSG00000196090_57 (sequence is synthesized)
cagggacaccagacttgatcaaggaagggctgtcactttagaggttcaaaaggaagtgcctcaaagcaaaggcaagcaaaggaaccccacgatgaacttgctcttttcctttgatgagcc

SEQ ID NO: 699834 - DNA, 120 bp, Artificial Sequence
  ENSG00000196090_58 (sequence is synthesized)
tctccccaggtgtatttcagcagaccccggggacccacccccactgggcctgctggcctccctcggctccagcccaatgccccagctggccttccccagcctgcaaggagcctgtagcat

SEQ ID NO: 699835 - DNA, 120 bp, Artificial Sequence
  ENSG00000196090_59 (sequence is synthesized)
ggcaaatctgcctgctgtatgctattttcttagatcttggtacatccagacaggatgagggtggagggagagctatttaacacaaatcctaagatttttttctgctcaggaaggggtgaa

SEQ ID NO: 699836 - DNA, 120 bp, Artificial Sequence
  ENSG00000196090_60 (sequence is synthesized)
atagctggcagatacaaaagacagtggcttttatcattttaaatggtaggaatttaaggtgtgacttcagggagaaacaaacttgcaaaaaaaaaaaatctcaggccatgttggggtaac

SEQ ID NO: 699837 - DNA, 120 bp, Artificial Sequence
  ENSG00000196090_61 (sequence is synthesized)
ccagcaagggccagtgatgatttcccccagctcatccccttattttcccacaacccaaccattctctaaagcaggacagtgaataggtcttaggccagtgcacacaggaagaaattgagg

SEQ ID NO: 699838 - DNA, 120 bp, Artificial Sequence
  ENSG00000196090_62 (sequence is synthesized)
cttatggatggggatgacttccctaagatcccatgggacaaggatgtggcaaggcttggatgagatggggcaccagtgcccaggaatttgaacattttcctttacccaggaaatctccgg

SEQ ID NO: 699839 - DNA, 120 bp, Artificial Sequence
  ENSG00000196090_63 (sequence is synthesized)
agccaacaccaccacccccagggggtctccccaccccaccccatttacagggtgagctcagcctgtcatgagcagaggaaaatattattaatgctctctgagtctttacaacaggagctc

SEQ ID NO: 699840 - DNA, 120 bp, Artificial Sequence
  ENSG00000196090_64 (sequence is synthesized)
ttacctcatagatgtgggctctgtttggggaagatgcaaggaagtaatgagaagcccaggaaatttctccacctgtgtttatggcctaaatagcttcaggatgtatcttagctgcactcc

SEQ ID NO: 699841 - DNA, 120 bp, Artificial Sequence
  ENSG00000196090_65 (sequence is synthesized)
aacattgcatcctttctggggtgaagaatctgggccaaccaggggtccttgggcctctagaaggccacagtaggcctctctttgtgggaatggaaggggacagtttgcttttagtgctgg

SEQ ID NO: 699842 - DNA, 120 bp, Artificial Sequence
  ENSG00000196090_66 (sequence is synthesized)
ccctctctgtgggtgtggcctgcaaaggaaccaacagaccctatgctggggactctaacatgtgagctcattaaattcttccagcattctaaaggagggtttgtgattgtcaccatttac

SEQ ID NO: 699843 - DNA, 120 bp, Artificial Sequence
  ENSG00000196090_67 (sequence is synthesized)
tgatgaggaaactaaggctcctaggggagaaatcacttgcccacagttccacagctagtgagtgaatgaaccaggatttaaaccggttttttctcactacagagacaatatttttccacc

SEQ ID NO: 699844 - DNA, 120 bp, Artificial Sequence
  ENSG00000196090_68 (sequence is synthesized)
attgtatctcacatttttcccaggaggttacccataacagaagagactagagtggaacagatacgtcagtggataaagctcaaagcaaacaacagtaagcttaaaattccttcatagtct

SEQ ID NO: 699845 - DNA, 120 bp, Artificial Sequence
  ENSG00000196090_69 (sequence is synthesized)
catgttttacgttcacaattcatgcaaaatttgcattccactttctgatttagccttgttggttttaatatgactctatgaatatttcaaaaaaaaatgtgctctgttcctcatgttgtt

SEQ ID NO: 699846 - DNA, 120 bp, Artificial Sequence
  ENSG00000196090_70 (sequence is synthesized)
ctgttctgttcaccccgctatgacggaccctaggtcagctggtcttcagcttgaccctagaattgactctaggagcagtgaccctgctgcctcccagagccagttataggctcaagatca

SEQ ID NO: 699847 - DNA, 120 bp, Artificial Sequence
  ENSG00000196090_71 (sequence is synthesized)
agaccaactgaccttctcctaggcagctcctttggtgtgtgggtgctctgacctcactgttcatgaggggacctcaactaaggcatcttccagttgggtgctggaaggaacccattaact

SEQ ID NO: 699848 - DNA, 120 bp, Artificial Sequence
  ENSG00000196090_72 (sequence is synthesized)
cacactagaatgatgaggatttgctcatctggcgtggagaaggatgagcccacaaaaccctaaagggaaaagagaagctggacacagctgtactcagcagattcctgaatgctaggctgg

SEQ ID NO: 699849 - DNA, 120 bp, Artificial Sequence
  ENSG00000196090_73 (sequence is synthesized)
aaagtggtgcctgttgtccaagtggagtcacatggttgctaatgtgggcaagtctgaggacacacttcatgagcagctggggtctggaaggctcctcactttaccctagccacacataat

SEQ ID NO: 699850 - DNA, 120 bp, Artificial Sequence
  ENSG00000196090_74 (sequence is synthesized)
tactgggtgcctacagcacctagcaccttggagggggcactattaggaaatcgagattactatggcacaattaattcctgggtaaggcatggggttgtggtggacagagctcagtcttta

SEQ ID NO: 699851 - DNA, 120 bp, Artificial Sequence
  ENSG00000196090_75 (sequence is synthesized)
gtttgaacgaaaacatacatacatgaaaaacatacatgaaaaaaggaccctcatcaacattagaaggggtagatttggagcactttaggcaggaaaacaggaacgcaaggccaggaaact

SEQ ID NO: 699852 - DNA, 120 bp, Artificial Sequence
  ENSG00000196090_76 (sequence is synthesized)
ggaacccagtgaatactcagaaccgaggatgcagatgacttatttagcaaaatggtcacttctgtgacatagctggagaaaggatgggtaacagcttgccagagccacttggaacaaggg

SEQ ID NO: 699853 - DNA, 120 bp, Artificial Sequence
  ENSG00000196090_77 (sequence is synthesized)
caaatctcagtgtctggggcaaaagatgatgcatttccctctgacccatcatgtttattcatcctccactccccattgccacactagctcttgctgtaagtcctcaccaggatctacatt

SEQ ID NO: 699854 - DNA, 120 bp, Artificial Sequence
  ENSG00000196090_78 (sequence is synthesized)
tcctcgtcgctggtgggaaccccttagagtacatagaggtatcagtccagtaagactgctctacacaacagaagtgaggcccagggagtagcagccaggcccttatcctgttacctctgc

SEQ ID NO: 699855 - DNA, 120 bp, Artificial Sequence
  ENSG00000196090_79 (sequence is synthesized)
aggagtgactgcccaacccagatccagagacattgaaggaaatgataattccttggtacctcactgccttgggacaaaatgaagaaagccacccttccttaggctgcagcttgccactcc

SEQ ID NO: 699856 - DNA, 120 bp, Artificial Sequence
  ENSG00000196090_80 (sequence is synthesized)
tgggctgggtaaacaggtcatcagcaccaagctcaaccaggagtaacactctggaagacatgggtgagcccaagaggaagcatgaacaggacgctgttcctaagtcatgtcaacaggttg

SEQ ID NO: 699857 - DNA, 120 bp, Artificial Sequence
  ENSG00000196090_81 (sequence is synthesized)
tgctgggccaggatccccagggaaaaaaatggtcaacccaactggagggtaggttagaagaaaaaaaacataaacgtggatagtcatgtcatctcaaatccctgacttggcttccccatt

SEQ ID NO: 699858 - DNA, 120 bp, Artificial Sequence
  ENSG00000196090_82 (sequence is synthesized)
acttaacagtctgagctccttcttagcctgtgaccagcttcaaatcacagccaagtaaaacaaggaaataggaaaagtaaatccaactagaagagacaagctgagattcagatttgttta

SEQ ID NO: 699859 - DNA, 120 bp, Artificial Sequence
  ENSG00000196090_83 (sequence is synthesized)
ctcctcccatgcaaagtttccctgttggaggttttccatgtatacatgtctagaagtgatagaatgcaaggccttggctttgtcttgcagggatctgcctttgaggtcatagactgaaca

SEQ ID NO: 699860 - DNA, 120 bp, Artificial Sequence
  ENSG00000196090_84 (sequence is synthesized)
gcagggagagaggttagtggtggagtgtggggggagctgttctagctccagtttcttctgacacatttttcaggatcatggatctgatcctccgaagcacagcagagatatctaagccat

SEQ ID NO: 699861 - DNA, 120 bp, Artificial Sequence
  ENSG00000196090_85 (sequence is synthesized)
atttgtgcacatgagcagactcttctagttttttagtaaccagggatgggcttttgcatggcactgactatagagatgtcttgtagagatcaagccagtcttttgcatcccacctgccca

SEQ ID NO: 699862 - DNA, 120 bp, Artificial Sequence
  ENSG00000196090_86 (sequence is synthesized)
cctccagaagagatgggaaaaggtcatcaaagggcattcaccaactgaaatccactcatgaatgttaggtctctaaaaggaggcatcaacactcacaatggtagcctccaaacctagcat

SEQ ID NO: 699863 - DNA, 120 bp, Artificial Sequence
  ENSG00000196090_87 (sequence is synthesized)
cccacctatctaagagctcaggggtggtccactggggcagatacaagggaagtgcaagggctcaggatgaaagaaaatctattgggaagagttttaggggcttgatcattatggggcttc

SEQ ID NO: 699864 - DNA, 120 bp, Artificial Sequence
  ENSG00000196090_88 (sequence is synthesized)
cttctatatctgagaactgctctgggtggtgagatgtggactctgatccttaattggaatgttcggagaatgagtgtctggtggccttgaagtgttggacagaaaagtatcagtataaaa

SEQ ID NO: 699865 - DNA, 120 bp, Artificial Sequence
  ENSG00000196090_89 (sequence is synthesized)
gcctggagctcagggtaattaatgtagttcatggttccttagtgagcaggactcttggatgtggaggagaaagggtcataggaagtaaaccaccaaaattacaaaattgagtctctgtac

SEQ ID NO: 699866 - DNA, 120 bp, Artificial Sequence
  ENSG00000196090_90 (sequence is synthesized)
aattacttcagtgcctttgggcttatgaatacaaatcagtgggccttctctatgatggtccaacaaactctcagtgtccaccctgtccctgtatctcccatggaagatgaataatgtcag

SEQ ID NO: 699867 - DNA, 120 bp, Artificial Sequence
  ENSG00000196090_91 (sequence is synthesized)
gtgttctttgggtcaaaggccccagggcagtctggaggcttagagggcagagtggtgtcattccatgtaaagttaggcttctgaggggtcaggcagaatatggtgtccatatcttccata

SEQ ID NO: 699868 - DNA, 120 bp, Artificial Sequence
  ENSG00000196090_92 (sequence is synthesized)
gctctgcagattcttggatgaagtcaagcacagtttgctagacccaggtcactcctctgagtataactaggacccatgagtgaaacttaatagctgtaaggaagaacctgctgtctgcca

SEQ ID NO: 699869 - DNA, 120 bp, Artificial Sequence
  ENSG00000196090_93 (sequence is synthesized)
gagaggataagctgcccatctcagcagctgtctaaaagaaggcaggtgtctctttaaagggaagagaagcattggtgaaatggatttcaggtcacttccattccagatgggtgagatctt

SEQ ID NO: 699870 - DNA, 120 bp, Artificial Sequence
  ENSG00000196090_94 (sequence is synthesized)
gtggagctgggatcatgtttgaactcattcatacctgtagagcacgaatccaagtagattgtgtttggtctgtacaggctgaagccccctgctctcccacccaagtgcccccactgagca

SEQ ID NO: 699871 - DNA, 120 bp, Artificial Sequence
  ENSG00000196090_95 (sequence is synthesized)
ggccaacatgctgttgtggccacatatactgggctgatccaggctggttatcaccaaacagcaaaccatagggaacagctgctttgccatagacccaatacccatgtagatctctcatga

SEQ ID NO: 699872 - DNA, 120 bp, Artificial Sequence
  ENSG00000196090_96 (sequence is synthesized)
gagcagccataactcagacccactgaccaacagggccatgagtgacagccagaaccagtgaaggtccaagtaggacacagagcagggcttttcttaccatacacattatctccagaggtt

SEQ ID NO: 699873 - DNA, 120 bp, Artificial Sequence
  ENSG00000196090_97 (sequence is synthesized)
atttctaccccactccctattcaaggcctgttggagcacactgcaaaagcaaaagcacagtaactcaatttacacatgattataatcatttccagtgcacacatttcatcaccaggtgga

SEQ ID NO: 699874 - DNA, 120 bp, Artificial Sequence
  ENSG00000196090_98 (sequence is synthesized)
tcctgagctagcccatgtaaatccgggttaacccatattggtaatcatactcaaaagcacttttcaccctacattctactagccaatcaaagacaaagagttgtggcctctaccattgcc

SEQ ID NO: 699875 - DNA, 120 bp, Artificial Sequence
  ENSG00000196090_99 (sequence is synthesized)
ttggcttctggacaccctcacaagctatcccaaggttcccgctcaactccagggaggctgacatcttcacatccactgggcatataatattgcatgagaccaaagtctccacactctttg

SEQ ID NO: 699876 - DNA, 120 bp, Artificial Sequence
  ENSG00000196090_100 (sequence is synthesized)
cagcctcctccatgaatcccaatggcctgcacttgtacagtttgggtgtttgatagataaagcacgtatgagaagagaaaacaaaataaatcaactttttaaaaaagccagcactgtgct

SEQ ID NO: 699877 - DNA, 120 bp, Artificial Sequence
  ENSG00000196090_101 (sequence is synthesized)
gtcaatgttttttttttcttttcaattctagctcagaaaagcagaaggtaaataatgtcaggtcaatgaatatcagatatattttttgactgtacattacagtgaagtgtaatcttttta

SEQ ID NO: 699878 - DNA, 120 bp, Artificial Sequence
  ENSG00000196090_102 (sequence is synthesized)
cacctgcaagtccatcttatttattcttgtaaatgttccctgacaatgtttgtaacatggctgtgttaaaaaatctatacaataaagctgtgaccctgagattcatgttttcctaagata

SEQ ID NO: 699879 - DNA, 80 bp, Artificial Sequence
  ENSG00000196090_103 (sequence is synthesized)
cctcccgcctcagttcgcgccgcgcctcggcttggaacgcaggagcgccggctccgggagcccgagcggagccagccgcg

SEQ ID NO: 699880 - DNA, 120 bp, Artificial Sequence
  ENSG00000196090_104 (sequence is synthesized)
ctcgttaaacatcaggcatgctaattaaggtggctgttcctttgatgagcactacagcaactgtggttatagtgtggctctagggaccaatgggttcacctgggagcagattaacacatg

SEQ ID NO: 699881 - DNA, 120 bp, Artificial Sequence
  ENSG00000196091_0 (sequence is synthesized)
gtcacaccgacctgcaccatctctcgcctgcctgtggggtttctgtcaactagtcgtggagggaaggagactctttaaagaataacatcttattgtggccatgccagaacccactaagaa

SEQ ID NO: 699882 - DNA, 120 bp, Artificial Sequence
  ENSG00000196091_1 (sequence is synthesized)
agaggaaaatgaagtgccagccccagccccacccccggaagaaccaagtaaagagaaggaggccggaactacaccagcaaaagatgaagaggaagtctccccgcctagcgccttgcctcc

SEQ ID NO: 699883 - DNA, 120 bp, Artificial Sequence
  ENSG00000196091_2 (sequence is synthesized)
aggtttgggtagtcgggccctggagagaaaagattcagactggacccttgtcgaaactcctcctggggaggaacaagccaagcagaatgccaactcccagctgtccatcttgttcattga

SEQ ID NO: 699884 - DNA, 120 bp, Artificial Sequence
  ENSG00000196091_3 (sequence is synthesized)
aaaacctcaaggaggaacagtgaaagttggtgaagatatcaccttcatagccaaagtcaaggctgaagatcttctgagaaaacccactatcaaatggttcaaaggaaaatggatggacct

SEQ ID NO: 699885 - DNA, 120 bp, Artificial Sequence
  ENSG00000196091_4 (sequence is synthesized)
ggccagcaaagccgggaagcaccttcagctgaaggaaacctttgagaggcacagtcgggtgtacacatttgagatgcagatcatcaaggccaaagataactttgcaggaaattacagatg

SEQ ID NO: 699886 - DNA, 120 bp, Artificial Sequence
  ENSG00000196091_5 (sequence is synthesized)
cgaggtcacctataaggataagtttgacagctgttcatttgatcttgaagtgcacgaatctactgggactactccaaacattgacatcagatctgctttcaagagaagtggagaaggtca

SEQ ID NO: 699887 - DNA, 120 bp, Artificial Sequence
  ENSG00000196091_6 (sequence is synthesized)
agaggatgcaggagaacttgactttagtggtctcctgaaacgtagggaggtgaagcagcaggaggaagaaccccaggtggacgtatgggagttgctgaagaacgcgaaacccagtgagta

SEQ ID NO: 699888 - DNA, 120 bp, Artificial Sequence
  ENSG00000196091_7 (sequence is synthesized)
cgagaagatcgccttccagtatggaatcaccgacctgcgcggcatgctcaagcgactcaagcgcatgcgcagagaggagaagaagagcgcagcttttgcaaaaattcttgatcctgcata

SEQ ID NO: 699889 - DNA, 120 bp, Artificial Sequence
  ENSG00000196091_8 (sequence is synthesized)
tcaggttgacaaaggaggcagagtgaggtttgttgtggagctggcagatccaaagttggaggtgaaatggtataaaaatggtcaagaaattcgacccagtaccaaatacatctttgaaca

SEQ ID NO: 699890 - DNA, 120 bp, Artificial Sequence
  ENSG00000196091_9 (sequence is synthesized)
caaaggatgccagagaatcctgtttatcaataactgtcagatgacagatgattcagagtattatgtgacagccggtgatgagaaatgttccactgagctcttcgtaagagagcctccaat

SEQ ID NO: 699891 - DNA, 120 bp, Artificial Sequence
  ENSG00000196091_10 (sequence is synthesized)
tatggtgaccaaacagctggaagatacaactgcttattgtggggagagagtggaattagaatgtgaggtgtctgaagatgatgccaatgtaaaatggtttaagaatggtgaagagattat

SEQ ID NO: 699892 - DNA, 120 bp, Artificial Sequence
  ENSG00000196091_11 (sequence is synthesized)
ccctggtccaaaatcaagataccgaattagagttgagggtaaaaaacacatcttgatcatagagggagcaacaaaggctgatgctgcagaatattcagtaatgacaacaggaggacaatc

SEQ ID NO: 699893 - DNA, 120 bp, Artificial Sequence
  ENSG00000196091_12 (sequence is synthesized)
atctgctaaacttagtgttgacttgaaacctctgaagattttgacacctctgactgatcagactgtaaatcttggaaaagaaatctgcctgaagtgtgaaatctctgaaaacataccagg

SEQ ID NO: 699894 - DNA, 120 bp, Artificial Sequence
  ENSG00000196091_13 (sequence is synthesized)
aaaatggactaaaaatggcctacctgttcaggagagtgaccgtctaaaggtggttcacaagggaaggatccacaagttagtgatagccaatgccctcactgaagatgaaggtgattatgt

SEQ ID NO: 699895 - DNA, 120 bp, Artificial Sequence
  ENSG00000196091_14 (sequence is synthesized)
atttgcacctgatgcctacaatgttactctgcctgccaaagttcatgttattgatcctcctaagatcatcctggatggtcttgatgctgacaacacagtgacagtgattgcaggaaacaa

SEQ ID NO: 699896 - DNA, 120 bp, Artificial Sequence
  ENSG00000196091_15 (sequence is synthesized)
gcttcgtcttgagatccccatcagcggagaaccacctcctaaagccatgtggagccggggagataaggctattatggaaggcagtggccggataagaacagaatcttaccctgatagcag

SEQ ID NO: 699897 - DNA, 120 bp, Artificial Sequence
  ENSG00000196091_16 (sequence is synthesized)
cactctggtcattgatatagctgaaagagatgactctggtgtttaccacatcaatctgaaaaacgaagctggagaggcacatgcaagcatcaaggttaaagttgtggacttccctgatcc

SEQ ID NO: 699898 - DNA, 120 bp, Artificial Sequence
  ENSG00000196091_17 (sequence is synthesized)
cagtggcaccgactgtgacagaggtgggagatgactggtgtatcatgaactgggagcctcctgcctacgacggaggctctccaatcctaggatattttattgagaggaagaagaaacaaa

SEQ ID NO: 699899 - DNA, 120 bp, Artificial Sequence
  ENSG00000196091_18 (sequence is synthesized)
gctccaggtggatgaggctgaattttgatctctgcaaagaaacaacttttgagcccaagaagatgattgaaggtgtggcctatgaggtccgcatctttgcagtcaatgccattggcatct

SEQ ID NO: 699900 - DNA, 120 bp, Artificial Sequence
  ENSG00000196091_19 (sequence is synthesized)
ccaagcccagtatgccctccaggccttttgttcctttggctgtaacaagccctcctactcttctgactgtggactctgtcactgacacgactgtcacgatgaggtggcgccccccagacc

SEQ ID NO: 699901 - DNA, 120 bp, Artificial Sequence
  ENSG00000196091_20 (sequence is synthesized)
acattggtgcagcaggtttagatggctatgtgctagagtattgctttgaaggaactgaggactggatagttgcaaacaaagatctgattgacaagacgaagttcaccatcacaggtctgc

SEQ ID NO: 699902 - DNA, 120 bp, Artificial Sequence
  ENSG00000196091_21 (sequence is synthesized)
caacagatgcaaagatctttgtgcgtgtgaaggctgttaatgcagctggtgccagcgagcccaagtactattctcagcccattctcgtgaaggaaatcatagaacctccaaagattcgca

SEQ ID NO: 699903 - DNA, 120 bp, Artificial Sequence
  ENSG00000196091_22 (sequence is synthesized)
ttccaagacacctgaagcaaacctatatccgcagagttggagaagctgtcaatctggttatacctttccagggaaaaccaagaccagaattaacttggaagaaggatggtgcagaaattg

SEQ ID NO: 699904 - DNA, 120 bp, Artificial Sequence
  ENSG00000196091_23 (sequence is synthesized)
ataagaatcaaataaacattcgcaactctgagactgatacaatcatatttattagaaaagcagagaggagccactctgggaaatatgatctgcaagtcaaagtggacaaattcgtggaga

SEQ ID NO: 699905 - DNA, 120 bp, Artificial Sequence
  ENSG00000196091_24 (sequence is synthesized)
ccgcatcaattgacatccagatcattgaccgtccaggtccaccccaaattgtgaagattgaggatgtctggggagaaaatgtcgctctcacatggactccaccaaaggatgatggaaatg

SEQ ID NO: 699906 - DNA, 120 bp, Artificial Sequence
  ENSG00000196091_25 (sequence is synthesized)
ctgctatcacaggctataccattcagaaggctgacaagaagagcatggaatggtttactgtcattgagcattatcatcgaaccagtgccaccattactgaattggtcatagggaatgaat

SEQ ID NO: 699907 - DNA, 120 bp, Artificial Sequence
  ENSG00000196091_26 (sequence is synthesized)
attacttccgggtcttttctgaaaacatgtgtggcctcagtgaggatgccaccatgactaaagagagtgcagtgatcgccagggatggtaaaatctacaaaaatccagtgtatgaagact

SEQ ID NO: 699908 - DNA, 120 bp, Artificial Sequence
  ENSG00000196091_27 (sequence is synthesized)
ttgatttctcagaggcacccatgtttactcagcctttggttaacacctatgccatagctggttacaatgccaccctaaactgcagtgtgagaggaaatcctaagcctaaaataacctgga

SEQ ID NO: 699909 - DNA, 120 bp, Artificial Sequence
  ENSG00000196091_28 (sequence is synthesized)
tgaaaaacaaagttgctattgtggatgatccaagatacaggatgttcagcaaccagggagtctgtaccctggaaattcgcaagcccagcccctatgatggaggcacttactgctgcaaag

SEQ ID NO: 699910 - DNA, 120 bp, Artificial Sequence
  ENSG00000196091_29 (sequence is synthesized)
cagtcaatgaccttgggacagtggagattgaatgcaaactggaggtgaaagtgatatatcaaggagtaaatacccctggacaaccagtcttcctggaggggcagcaacagtcattgcaca

SEQ ID NO: 699911 - DNA, 120 bp, Artificial Sequence
  ENSG00000196091_30 (sequence is synthesized)
ataaggatttttgaatgtataatatcatctaaggtgggctctccttctgcagactcctcttgcaaggcgtacctccaaacataattgattcgtatctgcgagacttacactcaagcaatc

SEQ ID NO: 699912 - DNA, 120 bp, Artificial Sequence
  ENSG00000196091_31 (sequence is synthesized)
ctgaggaatactgagggagggcctggctactgtctctctgcactctgctgctttgaaatctggttgaaatgagaaaaagcattttctgttttcccaccaggcccccaagtgtggtctttt

SEQ ID NO: 699913 - DNA, 120 bp, Artificial Sequence
  ENSG00000196091_32 (sequence is synthesized)
tctttcctcctaatgttgaagagaaaaaaaaaaaaaaaagtttgcccagattgcttaattaaaaattgcaaacaaaatctcatttgaagtcagcactttggtcattattatctctgctca

SEQ ID NO: 699914 - DNA, 120 bp, Artificial Sequence
  ENSG00000196091_33 (sequence is synthesized)
ctgtattatactttacaaaaatgcaagtcatagaataagcaaaagcagttatttttgtttacatagtaggctataaatgctttttttttcctctcagagtaaaaaacataacacaatgca

SEQ ID NO: 699915 - DNA, 120 bp, Artificial Sequence
  ENSG00000196091_34 (sequence is synthesized)
gcctgcctgtggggtttctgtcaactagtcgtggagggaaggagactctttaaagaataacatcttattgtggccatgccagaacccactaagaaagaggaaccaagtaaagagaaggag

SEQ ID NO: 699916 - DNA, 120 bp, Artificial Sequence
  ENSG00000196091_35 (sequence is synthesized)
agatgtgagaaaggtccccatagctgtcaagttcctgcatccttgtgctgaagaaagggaggtgccatcatgattgatgttcagaggcagtataaaagcactgggtttctccccaactgc

SEQ ID NO: 699917 - DNA, 120 bp, Artificial Sequence
  ENSG00000196091_36 (sequence is synthesized)
cctgcctgtggggtttctgtcaactagtcgtggagggaaggagactctttaaagaataacatcttattgtggccatgccagaacccactaagaaagaggcaatttcaaagtatccccgaa

SEQ ID NO: 699918 - DNA, 120 bp, Artificial Sequence
  ENSG00000196091_37 (sequence is synthesized)
agccatttggggttgctggtcattagctctccaaagtcatattcccttttggtgccctttaaacatcactgaaacacaattgctaaataacttcccacatcacaatcattacagagggat

SEQ ID NO: 699919 - DNA, 120 bp, Artificial Sequence
  ENSG00000196091_38 (sequence is synthesized)
tagatctgccttgtccttagacaactatcgaagtgcatttttcctaagcccaaagctgaataaaatgagtctagcagattactactgttccaaggtctgatgctctcctcttcttacttt

SEQ ID NO: 699920 - DNA, 120 bp, Artificial Sequence
  ENSG00000196091_39 (sequence is synthesized)
atttttgacttggatttctaccagccaacatcttgagtcttgtaaaactctttgattcagttctgcggaagttcactttgtagttaaaaacaacaaccacaacaaccatattcaacattt

SEQ ID NO: 699921 - DNA, 120 bp, Artificial Sequence
  ENSG00000196091_40 (sequence is synthesized)
agacaataatttcttggttaacattttcaagacttccctgatcctccagtggcaccgactgtgacagaggtgggagatgactggtgtatcatgaactgggagcctcctgcctacgacgga

SEQ ID NO: 699922 - DNA, 120 bp, Artificial Sequence
  ENSG00000196091_41 (sequence is synthesized)
aaacagtggcccaagacttcacctccaggaaaactctttggacaccaaactttaacacagatcctcgaagtgaaggaaggaggttacgaagcacatttgggaaatcaggaatgtgaacgc

SEQ ID NO: 699923 - DNA, 120 bp, Artificial Sequence
  ENSG00000196091_42 (sequence is synthesized)
aaatgcacctcccctggaggaaactcactatggagatgaaacttcctatgaagagaaaactgctgaaaaagaaatcccaggtacatcagcaaaacagtctgatgaaaatggggaggctgc

SEQ ID NO: 699924 - DNA, 120 bp, Artificial Sequence
  ENSG00000196091_43 (sequence is synthesized)
gaagtcaagtttaaagtggatgttcttcagagaatttttcatttctgaaaatgtgttttgcttatagaatataacagagttgactagaaagagagaaacaactgcatactaatcttttaa

SEQ ID NO: 699925 - DNA, 120 bp, Artificial Sequence
  ENSG00000196091_44 (sequence is synthesized)
agcctttaacagttgcttttaaactttctttttaaatgtttcatgactcttcacctatttttttttaaatggggacgaagagatatgaaaactgagacataagacaaatacctagaaacc

SEQ ID NO: 699926 - DNA, 120 bp, Artificial Sequence
  ENSG00000196091_45 (sequence is synthesized)
tctaagactgcacatatgatttggtagaagtctgaaggtatacacattgtaagaggcagacctactttaatgtattatttatgatgtactgtatttctgcaagtctaagacaccactgct

SEQ ID NO: 699927 - DNA, 120 bp, Artificial Sequence
  ENSG00000196091_46 (sequence is synthesized)
ctcttccaaataagctttccttgtggcttacgctgttcttcacttggatttgaacccgatcagcggctttcctttcaccaaaggatcttatttttgtaatttgtcggactttgcaagaat

SEQ ID NO: 699928 - DNA, 120 bp, Artificial Sequence
  ENSG00000196091_47 (sequence is synthesized)
agaaggcatcctgacctcatcctaatacaatcactaatgagctcatttcttgaagctgtattgattctaatccttgtcttattcagattgtagtttttacggcaatctttcattacgttt

SEQ ID NO: 699929 - DNA, 120 bp, Artificial Sequence
  ENSG00000196091_48 (sequence is synthesized)
cctcttacaagaaaactaatgtattgagaaacaattaattttgcatgatacacacgcattcaaggatctagccaaaaataccacaggtttgttctatcatttttaatatttagcaaatac

SEQ ID NO: 699930 - DNA, 120 bp, Artificial Sequence
  ENSG00000196091_49 (sequence is synthesized)
acagagatcaatcttcattttggggatgtactaaagttagataataattcacatttttatagaactttacatacagataataaaacattttcaaatgcatcctatcagctgtagctcctg

SEQ ID NO: 699931 - DNA, 120 bp, Artificial Sequence
  ENSG00000196091_50 (sequence is synthesized)
aatgtagttgtatcgatgtggccttatagtccatcacctagaaaaacaccaagagtactgcttgaatacactggccaccattgtttacctgttaggggacaggcaagatggggaagcaaa

SEQ ID NO: 699932 - DNA, 120 bp, Artificial Sequence
  ENSG00000196091_51 (sequence is synthesized)
ggaattattgccatcaaagagagaataacagcttacctggaaagttccactatttctaagaattacataatgttcatttgccccatcatggaagagatacccctgtaagaatgggaatct

SEQ ID NO: 699933 - DNA, 120 bp, Artificial Sequence
  ENSG00000196091_52 (sequence is synthesized)
gttcccctctactgatggctgctgggggcagaaagaatgatgttgtatttatctaggtttattagacaaagaaaagctacagcgttggtgagaacaacaaatccaggtaagactgcctaa

SEQ ID NO: 699934 - DNA, 120 bp, Artificial Sequence
  ENSG00000196091_53 (sequence is synthesized)
agaggaaaatgaagtgccagccccagccccacccccggaaggtgagtaaaaacactcactcacacacgtttgggctgcaaatacagagggtccatcccagcatgatttggcctccacggg

SEQ ID NO: 699935 - DNA, 120 bp, Artificial Sequence
  ENSG00000196091_54 (sequence is synthesized)
tgctgtgagctgtgagctttaacctaactcctactgagaagttggatggtgaccattgtgataagttgagaataataaaaataatacactgtgtttatataatcctcttgtgttaatcta

SEQ ID NO: 699936 - DNA, 120 bp, Artificial Sequence
  ENSG00000196091_55 (sequence is synthesized)
atttggatggcacttcatatatattagggggacaattcttatgaaacctttcaaattatgtaaaagttattatgtccgcattttacagtgtggaggctgagcctccatccaaggggctga

SEQ ID NO: 699937 - DNA, 120 bp, Artificial Sequence
  ENSG00000196091_56 (sequence is synthesized)
ttttcctatatagtgaaggtcaaacaaacccacatcttctttatgagagtggggagtggatccatctctaccctggaagtgatatatcaaggagtaaatacccctggacaaccagtcttc

SEQ ID NO: 699938 - DNA, 120 bp, Artificial Sequence
  ENSG00000196091_57 (sequence is synthesized)
ttcagaacttggaccctggtaaaacagggctggccttatcccaagggcctgcactcccagtcttgaatgagggagccccactgtgggagcaccgtgttccctggggacccaagagaatcc

SEQ ID NO: 699939 - DNA, 120 bp, Artificial Sequence
  ENSG00000196091_58 (sequence is synthesized)
tcccctgctggggtggcagagacaggcacaaggatagactgtctcactgtgcgctgctcccccgcagattccaggacctgctcctctgttttcttcagggtcttgctttgttcttctcta

SEQ ID NO: 699940 - DNA, 120 bp, Artificial Sequence
  ENSG00000196091_59 (sequence is synthesized)
tctcttcttcccaccactggaggtgtcccagcctcctttctcctcttctctattcttttcttttttctcctcttctctgtggcaggtgcctcaggtcagaagccacagtctgcacagagc

SEQ ID NO: 699941 - DNA, 120 bp, Artificial Sequence
  ENSG00000196091_60 (sequence is synthesized)
aggctgtgctctcctgaggaacccccctaacaccgtttggtctcttccgtcactgctctgaggacaaatctctttgcacactttgcatactttactaacagagaatgctgactgctgata

SEQ ID NO: 699942 - DNA, 120 bp, Artificial Sequence
  ENSG00000196091_61 (sequence is synthesized)
cgatattattctggtgtgaaagtgggtgtctttaattaattttaatgacggattctcaaaggtacatcagcaaaacagtctgatgaaaatggggaggctgcctatgatctgccagctgag

SEQ ID NO: 699943 - DNA, 120 bp, Artificial Sequence
  ENSG00000196092_0 (sequence is synthesized)
agttccttaatcatttcacggtgccttcggacgctttttttccacctaaaacgtttagtttcagctcagtgatcagctaccccagctcggcgggggagcggaaggcttgaattattccga

SEQ ID NO: 699944 - DNA, 89 bp, Artificial Sequence
  ENSG00000196092_1 (sequence is synthesized)
gtggaaacttttccctgtccattccatcaagtcctgaaaaatcaaaatggatttagagaaaaattatccgactcctcggaccagcagga

SEQ ID NO: 699945 - DNA, 120 bp, Artificial Sequence
  ENSG00000196092_2 (sequence is synthesized)
gatttagagaaaaattatccgactcctcggaccagcaggacaggacatggaggagtgaatcagcttgggggggtttttgtgaatggacggccactcccggatgtagtccgccagaggata

SEQ ID NO: 699946 - DNA, 120 bp, Artificial Sequence
  ENSG00000196092_3 (sequence is synthesized)
gtggaacttgctcatcaaggtgtcaggccctgcgacatctccaggcagcttcgggtcagccatggttgtgtcagcaaaattcttggcaggtattatgagacaggaagcatcaagcctggg

SEQ ID NO: 699947 - DNA, 120 bp, Artificial Sequence
  ENSG00000196092_4 (sequence is synthesized)
gtaattggaggatccaaaccaaaggtcgccacacccaaagtggtggaaaaaatcgctgaatataaacgccaaaatcccaccatgtttgcctgggagatcagggaccggctgctggcagag

SEQ ID NO: 699948 - DNA, 120 bp, Artificial Sequence
  ENSG00000196092_5 (sequence is synthesized)
cgggtgtgtgacaatgacaccgtgcctagcgtcagttccatcaacaggatcatccggacaaaagtacagcagccacccaaccaaccagtcccagcttccagtcacagcatagtgtccact

SEQ ID NO: 699949 - DNA, 120 bp, Artificial Sequence
  ENSG00000196092_6 (sequence is synthesized)
ggctccgtgacgcaggtgtcctcggtgagcacggattcggccggctcgtcgtactccatcagcggcatcctgggcatcacgtcccccagcgccgacaccaacaagcgcaagagagacgaa

SEQ ID NO: 699950 - DNA, 120 bp, Artificial Sequence
  ENSG00000196092_7 (sequence is synthesized)
ggtattcaggagtctccggtgccgaacggccactcgcttccgggcagagacttcctccggaagcagatgcggggagacttgttcacacagcagcagctggaggtgctggaccgcgtgttt

SEQ ID NO: 699951 - DNA, 120 bp, Artificial Sequence
  ENSG00000196092_8 (sequence is synthesized)
gagaggcagcactactcagacatcttcaccaccacagagcccatcaagcccgagcagaccacagagtattcagccatggcctcgctggctggtgggctggacgacatgaaggccaatctg

SEQ ID NO: 699952 - DNA, 120 bp, Artificial Sequence
  ENSG00000196092_9 (sequence is synthesized)
gccagccccacccctgctgacatcgggagcagtgtgccaggcccgcagtcctaccccattgtgacaggccgtgacttggcgagcacgaccctccccgggtaccctccacacgtccccccc

SEQ ID NO: 699953 - DNA, 120 bp, Artificial Sequence
  ENSG00000196092_10 (sequence is synthesized)
gctggacagggcagctactcagcaccgacgctgacagggatggtgcctgggagtgagttttccgggagtccctacagccaccctcagtattcctcgtacaacgactcctggaggttcccc

SEQ ID NO: 699954 - DNA, 120 bp, Artificial Sequence
  ENSG00000196092_11 (sequence is synthesized)
aacccggggctgcttggctccccctactattatagcgctgccgcccgaggagccgccccacctgcagccgccactgcctatgaccgtcactgacccttggagccaggcgggcaccaaaca

SEQ ID NO: 699955 - DNA, 120 bp, Artificial Sequence
  ENSG00000196092_12 (sequence is synthesized)
ctgatggcacctattgagggtgacagccacccagccctcctgaagatagccagagagcccatgagaccgtcccccagcatcccccacttgcctgaagctcccctcttcctctcttcctcc

SEQ ID NO: 699956 - DNA, 120 bp, Artificial Sequence
  ENSG00000196092_13 (sequence is synthesized)
agggactctggggccctttggtggggccgttggacttctggatgcttgtctatttctaaaagccaatctatgagcttctcccgatggccactgggtctctgcaaaccaatagactgtcct

SEQ ID NO: 699957 - DNA, 120 bp, Artificial Sequence
  ENSG00000196092_14 (sequence is synthesized)
gcaaataaccgcagccccagcccagcctgcctgtcctccagctgtctgactatccatccatcataaccaccccagcctgggaaggagagcttgcttttgttgcttcagcagcacccatgt

SEQ ID NO: 699958 - DNA, 120 bp, Artificial Sequence
  ENSG00000196092_15 (sequence is synthesized)
aaataccttcttgcttttctgtgggcctgaaggtccgactgagaagactgctccacccatgatgcatctcgcactcttggtgcatcaccggacatcttagacctatggcagagcatcctc

SEQ ID NO: 699959 - DNA, 120 bp, Artificial Sequence
  ENSG00000196092_16 (sequence is synthesized)
tctgccctgggtgaccctggcaggtgcgctcagagctgtcctcaagatggaggatgctgcccttgggccccagcctcctgctcatccctccttctttagtatctttacgaggagtctcac

SEQ ID NO: 699960 - DNA, 120 bp, Artificial Sequence
  ENSG00000196092_17 (sequence is synthesized)
tgggctggttgtgctgcaggctccccctgaggcccctctccaagaggagcacactttggggagatgtcctggtttcctgcctccatttctctgggaccgatgcagtatcagcagctcttt

SEQ ID NO: 699961 - DNA, 120 bp, Artificial Sequence
  ENSG00000196092_18 (sequence is synthesized)
tccagatcaaagaactcaaagaaaactgtctgggagattcctcagctacttttccgaagcagaatgtcatccgaggtattgattacattgtggactttgaatgtgagggctggatgggac

SEQ ID NO: 699962 - DNA, 120 bp, Artificial Sequence
  ENSG00000196092_19 (sequence is synthesized)
gcaggagatcatctgatcccagccaaggaggggcctgaggctctccctactccctcagcccctggaacggtgttttctgaggcatgcccaggttcaggtcacttcggacacctgccatgg

SEQ ID NO: 699963 - DNA, 120 bp, Artificial Sequence
  ENSG00000196092_20 (sequence is synthesized)
acacttcacccaccctccaggaccccagcaagtggattctgggcaagcctgttccggtgatgtagacaataattaacacagaggactttcccccacacccagatcacaaacagcctacag

SEQ ID NO: 699964 - DNA, 120 bp, Artificial Sequence
  ENSG00000196092_21 (sequence is synthesized)
ccagaacttctgagcatcctctcggggcagaccctccccgtcctcgtggagcttagcaggcagctgggcatggaggtgctggggctggggcagatgcctaatttcgcacaatgcatgccc

SEQ ID NO: 699965 - DNA, 120 bp, Artificial Sequence
  ENSG00000196092_22 (sequence is synthesized)
acctgttgatctaaggggccgcgatggtcagggccacggccaagggccacgggaacttggagagggagcttggagaactcactgtgggctagggtggtcagaggaagccagcagggaaga

SEQ ID NO: 699966 - DNA, 120 bp, Artificial Sequence
  ENSG00000196092_23 (sequence is synthesized)
tctgggggacagaggaaggcctcctgagggaggggcaggagagcagtgaggagctgctgtgtgacctgggagtgattttgacatgggggtgccaggtgccatcatctctttacctggggc

SEQ ID NO: 699967 - DNA, 120 bp, Artificial Sequence
  ENSG00000196092_24 (sequence is synthesized)
cttaattccttgcatagtctctcttgtcaagtcagaacagccaggtagagcccttgtccaaacctgggctgaatgacagtgatgagagggggcttggccttcttaggtgacaatgtcccc

SEQ ID NO: 699968 - DNA, 120 bp, Artificial Sequence
  ENSG00000196092_25 (sequence is synthesized)
catatctgtatgtcaccaggatggcagagagccagggcagagagagactggacttgggatcagcaggccaggcaggtcttgtcctggtcctggccacatgtctttgctgtgggacctcag

SEQ ID NO: 699969 - DNA, 120 bp, Artificial Sequence
  ENSG00000196092_26 (sequence is synthesized)
acaaaaccctgcacctctttgagccttggctgccttggtgcagcagggtcatctgtagggccaccccacagctctttccttcccctcctctctccagggagccggggctgtgagaggatc

SEQ ID NO: 699970 - DNA, 120 bp, Artificial Sequence
  ENSG00000196092_27 (sequence is synthesized)
atctggggcaggccctccacttccaagcaagcagatgggggtgggcacctgaggcccaataatatttggaccaagtgggaaacaagaacactcggaggggcgggaatcagaagagcctgg

SEQ ID NO: 699971 - DNA, 120 bp, Artificial Sequence
  ENSG00000196092_28 (sequence is synthesized)
aaaaagacctagcccaacttcccttgtgggaaactgaggcccagcttggggaaggccaggaccatgcagggagaaaaagcagacttcctctggccaccgctaagtattttgttccctaag

SEQ ID NO: 699972 - DNA, 120 bp, Artificial Sequence
  ENSG00000196092_29 (sequence is synthesized)
tcccccacagggtggtggaacagaagagaaaactaaggctcagcaaggtggagtcctcaagcagtgactggtgggggtggggctgggactcgggctcctgacccccaacccatggtgttc

SEQ ID NO: 699973 - DNA, 120 bp, Artificial Sequence
  ENSG00000196092_30 (sequence is synthesized)
cctgtcaccctggtctatccacatctcctattcctgaggagagttgacagtaagagcagtgagagatggttctgggccccatgccctagacaatcagtctgtaagaactgccaaggaagc

SEQ ID NO: 699974 - DNA, 120 bp, Artificial Sequence
  ENSG00000196092_31 (sequence is synthesized)
ctggtcacccaggccagggatggagcccagcgagctcacagcaggcacatgcacccccgcccccacccagaacctgcggggcaaagaagggaggtagttggggccagagtccacctccag

SEQ ID NO: 699975 - DNA, 120 bp, Artificial Sequence
  ENSG00000196092_32 (sequence is synthesized)
gagccagggtgagctggctgcagcttccacctgtcaggtaaggtaggagaaggtatgttacctggcatctctctccctgcctccctccatttagcaggaagtggtggggtcaggggtctt

SEQ ID NO: 699976 - DNA, 120 bp, Artificial Sequence
  ENSG00000196092_33 (sequence is synthesized)
cagcacagacttcttgagcctctgccccctgtcacccttcttttggaatgatgtgtacccacatctttggatcctgccctccttgtggttccaggctgttgggaggaggtcagcctcccc

SEQ ID NO: 699977 - DNA, 120 bp, Artificial Sequence
  ENSG00000196092_34 (sequence is synthesized)
tgaaccagctgcctgaggcatgcagcatccttcctcggcaaagcccacctggctcacagcggccccctctccccatcctgttcctcttcttgccctgtaatgagctccccccataccttt

SEQ ID NO: 699978 - DNA, 120 bp, Artificial Sequence
  ENSG00000196092_35 (sequence is synthesized)
cctccctcacctgaggctttgctggtcctcagattggttttgtatttgtgagacaaccacttgactcctgggctgccaggcggaagcacaagcgcacatggatgcacacggatgttctca

SEQ ID NO: 699979 - DNA, 120 bp, Artificial Sequence
  ENSG00000196092_36 (sequence is synthesized)
tggtgaggatggctccaaaggacacaagccgttgagtagatgccagagaattctgaatggaaaacacaagtccggggcctcaccagcatcgtggcagaaggcctggggcatttctccatg

SEQ ID NO: 699980 - DNA, 120 bp, Artificial Sequence
  ENSG00000196092_37 (sequence is synthesized)
ggccttcttccctgtgttcgagctctgacttttggaaaaggacattgtggattttatgaaaatttctcataccatcagtctagctccaacctagaaaaattggatgatatatcaaaccca

SEQ ID NO: 699981 - DNA, 120 bp, Artificial Sequence
  ENSG00000196092_38 (sequence is synthesized)
acatccctttcccaaggcaccttagttaaggctagcccttccataactgacattgtacggtgctttgcaatcctcaaccactctgtggagcaaagagcatgatgcctactttatagacgg

SEQ ID NO: 699982 - DNA, 120 bp, Artificial Sequence
  ENSG00000196092_39 (sequence is synthesized)
ggaaattgacatttggggctctcacggcaacatagaggcgaagtgaattctcagatctccaggccccattctctctccaccgagttgtgctcctgtcatgggagtgtatggcttaaagac

SEQ ID NO: 699983 - DNA, 120 bp, Artificial Sequence
  ENSG00000196092_40 (sequence is synthesized)
actcccccacccccattccctagaaatcccccagacccacaatcaggcaagaaagaacagggacccagaggctggcctgacctaggggcctgcaggttggcggctttgtttcctaagaac

SEQ ID NO: 699984 - DNA, 120 bp, Artificial Sequence
  ENSG00000196092_41 (sequence is synthesized)
attgaaacctgcggagtctttgaccaaatccacaacagtgcttctgaggtttcatccagactctttcccagctgtccctgaggttcagagggtatcagagtcaattcaaggccatgccat

SEQ ID NO: 699985 - DNA, 120 bp, Artificial Sequence
  ENSG00000196092_42 (sequence is synthesized)
aatccctgaccaggcctggacatgggtccagccctgactccaggggtccaggtgccaaggtcatgtgctgtcccccacttccctttctttgccttcgcactttggaacaggctccaggcc

SEQ ID NO: 699986 - DNA, 120 bp, Artificial Sequence
  ENSG00000196092_43 (sequence is synthesized)
tggctgtgacagtatgcaggagtgcccaagccagggccaccagggtgtccacagcccctggaaacacagatcacaatctcaagtcccctgaatgaactgcttcctgggtgaacggggtgg

SEQ ID NO: 699987 - DNA, 120 bp, Artificial Sequence
  ENSG00000196092_44 (sequence is synthesized)
tgtagccttgccactcgggcagcgcaccagacagtacggtgcagcagtgcccgagatgcccagaagtgtgcctgcccccctgagtggcattcaagtatgaaaacttgtaaaattttctgt

SEQ ID NO: 699988 - DNA, 120 bp, Artificial Sequence
  ENSG00000196092_45 (sequence is synthesized)
cggcctaaagaaaaatgtccatgggccaaacttgacccactgggcaccagcctgtgagccccaatgcctgtcaattgccccctttctcattcacctcctgtcctttgttgcagatttgga

SEQ ID NO: 699989 - DNA, 120 bp, Artificial Sequence
  ENSG00000196092_46 (sequence is synthesized)
ggagatgggagcccagagaggtgagagatgtgcttcagggtgtccagcaaggcaggggtagaaacgggcacgcccagagcctgccactctcccaggcctcatcttgggctcttgcaagtc

SEQ ID NO: 699990 - DNA, 120 bp, Artificial Sequence
  ENSG00000196092_47 (sequence is synthesized)
ttgcgctttgaagatggagttgggtggaaggtcagaggcgctggggacgggattggggagctgctgggttttcaggggaggtcagtgctgcttgggcacctttcacatgtgcagggaaga

SEQ ID NO: 699991 - DNA, 120 bp, Artificial Sequence
  ENSG00000196092_48 (sequence is synthesized)
gactcagatgtggccacagggcactgaggggtgaaatccatttaccagaagtcacgctccagaacgactgcccagccttggcagccagtggctccagccaccccctcctcatgacattca

SEQ ID NO: 699992 - DNA, 120 bp, Artificial Sequence
  ENSG00000196092_49 (sequence is synthesized)
gccagaattgagctccaagccagggaagcaaatcttaaaaaccaaccaagcaccctgacacagccctagaaacacgatgagtctgaaatacagcttcccaggaggggagtctaagataca

SEQ ID NO: 699993 - DNA, 120 bp, Artificial Sequence
  ENSG00000196092_50 (sequence is synthesized)
gcttcccgggagggtggaaaccaactcctgccccacggccaggccaggcccaggcaggcatgggtggatcccacagggctctgagctagaccggctccacggtggccccactacgaggcc

SEQ ID NO: 699994 - DNA, 120 bp, Artificial Sequence
  ENSG00000196092_51 (sequence is synthesized)
agttctgcagtcttggccttgtcacccatcgagaggctgctctgatggttcccagccacacaccagctctcctggggaaactatttctttcgttcttttggcctcggagaggtccgaggc

SEQ ID NO: 699995 - DNA, 120 bp, Artificial Sequence
  ENSG00000196092_52 (sequence is synthesized)
aagtacatttcttaaaaggtaataaaatgcattattggaaagttggacagtcaggccacgactcctagcccacggcgtgccccacctcccagcagccccttcagccccttgcccctgttg

SEQ ID NO: 699996 - DNA, 120 bp, Artificial Sequence
  ENSG00000196092_53 (sequence is synthesized)
ccccaaacctcagggttccctcttgcatattcatgggggaaccacagtgctgatgtgtacttccccactgtcagctcggctgcacctcgtgtggcgccaggtcccaagggcctctgcaga

SEQ ID NO: 699997 - DNA, 120 bp, Artificial Sequence
  ENSG00000196092_54 (sequence is synthesized)
ggccaggctgtgagccccttgcctgcctgctcccctgatgaggcaacagcttctctgaaatgagctgccggccaggagcaggcaggcaccagcctgtctttccttttctggtaattcctc

SEQ ID NO: 699998 - DNA, 120 bp, Artificial Sequence
  ENSG00000196092_55 (sequence is synthesized)
agcactgaggctccgttcctgggcaccccaggattgaagggaacctcagaatcatgtcactgccattctagagtttcaatccaaggggtcccctttagctcatctccaagatgggtaaac

SEQ ID NO: 699999 - DNA, 120 bp, Artificial Sequence
  ENSG00000196092_56 (sequence is synthesized)
gtagccaccattcagaaagcccagaaattcttgttcccacatcttagacccctgagcaacacaaggagaaaatgcagctgcttacctattaatatctactgagggacaatcagcaaagcc

SEQ ID NO: 700000 - DNA, 120 bp, Artificial Sequence
  ENSG00000196092_57 (sequence is synthesized)
tcaaaggagtcgtctcaggtagggtacttggcctgtggcaggagagacagaggcacaaacccacccacccatcagcttccggtggctgatcggggcccagggagggaagcaggtgaaaca

SEQ ID NO: 700001 - DNA, 120 bp, Artificial Sequence
  ENSG00000196092_58 (sequence is synthesized)
gcagggtgggggtgacttggcagtcgtgcatctcctccccgactctgaggcctggcaggaggaggccacaccagcctcacctgccctgacccccgccccccaccctgtgaccctgtggct

SEQ ID NO: 700002 - DNA, 120 bp, Artificial Sequence
  ENSG00000196092_59 (sequence is synthesized)
atggccgctggtcgcccttgtccccaaaatcaccatgcctgtggccacgtccctcatcttctccaaaagcatcattaagaacaagtgattttggatgatggatttttgatttacaaacgg

SEQ ID NO: 700003 - DNA, 120 bp, Artificial Sequence
  ENSG00000196092_60 (sequence is synthesized)
cgcatttcccttggagtggaacagaaaggaaaccatttaatggcgcccttcttttcaagcatgaatacattttaatgaaactattttattgtatttgaggaaatggagagttgaacattc

SEQ ID NO: 700004 - DNA, 120 bp, Artificial Sequence
  ENSG00000196092_61 (sequence is synthesized)
caaccaatcaatagccaattaattgctataaagctaaaaagaaaataaataaatcctgagtctattttaaacactgcaaaaagttcagagcctcagaatctggccttcccctccataagg

SEQ ID NO: 700005 - DNA, 120 bp, Artificial Sequence
  ENSG00000196092_62 (sequence is synthesized)
cacacacacacacacacactcactcactcccctacacctcagacatacttgaaactcagaaacagcactgagtctccccatgccaattcttgcctgctgtcttcgacttgggtcagagaa

SEQ ID NO: 700006 - DNA, 120 bp, Artificial Sequence
  ENSG00000196092_63 (sequence is synthesized)
cttgcctgctgtcttcgacttgggtcagagaaggtgagcagacccggcagcagcctgtcccggggctcaggaagaggcaggcccatcccctggccccaagcacccagcacaacagagggt

SEQ ID NO: 700007 - DNA, 120 bp, Artificial Sequence
  ENSG00000196092_64 (sequence is synthesized)
ggcgggcagtgagggcctggcgttgcctgggccccacttctcagccccagctgctgggcctccaaggttgggctgaggatggagttttggctctgggtttgccctgactcctgctggaag

SEQ ID NO: 700008 - DNA, 120 bp, Artificial Sequence
  ENSG00000196092_65 (sequence is synthesized)
acgctgccctggtttttcaccctctagtggccttggacattgagtatttgtagaaatgcagattacattgcaaatggaaacctttgccaggaagacacatgcattttgcttttaattctt

SEQ ID NO: 700009 - DNA, 120 bp, Artificial Sequence
  ENSG00000196092_66 (sequence is synthesized)
tgagacatttgattttgtcttagggactgacctttcagcatcaaagaaatacatatctactgtatccgccaaagtttgtgatgcctgcatagacgcttacttgtaaaaaaaaaaaaatac

SEQ ID NO: 700010 - DNA, 120 bp, Artificial Sequence
  ENSG00000196092_67 (sequence is synthesized)
aaaaaaatacaaaaaaaccaacaacaaaaaccacaattgaattgcctttgaaagtgggagatgatctgtctccaacggattgaaaaaaaaaaatgcttcttaaaaaatgtgtatgttttg

SEQ ID NO: 700011 - DNA, 120 bp, Artificial Sequence
  ENSG00000196092_68 (sequence is synthesized)
tattctttttttctagtagaaaataactgacttgaaatattggtggtttttttcttagtgacgtgtgttgcttttgtgtgtaataatatttgaatgtaattacagcagtgccaatttgcc

SEQ ID NO: 700012 - DNA, 120 bp, Artificial Sequence
  ENSG00000196092_69 (sequence is synthesized)
aaagatgttggacatatttttcttttttggggaggagggcagggctaggggtgggacttgggagaaaacaggggtggggttttggtttaattttttttttacttttttttccttgtcaaa

SEQ ID NO: 700013 - DNA, 120 bp, Artificial Sequence
  ENSG00000196092_70 (sequence is synthesized)
cctgaaatttgtggcttccttttaagttaaatggttgactgcaacacctttattttagattagttggagaaacatgcaataagattggcgtagtttcaatatctgtgtgtcttttcatga

SEQ ID NO: 700014 - DNA, 120 bp, Artificial Sequence
  ENSG00000196092_71 (sequence is synthesized)
gtggctgttacttgtgaagaattgattttatgtaacctttatgtgagataattatttgtaaatatttgccataattttattggttcctaaaataaaagtaattttttaagttcagaaaaa

SEQ ID NO: 700015 - DNA, 120 bp, Artificial Sequence
  ENSG00000196092_72 (sequence is synthesized)
gtgccaggcccgcagtcctaccccattgtgacaggctccccctactattatagcgctgccgcccgaggagccgccccacctgcagccgccactgcctatgaccgtcactgacccttggag

SEQ ID NO: 700016 - DNA, 120 bp, Artificial Sequence
  ENSG00000196092_73 (sequence is synthesized)
ggtcatttagggcgagggcaaggccggcctggctgcctggcccgcagggatcctgccaattcacccattaccacagcctcctgtgagatgagcgctcctctcacggacatggaggagtga

SEQ ID NO: 700017 - DNA, 120 bp, Artificial Sequence
  ENSG00000196092_74 (sequence is synthesized)
gtcccccagcgccgacaccaacaagcgcaagagagacgaaggctccccctactattatagcgctgccgcccgaggagccgccccacctgcagccgccactgcctatgaccgtcactgacc

SEQ ID NO: 700018 - DNA, 120 bp, Artificial Sequence
  ENSG00000196092_75 (sequence is synthesized)
caccacagagcccatcaagcccgagcagtggtgccccgtgctgatgagacaatacttggtgcagccccaggcagtccttttccaggccgtgacttggcgagcacgaccctccccgggtac

SEQ ID NO: 700019 - DNA, 120 bp, Artificial Sequence
  ENSG00000196092_76 (sequence is synthesized)
ggcagtgtccactggctccgtgacgcaggtgtcctcggtgagcacggattcggccggctcgtcgtactccatcagcggcatcctgggcatcacgtcccccagcgccgacaccaacaagcg

SEQ ID NO: 700020 - DNA, 120 bp, Artificial Sequence
  ENSG00000196092_77 (sequence is synthesized)
ctgacatcgggagcagtgtgccaggcccgcagtcctaccccattgtgacaggtgagggcacctggggcatgggggatgagtgagggagagagagagagataggagtgtgtggtgggaaga

SEQ ID NO: 700021 - DNA, 120 bp, Artificial Sequence
  ENSG00000196092_78 (sequence is synthesized)
gtggcttcttggtgtgtttggatgtgattggccaattttgttttaacaaggttatgaggcctgggaacaggtcaggtgctggggccagggttgcagctgtgatgagacatggctggatat

SEQ ID NO: 700022 - DNA, 120 bp, Artificial Sequence
  ENSG00000196092_79 (sequence is synthesized)
tgttcagaggcctagggtttatttctttcatgagaaaggccaccctggtgggcaccaacctcaaggaggaatgggattccttgcagattgatgttggcaggcagaatctgagtcaagaag

SEQ ID NO: 700023 - DNA, 120 bp, Artificial Sequence
  ENSG00000196092_80 (sequence is synthesized)
ggtaggtggcgtaagctggatggtgcatggtggatgccaagcagcttccctctggaagtcccagggccagactctttagctgtctgtgtagagattgggagtgtgggtcctggaggtgca

SEQ ID NO: 700024 - DNA, 120 bp, Artificial Sequence
  ENSG00000196092_81 (sequence is synthesized)
ctgttgagtctgatcatgccatttactagctgtgcagacttgggtgagtcatgtatgcgttctgggctgtggctttaagctgcacagcgggactagtgctagcacctaccccagggggct

SEQ ID NO: 700025 - DNA, 120 bp, Artificial Sequence
  ENSG00000196098_0 (sequence is synthesized)
atggctagggaaaatcactccttagcagctgaattcatcctcataggatttacaaattatccagagctgaagacgcttctgtttgtggtgttctctgccatctatctggtcaccatggtg

SEQ ID NO: 700026 - DNA, 120 bp, Artificial Sequence
  ENSG00000196098_1 (sequence is synthesized)
gggaatcttggtctggtggcattaatttatgtagagcgtcgtcttctcacaccaatgtacatctttctgggcaacctggctctgatggattcctgctgttcctgtgctgttacccccaag

SEQ ID NO: 700027 - DNA, 120 bp, Artificial Sequence
  ENSG00000196098_2 (sequence is synthesized)
atgttagagaatttcttttctgaggatagaattatttccctgtatgaatgtatggcacaattttattttctctgtcttgctgaaaccacagactgctttcttctggcgacaatggcctat

SEQ ID NO: 700028 - DNA, 120 bp, Artificial Sequence
  ENSG00000196098_3 (sequence is synthesized)
gaccgctatgtggccatatgccacccactgcagtaccacaccatgatgtccaagacgctctgcattcggatgaccacaggggccttcaaagctggaaacctgcattccatgattcatgta

SEQ ID NO: 700029 - DNA, 120 bp, Artificial Sequence
  ENSG00000196098_4 (sequence is synthesized)
ttattaaggttaactttctgcaggtctaataaaattcaccactttttctgtgatattcttccactgtatagactctcctgtacagatccttctattaatgaactaatgatatatatcttt

SEQ ID NO: 700030 - DNA, 120 bp, Artificial Sequence
  ENSG00000196098_5 (sequence is synthesized)
tcaataccaattcaaatctttaccattgctactgtcttgatctcttatctctgcatccttttgactgttttcaaaatgaaatccaaggagggaagaggtaaagcattttctacctgtgca

SEQ ID NO: 700031 - DNA, 120 bp, Artificial Sequence
  ENSG00000196098_6 (sequence is synthesized)
tcccactttctctctgtctcaatattttacatttgtcttctcatgtatattggaccatctgaagaaggagataaagatacaccagtggcaatattttatgcaatagtaatcccattacta

SEQ ID NO: 700032 - DNA, 120 bp, Artificial Sequence
  ENSG00000196098_7 (sequence is synthesized)
aacccttttatttatagtctgagaaataaggaggtcataaatgttcttaaaaaaattatgaggaattataacattcttaaacaaacttgctctatagcaaatttatttttaatttattaa

SEQ ID NO: 700033 - DNA, 120 bp, Artificial Sequence
  ENSG00000196099_0 (sequence is synthesized)
ttcttcagggaaaccctgcccaccatatagtagttgtcatgggaaactggagcactgtgactgaaatcaccctaattgccttcccagctctcctggagattcgaatatctctcttcgtgg

SEQ ID NO: 700034 - DNA, 120 bp, Artificial Sequence
  ENSG00000196099_1 (sequence is synthesized)
ttcttgtggtaacttacacattaacagcaacaggaaacatcaccatcatctccctgatatggattgatcatcgcctgcaaactccaatgtacttcttcctcagtaatttgtcctttctgg

SEQ ID NO: 700035 - DNA, 120 bp, Artificial Sequence
  ENSG00000196099_2 (sequence is synthesized)
atatcttatacaccactgtcattaccccaaagttgttggcctgcctcctaggagaagagaaaaccatatcttttgctggttgcatgatccaaacatatttctacttctttctggggacgg

SEQ ID NO: 700036 - DNA, 120 bp, Artificial Sequence
  ENSG00000196099_3 (sequence is synthesized)
tggagtttatcctcttggcggtgatgtcctttgaccgctacatggctatctgcgacccactgcactacacggtcatcatgaacagcagggcctgccttctgctggttctgggatgctggg

SEQ ID NO: 700037 - DNA, 120 bp, Artificial Sequence
  ENSG00000196099_4 (sequence is synthesized)
cccctcttcttcaggtggcctgtataaatactcacctcattgagaagataaactttctcctctctgcccttgtcatcctgagctccctggcattcactactgggtcctacgtgtacataa

SEQ ID NO: 700038 - DNA, 120 bp, Artificial Sequence
  ENSG00000196099_5 (sequence is synthesized)
tttctaccatcctgcgtatcccctccacccagggccgtcagaaagctttttctacctgtgcttctcacatcactgttgtctccattgcccacgggagcaacatctttgtgtatgtgagac

SEQ ID NO: 700039 - DNA, 120 bp, Artificial Sequence
  ENSG00000196099_6 (sequence is synthesized)
ccaatcagaactcctcactggattatgacaaggtggccgctgtcctcatcacagtggtgacccctctcctgaacccttttatctacagcttgaggaatgagaaggtacaggaagtgttga

SEQ ID NO: 700040 - DNA, 120 bp, Artificial Sequence
  ENSG00000196099_7 (sequence is synthesized)
gagagacagtgaacagaatcatgaccttgatacaaaggaaaacttgacactggtatacactacattaaatacatttctttttttattattttttttaagttccagggtacatgtgcagga

SEQ ID NO: 700041 - DNA, 120 bp, Artificial Sequence
  ENSG00000196104_0 (sequence is synthesized)
gcatttccagcaggagctgcgagcacagtgctggctcacaacaagatgctcaaggtgtcagccgtactgtgtgtgtgtgcagccgcttggtgcagtcagtctctcgcagctgccgcggcg

SEQ ID NO: 700042 - DNA, 120 bp, Artificial Sequence
  ENSG00000196104_1 (sequence is synthesized)
gtggctgcagccggggggcggtcggacggcggtaattttctggatgataaacaatggctcaccacaatctctcagtatgacaaggaagtcggacagtggaacaaattccgagacgatgat

SEQ ID NO: 700043 - DNA, 120 bp, Artificial Sequence
  ENSG00000196104_2 (sequence is synthesized)
tatttccgcacttggagtccaggaaaacccttcgatcaggctttagatccagctaaggatccatgcttaaagatgaaatgtagtcgccataaagtatgcattgctcaagattctcagact

SEQ ID NO: 700044 - DNA, 120 bp, Artificial Sequence
  ENSG00000196104_3 (sequence is synthesized)
gcagtctgcattagtcaccggaggcttacacacaggatgaaagaagcaggagtagaccataggcagtggaggggtcccatattatccacctgcaagcagtgcccagtggtctatcccagc

SEQ ID NO: 700045 - DNA, 120 bp, Artificial Sequence
  ENSG00000196104_4 (sequence is synthesized)
cctgtttgtggttcagatggtcatacctactcttttcagtgcaaactagaatatcaggcatgtgtcttaggaaaacagatctcagtcaaatgtgaaggacattgcccatgtccttcagat

SEQ ID NO: 700046 - DNA, 120 bp, Artificial Sequence
  ENSG00000196104_5 (sequence is synthesized)
aagcccaccagtacaagcagaaatgttaagagagcatgcagtgacctggagttcagggaagtggcaaacagattgcgggactggttcaaggcccttcatgaaagtggaagtcaaaacaag

SEQ ID NO: 700047 - DNA, 120 bp, Artificial Sequence
  ENSG00000196104_6 (sequence is synthesized)
aagacaaaaacattgctgaggcctgagagaagcagattcgataccagcatcttgccaatttgcaaggactcacttggctggatgtttaacagacttgatacaaactatgacctgctattg

SEQ ID NO: 700048 - DNA, 120 bp, Artificial Sequence
  ENSG00000196104_7 (sequence is synthesized)
gaccagtcagagctcagaagcatttaccttgataagaatgaacagtgtaccaaggcattcttcaattcttgtgacacatacaaggacagtttaatatctaataatgagtggtgctactgc

SEQ ID NO: 700049 - DNA, 120 bp, Artificial Sequence
  ENSG00000196104_8 (sequence is synthesized)
ttccagagacagcaagacccaccttgccagactgagctcagcaatattcagaagcggcaaggggtaaagaagctcctaggacagtatatccccctgtgtgatgaagatggttactacaag

SEQ ID NO: 700050 - DNA, 120 bp, Artificial Sequence
  ENSG00000196104_9 (sequence is synthesized)
ccaacacaatgtcatggcagtgttggacagtgctggtgtgttgacagatatggaaatgaagtcatgggatccagaataaatggtgttgcagattgtgctatagattttgagatctccgga

SEQ ID NO: 700051 - DNA, 120 bp, Artificial Sequence
  ENSG00000196104_10 (sequence is synthesized)
gattttgctagtggcgattttcatgaatggactgatgatgaggatgatgaagacgatattatgaatgatgaagatgaaattgaagatgatgatgaagatgaaggggatgatgatgatggt

SEQ ID NO: 700052 - DNA, 120 bp, Artificial Sequence
  ENSG00000196104_11 (sequence is synthesized)
ggtgatgaccatgatgtatacatttgattgatgacagttgaaatcaataaattctacatttctaatatttacaaaaatgatagcctatttaaaattatcttcttccccaataacaaaatg

SEQ ID NO: 700053 - DNA, 120 bp, Artificial Sequence
  ENSG00000196104_12 (sequence is synthesized)
taaacctcacatatattttgtataattatttgaaaaattgcagctaaagttatagaactttatgtttaaataagaatcatttgctttgagtttttatattccttacacaaaaagaaaata

SEQ ID NO: 700054 - DNA, 120 bp, Artificial Sequence
  ENSG00000196104_13 (sequence is synthesized)
catatgcagtctagtcagacaaaataaagttttgaagtgctactataataagtttttcacgagaacaaactttgtaaatcttccataagcaaaatgacagctagtgcttgggatcgtaca

SEQ ID NO: 700055 - DNA, 120 bp, Artificial Sequence
  ENSG00000196104_14 (sequence is synthesized)
tgttaattttctgaaagataattctaagtgaaatttaaaataaataaatttttaatgacctgggtcttaaggatttaggaaaaatatgcatgctttaattgcatttccaaagtagcatct

SEQ ID NO: 700056 - DNA, 120 bp, Artificial Sequence
  ENSG00000196104_15 (sequence is synthesized)
tgctagacctagttgagtcaggataacagagagataccacatggcaagaaaaacaaagtgacaattgtagagtcctcaattgtgtttacattaatagtggtgtttttacctatgaaatta

SEQ ID NO: 700057 - DNA, 120 bp, Artificial Sequence
  ENSG00000196104_16 (sequence is synthesized)
ttctggatctaataggacattttacaaaatggcaagtatggaaaaccatggattctgaaagttaaaaatttagttgttctccccaatgtgtattttaatttggatggcagtctcatgcag

SEQ ID NO: 700058 - DNA, 120 bp, Artificial Sequence
  ENSG00000196104_17 (sequence is synthesized)
attttttaaaagattctttaataacatgatttgtttgcctttctagatttctttatctttctgaccagcaacttagggagcagaatttaaattaggaagacaaagggaaagattcattta

SEQ ID NO: 700059 - DNA, 120 bp, Artificial Sequence
  ENSG00000196104_18 (sequence is synthesized)
aaccatatttttacaaagtttgtcatttgccccaaggtcaaattttaaattcttaattttcattttatttcccattttaggtaaaagtttgcatttaatcttagaattatgttatttttg

SEQ ID NO: 700060 - DNA, 120 bp, Artificial Sequence
  ENSG00000196104_19 (sequence is synthesized)
ttagtagtgtggaaacttagagaacttattgtatggtgccttgcaaaaatagagatagaaagattttagcatgcataccaatatagtatattacgcaatatataagcacacctaattaac

SEQ ID NO: 700061 - DNA, 120 bp, Artificial Sequence
  ENSG00000196104_20 (sequence is synthesized)
agattaatatcagtaaaggtattgctgctggaatgaagaaaatgggatacgtttgtttctttttttctattgttacataattgccatgtggacttgtttatgattattgtgtagagtagc

SEQ ID NO: 700062 - DNA, 120 bp, Artificial Sequence
  ENSG00000196104_21 (sequence is synthesized)
atttaagatttaactgtagcaaaaattactttaaccgctgtatttaagttagcatgttaattaattgtgtagacattttggcacaccatcacttttaactatatcataccaatggttttg

SEQ ID NO: 700063 - DNA, 120 bp, Artificial Sequence
  ENSG00000196104_22 (sequence is synthesized)
tgcccataataaaaatggaaaaacctgttgaatgttacgtattggtatctttaatttcaacagtgggtaaactggtttcccagtatacaattcattgaaagcaaaattgattaattattt

SEQ ID NO: 700064 - DNA, 120 bp, Artificial Sequence
  ENSG00000196104_23 (sequence is synthesized)
ccatttaatttatacacactcaatacaaaatttaatgttgactttacgtaataaagtataatgcattttcttttttactgtttatgtatagtttacaaaataaagaatcttgtaaccaaa

SEQ ID NO: 700065 - DNA, 120 bp, Artificial Sequence
  ENSG00000196104_24 (sequence is synthesized)
gctaatgcatgttttccagggtcgctcctggcttcgtaccccttatttgacactgacatgcccccccaccccccgttgtgtctcctctcccagatgctcaaggtgtcagccgtactgtgt

SEQ ID NO: 700066 - DNA, 120 bp, Artificial Sequence
  ENSG00000196104_25 (sequence is synthesized)
acaaagcagataaggattcctaggctaggagctacctcgtcctctggctccagccaagcgtcctatccggagccaactgtagctgggatccagcgagaggaagatgctcaaggtgtcagc

SEQ ID NO: 700067 - DNA, 120 bp, Artificial Sequence
  ENSG00000196104_26 (sequence is synthesized)
acacatattctccacgccatggaggccactgcttgaggatgggggaggagtagtataagcagttcaatactgtcttttttaccatcttcagtgcttcttggtgatatgaagtaaaaccag

SEQ ID NO: 700068 - DNA, 120 bp, Artificial Sequence
  ENSG00000196104_27 (sequence is synthesized)
taagcccaccagtacaagcagaaatgttaagagagtactctgagtgctatggaaccctatcaagaaacaaagtttatttcattattgtgctatgattataagttaactgatttaaggaaa

SEQ ID NO: 700069 - DNA, 120 bp, Artificial Sequence
  ENSG00000196104_28 (sequence is synthesized)
aagtattattgattaagaattaatgtatgccattttccaagtgacaaataatttagttttaacgtttaattttgtatgatggaatttttttatatcctctgaattatggaatggattttc

SEQ ID NO: 700070 - DNA, 120 bp, Artificial Sequence
  ENSG00000196104_29 (sequence is synthesized)
aatgagaaacagattaacatcagtgtattaatatactcttgcaacatgcatgcttctccgtaactaatatagtgtattcataaatggtaagttcttctgtaattttgtttaattggagcc

SEQ ID NO: 700071 - DNA, 120 bp, Artificial Sequence
  ENSG00000196104_30 (sequence is synthesized)
atggaaaaataaaattaagtcagtttattggcaagtgttgcataattatttataataaaaattaagttttactcatttggattatttgaaatacattcttggattaaattaatgtgtctg

SEQ ID NO: 700072 - DNA, 120 bp, Artificial Sequence
  ENSG00000196104_31 (sequence is synthesized)
ttaagaaaataaaacagtacactatgctcattcattttgtgtatgtttttgtaattcaagtgttgaataaaagagcaaataagaagcatgttgaacaaataactctgccagagatacaac

SEQ ID NO: 700073 - DNA, 120 bp, Artificial Sequence
  ENSG00000196104_32 (sequence is synthesized)
acatgctaaataagatgaaaaatagtaattaatattttgtattaatgccactacattatagtttccattatgagccaccaagaagcacacagaaatattaagaacttagatactgaaagt

SEQ ID NO: 700074 - DNA, 120 bp, Artificial Sequence
  ENSG00000196104_33 (sequence is synthesized)
aatcattaaaattaatttgctatctgctttgcccacaatgtaaaataaatggattttttatcactatacggtggagttttaatgttctattttgtgatcttattaaatgagttgaatgaa

SEQ ID NO: 700075 - DNA, 120 bp, Artificial Sequence
  ENSG00000196109_0 (sequence is synthesized)
gtcggtcctttgtctctcgctgcagccggaggtaaaggccttgtccttactgttcctagagtcccagcctctgtggccctatgacctgcaggtattgggagatccacaactaagtcgcca

SEQ ID NO: 700076 - DNA, 82 bp, Artificial Sequence
  ENSG00000196109_1 (sequence is synthesized)
tgcctggattctacacagcagaatttatataggaatgtgatgttagagaactacagaaacctggtcttcctgggtattgctg

SEQ ID NO: 700077 - DNA, 120 bp, Artificial Sequence
  ENSG00000196109_2 (sequence is synthesized)
ttagagaactacagaaacctggtcttcctgggtattgctgcctttaagccagacctgatcatttttctggagcaaggaaaagagccctggaatatgaagagacatgagatggtggaagaa

SEQ ID NO: 700078 - DNA, 120 bp, Artificial Sequence
  ENSG00000196109_3 (sequence is synthesized)
cccccagttatatgttctcatttttcccaagagttttggccagagcaaggcatagaagattctttccaaaaaatgatattgagaagatatgacaaatgtggacatgagaatttacactta

SEQ ID NO: 700079 - DNA, 120 bp, Artificial Sequence
  ENSG00000196109_4 (sequence is synthesized)
aaaattagttgtaccaatgtggatgagtgtaacgtgcacaaagaaggttataataaacttaaccagagtttaacaactacacagagcaaagtatttcaatgtggcaaatatgcaaacgtc

SEQ ID NO: 700080 - DNA, 120 bp, Artificial Sequence
  ENSG00000196109_5 (sequence is synthesized)
tttcataaatgttcaaattcaaacagacataagataaggcatactggagagaaaggtttgaaatgtaaagaatatgtcagatcattttgcatgctttcacacctatctcaacatgaaaga

SEQ ID NO: 700081 - DNA, 120 bp, Artificial Sequence
  ENSG00000196109_6 (sequence is synthesized)
atgaaagaatttatactagagagaattcctacaaatgtgaagaaaatggcaaagcttttaactggtcctcaacccttacttattataagagtattcatactggagagaaaccctacaaat

SEQ ID NO: 700082 - DNA, 82 bp, Artificial Sequence
  ENSG00000196109_7 (sequence is synthesized)
agaatgtggcaaaggatttagtagcgtctcaacccttaatacacataaggcaattcatgctgaccaactcgtcctcaaagct

SEQ ID NO: 700083 - DNA, 87 bp, Artificial Sequence
  ENSG00000196109_8 (sequence is synthesized)
aaccctacaagtgtgaagaatgtggcaaagccttcagctggtcctcaagccttactgaacacaagagaattcatgggaaagctttta

SEQ ID NO: 700084 - DNA, 90 bp, Artificial Sequence
  ENSG00000196109_9 (sequence is synthesized)
gatgtggcaaagcctttagtaaggtctcaacccttaatacacataaggcaattcatgctgaagagaagccctacaaatgtgaagaatgtg

SEQ ID NO: 700085 - DNA, 82 bp, Artificial Sequence
  ENSG00000196109_10 (sequence is synthesized)
cccttaatacacataaggcaattcatgctgaccaactcatcctcaaagctcatggaacataagagaattcatactggagaga

SEQ ID NO: 700086 - DNA, 74 bp, Artificial Sequence
  ENSG00000196109_11 (sequence is synthesized)
aaccctacaagtgtgaagaatgtggcaaagccttcagctggtcctcaagccttactgaacacaagagaattcat

SEQ ID NO: 700087 - DNA, 85 bp, Artificial Sequence
  ENSG00000196109_12 (sequence is synthesized)
agccttcacctggtcctcaagctttactaaacacaagagaattcatgctgcgctttagtacgttctcaatccttactaaacataa

SEQ ID NO: 700088 - DNA, 120 bp, Artificial Sequence
  ENSG00000196109_13 (sequence is synthesized)
attacatatacacagatgttatggatcttataccactttcttttctcagagttagagaatacattagtgaacatttctgtgttgaaaactattttattgaataatttcagtcattcatat

SEQ ID NO: 700089 - DNA, 120 bp, Artificial Sequence
  ENSG00000196109_14 (sequence is synthesized)
aagtcagaaccagctctctctactctctccattttaccttgagtcacattaaaagttctgcccatgaccaattggtaaatatatgtgtttgtgtgtgttttccagggagcattgacattt

SEQ ID NO: 700090 - DNA, 120 bp, Artificial Sequence
  ENSG00000196109_15 (sequence is synthesized)
aatgtgaagaatgtggcaaagcttttaagtcatcctcaactgttagttatcataagaaaattcatactggagagaatccctaaaaatgtgaagaatgtggtaaatccttcagctgattct

SEQ ID NO: 700091 - DNA, 120 bp, Artificial Sequence
  ENSG00000196109_16 (sequence is synthesized)
tccttcagctgattctcagtctagtaaacataagaaaattcatactggagagaaaatctacaaaggtgaagaatgtggcaaagcttttaaacagtcctcaatctttattacacataagaa

SEQ ID NO: 700092 - DNA, 120 bp, Artificial Sequence
  ENSG00000196109_17 (sequence is synthesized)
atctttattacacataagaaaattcatgctggagagaaacactacaaacgtgaagaatgtgacaaaggcttcaaccggtcctcaaaccttgtggaacataagagaattcatactggagag

SEQ ID NO: 700093 - DNA, 120 bp, Artificial Sequence
  ENSG00000196109_18 (sequence is synthesized)
atgtgataaagacttcaactgttcctcacaccttactactcataaaagaattcatactggaggaaaagccctacaaatgtgaaaaacgtggcaaagcttttcattagttctcaaccctta

SEQ ID NO: 700094 - DNA, 120 bp, Artificial Sequence
  ENSG00000196109_19 (sequence is synthesized)
ccctacaaatgtgaagaatgtggcaagccttttagctgttcctcaatccttactaaacattcatgtaattcatactggagggaattcctataattgtgtggaatgtggcaaagcctttaa

SEQ ID NO: 700095 - DNA, 120 bp, Artificial Sequence
  ENSG00000196109_20 (sequence is synthesized)
tataattgtgtggaatgtggcaaagcctttaaccagtccttaaggcttactacatataagacaactcatactggagagaaaccatgcatgtgtgaagaatgtgggaaagcctctaacaga

SEQ ID NO: 700096 - DNA, 120 bp, Artificial Sequence
  ENSG00000196109_21 (sequence is synthesized)
tcctcaattcttaagaaacataggctaattcatacatgagagactctacaaacctgaaagatgtgacaatgcttttggcaacacctcagacttttctgaatataaaagaaatcatatgaa

SEQ ID NO: 700097 - DNA, 120 bp, Artificial Sequence
  ENSG00000196109_22 (sequence is synthesized)
tgagaaatcctagaaatgtgaagaatgtgacaaagcctttaaatggctgtcacacttgattgtaggtaagataatatactggagaaaactactagaataaacaatgtggcacacatttaa

SEQ ID NO: 700098 - DNA, 120 bp, Artificial Sequence
  ENSG00000196109_23 (sequence is synthesized)
ctgccagcagaggatttccacccactcacaaacacccactagacattgatgtgtccacacccctctctggacaaggcaccaccctcaggaattttaccacagcatttttgatcctagtgg

SEQ ID NO: 700099 - DNA, 120 bp, Artificial Sequence
  ENSG00000196109_24 (sequence is synthesized)
tttttttggccaaaaacctacaaaagtgtctacaagtctcctggcatatccctattttcagacacggaatctgcagtagcatcctgttttctccaccagcctaggattcataatcttatc

SEQ ID NO: 700100 - DNA, 120 bp, Artificial Sequence
  ENSG00000196109_25 (sequence is synthesized)
tggctgcatggacccagaaatgaatcagagtacagccccacctgggccactatctatagcacaaaccagtccttccacctgcattgcactctctccaatcgagggatttttttcttttaa

SEQ ID NO: 700101 - DNA, 120 bp, Artificial Sequence
  ENSG00000196109_26 (sequence is synthesized)
cttttatttttgggtggttcaggggtacatgtgcagctttgttatacagctaaaattgtgtcatgggagtttggtgtggagattattttgtcactgcagtactaatcatagcaccaaaaa

SEQ ID NO: 700102 - DNA, 120 bp, Artificial Sequence
  ENSG00000196109_27 (sequence is synthesized)
tgtactttttctgacccttttagtcctcccaccctcaactaggcctcagtgtcttttttcccctctgtgttcatgtgttcttatttatctcttacttataaataataacatgcatttggt

SEQ ID NO: 700103 - DNA, 120 bp, Artificial Sequence
  ENSG00000196109_28 (sequence is synthesized)
tttttttaatggccacacagtatttcatgatgtcatgatgtttatgtaccatatttgtttgtttgtttgttttgatatggaatctcactgtatcacacaggctggagtgcagtggcatga

SEQ ID NO: 700104 - DNA, 74 bp, Artificial Sequence
  ENSG00000196109_29 (sequence is synthesized)
attttgtttttattaggttttttattttttgttatttttggagacagggtctcactttctttcccaggctgcag

SEQ ID NO: 700105 - DNA, 120 bp, Artificial Sequence
  ENSG00000196109_30 (sequence is synthesized)
gcagtgcagtggtgtgatcttggctcgctgaaactcacccactcaggctcaaacaatcctcttctatctaagcttctcaagtagctaagactgaaggcttgtgccaccatgcctagctaa

SEQ ID NO: 700106 - DNA, 120 bp, Artificial Sequence
  ENSG00000196109_31 (sequence is synthesized)
cttctcaagtagctaagactgaaggcttgtgccaccatgcctagctaatttttctttttaatagatgggattttgccatgttgtccatgccggtctcaaactcctgagctcaggcaatcc

SEQ ID NO: 700107 - DNA, 120 bp, Artificial Sequence
  ENSG00000196109_32 (sequence is synthesized)
tgagctcaggcaatccacctggctcagcccccaaagtgctggattacagacatgtgccatcatgcccaaccataccgtattttctgtatccagtctaccattgataggcatttaggttga

SEQ ID NO: 700108 - DNA, 120 bp, Artificial Sequence
  ENSG00000196109_33 (sequence is synthesized)
ctgcaacgaatgtgattgtgcatgtgtctttatgatagaataatttatatatttttaggtataaaccccgttgtgaggttactgggtcaaatggtaattttatttttagtttagtgagga

SEQ ID NO: 700109 - DNA, 120 bp, Artificial Sequence
  ENSG00000196110_0 (sequence is synthesized)
atggaggaagaaagaaaaactgctgagttacagaaaaatagaatacaggactcagtagtctttgaggatgtggctgtggactttacccaggaggaatgggctttgctggatcttgctcag

SEQ ID NO: 700110 - DNA, 120 bp, Artificial Sequence
  ENSG00000196110_1 (sequence is synthesized)
agaaacctctacagagatgtgatgctggaaaacttccagaacctggcctcactagggtatccgctacacacaccccatctgatctcccagtgggaacaagaggaggacctgcagacagtg

SEQ ID NO: 700111 - DNA, 120 bp, Artificial Sequence
  ENSG00000196110_2 (sequence is synthesized)
aagagagaacttatccagggcatctttatgggagagcaccgggaaggttttgagactcaacttaaaactaatgaatcagttgcttcacaagatatttgtggagaaaaaatatccaatgaa

SEQ ID NO: 700112 - DNA, 120 bp, Artificial Sequence
  ENSG00000196110_3 (sequence is synthesized)
cagaaaatagtaagattcaaaaggaatgattcctggttctccagtttacatgaaaaccaggagtcctgtggtattgattatcagaacaaaagccatgagagacatttgagaaatcatatg

SEQ ID NO: 700113 - DNA, 120 bp, Artificial Sequence
  ENSG00000196110_4 (sequence is synthesized)
gtagagaacatctatgaatgttatgaagaaaatcaagatggacagactttcagccaagttccaaatcttgattcactcaagagaaatactgaagtaaaatcctgtgaatgccatgagtgt

SEQ ID NO: 700114 - DNA, 120 bp, Artificial Sequence
  ENSG00000196110_5 (sequence is synthesized)
ggaaaggccttcgtggatcattcatcccttaagagtcacatcaggtctcatactggaagcaaaccctatcagtgcaaggaatgtgggaaggccttccattttcttgcttgtttcaagaag

SEQ ID NO: 700115 - DNA, 120 bp, Artificial Sequence
  ENSG00000196110_6 (sequence is synthesized)
catatgaaaacccccactgaagagaagccctatgaatgtaaggaatgtaccaaagccttcagctgttcctcattctttagggcacatatgaagattcacatcggaaagacaaactatgaa

SEQ ID NO: 700116 - DNA, 120 bp, Artificial Sequence
  ENSG00000196110_7 (sequence is synthesized)
tgtaaagaatgtgggaaaggttttagttgttcctcatcgctcacagaacacaaaagaattcacagtggagataagccttatgaatgtaaggaatgtgggaaggccttcagttgttcctcc

SEQ ID NO: 700117 - DNA, 120 bp, Artificial Sequence
  ENSG00000196110_8 (sequence is synthesized)
gaatgtgggaaggcctttagctcttcctctcaccttataatacatataagaattcacactggagagaagccttatgaatgtaaagagtgtgggaaggccttcagcgagtcctcaaaactc

SEQ ID NO: 700118 - DNA, 120 bp, Artificial Sequence
  ENSG00000196110_9 (sequence is synthesized)
actgtacatgggaggacacatactggagagaaaccctataaatgtaaggaatgtgggaaagcctacaattgtccctcctccttaagtatccatatgagaaaacacactggagaaaaaccg

SEQ ID NO: 700119 - DNA, 120 bp, Artificial Sequence
  ENSG00000196110_10 (sequence is synthesized)
tatgaatgtctggaatgtggaaaggccttctaccttcccacttcccttaatacacatgtgaaaaatcaaagtcgagagaaaccctatgaatgtaaggaatgtgggaaggcctttagttgt

SEQ ID NO: 700120 - DNA, 120 bp, Artificial Sequence
  ENSG00000196110_11 (sequence is synthesized)
ccctcgtcctttagagcacatgtgagagatcacactggaaagatacagtatgaatgtaaggagtgtgggaagacctttagtcgttcctcatccctcaccgaacacctaagaactcacagc

SEQ ID NO: 700121 - DNA, 120 bp, Artificial Sequence
  ENSG00000196110_12 (sequence is synthesized)
cctaagaactcacagcggagagaagccgtatgaatgtaaagaatgtgggaaagcctttattagttcctcccaccttacagtacatatcagaactcacactggagagaaaccctatgaatg

SEQ ID NO: 700122 - DNA, 120 bp, Artificial Sequence
  ENSG00000196110_13 (sequence is synthesized)
gcctttatttatccctcagcccttaggatccacatgagaacgcacactggggaaaaaccctatgaatgtaaggaatgtgggaaagcatttcgtcattcttcataccttactgtacatgca

SEQ ID NO: 700123 - DNA, 120 bp, Artificial Sequence
  ENSG00000196110_14 (sequence is synthesized)
agaatgcacactggagagaaaccctttgaatgtctggaatgtggaaaagctttcagttgtccctcatcctttcgaaggcatgtgagaagccacactggagagaaaccctatgaatgtaag

SEQ ID NO: 700124 - DNA, 120 bp, Artificial Sequence
  ENSG00000196110_15 (sequence is synthesized)
gaatgtgggaaagcctttgtttgtcctgcctactttcgaaggcatgtgaaaactcacactagagaaaacatataaatgtaaggaatatgggaatgtctgcaaagcttcagatcctaggca

SEQ ID NO: 700125 - DNA, 120 bp, Artificial Sequence
  ENSG00000196110_16 (sequence is synthesized)
acatgtgagatctcatactgtggagacaccctatgaatgtaagaaagtaggaaattgttgctcatcgttttgaagatttgaggacactttagagaaaccctgtgtatgtaagtcatgtgc

SEQ ID NO: 700126 - DNA, 120 bp, Artificial Sequence
  ENSG00000196110_17 (sequence is synthesized)
gcatgcgcgagtcgacagccttgtcaccctacgcctccgcccgcgtctgaggaacatttttgcctccgcccgcttcctgtcctgccctgccccgccccgccctgcctgccccgggtcggg

SEQ ID NO: 700127 - DNA, 120 bp, Artificial Sequence
  ENSG00000196110_18 (sequence is synthesized)
tccgcgggagaccgagggctgggtttgggaatcggcggtctaagggctgcctccccgccactccttgtccggaccccgcgcccggggcctcccgccgccgcggcgcctcctcagagagcc

SEQ ID NO: 700128 - DNA, 120 bp, Artificial Sequence
  ENSG00000196110_19 (sequence is synthesized)
cgggtcagctgcccctgtggccgcggctggtcccaaactcactgaatcgggaactctggtctgggtacagaaatcggggtgattctgatgcaggcgagagttggagaaccaatgtcgtag

SEQ ID NO: 700129 - DNA, 120 bp, Artificial Sequence
  ENSG00000196110_20 (sequence is synthesized)
ttcatcagcctccgaaagcatcctttgctctctttccagaaaggaagagcatctctgccattcgtgtctcaaggacaagcgcttcagcctcgttctctgtgagctgatctgtggatcgcg

SEQ ID NO: 700130 - DNA, 120 bp, Artificial Sequence
  ENSG00000196110_21 (sequence is synthesized)
tgaagatcagtgcctcatccttaaagtagaatgctggctcgttgattaccagtgttttctgataggaacattgaaggtgataaatttaccttttcagctctagccacatactttttagta

SEQ ID NO: 700131 - DNA, 120 bp, Artificial Sequence
  ENSG00000196110_22 (sequence is synthesized)
tgaggtgctttaattttggttctgatgtaaatatgatttccattacaaaatcttttggatcatggaggacacgaaatattttttctgtataggcagcagtggtcttttttaaaaaagtgg

SEQ ID NO: 700132 - DNA, 120 bp, Artificial Sequence
  ENSG00000196110_23 (sequence is synthesized)
tttctaattaatgttcattgttctttaaatgggtagtcgttataatattgacaaaccaatataatattgacaaaccaaaaaccaaatattgatttttgttgatgttttgtttttagtcta

SEQ ID NO: 700133 - DNA, 120 bp, Artificial Sequence
  ENSG00000196110_24 (sequence is synthesized)
catggcagataatggaacttgcccactcaatatttttcttcctattcttttttgctaagagacgttagagtttctgagatgataaatttttactattaaaagcttttattgtctagtgag

SEQ ID NO: 700134 - DNA, 120 bp, Artificial Sequence
  ENSG00000196110_25 (sequence is synthesized)
taatttcagcagaaattaatttaatatactatttttatattttattctttgtccttgctcgtggctgggaattggatccagtgttttgagtgtaaaaattgtgttacattaactacattt

SEQ ID NO: 700135 - DNA, 120 bp, Artificial Sequence
  ENSG00000196110_26 (sequence is synthesized)
cccagaatcacttttttctccagttctaggttagacttgtctaaaataagagtttgtacgagatttggaaggcataagggaagaaaaagctgttatgctatgtttagtggggccatcaga

SEQ ID NO: 700136 - DNA, 120 bp, Artificial Sequence
  ENSG00000196110_27 (sequence is synthesized)
cctggtgacctctagttttcagctcatttttctgactgttggactcattgatcaatatttgctcaaaactgaatgttatagctggacgtgatggtgcatacctgtggtcccagctactca

SEQ ID NO: 700137 - DNA, 88 bp, Artificial Sequence
  ENSG00000196110_28 (sequence is synthesized)
agagtgagaccctttctcaaaaacaaaacaaaacgaaataaaaaaccaaacattaaatgcttgcttgacctcagtgtcttccaaggca

SEQ ID NO: 700138 - DNA, 120 bp, Artificial Sequence
  ENSG00000196110_29 (sequence is synthesized)
aacattaaatgcttgcttgacctcagtgtcttccaaggcagcatctctaaagctatcaccagatacagcttcttggattttctagcaagctctggcattgccattttgcttatgttgcag

SEQ ID NO: 700139 - DNA, 120 bp, Artificial Sequence
  ENSG00000196110_30 (sequence is synthesized)
tctttcttacacagtccaatcgcatcatgtcatgctattcatggggaaaaatacgttcgcaagtctcaaaagcaagagctgtggagagtgagggaagttacccttggtaattgaggtaag

SEQ ID NO: 700140 - DNA, 120 bp, Artificial Sequence
  ENSG00000196110_31 (sequence is synthesized)
catccacagggtatcatcctgttttaatggaggaagatttatacttgacacctttaaacaggaaagattttactgctttttttttttttttaaatgtaagaagatgaattgcttcaggta

SEQ ID NO: 700141 - DNA, 120 bp, Artificial Sequence
  ENSG00000196110_32 (sequence is synthesized)
cctttagctacagtattatattttccctttaaaagtataatctactactgtgatatttccctcctattatattttctctttaaaagtataactctactatttccccataatcacttttta

SEQ ID NO: 700142 - DNA, 120 bp, Artificial Sequence
  ENSG00000196110_33 (sequence is synthesized)
ttttattatacatatactaacatgcatgaagtgtgctaatcttcaatgtacagcttaatgacatttcatgtatgtacatgtcctggtaaacagaacatttccaagactttaggaagttcc

SEQ ID NO: 700143 - DNA, 120 bp, Artificial Sequence
  ENSG00000196110_34 (sequence is synthesized)
ttcatcctctttctcagtgataattactccacagggcaaccacaattttgactcttactataattgacttggtgtgcttgttcttgattttcatccaaatgttaaaatacaatatataca

SEQ ID NO: 700144 - DNA, 120 bp, Artificial Sequence
  ENSG00000196110_35 (sequence is synthesized)
gttatgtgttttgacttcttttgctcaacataatgtgtggtttgacttttaattgttcttttgatagatgtatgggcttatttatcttggtatgtgctatatgctcaggaatgaatttac

SEQ ID NO: 700145 - DNA, 120 bp, Artificial Sequence
  ENSG00000196110_36 (sequence is synthesized)
tgaatcatagggtagactttaaatttagttttggtaggtattgcagttttcaaaaaatatcgattccacgaataatccccaaaacaatgcatgaaagttccagttgtttcacacacctgt

SEQ ID NO: 700146 - DNA, 120 bp, Artificial Sequence
  ENSG00000196110_37 (sequence is synthesized)
ccagctctttctgattatagtcatccagcagacagtgtgcatttacctgatgtgtaatgatttcgagtacttttcgatgtgcttattggctatttggattttttttttttttgagggcac

SEQ ID NO: 700147 - DNA, 81 bp, Artificial Sequence
  ENSG00000196110_38 (sequence is synthesized)
gcttattggctatttggattttttttttttttgagggcacctgttgaaacatttcatccactcttgtgcccaggttggagt

SEQ ID NO: 700148 - DNA, 74 bp, Artificial Sequence
  ENSG00000196110_39 (sequence is synthesized)
cttatggttcctttttaaaaaaaaaaaaaaattgaaaggtttccttctggttacttgtcctttattgtatgtat

SEQ ID NO: 700149 - DNA, 120 bp, Artificial Sequence
  ENSG00000196110_40 (sequence is synthesized)
aaaggtttccttctggttacttgtcctttattgtatgtatgtatatctatatctaggtacacatgcatagatatgtataaaccatgtatcatatattacatatatacataaaatatgtat

SEQ ID NO: 700150 - DNA, 120 bp, Artificial Sequence
  ENSG00000196110_41 (sequence is synthesized)
attatatatacatacattacagataacatttcccaatctctgtcttgtcttttcactctttaaagggaatttgttggtttaaataatttattactaaaaagtccttgggtataacgagct

SEQ ID NO: 700151 - DNA, 120 bp, Artificial Sequence
  ENSG00000196110_42 (sequence is synthesized)
tcagacatggctaaatcctggggctaaaaaaatgttatctagttgaattctgtctccctgtcttggctgtgcatcctcctgcattagtgtttcttccaagcaggttgtctcttcatagat

SEQ ID NO: 700152 - DNA, 120 bp, Artificial Sequence
  ENSG00000196110_43 (sequence is synthesized)
ggccccagaaactctggctactttcttcccaacttaaagtctcagggagaaaagagtgattgtctttttgagtggttccaatatgatgatcagaattgaatctcgttggctctgattggc

SEQ ID NO: 700153 - DNA, 120 bp, Artificial Sequence
  ENSG00000196110_44 (sequence is synthesized)
tcacttgcccactgtactctagtcactggcctggggaatgtaatactctcatttgtttagggttagtgcctgttcttatccagaaactggattagagtctgcactgactgaatcatagag

SEQ ID NO: 700154 - DNA, 120 bp, Artificial Sequence
  ENSG00000196110_45 (sequence is synthesized)
tcctggcagttttggggcatatgcagaggggaggaggaaggagtgggcaggtaggatctaaaagcagtggtaatgttagctgttatgctggtcttagcagcaagtgggaactgtgaagtc

SEQ ID NO: 700155 - DNA, 120 bp, Artificial Sequence
  ENSG00000196110_46 (sequence is synthesized)
tgggaactcagccagggttaggtagttcctagatagcattttagaaaggtcaggtgtcatccattaacatgtgtttagattgctaaagattgctgcttggccaggcacagtggctcatgc

SEQ ID NO: 700156 - DNA, 120 bp, Artificial Sequence
  ENSG00000196110_47 (sequence is synthesized)
ctccgtgtcaaaaaaaaaaaaaaaaaaagattgctgcttaatctttaatgagcataaagatcaacttgagatctgacacctgtttaagaattatttgcctggaccaagataatgaatcta

SEQ ID NO: 700157 - DNA, 120 bp, Artificial Sequence
  ENSG00000196110_48 (sequence is synthesized)
tctactctcctatgtttccttctagattctttattgtttttttatgtaggtctgtgatctactttgaataattttttgtagcgtgtgaggtaggatcaaggtgtgtgtatatagatttat

SEQ ID NO: 700158 - DNA, 120 bp, Artificial Sequence
  ENSG00000196110_49 (sequence is synthesized)
caaagagaccatggtttcctctttgctgaggtgatctctgcctcttggttcatttgtcttttcttgcatcaataccatactatcttaatttatgttgctttgtaatatttttggaaatct

SEQ ID NO: 700159 - DNA, 120 bp, Artificial Sequence
  ENSG00000196110_50 (sequence is synthesized)
ggtagtgaaagccttccaacttttttattctttaagattgtcttgccttctctgttccccatgtttcctaaattaattttggaatctcaggattaattttcacaaatgaatttttggtac

SEQ ID NO: 700160 - DNA, 120 bp, Artificial Sequence
  ENSG00000196110_51 (sequence is synthesized)
tatgcctgtaattgcattggttttataaaataacctgaggataattgacatctttacaatatcgagttttccagttgatgaatatggtataattgtccatttacctaggttgtctttaac

SEQ ID NO: 700161 - DNA, 120 bp, Artificial Sequence
  ENSG00000196116_0 (sequence is synthesized)
gaggtgattcccaagccgcggggcggctccggtggtgcggggaaaccgaaagtgggcggcggccgcggcggggcccctggcggagacggcggcaggagctgggcccagagacgcggggac

SEQ ID NO: 700162 - DNA, 120 bp, Artificial Sequence
  ENSG00000196116_1 (sequence is synthesized)
gggccgtgggcccccggaacgaggcaaagatgctggaaggagatctggtttcaaagatgctacgagctgttctgcagtctcataagaatggagtagcattaccccggctccaaggagagt

SEQ ID NO: 700163 - DNA, 120 bp, Artificial Sequence
  ENSG00000196116_2 (sequence is synthesized)
acagatccttgactggagactggatccccttcaaacagctaggtttccctacactagaagcctatctgagaagtgtgccagcagtggtcaggatagagactagtagatctggagagatta

SEQ ID NO: 700164 - DNA, 120 bp, Artificial Sequence
  ENSG00000196116_3 (sequence is synthesized)
cctgctatgccatggcctgcacagaaactgcaagaattgctcagcttgtggctcgtcaaaggagttctaaaaggaaaaccgggcgtcaagttaattgtcagatgagagtgaagaaaacca

SEQ ID NO: 700165 - DNA, 120 bp, Artificial Sequence
  ENSG00000196116_4 (sequence is synthesized)
tgccattttttctagaaggaaaaccaaaagcaaccctcagacaaccaggatttgcttcaaatttttctgttggcaaaaaacctaatccagcaccgttaagagacaaaggaaactctgttg

SEQ ID NO: 700166 - DNA, 120 bp, Artificial Sequence
  ENSG00000196116_5 (sequence is synthesized)
gagttaagcctgatgctgaaatgtctccttatatgctacacacaactcttggaaatgaagcattcaaagacattccagtgcaaaggcatgtgaccatgtccaccaacaacaggtttagcc

SEQ ID NO: 700167 - DNA, 120 bp, Artificial Sequence
  ENSG00000196116_6 (sequence is synthesized)
caaaggcgtcccttcaaccacctttgcagatgcatctctcaagaacctctactaaggaaatgagtgataatttaaatcagactgttgaaaaacccaatgtcaagcctcctgcctcttaca

SEQ ID NO: 700168 - DNA, 120 bp, Artificial Sequence
  ENSG00000196116_7 (sequence is synthesized)
cttataaaatggatgaggttcaaaatcgcataaaggaaatactaaacaagcataacaatggcatttggatatctaagcttccacatttttacaaagagttatataaagaagaccttaatc

SEQ ID NO: 700169 - DNA, 120 bp, Artificial Sequence
  ENSG00000196116_8 (sequence is synthesized)
aaggaattttacaacagtttgaacactggcctcatatttgcacggtggagaaaccttgcagtggtggccaagatttacttctttatccagctaagagaaagcagcttttgagaagtgaac

SEQ ID NO: 700170 - DNA, 120 bp, Artificial Sequence
  ENSG00000196116_9 (sequence is synthesized)
tggatactgagaaagtacctctatccccactacctggtcccaaacaaacaccaccgttgaaagggtgtccaacagttatggcaggagactttaaagaaaaagtggcagacctgctggtga

SEQ ID NO: 700171 - DNA, 120 bp, Artificial Sequence
  ENSG00000196116_10 (sequence is synthesized)
aatacacaagtggcctttgggccagtgcacttccgaaagcatttgaggaaatgtacaaagtgaaattccctgaggatgccttaaaaaatcttgcctcactttctgatgtatgcagcatag

SEQ ID NO: 700172 - DNA, 120 bp, Artificial Sequence
  ENSG00000196116_11 (sequence is synthesized)
actacatttctggaaatccccagaaggccattctctatgctaaacttccattgcccactgacaaaatccaaaaggatgcagggcaagcacatggtgataatgatatcaaggctatggttg

SEQ ID NO: 700173 - DNA, 120 bp, Artificial Sequence
  ENSG00000196116_12 (sequence is synthesized)
aacaagagtatttgcaggtagaagaaagcattgctgaaagtgctaatacctttatggaggacataacagttcctcctttaatgattccaactgaagcatcaccatctgtattggtggttg

SEQ ID NO: 700174 - DNA, 120 bp, Artificial Sequence
  ENSG00000196116_13 (sequence is synthesized)
aactgagcaacacaaatgaagtggttatcaggtatgtgggcaaagactattctgctgctcaggaattaatggaagatgagatgaaggaatattacagtaagaatcctaagatcacaccag

SEQ ID NO: 700175 - DNA, 120 bp, Artificial Sequence
  ENSG00000196116_14 (sequence is synthesized)
tccaggctgtgaatgttgggcagttgctggccgtaaatgccgaggaggacgcctggttacgggcacaggtcatctcaacagaagagaacaaaataaaggtatgctatgttgactatggtt

SEQ ID NO: 700176 - DNA, 120 bp, Artificial Sequence
  ENSG00000196116_15 (sequence is synthesized)
aggcttggaagtcctaagcgatgaccctgatctagtgaaggtggttgaatctttaacttgtggaaagatctttgcagtggaaatacttgacaaagctgacattccacttgttgttctgta

SEQ ID NO: 700177 - DNA, 120 bp, Artificial Sequence
  ENSG00000196116_16 (sequence is synthesized)
cgatacctcaggagaagatgatatcaatatcaatgccacctgcttgaaggctatatgtgacaagtcactagaggttcacctgcaggttgacgccatgtacacaaatgtcaaagtaactaa

SEQ ID NO: 700178 - DNA, 120 bp, Artificial Sequence
  ENSG00000196116_17 (sequence is synthesized)
tatttgctctgatgggacactctactgccaggtgccttgtaagggtctgaacaagctcagtgaccttctacgtaagatagaggactacttccattgcaagcacatgacctctgagtgctt

SEQ ID NO: 700179 - DNA, 120 bp, Artificial Sequence
  ENSG00000196116_18 (sequence is synthesized)
tgtttcattacccttctgtgggaaaatctgcctcttccattgcaaaggaaaatggttacgagtagagatcacaaatgttcacagcagccgggctcttgatgttcagttcctggactctgg

SEQ ID NO: 700180 - DNA, 120 bp, Artificial Sequence
  ENSG00000196116_19 (sequence is synthesized)
cactgtgacatctgtaaaagtgtcagagctcagggaaattccacctcggtttctacaagaaatgattgcaataccacctcaggccattaagtgctgtttagcagatcttccacaatctat

SEQ ID NO: 700181 - DNA, 120 bp, Artificial Sequence
  ENSG00000196116_20 (sequence is synthesized)
tggcatgtggacaccagatgcagtgctgtggttaagagattctgttttgaattgctcggactgtagcattaaggttacaaaagtggatgaaaccagagggatcgcacatgtttatttatt

SEQ ID NO: 700182 - DNA, 120 bp, Artificial Sequence
  ENSG00000196116_21 (sequence is synthesized)
tacccctaagaacttccctgaccctcatcgcagtattaatcgccagattacaaatgcagacttgtggaagcatcagaaggatgtgtttttgagtgccatatccagtggagctgactctcc

SEQ ID NO: 700183 - DNA, 120 bp, Artificial Sequence
  ENSG00000196116_22 (sequence is synthesized)
caacagcaaaaatggcaacatgcccatgtcgggcaacactggagagaatttcagaaagaacctcacagatgtcatcaaaaagtccatggtggaccatacgagcgctttctccacagagga

SEQ ID NO: 700184 - DNA, 120 bp, Artificial Sequence
  ENSG00000196116_23 (sequence is synthesized)
actgccacctcctgtccacttatcaaagccaggggaacacatggatgtgtatgtgcctgtggcctgtcacccaggctacttcgtcatccagccttggcaggagatacataagttggaagt

SEQ ID NO: 700185 - DNA, 120 bp, Artificial Sequence
  ENSG00000196116_24 (sequence is synthesized)
tctgatggaagagatgattctatattacagcgtgtctgaagagcgccacatagcagtggagaaagaccaagtgtatgctgcaaaagtggaaaataagtggcacagggtgcttttaaaagg

SEQ ID NO: 700186 - DNA, 120 bp, Artificial Sequence
  ENSG00000196116_25 (sequence is synthesized)
aatcctgaccaatggactggtatctgtgtatgagctggattatggcaaacacgaattagtcaacataagaaaagtacagcccctagtggacatgttccgaaagctgcccttccaagcagt

SEQ ID NO: 700187 - DNA, 120 bp, Artificial Sequence
  ENSG00000196116_26 (sequence is synthesized)
cacagctcaacttgcaggagtgaagtgcaaccagtggtctgaggaggcttctatggtgtttcgaaatcatgtggagaagaaacctctggtggcactggtgcagacagtcattgaaaatgc

SEQ ID NO: 700188 - DNA, 120 bp, Artificial Sequence
  ENSG00000196116_27 (sequence is synthesized)
taacccttgggaccggaaagtagtggtctacttagtggacacatcgttgccagacaccgatacctggattcatgattttatgtcagagtatctgatagagctttcaaaagttaattaatg

SEQ ID NO: 700189 - DNA, 120 bp, Artificial Sequence
  ENSG00000196116_28 (sequence is synthesized)
actgcctctgaaaccttgacaactaattcagattttttagcaataacaaaatgtagtaggcttaaaaaaaatcttaactctgctacatggctctgactgctgtgggggattgaaaagaat

SEQ ID NO: 700190 - DNA, 120 bp, Artificial Sequence
  ENSG00000196116_29 (sequence is synthesized)
ggggattgaaaagaatatgcttatgtttgatgaaagatatttaacaagttttgttttaacagagttgacttttcaaagaaaattgtacttgaattattactataatattagaataaaaat

SEQ ID NO: 700191 - DNA, 120 bp, Artificial Sequence
  ENSG00000196116_30 (sequence is synthesized)
caaacaaatgtgcctggtacccacgaggtactcaggaaatgctgaatgaagcaacaggagtcagatttcctccaaatgacaattgatttttttttttttttaagttgagctagagggtag

SEQ ID NO: 700192 - DNA, 120 bp, Artificial Sequence
  ENSG00000196116_31 (sequence is synthesized)
accttgataaaagtcccaaccctgtctttgcaactttggtatcttatacagtctttctgagtccatttccccatctgtgaaatggggctgcaacacctgtcatgcagaagtattgtacgg

SEQ ID NO: 700193 - DNA, 120 bp, Artificial Sequence
  ENSG00000196116_32 (sequence is synthesized)
tcaaaccaggaactgtgattgtcgttattagctgttgttgcttgctgtctatcttggtaccatttgatttgtaggaaaataatattaacattactcataactaggtattttaacatggtg

SEQ ID NO: 700194 - DNA, 120 bp, Artificial Sequence
  ENSG00000196118_0 (sequence is synthesized)
gtattagcaacctggaagagagggcgcccaggtgggcactcgcaacttctcacgtatctgcgcgttctcttcgctcccactggcgtgagcctgcgctttccgccttccttccctcacaag

SEQ ID NO: 700195 - DNA, 120 bp, Artificial Sequence
  ENSG00000196118_1 (sequence is synthesized)
cccccttggcaaccgtcgccgttgagacggagggagacgcccccacggattcgccccgccgcgcctctccgcgcgtagattggccggagcgaggcgaacgggcccggccttggtagccgc

SEQ ID NO: 700196 - DNA, 120 bp, Artificial Sequence
  ENSG00000196118_2 (sequence is synthesized)
cgaccgagcgctggctgtcctggaacctaggcggcgggagcccggggcgcctcgcggcacggaagagcggcgagatgctcaaccgcaagaccagccactttttgggaatgagggtgcagt

SEQ ID NO: 700197 - DNA, 120 bp, Artificial Sequence
  ENSG00000196118_3 (sequence is synthesized)
cggagcttgaacatctctccgagctgcggcgggaagcggggaaggatcgcagctcagtgcatgggtcggccgcgcggacgcgtgcgagtgtgcggactcagtggacgacggcggcggcgg

SEQ ID NO: 700198 - DNA, 120 bp, Artificial Sequence
  ENSG00000196118_4 (sequence is synthesized)
cgaaagcggatgaagaccccggagccaacttgtttccgccgccgctgccccgaccccggatctgcatgtggaagtacctggacgtccattccatgcaccagctggagaagaccaccaatg

SEQ ID NO: 700199 - DNA, 120 bp, Artificial Sequence
  ENSG00000196118_5 (sequence is synthesized)
tcctgagcagagcctgagggacgccatcaccctggacctcttctgccacgcgctcattttctgccgccagcagggcttctcactggagcagacgtcagcggcttgtgccctgctccagga

SEQ ID NO: 700200 - DNA, 120 bp, Artificial Sequence
  ENSG00000196118_6 (sequence is synthesized)
tcttcacaaggcttgtattgcaacccccttgggcaacgtggaggagtgctaccgctacttcaccagtgtccttttttgccatggagtcaggcggcctcctttcagcatcgacctcttcaa

SEQ ID NO: 700201 - DNA, 120 bp, Artificial Sequence
  ENSG00000196118_7 (sequence is synthesized)
agaggaacagctgctggccttggaagactacgtggtcaacacttacttccgccacttcaagctctataaatacgtcttcacaccccaggtgcggctggatctgtctttgacttacatggg

SEQ ID NO: 700202 - DNA, 120 bp, Artificial Sequence
  ENSG00000196118_8 (sequence is synthesized)
gctacagccacccaaactgtggccagagagtgagacggagaaagaagaaagcaaggagatggaggagcaggcagttaccccgcagaaagaggaactagagacagtggccccaccagagcc

SEQ ID NO: 700203 - DNA, 120 bp, Artificial Sequence
  ENSG00000196118_9 (sequence is synthesized)
agagccaagccacatccacgtcctccgagcctacatcaagacccaagtgaacaaagagctggagcagctccaggggctggtggaggagcggctcaaggccagcgaggaaaggctcagcag

SEQ ID NO: 700204 - DNA, 120 bp, Artificial Sequence
  ENSG00000196118_10 (sequence is synthesized)
caagttgactgcactagagcggcccttccagctacctccgggtaaaggcaagagcaagaccaagtgacccccaacattttccccaataaaggtctgggccagaatggcaccatccctgca

SEQ ID NO: 700205 - DNA, 120 bp, Artificial Sequence
  ENSG00000196118_11 (sequence is synthesized)
ctctctcacattcatcacccttatcttcttgtgaagaccccagtgggctctccttgctcctgttgctgggcttttggaggcaaagccagggctccggaaggtagtcagggttctaattcc

SEQ ID NO: 700206 - DNA, 120 bp, Artificial Sequence
  ENSG00000196118_12 (sequence is synthesized)
ggggcagctaccaggtttgagccccagggagaagaggaaccgggcctggcacaagtgaccatgggaagcagaagcaggggatttctgcctggaatatgtcattattagtagcatcatcat

SEQ ID NO: 700207 - DNA, 120 bp, Artificial Sequence
  ENSG00000196118_13 (sequence is synthesized)
acacaagccatcagctttccaatccactgcttccttatctagaaattaaggatacagcacacattttacaggactgttctgagaaataatatatgcaaatatatgcatagtgcacaataa

SEQ ID NO: 700208 - DNA, 120 bp, Artificial Sequence
  ENSG00000196118_14 (sequence is synthesized)
gggtcaggttgggaaaacatgaggaatggctgactccaaagcatgtggtgggtgtagggtgatgaaaggaggcccagttgtcactcactcctctctccctcccaagggtgctggctgagc

SEQ ID NO: 700209 - DNA, 120 bp, Artificial Sequence
  ENSG00000196118_15 (sequence is synthesized)
accggctcccccgcaggcgccacctgtcattatgcttactaacgttcgggacgtctcccgggctgcttgggcgaggagaggcaggggtgtgtgaccccggtggttactgtgctcgcgtag

SEQ ID NO: 700210 - DNA, 120 bp, Artificial Sequence
  ENSG00000196118_16 (sequence is synthesized)
agcacctagggcctgctgaagccctccctcgcccgcgcctctccttagtccttgagatgagatggcaagttacagcggcttctccggcctgctggagattcgctacgggccaggacaccg

SEQ ID NO: 700211 - DNA, 120 bp, Artificial Sequence
  ENSG00000196118_17 (sequence is synthesized)
atcttctgcttctattggttacgcttggtcccgccactcgggtcctctggcttcttcccaaacacctcctctttctctcggtgattggccaagaggcagttcccatagtaactgacaccg

SEQ ID NO: 700212 - DNA, 120 bp, Artificial Sequence
  ENSG00000196119_0 (sequence is synthesized)
catcagcagagagcccaggatgtttcactagcaccaaaggctcaagactagccgtccaagattagccttttaatggggttcttgtctcccatgcatccctgcaggcctcccacccagagg

SEQ ID NO: 700213 - DNA, 120 bp, Artificial Sequence
  ENSG00000196119_1 (sequence is synthesized)
agaatggctgcaggaaatcactctacagtgacagagttcattctcaagggtttaacgaagagagcagacctccagctccccctctttctcctcttcctcgggatctacttggtcaccatc

SEQ ID NO: 700214 - DNA, 120 bp, Artificial Sequence
  ENSG00000196119_2 (sequence is synthesized)
gtggggaacctgggcatgatcactctaatttgtctgaactctcagctgcacacccccatgtactactttctcagcaatctgtcactcatggatctctgctactcctccgtcattacccct

SEQ ID NO: 700215 - DNA, 120 bp, Artificial Sequence
  ENSG00000196119_3 (sequence is synthesized)
aagatgctggtgaactttgtgtcagagaaaaacatcatctcctacgcagggtgcatgtcacagctctacttcttccttgtttttgtcattgctgagtgttacatgctgacagtgatggcc

SEQ ID NO: 700216 - DNA, 120 bp, Artificial Sequence
  ENSG00000196119_4 (sequence is synthesized)
tacgaccgctatgttgccatctgccaccctttgctttacaacatcattatgtctcatcacacctgcctgctgctggtggctgtggtctacgccatcggactcattggctccacaatagaa

SEQ ID NO: 700217 - DNA, 120 bp, Artificial Sequence
  ENSG00000196119_5 (sequence is synthesized)
acatcctccctctcatgaagctgtcctgctctagcacctatgatgttgagatgacagtcttcttttcggctggattcaacatcatagtcacgagcttaacagttcttgtttcttacacct

SEQ ID NO: 700218 - DNA, 120 bp, Artificial Sequence
  ENSG00000196119_6 (sequence is synthesized)
tcattctctccagcatcctcggcatcagcaccacagaggggagatccaaagccttcagcacctgcagctcccaccttgcagccgtgggaatgttctatggatcaactgcattcatgtact

SEQ ID NO: 700219 - DNA, 120 bp, Artificial Sequence
  ENSG00000196119_7 (sequence is synthesized)
taaaaccctccacaatcagttccttgacccaggagaatgtggcctctgtgttctacaccacggtaatccccatgttgaatcccctaatctacagcctgaggaacaaggaagtaaaggctg

SEQ ID NO: 700220 - DNA, 120 bp, Artificial Sequence
  ENSG00000196119_8 (sequence is synthesized)
ccgtgcagaaaacgctgaggggtaaactgttttgatgcaaatgttattgttccttttcaatttagtggtaattgttataaataccagagtgacagcttctgaatgctggccagctgtgga

SEQ ID NO: 700221 - DNA, 120 bp, Artificial Sequence
  ENSG00000196119_9 (sequence is synthesized)
tggaaaataatcacttctccacatggctgggtgaatgggcatttttccttctttcctcttccttccctcttcctttcctcttccttcctcttccttccttcctcttctttcctcttcctt

SEQ ID NO: 700222 - DNA, 120 bp, Artificial Sequence
  ENSG00000196119_10 (sequence is synthesized)
ccctccctcttttttcacttctctttgaagccagccaacttcaggttcaggttttctttcacttgagatccatccctctaccccaagccctttaataaatgtttcctatcttaattgtaa

SEQ ID NO: 700223 - DNA, 120 bp, Artificial Sequence
  ENSG00000196119_11 (sequence is synthesized)
ttaacttaaatgctaaactttcaacattgagttttagggtcattcatggtcttattatcttctatatagaaaatattactcagcccaatttttttctttttttttttctttttggtgaca

SEQ ID NO: 700224 - DNA, 120 bp, Artificial Sequence
  ENSG00000196119_12 (sequence is synthesized)
ctggaattacaggtgtgaggcactgcgcctggccaattttttttctttttgtacttgggaacaaatgaggcaaagagaggcaaagtatctctacttacccctgcccaagaatttcctgat

SEQ ID NO: 700225 - DNA, 120 bp, Artificial Sequence
  ENSG00000196119_13 (sequence is synthesized)
ctctttatgtaattttcttagtaacactaataataatgataacagcagctaacatgtttttggatgctgactctgatccatgcaattcttctacgtgctttctattctatttcaattata

SEQ ID NO: 700226 - DNA, 120 bp, Artificial Sequence
  ENSG00000196119_14 (sequence is synthesized)
ctacacaacaagtaggtactattctattctcatttcacagatatggaacttggagcaggagtaacaacactgagattcaaaccccagtccaagtggcttccagagcccagactctgggca

SEQ ID NO: 700227 - DNA, 120 bp, Artificial Sequence
  ENSG00000196119_15 (sequence is synthesized)
ctcacacattacttccttcactttagtctagccgtccctttgaacagcctattaaacctcccataattatgctcatccaatttcaaattggatgaaaataatttcttctgaaaataattt

SEQ ID NO: 700228 - DNA, 120 bp, Artificial Sequence
  ENSG00000196119_16 (sequence is synthesized)
ctcaaatcccttccttttatcatctgcccaaacctctttctctttatgggcaacaactataataggatgggaaaagatgcctaactagcatatataataataaaccctagcaaaccagca

SEQ ID NO: 700229 - DNA, 120 bp, Artificial Sequence
  ENSG00000196119_17 (sequence is synthesized)
agaaaaagacatcaactttagcaagaaaaaaaatgagcaaggtatatagaacaatttacaaaagagaaaacctgaagtaccacagagcatgtgaagagatgctcaaaccgattactaaac

SEQ ID NO: 700230 - DNA, 120 bp, Artificial Sequence
  ENSG00000196119_18 (sequence is synthesized)
atagaagcgcaaattaaaacagtgatatatctttttacgtttataagattagcacaaattttaaaagctggatggtgctaagtgttagtaaggaggtagggatttaggaacccccatata

SEQ ID NO: 700231 - DNA, 120 bp, Artificial Sequence
  ENSG00000196119_19 (sequence is synthesized)
ctacagctattctggaaaacagtaagacattacttaggaaaaataagtataggtatccacagggcatagcaaatctggtccaaggtatatatagtcccaaatcattctctttcaggccta

SEQ ID NO: 700232 - DNA, 120 bp, Artificial Sequence
  ENSG00000196119_20 (sequence is synthesized)
taagatggcatgtacaaaggcattcattataccattatttttggcgatgggaacttagagataaaataagtgtccaccattgggaaagtaagtagataaattgtatctacttacttacaa

SEQ ID NO: 700233 - DNA, 120 bp, Artificial Sequence
  ENSG00000196119_21 (sequence is synthesized)
gtgtgagaaaagtaagaaagataatgagatataaaacatattatttatgtatattaaaattgcatgtgcacacaccccaaaaaaagcacacttagaaagaaaaaagaccataacgtaaaa

SEQ ID NO: 700234 - DNA, 120 bp, Artificial Sequence
  ENSG00000196119_22 (sequence is synthesized)
tacacattaggcaggtcagaatggctgctgagagagataagatgcacgaaagaagggagtagaaaaaagatgaagcagaaaaccaagaaagaccacattctggaccataaaacacacctt

SEQ ID NO: 700235 - DNA, 120 bp, Artificial Sequence
  ENSG00000196119_23 (sequence is synthesized)
aactgatttaaagaaatagaaatcatacaatgtctgctgtctgctctcagaccacaatgaaattaaacgagaaatcaataacagaaagataactgaaaaatcattaaatattttgaaatt

SEQ ID NO: 700236 - DNA, 120 bp, Artificial Sequence
  ENSG00000196119_24 (sequence is synthesized)
aaacaacacatttctaaatagcacatgagtcaaagaagaaaatctcaagagaaattttaaaatattttgaatgaaacgaaaatgaaaatgcaactaatcaaaacttgtgggatgcagcaa

SEQ ID NO: 700237 - DNA, 120 bp, Artificial Sequence
  ENSG00000196119_25 (sequence is synthesized)
aagcagagtttagagggaagtttacagcattgaatgtttacagcactgaatgtttacagcattgaatgtttacagcattgaatgccttcgcaaagaaaacgatctaaaatcaatcaccta

SEQ ID NO: 700238 - DNA, 120 bp, Artificial Sequence
  ENSG00000196119_26 (sequence is synthesized)
gacttccaacttaagaaactaggttggagaatggcaaattaaatccaaagttagcagaagaaaacaaaaaaaattagagaaaaatcaataatatttaaaacagaaaatcaacggaggaaa

SEQ ID NO: 700239 - DNA, 120 bp, Artificial Sequence
  ENSG00000196119_27 (sequence is synthesized)
atcaatgaaaccaaaagctgattctttgaaaagatcaatagaattgataagcctctagccaggataactggtaaaaaaaaaaaaaaaaggacacaaattactagtgtcagaaatgaaaga

SEQ ID NO: 700240 - DNA, 120 bp, Artificial Sequence
  ENSG00000196119_28 (sequence is synthesized)
aggacatcagtataggtcctatgaacatttaaaaaaagaagaattactatgaacaactctatgcctacagacttaataacctagatgaaatggaccaaatcctggaaagatgtaatctgt

SEQ ID NO: 700241 - DNA, 120 bp, Artificial Sequence
  ENSG00000196119_29 (sequence is synthesized)
caaaactcacataagaagaaatagacaagctgaataggcctatatctattaaagaaactgacttaataattagcagcctttcaaaacagaaaacaccaggttcaaatgggttcactggtg

SEQ ID NO: 700242 - DNA, 120 bp, Artificial Sequence
  ENSG00000196119_30 (sequence is synthesized)
aattctaccaaacattttaaagaaagatattataccaattctctacaatctcttccagaagattgaagcagagggaatacttcctaactcattctttgaggccagcatcaccctaatacc

SEQ ID NO: 700243 - DNA, 120 bp, Artificial Sequence
  ENSG00000196119_31 (sequence is synthesized)
aaaatctgacaaaaaatttataagaaagggaagctacagaccagcatctatcatgaacagagataataaattcctcaacaaaatattagcaaattgaatgcaacaatgtattcaacaact

SEQ ID NO: 700244 - DNA, 120 bp, Artificial Sequence
  ENSG00000196119_32 (sequence is synthesized)
atacaccataaccaagtgcaatttatcccaagtgtgtgaggctggttcaacatttgaaaatcaattaaggtaatccaaatccacatcaacaggctaaagaagaaaaatcacatgttgata

SEQ ID NO: 700245 - DNA, 120 bp, Artificial Sequence
  ENSG00000196119_33 (sequence is synthesized)
tcaatagatatagaaaaaaaatttgacaaaattcctcactcatttataattttttaaaactctcagtaaactaggaatacaggggaacttcctcaacttgataaagaatttttttaaacc

SEQ ID NO: 700246 - DNA, 120 bp, Artificial Sequence
  ENSG00000196119_34 (sequence is synthesized)
tacagctaacatcatacttgataatgacaaagttgaagctttcccactaagatcaggagcaaagcaaggatgtctcctctcactgctgttttccaacattgtactggacatcctacctaa

SEQ ID NO: 700247 - DNA, 120 bp, Artificial Sequence
  ENSG00000196119_35 (sequence is synthesized)
tgcaataagacaagaaaaggaaataaaatatatacagattgggagagaagaaataaaactgtctttgttcacagacgacatgattgtccatttagaaaactagaaataattgacaaaaaa

SEQ ID NO: 700248 - DNA, 120 bp, Artificial Sequence
  ENSG00000196119_36 (sequence is synthesized)
aagaaaaacctcctggaatcaatagcatttacagcaaggatgcagcatacaagattaacatacaaaagtcaattgctttcttatatgcctgcaaataacaatggaatttgaaatttaaaa

SEQ ID NO: 700249 - DNA, 120 bp, Artificial Sequence
  ENSG00000196119_37 (sequence is synthesized)
caccatgccatttatgttagaattccaaaaaatgaaatacataagtgtgaatttaacaaaatatgtgcatgatctaaacaaggaaaactacacaactcagatgaaagaaatcaaatacta

SEQ ID NO: 700250 - DNA, 120 bp, Artificial Sequence
  ENSG00000196119_38 (sequence is synthesized)
tacacaactcagatgaaagaaatcaaatactaaataaatggagagatattccatattcatggaaaggaaggctccataattcataattgccaacacttggaagcaaccaagatgtccttc

SEQ ID NO: 700251 - DNA, 120 bp, Artificial Sequence
  ENSG00000196119_39 (sequence is synthesized)
ctatcaagccatgaaaagacatggagaaatctaaatgcatattactaaccgaaagacgtcaatctgaaatggctatatactgtatgattctaagaatctaacattctggaaagggcaaaa

SEQ ID NO: 700252 - DNA, 120 bp, Artificial Sequence
  ENSG00000196119_40 (sequence is synthesized)
tgtatgattctaagaatctaacattctggaaagggcaaaactatggaaaccataaaaagatcagtggttgccgaggattagagtgggagggagtgatgaatgggtggagcacagaggatt

SEQ ID NO: 700253 - DNA, 120 bp, Artificial Sequence
  ENSG00000196119_41 (sequence is synthesized)
tttagggcagtgaaaatactctgtattgactggtataatgtatatataccagtatgtataatgacatggtgtatacatgtataatgacatggtgtatacatgtcattatacattggtcta

SEQ ID NO: 700254 - DNA, 120 bp, Artificial Sequence
  ENSG00000196119_42 (sequence is synthesized)
aacccaaagaaggtacaatatcaagagtgaacactaatttaaactttggcctttgggtgataataatgtgtcaacataggctcatcaattgtagcaaatgtgccactctggtaaggggtg

SEQ ID NO: 700255 - DNA, 120 bp, Artificial Sequence
  ENSG00000196119_43 (sequence is synthesized)
ttgatactggggaaggttatgtatgtgtggaggtaagggaaatatagaaaatctctgtaccttctgctcaatttttctgtaaacctaaaattatcttaaaaagtaaattctatttttaaa

SEQ ID NO: 700256 - DNA, 120 bp, Artificial Sequence
  ENSG00000196119_44 (sequence is synthesized)
agaagaagaaacagaaataaaaattatttttcctagacccacgaccctcaggtacataccagtgaacccatccaagaagctctggatcagacagagctagccactgaaccattgaataga

SEQ ID NO: 700257 - DNA, 120 bp, Artificial Sequence
  ENSG00000196119_45 (sequence is synthesized)
ttgcttgtgcacatggctgcagaccctatgatctcagaagccctgctgccaacaaaatgggcaagttcatagctgtgggcttgccgctgctgctgatgtccctggcccaggagttttcca

SEQ ID NO: 700258 - DNA, 120 bp, Artificial Sequence
  ENSG00000196119_46 (sequence is synthesized)
gtgtgttgctgccactacccggtgcagcaggggtagactacactaccttattcctctcattgcatgggatctggagtaagacagctactctttctgttggtacagtaaggcaaaaaaaaa

SEQ ID NO: 700259 - DNA, 120 bp, Artificial Sequence
  ENSG00000196123_0 (sequence is synthesized)
tggcctcgggggcgcgccgccgcggagactgacgcgaagccccacgctttcgtaagagcgtgcgcgcgcccgaggacgtacgtcatcggcgacggctcccgccggctgggcgtccggtgg

SEQ ID NO: 700260 - DNA, 120 bp, Artificial Sequence
  ENSG00000196123_1 (sequence is synthesized)
ccggtgtagcagagcgggagcggcgggcggcgagcagaggagctaacaggtgggggcacggcacgcggacggacccccccaaaggccgggaggaggcgcgcgacgcgacctttcctgatc

SEQ ID NO: 700261 - DNA, 120 bp, Artificial Sequence
  ENSG00000196123_2 (sequence is synthesized)
tcccggagaagcctccactccattgtctcctggccccaccctccattgggcacgcccttcaccttatcccccaccacttattggctgcaggtcacgcccctcctctatttctggttcccc

SEQ ID NO: 700262 - DNA, 120 bp, Artificial Sequence
  ENSG00000196123_3 (sequence is synthesized)
attggctcttcaccttgtcctctccggggcttctctccgcacaggccacaccctctcatttgtcactagaccccgccttaatagtggggggctcctcccccatccatccttcattcatta

SEQ ID NO: 700263 - DNA, 120 bp, Artificial Sequence
  ENSG00000196123_4 (sequence is synthesized)
tgcacccagtgctgggtgcttggtacacgggggtgaatcagaccccattcctgccttcggggagttcaggggattgtgggaggacacggacctagactccaacagtgacagctctgagta

SEQ ID NO: 700264 - DNA, 120 bp, Artificial Sequence
  ENSG00000196123_5 (sequence is synthesized)
aagaagtcgccgaagcagtgggacactagacgcggggaaggcttcctggaggaagtgaggcctaaactgagccttgaagaatggttaagagtttgctccaggaatatattgcaaaggcat

SEQ ID NO: 700265 - DNA, 120 bp, Artificial Sequence
  ENSG00000196123_6 (sequence is synthesized)
tcttggcggaaggacccgagacgtgaaaaaaacaggcgtattctggtaatttcgaggagatggagaagtaacagcatgtgtttatcctgatggaaagagtccagtagagaggaagagatt

SEQ ID NO: 700266 - DNA, 120 bp, Artificial Sequence
  ENSG00000196123_7 (sequence is synthesized)
gatgatgtaggagagaggagaaatgctggaaaggtcgacagtgtggggagttggagtgacccggctggatgtgacccccaggacagaatggtgctggactcaggggctcaggcgtatgat

SEQ ID NO: 700267 - DNA, 120 bp, Artificial Sequence
  ENSG00000196123_8 (sequence is synthesized)
caggcaccccccagcccgcctaccagtcccccatccctgcgccataggctgaagccctcagaccgagatgggccaccactgtacccctggtctcagtccctggccttgcccctggctctg

SEQ ID NO: 700268 - DNA, 120 bp, Artificial Sequence
  ENSG00000196123_9 (sequence is synthesized)
gcagtccccccagcgctgcagccccagcctgagcagcagccgttctcacagatgctcctgggccaccgtggccacatgcgtcgcagtgagagcacctactctgtaaatagtactggccgg

SEQ ID NO: 700269 - DNA, 120 bp, Artificial Sequence
  ENSG00000196123_10 (sequence is synthesized)
cgggggcgtggcaccctgggacggcctccacctggacggggacggaacccaggtgggggcaccctgcggcctgcagcctccctgcctcacattgctaagactcaaagggatgcaggccat

SEQ ID NO: 700270 - DNA, 120 bp, Artificial Sequence
  ENSG00000196123_11 (sequence is synthesized)
attgccagcaagagcccctgcatgttggtggccctgcggccaaccaacatggaccgtgagcgagacaagttcttccagtcccattacacctacaatccacagtttgagtaccaggagccc

SEQ ID NO: 700271 - DNA, 120 bp, Artificial Sequence
  ENSG00000196123_12 (sequence is synthesized)
atgcccacggctgtgctggaaaagtactgcgaggcctctggacagttcatccatcaggcagttggcatcattgaggctgttctggagaagtttggaacctatgaacactttgaggctgcc

SEQ ID NO: 700272 - DNA, 120 bp, Artificial Sequence
  ENSG00000196123_13 (sequence is synthesized)
actggggggcagctgctcaccaagtgccagatatggtcgattgtgcgcaaatacatgcagaaggagggctgcgctggggaggttgtggtgcagctgagtgaggacctgctgtcccaggca

SEQ ID NO: 700273 - DNA, 120 bp, Artificial Sequence
  ENSG00000196123_14 (sequence is synthesized)
agggcatgctgcggcatgagataggcacccactacctgcggggcgtgaacaacgcgcgccagccgtggcacaacgcggagggccggctgcggtacgggctgcggccggcgaaccccacgg

SEQ ID NO: 700274 - DNA, 120 bp, Artificial Sequence
  ENSG00000196123_15 (sequence is synthesized)
aggagggcctggccagcctgcacagcgtgctgttccgcaagcagccgttcctgtggcgcgctgcactgctctactacaccatccaccgcgccgcgcgcatgtccttccgtcagctcttcc

SEQ ID NO: 700275 - DNA, 120 bp, Artificial Sequence
  ENSG00000196123_16 (sequence is synthesized)
aggacctggagcgctacgtgcaggacgccgatgtgcgctgggagtactgcgtgcgcgccaagcgcggccagaccgacacctcgctgccaggttgtttcagcaaggaccaggtgtacctgg

SEQ ID NO: 700276 - DNA, 120 bp, Artificial Sequence
  ENSG00000196123_17 (sequence is synthesized)
acggcatcgtgcgcattctgcgacatcgccagaccatcgatttcccgttgctgacctcactgggcaaggtgtcctatgaggatgtggaccacctgcggccccatggggtgctggataata

SEQ ID NO: 700277 - DNA, 120 bp, Artificial Sequence
  ENSG00000196123_18 (sequence is synthesized)
cccgggtgccccacttcatgcaggacttggcacgctaccggcagcagctggagcacatcatggccaccaaccggctggatgaggcggagctgggtcgcctgctacccgactgatgtccgt

SEQ ID NO: 700278 - DNA, 120 bp, Artificial Sequence
  ENSG00000196123_19 (sequence is synthesized)
tgagggctgcagtcagaggccctggacagaagctccagataggcccctagaacatgaagcagtttgctctgtgcgtccacggcctaggtgtttcttgggggtgttgggagggcaggagca

SEQ ID NO: 700279 - DNA, 120 bp, Artificial Sequence
  ENSG00000196123_20 (sequence is synthesized)
ttccttgaggaggagtggcaacatcaaagtgtttgtgtcccttgccagcctccctggggtctggggacctgcagcagcatgtctggcaaactgagtcgccctcctgcctccagctctctg

SEQ ID NO: 700280 - DNA, 120 bp, Artificial Sequence
  ENSG00000196123_21 (sequence is synthesized)
ttgagcagagggaaggcatgggggcaggaagagagctgagcattgatggggatgggggtggtttgggaatagaaacttgttcttgcatgagatggctttggttgtcccagtactccagtc

SEQ ID NO: 700281 - DNA, 120 bp, Artificial Sequence
  ENSG00000196123_22 (sequence is synthesized)
tctcccttcccttacctggccccttggtgctccttcagcatttgtgctgtctacctctcactgggtcctggtgggggtcgggctcccttctcctggggtgattgatggcctgagcctggg

SEQ ID NO: 700282 - DNA, 120 bp, Artificial Sequence
  ENSG00000196123_23 (sequence is synthesized)
gtcctggtagtagagacccagctggcctggggtctgctttccgacattttgcctctctcactggtcatgtatttattccatatttatatggtctacttcctgtggctgggagcagcagct

SEQ ID NO: 700283 - DNA, 120 bp, Artificial Sequence
  ENSG00000196123_24 (sequence is synthesized)
gctgggagcagcagctcctgaaggttccgtgggggtgcggggggttggacaggacactccttcttggaaggcaccaattttcccagccccactcccattacacacacacacacacacaca

SEQ ID NO: 700284 - DNA, 120 bp, Artificial Sequence
  ENSG00000196123_25 (sequence is synthesized)
cacacacacacacacacacacacactgattcaggccttgagagtcaagcccaagagctcccttggccctgttccccactccctccactggcctctgctgttcctgtctttgctcacaccc

SEQ ID NO: 700285 - DNA, 120 bp, Artificial Sequence
  ENSG00000196123_26 (sequence is synthesized)
accctcacagctgctctctggcagaggttggcatagcctaggagcagctgcaattgcacctgagggacaggccctagagtttggtggcccaagtcctgaacccctcttagaccaggtgag

SEQ ID NO: 700286 - DNA, 120 bp, Artificial Sequence
  ENSG00000196123_27 (sequence is synthesized)
gtgcagaggtggttgctgcttccagtttcccttcagacttagctgtgtgaaccccactcctatcctttggccttagttttcccatctgtaaaactcagaaacgcagttggaaagtcctta

SEQ ID NO: 700287 - DNA, 120 bp, Artificial Sequence
  ENSG00000196123_28 (sequence is synthesized)
ttcatttagtaagcgaatatattataatatgtatagagcgccttttgtgtaagtcactggtcagaatcctcactgagctcccagtccagagagaagccagacaattaaaacagtaatgac

SEQ ID NO: 700288 - DNA, 120 bp, Artificial Sequence
  ENSG00000196123_29 (sequence is synthesized)
gggccccaataactcccctttttgtttctcccccttccctcctgaggtcggggctttcccttcctgagcagccacctcccgccctctgcttacagaggtaggccagaacatgcctgccca

SEQ ID NO: 700289 - DNA, 120 bp, Artificial Sequence
  ENSG00000196123_30 (sequence is synthesized)
tgctctgggctcgctctcatctcttggtcctttcgggtatatttttctctctccacttcctctccgacttctcccaacagtgcgggcaaggctggtcaggccctgaccggccagagaaag

SEQ ID NO: 700290 - DNA, 120 bp, Artificial Sequence
  ENSG00000196123_31 (sequence is synthesized)
ctggttggagggcatgctgcggcatgagataggtcagggtgtgggtatccgggcagatgggcacccactacctgcggggcgtgaacaacgcgcgccagccgtggcacaacgcggagggcc

SEQ ID NO: 700291 - DNA, 120 bp, Artificial Sequence
  ENSG00000196123_32 (sequence is synthesized)
cccctgccccagtgaggtgggagctggttctgagcagaggtgatgaagggtgggtgccctggccaattgtctggcctcgctgccctgtggcatcattgggtccacctgcaccctggcccc

SEQ ID NO: 700292 - DNA, 120 bp, Artificial Sequence
  ENSG00000196123_33 (sequence is synthesized)
aggctggtggccatggctcagagcactgccacctgcaggttgtggtgcagctgagtgaggacctgctgtcccaggcagtgatgatggtggagaacagccggcccacattggcgatcaacc

SEQ ID NO: 700293 - DNA, 120 bp, Artificial Sequence
  ENSG00000196123_34 (sequence is synthesized)
tacgtcatcggcgacggctcccgccggctgggcgtccggtggccggtgtagcagagcgggagcggcgggcggcgagcagaggagctaacagtttgagtaccaggagcccatgcccacggc

SEQ ID NO: 700294 - DNA, 120 bp, Artificial Sequence
  ENSG00000196123_35 (sequence is synthesized)
ggtggatggaaggccaggtcctgggaatggacttgacttgaggacacatggcacctggtttaggaggggactggccagtttgggcaggggggtgcagggcactaaccactattcctatct

SEQ ID NO: 700295 - DNA, 120 bp, Artificial Sequence
  ENSG00000196123_36 (sequence is synthesized)
gtctgtccctcttcctcgagaatcctgttgctctgggcaagagtgatttttaccgggggcatcagcatgactgttcaagatgatatgggcacccaggatgttgggcagggtggtatatgt

SEQ ID NO: 700296 - DNA, 120 bp, Artificial Sequence
  ENSG00000196123_37 (sequence is synthesized)
attcttgtgcccaggagggctgggggcaatgtcagtttgggagagttcgtgcacgtgtgtgggtgcgtgggtgtagggtggggggcggatgggtgggagaggattcatgtatgtgagcct

SEQ ID NO: 700297 - DNA, 120 bp, Artificial Sequence
  ENSG00000196123_38 (sequence is synthesized)
ctgtggatccttgggtgcgagtccacaggaggaggagcttcacgctgcctggggctgggagagcctgtgtgcgagcctgagttcaggagcatgaggatggaagtgtcgcggccagagccc

SEQ ID NO: 700298 - DNA, 120 bp, Artificial Sequence
  ENSG00000196126_0 (sequence is synthesized)
agtaacttcctccctataacttggaatgtgggtggaggggttcatagttctccctgagtgagacttgcctgcttctctggcccctggtcctgtcctgttctccagcatggtgtgtctgaa

SEQ ID NO: 700299 - DNA, 120 bp, Artificial Sequence
  ENSG00000196126_1 (sequence is synthesized)
gctccctggaggctcctgcatgacagcgctgacagtgacactgatggtgctgagctccccactggctttgtctggggacacccgaccacgtttcctgtggcagcctaagagggagtgtca

SEQ ID NO: 700300 - DNA, 120 bp, Artificial Sequence
  ENSG00000196126_2 (sequence is synthesized)
tttcttcaatgggacggagcgggtgcggttcctggacagatacttctataaccaggaggagtccgtgcgcttcgacagcgacgtgggggagttccgggcggtgacggagctggggcggcc

SEQ ID NO: 700301 - DNA, 120 bp, Artificial Sequence
  ENSG00000196126_3 (sequence is synthesized)
tgacgctgagtactggaacagccagaaggacatcctggagcaggcgcgggccgcggtggacacctactgcagacacaactacggggttgtggagagcttcacagtgcagcggcgagtcca

SEQ ID NO: 700302 - DNA, 120 bp, Artificial Sequence
  ENSG00000196126_4 (sequence is synthesized)
acctaaggtgactgtatatccttcaaagacccagcccctgcagcaccacaacctcctggtctgctctgtgagtggtttctatccaggcagcattgaagtcaggtggttcctgaacggcca

SEQ ID NO: 700303 - DNA, 120 bp, Artificial Sequence
  ENSG00000196126_5 (sequence is synthesized)
gcctgatccagaatggagactggaccttccagaccctggtgatgctggaaacagttcctcgaagtggagaggtttacacctgccaagtggagcacccaagcgtgacaagccctctcacag

SEQ ID NO: 700304 - DNA, 120 bp, Artificial Sequence
  ENSG00000196126_6 (sequence is synthesized)
tggaatggagagcacggtctgaatctgcacagagcaagatgctgagtggagtcgggggctttgtgctgggcctgctcttccttggggccgggctgttcatctacttcaggaatcagaaag

SEQ ID NO: 700305 - DNA, 120 bp, Artificial Sequence
  ENSG00000196126_7 (sequence is synthesized)
gacactctggacttcagccaacaggattcctgagctgaaatgcagatgaccacattcaaggaagaactttctgccccggctttgcaggatgaaaagctttcctgcttggcagttattctt

SEQ ID NO: 700306 - DNA, 120 bp, Artificial Sequence
  ENSG00000196126_8 (sequence is synthesized)
ccacaagagagggctttctcaggacctggttgctactggttcggcaactgcagaaaatgtcctcccttgtggcttcctcagctcctgcccttggcctgaagtcccagcattgatggcagc

SEQ ID NO: 700307 - DNA, 120 bp, Artificial Sequence
  ENSG00000196126_9 (sequence is synthesized)
gcctcatcttcaacttttgtgctcccctttgcctaaaccgtatggcctcccgtgcatctgtattcaccctgtatgacaaacacattacattattaaatgtttctcaaagatggagttaaa

SEQ ID NO: 700308 - DNA, 86 bp, Artificial Sequence
  ENSG00000196131_0 (sequence is synthesized)
ggagatgactcacactctttaccctaccccttttgcttggggccactaccagtctcctgctttgtatccaataaatatcagtgcag

SEQ ID NO: 700309 - DNA, 88 bp, Artificial Sequence
  ENSG00000196131_1 (sequence is synthesized)
gtctctgcacacggagagaaacccaccaaacctgtggggctggaccctacactattccaggtagttgttggaatcctggggaattttt

SEQ ID NO: 700310 - DNA, 120 bp, Artificial Sequence
  ENSG00000196131_2 (sequence is synthesized)
acactattccaggtagttgttggaatcctggggaatttttcactcttatattattatatgttcctttactttaggggatacaagccaagatccacagatttgattctcaggcacctgact

SEQ ID NO: 700311 - DNA, 120 bp, Artificial Sequence
  ENSG00000196131_3 (sequence is synthesized)
gtagctgactccttggttatcctatctaaaagaatcccagagaccatggcaacttttgggttgaaacattttgacaattattttggatgcaaatttcttttgtatgcacacagggtaggc

SEQ ID NO: 700312 - DNA, 120 bp, Artificial Sequence
  ENSG00000196131_4 (sequence is synthesized)
ggtctctccaatatcctgtgctgggccttccacatgctggtaaatgccatttttcctatttatacaactggcaaatggagcaacaacaacatcacaaagaaaggagatttgggatattgt

SEQ ID NO: 700313 - DNA, 120 bp, Artificial Sequence
  ENSG00000196131_5 (sequence is synthesized)
tctgccccacttagtgatgaagtcacaaagtcagtatatgcagcattgacatccttccatgatgttttgtgtctggggctcatgctctgggccagcagctccatcgttttggtcttgtac

SEQ ID NO: 700314 - DNA, 120 bp, Artificial Sequence
  ENSG00000196131_6 (sequence is synthesized)
aggcacaaacagcaggtacaacacatctgtaggaacaatctctaccccaactcttctcctgggaacagagccatccaaagcatccttgcattggtgagcacctttgcattatgttacgcc

SEQ ID NO: 700315 - DNA, 120 bp, Artificial Sequence
  ENSG00000196131_7 (sequence is synthesized)
ctttccttcatcacctacgtttatttagctctcttcgataattccagttggtggctagtgaacactgctgcactaatcattgcctgttttccaactattagcccttttgttctcatgtgc

SEQ ID NO: 700316 - DNA, 120 bp, Artificial Sequence
  ENSG00000196131_8 (sequence is synthesized)
cgtgaccccagcagatccaggctctgcagtatctgctgcagaagaaatagacgattctttcatgatttcaggaaaatgtgaattggctgtcttggtttatgttcggccactgatgcactc

SEQ ID NO: 700317 - DNA, 120 bp, Artificial Sequence
  ENSG00000196131_9 (sequence is synthesized)
agtcatcttgcctccccagcccgttttgctctgtgtttttgtttttcatgatcttgacaactttgaagagcattgttttacttttagaatgtcgctaaaattgaatttgtctgttgttta

SEQ ID NO: 700318 - DNA, 120 bp, Artificial Sequence
  ENSG00000196132_0 (sequence is synthesized)
agcgtatttacaaaggagcctcctccgccagcccgtgccaccgctgctaatgagagcagtcattaagtaaatgagacgtcgcctttagctggcttaggagttcgcacactaaggggagaa

SEQ ID NO: 700319 - DNA, 120 bp, Artificial Sequence
  ENSG00000196132_1 (sequence is synthesized)
gatatttaattgaaacccgcacgcaggcttccccacatgtgaccgctgtacgggaggcagctgccttccctctcctcccccagtccaccctgcaccccccatgtaaatttcatgattgct

SEQ ID NO: 700320 - DNA, 120 bp, Artificial Sequence
  ENSG00000196132_2 (sequence is synthesized)
ttccgtgatgtcattttgaaagaggacagacaatagctgtggggaaagaaaatgagttccgaggtgagctgttaaatcagaggtggacacacggaggcaaggccagcagctgcaggacct

SEQ ID NO: 700321 - DNA, 120 bp, Artificial Sequence
  ENSG00000196132_3 (sequence is synthesized)
caagacacctgggcagacactgcaagatgagcttagaaaatgaagacaagcgagctcgcacccgatccaaggccctgcgaggacccccagagaccacagctgcagacctcagctgcccca

SEQ ID NO: 700322 - DNA, 120 bp, Artificial Sequence
  ENSG00000196132_4 (sequence is synthesized)
ccccaggatgcacaggctcagggcacgtccggggcaagtactccaggcaccgaagtttacagagctgccccctggccaagaagaggaagctggagggcgctgaggctgagcacctggtgt

SEQ ID NO: 700323 - DNA, 120 bp, Artificial Sequence
  ENSG00000196132_5 (sequence is synthesized)
ccaagaggaagtcacaccccctgaagctggctctggacgagggctatggtgtggacagcgacggcagtgaggacactgaggtgaaggacgcctctgtttcggatgaatcggaaggaactc

SEQ ID NO: 700324 - DNA, 120 bp, Artificial Sequence
  ENSG00000196132_6 (sequence is synthesized)
tggagggggccgaggctgagacgtcaggacaggacgagattcatcgccccgagacagctgaaggaaggagccccgtcaagtcccattttggatccaaccccatcggcagcgccactgcct

SEQ ID NO: 700325 - DNA, 120 bp, Artificial Sequence
  ENSG00000196132_7 (sequence is synthesized)
cctccaagggcagctacagcagctaccagggaatcatcgcaacttctctcctgaacttgggtcaaattgctgaagagaccctggtggaagaggacttgggccaggcggccaagccaggtc

SEQ ID NO: 700326 - DNA, 120 bp, Artificial Sequence
  ENSG00000196132_8 (sequence is synthesized)
ctggcattgtgcacctgcttcaggaggctgcagagggagctgccagcgaggagggtgaaaagggcctcttcatccagccagaggatgccgaggaggtcgtcgaagtcaccaccgagcgct

SEQ ID NO: 700327 - DNA, 120 bp, Artificial Sequence
  ENSG00000196132_9 (sequence is synthesized)
cgctcccaggacctgtgtccccagtccctggaggatgcagccagtgaggagtccagcaagcagaaaggcatcctgagtcacgaagaggaggacgaggaggaggaggaggaggaagaggag

SEQ ID NO: 700328 - DNA, 120 bp, Artificial Sequence
  ENSG00000196132_10 (sequence is synthesized)
aggaggatgaagaagaggaagaggaagaggaggaggaagaggaagaggaggaggaggaagaggaagaggaggaggaagaggaagaggaagaggaggaggaggaggcagctcctgatgtga

SEQ ID NO: 700329 - DNA, 120 bp, Artificial Sequence
  ENSG00000196132_11 (sequence is synthesized)
tctttcaggaagacacctctcacacctctgcccagaaggcccctgagctccggggcccagaatcacccagtcccaagcctgagtactctgttattgtggaggtccgctcggatgatgaca

SEQ ID NO: 700330 - DNA, 120 bp, Artificial Sequence
  ENSG00000196132_12 (sequence is synthesized)
aggacgaggacacccactcccggaagtcaacagtcactgacgagtcggagatgcaggacatgatgacccggggaaacctgggcctcctggagcaggccatcgccctgaaggctgaacagg

SEQ ID NO: 700331 - DNA, 120 bp, Artificial Sequence
  ENSG00000196132_13 (sequence is synthesized)
tgcgcacagtctgcgagccgggctgcccgcctgccgagcagagccagctgggcctgggagagccagggaaggcagcaaagcccctggacactgtgcggaagagttactacagtaaagatc

SEQ ID NO: 700332 - DNA, 120 bp, Artificial Sequence
  ENSG00000196132_14 (sequence is synthesized)
cttcaagagctgagaagcgtgagatcaagtgtccaacaccaggctgtgatggcactggccacgttaccgggttgtaccctcaccaccgcagcctttctggctgtccccacaaggatagga

SEQ ID NO: 700333 - DNA, 120 bp, Artificial Sequence
  ENSG00000196132_15 (sequence is synthesized)
tccccccagagatcttagccatgcatgagaacgtgctgaagtgccccactcctggctgcacaggccagggtcacgtgaacagcaaccgcaacacgcacagaagtttgtctgggtgtccca

SEQ ID NO: 700334 - DNA, 120 bp, Artificial Sequence
  ENSG00000196132_16 (sequence is synthesized)
ttgctgccgccgaaaaattagccaaatcccatgagaagcagcagccgcagacaggagatccttccaagagtagctccaattccgatcggatcctcaggcccatgtgcttcgtgaagcagc

SEQ ID NO: 700335 - DNA, 120 bp, Artificial Sequence
  ENSG00000196132_17 (sequence is synthesized)
tcgaggtccctccatatgggagctaccggcccaacgtggcccccgccacacccagggccaacttggccaaggagctggagaagttctccaaggtcacctttgactacgcaagtttcgatg

SEQ ID NO: 700336 - DNA, 120 bp, Artificial Sequence
  ENSG00000196132_18 (sequence is synthesized)
ctcaggtttttggcaaacgcatgcttgccccaaagattcagaccagcgaaacctcacctaaagcctttcaatgctttgactactcgcaggacgccgaggctgcacacatggctgccactg

SEQ ID NO: 700337 - DNA, 120 bp, Artificial Sequence
  ENSG00000196132_19 (sequence is synthesized)
ccatcctgaacctctccacgcgctgctgggagatgcctgagaacctcagcacgaagccacaggacctccccagcaagtctgtggatatcgaggtagacgaaaatggaaccctggacttga

SEQ ID NO: 700338 - DNA, 120 bp, Artificial Sequence
  ENSG00000196132_20 (sequence is synthesized)
gcatgcacaaacaccgcaaacgagaaaatgctttccccagcagcagcagctgcagcagcagccccggtgtgaagtctcccgacgcctcccagcgccacagcagcaccagcgcccccagca

SEQ ID NO: 700339 - DNA, 120 bp, Artificial Sequence
  ENSG00000196132_21 (sequence is synthesized)
gctccatgacctctccccagtccagccaggcctcccgccaggacgagtgggaccggcccctggactacaccaagcctagccgcctgagagaggaggaacctgaggagtcagagccagcag

SEQ ID NO: 700340 - DNA, 120 bp, Artificial Sequence
  ENSG00000196132_22 (sequence is synthesized)
cccattcttttgcttcttctgaagcagatgaccaggaagtgtcggaagagaattttgaggagcggaagtatccgggggaagtcaccctgaccaactttaagctgaagtttctctccaagg

SEQ ID NO: 700341 - DNA, 120 bp, Artificial Sequence
  ENSG00000196132_23 (sequence is synthesized)
ctgtgacggcagcggccacatcaccgggaactacgcctcccaccgcagcctctctggttgccctcttgctgacaagagcctcagaaacctcatggctgcccactctgctgacctcaagtg

SEQ ID NO: 700342 - DNA, 120 bp, Artificial Sequence
  ENSG00000196132_24 (sequence is synthesized)
ccccacgcccggctgtgacggctctggccacatcacagggaactacgcttcacaccggagcttgtccggctgccctcgtgcaaagaaaagtggagtcaaggtggcacccaccaaggacga

SEQ ID NO: 700343 - DNA, 120 bp, Artificial Sequence
  ENSG00000196132_25 (sequence is synthesized)
caaggaggaccccgagctgatgaagtgcccagttccaggctgtgtggggctcggtcacatcagcgggaaatacgcctctcacaggagcgcatccggctgcccactggccgcccgcaggca

SEQ ID NO: 700344 - DNA, 120 bp, Artificial Sequence
  ENSG00000196132_26 (sequence is synthesized)
gaaggaagggtccctcaatggctcgtcattctcctggaagtccctgaagaatgaaggaccgacctgccccaccccgggctgtgacggctctggccacgccaatgggagtttcctcaccca

SEQ ID NO: 700345 - DNA, 120 bp, Artificial Sequence
  ENSG00000196132_27 (sequence is synthesized)
ccggagtttgtcaggctgtcccagagcaacctttgctggaaagaagggaaaactgtcaggggatgaggtcctcagtccaaagttcaagactagcgacgtgttggagaatgatgaggagat

SEQ ID NO: 700346 - DNA, 120 bp, Artificial Sequence
  ENSG00000196132_28 (sequence is synthesized)
caagcagctgaaccaggagatccgagacctgaacgagtccaactcggagatggaggctgccatggtgcagctgcagtcccagatctcctccatggagaagaacctgaagaacatcgagga

SEQ ID NO: 700347 - DNA, 120 bp, Artificial Sequence
  ENSG00000196132_29 (sequence is synthesized)
ggagaacaagctcattgaggagcagaatgaagccctgtttctggagctgtccggcctgagccaggccctcatccaaagtctcgccaatatccgccttccgcacatggagccaatatgcga

SEQ ID NO: 700348 - DNA, 120 bp, Artificial Sequence
  ENSG00000196132_30 (sequence is synthesized)
acagaatttcgatgcctatgtgagcaccctcaccgacatgtactccaaccaggacccggagaacaaggacctcctggagagcatcaagcaggctgtgaggggcatccaggtctaggccgt

SEQ ID NO: 700349 - DNA, 120 bp, Artificial Sequence
  ENSG00000196132_31 (sequence is synthesized)
gtggtacccagaagtgtcccagcccaccacaccgtttacctccctcgccctgccccgcaccgtggggatgcccaactcacagtgacttcccgtttggggcccggtgtggccgcgggcggg

SEQ ID NO: 700350 - DNA, 120 bp, Artificial Sequence
  ENSG00000196132_32 (sequence is synthesized)
tttatccaaagggatggctggaaattggccgctcccacgaggctccctccaggcttggggccgtggtggccctatctgtgtgcataggggcactgaagaattacaaagtgatttattttt

SEQ ID NO: 700351 - DNA, 120 bp, Artificial Sequence
  ENSG00000196132_33 (sequence is synthesized)
gttttctgaaagaaatctgaagagcagctcaaagtctccagtggaagctcatggacaaggttctcagggaagttttggagtttgcaaccacagtattcctttgtctgtcgaggctgggag

SEQ ID NO: 700352 - DNA, 120 bp, Artificial Sequence
  ENSG00000196132_34 (sequence is synthesized)
ggtagccgtgagcgtggtgggtgggtggtgtgagtggcatcttggcctggaggacacgcctggggcagcgtgtctgtgctcagtgagggccgatgaagaaagtgcgttttctgttttcat

SEQ ID NO: 700353 - DNA, 120 bp, Artificial Sequence
  ENSG00000196132_35 (sequence is synthesized)
ttaattcagttttgtgttaagggtggaacaaagctctgttctagagggaaagttaggaataggcctcccagaggatactccagacagttgacaagcatcgcagcccctgtcaggtcaagg

SEQ ID NO: 700354 - DNA, 120 bp, Artificial Sequence
  ENSG00000196132_36 (sequence is synthesized)
aattttaacctgggagactcctgaaaatcagcctaatgtctgggggcagctggcgctgaggctgtgcagatgtgtatggccttgggtcacagctccctactggggctgcagcctttagac

SEQ ID NO: 700355 - DNA, 120 bp, Artificial Sequence
  ENSG00000196132_37 (sequence is synthesized)
cctgggtctgggatccacgtctagggaccactctggcttctgtgcatccacccaggcccccgacccatcactgccacattctccgggtcatggccgagcttgacctctgcatccatggtg

SEQ ID NO: 700356 - DNA, 120 bp, Artificial Sequence
  ENSG00000196132_38 (sequence is synthesized)
acggaggtggcaatgacatcatcaaggtcagagggtaaattcctaacaggagaccacaaaggtttcacttcttttagatccatccaatatgcgaaaaaagggtacattttaatttaatgt

SEQ ID NO: 700357 - DNA, 120 bp, Artificial Sequence
  ENSG00000196132_39 (sequence is synthesized)
gttaaaaacacaatgtccctaccgtgtaaatagaatccaagtcaattgtgactgcaattccaagttagtatttaaaaatagagaaattgcacttcctggaaaaaattaaaaagtagttag

SEQ ID NO: 700358 - DNA, 120 bp, Artificial Sequence
  ENSG00000196132_40 (sequence is synthesized)
gtaaattatttaattttgtcaagatgtaagtatttatattcacagcctcttatgttaacgtttgctatttatttaacatttttatttattaattttatactatttcaactagaccccaca

SEQ ID NO: 700359 - DNA, 120 bp, Artificial Sequence
  ENSG00000196132_41 (sequence is synthesized)
ctagaccccacaccagggcaccctaagaggggaaaaaagtgaattcaaagcaaaaataactatttgactataatataggccacaaaaaatcttgatataactcctagttataattttgat

SEQ ID NO: 700360 - DNA, 120 bp, Artificial Sequence
  ENSG00000196132_42 (sequence is synthesized)
gcaaccaagttattttttatatattttgttatttattcttttaataatggaatttttttaaaaagtattttgtaactgaggaattttgataatttggggattttgttttcccttggtcta

SEQ ID NO: 700361 - DNA, 120 bp, Artificial Sequence
  ENSG00000196132_43 (sequence is synthesized)
atggagagaaagacattttggttttctttttccattttgggttccttttgtttcaggcacggataacagcaaatggaattctgtatttattattatttaagtgtagcgcagatgtgtgtg

SEQ ID NO: 700362 - DNA, 120 bp, Artificial Sequence
  ENSG00000196132_44 (sequence is synthesized)
cttgggcgtgtttctcgtgtcgcgtttgcgtgtcggctcttgcggtggagtcctgttgctgtgagggagtgctggccgcaggcagcctcgagtcaccgccaggctcacaggctgtgccac

SEQ ID NO: 700363 - DNA, 120 bp, Artificial Sequence
  ENSG00000196132_45 (sequence is synthesized)
ccgtccctccgacagctccaatactgtgaccctccttcctcaggaagcgcgttgaacccacagcactccgtggtgtgtttgcagggtgatttcctaataaaagtccactctgactgtgaa

SEQ ID NO: 700364 - DNA, 120 bp, Artificial Sequence
  ENSG00000196132_46 (sequence is synthesized)
caggtgtgagccactgtgcccggccaaatttacccaatttttaagagttatgacgtgctgcaagcttgctgccttccctcatccagcgaaaatgagttccgaggtgagctgttaaatcag

SEQ ID NO: 700365 - DNA, 120 bp, Artificial Sequence
  ENSG00000196132_47 (sequence is synthesized)
ttccgaggtgagctgttaaatcagaggtggacacacggaggcaaggccagcagctgcaggacctcaagacacctgggcagacactgcaagttttcatggttttcctatcgaaggcagaac

SEQ ID NO: 700366 - DNA, 120 bp, Artificial Sequence
  ENSG00000196132_48 (sequence is synthesized)
tattgaaatattaattagagcctcaagacatgctcgcagtggcagaatgaagctggcatttggagaaacagagcagacgttcttgagaaaggttgccggcccagcagtaagaatgagctt

SEQ ID NO: 700367 - DNA, 120 bp, Artificial Sequence
  ENSG00000196132_49 (sequence is synthesized)
gggaggacccgcctcccggggagagctcgcccgcccctccctcccggctggccgcggggcggtctgcagaccctttggccgtgccggatctgcctggtccccggggagaagacgctgagg

SEQ ID NO: 700368 - DNA, 120 bp, Artificial Sequence
  ENSG00000196132_50 (sequence is synthesized)
cggagtagcaggagtttgcaagctgcttcattaacttggagccagtggaatgtctgggatcgtctgtgatttggaaaccggtggcagaatgttcccgcgtttctggtcctcatcagtcag

SEQ ID NO: 700369 - DNA, 120 bp, Artificial Sequence
  ENSG00000196132_51 (sequence is synthesized)
gccatgctggctctttcattgcattgcggaattgagattttcgtgtgttttataatgtaaaaaaactcctactagattcccttttcattaatacaacgggtcacctaactgaccaacgcc

SEQ ID NO: 700370 - DNA, 120 bp, Artificial Sequence
  ENSG00000196132_52 (sequence is synthesized)
ggctcaaggacagtgatggcgtagggtgtaggcaaggagggctatgcagttgtagtgggaacttcatttgggggtgcttgtgttttactctcaaaacccaacctttttcttttgaatctg

SEQ ID NO: 700371 - DNA, 120 bp, Artificial Sequence
  ENSG00000196132_53 (sequence is synthesized)
gtggcgagaatgtacattttaatgggtctgttatagacaacttgctgagcacctccgctcatattttggctcccgcaggattatcagtgctctgctgatccatgttggagcctggggcac

SEQ ID NO: 700372 - DNA, 120 bp, Artificial Sequence
  ENSG00000196132_54 (sequence is synthesized)
aaggaagagtcagtaatatggatcctgtctttatttaaggttttggtatcttgtttattaggggttttttgcatcatgttgatgtttctaaatattgaattaaaatattatttatcttga

SEQ ID NO: 700373 - DNA, 120 bp, Artificial Sequence
  ENSG00000196132_55 (sequence is synthesized)
atcccattgctggtctgtggatggggacaggagacgcccgaggtttccatttgcatctggcttttgtgtggcactagaagagatcagctttttgcaagcatggggctgatgaacgcattt

SEQ ID NO: 700374 - DNA, 120 bp, Artificial Sequence
  ENSG00000196136_0 (sequence is synthesized)
attcatgaaaatccactactccagacagacggctttggaatccaccagctacatccagctccctgaggcagagttgagaatggagagaatgttacctctcctggctctggggctcttggc

SEQ ID NO: 700375 - DNA, 120 bp, Artificial Sequence
  ENSG00000196136_1 (sequence is synthesized)
ggctgggttctgccctgctgtcctctgccaccctaacagcccacttgacgaggagaatctgacccaggagaaccaagaccgagggacacacgtggacctcggattagcctccgccaacgt

SEQ ID NO: 700376 - DNA, 120 bp, Artificial Sequence
  ENSG00000196136_2 (sequence is synthesized)
ggacttcgctttcagcctgtacaagcagttagtcctgaaggcccctgataagaatgtcatcttctccccactgagcatctccaccgccttggccttcctgtctctgggggcccataatac

SEQ ID NO: 700377 - DNA, 120 bp, Artificial Sequence
  ENSG00000196136_3 (sequence is synthesized)
caccctgacagagattctcaaaggcctcaagttcaacctcacggagacttctgaggcagaaattcaccagagcttccagcacctcctgcgcaccctcaatcagtccagcgatgagctgca

SEQ ID NO: 700378 - DNA, 120 bp, Artificial Sequence
  ENSG00000196136_4 (sequence is synthesized)
gctgagtatgggaaatgccatgtttgtcaaagagcaactcagtctgctggacaggttcacggaggatgccaagaggctgtatggctccgaggcctttgccactgactttcaggactcagc

SEQ ID NO: 700379 - DNA, 120 bp, Artificial Sequence
  ENSG00000196136_5 (sequence is synthesized)
tgcagctaagaagctcatcaacgactacgtgaagaatggaactagggggaaaatcacagatctgatcaaggaccttgactcgcagacaatgatggtcctggtgaattacatcttctttaa

SEQ ID NO: 700380 - DNA, 120 bp, Artificial Sequence
  ENSG00000196136_6 (sequence is synthesized)
aagatactcatcagtcaaggttctacttgagcaagaaaaagtgggtaatggtgcccatgatgagtttgcatcacctgactataccttacttccgggacgaggagctgtcctgcaccgtgg

SEQ ID NO: 700381 - DNA, 120 bp, Artificial Sequence
  ENSG00000196136_7 (sequence is synthesized)
tggagctgaagtacacaggcaatgccagcgcactcttcatcctccctgatcaagacaagatggaggaagtggaagccatgctgctcccagagaccctgaagcggtggagagactctctgg

SEQ ID NO: 700382 - DNA, 120 bp, Artificial Sequence
  ENSG00000196136_8 (sequence is synthesized)
agttcagagagataggtgagctctacctgccaaagttttccatctcgagggactataacctgaacgacatacttctccagctgggcattgaggaagccttcaccagcaaggctgacctgt

SEQ ID NO: 700383 - DNA, 120 bp, Artificial Sequence
  ENSG00000196136_9 (sequence is synthesized)
cagggatcacaggggccaggaacctagcagtctcccaggtggtccataaggctgtgcttgatgtatttgaggagggcacagaagcatctgctgccacagcagtcaaaatcaccctccttt

SEQ ID NO: 700384 - DNA, 120 bp, Artificial Sequence
  ENSG00000196136_10 (sequence is synthesized)
ctgcattagtggagacaaggaccattgtgcgtttcaacaggcccttcctgatgatcattgtccctacagacacccagaacatcttcttcatgagcaaagtcaccaatcccaagcaagcct

SEQ ID NO: 700385 - DNA, 120 bp, Artificial Sequence
  ENSG00000196136_11 (sequence is synthesized)
agagcttgccatcaagcagtggggctctcagtaaggaacttggaatgcaagctggatgcctgggtctctgggcacagcctggcccctgtgcaccgagtggccatggcatgtgtggccctg

SEQ ID NO: 700386 - DNA, 120 bp, Artificial Sequence
  ENSG00000196136_12 (sequence is synthesized)
tctgcttatccttggaaggtgacagcgattccctgtgtagctctcacatgcacaggggcccatggactcttcagtctggagggtcctgggcctcctgacagcaataaataatttcgttgg

SEQ ID NO: 700387 - DNA, 120 bp, Artificial Sequence
  ENSG00000196136_13 (sequence is synthesized)
actactccagacagacggctttggaatccaccagctacatccagctccctgaggactgagtgggcggaggctgaaggtgaataatcttgtttgctgcggtcaccggcttggaactcagcc

SEQ ID NO: 700388 - DNA, 120 bp, Artificial Sequence
  ENSG00000196136_14 (sequence is synthesized)
cttccagggtctcttgtgcagtagctcatggctcttctctggcttgtagtttcaggaaaggggtagtatgggaggtggtgactgctcggtacgtctaatatgaaccaggtgccttcatca

SEQ ID NO: 700389 - DNA, 120 bp, Artificial Sequence
  ENSG00000196136_15 (sequence is synthesized)
tttatctcacctgagccacttaacaggttgtgcagagacggaaacaggttgagagatgtacagtcacctgcttgccagtacacagcaatcaaaagtggccaaaataaaatcccagtccaa

SEQ ID NO: 700390 - DNA, 120 bp, Artificial Sequence
  ENSG00000196136_16 (sequence is synthesized)
gtctgggagactccaaagccctctctgccttctccccactaagaggcccttccaggcttatggtggacacagacaccacgtggcaacctggcaggggcagagaagaacatttgcctttct

SEQ ID NO: 700391 - DNA, 120 bp, Artificial Sequence
  ENSG00000196136_17 (sequence is synthesized)
ttggtcttgctgccaaccattatcagggccatcgaggctccagacactgtaccagggactttcatttccctctctcagtcgaccctcactgccacccagcatcacatcgtggaggcctgt

SEQ ID NO: 700392 - DNA, 120 bp, Artificial Sequence
  ENSG00000196136_18 (sequence is synthesized)
ggaggccacaccacgtgacatctagaggctgggagagtcactgtggcctctatctctgcccagggctccttcatccctgggttctactttggtggcagttgggagaatgaaggaagggag

SEQ ID NO: 700393 - DNA, 120 bp, Artificial Sequence
  ENSG00000196136_19 (sequence is synthesized)
cccctgctttctaatcccctaggatgagatctgctcaccaagcaggagaggagcaggcattctgattggactgaacctcggaccccccatcagcttacagaccgaggagccaggcaaacc

SEQ ID NO: 700394 - DNA, 120 bp, Artificial Sequence
  ENSG00000196136_20 (sequence is synthesized)
tggctgcccactgggctcctttacctgtttgctgtatgatcttgggcaagccccctcaccgctctgtgcccggcttttccactgcaagaaaatggcaacaattatggtacctacctcaaa

SEQ ID NO: 700395 - DNA, 120 bp, Artificial Sequence
  ENSG00000196136_21 (sequence is synthesized)
gggtgaaatgaagcagagtgatgtgtgtcgggtgccccagagagcacctacctgagggaggctccaaagctagcaagaggcagcaggacagggaccaggacgcaggctgggtggagggca

SEQ ID NO: 700396 - DNA, 120 bp, Artificial Sequence
  ENSG00000196136_22 (sequence is synthesized)
aagttgacctgggcccatttgaaaattccttttgctccctcattttaacccctaaagtaaagccgtttgtgactttatgagcttttaccaagcatctcctaaaaccaagaatggaggtga

SEQ ID NO: 700397 - DNA, 120 bp, Artificial Sequence
  ENSG00000196136_23 (sequence is synthesized)
aagattgtggagcccacaacctagagaaaggattgacaattttttttccataaagggcctagtagtatgtattttaggctgtgtggtccacatgagggcagattcttctttttgacttcc

SEQ ID NO: 700398 - DNA, 120 bp, Artificial Sequence
  ENSG00000196136_24 (sequence is synthesized)
tcctctgcatcttcttcatcttctctttcctcttcattttttttacaacctttgaaaaatataagcaccattcttagctttaggtacacacaaaaataagctatggctgtattggcttac

SEQ ID NO: 700399 - DNA, 120 bp, Artificial Sequence
  ENSG00000196136_25 (sequence is synthesized)
aggctatagtttcctgacccctgttctaggggaggaaaataattgtacccaactaaatgcgtgcgaatcatgggcctatgtcatgattcccaaagaatgagtttcatggaattttcaaca

SEQ ID NO: 700400 - DNA, 120 bp, Artificial Sequence
  ENSG00000196136_26 (sequence is synthesized)
ttttaaatattttactccattcttcccttgcttgcatagtttctgatgagaagtctgctgtcattttcatccttattcctttttagataaggtggagttttcctccctctgcctctacct

SEQ ID NO: 700401 - DNA, 120 bp, Artificial Sequence
  ENSG00000196136_27 (sequence is synthesized)
ctacctctttcaagattttctctttctctttactatggtaaataggcctttagtgagaggagttatgtcagcctggctaggagtcaggctgcatttcaggtttgtgatagctagaggtac

SEQ ID NO: 700402 - DNA, 120 bp, Artificial Sequence
  ENSG00000196136_28 (sequence is synthesized)
cagaggcagtttcatggaattttacctttgcaacactgagagcctaggcagcctcagagtcagaacacccacagttgaatcctcagcctgacagacactgaatccagggcaaatcttagc

SEQ ID NO: 700403 - DNA, 120 bp, Artificial Sequence
  ENSG00000196136_29 (sequence is synthesized)
tgaatattcatggtctgtagaggtggacatgagctagatatgagctaaggaccatagccagctcatggcttttgtgatgtccaacaccgctatcctctaagatgtcacaagtgtccctag

SEQ ID NO: 700404 - DNA, 120 bp, Artificial Sequence
  ENSG00000196136_30 (sequence is synthesized)
gcttttattcccatggtctctcctggctctgagttctatcttccattaaggttcttcctgttcctcccctcattcacactgattggcatctcttctgtctgccctcaccaactcacatac

SEQ ID NO: 700405 - DNA, 120 bp, Artificial Sequence
  ENSG00000196136_31 (sequence is synthesized)
agaacccagtctctttcctcttatttccacccaaagccctcccacaagccactgttatatgttcacatccctgtaataccagtgagtaataattgctaatgagacatttttccttttatg

SEQ ID NO: 700406 - DNA, 120 bp, Artificial Sequence
  ENSG00000196136_32 (sequence is synthesized)
ctcctcaggcaccagcctcccacatgttgtcatgcctctttcccccactttccctaaaccttctttctctcttgcactccttattccctggttcctattgatttctcatttagcacaagg

SEQ ID NO: 700407 - DNA, 120 bp, Artificial Sequence
  ENSG00000196136_33 (sequence is synthesized)
aactaggtctttcttttgtggcccttttcccaatccaagcctgctgggctctccctcacccccaataacttttactcttgccaagctacttctctaaaccaaagcagggtccctcctatg

SEQ ID NO: 700408 - DNA, 120 bp, Artificial Sequence
  ENSG00000196136_34 (sequence is synthesized)
agggactctgggcacttccactgctgcggaagcagggtcgagcagggcgacccttgcactcacaccttctccaactgcttgctccaccttcagccaaatgggagatgccctttgaccccc

SEQ ID NO: 700409 - DNA, 120 bp, Artificial Sequence
  ENSG00000196136_35 (sequence is synthesized)
tgtatccgaacttgaattggtgaaggccagatggacttttgggtactcttgaacttgggttaatgcacgtgcatttctcattatatactcaccctgcttgggacacccccaagccaagaa

SEQ ID NO: 700410 - DNA, 120 bp, Artificial Sequence
  ENSG00000196136_36 (sequence is synthesized)
gagctaggttacagcccagctcctcctgccgtgttaggggttgagcctctacaacataatgtcatccaggcttggaatcagagagccatggacaccattccacactataccatttactat

SEQ ID NO: 700411 - DNA, 120 bp, Artificial Sequence
  ENSG00000196136_37 (sequence is synthesized)
ctttgggcttgatttttctttttcttctttaagacaatgacatcagacaggacaaggggctgaggcttcctctgactccagcatgttctaagtcatgagaaatcttctgcacagtcccaa

SEQ ID NO: 700412 - DNA, 120 bp, Artificial Sequence
  ENSG00000196136_38 (sequence is synthesized)
acactcatgcatggtttctcctggtctcaatctcttgaagggagagagaaacagaaggaattgtgatcagttgagggctgcagtgagatggactctgagaatcagttctgcactggtgaa

SEQ ID NO: 700413 - DNA, 120 bp, Artificial Sequence
  ENSG00000196136_39 (sequence is synthesized)
ccactgtatttattcattctctcagcatttgctgcatgattaattgagcacctactatgtgtcagacactaatttgcaccctgagagtaaatcagcaaataaaacacaagattccctgcc

SEQ ID NO: 700414 - DNA, 120 bp, Artificial Sequence
  ENSG00000196139_0 (sequence is synthesized)
aaacatttgctagtcagacaagtgacagggaatggattccaaacaccagtgtgtaaagctaaatgatggccacttcatgcctgtattgggatttggcacctatgcacctccagaggttcc

SEQ ID NO: 700415 - DNA, 120 bp, Artificial Sequence
  ENSG00000196139_1 (sequence is synthesized)
gagaagtaaagctttggaggtcacaaaattagcaatagaagctgggttccgccatatagattctgctcatttatacaataatgaggagcaggttggactggccatccgaagcaagattgc

SEQ ID NO: 700416 - DNA, 120 bp, Artificial Sequence
  ENSG00000196139_2 (sequence is synthesized)
agatggcagtgtgaagagagaagacatattctacacttcaaagctttggtccacttttcatcgaccagagttggtccgaccagccttggaaaactcactgaagaaagctcaattggacta

SEQ ID NO: 700417 - DNA, 120 bp, Artificial Sequence
  ENSG00000196139_3 (sequence is synthesized)
tgttgacctctatcttattcattctccaatgtctctaaagccaggtgaggaactttcaccaacagatgaaaatggaaaagtaatatttgacatagtggatctctgtaccacctgggaggc

SEQ ID NO: 700418 - DNA, 120 bp, Artificial Sequence
  ENSG00000196139_4 (sequence is synthesized)
cctgtctgcaaccaggtagaatgtcatccgtatttcaaccggagtaaattgctagatttctgcaagtcgaaagatattgttctggttgcctatagtgctctgggatctcaacgagacaaa

SEQ ID NO: 700419 - DNA, 120 bp, Artificial Sequence
  ENSG00000196139_5 (sequence is synthesized)
cgatgggtggacccgaactccccggtgctcttggaggacccagtcctttgtgccttggcaaaaaagcacaagcgaaccccagccctgattgccctgcgctaccagctgcagcgtggggtt

SEQ ID NO: 700420 - DNA, 120 bp, Artificial Sequence
  ENSG00000196139_6 (sequence is synthesized)
gtggtcctggccaagagctacaatgagcagcgcatcagacagaacgtgcaggtttttgagttccagttgactgcagaggacatgaaagccatagatggcctagacagaaatctccactat

SEQ ID NO: 700421 - DNA, 120 bp, Artificial Sequence
  ENSG00000196139_7 (sequence is synthesized)
tttaacagtgatagttttgctagccaccctaattatccatattcagatgaatattaacatggagggctttgcctgatgtctaccagaagccctgtgtgtggatggtgacgcagaggacgt

SEQ ID NO: 700422 - DNA, 120 bp, Artificial Sequence
  ENSG00000196139_8 (sequence is synthesized)
ctctatgccggtgactggacatatcacctctacttaaatccgtcctgtttagcgacttcagtcaactacagctgagtccataggccagaaagacaataaatttttatcattttgaaataa

SEQ ID NO: 700423 - DNA, 120 bp, Artificial Sequence
  ENSG00000196139_9 (sequence is synthesized)
ggcagtgtgaagagagaagacatattctacacttcaaaggccatggagaagtgtaaggatgcaggattggccaagtccattggggtgtcaaacttcaaccgcaggcagctggagatgatc

SEQ ID NO: 700424 - DNA, 120 bp, Artificial Sequence
  ENSG00000196139_10 (sequence is synthesized)
aagccaggactcaagtacaagcctgtctgcaaccaggtgagctcccttggccttctctcctttcggttcttcatgccccctcttcctgtcctattgccaaatatctgtttgttttgtccc

SEQ ID NO: 700425 - DNA, 120 bp, Artificial Sequence
  ENSG00000196139_11 (sequence is synthesized)
agttatctttgtgaagtagaagattatctagagagcaaagcttctgtcaagaaaggcgtgaagatttcttgtttgtaccctgcttggaaaagtattagggaaaaattggaatgagtttaa

SEQ ID NO: 700426 - DNA, 120 bp, Artificial Sequence
  ENSG00000196139_12 (sequence is synthesized)
tgctgaatcgtgtgtaatatttaggggaggtccatttgatcagggaggcctggaatcatcaattagaactcaaggaaaggtggacttacctctaagctatgaaagatgaccagaaagtgc

SEQ ID NO: 700427 - DNA, 120 bp, Artificial Sequence
  ENSG00000196139_13 (sequence is synthesized)
atgggtgaaggtgatttggagggaatggtgtatagatatgaagctaggaaaagatgaaatgagctgtacgtgaacagagagttagaataagagaagagaggtgctaggggtttacatgga

SEQ ID NO: 700428 - DNA, 120 bp, Artificial Sequence
  ENSG00000196139_14 (sequence is synthesized)
tttttgctgaacattccccttagtaaaatggcaggatggtttgcttgccattgaaactaaccaaacatttaatccttttccctttagagaaaaaagaaaaaaaaaggtgcagctcactgc

SEQ ID NO: 700429 - DNA, 120 bp, Artificial Sequence
  ENSG00000196139_15 (sequence is synthesized)
cagtgcccatttagttttacattaacatgttccttgaggttgaagcaaatctgaccgattttcaatgtaaaaataacatataaaaactgttctcggagttatttctaaacagaactaaga

SEQ ID NO: 700430 - DNA, 120 bp, Artificial Sequence
  ENSG00000196139_16 (sequence is synthesized)
tgttgacctctatcttattcattctccaatgtctctaaaggtatgcagtttgtatgagcataaaattgcgcttctgctgtcattataaacattgtttatctggatagttgaacagagctt

SEQ ID NO: 700431 - DNA, 120 bp, Artificial Sequence
  ENSG00000196139_17 (sequence is synthesized)
tctttcgagtaaattttgaatcctacttctctaatgcacacctacaagagaagagagtacagcaacctcaaagcctcttcctcaaaaacttgaaattacaatagtctctttcaaggcact

SEQ ID NO: 700432 - DNA, 120 bp, Artificial Sequence
  ENSG00000196139_18 (sequence is synthesized)
gtcttagttgtggcttttgagtccatctcttgggatgttcccagacacagagtttcatgcagttgtggtgcccaataaaactgctgcacatgtgatgcacaatgagtttccaccatctct

SEQ ID NO: 700433 - DNA, 120 bp, Artificial Sequence
  ENSG00000196139_19 (sequence is synthesized)
ccccatttcaagctgaagcagatttggtggaagccactatgcatggttcttaaattagaaacccttaatgtggacttgcaaagctttattattctgctgcctcttctttcacaatagagt

SEQ ID NO: 700434 - DNA, 120 bp, Artificial Sequence
  ENSG00000196139_20 (sequence is synthesized)
ttgaagctgtatttagccaggaattactgtgtagtgtataacttttgatttaaagttacagaaaactactcaggctagttaatgcaaaagagtttactgagttatgtaaaatgggaagtc

SEQ ID NO: 700435 - DNA, 120 bp, Artificial Sequence
  ENSG00000196139_21 (sequence is synthesized)
cttttccaacaaatcactgaatctgagggtgttatttggtacctccataacagtgatcaaccagagattgcctgagactgaaggtgtttctgggatgctcaacctttattactaaccagg

SEQ ID NO: 700436 - DNA, 120 bp, Artificial Sequence
  ENSG00000196139_22 (sequence is synthesized)
aaagactcaggcaaactgagatggacttttcaccccacatacagacaggaggaaaagctgattcttgtataaaagtcaatgcttgtgcctgaactacctctcagccacagtgatcaccag

SEQ ID NO: 700437 - DNA, 120 bp, Artificial Sequence
  ENSG00000196139_23 (sequence is synthesized)
ccaccctggcgatggctccctggtcctactttctctctcaaactggctttttctcattcctttgactccgccagacttcctcgcccccatgacctggtgttgtgtctgatcaccccaaca

SEQ ID NO: 700438 - DNA, 120 bp, Artificial Sequence
  ENSG00000196139_24 (sequence is synthesized)
ttcctggctgcccaatgtggggcaatgaagaccccagtgaaggaatgctagagtgtgtgaaagtggaggacgcatcgtcaaaggacacctgaggacgtctcaaagaagctcggcgggaga

SEQ ID NO: 700439 - DNA, 120 bp, Artificial Sequence
  ENSG00000196139_25 (sequence is synthesized)
agcgctcggaagaaccaagaactaagatcagaattctttgaatcatcagaatcatctcttttgaaaaatcgattcatcaaatgaatcttcagccaacaactgttcaagaaggatgcaaat

SEQ ID NO: 700440 - DNA, 120 bp, Artificial Sequence
  ENSG00000196139_26 (sequence is synthesized)
aggtacatgaccctatcatgtgggcacaatgtgaccctatcatgtgggcacaatgtcagcgctgtttcttctccattttctgttgaaattttctctttgtctgcagagttgcacagtttc

SEQ ID NO: 700441 - DNA, 120 bp, Artificial Sequence
  ENSG00000196139_27 (sequence is synthesized)
aatacataatatctaggaatggatttctgcttatttttcgtgagctattcattgacccacctgagtgtttagagctgacttctataactgtttaaaacttaccaatattttaagtattgt

SEQ ID NO: 700442 - DNA, 120 bp, Artificial Sequence
  ENSG00000196139_28 (sequence is synthesized)
aggaggaggtgtgaattcaaaggcagcattactccccattttcttccctctcctgtgtctctcccctgaggcttctctgcaaaacatcactgcccagcttagcatctgtcctgggcactg

SEQ ID NO: 700443 - DNA, 120 bp, Artificial Sequence
  ENSG00000196139_29 (sequence is synthesized)
tgctagccagctgagtgacagtgatggattcaaaacatcagtgtttgaagctaaatgatggtcacttcatgcctgtcctgggatttggcacctatgcacctccagagaatcatctctttt

SEQ ID NO: 700444 - DNA, 120 bp, Artificial Sequence
  ENSG00000196141_0 (sequence is synthesized)
gcagaaacccacggctgaagcccacgatgcccatgtgtaacttggttattacacacacgtttggagcccagtgtgcagacccgcagcgcagaggaggcggcggaacaccccgggttggtc

SEQ ID NO: 700445 - DNA, 120 bp, Artificial Sequence
  ENSG00000196141_1 (sequence is synthesized)
gggtttccaagggctgacccgagctccagcactttttccgcgcctgatttttcagagctcttcagaaaccaggctgctttcaggaacattgctgtggattcccagggcctattccactag

SEQ ID NO: 700446 - DNA, 120 bp, Artificial Sequence
  ENSG00000196141_2 (sequence is synthesized)
aagcaagatggctgaactcaatactcatgtgaatgtcaaggaaaagatctatgcagttagatcagttgttcccaacaaaagcaataatgaaatagtcctggtgctccaacagtttgattt

SEQ ID NO: 700447 - DNA, 120 bp, Artificial Sequence
  ENSG00000196141_3 (sequence is synthesized)
taatgtggataaagccgtgcaagcctttgtggatggcagtgcaattcaagttctaaaagaatggaatatgacaggaaaaaagaagaacaataaaagaaaaagaagcaagtccaagcagca

SEQ ID NO: 700448 - DNA, 120 bp, Artificial Sequence
  ENSG00000196141_4 (sequence is synthesized)
tcaaggcaacaaagatgctaaagacaaggtggagaggcctgaggcagggcccctgcagccgcagccaccacagattcaaaacggccccatgaatggctgcgagaaggacagctcgtccac

SEQ ID NO: 700449 - DNA, 120 bp, Artificial Sequence
  ENSG00000196141_5 (sequence is synthesized)
agattctgctaacgaaaaaccagcccttatccctcgtgagaaaaagatctcgatacttgaggaaccttcaaaggcacttcgtggggtcacagaaggcaacagactactgcaacagaaact

SEQ ID NO: 700450 - DNA, 120 bp, Artificial Sequence
  ENSG00000196141_6 (sequence is synthesized)
atccttagatgggaaccccaaacctatacatggaacaacagagaggtcagatggcctacagtggtcagctgagcagccttgtaacccaagcaagcctaaggcaaaaacatctcctgttaa

SEQ ID NO: 700451 - DNA, 120 bp, Artificial Sequence
  ENSG00000196141_7 (sequence is synthesized)
gtccaatacccctgcagctcatcttgaaataaagccagatgagttggcaaagaaaagaggcccaaatattgagaaatcagtgaaggatttgcaacgctgcaccgtttctctaactagata

SEQ ID NO: 700452 - DNA, 120 bp, Artificial Sequence
  ENSG00000196141_8 (sequence is synthesized)
tcgcgtcatgattaaggaagaagtggatagttccgtgaagaagatcaaagctgcctttgctgaattacacaactgcatcattgacaaagaagtttcattaatggcagaaatggataaagt

SEQ ID NO: 700453 - DNA, 120 bp, Artificial Sequence
  ENSG00000196141_9 (sequence is synthesized)
taaagaagaagccatggaaatcctgactgctcgtcagaagaaagcagaagaactaaagagactcactgaccttgccagtcagatggcagagatgcagctggccgaactcagggcagaaat

SEQ ID NO: 700454 - DNA, 120 bp, Artificial Sequence
  ENSG00000196141_10 (sequence is synthesized)
taagcactttgtcagcgagcgtaaatatgacgaggagctcgggaaagctgcccggttttcctgtgacatcgaacagctgaaggcccaaatcatgctctgcggagaaattacacatccaaa

SEQ ID NO: 700455 - DNA, 120 bp, Artificial Sequence
  ENSG00000196141_11 (sequence is synthesized)
gaacaactattcctcaagaactccctgcagctccctgctgcctctgctgaatgcgcacgcagcaacctctgggaaacagagtaacttttcccgaaaatcatccactcacaataagccctc

SEQ ID NO: 700456 - DNA, 120 bp, Artificial Sequence
  ENSG00000196141_12 (sequence is synthesized)
tgaaggcaaagcggcaaaccccaaaatggtgagcagtctccccagcaccgccgacccctctcaccagaccatgccggccaacaagcagaatggatcttctaaccaaagacggagatttaa

SEQ ID NO: 700457 - DNA, 120 bp, Artificial Sequence
  ENSG00000196141_13 (sequence is synthesized)
tccacagtatcataacaacaggctaaatgggcctgccaagtcgcagggcagtgggaatgaagccgagccactgggaaagggcaacagccgccacgaacacagaagacagccgcacaacgg

SEQ ID NO: 700458 - DNA, 120 bp, Artificial Sequence
  ENSG00000196141_14 (sequence is synthesized)
cttccggcccaaaaacaaaggcggtgccaaaaatcaagaggcttccttggggatgaagacccccgaggccccggcccattctgaaaagccccggcgaaggcagcacgctgcagacacctc

SEQ ID NO: 700459 - DNA, 120 bp, Artificial Sequence
  ENSG00000196141_15 (sequence is synthesized)
ggaggccaggcccttccggggtagtgtcggtagggtttcacagtgcaatctctgccccacgagaatagaagtttccacagatgcagcagttctctcagtcccggctgtgacgttggtggc

SEQ ID NO: 700460 - DNA, 120 bp, Artificial Sequence
  ENSG00000196141_16 (sequence is synthesized)
ctgagctaggaggaaaaagagcagttttcactcagttttggttccctgcccgaggtgctgacccaattcgctgccaaaagagtgtcaatcagaatatacaaatcccgtatggttgtgtca

SEQ ID NO: 700461 - DNA, 120 bp, Artificial Sequence
  ENSG00000196141_17 (sequence is synthesized)
tcctctcttaatcatttttactaattctaataatcagctctagcttgcttcataattttcatggctttgcttgatctgttgatgctttctctcatcaagactttgcagcattttagccag

SEQ ID NO: 700462 - DNA, 120 bp, Artificial Sequence
  ENSG00000196141_18 (sequence is synthesized)
gcagtatttactcattattaggaaaatcaagatgtggctgaagatcagaggctcagttagcaacctgtgttgtagcagtgatgtcagtccattgattgtctttagagagttaatgttaca

SEQ ID NO: 700463 - DNA, 120 bp, Artificial Sequence
  ENSG00000196141_19 (sequence is synthesized)
aaaaagaattcttaataatcagacaaacatgatctgctgaggacacatgcgcttttgtagaatttaacatctggtgtttttctgaaaaaatatatatacatatattgctttatttgaaac

SEQ ID NO: 700464 - DNA, 120 bp, Artificial Sequence
  ENSG00000196141_20 (sequence is synthesized)
aaattaaaatatgctgcatttgacacctggctagtttcttttattgatacccacctagttattgaatgtactgtttagtgctttcaaaaaaaactttagagactagaggttgtggtgcaa

SEQ ID NO: 700465 - DNA, 120 bp, Artificial Sequence
  ENSG00000196141_21 (sequence is synthesized)
agctgtgtacaataaatactgtttctgttgagacaagtactctttcaggaaaatatatatatgccctttcaattagattacacaaatagatggatatgcaccctgatcatcttagacaca

SEQ ID NO: 700466 - DNA, 120 bp, Artificial Sequence
  ENSG00000196141_22 (sequence is synthesized)
ccatgtggcagttgggcagttggaaacattggttgcaagtactacaaacctcagctgagcctagcttcaacaataagaatttattggttcagtgagtgaaaagtccagttggtccaattt

SEQ ID NO: 700467 - DNA, 65 bp, Artificial Sequence
  ENSG00000196141_23 (sequence is synthesized)
ttcaagccattctcctgcccatattattagtacagacaggatttcaccatgttgtccaggctggt

SEQ ID NO: 700468 - DNA, 120 bp, Artificial Sequence
  ENSG00000196141_24 (sequence is synthesized)
ccacctgctttggcctccgaaactgccggaattacaggcatgagccaccgtacccggccagctcccatctcttaattatcttagctctcctttcctccttgggttgacattgcattcaga

SEQ ID NO: 700469 - DNA, 120 bp, Artificial Sequence
  ENSG00000196141_25 (sequence is synthesized)
attgtggcaaagggccaccatgctcttaagactcaagtctattttccacactgtccagaggagagaagttatcctagtagcttctacacagagcaagtgtctttctcagaaatcccagca

SEQ ID NO: 700470 - DNA, 120 bp, Artificial Sequence
  ENSG00000196141_26 (sequence is synthesized)
aaggtcttgcataccattgctggtaggcctgtctcttaaaccaatcatgaaaggggggagagaagtgaatgggatgaactaatttgcatagactaattagagcccacccctggagcctgg

SEQ ID NO: 700471 - DNA, 120 bp, Artificial Sequence
  ENSG00000196141_27 (sequence is synthesized)
gtgtggccatcttcccagagttcctgagctagatggagaaggggtacttctcagaaagggaaaatggatacccaatggcccaaacccaaaatagccccagttcccctaactttgactaca

SEQ ID NO: 700472 - DNA, 120 bp, Artificial Sequence
  ENSG00000196141_28 (sequence is synthesized)
gggcagtccagtttgggtgccgcttccgttgcactcacatgtcctacatatctgttgactactcacaagtgcaaatgcttattctcaactcaacattaacattttttctggcaacccagg

SEQ ID NO: 700473 - DNA, 120 bp, Artificial Sequence
  ENSG00000196141_29 (sequence is synthesized)
ttcactggttctcttccacagagcggccctgagcagctgagcctgcaagccacgcaagcatctgtttcttcttttgccaagtacaggaggatgtttgctctctctgtagagagctttctg

SEQ ID NO: 700474 - DNA, 120 bp, Artificial Sequence
  ENSG00000196141_30 (sequence is synthesized)
aggtctctgggtgtacccagagatttaatagaaattcttaacgttaagtcacattccaggaaggaaggaagagttgttcgttcaaataagaaagataaatgttcggcactgtaggccctg

SEQ ID NO: 700475 - DNA, 120 bp, Artificial Sequence
  ENSG00000196141_31 (sequence is synthesized)
tttaccccatctgaggccctgaattcatatattacaagacggaaggattttgcacagttttttatgtagcaagattttgctcaccactgaaaaatgtcagtgtaaatgtgaccgctttaa

SEQ ID NO: 700476 - DNA, 120 bp, Artificial Sequence
  ENSG00000196141_32 (sequence is synthesized)
agatgagtcaagtaattcttggaacagggaaaaaaatgaatttgccaggtcaggagttcacctgcctttgtcagagttgaacccaaccactcttgacctcgactcactcccttagggtta

SEQ ID NO: 700477 - DNA, 120 bp, Artificial Sequence
  ENSG00000196141_33 (sequence is synthesized)
agaaagcccaaacacattcctgagcacagagcaaacactcccatgtcactgaaaagaaacaaaagaatgctaaaaagtgctcagacctgatcacattttttccaatattttttccttttt

SEQ ID NO: 700478 - DNA, 120 bp, Artificial Sequence
  ENSG00000196141_34 (sequence is synthesized)
ttttgagacagggtcttgctctatcacctaggctggagtgcatgtttttgagacagggtcttgctctatcacctaggctggagtgcatgatcatggctcactatagccttgaactcctgg

SEQ ID NO: 700479 - DNA, 120 bp, Artificial Sequence
  ENSG00000196141_35 (sequence is synthesized)
actcctgggctcaagccatcctcagcctcccaagttgcgaggactacaggtgtgcaccacaacgtcccagctactttttaaatttttagtagaaacgaggtctcactatggtgcccagac

SEQ ID NO: 700480 - DNA, 120 bp, Artificial Sequence
  ENSG00000196141_36 (sequence is synthesized)
tggtctcgaactccggagctcaagtgatcttcctgctttggcctcccaaagtgttagaattacaggcatgagccacctcgcctggctggtttttgcctttcttatagaccctgggcatgt

SEQ ID NO: 700481 - DNA, 120 bp, Artificial Sequence
  ENSG00000196141_37 (sequence is synthesized)
aagcatttattagtttgcatttttgaaacagtaatttcaatattttagtgccaatgtcaggccgcttaaacactgtattacatatcttcatctgtctggtggaactattggtgtgatcct

SEQ ID NO: 700482 - DNA, 120 bp, Artificial Sequence
  ENSG00000196141_38 (sequence is synthesized)
agagaactgagtcctattctgccattcatttaaagtgttttaaactctaatctctctacttaatgcacagtagtcagattattctcttaaacatttgcctagtagaggttaaaatagttt

SEQ ID NO: 700483 - DNA, 120 bp, Artificial Sequence
  ENSG00000196141_39 (sequence is synthesized)
aatccttatgaagatggaataacttcaaactcacattgtggcacttagatcttccaccaagacttcatccgtgaaatccacacctccctgttgggttcccaattacattccaaatttaca

SEQ ID NO: 700484 - DNA, 120 bp, Artificial Sequence
  ENSG00000196141_40 (sequence is synthesized)
tttcttttgagaatctctgcatactccagctctgtcctgttgatcctattctagaagtgcttaatgcagcaagacacagaaagttaaacgcaaattgctgcaaaattcaccctcagtgga

SEQ ID NO: 700485 - DNA, 120 bp, Artificial Sequence
  ENSG00000196141_41 (sequence is synthesized)
ggactagaaacacaacatgtccaatttaaagctcagttcacaagcagttcaattctgctggcatcagaaaaggagattctaattaaacattcttagggaaggacatcaaatgaggttaat

SEQ ID NO: 700486 - DNA, 120 bp, Artificial Sequence
  ENSG00000196141_42 (sequence is synthesized)
gggaaacgttaccagattaaaagcagttttttgacaaagtaacagatttggaaattctgactctctgaaagccttgatttgaacctcaaacttgatttcaccatgagaagtggggatcaa

SEQ ID NO: 700487 - DNA, 120 bp, Artificial Sequence
  ENSG00000196141_43 (sequence is synthesized)
gggcctgcgcagttcttttcctaaatcgattcggtgctccccaccccgacgcaggcacaggtccgcaaccagatagggagatgcctgaatttcaggctacctttgacaaagctttcttcc

SEQ ID NO: 700488 - DNA, 120 bp, Artificial Sequence
  ENSG00000196141_44 (sequence is synthesized)
tccctccctccctttgcacgctgcatcccacgctgcctgcttaaagcgccctcatgtgtctacagatggtaaaacgtttatttctcaacagacattccagtgatagcatccaatgaccta

SEQ ID NO: 700489 - DNA, 67 bp, Artificial Sequence
  ENSG00000196141_45 (sequence is synthesized)
tttctcaacagacattccagtgatagcatccaatgacctatgtaacggcacccttttttgctgtacg

SEQ ID NO: 700490 - DNA, 83 bp, Artificial Sequence
  ENSG00000196141_46 (sequence is synthesized)
cagtcacttgttcttaagtttcttaagcaaactataaaatagcaaaagaccaaaaaaaaaggaaaaaaagcagttcgcctaat

SEQ ID NO: 700491 - DNA, 120 bp, Artificial Sequence
  ENSG00000196141_47 (sequence is synthesized)
aaaagaccaaaaaaaaaggaaaaaaagcagttcgcctaatacattgttccagcatttccttgaaagtactgagccatctcaattgctctgattttgtgagaaaattatgaagagttgcaa

SEQ ID NO: 700492 - DNA, 120 bp, Artificial Sequence
  ENSG00000196141_48 (sequence is synthesized)
agtcccagtgattctcttgttacttagctaagaatttgaaatgtaatttaaatactattctttacaatccattataaggattttaaaatctttttgcttctttaataaattctaacaaag

SEQ ID NO: 700493 - DNA, 120 bp, Artificial Sequence
  ENSG00000196141_49 (sequence is synthesized)
agttgtgtcagtgaaggaatccagtccgggggccgagctggctgcgccctccgctgcaagcgccggcagcgcggggcgagctccggacggcgcgcggcccaggcagcggctcccgctcgg

SEQ ID NO: 700494 - DNA, 120 bp, Artificial Sequence
  ENSG00000196141_50 (sequence is synthesized)
caggggccgccaccgccgcggcgcctcccctggcgaccgcgcccccgggccccggctccggcccgggacggaggagccggcgctcgacacagagagctcttcagaaaccaggctgctttc

SEQ ID NO: 700495 - DNA, 120 bp, Artificial Sequence
  ENSG00000196141_51 (sequence is synthesized)
agcactttttccgcgcctgatttttcaggtcattttcgaatgggctatctttgcttacattttgagcttggatcctctccagaaagcattactaccttctaaaaggaaaaacatctcgta

SEQ ID NO: 700496 - DNA, 120 bp, Artificial Sequence
  ENSG00000196141_52 (sequence is synthesized)
ggagcaaagttcattttctcgggtaggagaagatgattctcttgcaacacgtgcggattgtgacaaaatctttcattaacaaggggagtttcggtgaagtggaggtttggggaaaggcga

SEQ ID NO: 700497 - DNA, 120 bp, Artificial Sequence
  ENSG00000196141_53 (sequence is synthesized)
ggaagtcggtctggagcaagcaagcaaagtgcggaagctgtactgggattcttctagaaagtggggtgggaaaggagctagggagggcgtgtggagggacgagatctgtgtcagaacgtg

SEQ ID NO: 700498 - DNA, 120 bp, Artificial Sequence
  ENSG00000196141_54 (sequence is synthesized)
cgtgtgagcggatacaaaacccgagagaggcgtgagcagcgctgtgtttgcgagcgggagcgaggggcgccggctggggtgtgtgctcctgagctcttcagaaaccaggctgctttcagg

SEQ ID NO: 700499 - DNA, 120 bp, Artificial Sequence
  ENSG00000196141_55 (sequence is synthesized)
aaagtcttcagtaaatagtttttctgcatgcactgattttcctgaggccattgtggagagagttatctgtgggcttgagaagctgctctgccacaccagtaaggatcagggaaagaaaat

SEQ ID NO: 700500 - DNA, 120 bp, Artificial Sequence
  ENSG00000196141_56 (sequence is synthesized)
acttaggccacaccgttgcagtctttgattgcatgccagtctgaagcattttatggacccgttttgccatagctcttcagaaaccaggctgctttcaggaacattgctgtggattcccag

SEQ ID NO: 700501 - DNA, 120 bp, Artificial Sequence
  ENSG00000196141_57 (sequence is synthesized)
gtgagaatatgtattccccaatttgagaatctgggttgggcgccatggtgctgatcgaggattggcagcccctttcctaatatctgttgagatagaacagctcctaaagttggaccatgg

SEQ ID NO: 700502 - DNA, 120 bp, Artificial Sequence
  ENSG00000196141_58 (sequence is synthesized)
aaaggaaaagcactttaaagaatcagactcatagcaattgatccctgcaaaacatggctggtggacagaccaatatgatctatgcagttagatcagttgttcccaacaaaagcaataatg

SEQ ID NO: 700503 - DNA, 120 bp, Artificial Sequence
  ENSG00000196141_59 (sequence is synthesized)
atggctgaactcaatactcatgtgaatgtcaaggaaaaggtaagatcaagttatacgttggctcacagaaactccaaactaggtaatgcagttcctagcaggtaaaaactcaattacagt

SEQ ID NO: 700504 - DNA, 120 bp, Artificial Sequence
  ENSG00000196141_60 (sequence is synthesized)
ggagaaagggaaagtggttttgggggatacgtagtaagtttgccacaacagtaaactgttcagcagaaagaatcataagtaacatttactgaaagcatgttaagcatatgacactcattt

SEQ ID NO: 700505 - DNA, 120 bp, Artificial Sequence
  ENSG00000196141_61 (sequence is synthesized)
tttcatttactcttgaccataaccccataaagaagatactgttgttatttccattttacagaggtggaaattgagaaacagagaagtaatttggctaagttaacgtagctggtaaacagc

SEQ ID NO: 700506 - DNA, 120 bp, Artificial Sequence
  ENSG00000196141_62 (sequence is synthesized)
agagctgggatttgaacccatgcagtgtgccattccaccgttcatactcttcacccccaggctgggttacatctaagagcaagggtattatattacctcttcagaaatggactcagagag

SEQ ID NO: 700507 - DNA, 120 bp, Artificial Sequence
  ENSG00000196141_63 (sequence is synthesized)
agacatccagtctatcacctggtggtcacgctgggcagcctttgaagtttctttcaacgctgagagttcatgactctgaaaatccccacttctcatgatttgttggagactgattccact

SEQ ID NO: 700508 - DNA, 120 bp, Artificial Sequence
  ENSG00000196141_64 (sequence is synthesized)
tcagagctctttccaagtctatgctgcgtcctccactgagggtcagaatccctcacttgccacatatgctgccttgtaatgttagctcttaaggatcataaaccatagaccatgaagata

SEQ ID NO: 700509 - DNA, 120 bp, Artificial Sequence
  ENSG00000196141_65 (sequence is synthesized)
tggtttgctagtggttgtataggcaagtgggagagcctggacaggagcccaagccaccacagtgctggtgcaccttccacagcatcaccccacagccttctctggactgtaaaccatgtg

SEQ ID NO: 700510 - DNA, 120 bp, Artificial Sequence
  ENSG00000196141_66 (sequence is synthesized)
aaggcaggagtttgtctttcatctctttgtatcctcaccataccaaaaatagagtgaaggatgagagaagtgacatttgtgaagccattactattttttctttcacttagcaacagggta

SEQ ID NO: 700511 - DNA, 120 bp, Artificial Sequence
  ENSG00000196141_67 (sequence is synthesized)
atagacccaaacaccactctagatgcctggggtatggccctgaacatgtagatgaagttcctgctcccatggagctcacattttagggcagggaagcagagaataaacacaagaatatct

SEQ ID NO: 700512 - DNA, 120 bp, Artificial Sequence
  ENSG00000196141_68 (sequence is synthesized)
aaatgaacacagttgttccaggcggtgataacaactgtggagaaaacagcagggcggtgtgatgaaggcaaggggaggtggctcctctgtgtggagtggtcagggaagccctttggagga

SEQ ID NO: 700513 - DNA, 120 bp, Artificial Sequence
  ENSG00000196141_69 (sequence is synthesized)
ggtgacatttgattgagataaagatggggaaagaaacaaccatacaaagatctgaggacagagaattccagacagagagaaaagcaaagcagatgcctaaggttgactaagttgaatgtg

SEQ ID NO: 700514 - DNA, 120 bp, Artificial Sequence
  ENSG00000196141_70 (sequence is synthesized)
tttgatgagcaggtggtcagtgtggtccaggtgtggtagacaaaggtgattggtgatgggagatgaagtccaagaataccacttagaatcctggctgtctacccaggtccgtggatctcc

SEQ ID NO: 700515 - DNA, 120 bp, Artificial Sequence
  ENSG00000196141_71 (sequence is synthesized)
aagggatcgcggttagaatccatgggtccatgaatgtagatgagaacaaatacatttttatcttcactaacatctaaatgaaatttaccgtttcctccagtcatgaatgtaggcaaaggc

SEQ ID NO: 700516 - DNA, 120 bp, Artificial Sequence
  ENSG00000196141_72 (sequence is synthesized)
tcaagagtatttttcacactttacatttcctgtagacattataaatcatatttcctcaattataacagaagctcctaaatccctcatggcacctaacccagtgctgagaagactgcagtg

SEQ ID NO: 700517 - DNA, 120 bp, Artificial Sequence
  ENSG00000196141_73 (sequence is synthesized)
caccgcgcccggcctaaacagttttcttaaaatactccagttctgttcatgaacttcgtcaaatacactgacacctgccaacttaaaaccgcaaaagaaaatcaattccatatattaaat

SEQ ID NO: 700518 - DNA, 120 bp, Artificial Sequence
  ENSG00000196141_74 (sequence is synthesized)
tgaaaatcacaaatcagattgcttaatgtaccaaattctctgtttaaataatgaacacgctcaaattatcttgatcattgcaaaacttaatcctaaatttaacataaaatattaacattc

SEQ ID NO: 700519 - DNA, 120 bp, Artificial Sequence
  ENSG00000196141_75 (sequence is synthesized)
gtgtttgcgagcgggagcgaggggcgccggctggggtgtgtgctcctgagctcttcagaaaccaggctgctttcaggaacattgctgtggattcccagttcaagcaaagtgatgtaatac

SEQ ID NO: 700520 - DNA, 120 bp, Artificial Sequence
  ENSG00000196141_76 (sequence is synthesized)
ccaagaacaggaaagtaaacctaagagcattaatgggtttcagagaaacgaaagtgaaactttattactgcctacacaatcaaacaggagggagaaaggagacaagcaagtcagaaagcg

SEQ ID NO: 700521 - DNA, 120 bp, Artificial Sequence
  ENSG00000196141_77 (sequence is synthesized)
gtgtttgcgagcgggagcgaggggcgccggctggggtgtgtgctcctgagctcttcagaaaccaggctgctttcaggaacattgctgtggattcccaggtgaccaaggccaccaaccccc

SEQ ID NO: 700522 - DNA, 120 bp, Artificial Sequence
  ENSG00000196141_78 (sequence is synthesized)
tgctgattactcagccacgcccaagatcctgctactaccctggtttctggctccacattcgtcactattgagatgacttactggtcacagtaaaagcaagttgataaaggtggccagtgg

SEQ ID NO: 700523 - DNA, 120 bp, Artificial Sequence
  ENSG00000196141_79 (sequence is synthesized)
ccagctttcagacaacacatgactaagacagaatgagaccactctagttgcctcatgggaaactcgggaaaagactgcaaaaacaacattgtttctccctttggaattctggagttataa

SEQ ID NO: 700524 - DNA, 120 bp, Artificial Sequence
  ENSG00000196141_80 (sequence is synthesized)
ggcagaggtcccccatcttcccgaactggcctattccactagaagcaagatggctgaactcaatactcatgtgaatgtcaaggaaaagatctatgcagttagatcagttgttcccaacaa

SEQ ID NO: 700525 - DNA, 120 bp, Artificial Sequence
  ENSG00000196141_81 (sequence is synthesized)
ctagccaggtcagcactaagactgagcgtggagcctcccagcaacagggctggaaagatccccaccaggtcagcactgcagtggacaccggaagagcagagtgaacgcatccacgggggt

SEQ ID NO: 700526 - DNA, 120 bp, Artificial Sequence
  ENSG00000196141_82 (sequence is synthesized)
agagctataccttccctaagataagaaggatgaagagctggcattcactaacaggaccctgaaggcaaaaacactgggcagtttcacaaaaagggaacaagtagtctctctgaagggcct

SEQ ID NO: 700527 - DNA, 120 bp, Artificial Sequence
  ENSG00000196150_0 (sequence is synthesized)
agccctttgtctgaaggtgctgcgggatgccgttccttcgcgcgtgaggctgcggctctgacgccccataggctccttcaatttccgtgatcctcggagtccccaggagaccaggtgatg

SEQ ID NO: 700528 - DNA, 120 bp, Artificial Sequence
  ENSG00000196150_1 (sequence is synthesized)
gcagcagccagactcctgccagtgccggcaggaccccagcccctgtcgttccaggccaagctgaccttcgaggatgtggctgtgctcctctcccaggatgaatgggaccgcctgtgccct

SEQ ID NO: 700529 - DNA, 120 bp, Artificial Sequence
  ENSG00000196150_2 (sequence is synthesized)
gctcagaggggtctctacagaaatgtgatgatggaaacctatgggaatgtagtctcattgggacttccaggatccaagcctgacataatctcccagctggagcgaggggaagatccctgg

SEQ ID NO: 700530 - DNA, 120 bp, Artificial Sequence
  ENSG00000196150_3 (sequence is synthesized)
gtcctggacaggaagggggctaagaagagccagggcctgtggagtgactactcagacaacctcaaatatgaccacactacagcctgtacacaacaagacagtttatcttgtccatgggaa

SEQ ID NO: 700531 - DNA, 120 bp, Artificial Sequence
  ENSG00000196150_4 (sequence is synthesized)
tgtgaaaccaagggagagagtcaaaatacagacttgagtccgaagccattaatttcagagcaaacagtgattctggggaaaacacccttggggaggattgatcaagaaaataatgaaaca

SEQ ID NO: 700532 - DNA, 120 bp, Artificial Sequence
  ENSG00000196150_5 (sequence is synthesized)
aagcaaagcttctgtctgagtccaaactctgttgaccaccgtgaagttcaggtcttaagccaaagcatgccactcactccgcaccaggcagtgcctagtggagagaggccctacatgtgt

SEQ ID NO: 700533 - DNA, 120 bp, Artificial Sequence
  ENSG00000196150_6 (sequence is synthesized)
gttgagtgtgggaagtgctttggccggagttcccacctccttcagcatcagcgtatccacactggagagaagccctatgtgtgcagtgtatgtgggaaggccttcagccagagctcagtc

SEQ ID NO: 700534 - DNA, 120 bp, Artificial Sequence
  ENSG00000196150_7 (sequence is synthesized)
cttagtaaacacaggagaattcacacaggtgagaagccctatgagtgtaatgagtgtggaaaagcctttagagtgagctcagatcttgctcagcatcacaagatacatacaggagagaag

SEQ ID NO: 700535 - DNA, 120 bp, Artificial Sequence
  ENSG00000196150_8 (sequence is synthesized)
cctcacgaatgtcttgagtgtcggaaagccttcactcaactctcacatctcattcagcaccagcggatccacacgggagaaaggccatatgtgtgtccgttgtgtgggaaagccttcaac

SEQ ID NO: 700536 - DNA, 120 bp, Artificial Sequence
  ENSG00000196150_9 (sequence is synthesized)
catagcactgttctgcggagccaccagagggtacacactggggagaagcctcacaggtgcaatgagtgtgggaaaaccttcagtgtgaagaggacactgctgcagcaccagaggatccac

SEQ ID NO: 700537 - DNA, 120 bp, Artificial Sequence
  ENSG00000196150_10 (sequence is synthesized)
accggggagaagccctacacgtgcagcgagtgtgggaaggccttcagcgaccgctcagtcctcattcagcaccacaacgtgcacaccggggagaagccctatgagtgcagtgagtgtggg

SEQ ID NO: 700538 - DNA, 120 bp, Artificial Sequence
  ENSG00000196150_11 (sequence is synthesized)
aagaccttcagccaccgctccacactgatgaatcacgagcggatccacaccgaggaaaagccctatgcatgctacgaatgtgggaaggccttcgttcagcactcacacctgatccagcac

SEQ ID NO: 700539 - DNA, 120 bp, Artificial Sequence
  ENSG00000196150_12 (sequence is synthesized)
cagagagtccacactggggagaagccctatgtgtgtggtgaatgtgggcacgccttcagtgcacgccggtctctgatccagcatgagagaatccacacaggtgaaaagcccttccagtgc

SEQ ID NO: 700540 - DNA, 120 bp, Artificial Sequence
  ENSG00000196150_13 (sequence is synthesized)
acagaatgtggcaaagccttcagcctgaaagcaactctgattgtgcacctgaggacccacacgggcgagaagccatatgagtgcaatagctgcgggaaggccttcagccagtactcagtg

SEQ ID NO: 700541 - DNA, 120 bp, Artificial Sequence
  ENSG00000196150_14 (sequence is synthesized)
ctcatccagcaccagcggatccacacaggcgagaagccctatgagtgcggggagtgtgggcgtgccttcaaccagcatggccacctaatccagcaccagaaagtgcacagaaagttgtga

SEQ ID NO: 700542 - DNA, 120 bp, Artificial Sequence
  ENSG00000196150_15 (sequence is synthesized)
cccatggctgacacaagaatccattctcacagaaactgcatgtggaaccacaagcagccttcagcccaagagaagtctctgttaactctataggaagcttttctttggcgattcagtgtc

SEQ ID NO: 700543 - DNA, 120 bp, Artificial Sequence
  ENSG00000196150_16 (sequence is synthesized)
acaaaataactccagaaagaagcacttagcgtgctgttcctgtggaaaaacttcagagactacctgttttattttcctcaacatcttgaagttatgttggagagtaatcatacaattgta

SEQ ID NO: 700544 - DNA, 120 bp, Artificial Sequence
  ENSG00000196150_17 (sequence is synthesized)
gagaattttggtaaaaaacagccataattctttaacattagtttatttgaactaagggaatttaaggcataagaaccattatcccaataaaatcttacattccaaataaagttctttttc

SEQ ID NO: 700545 - DNA, 120 bp, Artificial Sequence
  ENSG00000196150_18 (sequence is synthesized)
taagaacattacatgcccttcctaaatatcaattaaccatactaattattgcacttaaaatttgaaagtcggactattttcagtattctcttaaaagactaaagtattgtatggataaag

SEQ ID NO: 700546 - DNA, 120 bp, Artificial Sequence
  ENSG00000196150_19 (sequence is synthesized)
tgatataaaaagatattttcatcaagcatcatgtaaaatggttggaaatcctaagtgtgtggatttccatcctaagtgtgtggagtcctgttttgtatgaaacaaggaaaaagcttatat

SEQ ID NO: 700547 - DNA, 120 bp, Artificial Sequence
  ENSG00000196150_20 (sequence is synthesized)
aacaaggaaaaagcttatatattagtgagaaattacataaatttaaaaaactttttgtatgtgtgtgtggagatagtcttgctctgttgcccaagctgcagtgcagtggcatgatcttgg

SEQ ID NO: 700548 - DNA, 120 bp, Artificial Sequence
  ENSG00000196150_21 (sequence is synthesized)
agtggcatgatcttggctcactgcagtctccgcccccaccccaggttcaagcttttcttgtgcctcagtctcccaagtaactaggattatagatatgcgccaccacacctggctaatttt

SEQ ID NO: 700549 - DNA, 120 bp, Artificial Sequence
  ENSG00000196150_22 (sequence is synthesized)
ctcctggcctcaagtgatcctcccacctttgcttccgaaagtgttgggattacaggcgtgaggcaccatgcctggcctagaaaaccctttatctggagcttttaactttattcaagatca

SEQ ID NO: 700550 - DNA, 120 bp, Artificial Sequence
  ENSG00000196150_23 (sequence is synthesized)
actttattcaagatcagaaaggttatgctaactttttagtaaaaattcaactcaaaaatgggtattttcctcaaaacttgcccttatgacctgcagatcctgtgccccagaaaccgtgag

SEQ ID NO: 700551 - DNA, 120 bp, Artificial Sequence
  ENSG00000196150_24 (sequence is synthesized)
atgtctcaattcccatgcaggcaaaggaggggagcttcacactcagcagacctcatagctgttacaccaagtgggtacctctttacatcttatggtatttcccccaaaacaatgctgaaa

SEQ ID NO: 700552 - DNA, 120 bp, Artificial Sequence
  ENSG00000196150_25 (sequence is synthesized)
atactgttctttggtagatatatttaaaacatacatttctcaaattcagatagctcttttttactatctctagtatttctattcctatatttgaaggggttttttttttcatttttttac

SEQ ID NO: 700553 - DNA, 120 bp, Artificial Sequence
  ENSG00000196150_26 (sequence is synthesized)
ggttcaagagtccagtatccattgccatattactatgatgaagatgaatctagtttattcataattaaaaatttgtattcagaattatttgttctgttttaagcatactttttttttttt

SEQ ID NO: 700554 - DNA, 120 bp, Artificial Sequence
  ENSG00000196150_27 (sequence is synthesized)
ggattacaggcgtgtgccaccgcacccggccaaggatacagttcttgaaaccgaatcagaaccatttctagtagcagccagctgcaaacgaaacaaatgtatgaggttcaagccacttga

SEQ ID NO: 700555 - DNA, 120 bp, Artificial Sequence
  ENSG00000196150_28 (sequence is synthesized)
ggttcaagccacttgaaattctcaacatgttaagtgcctgagatagagaagggctgtcttcaccccaggcccccgcccccaacatctgtcagtttggtggggaggaaatagtcaccagga

SEQ ID NO: 700556 - DNA, 120 bp, Artificial Sequence
  ENSG00000196150_29 (sequence is synthesized)
tattgatcctttttgtttgttttaaagacggtcttgctctgtcaccaggttggagtgcagtggtgccatcatggctcaccgctgcctcaaactcctgggctgaagcagtcctcccacctc

SEQ ID NO: 700557 - DNA, 120 bp, Artificial Sequence
  ENSG00000196150_30 (sequence is synthesized)
accttcccaaaaggttaggattacaggcatgagctgctgtgcccatccaggcattgatccttaagtccacagcaaaacaccacgatgtagacaaaagcttgttcccccttctatgtacag

SEQ ID NO: 700558 - DNA, 120 bp, Artificial Sequence
  ENSG00000196150_31 (sequence is synthesized)
acactgacaacagtgaattattaactccagagaggaactggtaactgattggttaacttgagaaaggagctgacatcactggtgttttacttcagagcaactgaaaccactgaagtgaaa

SEQ ID NO: 700559 - DNA, 120 bp, Artificial Sequence
  ENSG00000196150_32 (sequence is synthesized)
ttccagaggaactaatattactgaggtgttacttcagagggactgagatcactgaagtgaaacctcagatagctcagataaccaaggtgttaaccttagaggtgttgccattctgtgagg

SEQ ID NO: 700560 - DNA, 120 bp, Artificial Sequence
  ENSG00000196150_33 (sequence is synthesized)
tgttgtttcagatagataaaataactaaggtgttagttcagagaagacaagagcttaactgtttctttggagaagagctgagatcactgaggcgtcacttcagaaagaaagtgagacaat

SEQ ID NO: 700561 - DNA, 120 bp, Artificial Sequence
  ENSG00000196150_34 (sequence is synthesized)
ttttgttacttcagaggatctgagtacactgaggtgtttcatcagagaggaggtgagatcactgggtgttacttctgaaaggaattgacatcactagtgggtactgcagagtagctctga

SEQ ID NO: 700562 - DNA, 120 bp, Artificial Sequence
  ENSG00000196150_35 (sequence is synthesized)
ccactgaggtttacttcagaggagctgaaataacggaaatgggatcactaaggtattactttagagattagatcattgaggtaattcttcagagaagctgagatcacagaggtgtttctt

SEQ ID NO: 700563 - DNA, 120 bp, Artificial Sequence
  ENSG00000196150_36 (sequence is synthesized)
cagagaagttgaaatcactaatgtgaaactctagaagaatggaggtcactgagtgctatttcataaaggaagtgaaatcactatattgtaccatcggaaagatgagaatgctgagatgtt

SEQ ID NO: 700564 - DNA, 120 bp, Artificial Sequence
  ENSG00000196150_37 (sequence is synthesized)
acttaggagctgagatcactgaggttctgcttcagagaaaagctgataccaatgagatgttacttaagggaggagctgaggttactgaggtattattcaggaccaagatggtgtccctca

SEQ ID NO: 700565 - DNA, 120 bp, Artificial Sequence
  ENSG00000196150_38 (sequence is synthesized)
ggtgttagaagctgagatcacagagatgttacttaagagaggctgagactgctgatgtgattcttcagaaaggaaatgagatcactaagctgttaactttagaaaggagatgaaataact

SEQ ID NO: 700566 - DNA, 120 bp, Artificial Sequence
  ENSG00000196150_39 (sequence is synthesized)
gagttgttcactggagttgagatcacacaggtgttaacttcagaggtggctgaaatcactaaggtgattcttcagagaaaggttgagatcactaggggtgatgctttagaaagaggttac

SEQ ID NO: 700567 - DNA, 120 bp, Artificial Sequence
  ENSG00000196150_40 (sequence is synthesized)
tttagggaaaagctatgatcactgagaagttacttcagaatggagctgagatcactgaggtaacagtccaaagaggaactgagattactgaggtgttacttcagagccaagagatcaccc

SEQ ID NO: 700568 - DNA, 120 bp, Artificial Sequence
  ENSG00000196150_41 (sequence is synthesized)
aggtacctagatgagatcactgagatgaaagtccagaaacctgaggtcacctcaatattaattgagagaaaatgagaacactgtggtgctatcttaaatcttctatgaaaggaagctgcc

SEQ ID NO: 700569 - DNA, 120 bp, Artificial Sequence
  ENSG00000196150_42 (sequence is synthesized)
aacctgtgttagctgagtccacagctggcatgtgactcagtggcagctgctcagtgcccactactattcaggccccaatttctaatcattaaagacaaagtcatattccaattaagatga

SEQ ID NO: 700570 - DNA, 120 bp, Artificial Sequence
  ENSG00000196150_43 (sequence is synthesized)
gaataattaaattcaatatacaggaacatttgtttagaaagactgtgtatcacaggacaacgtaagttacacagtacaagttattctggattccaataacctagggttttcagggaaatc

SEQ ID NO: 700571 - DNA, 120 bp, Artificial Sequence
  ENSG00000196150_44 (sequence is synthesized)
cttccaaaaagtatagtttttttcctgcattcttaaaatgagcttaatatcattctgcctgttcttgctatgtcaggctgccattgatccactggtgagaatgcaggctcaggtgtccac

SEQ ID NO: 700572 - DNA, 120 bp, Artificial Sequence
  ENSG00000196150_45 (sequence is synthesized)
ggagccaggaagtgggcttcaatgcccttctttctgaggaggattcccaggctacattttcttgccactcacctcctcctctccaaggagaaagaggtggcacatgacctactggaacat

SEQ ID NO: 700573 - DNA, 120 bp, Artificial Sequence
  ENSG00000196150_46 (sequence is synthesized)
gtgggctatctacctttttgggatataacatcaaaggccagggccctgaattttcatgctgataacagtcttctcaaccattatcttctgcctgatttgtcagcagcattccacctttat

SEQ ID NO: 700574 - DNA, 120 bp, Artificial Sequence
  ENSG00000196150_47 (sequence is synthesized)
cttctgcctgatttgtcagcagcattccacctttattttggatttgttttattcagaagtctgtatattttaggtatttaaatacttctctttggctgggtgcaatggctcacacctgta

SEQ ID NO: 700575 - DNA, 120 bp, Artificial Sequence
  ENSG00000196150_48 (sequence is synthesized)
cttgagcccaggactttgagaccagcatggcgaaaacccgtctctacaaaaaaaaaattagctgggtgttgtggcttgcgcctgtagtcccagatacgtgggaggctaaggtgggaggat

SEQ ID NO: 700576 - DNA, 120 bp, Artificial Sequence
  ENSG00000196150_49 (sequence is synthesized)
tgattgggagttcaagactagtgtgctgtgatcatactatctagcctggacaacagagagagaccttgtcacaaaaaatacgtatatatttcttttaaaattgtttcttctaacagctat

SEQ ID NO: 700577 - DNA, 120 bp, Artificial Sequence
  ENSG00000196150_50 (sequence is synthesized)
taagaatttgaaacttggttctcttcaaattttctattattttggaaaacattttagtctgcctggaatttctgtgtataatctgacgctttccaataaaaaagtaatgactggaacaag

SEQ ID NO: 700578 - DNA, 120 bp, Artificial Sequence
  ENSG00000196150_51 (sequence is synthesized)
tcacactcagcagacctcatagctgttacaccaatggcttctgctgtggctatcccatgtccggtgtgaggagacagtggtatgactcatccctttgtgtccggaattggtgggttcttg

SEQ ID NO: 700579 - DNA, 120 bp, Artificial Sequence
  ENSG00000196150_52 (sequence is synthesized)
cgcgcgtgaggctgcggctctgacggtgtgtaacttgtatgtggaaggaccaacgtagcatttgcctcagcaacatccttgaatctgcaccctcacccacatccattcttatcagcccca

SEQ ID NO: 700580 - DNA, 120 bp, Artificial Sequence
  ENSG00000196150_53 (sequence is synthesized)
cttcgcgcgtgaggctgcggctctgacggtgagtggggggcgcgtgtcgtcgccggccaggaccctctcccatcacggacaccggagccgccccataggctccttcaatttccgtgatcc

SEQ ID NO: 700581 - DNA, 120 bp, Artificial Sequence
  ENSG00000196150_54 (sequence is synthesized)
caccttagcaggcctcgtctatgtatctgcgtattggactggggtgggggcttctcagggtacggggcctgggacaggctggtcctggaggtttgctctcatcacctctctgggtgctca

SEQ ID NO: 700582 - DNA, 120 bp, Artificial Sequence
  ENSG00000196150_55 (sequence is synthesized)
gctccagcagaagatcagtcctgtccattttcatgtccccacaagtggcttgggcagggggagggggctctgtaaatgttgtgtaaacaaagacttccctccccacgagcaggacttcca

SEQ ID NO: 700583 - DNA, 120 bp, Artificial Sequence
  ENSG00000196150_56 (sequence is synthesized)
ggccgagtgggcgacggagacggtcgctgttcagtgacgccccctgtcgggagcacgccgggccggacacagcgaagagcggctgcgcctcggacctcgcagcactcagcctcctaagtg

SEQ ID NO: 700584 - DNA, 120 bp, Artificial Sequence
  ENSG00000196150_57 (sequence is synthesized)
ggaggaataacctcacgcaagtcatcaaacaagaggacttcagtgttgcaacgaaggaagagaaagggcccctgagaaggcgacattcgcactgcagcggcgcagggaccagccaggcgg

SEQ ID NO: 700585 - DNA, 120 bp, Artificial Sequence
  ENSG00000196150_58 (sequence is synthesized)
ggtcgttcccagcagcgggaaccgcaagggcaaaaggctcggaggggggaacgagctcgagttccaggacggccgaagccagcgcaagtcgaggagggactgcggggccggcaggggtgt

SEQ ID NO: 700586 - DNA, 120 bp, Artificial Sequence
  ENSG00000196151_0 (sequence is synthesized)
ggggcctactccctccgctctgggtcacagcgggcgttcggggggcggggcctgttccctccgctctgggtccccgcgggcgttcgggggcggggcctgttccctctgctctgggtctcc

SEQ ID NO: 700587 - DNA, 120 bp, Artificial Sequence
  ENSG00000196151_1 (sequence is synthesized)
gccggcgcccgccccgccagcctcacctgcgcggcacgtgacccgcaccgcccgtgggcaccttgaaggcggatcccgcgcgcccccgctcctgcaggctgtttttcttcaaataaagaa

SEQ ID NO: 700588 - DNA, 120 bp, Artificial Sequence
  ENSG00000196151_2 (sequence is synthesized)
catggtgaaactgattcacacattagctgatcatggtgacgatgtcaactgctgtgccttctccttttccctcttggctacttgctccttggacaaaacaattcgcctgtactcgttacg

SEQ ID NO: 700589 - DNA, 120 bp, Artificial Sequence
  ENSG00000196151_3 (sequence is synthesized)
tgactttactgaactgccacattctccattgaagtttcatacctatgctgtccactgctgctgtttctccccttcaggacatattttggcatcgtgttcaacagatggtaccactgtcct

SEQ ID NO: 700590 - DNA, 120 bp, Artificial Sequence
  ENSG00000196151_4 (sequence is synthesized)
atggaatactgaaaatggacagatgctggcagtgatggaacagcctagtggcagccctgtgagggtttgccagttttccccagactccacgtgtttggcatcaggggcagctgatggaac

SEQ ID NO: 700591 - DNA, 120 bp, Artificial Sequence
  ENSG00000196151_5 (sequence is synthesized)
tgtggttttgtggaatgcacagtcatacaaattatatagatgtggtagtgttaaagatggctccttggcggcatgtgcattttctcctaatggaagcttctttgtcactggctcctcatg

SEQ ID NO: 700592 - DNA, 120 bp, Artificial Sequence
  ENSG00000196151_6 (sequence is synthesized)
tggtgatttaacagtgtgggatgataaaatgaggtgtctgcatagtgaaaaagcacatgatcttggaattacctgctgcgatttttcttcacagccagtttctgatggagaacaaggtct

SEQ ID NO: 700593 - DNA, 120 bp, Artificial Sequence
  ENSG00000196151_7 (sequence is synthesized)
cactgtgctcctgttctggcttgtgctttttcccatgatgggcagatgctagtctcagggtcagtggataagtctgtcatagtatatgatactaatactgagaatatacttcacacattg

SEQ ID NO: 700594 - DNA, 120 bp, Artificial Sequence
  ENSG00000196151_8 (sequence is synthesized)
actcagcacaccaggtatgtcacaacttgtgcttttgcacctaatacccttttacttgctactggttcaatggacaaaacagtgaacatctggcaatttgacctggaaacactttgccaa

SEQ ID NO: 700595 - DNA, 120 bp, Artificial Sequence
  ENSG00000196151_9 (sequence is synthesized)
gcaaggcgcacagaacatcagctgaagcaatttaccgaagattggtcagaggaggatgtctcaacatggctttgtgcacaagatttaaaagatcttgttggtattttcaagatgaataac

SEQ ID NO: 700596 - DNA, 120 bp, Artificial Sequence
  ENSG00000196151_10 (sequence is synthesized)
attgatggaaaagaactgttgaatcttacaaaagaaagtctggctgatgatttgaaaattgaatctctaggactgcgtagtaaagtgctgaggaaaattgaagagctcaggaccaaggtt

SEQ ID NO: 700597 - DNA, 120 bp, Artificial Sequence
  ENSG00000196151_11 (sequence is synthesized)
aaatccctttcttcaggaattcctgatgaatttatatgtccaataactagagaacttatgaaagatccggtcatcgcatcagatggctattcatatgaaaaggaagcaatggaaaattgg

SEQ ID NO: 700598 - DNA, 120 bp, Artificial Sequence
  ENSG00000196151_12 (sequence is synthesized)
atcagcaaaaagaaacgtacaagtcccatgacaaatcttgttcttccttcagcggtacttacaccaaataggactctgaaaatggccatcaatagatggctggagacacaccaaaagtaa

SEQ ID NO: 700599 - DNA, 120 bp, Artificial Sequence
  ENSG00000196151_13 (sequence is synthesized)
aattgttgatattgtattatttatattttcagtgatctcatttgaatgatttataggtaaatactaatcagacattattaaaagcaaaacaggaaaaaggtaaacttcttaaatttagtt

SEQ ID NO: 700600 - DNA, 120 bp, Artificial Sequence
  ENSG00000196151_14 (sequence is synthesized)
acctataaaaattgtcaattttcattctttaaaaaacacatggacttactataaaagcctttttgtactagtgaaaagaatcttcagctatatagaaataaagttatactttaaattgca

SEQ ID NO: 700601 - DNA, 120 bp, Artificial Sequence
  ENSG00000196151_15 (sequence is synthesized)
agcggcggtggcggcaggtggggaagcgcggctgggcctgctcgcgcggggcgtctgagccctccatttcccggttctaaccgcgcagcagggcccaaccgggaccttgagtgcggcgag

SEQ ID NO: 700602 - DNA, 120 bp, Artificial Sequence
  ENSG00000196152_0 (sequence is synthesized)
aatcaggcgcgtccctctggcgctggagccaggacctggcgttgggcggtacttggacagcggttcttgagctctcgcggttgccggtagattgttgccagttgccagttgccagtcgtt

SEQ ID NO: 700603 - DNA, 120 bp, Artificial Sequence
  ENSG00000196152_1 (sequence is synthesized)
tttcggaaagctggcagcggctttttcaccgggttctgcttgaggccgagccaaagagtggctgtgactcgggagacggagtggaacacccggctgggcaggcccggacagctcccgcga

SEQ ID NO: 700604 - DNA, 120 bp, Artificial Sequence
  ENSG00000196152_2 (sequence is synthesized)
cccagcaccgcaggatcagaccgtgcctctgcggggagaggctggagaggaagagtccggcctgggagccgtcagagcagccctgcagaacggggtgggggctgctgtagatagaccctt

SEQ ID NO: 700605 - DNA, 120 bp, Artificial Sequence
  ENSG00000196152_3 (sequence is synthesized)
acgcccagagaactgctgggaggctgtggcgcgaggcgggactcaaatgctggaggaaggagtactgccttccccaggccctgcccttccccaagaggaaaacacaggagaggaaggaat

SEQ ID NO: 700606 - DNA, 120 bp, Artificial Sequence
  ENSG00000196152_4 (sequence is synthesized)
ggctgctggtctcctcacagctgggccccggggatccacattcttcagcagtgtgacggtagcttttgcacaggaaaggtggaggtgcctcgtgtctactccacgggacaggttcaagga

SEQ ID NO: 700607 - DNA, 120 bp, Artificial Sequence
  ENSG00000196152_5 (sequence is synthesized)
ggggataccaggaaagtccaggagccttgtcctactaggacttccagtttcccagcctggcatgaactcccagttggaacaaagggaaggcgcatggatgctggagggcgaagacctgcg

SEQ ID NO: 700608 - DNA, 120 bp, Artificial Sequence
  ENSG00000196152_6 (sequence is synthesized)
aagtccctctccaggctggaagattatatctggatcaccaccagagcaagccctttctgaagcttcattccaagacccatgtgtagagatgccccctggggattcagaccacgggaccag

SEQ ID NO: 700609 - DNA, 120 bp, Artificial Sequence
  ENSG00000196152_7 (sequence is synthesized)
tgaccttgagaagagcttcaatctgagaccagtcctctctccgcaacagagagtgcccgtggaagcgagacctcgcaaatgtgagacacacaccgagagcttcaagaactcggaaatcct

SEQ ID NO: 700610 - DNA, 120 bp, Artificial Sequence
  ENSG00000196152_8 (sequence is synthesized)
gtggcaaagccttcagttactgttcttccctttctcagcatcagaagagccacactggagagaagccctatgagtgcagtgaatgtgggaaggccttcagccagagctcatctctcattc

SEQ ID NO: 700611 - DNA, 120 bp, Artificial Sequence
  ENSG00000196152_9 (sequence is synthesized)
agcaccagaggattcacactggagagaagccttacaagtgcagtgaatgtggaagagccttcagccagaacgccaacctcaccaaacaccagcgaacccacaccggagagaagccctaca

SEQ ID NO: 700612 - DNA, 120 bp, Artificial Sequence
  ENSG00000196152_10 (sequence is synthesized)
gatgcagcgagtgtgagaaagccttcagtgactgctcagctcttgttcagcatcagagaattcataccggagagaagccctacgaatgcagcgactgtgggaaggccttccgtcacagtg

SEQ ID NO: 700613 - DNA, 120 bp, Artificial Sequence
  ENSG00000196152_11 (sequence is synthesized)
caaacctcacgaaccatcagaggactcacaccggggagaagccctacaagtgcagcgagtgtgggaaggccttcagttactgcgcagcgttcattcagcaccagaggattcacaccgggg

SEQ ID NO: 700614 - DNA, 120 bp, Artificial Sequence
  ENSG00000196152_12 (sequence is synthesized)
agaagccctacagatgtgccgcgtgtgggaaggccttcagccagagtgcaaacctcacaaaccatcagaggactcacactggggagaaaccctacaagtgcagcgagtgtgggaaggcct

SEQ ID NO: 700615 - DNA, 120 bp, Artificial Sequence
  ENSG00000196152_13 (sequence is synthesized)
tcagccagagtaccaatctcataatccaccaaaagacccacaccggggagaagccatataaatgtaatgaatgtgggaaattcttcagtgagagctcagccctcattcggcatcatataa

SEQ ID NO: 700616 - DNA, 120 bp, Artificial Sequence
  ENSG00000196152_14 (sequence is synthesized)
tccacaccggagaaaaaccttatgagtgtaatgagtgtggtaaagcgtttaaccagagctcatcccttagtcagcatcagagaatccacacaggcgtgaaaccctacgaatgcagcgagt

SEQ ID NO: 700617 - DNA, 120 bp, Artificial Sequence
  ENSG00000196152_15 (sequence is synthesized)
gtgggaaggccttccggtgcagctctgccttcgttagacatcagagactccacgccggagagtaactaggaacatggtagaagtggagagagtcccggacatgccgactcaggacaggtg

SEQ ID NO: 700618 - DNA, 120 bp, Artificial Sequence
  ENSG00000196152_16 (sequence is synthesized)
ggtgaggatctgagaaatgctaaaggcttgaaagcatctgaagacatctaacttagagtctgcagcccagagccacatgcaaaacaccttcaataaacagccactatttcacatgctgta

SEQ ID NO: 700619 - DNA, 120 bp, Artificial Sequence
  ENSG00000196154_0 (sequence is synthesized)
ttcccctctctacaaccctctctcctcagcgcttcttctttcttggtttggtgcttctgagatgtgggcttgcacacgctgttgctatagtacgtgttgatcctgactgctgtcatggcg

SEQ ID NO: 700620 - DNA, 120 bp, Artificial Sequence
  ENSG00000196154_1 (sequence is synthesized)
tgccctctggagaaggccctggatgtgatggtgtccaccttccacaagtactcgggcaaagagggtgacaagttcaagctcaacaagtcagaactaaaggagctgctgacccgggagctg

SEQ ID NO: 700621 - DNA, 120 bp, Artificial Sequence
  ENSG00000196154_2 (sequence is synthesized)
cttccaagagtactgtgtcttcctgtcctgcatcgccatgatgtgtaacgaattctttgaaggcttcccagataagcagcccaggaagaaatgaaaactcctctgatgtggttggggggt

SEQ ID NO: 700622 - DNA, 120 bp, Artificial Sequence
  ENSG00000196154_3 (sequence is synthesized)
ctgccagctggggccctccctgtcgccagtgggcacttttttttttccaccctggctccttcagacacgtgcttgatgctgagcaagttcaataaagattcttggaagttttgaggctga

SEQ ID NO: 700623 - DNA, 120 bp, Artificial Sequence
  ENSG00000196154_4 (sequence is synthesized)
ggccctgggagtttgctgcccgaatctccagagcttgcgcagcggatcttgcaaatgttcactgcccagagcatgtgttccccactgtgcacaccctcccagccagatcctgactgctgt

SEQ ID NO: 700624 - DNA, 120 bp, Artificial Sequence
  ENSG00000196154_5 (sequence is synthesized)
ggaaaaaatgctgttgttgaggcaaggcctgggaggccctgggagtttgctgcccgaatctccagagcttgcgcagcggatcttgcaaatgttcactgcccagagcatgtgttccccact

SEQ ID NO: 700625 - DNA, 120 bp, Artificial Sequence
  ENSG00000196154_6 (sequence is synthesized)
gtgcacaccctcccagccaggtgcgggggcccactgctctgggctcccccagggagggagcagagtctcgccaagtgctcctggagggatgggagtggagcctggcattctgaacacatc

SEQ ID NO: 700626 - DNA, 120 bp, Artificial Sequence
  ENSG00000196155_0 (sequence is synthesized)
tggtcagccacccctggctggctccaggcccagctccccaatattccccactaggcctcagtgtgtcctcatttctatctgtacctttgccatcctgggccatgcaacctgtagctctcg

SEQ ID NO: 700627 - DNA, 120 bp, Artificial Sequence
  ENSG00000196155_1 (sequence is synthesized)
gcctcttctgtctcctttcaggctgagtctctgaatctgtctccatttgtgactctggtttccatgggatacatagatgtggagcctcaggagggcaggggtagtgtgatcagtgtcagg

SEQ ID NO: 700628 - DNA, 120 bp, Artificial Sequence
  ENSG00000196155_2 (sequence is synthesized)
cgccccaaagcatttattctgtgccaggccctgtgctggatgctgaaagtacggaagtggataacatacagtctctgtttccatgaagcctacaatgcacattctctgtggagtggagaa

SEQ ID NO: 700629 - DNA, 120 bp, Artificial Sequence
  ENSG00000196155_3 (sequence is synthesized)
accagggcccagccctgcctctatctcagtatggctgtacctcccctgaatctgcctgctgtgcccagggtgccaggtcagctatagcctgtggcttgaggctcttctttgcctctggca

SEQ ID NO: 700630 - DNA, 120 bp, Artificial Sequence
  ENSG00000196155_4 (sequence is synthesized)
ttcacaggggtatgtgtgcccgccagcaggtcccccccggctcttagggctcctgggggacttggctggtgggtgctggtgggcagcagaaggggagggagggagcagaaggcagtgact

SEQ ID NO: 700631 - DNA, 120 bp, Artificial Sequence
  ENSG00000196155_5 (sequence is synthesized)
cagtgggggtggccctgggacagaactggggaggaagccaaggttggatgatgcttcctgaagccaggagggtgggaagagaggtctggctgggagttagggatggagcaggacaactcc

SEQ ID NO: 700632 - DNA, 120 bp, Artificial Sequence
  ENSG00000196155_6 (sequence is synthesized)
aaggctcccctctggcagccagacctgctcatgaagaaggctcctcggtagctgcctgaaagtctggactctgggggctgggctgggctgggtggggagattgctgttggtcccactgtg

SEQ ID NO: 700633 - DNA, 120 bp, Artificial Sequence
  ENSG00000196155_7 (sequence is synthesized)
cctgttgtaatccccaggttcatgaaagaggtgcctgccttagagccagggaagccgttgcacccggtgccccctctccccagggaccatgggcctgggcacactgtggggctcagggtc

SEQ ID NO: 700634 - DNA, 120 bp, Artificial Sequence
  ENSG00000196155_8 (sequence is synthesized)
ttctcctggtcgcagagctgaccttcccacaatcttcccacaaattctggggagtgtcgggccaggcccacatgccctaaagggacctcaaatcgcacagctacccacttgggtagcttt

SEQ ID NO: 700635 - DNA, 120 bp, Artificial Sequence
  ENSG00000196155_9 (sequence is synthesized)
catcagttcaggattccctgactgcgggtgaaatgagggggcagggcaccaacacagcccgagtgctggcagcgggtgaacgtataacacagggagtcttccccagtcctcacggcaacc

SEQ ID NO: 700636 - DNA, 120 bp, Artificial Sequence
  ENSG00000196155_10 (sequence is synthesized)
ccaggagaaaaatgactttccatttttacaggtgaggagggtgaggctcaaagagcagagttcctggagcgcccccagcaggtaagtggagaagccaggcctgggctgggggctctggct

SEQ ID NO: 700637 - DNA, 120 bp, Artificial Sequence
  ENSG00000196155_11 (sequence is synthesized)
ccagaaccccacctcagcaccagcctcctgcaccggactttgtggagaagggggtaagggggtgccagggatggcaaaggggtagaggatctggtggactctggcaggcctgggtcagct

SEQ ID NO: 700638 - DNA, 120 bp, Artificial Sequence
  ENSG00000196155_12 (sequence is synthesized)
ccacccattggtctcactcccacccggatggcagccccatcccacgtgggatcatgcgacctgtctctgggtgcccgcggcgaggcagcaccccgcttccctacacagaaggccttcccc

SEQ ID NO: 700639 - DNA, 120 bp, Artificial Sequence
  ENSG00000196155_13 (sequence is synthesized)
tcccgtcggctcattcagccgcggaagcccctgggagaccccgccccgccccgtcccgcggtgccccccgcgcactcaccctcgctcacccacgcggccttcctggcgggagagcgcttc

SEQ ID NO: 700640 - DNA, 120 bp, Artificial Sequence
  ENSG00000196155_14 (sequence is synthesized)
ggagagcgcttccggcgtcctcgccaggcccggggagtgggcacggtggagctgccgaccgttggtcgctgccccaacccacgcactgcgacgccgcgggtgaggcgcgcggtctgcggg

SEQ ID NO: 700641 - DNA, 120 bp, Artificial Sequence
  ENSG00000196155_15 (sequence is synthesized)
ctggcgggctgtccgggcccacggagaggacggcggcgggcgggggttgctgcagggcccgcaccttgtcttccgcgccggcagggctgtgccccgtcgagacctgctcgggctgtggct

SEQ ID NO: 700642 - DNA, 120 bp, Artificial Sequence
  ENSG00000196155_16 (sequence is synthesized)
ggcgctgcgcggcgccccggcggcactgccctcccttcccagcggccaggaggcggtgtcccgtgacgccgcgcggccgcgctgtagtggccgtcgaggccgccgtctgttcgaaggctg

SEQ ID NO: 700643 - DNA, 120 bp, Artificial Sequence
  ENSG00000196155_17 (sequence is synthesized)
gctgtagtggccgtcgaggccgccgtctgttcgaaggctgtccgacttcacggttccccgcggctcggcccgggggcgtgagtgtcgccagcgggcgacgggggggcgcgcggtaggccc

SEQ ID NO: 700644 - DNA, 120 bp, Artificial Sequence
  ENSG00000196155_18 (sequence is synthesized)
tgcaacaaggccagggcctgggggggccggcaggagagcgaacccgaggcatcgtggtgccatggcggggccgcccccacgggcatgggcctgcagagcgtggccgtgaggacgctgagg

SEQ ID NO: 700645 - DNA, 120 bp, Artificial Sequence
  ENSG00000196155_19 (sequence is synthesized)
gtgggcgcgcacggagcagaggcccacgggcgtccgacgggggacctggacagagggacacccttaacgttattccctcttcccaggcctgaattgcagttcctgtgccctggcactaag

SEQ ID NO: 700646 - DNA, 120 bp, Artificial Sequence
  ENSG00000196155_20 (sequence is synthesized)
actggcacctcctgcggcccatgcccttcgcctgcattgcccactgagtcccactcgactgtcttcagcgcggttcacactgagacccagccctctcccgctggccccgagcaggcccac

SEQ ID NO: 700647 - DNA, 120 bp, Artificial Sequence
  ENSG00000196155_21 (sequence is synthesized)
ctttaggagggcgtgatggaaaggcccctggagaatggggatgagtccccagactctcagggccatgccaccgactggagatttgctgtgtgcagtttcagggatgcctgggaagaggag

SEQ ID NO: 700648 - DNA, 120 bp, Artificial Sequence
  ENSG00000196155_22 (sequence is synthesized)
gaacctgcttcccagatgcacgttaaggacccaggtcctccaagaccaccagccggggccacccaggatgaggagctacagggcagccccttgtccaggaaattccagttacccccagct

SEQ ID NO: 700649 - DNA, 120 bp, Artificial Sequence
  ENSG00000196155_23 (sequence is synthesized)
gcagatgagtcgggggatgcccagaggggcacagtagaaagctcctcagtcctgtcagaagggccaggcccctctggagtggagagtctcctatgccccatgtcctcccacctcagcttg

SEQ ID NO: 700650 - DNA, 120 bp, Artificial Sequence
  ENSG00000196155_24 (sequence is synthesized)
gcacagggtgagagtgacaccccaggggtagggttggtaggggacccaggtccaagcagggcgatgccatctggcttgagccctggggcattggacagcgaccctgtgggccttggagac

SEQ ID NO: 700651 - DNA, 120 bp, Artificial Sequence
  ENSG00000196155_25 (sequence is synthesized)
cctttatcagaaatatcaaagctgctggaggcagcccccagtggatccggcctccctaagcctgctgactgcctcctggcccaagacctctgttgggagctgctggccagtggtatggcc

SEQ ID NO: 700652 - DNA, 120 bp, Artificial Sequence
  ENSG00000196155_26 (sequence is synthesized)
accttgccagggactcgggatgtccaaggccgggcagtgctgcttctgtgtgcccacagcccagcctggcttcagtctgagtgcagcagccaggaactcatccgcctcctgctgtacctg

SEQ ID NO: 700653 - DNA, 120 bp, Artificial Sequence
  ENSG00000196155_27 (sequence is synthesized)
cgaagcatccccaggcccgaagtacaggcactgggactgacagtgctagttgatgcccgaatttgtgctccaagttcttccctcttctctgggctcagccaactacaagaagcagcccca

SEQ ID NO: 700654 - DNA, 120 bp, Artificial Sequence
  ENSG00000196155_28 (sequence is synthesized)
gcagctggagcagttgccttctcagagcctgctgacccacatcccaacggcggggctgcccacttcgctaggaggaggcctgccttactgccaccaggcctggctggatttccgaaggcg

SEQ ID NO: 700655 - DNA, 120 bp, Artificial Sequence
  ENSG00000196155_29 (sequence is synthesized)
gctggaagctctactacagaactgccaggcagcttgtgccctgctccagggggccatcgaaagtgtgaaggctgtgccccagcccatggagcctggggaggtcggtcagctgctacagca
